United States Patent Application Publication US 2011/0183924 A1 - sequence listing, part 221

SEQ ID NO: 567314 - DNA, 943 bp, Homo sapiens
ggggcaccggggcggcgggttggtctacgctgtgcgcggcggacgtcaggaggcagctgtgggagctggagctggggccgcctgtgggcctctccatgtggcctgcagctgtgcagcagtatgggcccccacgccccgtgccggctggcacctgaacgaaactgcatggacacgtgtggtggcctggggtgtggaatcccttgtctcactctgtgccctgtgatctctggcatggccccattgatcctctctaactgttgtgacgtactatcccttaaccgctccatctgcccactcacttccaatcccttgtcccattgcgattggtctatccccagttatcaacgcctctttgcatctagacccaactgtcaccaccgctcattatcatcctccctactcccctttatttgggtgcccatttcctaaggtggtctcagatatttcccgcctccaataagccggacctctagccacgttgcaaccccctattctaacccctggaagcccctttccccaacgcgtcttcacactcccgagttccgggtacgggtccgcccgccctttgcactgggggttggcaccctcccccaattttctacttttgccccttggacaacacgcggatcaccatgcgctattccccggatgcacattgacaacaaaaccttttctactttggacctttttcatgctctcacagttgatcaaaccttattccccccccttgacccctccttttcccccccctcaaaccacaccaacaattcgctgtgccaattctaccctttattccccccttgacaaccccttacactctcaaccactccttttatcccacaacatccaccaaaccaatccagtcatatccgcgtcccagtccccaaaaacttacagcccgcaatcctactttcctttgacacgcattccaaaatccaggcat

SEQ ID NO: 567315 - DNA, 216 bp, Homo sapiens
tactcacaaaggtttagcagtgaatgtgtggtgagtagcccatgtgtgtggtaatatgtagaggagtataggctggatagtatgcgagtctgtagtggagatgatttgatcggagacgtgtactagcacagagagtctccagtaggttatagtgggggtaggcgaggtagcgaggctgctagaagtcatcaaaaagctgtttggggaggtagcact

SEQ ID NO: 567316 - DNA, 11510 bp, Homo sapiens
  misc_feature (603)..(603): n is a, c, g, or t
  misc_feature (618)..(618): n is a, c, g, or t
  misc_feature (676)..(676): n is a, c, g, or t
  misc_feature (685)..(685): n is a, c, g, or t
  misc_feature (1078)..(1078): n is a, c, g, or t
  misc_feature (1116)..(1116): n is a, c, g, or t
  misc_feature (11510)..(11510): n is a, c, g, or t
ttttttttttatagtgcatgcaggaaattgcaattttatttatgtttgtattgatacatatttgtacatatttatggggtgtggtagtttgatatatgcatacaatgtgtaatgatcaaatcagggtgtttaggatatctatcacctcaaacatttatcatttttgtgtttggaacatttctaatctcctagttattttgaaatatataacatattgttaactatagtcaccctactgtgctatcaaacacttgaacttattccttctatctacgtttgtacccattaaccaatctcttccctccctcccccaactccaccttcccagcctctggtacttatctctactccatgagatcaactttttaagctcccacatgagtgagaccatgggatatttgtctttctgtgccagacttatttcacttagaataatgacctccagttccgtaagatgggcagccaggaaaggccttacttagctgatgtttgaattgtgaagttatgtaatcattaagatgagtatacatacaatgggccagctgagtgcacagcaagattcaataaattcaaactaacattactcttattgccaagagagtncctgaaatgacagcncattggaaactggctactttccttccctttccttaggggtttaaggaaagcatgagtnatttcagtnttttgctggagctcctcactgacactcattgcagagcctgagccctcaactctcaatctttgcttaggtcctggcttaggctccactttgtaagaggcaccttcctagtattcactactctctctctcacaatcatgtccttacagacattgctgatcctctttcatactgacaccgggttctagtccgagttccatcactaagtcgctgtttgactttgggcaagttacttctgtggttaattatttttcatcaacaaaatcaaaaggtgaaactagacgaacaactaagaggctccagtattttttcaatctaagagtcccatatcccccactcccttctcacagctcattcaacaatcctaatggcagcgggtgcccgcagtctcaagtntctgccgaagcccaagccgctgtctcggtcagtcacanccgacgaagaggaggaattggaggaagccagcataaccacctcacactgagaacatctgacctttcccagaacgcccgcccactcgacacttcctgtccctccccagatcttgttccggggcacctactcgggtctaatcactcccctcattcactctttagggtccattgctgtttctttgaggaagcggagcatcttctgtcgttgattggtttccgtcattgttgataggttggtaacaaacaaggtgtgcctggtctcctggtaacgtcctgccgatagtcctgattggtcggtgtcttaatcccatcttccgtcccaactgctagtggctgagtccctggcggggcgcggcggtggaaggtgtcgcgtacgggcttcccgagctgacgtggcttgaattgggaggggggcagctggagcctcaggcggcagcgcttctagaaatgctgagccgattatcaggattagcaaatgttgttttgcatgaattatcaggagatgatgacactgatcagaatatgagggctcccctagaccctgaattacaccaagaatctgacatggaatttaataatactacacaagaagatgttcaggagcgcctggcttatgcagagcaattggtggtggagctaaaagatattattagacagaaggatgttcaactgcagcagaaagatgaagctctacaggaagagagaaaagctgctgataacaaaattaaaaaactaaaacttcatgcgaaggccaaattaacttctttgaataaatacatagaagaaatgaaagcacaaggagggactgttctgcctacagaacctcagtcagaggagcaactttccaagcatgacaagagttctacagaggaagagatggaaatagaaaagataaaacataagctccaggagaaggaggaactaatcagcactttgcaagcccagcttactcaggcacaggcagaacaacctgcacagagttctacagagatggaagaatttgtaatgatgaagcaacagctccaggagaaggaagaattcattagcactttacaagcccagctcagccagacacaggcagagcaagctgcacagcaggtggtccgagagaaagatgcccgctttgaaacacaagttcgtcttcatgaagatgagcttcttcagttagtaacccaggcagatgtggaaacagagatgcaacagaaattgagggtgctgcaaaggaagcttgaggaacacgaagaatccttggtgggccgtgctcaggtcgttgacttgctgcaacaggagctgactgctgctgagcagagaaaccagattctctctcagcagttacagcagatggaagctgagcataatactttgaggaacactgtggaaacagaaagagaggagtccaagattctactggaaaagatggaacttgaagtggcagagagaaaattatccttccataatctgcaggaagaaatgcatcatcttttagaacagtttgagcaagcaggccaagcccaggctgaactagagtctcggtatagtgctttggagcagaagcacaaagcagaaatggaagagaagacctctcatattttgagtcttcaaaagactggacaagagctgcagtctgcctgtgatgctctaaaggatcaaaattcaaagcttctccaagataagaatgaacaggcagttcagtcagcccagaccattcagcaactggaagatcagctccagcaaaaatccaaagaaattagccaatttctaaatagactgcccttgcaacaacatgaaacagcatctcagacttctttcccagatgtttataatgagggcacacaggcagtcactgaggagaatattgcttctttgcagaagagagtggtagaactagagaatgaaaagggagccttgctccttagttctatagagctggaggagctgaaagctgagaatgaaaaactgtcttctcagattactctcctagaggctcagaatagaactggggaggcagacagagaagtcagtgagatcagcattgttgatattgccaacaagaggagctcttctgctgaggaaagtggacaagatgttctagaaaacacattttctcagaaacataaagaattatcagttttattgttggaaatgaaagaagctcaagaggaaattgcatttcttaaattacagctccagggaaaaagggctgaggaagcagatcatgaggtccttgaccagaaagaaatgaaacagatggagggtgagggaatagctccaattaaaatgaaagtatttcttgaagatacagggcaagattttcccttaatgccaaatgaagagagcagtcttccagcagttgaaaaagaacaggcgagcactgaacatcaaagtagaacatctgaggaaatatctttaaatgatgctggagtagaattgaaatcaacaaagcaggatggtgataaatccctttctgctgtaccagatattggtcagtgtcatcaggatgagttggaaaggttaaaaagtcaaattttggagctcgagctaaactttcataaagcacaagaaatctatgagaaaaatttagatgagaaagctaaggaaattagcaacctaaaccagttgattgaggagtttaagaaaaatgctgacaacaacagcagtgcattcactgctttgtctgaagaaagagaccagcttctctctcaggtgaaggaacttagcatggtaacagaattgagggctcaggtaaagcaactggaaatgaaccttgcagaagcagaaaggcaaagaagacttgattatgaaagccaaactgcccatgacaacctgctcactgaacagatccatagtctcagcatagaagccaaatctaaagatgtgaaaattgaagttttacagaatgaactggatgatgtgcagcttcagttttctgagcagagtaccctgataagaagcctgcaaagccagctgcaaaataaggaaagtgaagtgcttgagggggcagaacgtgtaaggcatatctcaagtaaagtggaagaactgtcccaggctctttcacagaaggaacttgaaataacaaaaatggatcagctcttactagagaaaaagagagatgtggaaaccctccaacaaaccatcgaggagaaggatcaacaagtgacagaaatcagctttagtatgactgagaaaatggttcagcttaatgaagagaagttttctcttggggttgaaattaagactcttaaagaacagctaaatttattatccagagctgaggaagcaaaaaaagagcaggtggaagaagataatgaagtttcttctggccttaaacaaaattatgatgagatgagcccagcaggacaaataagtaaggaagaacttcagcatgaatttgaccttctgaagaaagaaaatgagcagagaaagagaaagctccaggcagctcttattaacagaaaggagcttctgcaaagagtcagtagattggaagaagaattagccaacttgaaagatgaatctaagaaagaaatcccactcagtgagactgagaggggagaagtggaagaagataaagaaaacaaagaatactcagaaaaatgtgtgacttctaagtgccaagaaatagaaatttatttaaaacagacaatatctgagaaagaagtggaactacagcatataaggaaggatttggaagaaaagctggcagctgaagagcaattccaggctctggtcaaacagatgaatcagaccttgcaagataaaacaaaccaaatagatttgctccaagcagaaatcagtgaaaaccaagcaattatccagaagttaatcacaagtaacacggatgcaagtgatggggactccgtagcacttgtaaaggaaacagtggtgataagtccaccttgtacaggtagtagtgaacactggaaaccagaactagaagaaaagatactggcccttgaaaaagaaaaggagcaacttcaaaagaagctacaggaagccttaacctcccgcaaggcaattcttaaaaaggcacaggagaaagaaagacatctcagggaggagctaaagcaacagaaagatgactataatcgcttgcaagaacagtttgatgagcaaagcaaggaaaatgagaatattggagaccagctaaggcaactccagattcaagtaagggaatccatagacggaaaactcccaagcacagaccagcaggaatcgtgttcttccactccaggtttagaagaacctttattcaaagccacagaacagcatcacactcaacctgttttagagtccaacttgtgcccagactggccttctcattctgaagatgcgagtgctctgcagggcggaacttctgttgcccagattaaggcccagctgaaggaaatagaggctgagaaagtagagttagaattgaaagttagttctacaacaagtgagcttactaaaaaatcagaagaggtatttcagttacaagagcagataaataaacagggtttagaaatcgagagtctaaagacagtatcccatgaagctgaagtccatgccgaaagcctgcagcagaaattggaaagcagccaactacaaattgctggcctagaacatctaagagaattgcaacctaaactggatgaactgcaaaaactcataagcaaaaaggaagaagacgttagctacctttctggacaacttagtgagaaagaagcagctctcactaaaatacagacagagataatagaacaagaagatttaattaaggctctgcatacacagctagaaatgcaagccaaagagcatgatgagaggataaagcagctacaggtggaactttgtgaaatgaagcaaaaaccagaagagattggagaagaaagtagagcaaagcaacaaatacaaaggaaactgcaagctgcccttatttcccgaaaagaagcactaaaagaaaacaaaagtctccaagaggaattgtctttggccagaggtaccattgaacgtctcaccaagtctctggcagatgtggaaagccaagtttctgctcaaaataaagaaaaagatacggtcttaggaaggttagctcttcttcaagaagaaagagacaaactcattacagaaatggacaggtctttattggaaaatcagagtctcagcagctcctgtgaaagtctaaaactagctctagagggtcttactgaagacaaggaaaagttagtgaaggaaattgaatctttgaaatcttctaagattgcagaaagtactgagtggcaagagaaacacaaggagctacaaaaagagtatgaaattcttctgcagtcctatgagaatgttagtaatgaagcagaaaggattcagcatgtggtggaagctgtgaggcaagagaaacaagaactgtatggcaagttaagaagcacagaggcaaacaagaaggagacagaaaagcagttgcaggaagctgagcaagaaatggaggaaatgaaagaaaagatgagaaagtttgctaaatctaaacagcagaaaatcctagagctggaagaagagaatgaccggcttagggcagaggtgcaccctgcaggagatacagctaaagagtgtatggaaacacttctttcttccaatgccagcatgaaggaagaacttgaaagggtcaaaatggagtatgaaaccctttctaagaagtttcagtctttaatgtctgagaaagactctctaagtgaagaggttcaagatttaaagcatcagatagaagataatgtatctaaacaagctaacctagaggccaccgagaaacatgataaccaaacgaatgtcactgaagagggaacacagtctataccaggtgagactgaagagcaagactctctgagtatgagcacaagacctacatgttcagaatcggttccatcagcgaagagtgccaaccctgctgtaagtaaggatttcagctcacatgatgaaattaataactacctacagcagattgatcagctcaaagaaagaattgctggattagaggaggagaagcagaaaaacaaggaatttagccagactttagaaaatgagaaaaataccttactgagtcagatatcaacaaaggatggtgaactaaaaatgcttcaggaggaagtaaccaaaatgaacctgttaaatcagcaaatccaagaagaactctccagagttaccaaactaaaggagacagcagaagaagagaaagatgatttggaagagaggcttatgaatcaattagcagaacttaatggaagcattgggaattactgtcaggatgttacagatgcccaaataaaaaatgagctattggaatctgaaatgaagaaccttaaaaagtgtgtgagtgaattggaagaagaaaagcagcagttagtcaaggaaaaaactaaggtggaatcagaaatacgaaaggaatatttggagaaaatacaaggtgctcagaaagaacccggaaataaaagccatgcaaaggaacttcaggaactgttaaaagaaaaacaacaagaagtaaagcagctacagaaggactgcatcaggtatcaagagaaaattagtgctctggagagaactgttaaagctctagaatttgttcaaactgaatctcaaaaagatttggaaataaccaaagaaaatctggctcaagcagttgaacaccgcaaaaaggcacaagcagaattagctagcttcaaagtcctgctagatgacactcaaagtgaagcagcaagggtcctagcagacaatctcaagttgaaaaaggaacttcagtcaaataaagaatcagttaaaagccagatgaaacaaaaggatgaagatcttgagcgaagactggaacaggcagaagagaagcacctgaaagagaagaagaatatgcaagagaaactggatgctttgcgcagagaaaaagtccacttggaagagacaattggagagattcaggttactttgaacaagaaagacaaggaagttcagcaacttcaggaaaacttggacagtactgtgacccagcttgcagcctttactaagagcatgtcttccctccaggatgatcgtgacagggtgatagatgaagctaagaaatgggagaggaagtttagtgatgcgattcaaagcaaagaagaagaaattagactcaaagaagataattgcagtgttctaaaggatcaacttagacagatgtccatccatatggaagaattaaagattaacatttccaggcttgaacatgacaagcagatttgggagtccaaggcccagacagaggtccagcttcagcagaaggtctgtgatactctacagggggaaaacaaagaacttttgtcccagctagaagagacacgccacctataccacagttctcagaatgaattagctaagttggaatcagaacttaagagtctcaaagaccagttgactgatttaagtaactctttagaaaaatgtaaggaacaaaaaggaaacttggaagggatcataaggcagcaagaggctgatattcaaaattctaagttcagttatgaacaactggagactgatcttcaggcctccagagaactgaccagtaggctgcatgaagaaataaatatgaaagagcaaaagattataagcctgctttctggcaaggaagaggcaatccaagtagctattgctgaactgcgtcagcaacatgataaagaaattaaagagctggaaaacctgctgtcccaggaggaagaggagaatattgttttagaagaggagaacaaaaaggctgttgataaaaccaatcagcttatggaaacactgaaaaccatcaaaaaggaaaacattcagcaaaaggcacagttggattcctttgttaaatccatgtcttctctccaaaatgatcgagaccgcatagtgggtgactatcaacagctggaagagcgacatctctctataatcttggaaaaagaccaactcatccaagaggctgctgcagagaataataagcttaaagaagaaatacgaggcttgagaagtcatatggatgatctcaattctgagaatgccaagctagatgcagaactgatccaatatagagaagacctgaaccaagtgataacaataaaggacagccaacaaaagcagcttcttgaagttcaacttcagcaaaataaggagctggaaaataaatatgctaaattagaagaaaagctgaaggaatctgaggaagcaaatgaggatctgcggaggtcctttaatgccctacaagaagagaaacaagatttatctaaagagattgagagtttgaaagtatctatatcccagctaacaagacaagtaacagccttgcaagaagaaggtactttaggactctatcatgcccagttaaaagtaaaagaagaagaggtacacaggttaagtgctttgttttcctcctctcaaaagagaattgcagaactggaagaagaattggtttgtgttcaaaaggaagctgccaagaaggtaggtgaaattgaagataaactgaagaaagaattaaagcatcttcatcatgatgcagggataatgagaaatgaaactgaaacagcagaagagagagtggcagagctagcaagagatttggtggagatggaacagaaattactcatggtcaccaaagaaaataaaggtctcacagcacaaattcagtcttttggaaggtctatgagttccttgcaaaatagtagagatcatgccaatgaggaacttgatgaactgaaaaggaaatatgatgccagtctgaaggaattggcacagttgaaagaacagggactcttaaacagagagagagatgctcttctttctgaaaccgccttttcaatgaactccactgaggagaatagcttgtctcaccttgagaaacttaaccaacagctcctatccaaagatgagcaattgcttcacttgtcctcacaactagaagattcttataaccaagtgcagtccttttccaaggctatggccagtctgcagaatgagagagatcacctgtggaatgagctggagaaatttcgaaagtcagaggaagggaagcagaggtctgcagctcagccttccaccagcccagctgaagtacagagtttaaaaaaagctatgtcttcactccaaaatgacagagacagactactgaaggaattgaagaatctgcagcagcaatacttacagattaatcaagagatcactgagttacatccactgaaggctcaacttcaggagtatcaagataagacaaaagcatttcagattatgcaagaagagctcaggcaggaaaacctctcctggcagcatgagctgcatcagctcaggatggagaagagttcctgggaaatacatgagaggagaatgaaggaacagtaccttatggctatctcagataaagatcagcagctcagtcatctgcagaatcttataagggaattgaggtcttcttcctcccagactcagcctctcaaagtgcaataccaaagacaggcatccccagagacatcagcttccccagatgggtcacaaaatctggtttatgagacagaacttctcaggacccagctcaatgacagcttaaaggaaattcaccaaaaggagttaagaattcagcaactgaacagcaacttctctcagctactggaagagaaaaacaccctttccattcagctctgcgataccagtcagagtcttcgtgagaaccagcagcactatggtgaccttttaaatcactgtgcagtcttggagaagcaggttcaagagctgcaggcggggccactaaatatagatgttgctccaggagctccccaggaaaagaatggagttcacagaaagagtgaccctgaggaactaagggaaccgcagcaaagcttttctgaagctcagcagcagctatgcaacaccagacaggaagtgaatgaattaaggaagctgctggaagaagaacgagaccaaagagtggctgctgagaatgctctctctgtggccgaggagcagatcagacggtaaaggctgaaggagatagcctctgttcccttccgatcctttctgatcaaactcatgtacatttcctgccagacttaggatttcttaagatctttttctcatcttgaggtagttgctgcaatgagtttaccaacattgtggtcacccaagagaacactgtacttttggagtataagagagtcagtgttttctaaaacagttgttcttagagaataataatgatatctaccattactgaaagatattttatttcaccctaaccataactatatgaggtaggtgttgggttctctagaggaccaaataagtgacaacctcattttctacctgagatctgaatccatggaaatcttttttaaaagaataaaagattgagagattaaaagactgctttataaatgatggtn

SEQ ID NO: 567317 - DNA, 10643 bp, Homo sapiens
  misc_feature (603)..(603): n is a, c, g, or t
  misc_feature (618)..(618): n is a, c, g, or t
  misc_feature (676)..(676): n is a, c, g, or t
  misc_feature (685)..(685): n is a, c, g, or t
  misc_feature (1078)..(1078): n is a, c, g, or t
  misc_feature (1116)..(1116): n is a, c, g, or t
ttttttttttatagtgcatgcaggaaattgcaattttatttatgtttgtattgatacatatttgtacatatttatggggtgtggtagtttgatatatgcatacaatgtgtaatgatcaaatcagggtgtttaggatatctatcacctcaaacatttatcatttttgtgtttggaacatttctaatctcctagttattttgaaatatataacatattgttaactatagtcaccctactgtgctatcaaacacttgaacttattccttctatctacgtttgtacccattaaccaatctcttccctccctcccccaactccaccttcccagcctctggtacttatctctactccatgagatcaactttttaagctcccacatgagtgagaccatgggatatttgtctttctgtgccagacttatttcacttagaataatgacctccagttccgtaagatgggcagccaggaaaggccttacttagctgatgtttgaattgtgaagttatgtaatcattaagatgagtatacatacaatgggccagctgagtgcacagcaagattcaataaattcaaactaacattactcttattgccaagagagtncctgaaatgacagcncattggaaactggctactttccttccctttccttaggggtttaaggaaagcatgagtnatttcagtnttttgctggagctcctcactgacactcattgcagagcctgagccctcaactctcaatctttgcttaggtcctggcttaggctccactttgtaagaggcaccttcctagtattcactactctctctctcacaatcatgtccttacagacattgctgatcctctttcatactgacaccgggttctagtccgagttccatcactaagtcgctgtttgactttgggcaagttacttctgtggttaattatttttcatcaacaaaatcaaaaggtgaaactagacgaacaactaagaggctccagtattttttcaatctaagagtcccatatcccccactcccttctcacagctcattcaacaatcctaatggcagcgggtgcccgcagtctcaagtntctgccgaagcccaagccgctgtctcggtcagtcacanccgacgaagaggaggaattggaggaagccagcataaccacctcacactgagaacatctgacctttcccagaacgcccgcccactcgacacttcctgtccctccccagatcttgttccggggcacctactcgggtctaatcactcccctcattcactctttagggtccattgctgtttctttgaggaagcggagcatcttctgtcgttgattggtttccgtcattgttgataggttggtaacaaacaaggtgtgcctggtctcctggtaacgtcctgccgatagtcctgattggtcggtgtcttaatcccatcttccgtcccaactgctagtggctgagtccctggcggggcgcggcggtggaaggtgtcgcgtacgggcttcccgagctgacgtggcttgaattgggaggggggcagctggagcctcaggcggcagcgcttctagaaatgctgagccgattatcaggattagcaaatgttgttttgcatgaattatcaggagatgatgacactgatcagaatatgagggctcccctagaccctgaattacaccaagaatctgacatggaatttaataatactacacaagaagatgttcaggagcgcctggcttatgcagagcaattggtggtggagctaaaagatattattagacagaaggatgttcaactgcagcagaaagatgaagctctacaggaagagagaaaagctgctgataacaaaattaaaaaactaaaacttcatgcgaaggccaaattaacttctttgaataaatacatagaagaaatgaaagcacaaggagggactgttctgcctacagaacctcagtcagaggagcaactttccaagcatgacaagagttctacagaggaagagatggaaatagaaaagataaaacataagctccaggagaaggaggaactaatcagcactttgcaagcccagcttactcaggcacaggcagaacaacctgcacagagttctacagagatggaagaatttgtaatgatgaagcaacagctccaggagaaggaagaattcattagcactttacaagcccagctcagccagacacaggcagagcaagctgcacagcaggtggtccgagagaaagatgcccgctttgaaacacaagttcgtcttcatgaagatgagcttcttcagttagtaacccaggcagatgtggaaacagagatgcaacagaaattgagggtgctgcaaaggaagcttgaggaacacgaagaatccttggtgggccgtgctcaggtcgttgacttgctgcaacaggagctgactgctgctgagcagagaaaccagattctctctcagcagttacagcagatggaagctgagcataatactttgaggaacactgtggaaacagaaagagaggagtccaagattctactggaaaagatggaacttgaagtggcagagagaaaattatccttccataatctgcaggaagaaatgcatcatcttttagaacagtttgagcaagcaggccaagcccaggctgaactagagtctcggtatagtgctttggagcagaagcacaaagcagaaatggaagagaagacctctcatattttgagtcttcaaaagactggacaagagctgcagtctgcctgtgatgctctaaaggatcaaaattcaaagcttctccaagataagaatgaacaggcagttcagtcagcccagaccattcagcaactggaagatcagctccagcaaaaatccaaagaaattagccaatttctaaatagactgcccttgcaacaacatgaaacagcatctcagacttctttcccagatgtttataatgagggcacacaggcagtcactgaggagaatattgcttctttgcagaagagagtggtagaactagagaatgaaaagggagccttgctccttagttctatagagctggaggagctgaaagctgagaatgaaaaactgtcttctcagattactctcctagaggctcagaatagaactggggaggcagacagagaagtcagtgagatcagcattgttgatattgccaacaagaggagctcttctgctgaggaaagtggacaagatgttctagaaaacacattttctcagaaacataaagaattatcagttttattgttggaaatgaaagaagctcaagaggaaattgcatttcttaaattacagctccagggaaaaagggctgaggaagcagatcatgaggtccttgaccagaaagaaatgaaacagatggagggtgagggaatagctccaattaaaatgaaagtatttcttgaagatacagggcaagattttcccttaatgccaaatgaagagagcagtcttccagcagttgaaaaagaacaggcgagcactgaacatcaaagtagaacatctgaggaaatatctttaaatgatgctggagtagaattgaaatcaacaaagcaggatggtgataaatccctttctgctgtaccagatattggtcagtgtcatcaggatgagttggaaaggttaaaaagtcaaattttggagctcgagctaaactttcataaagcacaagaaatctatgagaaaaatttagatgagaaagctaaggaaattagcaacctaaaccagttgattgaggagtttaagaaaaatgctgacaacaacagcagtgcattcactgctttgtctgaagaaagagaccagcttctctctcaggtgaaggaacttagcatggtaacagaattgagggctcaggtaaagcaactggaaatgaaccttgcagaagcagaaaggcaaagaagacttgattatgaaagccaaactgcccatgacaacctgctcactgaacagatccatagtctcagcatagaagccaaatctaaagatgtgaaaattgaagttttacagaatgaactggatgatgtgcagcttcagttttctgagcagagtaccctgataagaagcctgcaaagccagctgcaaaataaggaaagtgaagtgcttgagggggcagaacgtgtaaggcatatctcaagtaaagtggaagaactgtcccaggctctttcacagaaggaacttgaaataacaaaaatggatcagctcttactagagaaaaagagagatgtggaaaccctccaacaaaccatcgaggagaaggatcaacaagtgacagaaatcagctttagtatgactgagaaaatggttcagcttaatgaagagaagttttctcttggggttgaaattaagactcttaaagaacagctaaatttattatccagagctgaggaagcaaaaaaagagcaggtggaagaagataatgaagtttcttctggccttaaacaaaattatgatgagatgagcccagcaggacaaataagtaaggaagaacttcagcatgaatttgaccttctgaagaaagaaaatgagcagagaaagagaaagctccaggcagctcttattaacagaaaggagcttctgcaaagagtcagtagattggaagaagaattagccaacttgaaagatgaatctaagaaagaaatcccactcagtgagactgagaggggagaagtggaagaagataaagaaaacaaagaatactcagaaaaatgtgtgacttctaagtgccaagaaatagaaatttatttaaaacagacaatatctgagaaagaagtggaactacagcatataaggaaggatttggaagaaaagctggcagctgaagagcaattccaggctctggtcaaacagatgaatcagaccttgcaagataaaacaaaccaaatagatttgctccaagcagaaatcagtgaaaaccaagcaattatccagaagttaatcacaagtaacacggatgcaagtgatggggactccgtagcacttgtaaaggaaacagtggtgataagtccaccttgtacaggtagtagtgaacactggaaaccagaactagaagaaaagatactggcccttgaaaaagaaaaggagcaacttcaaaagaagctacaggaagccttaacctcccgcaaggcaattcttaaaaaggcacaggagaaagaaagacatctcagggaggagctaaagcaacagaaagatgactataatcgcttgcaagaacagtttgatgagcaaagcaaggaaaatgagaatattggagaccagctaaggcaactccagattcaagtaagggaatccatagacggaaaactcccaagcacagaccagcaggaatcgtgttcttccactccaggtttagaagaacctttattcaaagccacagaacagcatcacactcaacctgttttagagtccaacttgtgcccagactggccttctcattctgaagatgcgagtgctctgcagggcggaacttctgttgcccagattaaggcccagctgaaggaaatagaggctgagaaagtagagttagaattgaaagttagttctacaacaagtgagcttactaaaaaatcagaagaggtatttcagttacaagagcagataaataaacagggtttagaaatcgagagtctaaagacagtatcccatgaagctgaagtccatgccgaaagcctgcagcagaaattggaaagcagccaactacaaattgctggcctagaacatctaagagaattgcaacctaaactggatgaactgcaaaaactcataagcaaaaaggaagaagacgttagctacctttctggacaacttagtgagaaagaagcagctctcactaaaatacagacagagataatagaacaagaagatttaattaaggctctgcatacacagctagaaatgcaagccaaagagcatgatgagaggataaagcagctacaggtggaactttgtgaaatgaagcaaaaaccagaagagattggagaagaaagtagagcaaagcaacaaatacaaaggaaactgcaagctgcccttatttcccgaaaagaagcactaaaagaaaacaaaagtctccaagaggaattgtctttggccagaggtaccattgaacgtctcaccaagtctctggcagatgtggaaagccaagtttctgctcaaaataaagaaaaagatacggtcttaggaaggttagctcttcttcaagaagaaagagacaaactcattacagaaatggacaggtctttattggaaaatcagagtctcagcagctcctgtgaaagtctaaaactagctctagagggtcttactgaagacaaggaaaagttagtgaaggaaattgaatctttgaaatcttctaagattgcagaaagtactgagtggcaagagaaacacaaggagctacaaaaagagtatgaaattcttctgcagtcctatgagaatgttagtaatgaagcagaaaggattcagcatgtggtggaagctgtgaggcaagagaaacaagaactgtatggcaagttaagaagcacagaggcaaacaagaaggagacagaaaagcagttgcaggaagctgagcaagaaatggaggaaatgaaagaaaagatgagaaagtttgctaaatctaaacagcagaaaatcctagagctggaagaagagaatgaccggcttagggcagaggtgcaccctgcaggagatacagctaaagagtgtatggaaacacttctttcttccaatgccagcatgaaggaagaacttgaaagggtcaaaatggagtatgaaaccctttctaagaagtttcagtctttaatgtctgagaaagactctctaagtgaagaggttcaagatttaaagcatcagatagaagataatgtatctaaacaagctaacctagaggccaccgagaaacatgataaccaaacgaatgtcactgaagagggaacacagtctataccaggtgagactgaagagcaagactctctgagtatgagcacaagacctacatgttcagaatcggttccatcagcgaagagtgccaaccctgctgtaagtaaggatttcagctcacatgatgaaattaataactacctacagcagattgatcagctcaaagaaagaattgctggattagaggaggagaagcagaaaaacaaggaatttagccagactttagaaaatgagaaaaataccttactgagtcagatatcaacaaaggatggtgaactaaaaatgcttcaggaggaagtaaccaaaatgaacctgttaaatcagcaaatccaagaagaactctccagagttaccaaactaaaggagacagcagaagaagagaaagatgatttggaagagaggcttatgaatcaattagcagaacttaatggaagcattgggaattactgtcaggatgttacagatgcccaaataaaaaatgagctattggaatctgaaatgaagaaccttaaaaagtgtgtgagtgaattggaagaagaaaagcagcagttagtcaaggaaaaaactaaggtggaatcagaaatacgaaaggaatatttggagaaaatacaaggtgctcagaaagaacccggaaataaaagccatgcaaaggaacttcaggaactgttaaaagaaaaacaacaagaagtaaagcagctacagaaggactgcatcaggtatcaagagaaaattagtgctctggagagaactgttaaagctctagaatttgttcaaactgaatctcaaaaagatttggaaataaccaaagaaaatctggctcaagcagttgaacaccgcaaaaaggcacaagcagaattagctagcttcaaagtcctgctagatgacactcaaagtgaagcagcaagggtcctagcagacaatctcaagttgaaaaaggaacttcagtcaaataaagaatcagttaaaagccagatgaaacaaaaggatgaagatcttgagcgaagactggaacaggcagaagagaagcacctgaaagagaagaagaatatgcaagagaaactggatgctttgcgcagagaaaaagtccacttggaagagacaattggagagattcaggttactttgaacaagaaagacaaggaagttcagcaacttcaggaaaacttggacagtactgtgacccagcttgcagcctttactaagagcatgtcttccctccaggatgatcgtgacagggtgatagatgaagctaagaaatgggagaggaagtttagtgatgcgattcaaagcaaagaagaagaaattagactcaaagaagataattgcagtgttctaaaggatcaacttagacagatgtccatccatatggaagaattaaagattaacatttccaggcttgaacatgacaagcagatttgggagtccaaggcccagacagaggtccagcttcagcagaaggtctgtgatactctacagggggaaaacaaagaacttttgtcccagctagaagagacacgccacctataccacagttctcagaatgaattagctaagttggaatcagaacttaagagtctcaaagaccagttgactgatttaagtaactctttagaaaaatgtaaggaacaaaaaggaaacttggaagggatcataaggcagcaagaggctgatattcaaaattctaagttcagttatgaacaactggagactgatcttcaggcctccagagaactgaccagtaggctgcatgaagaaataaatatgaaagagcaaaagattataagcctgctttctggcaaggaagaggcaatccaagtagctattgctgaactgcgtcagcaacatgataaagaaattaaagagctggaaaacctgctgtcccaggaggaagaggagaatattgttttagaagaggagaacaaaaaggctgttgataaaaccaatcagcttatggaaacactgaaaaccatcaaaaaggaaaacattcagcaaaaggcacagttggattcctttgttaaatccatgtcttctctccaaaatgatcgagaccgcatagtgggtgactatcaacagctggaagagcgacatctctctataatcttggaaaaagaccaactcatccaagaggctgctgcagagaataataagcttaaagaagaaatacgaggcttgagaagtcatatggatgatctcaattctgagaatgccaagctagatgcagaactgatccaatatagagaagacctgaaccaagtgataacaataaaggacagccaacaaaagcagcttcttgaagttcaacttcagcaaaataaggagctggaaaataaatatgctaaattagaagaaaagctgaaggaatctgaggaagcaaatgaggatctgcggaggtcctttaatgccctacaagaagagaaacaagatttatctaaagagattgagagtttgaaagtatctatatcccagctaacaagacaagtaacagccttgcaagaagaaggtactttaggactctatcatgcccagttaaaagtaaaagaagaagaggtacacaggttaagtgctttgttttcctcctctcaaaagagaattgcagaactggaagaagaattggtttgtgttcaaaaggaagctgccaagaaggtaggtgaaattgaagataaactgaagaaagaattaaagcatcttcatcatgatgcagggataatgagaaatgaaactgaaacagcagaagagagagtggcagagctagcaagagatttggtggagatggaacagaaattactcatggtcaccaaagaaaataaaggtctcacagcacaaattcagtcttttggaaggtctatgagttccttgcaaaatagtagagatcatgccaatgaggaacttgatgaactgaaaaggaaatatgatgccagtctgaaggaattggcacagttgaaagaacagggactcttaaacagagagagagatgctcttctttctgaaaccgccttttcaatgaactccactgaggagaatagcttgtctcaccttgagaaacttaaccaacagctcctatccaaagatgagcaattgcttcacttgtcctcacaactagaagattcttataaccaagtgcagtccttttccaaggctatggccagtctgcagaatgagagagatcacctgtggaatgagctggagaaatttcgaaagtcagaggaagggaagcagaggtctgcagctcagccttccaccagcccagctgaagtacagagtttaaaaaaagctatgtcttcactccaaaatgacagagacagactactgaaggaattgaagaatctgcagcagcaatacttacagattaatcaagagatcactgagttacatccactgaaggctcaacttcaggagtatcaattccagtggaacagtcttcccatttacaggtcttctctccaactcttcacggaaagtgcctgcaaaaacagaggtggatacgaggacaggttggagctgcagggactggcgagtctgctttcttctactgccctgagcctgaacgcttctgcttaatctgagaatcacatttggtttgttgagcctaatatttgttgagattttgcaggaccctgatcttttgtggtcctgtaaaagatactgaggaatgtctttcagccaagccaagaggatggtttcaataaacctaataatctgaagttcag

SEQ ID NO: 567318 - DNA, 10467 bp, Homo sapiens
  misc_feature (603)..(603): n is a, c, g, or t
  misc_feature (618)..(618): n is a, c, g, or t
  misc_feature (676)..(676): n is a, c, g, or t
  misc_feature (685)..(685): n is a, c, g, or t
  misc_feature (1078)..(1078): n is a, c, g, or t
  misc_feature (1116)..(1116): n is a, c, g, or t
ttttttttttatagtgcatgcaggaaattgcaattttatttatgtttgtattgatacatatttgtacatatttatggggtgtggtagtttgatatatgcatacaatgtgtaatgatcaaatcagggtgtttaggatatctatcacctcaaacatttatcatttttgtgtttggaacatttctaatctcctagttattttgaaatatataacatattgttaactatagtcaccctactgtgctatcaaacacttgaacttattccttctatctacgtttgtacccattaaccaatctcttccctccctcccccaactccaccttcccagcctctggtacttatctctactccatgagatcaactttttaagctcccacatgagtgagaccatgggatatttgtctttctgtgccagacttatttcacttagaataatgacctccagttccgtaagatgggcagccaggaaaggccttacttagctgatgtttgaattgtgaagttatgtaatcattaagatgagtatacatacaatgggccagctgagtgcacagcaagattcaataaattcaaactaacattactcttattgccaagagagtncctgaaatgacagcncattggaaactggctactttccttccctttccttaggggtttaaggaaagcatgagtnatttcagtnttttgctggagctcctcactgacactcattgcagagcctgagccctcaactctcaatctttgcttaggtcctggcttaggctccactttgtaagaggcaccttcctagtattcactactctctctctcacaatcatgtccttacagacattgctgatcctctttcatactgacaccgggttctagtccgagttccatcactaagtcgctgtttgactttgggcaagttacttctgtggttaattatttttcatcaacaaaatcaaaaggtgaaactagacgaacaactaagaggctccagtattttttcaatctaagagtcccatatcccccactcccttctcacagctcattcaacaatcctaatggcagcgggtgcccgcagtctcaagtntctgccgaagcccaagccgctgtctcggtcagtcacanccgacgaagaggaggaattggaggaagccagcataaccacctcacactgagaacatctgacctttcccagaacgcccgcccactcgacacttcctgtccctccccagatcttgttccggggcacctactcgggtctaatcactcccctcattcactctttagggtccattgctgtttctttgaggaagcggagcatcttctgtcgttgattggtttccgtcattgttgataggttggtaacaaacaaggtgtgcctggtctcctggtaacgtcctgccgatagtcctgattggtcggtgtcttaatcccatcttccgtcccaactgctagtggctgagtccctggcggggcgcggcggtggaaggtgtcgcgtacgggcttcccgagctgacgtggcttgaattgggaggggggcagctggagcctcaggcggcagcgcttctagaaatgctgagccgattatcaggattagcaaatgttgttttgcatgaattatcaggagatgatgacactgatcagaatatgagggctcccctagaccctgaattacaccaagaatctgacatggaatttaataatactacacaagaagatgttcaggagcgcctggcttatgcagagcaattggtggtggagctaaaagatattattagacagaaggatgttcaactgcagcagaaagatgaagctctacaggaagagagaaaagctgctgataacaaaattaaaaaactaaaacttcatgcgaaggccaaattaacttctttgaataaatacatagaagaaatgaaagcacaaggagggactgttctgcctacagaacctcagtcagaggagcaactttccaagcatgacaagagttctacagaggaagagatggaaatagaaaagataaaacataagctccaggagaaggaggaactaatcagcactttgcaagcccagcttactcaggcacaggcagaacaacctgcacagagttctacagagatggaagaatttgtaatgatgaagcaacagctccaggagaaggaagaattcattagcactttacaagcccagctcagccagacacaggcagagcaagctgcacagcaggtggtccgagagaaagatgcccgctttgaaacacaagttcgtcttcatgaagatgagcttcttcagttagtaacccaggcagatgtggaaacagagatgcaacagaaattgagggtgctgcaaaggaagcttgaggaacacgaagaatccttggtgggccgtgctcaggtcgttgacttgctgcaacaggagctgactgctgctgagcagagaaaccagattctctctcagcagttacagcagatggaagctgagcataatactttgaggaacactgtggaaacagaaagagaggagtccaagattctactggaaaagatggaacttgaagtggcagagagaaaattatccttccataatctgcaggaagaaatgcatcatcttttagaacagtttgagcaagcaggccaagcccaggctgaactagagtctcggtatagtgctttggagcagaagcacaaagcagaaatggaagagaagacctctcatattttgagtcttcaaaagactggacaagagctgcagtctgcctgtgatgctctaaaggatcaaaattcaaagcttctccaagataagaatgaacaggcagttcagtcagcccagaccattcagcaactggaagatcagctccagcaaaaatccaaagaaattagccaatttctaaatagactgcccttgcaacaacatgaaacagcatctcagacttctttcccagatgtttataatgagggcacacaggcagtcactgaggagaatattgcttctttgcagaagagagtggtagaactagagaatgaaaagggagccttgctccttagttctatagagctggaggagctgaaagctgagaatgaaaaactgtcttctcagattactctcctagaggctcagaatagaactggggaggcagacagagaagtcagtgagatcagcattgttgatattgccaacaagaggagctcttctgctgaggaaagtggacaagatgttctagaaaacacattttctcagaaacataaagaattatcagttttattgttggaaatgaaagaagctcaagaggaaattgcatttcttaaattacagctccagggaaaaagggctgaggaagcagatcatgaggtccttgaccagaaagaaatgaaacagatggagggtgagggaatagctccaattaaaatgaaagtatttcttgaagatacagggcaagattttcccttaatgccaaatgaagagagcagtcttccagcagttgaaaaagaacaggcgagcactgaacatcaaagtagaacatctgaggaaatatctttaaatgatgctggagtagaattgaaatcaacaaagcaggatggtgataaatccctttctgctgtaccagatattggtcagtgtcatcaggatgagttggaaaggttaaaaagtcaaattttggagctcgagctaaactttcataaagcacaagaaatctatgagaaaaatttagatgagaaagctaaggaaattagcaacctaaaccagttgattgaggagtttaagaaaaatgctgacaacaacagcagtgcattcactgctttgtctgaagaaagagaccagcttctctctcaggtgaaggaacttagcatggtaacagaattgagggctcaggtaaagcaactggaaatgaaccttgcagaagcagaaaggcaaagaagacttgattatgaaagccaaactgcccatgacaacctgctcactgaacagatccatagtctcagcatagaagccaaatctaaagatgtgaaaattgaagttttacagaatgaactggatgatgtgcagcttcagttttctgagcagagtaccctgataagaagcctgcaaagccagctgcaaaataaggaaagtgaagtgcttgagggggcagaacgtgtaaggcatatctcaagtaaagtggaagaactgtcccaggctctttcacagaaggaacttgaaataacaaaaatggatcagctcttactagagaaaaagagagatgtggaaaccctccaacaaaccatcgaggagaaggatcaacaagtgacagaaatcagctttagtatgactgagaaaatggttcagcttaatgaagagaagttttctcttggggttgaaattaagactcttaaagaacagctaaatttattatccagagctgaggaagcaaaaaaagagcaggtggaagaagataatgaagtttcttctggccttaaacaaaattatgatgagatgagcccagcaggacaaataagtaaggaagaacttcagcatgaatttgaccttctgaagaaagaaaatgagcagagaaagagaaagctccaggcagctcttattaacagaaaggagcttctgcaaagagtcagtagattggaagaagaattagccaacttgaaagatgaatctaagaaagaaatcccactcagtgagactgagaggggagaagtggaagaagataaagaaaacaaagaatactcagaaaaatgtgtgacttctaagtgccaagaaatagaaatttatttaaaacagacaatatctgagaaagaagtggaactacagcatataaggaaggatttggaagaaaagctggcagctgaagagcaattccaggctctggtcaaacagatgaatcagaccttgcaagataaaacaaaccaaatagatttgctccaagcagaaatcagtgaaaaccaagcaattatccagaagttaatcacaagtaacacggatgcaagtgatggggactccgtagcacttgtaaaggaaacagtggtgataagtccaccttgtacaggtagtagtgaacactggaaaccagaactagaagaaaagatactggcccttgaaaaagaaaaggagcaacttcaaaagaagctacaggaagccttaacctcccgcaaggcaattcttaaaaaggcacaggagaaagaaagacatctcagggaggagctaaagcaacagaaagatgactataatcgcttgcaagaacagtttgatgagcaaagcaaggaaaatgagaatattggagaccagctaaggcaactccagattcaagtaagggaatccatagacggaaaactcccaagcacagaccagcaggaatcgtgttcttccactccaggtttagaagaacctttattcaaagccacagaacagcatcacactcaacctgttttagagtccaacttgtgcccagactggccttctcattctgaagatgcgagtgctctgcagggcggaacttctgttgcccagattaaggcccagctgaaggaaatagaggctgagaaagtagagttagaattgaaagttagttctacaacaagtgagcttactaaaaaatcagaagaggtatttcagttacaagagcagataaataaacagggtttagaaatcgagagtctaaagacagtatcccatgaagctgaagtccatgccgaaagcctgcagcagaaattggaaagcagccaactacaaattgctggcctagaacatctaagagaattgcaacctaaactggatgaactgcaaaaactcataagcaaaaaggaagaagacgttagctacctttctggacaacttagtgagaaagaagcagctctcactaaaatacagacagagataatagaacaagaagatttaattaaggctctgcatacacagctagaaatgcaagccaaagagcatgatgagaggataaagcagctacaggtggaactttgtgaaatgaagcaaaaaccagaagagattggagaagaaagtagagcaaagcaacaaatacaaaggaaactgcaagctgcccttatttcccgaaaagaagcactaaaagaaaacaaaagtctccaagaggaattgtctttggccagaggtaccattgaacgtctcaccaagtctctggcagatgtggaaagccaagtttctgctcaaaataaagaaaaagatacggtcttaggaaggttagctcttcttcaagaagaaagagacaaactcattacagaaatggacaggtctttattggaaaatcagagtctcagcagctcctgtgaaagtctaaaactagctctagagggtcttactgaagacaaggaaaagttagtgaaggaaattgaatctttgaaatcttctaagattgcagaaagtactgagtggcaagagaaacacaaggagctacaaaaagagtatgaaattcttctgcagtcctatgagaatgttagtaatgaagcagaaaggattcagcatgtggtggaagctgtgaggcaagagaaacaagaactgtatggcaagttaagaagcacagaggcaaacaagaaggagacagaaaagcagttgcaggaagctgagcaagaaatggaggaaatgaaagaaaagatgagaaagtttgctaaatctaaacagcagaaaatcctagagctggaagaagagaatgaccggcttagggcagaggtgcaccctgcaggagatacagctaaagagtgtatggaaacacttctttcttccaatgccagcatgaaggaagaacttgaaagggtcaaaatggagtatgaaaccctttctaagaagtttcagtctttaatgtctgagaaagactctctaagtgaagaggttcaagatttaaagcatcagatagaagataatgtatctaaacaagctaacctagaggccaccgagaaacatgataaccaaacgaatgtcactgaagagggaacacagtctataccaggtgagactgaagagcaagactctctgagtatgagcacaagacctacatgttcagaatcggttccatcagcgaagagtgccaaccctgctgtaagtaaggatttcagctcacatgatgaaattaataactacctacagcagattgatcagctcaaagaaagaattgctggattagaggaggagaagcagaaaaacaaggaatttagccagactttagaaaatgagaaaaataccttactgagtcagatatcaacaaaggatggtgaactaaaaatgcttcaggaggaagtaaccaaaatgaacctgttaaatcagcaaatccaagaagaactctccagagttaccaaactaaaggagacagcagaagaagagaaagatgatttggaagagaggcttatgaatcaattagcagaacttaatggaagcattgggaattactgtcaggatgttacagatgcccaaataaaaaatgagctattggaatctgaaatgaagaaccttaaaaagtgtgtgagtgaattggaagaagaaaagcagcagttagtcaaggaaaaaactaaggtggaatcagaaatacgaaaggaatatttggagaaaatacaaggtgctcagaaagaacccggaaataaaagccatgcaaaggaacttcaggaactgttaaaagaaaaacaacaagaagtaaagcagctacagaaggactgcatcaggtatcaagagaaaattagtgctctggagagaactgttaaagctctagaatttgttcaaactgaatctcaaaaagatttggaaataaccaaagaaaatctggctcaagcagttgaacaccgcaaaaaggcacaagcagaattagctagcttcaaagtcctgctagatgacactcaaagtgaagcagcaagggtcctagcagacaatctcaagttgaaaaaggaacttcagtcaaataaagaatcagttaaaagccagatgaaacaaaaggatgaagatcttgagcgaagactggaacaggcagaagagaagcacctgaaagagaagaagaatatgcaagagaaactggatgctttgcgcagagaaaaagtccacttggaagagacaattggagagattcaggttactttgaacaagaaagacaaggaagttcagcaacttcaggaaaacttggacagtactgtgacccagcttgcagcctttactaagagcatgtcttccctccaggatgatcgtgacagggtgatagatgaagctaagaaatgggagaggaagtttagtgatgcgattcaaagcaaagaagaagaaattagactcaaagaagataattgcagtgttctaaaggatcaacttagacagatgtccatccatatggaagaattaaagattaacatttccaggcttgaacatgacaagcagatttgggagtccaaggcccagacagaggtccagcttcagcagaaggtctgtgatactctacagggggaaaacaaagaacttttgtcccagctagaagagacacgccacctataccacagttctcagaatgaattagctaagttggaatcagaacttaagagtctcaaagaccagttgactgatttaagtaactctttagaaaaatgtaaggaacaaaaaggaaacttggaagggatcataaggcagcaagaggctgatattcaaaattctaagttcagttatgaacaactggagactgatcttcaggcctccagagaactgaccagtaggctgcatgaagaaataaatatgaaagagcaaaagattataagcctgctttctggcaaggaagaggcaatccaagtagctattgctgaactgcgtcagcaacatgataaagaaattaaagagctggaaaacctgctgtcccaggaggaagaggagaatattgttttagaagaggagaacaaaaaggctgttgataaaaccaatcagcttatggaaacactgaaaaccatcaaaaaggaaaacattcagcaaaaggcacagttggattcctttgttaaatccatgtcttctctccaaaatgatcgagaccgcatagtgggtgactatcaacagctggaagagcgacatctctctataatcttggaaaaagaccaactcatccaagaggctgctgcagagaataataagcttaaagaagaaatacgaggcttgagaagtcatatggatgatctcaattctgagaatgccaagctagatgcagaactgatccaatatagagaagacctgaaccaagtgataacaataaaggacagccaacaaaagcagcttcttgaagttcaacttcagcaaaataaggagctggaaaataaatatgctaaattagaagaaaagctgaaggaatctgaggaagcaaatgaggatctgcggaggtcctttaatgccctacaagaagagaaacaagatttatctaaagagattgagagtttgaaagtatctatatcccagctaacaagacaagtaacagccttgcaagaagaaggtactttaggactctatcatgcccagttaaaagtaaaagaagaagaggtacacaggttaagtgctttgttttcctcctctcaaaagagaattgcagaactggaagaagaattggtttgtgttcaaaaggaagctgccaagaaggtaggtgaaattgaagataaactgaagaaagaattaaagcatcttcatcatgatgcagggataatgagaaatgaaactgaaacagcagaagagagagtggcagagctagcaagagatttggtggagatggaacagaaattactcatggtcaccaaagaaaataaaggtctcacagcacaaattcagtcttttggaaggtctatgagttccttgcaaaatagtagagatcatgccaatgaggaacttgatgaactgaaaaggaaatatgatgccagtctgaaggaattggcacagttgaaagaacagggactcttaaacagagagagagatgctcttctttctgaaaccgccttttcaatgaactccactgaggagaatagcttgtctcaccttgagaaacttaaccaacagctcctatccaaagatgagcaattgcttcacttgtcctcacaactagaagattcttataaccaagtgcagtccttttccaaggctatggccagtctgcagaatgagagagatcacctgtggaatgagctggagaaatttcgaaagtcagaggaagggaagcagaggtctgcagctcagccttccaccagcccagctgaagtacagagtttaaaaaaagctatgtcttcactccaaaatgacagagacagactactgagtagctagttctttctttctgatctgtttaagagtttttgaacctttctttaaatgttatttttatagaaaaggataaacacattcttatacatattatctgggaacgcagggaaagtattatgtatcccacaggttttgtttggtcttagagaagcacagaaacatgatttaaattgctaaacctgccaataccattagaaaaaaaatcagaaatttacc

SEQ ID NO: 567319 - DNA, 941 bp, Homo sapiens
tctacatagcctgacaatataaaatatatttactgtataaggcctggaatataacaatgtaatgttacaatctgttattaagtcatgttttcgaatactagatacagtcatttaaggtcatagtcccaagtgttagaatttacctatcaaatgtttctaaccaaaagttgtgttacttaagatactctgttctgtcatgaagtaatagctggtatgttagtatttgaaacaaacatacagagttcatcatacttggaagcaaggaatatcatttagatgctttttattcagatccattccttaagtggtttggtgtctgtagagtcaggcaaatgattaattatacatgtgattccagagtagtgtgttgaagcagttacagaatcagtaaggaacatttagctaggtcattgagcttgactacttacaatctaacaaataaggaaatcgtgaattagacagtagtagtggtaggaggactttgtatgatcttatcttggtttgtcagtctagttcccatcctgtggatgtgtagggggaggcaactatttcatgacagaaagttacgtcttgaggtacacaagaaggctttaactctttgaagactgctctgtgggttgagcagcaggggtcactttacttaaatagtcgacaggctgcactggcacatcagtgagctagctaccacgtgggtcccctggcatctgcaatatgtcgagtatgacctaggatcactagaatggtggcgggccgactaacatgtgccgccgagccttcaaacactggaagtgtcagggtcaaacaaaagaaaatgtctgagggaacaacacacgaaatcaaatgtcaacgtacgcaaaaacccagaataggaacggaagaagagaacaacgagagacaaacaacgcacaaagaacatgagacaacacagcagacaatgaagg

SEQ ID NO: 567320 - DNA, 1174 bp, Homo sapiens
  misc_feature (5)..(5): n is a, c, g, or t
gcgtnctagtaggactcaaacgacccgaagaccaaagacaggcatccccagagacatcagcttccccagatgggtcacaaaatctggtttatgagacagaacttctcaggacccagctcaatgacagcttaaaggaaattcaccaaaaggagttaagaattcagcaactgaacagcaacttctctcagctactggaagagaaaaacaccctttccattcagctctgcgataccagtcagagtcttcgtgagaaccagcagcactatggtgaccttttaaatcactgtgcagtcttggagaagcaggttcaagagctgcaggcggggccactaaatatagatgttgctccaggagctccccaggaaaagaatggagttcacagaaagagtgaccctgaggaactaagggaaccgcagcaaagcttttctgaagctcagcagcagctatgcaacaccagacaggaagtgaatgaattaaggaagctgctggaagaagaacgagaccaaagagtggctgctgagaatgctctctctgtggccgaggagcagatcagacggttagagcacagtgaatgggactcttcccggactcctatcattggctcctgtggcactcaggagcaggcactgttaatagatcttacaagcaacagttgtcgaaggacccggagtggcgttggatggaagcgagtcctgcgttcactctgtcattcacggacccgagtgccacttctagcagccatctactttctaatgattcatgtcctgctcattctgtgttttacgggccatctatagacttagttgttactctttggaccactcccctcaaaacttggaattctctcacctctaacatcagaacatcaattccagtggaacagtcttcccatttacaggtcttctctccaactcttcacggaaagtgcctgcaaaaacagaggtggatacgaggacaggttggagctgcagggactggcgagtctgctttcttctactgccctgagcctgaacgcttctgcttaatctgagaatcacatttggtttgttgagcctaatatttgttgagattttgcaggaccctgatcttttgtggtcctgtaaaagatactgaggaatgtctttcagccaagccaagaggatggtttcaataaacctaataatctgaagttcag

SEQ ID NO: 567321 - DNA, 398 bp, Homo sapiens
ttccatgctgctgcggtacaagggtggtgatcatcgacgagggccacgagaggagcgtgtacacggagcatcctcatcggcctcctagtgccgcaacttgtgtactcgtccgggctaagcaggaacgctggccatgtcaagtcgtgtcatcatgtcggaccacgctgctggggtggcatggacttgcaccctaggaagccccacggactcttcggcaagccgtcgccggtcgatctaaggtggaatccaggcagttcccagtgactgtgcatttcaacaagcggacaccgttggaaaactacatgtggctgagtgcttcctggaaggtctgcgaagatccacctggatgcatgcccggaaggtggcatctctgagtggttcactgtagtggggcgagg

SEQ ID NO: 567322 - DNA, 1212 bp, Homo sapiens
taatcaagctgactcttcccatcaggtgcagactccaaagactggctggcaggctcacatgaaagaggaccaaagacaggcatccccagagacatcagcttccccagatgggtcacaaaatctggtttatgagacagaacttctcaggacccagctcaatgacagcttaaaggaaattcaccaaaaggagttaagaattcagcaactgaacagcaacttctctcagctactggaagagaaaaacaccctttccattcagctctgcgataccagtcagagtcttcgtgagaaccagcagcactatggtgaccttttaaatcactgtgcagtcttggagaagcaggttcaagagctgcaggcggggccactaaatatagatgttgctccaggagctccccaggaaaagaatggagttcacagaaagagtgaccctgaggaactaagggaaccgcagcaaagcttttctgaagctcagcagcagctatgcaacaccagacaggaagtgaatgaattaaggaagctgctggaagaagaacgagaccaaagagtggctgctgagaatgctctctctgtggccgaggagcagatcagacggttagagcacagtgaatgggactcttcccggactcctatcattggctcctgtggcactcaggagcaggcactgttaatagatcttacaagcaacagttgtcgaaggacccggagtggcgttggatggaagcgagtcctgcgttcactctgtcattcacggacccgagtgccacttctagcagccatctactttctaatgattcatgtcctgctcattctgtgttttacgggccatctatagacttagttgttactctttggaccactcccctcaaaacttggaattctctcacctctaacatcagaacatcaattccagtggaacagtcttcccatttacaggtcttctctccaactcttcacggaaagtgcctgcaaaaacagaggtggatacgaggacaggttggagctgcagggactggcgagtctgctttcttctactgccctgagcctgaacgcttctgcttaatctgagaatcacatttggtttgttgagcctaatatttgttgagattttgcaggaccctgatcttttgtggtcctgtaaaagatactgaggaatgtctttcagccaagccaagaggatggtttcaataaacctaataatctgaagttcag

SEQ ID NO: 567323 - DNA, 328 bp, Homo sapiens
gatcctccctaggccctgcctaaccttgagttgtttctcaatccctctggctgcagaagtcccgtgacccttaatgagaggaggggcaggaccagatcttttgagagctgagggttgagggcattgagccaacacacagatttgtcgcctctgtccccgaagacacctgcaccctccatgcggagccaagatggggaatggaactgaggaagattataactttgtcttcaaggtggtgccgatcggcgaatcaggtgtggggaagaccaatctactctcccgattcacgcgcaatgagttcagccacgacagccgcaccaccatcggg

SEQ ID NO: 567324 - DNA, 362 bp, Homo sapiens
  misc_feature (1)..(1): n is a, c, g, or t
naaccatgccttcaggatcttttttttataagtaaccacgttgtggacaaacaaactttaacttcccctaccccattccattaaaaaggaatggttttaaaaagcttaccttaactttattaaaaggaattggccagtttccaagaatgaataaattacaagatgatacagtgagaccaatgattaaggaaataagagcggacactaaagtgcctttgggaaagacagctattgaaatgactacaaaagttttaccataaaattcagaccctatacctgaaaaatcaccatcctgtattgtaagtatatatataattcactttcctatcagaaccaagaaagcactctagttcccattttcc

SEQ ID NO: 567325 - DNA, 381 bp, Homo sapiens
taagcctcactccttcccttgagaccttgctgactgactgagctgggttggtcaggtggtgccctcaatgttgaggctcgaatacgaggggttcagtgaagggcatggcagaagaggaagctcacacaaaggaaaatacaaaaatctgggccagcagaggacccaatcccaactctctccaacaactgctgatgagcacggacggctgtgcaggaaggagagggagccagtactcagcaacagatacagtacacaggcgatggtcaactgttggctgtttgcaccccacagcatcctttggcaaaaggggaccattaatgtggattcatctttctccaaaagaaagctggttaaatacagaattgtaggacttggattacc

SEQ ID NO: 567326 - DNA, 269 bp, Homo sapiens
gtgctggcatagattaacatactcaacatcatctagagactggattgcatggtctagaacggatggtcagggctgtccctgtccgcaggtggggatgccggtgtgctgagtcctgtggatgactcaggagttggcctggatggtttcctggatccacttggtgaacttgcagaggttcgtgtagacacccggtctgttgggccgggcacaagggtaatctccccaggacacgagtccctgcagggcagccattgcaacacggtctctca

SEQ ID NO: 567327 - DNA, 311 bp, Homo sapiens
  misc_feature (32)..(32): n is a, c, g, or t
  misc_feature (37)..(37): n is a, c, g, or t
  misc_feature (46)..(46): n is a, c, g, or t
  misc_feature (110)..(110): n is a, c, g, or t
  misc_feature (116)..(116): n is a, c, g, or t
  misc_feature (128)..(128): n is a, c, g, or t
  misc_feature (168)..(168): n is a, c, g, or t
ggtctttgtgagaccggtgcaggcctggggtngtctnctgtctggncagagaagagaaaaatgtaggacactggtttagtagtggctttgttttggtttggttttggttnctcagnagtggttgtttntggtgggatcattggttatgtaaaaggaggtagtgtgtcntccttgggttgtgggttggtctttgtgagtttagtcggtctgggtgttttccagttgttttaggatccaaggaacgtttggggttttgctagcttcatctgggtccttgggttggtattatggggaatgaggttcttccactt

SEQ ID NO: 567328 - DNA, 1824 bp, Homo sapiens
  misc_feature (246)..(246): n is a, c, g, or t
  misc_feature (1767)..(1767): n is a, c, g, or t
  misc_feature (1824)..(1824): n is a, c, g, or t
gattgcttaattgccgccatctgtgacgtggaaagtcgggactactgactacctcatctttacgaagccatgatctgcagtctctgatagtactactagacttcatgacgtcctatctcgctgtatggcgcatgctggagctgagtccaggacgggctcatgcgttctaatggtgtgcgcaccaagatcatagagaaggtagctcgatagcgacgccactcaatacatttggccatttcaactacnttgcgtatcaagaacctgatatcaccatcgagtacggtaatccagtgaggtgcgttcggtgcagacgtggaacttagctgccccgcgtgcaatagttcttgtattgacccgcgctgattggtcgagcagtttaactcgcgctggaatactacggtacgcattgagagagcggaatcgtgggcaactgctattgagccctccctcgttcatgcctcctctataccgtacgcttgacattgtcgaactaattcctcgccatcatcacgatctgcgaacgagccaccgtgagagacccaggagatagagcttaggctattgctaaaatcaagccactacatcaaccgtacctcattaaagaccaagcgggagacaccttcattcgttccgacaaatcccccattggcgggaagggcctataccactgtctaacgtaaccacctttacaaaccctacttcgtataccttccaccatgtggaaccaatctcctcaagggcggaagccgctgtgatttcggtctcctttctttaacattcaatcttatagcctgggggccccattttcgcaccaatattttggccaatccctagggggaaatggattaacttttaattttgtagaactccatggatgaacaacgctcgcggcgtaggggttccaattggaagaccccgccacaatttcaaacaccacataagtccggaccctcactttgcctttagctggttgccttcggaacttccaccaggtgacgccgtaaacactaccaccccatgcccaaaggctctctcttggatacaaatgttccattcccccttgaagtgccgttcctttgctcgcccaggtgttgccccttcagggcgttagttcttagtgccccaatttcgaaggctttaaacttatcttaaaccattaataccaaagggaggcccgcgtctagaaagcataacgagagggaggcgaaccttttaccctataccgaagaacaccgggcccctgggaaagggacatgggaagagatcgtccccgcacctctgctgattatgggcgcaaaactagaagccttaaggttggtcgtcggaaatataatcccccaggggaactagagccgcctgcgcacaacgattcttcaatcaactatgacgaagtactcctccgtgaccgcaagcggggccaaacggcgggcacagtaaaagatgctgtcgccccatgaattggcttgacaacgcttcacaataggtgtccgggaacggagcaaagtgacaaccccccggggggggatacccaacaacggccaaatgatggtgcttggagggaggacggcaaagatcaacccaaggaggggggtgacacacagggagggacgaaaactgagcgggacggagcaccccacaatcaaaattgagtcagggcagacaaaagatcaccgtcgtgagtcacgccacacgtaattatatacgatcagggagagagacaatcatagctggatgcacacaaggagccggtcagaaaacgtcgagccngtgccgcgacccgaagcggagcgtgacaacatgaacagagcggacaggagcgaaaan

SEQ ID NO: 567329 - DNA, 332 bp, Homo sapiens
ctcggtctaccttgtctttaatctccattttcagatggggacattaagacaatgagaaagtatggaacctacctaaggtcacacagctagcagtgagggagctatagtcgtgaatgcagcattctggctccagagctggtatcctgtcacgctgtggctgccctcagcaagagtaaagtgaggaggaacactgtaggagggaaggaagaactcaggaaaactctgaggaggtggcgtctgctgagcagggctttgatgaatggggaggatttggtttgtgtagaaatggaaaaggatgtttggtttcttggcagagacaaggtagagccgag

SEQ ID NO: 567330 - DNA, 241 bp, Homo sapiens
tgtgtgtgtgtgtgtgtgtggcggggggggtgtccaatcaaagacttaactaggtcaggcgtggtggctcacacctgtaatcctagcactttggaaggctgagatggaaggatcacttaagcccaggagttcaaggctgtggagagctagtattgtgccagtgcattccacctgggtgaaagagcaagaccctctttctaaaaaacaaaaaacgaaacaccaaccaaaaaacgggtaccga

SEQ ID NO: 567331 - DNA, 1169 bp, Homo sapiens
cctgagataaatgaatgtgaggtttcaaagtggcttcaatgctaaagtaaatgtattaaccatttggaaaatacaagacaattactttagcagtgaagccactttgaaacctgagataaatgaatgtgaggtatctttctgctttcctcatttgtgtagatgtactgatctgtatctgttgatttaaattattttgtttccagatgggcacatgaaatatttaaactattatagtgtgcctttctgtccaaatgtagcatagttaccagggaagattagtccagtgattacataagagttgggcaccataaattctctatatttgcctcccatggaggcctttgaaatgcatctttattaaaaatcaaaatataaccaggatactgaaagtcagtatatgaatggtaaaatcgtgacatatcctatgtccatgccattcttgctaaggttgacatggtatatataaactgaggagcaactgcattccagaatcaagcaataagataagcctttaagtatggcacacttgtatatagaggtgtaaaaatccacacgtggcatgataattccctgatcactaagtatacccacacgaacttcaaatagtacactacacggactaggcactgcagacagtaagcagaggattcatcgaaaactacaaggcatcccgacatgcacctcggtaccccagaacaccactgcaacactgagggtacaaagggaaacaatagccaaaatcacggaacagacacaacataagtaatgaaacttcgcgtacctacaggacaagaacggccatcgcccacatccggcacacactagccaactcgaccttacagccatgacgacgcaaacgactttgcccaacggaacgctggaccttgcacctcaggaaacacacttacagagagagtcgagtaaaaacccaagggtgtagaaaatgaccatggggaaaacaagaacgtcgtgttggaacttagcacatgaggtagactcaggactatcagggtgcaaacgatctcgactatgtgcgtacattagagacaagcaagagaagatcacgatgtgataagtgttgcacacggaggctatgacgatacgcaatcatgaggttatccaaagcagaagaaaaggcggttgcagaaacgcagttctccactagtaat

SEQ ID NO: 567332 - DNA, 178 bp, Homo sapiens
cgggaaccaaaagcaaaaatagccaaatgggattcccccaacttaaaaagcttttgcatagttaccgaaccaattaccccagtgaagagccaccggccagattgggagaaaattttgccaattcatccattggttaaggggttaatattcaaattttatgaggacctcaacctcccca

SEQ ID NO: 567333 - DNA, 746 bp, Homo sapiens
  misc_feature (1)..(1): n is a, c, g, or t
ngccaagtcgctgggataggtgcgcccgggcattttctcccccgtccatatgttgggtgtccccccgcggtcaaatttttgtgcgtgcttgacccctcttcccgtggcccatattgatgtctctggccagtggttttgccgcctctgagttcaatcttgtgttgttccgcgcgtaggggccgctctggcgcgtgtgtaaccccaaccgtgcttccccttgcacgtgtgtgtcttcccgccagcggtttacggtggtggcctgtaccggtcccccctactgggctccttccccataggatccgtgttttcgcccacaacataggaggcttcactatcccccggatgtgtccgcctcattttccgcggggacccccctctgggccccacgcttgcgggccccaataccctcttgcgcctatcaaaaattctctcgtcgcgttaataataaacatttcttttccgcaccaacaacatttttccgcgcctttccccgggataccccccccgttttctctggggcatacccccgatgccatacgccccccatgcgacaatctcctatcaatcttgtaggcgctccccatccatttctttttcaccacgcccggggatatttaataattttccatgaatttgagaaacccctctccttttgaaaccgaaactccttataataggagacacccccccacccggggggcaattgggggccccccccccccccccctttgagaaccccttaaaaa

SEQ ID NO: 567334 - DNA, 980 bp, Homo sapiens
attcaaaagtgcgttcccttctgggtgatgctatcacaactaccaccactgggtgcagattggcctgcaggtagacctggaagatgaaacaccaacggaccgggctgatttacgttcagtaagactttcgggtcatgctctaagtagctctgggtgacgatgcggggttatagtcgtatgcgtggcagtagtttccacctgggttacattgacgcgtatagcatcaagcgtgccacgtgtaccaggattggaccagacgagtgcatggcgttagtgcttttagacactactcgtgttgtagagaggtggctttgaagaacgcttttgaataaacgttagtcggggtggttactggttccccttaggaagtctgcttggatatggccgttaaactaacaggttgcatctgctgtctggagtgcgaagtgcatatctatccccttggttgattgtttcaacggacccaatgtattttcgttaagctatgccccgtggcgaactcatgtgcactggcgagcaagctgctttggccatgcttgctcaacatttggggtgcattacggaagcgcgacgggtcagtacagatggaggcttaacgcaccgttgacagatgaacagtaggtaccacttgtggcctagatgggtcatagccgaaactctgaaattagggaaaagcccttccctttgtggcttggtcaagatggtcaaactctaggtttagaaagtgcaacgagttataaaactcaataaacccaggggcccttacacactctccgtggtccaatcggttacgatgataaggaagatatttgtgtgacgaaagatgacggagtccttggcatatggtaaggccaaagggctggaactccaagacttaccttgggctccaggttgaatcgtccaactatggggtaccttgacgtaagctggcggacaacagggcacatttgctcgagcatagaccaggtccaggggccttg

SEQ ID NO: 567335 - DNA, 201 bp, Homo sapiens
ccaaaaaggggggggggggtttccctttttgtttccacctttaggggggtgggggggccctttttttttcccccccggaaaaaaaaatttggaaaaaaatttggtttttccaaaattttgtttggggggggggggggtttttttaattaggccctttttggggggttgggggggcaaataaagccttgggacccttcccga

SEQ ID NO: 567336 - DNA, 536 bp, Homo sapiens
  misc_feature (58)..(58): n is a, c, g, or t
  misc_feature (76)..(76): n is a, c, g, or t
  misc_feature (273)..(273): n is a, c, g, or t
  misc_feature (318)..(318): n is a, c, g, or t
  misc_feature (403)..(403): n is a, c, g, or t
tctagaggatcccgtcaggtggtggtgggtagcgcatgtcgtcagaagagcggagtgngagcaggtggttctgtgnctgtgctgtcctttccggagaggggctaggtcgagttgagatttctccttcttgttttatctttgtcttcataaggggtggtagggtggttcgtagcagtctccgggctactagggcgttgtgtgctggtagtaactggttcattgaaaggggcatctccctccccgcgtctgcctgaagcaggggaaggacttcgnccagccaaggcagttgtatgagttttagctgcagcacttcgaganctgcaggagttaattgaggacgtgggagaggaaggaaatcagctcaaagggagaacagaaaaccccctccccaattcccatccanctttcctaactggacaaccctcttccaaaaagcctttagtcgcacaactcaaatcattcactgaaatgcaagtacagtccactttggttcttattttcccaacacaatcccaaagagcgttctccctctaccc

SEQ ID NO: 567337 - DNA, 105 bp, Homo sapiens
  misc_feature (11)..(11): n is a, c, g, or t
tctcagaagcngctgtttcagactcaatcgaagttaccaggtactgggttccttgaatgtcttcatctgcttatgtaatggccttctgtctcttttgatctgttg

SEQ ID NO: 567338 - DNA, 1100 bp, Homo sapiens
gcctgagaaggaaggaacaatgattctccaggatactgcacggggatcggcacaggtgaacattcgccctggcatcactcagctgtgtccggcagcctgaacactattctgtgggtattcgaggagaaaaacaccctttccattcagctctgcgataccagtcagagtcttcgtgagaaccagcagcactatggtgaccttttaaatcactgtgcagtcttggagaagcaggttcaagagctgcaggcggggccactaaatatagatgttgctccaggagctccccaggaaaagaatggagttcacagaaagagtgaccctgaggaactaagggaaccgcagcaaagcttttctgaagctcagcagcagctatgcaacaccagacaggaagtgaatgaattaaggaagctgctggaagaagaacgagaccaaagagtggctgctgagaatgctctctctgtggccgaggagcagatcagacggttagagcacagtgaatgggactcttcccggactcctatcattggctcctgtggcactcaggagcaggcactgttaatagatcttacaagcaacagttgtcgaaggacccggagtggcgttggatggaagcgagtcctgcgttcactctgtcattcacggacccgagtgccacttctagcagccatctactttctaatgattcatgtcctgctcattctgtgttttacgggccatctatagacttagttgttactctttggaccactcccctcaaaacttggaattctctcacctctaacatcagaacatcaattccagtggaacagtcttcccatttacaggtcttctctccaactcttcacggaaagtgcctgcaaaaacagaggtggatacgaggacaggttggagctgcagggactggcgagtctgctttcttctactgccctgagcctgaacgcttctgcttaatctgagaatcacatttggtttgttgagcctaatatttgttgagattttgcaggaccctgatcttttgtggtcctgtaaaagatactgaggaatgtctttcagccaagccaagaggatggtttcaataaacctaataatctgaagttcag

SEQ ID NO: 567339 - DNA, 140 bp, Homo sapiens
atatgcactgggccctgaaccacacttcacttaagaccacgggtggtgttatttcaaagcccccaagggaaaccgtgggcggtacagacattttcaaagtggccagtgttactttaatgggacggccttcgtaattcatg

SEQ ID NO: 567340 - DNA, 151 bp, Homo sapiens
atactacactttattctaatataggaacttcataatataaaatccaacgcacgatgctagagataaaaaaagagggtgggagatgtggagccaggattcaaatcgaaaatcgtaatcggaaactaaaccagcattgcaaccgggccataag

SEQ ID NO: 567341 - DNA, 9754 bp, Homo sapiens
  misc_feature (603)..(603): n is a, c, g, or t
  misc_feature (618)..(618): n is a, c, g, or t
  misc_feature (676)..(676): n is a, c, g, or t
  misc_feature (685)..(685): n is a, c, g, or t
  misc_feature (1078)..(1078): n is a, c, g, or t
  misc_feature (1116)..(1116): n is a, c, g, or t
ttttttttttatagtgcatgcaggaaattgcaattttatttatgtttgtattgatacatatttgtacatatttatggggtgtggtagtttgatatatgcatacaatgtgtaatgatcaaatcagggtgtttaggatatctatcacctcaaacatttatcatttttgtgtttggaacatttctaatctcctagttattttgaaatatataacatattgttaactatagtcaccctactgtgctatcaaacacttgaacttattccttctatctacgtttgtacccattaaccaatctcttccctccctcccccaactccaccttcccagcctctggtacttatctctactccatgagatcaactttttaagctcccacatgagtgagaccatgggatatttgtctttctgtgccagacttatttcacttagaataatgacctccagttccgtaagatgggcagccaggaaaggccttacttagctgatgtttgaattgtgaagttatgtaatcattaagatgagtatacatacaatgggccagctgagtgcacagcaagattcaataaattcaaactaacattactcttattgccaagagagtncctgaaatgacagcncattggaaactggctactttccttccctttccttaggggtttaaggaaagcatgagtnatttcagtnttttgctggagctcctcactgacactcattgcagagcctgagccctcaactctcaatctttgcttaggtcctggcttaggctccactttgtaagaggcaccttcctagtattcactactctctctctcacaatcatgtccttacagacattgctgatcctctttcatactgacaccgggttctagtccgagttccatcactaagtcgctgtttgactttgggcaagttacttctgtggttaattatttttcatcaacaaaatcaaaaggtgaaactagacgaacaactaagaggctccagtattttttcaatctaagagtcccatatcccccactcccttctcacagctcattcaacaatcctaatggcagcgggtgcccgcagtctcaagtntctgccgaagcccaagccgctgtctcggtcagtcacanccgacgaagaggaggaattggaggaagccagcataaccacctcacactgagaacatctgacctttcccagaacgcccgcccactcgacacttcctgtccctccccagatcttgttccggggcacctactcgggtctaatcactcccctcattcactctttagggtccattgctgtttctttgaggaagcggagcatcttctgtcgttgattggtttccgtcattgttgataggttggtaacaaacaaggtgtgcctggtctcctggtaacgtcctgccgatagtcctgattggtcggtgtcttaatcccatcttccgtcccaactgctagtggctgagtccctggcggggcgcggcggtggaaggtgtcgcgtacgggcttcccgagctgacgtggcttgaattgggaggggggcagctggagcctcaggcggcagcgcttctagaaatgctgagccgattatcaggattagcaaatgttgttttgcatgaattatcaggagatgatgacactgatcagaatatgagggctcccctagaccctgaattacaccaagaatctgacatggaatttaataatactacacaagaagatgttcaggagcgcctggcttatgcagagcaattggtggtggagctaaaagatattattagacagaaggatgttcaactgcagcagaaagatgaagctctacaggaagagagaaaagctgctgataacaaaattaaaaaactaaaacttcatgcgaaggccaaattaacttctttgaataaatacatagaagaaatgaaagcacaaggagggactgttctgcctacagaacctcagtcagaggagcaactttccaagcatgacaagagttctacagaggaagagatggaaatagaaaagataaaacataagctccaggagaaggaggaactaatcagcactttgcaagcccagcttactcaggcacaggcagaacaacctgcacagagttctacagagatggaagaatttgtaatgatgaagcaacagctccaggagaaggaagaattcattagcactttacaagcccagctcagccagacacaggcagagcaagctgcacagcaggtggtccgagagaaagatgcccgctttgaaacacaagttcgtcttcatgaagatgagcttcttcagttagtaacccaggcagatgtggaaacagagatgcaacagaaattgagggtgctgcaaaggaagcttgaggaacacgaagaatccttggtgggccgtgctcaggtcgttgacttgctgcaacaggagctgactgctgctgagcagagaaaccagattctctctcagcagttacagcagatggaagctgagcataatactttgaggaacactgtggaaacagaaagagaggagtccaagattctactggaaaagatggaacttgaagtggcagagagaaaattatccttccataatctgcaggaagaaatgcatcatcttttagaacagtttgagcaagcaggccaagcccaggctgaactagagtctcggtatagtgctttggagcagaagcacaaagcagaaatggaagagaagacctctcatattttgagtcttcaaaagactggacaagagctgcagtctgcctgtgatgctctaaaggatcaaaattcaaagcttctccaagataagaatgaacaggcagttcagtcagcccagaccattcagcaactggaagatcagctccagcaaaaatccaaagaaattagccaatttctaaatagactgcccttgcaacaacatgaaacagcatctcagacttctttcccagatgtttataatgagggcacacaggcagtcactgaggagaatattgcttctttgcagaagagagtggtagaactagagaatgaaaagggagccttgctccttagttctatagagctggaggagctgaaagctgagaatgaaaaactgtcttctcagattactctcctagaggctcagaatagaactggggaggcagacagagaagtcagtgagatcagcattgttgatattgccaacaagaggagctcttctgctgaggaaagtggacaagatgttctagaaaacacattttctcagaaacataaagaattatcagttttattgttggaaatgaaagaagctcaagaggaaattgcatttcttaaattacagctccagggaaaaagggctgaggaagcagatcatgaggtccttgaccagaaagaaatgaaacagatggagggtgagggaatagctccaattaaaatgaaagtatttcttgaagatacagggcaagattttcccttaatgccaaatgaagagagcagtcttccagcagttgaaaaagaacaggcgagcactgaacatcaaagtagaacatctgaggaaatatctttaaatgatgctggagtagaattgaaatcaacaaagcaggatggtgataaatccctttctgctgtaccagatattggtcagtgtcatcaggatgagttggaaaggttaaaaagtcaaattttggagctcgagctaaactttcataaagcacaagaaatctatgagaaaaatttagatgagaaagctaaggaaattagcaacctaaaccagttgattgaggagtttaagaaaaatgctgacaacaacagcagtgcattcactgctttgtctgaagaaagagaccagcttctctctcaggtgaaggaacttagcatggtaacagaattgagggctcaggtaaagcaactggaaatgaaccttgcagaagcagaaaggcaaagaagacttgattatgaaagccaaactgcccatgacaacctgctcactgaacagatccatagtctcagcatagaagccaaatctaaagatgtgaaaattgaagttttacagaatgaactggatgatgtgcagcttcagttttctgagcagagtaccctgataagaagcctgcaaagccagctgcaaaataaggaaagtgaagtgcttgagggggcagaacgtgtaaggcatatctcaagtaaagtggaagaactgtcccaggctctttcacagaaggaacttgaaataacaaaaatggatcagctcttactagagaaaaagagagatgtggaaaccctccaacaaaccatcgaggagaaggatcaacaagtgacagaaatcagctttagtatgactgagaaaatggttcagcttaatgaagagaagttttctcttggggttgaaattaagactcttaaagaacagctaaatttattatccagagctgaggaagcaaaaaaagagcaggtggaagaagataatgaagtttcttctggccttaaacaaaattatgatgagatgagcccagcaggacaaataagtaaggaagaacttcagcatgaatttgaccttctgaagaaagaaaatgagcagagaaagagaaagctccaggcagctcttattaacagaaaggagcttctgcaaagagtcagtagattggaagaagaattagccaacttgaaagatgaatctaagaaagaaatcccactcagtgagactgagaggggagaagtggaagaagataaagaaaacaaagaatactcagaaaaatgtgtgacttctaagtgccaagaaatagaaatttatttaaaacagacaatatctgagaaagaagtggaactacagcatataaggaaggatttggaagaaaagctggcagctgaagagcaattccaggctctggtcaaacagatgaatcagaccttgcaagataaaacaaaccaaatagatttgctccaagcagaaatcagtgaaaaccaagcaattatccagaagttaatcacaagtaacacggatgcaagtgatggggactccgtagcacttgtaaaggaaacagtggtgataagtccaccttgtacaggtagtagtgaacactggaaaccagaactagaagaaaagatactggcccttgaaaaagaaaaggagcaacttcaaaagaagctacaggaagccttaacctcccgcaaggcaattcttaaaaaggcacaggagaaagaaagacatctcagggaggagctaaagcaacagaaagatgactataatcgcttgcaagaacagtttgatgagcaaagcaaggaaaatgagaatattggagaccagctaaggcaactccagattcaagtaagggaatccatagacggaaaactcccaagcacagaccagcaggaatcgtgttcttccactccaggtttagaagaacctttattcaaagccacagaacagcatcacactcaacctgttttagagtccaacttgtgcccagactggccttctcattctgaagatgcgagtgctctgcagggcggaacttctgttgcccagattaaggcccagctgaaggaaatagaggctgagaaagtagagttagaattgaaagttagttctacaacaagtgagcttactaaaaaatcagaagaggtatttcagttacaagagcagataaataaacagggtttagaaatcgagagtctaaagacagtatcccatgaagctgaagtccatgccgaaagcctgcagcagaaattggaaagcagccaactacaaattgctggcctagaacatctaagagaattgcaacctaaactggatgaactgcaaaaactcataagcaaaaaggaagaagacgttagctacctttctggacaacttagtgagaaagaagcagctctcactaaaatacagacagagataatagaacaagaagatttaattaaggctctgcatacacagctagaaatgcaagccaaagagcatgatgagaggataaagcagctacaggtggaactttgtgaaatgaagcaaaaaccagaagagattggagaagaaagtagagcaaagcaacaaatacaaaggaaactgcaagctgcccttatttcccgaaaagaagcactaaaagaaaacaaaagtctccaagaggaattgtctttggccagaggtaccattgaacgtctcaccaagtctctggcagatgtggaaagccaagtttctgctcaaaataaagaaaaagatacggtcttaggaaggttagctcttcttcaagaagaaagagacaaactcattacagaaatggacaggtctttattggaaaatcagagtctcagcagctcctgtgaaagtctaaaactagctctagagggtcttactgaagacaaggaaaagttagtgaaggaaattgaatctttgaaatcttctaagattgcagaaagtactgagtggcaagagaaacacaaggagctacaaaaagagtatgaaattcttctgcagtcctatgagaatgttagtaatgaagcagaaaggattcagcatgtggtggaagctgtgaggcaagagaaacaagaactgtatggcaagttaagaagcacagaggcaaacaagaaggagacagaaaagcagttgcaggaagctgagcaagaaatggaggaaatgaaagaaaagatgagaaagtttgctaaatctaaacagcagaaaatcctagagctggaagaagagaatgaccggcttagggcagaggtgcaccctgcaggagatacagctaaagagtgtatggaaacacttctttcttccaatgccagcatgaaggaagaacttgaaagggtcaaaatggagtatgaaaccctttctaagaagtttcagtctttaatgtctgagaaagactctctaagtgaagaggttcaagatttaaagcatcagatagaagataatgtatctaaacaagctaacctagaggccaccgagaaacatgataaccaaacgaatgtcactgaagagggaacacagtctataccaggtgagactgaagagcaagactctctgagtatgagcacaagacctacatgttcagaatcggttccatcagcgaagagtgccaaccctgctgtaagtaaggatttcagctcacatgatgaaattaataactacctacagcagattgatcagctcaaagaaagaattgctggattagaggaggagaagcagaaaaacaaggaatttagccagactttagaaaatgagaaaaataccttactgagtcagatatcaacaaaggatggtgaactaaaaatgcttcaggaggaagtaaccaaaatgaacctgttaaatcagcaaatccaagaagaactctccagagttaccaaactaaaggagacagcagaagaagagaaagatgatttggaagagaggcttatgaatcaattagcagaacttaatggaagcattgggaattactgtcaggatgttacagatgcccaaataaaaaatgagctattggaatctgaaatgaagaaccttaaaaagtgtgtgagtgaattggaagaagaaaagcagcagttagtcaaggaaaaaactaaggtggaatcagaaatacgaaaggaatatttggagaaaatacaaggtgctcagaaagaacccggaaataaaagccatgcaaaggaacttcaggaactgttaaaagaaaaacaacaagaagtaaagcagctacagaaggactgcatcaggtatcaagagaaaattagtgctctggagagaactgttaaagctctagaatttgttcaaactgaatctcaaaaagatttggaaataaccaaagaaaatctggctcaagcagttgaacaccgcaaaaaggcacaagcagaattagctagcttcaaagtcctgctagatgacactcaaagtgaagcagcaagggtcctagcagacaatctcaagttgaaaaaggaacttcagtcaaataaagaatcagttaaaagccagatgaaacaaaaggatgaagatcttgagcgaagactggaacaggcagaagagaagcacctgaaagagaagaagaatatgcaagagaaactggatgctttgcgcagagaaaaagtccacttggaagagacaattggagagattcaggttactttgaacaagaaagacaaggaagttcagcaacttcaggaaaacttggacagtactgtgacccagcttgcagcctttactaagagcatgtcttccctccaggatgatcgtgacagggtgatagatgaagctaagaaatgggagaggaagtttagtgatgcgattcaaagcaaagaagaagaaattagactcaaagaagataattgcagtgttctaaaggatcaacttagacagatgtccatccatatggaagaattaaagattaacatttccaggcttgaacatgacaagcagatttgggagtccaaggcccagacagaggtccagcttcagcagaaggtctgtgatactctacagggggaaaacaaagaacttttgtcccagctagaagagacacgccacctataccacagttctcagaatgaattagctaagttggaatcagaacttaagagtctcaaagaccagttgactgatttaagtaactctttagaaaaatgtaaggaacaaaaaggaaacttggaagggatcataaggcagcaagaggctgatattcaaaattctaagttcagttatgaacaactggagactgatcttcaggcctccagagaactgaccagtaggctgcatgaagaaataaatatgaaagagcaaaagattataagcctgctttctggcaaggaagaggcaatccaagtagctattgctgaactgcgtcagcaacatgataaagaaattaaagagctggaaaacctgctgtcccaggaggaagaggagaatattgttttagaagaggagaacaaaaaggctgttgataaaaccaatcagcttatggaaacactgaaaaccatcaaaaaggaaaacattcagcaaaaggcacagttggattcctttgttaaatccatgtcttctctccaaaatgatcgagaccgcatagtgggtgactatcaacagctggaagagcgacatctctctataatcttggaaaaagaccaactcatccaagaggctgctgcagagaataataagcttaaagaagaaatacgaggcttgagaagtcatatggatgatctcaattctgagaatgccaagctagatgcagaactgatccaatatagagaagacctgaaccaagtgataacaataaaggacagccaacaaaagcagcttcttgaagttcaacttcagcaaaataaggagctggaaaataaatatgctaaattagaagaaaagctgaaggaatctgaggaagcaaatgaggatctgcggaggtcctttaatgccctacaagaagagaaacaagatttatctaaagagattgagagtttgaaagtatctatatcccagctaacaagacaagtaacagccttgcaagaagaaggtactttaggactctatcatgcccagttaaaagtaaaagaacttttgtcccagctagaagagacacgccacctataccacagttctcagaatgaattagctaagttggaatcagaacttaagagtctcaaagaccagttgactgatttaagtaactctttagaaaaatgtaaggaacaaaaaggaaacttggaagggatcataaggcagcaagaggctgatattcaaaattctaagttcagttatgacactggagactgatcttcagcccaagaactgaccagtaggctgcatgaagaaagagtgctggcggtccggc

SEQ ID NO: 567342 - DNA, 8490 bp, Homo sapiens
  misc_feature (603)..(603): n is a, c, g, or t
  misc_feature (618)..(618): n is a, c, g, or t
  misc_feature (676)..(676): n is a, c, g, or t
  misc_feature (685)..(685): n is a, c, g, or t
  misc_feature (1078)..(1078): n is a, c, g, or t
  misc_feature (1116)..(1116): n is a, c, g, or t
ttttttttttatagtgcatgcaggaaattgcaattttatttatgtttgtattgatacatatttgtacatatttatggggtgtggtagtttgatatatgcatacaatgtgtaatgatcaaatcagggtgtttaggatatctatcacctcaaacatttatcatttttgtgtttggaacatttctaatctcctagttattttgaaatatataacatattgttaactatagtcaccctactgtgctatcaaacacttgaacttattccttctatctacgtttgtacccattaaccaatctcttccctccctcccccaactccaccttcccagcctctggtacttatctctactccatgagatcaactttttaagctcccacatgagtgagaccatgggatatttgtctttctgtgccagacttatttcacttagaataatgacctccagttccgtaagatgggcagccaggaaaggccttacttagctgatgtttgaattgtgaagttatgtaatcattaagatgagtatacatacaatgggccagctgagtgcacagcaagattcaataaattcaaactaacattactcttattgccaagagagtncctgaaatgacagcncattggaaactggctactttccttccctttccttaggggtttaaggaaagcatgagtnatttcagtnttttgctggagctcctcactgacactcattgcagagcctgagccctcaactctcaatctttgcttaggtcctggcttaggctccactttgtaagaggcaccttcctagtattcactactctctctctcacaatcatgtccttacagacattgctgatcctctttcatactgacaccgggttctagtccgagttccatcactaagtcgctgtttgactttgggcaagttacttctgtggttaattatttttcatcaacaaaatcaaaaggtgaaactagacgaacaactaagaggctccagtattttttcaatctaagagtcccatatcccccactcccttctcacagctcattcaacaatcctaatggcagcgggtgcccgcagtctcaagtntctgccgaagcccaagccgctgtctcggtcagtcacanccgacgaagaggaggaattggaggaagccagcataaccacctcacactgagaacatctgacctttcccagaacgcccgcccactcgacacttcctgtccctccccagatcttgttccggggcacctactcgggtctaatcactcccctcattcactctttagggtccattgctgtttctttgaggaagcggagcatcttctgtcgttgattggtttccgtcattgttgataggttggtaacaaacaaggtgtgcctggtctcctggtaacgtcctgccgatagtcctgattggtcggtgtcttaatcccatcttccgtcccaactgctagtggctgagtccctggcggggcgcggcggtggaaggtgtcgcgtacgggcttcccgagctgacgtggcttgaattgggaggggggcagctggagcctcaggcggcagcgcttctagaaatgctgagccgattatcaggattagcaaatgttgttttgcatgaattatcaggagatgatgacactgatcagaatatgagggctcccctagaccctgaattacaccaagaatctgacatggaatttaataatactacacaagaagatgttcaggagcgcctggcttatgcagagcaattggtggtggagctaaaagatattattagacagaaggatgttcaactgcagcagaaagatgaagctctacaggaagagagaaaagctgctgataacaaaattaaaaaactaaaacttcatgcgaaggccaaattaacttctttgaataaatacatagaagaaatgaaagcacaaggagggactgttctgcctacagaacctcagtcagaggagcaactttccaagcatgacaagagttctacagaggaagagatggaaatagaaaagataaaacataagctccaggagaaggaggaactaatcagcactttgcaagcccagcttactcaggcacaggcagaacaacctgcacagagttctacagagatggaagaatttgtaatgatgaagcaacagctccaggagaaggaagaattcattagcactttacaagcccagctcagccagacacaggcagagcaagctgcacagcaggtggtccgagagaaagatgcccgctttgaaacacaagttcgtcttcatgaagatgagcttcttcagttagtaacccaggcagatgtggaaacagagatgcaacagaaattgagggtgctgcaaaggaagcttgaggaacacgaagaatccttggtgggccgtgctcaggtcgttgacttgctgcaacaggagctgactgctgctgagcagagaaaccagattctctctcagcagttacagcagatggaagctgagcataatactttgaggaacactgtggaaacagaaagagaggagtccaagattctactggaaaagatggaacttgaagtggcagagagaaaattatccttccataatctgcaggaagaaatgcatcatcttttagaacagtttgagcaagcaggccaagcccaggctgaactagagtctcggtatagtgctttggagcagaagcacaaagcagaaatggaagagaagacctctcatattttgagtcttcaaaagactggacaagagctgcagtctgcctgtgatgctctaaaggatcaaaattcaaagcttctccaagataagaatgaacaggcagttcagtcagcccagaccattcagcaactggaagatcagctccagcaaaaatccaaagaaattagccaatttctaaatagactgcccttgcaacaacatgaaacagcatctcagacttctttcccagatgtttataatgagggcacacaggcagtcactgaggagaatattgcttctttgcagaagagagtggtagaactagagaatgaaaagggagccttgctccttagttctatagagctggaggagctgaaagctgagaatgaaaaactgtcttctcagattactctcctagaggctcagaatagaactggggaggcagacagagaagtcagtgagatcagcattgttgatattgccaacaagaggagctcttctgctgaggaaagtggacaagatgttctagaaaacacattttctcagaaacataaagaattatcagttttattgttggaaatgaaagaagctcaagaggaaattgcatttcttaaattacagctccagggaaaaagggctgaggaagcagatcatgaggtccttgaccagaaagaaatgaaacagatggagggtgagggaatagctccaattaaaatgaaagtatttcttgaagatacagggcaagattttcccttaatgccaaatgaagagagcagtcttccagcagttgaaaaagaacaggcgagcactgaacatcaaagtagaacatctgaggaaatatctttaaatgatgctggagtagaattgaaatcaacaaagcaggatggtgataaatccctttctgctgtaccagatattggtcagtgtcatcaggatgagttggaaaggttaaaaagtcaaattttggagctcgagctaaactttcataaagcacaagaaatctatgagaaaaatttagatgagaaagctaaggaaattagcaacctaaaccagttgattgaggagtttaagaaaaatgctgacaacaacagcagtgcattcactgctttgtctgaagaaagagaccagcttctctctcaggtgaaggaacttagcatggtaacagaattgagggctcaggtaaagcaactggaaatgaaccttgcagaagcagaaaggcaaagaagacttgattatgaaagccaaactgcccatgacaacctgctcactgaacagatccatagtctcagcatagaagccaaatctaaagatgtgaaaattgaagttttacagaatgaactggatgatgtgcagcttcagttttctgagcagagtaccctgataagaagcctgcaaagccagctgcaaaataaggaaagtgaagtgcttgagggggcagaacgtgtaaggcatatctcaagtaaagtggaagaactgtcccaggctctttcacagaaggaacttgaaataacaaaaatggatcagctcttactagagaaaaagagagatgtggaaaccctccaacaaaccatcgaggagaaggatcaacaagtgacagaaatcagctttagtatgactgagaaaatggttcagcttaatgaagagaagttttctcttggggttgaaattaagactcttaaagaacagctaaatttattatccagagctgaggaagcaaaaaaagagcaggtggaagaagataatgaagtttcttctggccttaaacaaaattatgatgagatgagcccagcaggacaaataagtaaggaagaacttcagcatgaatttgaccttctgaagaaagaaaatgagcagagaaagagaaagctccaggcagctcttattaacagaaaggagcttctgcaaagagtcagtagattggaagaagaattagccaacttgaaagatgaatctaagaaagaaatcccactcagtgagactgagaggggagaagtggaagaagataaagaaaacaaagaatactcagaaaaatgtgtgacttctaagtgccaagaaatagaaatttatttaaaacagacaatatctgagaaagaagtggaactacagcatataaggaaggatttggaagaaaagctggcagctgaagagcaattccaggctctggtcaaacagatgaatcagaccttgcaagataaaacaaaccaaatagatttgctccaagcagaaatcagtgaaaaccaagcaattatccagaagttaatcacaagtaacacggatgcaagtgatggggactccgtagcacttgtaaaggaaacagtggtgataagtccaccttgtacaggtagtagtgaacactggaaaccagaactagaagaaaagatactggcccttgaaaaagaaaaggagcaacttcaaaagaagctacaggaagccttaacctcccgcaaggcaattcttaaaaaggcacaggagaaagaaagacatctcagggaggagctaaagcaacagaaagatgactataatcgcttgcaagaacagtttgatgagcaaagcaaggaaaatgagaatattggagaccagctaaggcaactccagattcaagtaagggaatccatagacggaaaactcccaagcacagaccagcaggaatcgtgttcttccactccaggtttagaagaacctttattcaaagccacagaacagcatcacactcaacctgttttagagtccaacttgtgcccagactggccttctcattctgaagatgcgagtgctctgcagggcggaacttctgttgcccagattaaggcccagctgaaggaaatagaggctgagaaagtagagttagaattgaaagttagttctacaacaagtgagcttactaaaaaatcagaagaggtatttcagttacaagagcagataaataaacagggtttagaaatcgagagtctaaagacagtatcccatgaagctgaagtccatgccgaaagcctgcagcagaaattggaaagcagccaactacaaattgctggcctagaacatctaagagaattgcaacctaaactggatgaactgcaaaaactcataagcaaaaaggaagaagacgttagctacctttctggacaacttagtgagaaagaagcagctctcactaaaatacagacagagataatagaacaagaagatttaattaaggctctgcatacacagctagaaatgcaagccaaagagcatgatgagaggataaagcagctacaggtggaactttgtgaaatgaagcaaaaaccagaagagattggagaagaaagtagagcaaagcaacaaatacaaaggaaactgcaagctgcccttatttcccgaaaagaagcactaaaagaaaacaaaagtctccaagaggaattgtctttggccagaggtaccattgaacgtctcaccaagtctctggcagatgtggaaagccaagtttctgctcaaaataaagaaaaagatacggtcttaggaaggttagctcttcttcaagaagaaagagacaaactcattacagaaatggacaggtctttattggaaaatcagagtctcagcagctcctgtgaaagtctaaaactagctctagagggtcttactgaagacaaggaaaagttagtgaaggaaattgaatctttgaaatcttctaagattgcagaaagtactgagtggcaagagaaacacaaggagctacaaaaagagtatgaaattcttctgcagtcctatgagaatgttagtaatgaagcagaaaggattcagcatgtggtggaagctgtgaggcaagagaaacaagaactgtatggcaagttaagaagcacagaggcaaacaagaaggagacagaaaagcagttgcaggaagctgagcaagaaatggaggaaatgaaagaaaagatgagaaagtttgctaaatctaaacagcagaaaatcctagagctggaagaagagaatgaccggcttagggcagaggtgcaccctgcaggagatacagctaaagagtgtatggaaacacttctttcttccaatgccagcatgaaggaagaacttgaaagggtcaaaatggagtatgaaaccctttctaagaagtttcagtctttaatgtctgagaaagactctctaagtgaagaggttcaagatttaaagcatcagatagaagataatgtatctaaacaagctaacctagaggccaccgagaaacatgataaccaaacgaatgtcactgaagagggaacacagtctataccaggtgagactgaagagcaagactctctgagtatgagcacaagacctacatgttcagaatcggttccatcagcgaagagtgccaaccctgctgtaagtaaggatttcagctcacatgatgaaattaataactacctacagcagattgatcagctcaaagaaagaattgctggattagaggaggagaagcagaaaaacaaggaatttagccagactttagaaaatgagaaaaataccttactgagtcagatatcaacaaaggatggtgaactaaaaatgcttcaggaggaagtaaccaaaatgaacctgttaaatcagcaaatccaagaagaactctccagagttaccaaactaaaggagacagcagaagaagagaaagatgatttggaagagaggcttatgaatcaattagcagaacttaatggaagcattgggaattactgtcaggatgttacagatgcccaaataaaaaatgagctattggaatctgaaatgaagaaccttaaaaagtgtgtgagtgaattggaagaagaaaagcagcagttagtcaaggaaaaaactaaggtggaatcagaaatacgaaaggaatatttggagaaaaaaaaaaaaaaaaaaaaaaaaaaaaaaaaaaaaaaaaaaaaaaaaaaaaaaaaaaaaaaaaggaaaaaaaaaaaaatacaaacgaagagagagaaacacaaaaaaaaaaaacacacccgaacgagtcggcggcactcaaggaaggccccccagagcagggcgcaatataagacagaagcgcccccgccgcacacaaaccaccaaccctagcagagatgtaaaacaatacccagagcaaccccgaccaaaacaccacacgactggtagaggaaaccacacagcgacccacctaaatccgaagacaacaacccccacccggggaccacacaaccgacaagagaccccaaccgggcacaccacaccgacacggaaaccacccaaaccaaccggccccacacggaccccaaccccagagaacacactacacacccagaacacccctaacgcccccacccgaaaccaccaccacacacaagcacgcaacctcaacaacacaccgcggcccaccaacacaccagccccaccgccacacacagcacacacacacaacaacccagcaacacagccacccagcaccacccgcaggggacaaccgcgcgggagaggcgaggccaaagagccagccagacgccgacacgaaagcgcacgggcacgcacgcacgacccgcaagccaggcgaagcgcgccacaacagagaggaacaggcacagcaccacaacacacacaccgccgcacgacacaaacagcgggccagagagcgagaacgccgcaacgacaaagcgacgcagagacccagcacgcggcagaccggaccagacggccaacaaaagcgaaagcaaagaagcacaaagcagacgaacacgagagcaggacgagacaaaccgaccaacggaacgcgaacgcaacgcaaaagagacgcatatagacagcaaagcggaaccaacaaca

SEQ ID NO: 567343 - DNA, 109 bp, Homo sapiens
agtctacgagggtagaaccagtgtgttatgacccttctgcaagcagccatcaactatataccctactttaaacaaacatttaacaaagaaataggctcttaaaatgcat

SEQ ID NO: 567344 - DNA, 8188 bp, Homo sapiens
  misc_feature (603)..(603): n is a, c, g, or t
  misc_feature (618)..(618): n is a, c, g, or t
  misc_feature (676)..(676): n is a, c, g, or t
  misc_feature (685)..(685): n is a, c, g, or t
  misc_feature (1078)..(1078): n is a, c, g, or t
  misc_feature (1116)..(1116): n is a, c, g, or t
ttttttttttatagtgcatgcaggaaattgcaattttatttatgtttgtattgatacatatttgtacatatttatggggtgtggtagtttgatatatgcatacaatgtgtaatgatcaaatcagggtgtttaggatatctatcacctcaaacatttatcatttttgtgtttggaacatttctaatctcctagttattttgaaatatataacatattgttaactatagtcaccctactgtgctatcaaacacttgaacttattccttctatctacgtttgtacccattaaccaatctcttccctccctcccccaactccaccttcccagcctctggtacttatctctactccatgagatcaactttttaagctcccacatgagtgagaccatgggatatttgtctttctgtgccagacttatttcacttagaataatgacctccagttccgtaagatgggcagccaggaaaggccttacttagctgatgtttgaattgtgaagttatgtaatcattaagatgagtatacatacaatgggccagctgagtgcacagcaagattcaataaattcaaactaacattactcttattgccaagagagtncctgaaatgacagcncattggaaactggctactttccttccctttccttaggggtttaaggaaagcatgagtnatttcagtnttttgctggagctcctcactgacactcattgcagagcctgagccctcaactctcaatctttgcttaggtcctggcttaggctccactttgtaagaggcaccttcctagtattcactactctctctctcacaatcatgtccttacagacattgctgatcctctttcatactgacaccgggttctagtccgagttccatcactaagtcgctgtttgactttgggcaagttacttctgtggttaattatttttcatcaacaaaatcaaaaggtgaaactagacgaacaactaagaggctccagtattttttcaatctaagagtcccatatcccccactcccttctcacagctcattcaacaatcctaatggcagcgggtgcccgcagtctcaagtntctgccgaagcccaagccgctgtctcggtcagtcacanccgacgaagaggaggaattggaggaagccagcataaccacctcacactgagaacatctgacctttcccagaacgcccgcccactcgacacttcctgtccctccccagatcttgttccggggcacctactcgggtctaatcactcccctcattcactctttagggtccattgctgtttctttgaggaagcggagcatcttctgtcgttgattggtttccgtcattgttgataggttggtaacaaacaaggtgtgcctggtctcctggtaacgtcctgccgatagtcctgattggtcggtgtcttaatcccatcttccgtcccaactgctagtggctgagtccctggcggggcgcggcggtggaaggtgtcgcgtacgggcttcccgagctgacgtggcttgaattgggaggggggcagctggagcctcaggcggcagcgcttctagaaatgctgagccgattatcaggattagcaaatgttgttttgcatgaattatcaggagatgatgacactgatcagaatatgagggctcccctagaccctgaattacaccaagaatctgacatggaatttaataatactacacaagaagatgttcaggagcgcctggcttatgcagagcaattggtggtggagctaaaagatattattagacagaaggatgttcaactgcagcagaaagatgaagctctacaggaagagagaaaagctgctgataacaaaattaaaaaactaaaacttcatgcgaaggccaaattaacttctttgaataaatacatagaagaaatgaaagcacaaggagggactgttctgcctacagaacctcagtcagaggagcaactttccaagcatgacaagagttctacagaggaagagatggaaatagaaaagataaaacataagctccaggagaaggaggaactaatcagcactttgcaagcccagcttactcaggcacaggcagaacaacctgcacagagttctacagagatggaagaatttgtaatgatgaagcaacagctccaggagaaggaagaattcattagcactttacaagcccagctcagccagacacaggcagagcaagctgcacagcaggtggtccgagagaaagatgcccgctttgaaacacaagttcgtcttcatgaagatgagcttcttcagttagtaacccaggcagatgtggaaacagagatgcaacagaaattgagggtgctgcaaaggaagcttgaggaacacgaagaatccttggtgggccgtgctcaggtcgttgacttgctgcaacaggagctgactgctgctgagcagagaaaccagattctctctcagcagttacagcagatggaagctgagcataatactttgaggaacactgtggaaacagaaagagaggagtccaagattctactggaaaagatggaacttgaagtggcagagagaaaattatccttccataatctgcaggaagaaatgcatcatcttttagaacagtttgagcaagcaggccaagcccaggctgaactagagtctcggtatagtgctttggagcagaagcacaaagcagaaatggaagagaagacctctcatattttgagtcttcaaaagactggacaagagctgcagtctgcctgtgatgctctaaaggatcaaaattcaaagcttctccaagataagaatgaacaggcagttcagtcagcccagaccattcagcaactggaagatcagctccagcaaaaatccaaagaaattagccaatttctaaatagactgcccttgcaacaacatgaaacagcatctcagacttctttcccagatgtttataatgagggcacacaggcagtcactgaggagaatattgcttctttgcagaagagagtggtagaactagagaatgaaaagggagccttgctccttagttctatagagctggaggagctgaaagctgagaatgaaaaactgtcttctcagattactctcctagaggctcagaatagaactggggaggcagacagagaagtcagtgagatcagcattgttgatattgccaacaagaggagctcttctgctgaggaaagtggacaagatgttctagaaaacacattttctcagaaacataaagaattatcagttttattgttggaaatgaaagaagctcaagaggaaattgcatttcttaaattacagctccagggaaaaagggctgaggaagcagatcatgaggtccttgaccagaaagaaatgaaacagatggagggtgagggaatagctccaattaaaatgaaagtatttcttgaagatacagggcaagattttcccttaatgccaaatgaagagagcagtcttccagcagttgaaaaagaacaggcgagcactgaacatcaaagtagaacatctgaggaaatatctttaaatgatgctggagtagaattgaaatcaacaaagcaggatggtgataaatccctttctgctgtaccagatattggtcagtgtcatcaggatgagttggaaaggttaaaaagtcaaattttggagctcgagctaaactttcataaagcacaagaaatctatgagaaaaatttagatgagaaagctaaggaaattagcaacctaaaccagttgattgaggagtttaagaaaaatgctgacaacaacagcagtgcattcactgctttgtctgaagaaagagaccagcttctctctcaggtgaaggaacttagcatggtaacagaattgagggctcaggtaaagcaactggaaatgaaccttgcagaagcagaaaggcaaagaagacttgattatgaaagccaaactgcccatgacaacctgctcactgaacagatccatagtctcagcatagaagccaaatctaaagatgtgaaaattgaagttttacagaatgaactggatgatgtgcagcttcagttttctgagcagagtaccctgataagaagcctgcaaagccagctgcaaaataaggaaagtgaagtgcttgagggggcagaacgtgtaaggcatatctcaagtaaagtggaagaactgtcccaggctctttcacagaaggaacttgaaataacaaaaatggatcagctcttactagagaaaaagagagatgtggaaaccctccaacaaaccatcgaggagaaggatcaacaagtgacagaaatcagctttagtatgactgagaaaatggttcagcttaatgaagagaagttttctcttggggttgaaattaagactcttaaagaacagctaaatttattatccagagctgaggaagcaaaaaaagagcaggtggaagaagataatgaagtttcttctggccttaaacaaaattatgatgagatgagcccagcaggacaaataagtaaggaagaacttcagcatgaatttgaccttctgaagaaagaaaatgagcagagaaagagaaagctccaggcagctcttattaacagaaaggagcttctgcaaagagtcagtagattggaagaagaattagccaacttgaaagatgaatctaagaaagaaatcccactcagtgagactgagaggggagaagtggaagaagataaagaaaacaaagaatactcagaaaaatgtgtgacttctaagtgccaagaaatagaaatttatttaaaacagacaatatctgagaaagaagtggaactacagcatataaggaaggatttggaagaaaagctggcagctgaagagcaattccaggctctggtcaaacagatgaatcagaccttgcaagataaaacaaaccaaatagatttgctccaagcagaaatcagtgaaaaccaagcaattatccagaagttaatcacaagtaacacggatgcaagtgatggggactccgtagcacttgtaaaggaaacagtggtgataagtccaccttgtacaggtagtagtgaacactggaaaccagaactagaagaaaagatactggcccttgaaaaagaaaaggagcaacttcaaaagaagctacaggaagccttaacctcccgcaaggcaattcttaaaaaggcacaggagaaagaaagacatctcagggaggagctaaagcaacagaaagatgactataatcgcttgcaagaacagtttgatgagcaaagcaaggaaaatgagaatattggagaccagctaaggcaactccagattcaagtaagggaatccatagacggaaaactcccaagcacagaccagcaggaatcgtgttcttccactccaggtttagaagaacctttattcaaagccacagaacagcatcacactcaacctgttttagagtccaacttgtgcccagactggccttctcattctgaagatgcgagtgctctgcagggcggaacttctgttgcccagattaaggcccagctgaaggaaatagaggctgagaaagtagagttagaattgaaagttagttctacaacaagtgagcttactaaaaaatcagaagaggtatttcagttacaagagcagataaataaacagggtttagaaatcgagagtctaaagacagtatcccatgaagctgaagtccatgccgaaagcctgcagcagaaattggaaagcagccaactacaaattgctggcctagaacatctaagagaattgcaacctaaactggatgaactgcaaaaactcataagcaaaaaggaagaagacgttagctacctttctggacaacttagtgagaaagaagcagctctcactaaaatacagacagagataatagaacaagaagatttaattaaggctctgcatacacagctagaaatgcaagccaaagagcatgatgagaggataaagcagctacaggtggaactttgtgaaatgaagcaaaaaccagaagagattggagaagaaagtagagcaaagcaacaaatacaaaggaaactgcaagctgcccttatttcccgaaaagaagcactaaaagaaaacaaaagtctccaagaggaattgtctttggccagaggtaccattgaacgtctcaccaagtctctggcagatgtggaaagccaagtttctgctcaaaataaagaaaaagatacggtcttaggaaggttagctcttcttcaagaagaaagagacaaactcattacagaaatggacaggtctttattggaaaatcagagtctcagcagctcctgtgaaagtctaaaactagctctagagggtcttactgaagacaaggaaaagttagtgaaggaaattgaatctttgaaatcttctaagattgcagaaagtactgagtggcaagagaaacacaaggagctacaaaaagagtatgaaattcttctgcagtcctatgagaatgttagtaatgaagcagaaaggattcagcatgtggtggaagctgtgaggcaagagaaacaagaactgtatggcaagttaagaagcacagaggcaaacaagaaggagacagaaaagcagttgcaggaagctgagcaagaaatggaggaaatgaaagaaaagatgagaaagtttgctaaatctaaacagcagaaaatcctagagctggaagaagagaatgaccggcttagggcagaggtgcaccctgcaggagatacagctaaagagtgtatggaaacacttctttcttccaatgccagcatgaaggaagaacttgaaagggtcaaaatggagtatgaaaccctttctaagaagtttcagtctttaatgtctgagaaagactctctaagtgaagaggttcaagatttaaagcatcagatagaagataatgtatctaaacaagctaacctagaggccaccgagaaacatgataaccaaacgaatgtcactgaagagggaacacagtctataccaggtgagactgaagagcaagactctctgagtatgagcacaagacctacatgttcagaatcggttccatcagcgaagagtgccaaccctgctgtaagtaaggatttcagctcacatgatgaaattaataactacctacagcagattgatcagctcaaagaaagaattgctggattagaggaggagaagcagaaaaacaaggaatttagccagactttagaaaatgagaaaaataccttactgagtcagatatcaacaaaggatggtgaactaaaaatgcttcaggaggaagtaaccaaaatgaacctgttaaatcagcaaatccaagaagaactctccagagttaccaaactaaaggagacagcagaagaagagaaagatgatttggaagagaggcttatgaatcaattagcagaacttaatggaagcattgggaattactgtcaggatgttacagatgcccaaataaaaaatgagctattggaatctgaaatgaagaaccttaaaaagtgtgtgagtgaattggaagaagaaaagcagcagttagtcaaggaaaaaactaaggtggaatcagaaatacgaaaggaatatttggagaaaaaaaaaaaaaaaaaaaaaaaaaaacaaaaaaaaaaaaaaaaaaaaacaaaaaacaaaaaaaaggggggcccccccttttcccccgcagggggccccaagacagcccgcccaccgcgctgtctgtccatgtcaacacagcggcccccctcgcagacgggcgcataaacaagcaccacagaagacgcggcgccgcgcgctaaacacacgacaacgccgcgagcgaggcaacacggccgcccgggggccccgctcggcgcacgccaccgcactcccccgcggagcgggcgcaaccactggtgacgacacaaccacctccaacagcacgcatacacagcgcctcggggcgaaccaaaaaaccggaaccacagagccataaccggtgggacgaagcacgcgcggccaccatgagcccgccgccgccgagcgaaaaagactgatgcgcccacacggcgcactctcccccgcagacgaaaccaacctctcatcccgcccgcggcccccagcgcacacaccgaccgcgccgacagcccaccacccacgacaactgaccgccgaccacagctcgagacacccagcacgcaccgcagcgcccgccgacgcaccgcacacgcagccacgccgcagcacggcgtggccagcgagggca

SEQ ID NO: 567345 - DNA, 268 bp, Homo sapiens
aaaatttcagggggttttccccctgaaatttcaatgttttccgggcgaaaaaccttaaattccctgcctttgttagggagggggtttttcccccgttaaccccaaaaagcaaatgggtaatgggggcccttttgcctttttgacattttcttggggatttggaagaacccccccttttccttccccccataaggcccttttagggggggtttaaccacccccgaatttttaattaaaagtttgggccaacccccccctggaggtgcca

SEQ ID NO: 567346 - DNA, 565 bp, Homo sapiens
agaggtacacaacatgttttgctatagcataacatacgacggacgcggagcttagttggcttataacaccaacgaccggtgacatgaccaggcgtttactaagtgcatgctggctacatgacggagactgaattacggagatctttgcttaccaaagaataccctgaaaaacacaatgtgttttggactggtactaagtagcccagggctccaatcacatgaaaaatccggaagatgtgtggagagaagcagatccattgaagaggtgcactttgttaccccaggtattgacagggttaaatttattctctgaatataaatcatgagagtcagagggctggatttatgcatgaagactcatacggtggactgtgggtccatgtgggggcaacagggacctgaagaatcaatggtttaagcagtatagcggtttatttattttacatgaccgcgtgaagagttggaaacaaagacttgttgtgtggaacattgagtgagagaccgtcagaggatgccatcttatagttcattatggaaggggatgggccttatcagcaggtccagg

SEQ ID NO: 567347 - DNA, 1678 bp, Homo sapiens
agatggctatagtgggggcaaggagctgaggagaaggaatgtggaagtccagccactgagcagcgaatgagtctaaggctggaagggcgtggaagattagaacctggtggaatttgccaagttgttgactctgaggcaactttcctctcagaatacccctttctacagtggttgggtcagctttgcttaagtgcaagactagtaggagggaaagcaacatagccctatagggtgaaaactctctgactttcacatttttctttcagacccggagtggcgttggatggaagcgagtcctgcgttcactctgtcattcacggacccgagtgccacttctagcagccatctactttctaatgattcatgtcctgctcattctgtgttttacgggccatctatagacttagttgttactctttggaccactcccctcaaaacttggaattctctcacctctaacatcagaacatcaattccagtggaacagtcttcccatttacaggtcttctctccaactcttcacggaaagtgcctgcaaaaacagaggtggatacgaggacaggttggagctgcagggactggcgagtctgctttcttctactgccctgagcctgaacgcttctgcttaatctgagaatcacatttggtttgttgagcctaatatttgttgagattttgcaggaccctgatcttttgtggtcctgtaaaagatactgaggaatgtctttcagccaagccaagaggatggtttcaataaacctaataatctgaagttcagtatcattttgattgataactttctttgccttgtttgcctgtattttctcctgtttcagggggaaggtggctctgcataaacagagttcagggaaatgaacatgtcacctcataggacatctgatttaggtctcttgcagaatagggtggtgaaagctgaaggaactccctaggggttttagctgttagatcacatgggaggacagcatcttcttccctgccaatttcagatataattggagggagaatttcaggtcttagactataaggatagaatccctttgcttttgcccttgatcacatgtatactaaggtattaagtggcccaagtctttcctttcaccaaagggcagggagaagtgtctatggacagcagggttccaattcttgtcattccaggaatatctgaatattcctggaatgtggaccctgagacagtgctcaggggccactgggagccaatattaggcattgactctcagccaggagtctgactggtctaacaccacactgcaactcctgacctcttgaagtactaagctactttgctgttagtgacagttattacagtttctcagccccattgtctctgccctctgtggcaatggaaggagaatatagagaagacaaaattaaatatagatagacctgagaaggacagccaggatagaattccatttgtgcctattccctgcctcccctcccctcccccatcctaccagttggttattttctcattgcatacgtgatgtgttcactgcctagcctctccctaaagaagagagaagacaagtgggctgactgatctgctctaaatctactgtggtgattaaatcttggttacaacatcctgggaagtttcctgaacaactgtaaaataataaaattattttcagaatga

SEQ ID NO: 567348 - DNA, 142 bp, Homo sapiens
gatctagaggatccctctaacctaatcgccagcagtttgaggcagcctggcaacatggtgagacccgtctctacaaaaatgcaaaattatctgggcatgtggcatgcacctgtggtctcagctaatagggaggctgaggtgg

SEQ ID NO: 567349 - DNA, 170 bp, Homo sapiens
gggacgctcttcagcctcttgggcgcacgggcccagccttccttcaaaaatgtctaacttgttcacggaaattcctgtttccaagtctccagctttgggaggggtaatcaatcttacaaccccccaaggtccaatattgggggcctttctaaaggccctttctaaccttt

SEQ ID NO: 567350 - DNA, 338 bp, Homo sapiens
  misc_feature (78)..(78): n is a, c, g, or t
  misc_feature (114)..(114): n is a, c, g, or t
  misc_feature (173)..(173): n is a, c, g, or t
  misc_feature (176)..(176): n is a, c, g, or t
  misc_feature (314)..(314): n is a, c, g, or t
aggtaaattttgccccaatttgtagggtaatggaaagtgtttttgagcatgtttcaaggtaggctaggctaagctatnagtgttcagcaggttggtgtattaaatgtattttcnacttacagtgttatcaacatacaatggctttatcaagatgtaaccctgttgtaagtcanggnacatctatatgaccaaatcatcctcaaggaagattttgcaggggccaggcacagtgactcatgcctgtaattacaacactttgggaggccaaggcaggaggatcacttgagcccaggagtttgagagtagcctgggcnacatagggagacccccatctctac

SEQ ID NO: 567351 - DNA, 275 bp, Homo sapiens
  misc_feature (165)..(165): n is a, c, g, or t
  misc_feature (244)..(244): n is a, c, g, or t
accggggctggggcccctttttggaaagggtttttaagaaaaacattttccttccccctttttggccttccctccagggttggcccaaatttgttagggaaaatcatcaaaggggttggctgtgccttcataggtcatttagggttttataaaggaggaggagcncaatttttttccaaccttttggggagggggggcctttttgtttataaaaaatgtttatatttaaggggggtttttgttnccgtttttaattaacagaatgggccctttta

SEQ ID NO: 567352 - DNA, 341 bp, Homo sapiens
ttttttttggagacggagccgtctctgtagcccaggctggagtgcaaagatgtgatatcaactcactgcaacccctacctcccagattcaagcaattctcccgcctcagcctcccacgtagttgggattacaagcacacaccaccacacctggccaatttttttgcatttttagtagagaaggggcttcaccatgttggccatgctggtctggaactcctgccttcaagtgatccgcccacctcagactcccaaagtgctgggattatagccatgagccactgagcgtggcccagtttgttcctttccatttagttgtctaggtataaaatcatgtcgacg

SEQ ID NO: 567353 - DNA, 793 bp, Homo sapiens
  misc_feature (71)..(71): n is a, c, g, or t
  misc_feature (76)..(76): n is a, c, g, or t
  misc_feature (95)..(95): n is a, c, g, or t
  misc_feature (108)..(108): n is a, c, g, or t
  misc_feature (117)..(117): n is a, c, g, or t
  misc_feature (133)..(133): n is a, c, g, or t
  misc_feature (140)..(140): n is a, c, g, or t
  misc_feature (148)..(148): n is a, c, g, or t
  misc_feature (151)..(151): n is a, c, g, or t
  misc_feature (158)..(158): n is a, c, g, or t
  misc_feature (161)..(161): n is a, c, g, or t
tatgtagggtgaccatgatagctgccactctgcaggcagttattaatgaagtttgtaggcacatacccctnatganggggggtttaaaatacctnctttccttcctanttcaacaantgaagggttattactnaaaattnatccattnttncctaaanaantaaaaaataaaaaaactgaaaaaaaagatgcctaaatgggggaattgggaaattactttcactggggggggggcaatggagaggggtgtaatacagaataatttttacatttggtggcttggtattgatcatacttgaaagtgaactttaacattgagaaatcgtacagggatttcaagaataagagaataaaattttgtgtgtggctgagaaaaaaaaatgcgggctcggtggggctcagggggggagctctggggggcggttccctttagggggggggaattcatggtcctgggtcacgtgagtcgctgcggtacgggcggtccggtgggggaagcggggttagctccctcgaggggggggatagggtgatccacagaatgggggggagaccggagggaggaggtgggagcaaaaggcggcggaagggcgggagccccaaaaaggcgcgggggtggagggtggttgcctgggcttccccgccctgacggggctcacaaggagggggggctaggggagggggggggagtgcgcggggggggtgtagagataccgaggggtgggcccgtggaggccccgggggcgctgggcggggcccgggcttgcgcggagggggggccgggcaccgtttg

SEQ ID NO: 567354 - DNA, 696 bp, Homo sapiens
aaatcaaataattcaagcactggctttattacaatttatactgggtctctattgtaccctcctacgaagcctcagagtacttcgagtctcccttcatccatttccgacggctatctacggctcaacattttgtgtagccacaggcttccacggacttcaccgtcattattggctcaagtttcctcactatctgcttcatccgcaactaatatttcacgtttacagtccaaactatcacttcggcttcgaagccgcgcctgatactggcatttctgtagatgtggtttgactatttctgtatgtctccatcctattgatgagggtcttaaaaaaaaagaaaacggcaaatgatatacatcgacatattttttcggcggaggaagagagcctgtcgggaaagaccatttgcgaagaacgcacttattcggttggggagccgcaggaggagcccaaaagccgcaagcatgcaaaacgcgtgctgccaaccgcgggacgctacgagaataccccgccggactcaggaaccaacgggcatgagaattcaccagccagattatgaacaccccccggggggcaaaccgtgctgtgatgcgaacgacagcccacaaggggccattgagtcaaaccacaacgtggggttcaatcacacagtgggatagcaagcgaacctcctcaccaacattcgccccgcccggg

SEQ ID NO: 567355 - DNA, 848 bp, Homo sapiens
ggcaagccaccgccaattatccagtgaagcactatcacgaaaaaaactctacctctctatagctaatctccctagcaaatgctccttaattatagaacattcacagccacagaactaacttcatattttatatcttcttcgaaaccacgcttatcgcccaccttgggtaatgatcacccgaggaggcaaccaggccagaaagcctgaacgcgaggcacatacttcctattcgtacgagcctagtaggctcccttcccctactgcatcgcactgatgttacactcacaacaccctaggctcactagaagcattgctactactcactcgtcaaccggcccaagaactatcgaaaactcctgagccaacaacttaagtatgactagcgttacacaatagctttgatagtagagatacctctttagcggactccacttatgagtccctaaagcccatgtcgaagcccccagttcgctgggtcaatagtacttgccgaagtactcttaaaactaggcggctatggtataataggcctcacactcattctcaacccctgaaaaaaaatagctaaccccttcctgtgtactatccctatgaggcagtaattataacaggctccatcttgtctactgaaaaaaagacctaaaatcggtcatgaataacttcttcaatcaagcacaattagcctcgtagtaacaggcattctcatcaaacccctgaagttcaccggggcggcattctcataagctctctcaaggattcaatctggtccactaatagtttggtgagttaggaggctcgaactgggtacccattaactaggggaacctgtggggaccgctccggggaat

SEQ ID NO: 567356 - DNA, 147 bp, Homo sapiens
tgaacagctatacatgcactggcgtcgtttcactaacagctataccatcactggccgttcgtatacacaaacagctatgaccagtgcactggtctgtcgtattacacaaacagctataaccatgcagtggccgtcgttcttacacgt

SEQ ID NO: 567357 - DNA, 1219 bp, Homo sapiens
actcccaagcctactggctgagactgtcgtctgactctgacctcatcaatatatggtcctatttacgctagctgcacaaacctaagcaaggacaagcagcttctgacaagggctaatgattccaagctacgcaggctctacgccaagagtgacaatgcacggaacacttgtgaggaacaggcagtccctatatccttcagcgcaattacttccatggcatactacttcttcccgcaactgcggctcttgacgaagaacttatccaacccagagctcttgcgccttactagctctctgactgacaaccttggacgctgcagctgtctgccaaccatatttggcgaatggcaggcgacagggtcgccagttcattttcgcccctgatgaaatcgtacacggacatatccccgtccaactggactcagccccactgctcgggtcccctcctccacgcagcatcgcacacttcgaacggacgcgatcacaccagccaggcgataccccaatccctttccttcccaccagacactacacctccctggggactcccaacccttctgtcacaaccccacaatgtctgccggcataatgcactctccatatactactcaagcggttcccgcctattagagcccctctctacttacggccaggtcacacttccctagataacaaaccgctttctacaacactctccgggtctatgccgaccttcacttggacgcacccgaaacccgccccaccttggacccataagcagcacctctggacagctggccgccacgttggcagcacggccccttaatatcggctggcctattcccccccaacttggggacggacaacggtcccttctaaccaccctgtgttcgctccaaccgggccttggacgcttacgagactttcaagttcaaccgctatctgaagcccaccacccaacaagtattcccctgttaagggaaggcggccccttgggacatttatcgggctacacaggaaacttcagccgccctctgcacacacgccaaccttacaacccctcccttcacaacgcacgtgggaagtggcccttacaagagctttccattgggggctacgaccacttttcacgctctctccgccacttttcgatccaaccacatacgaacgcgaaccctaagatcacgcacaactcctcatttatgaacaccactctatggggagcttctcccctatgtcc

SEQ ID NO: 567358 - DNA, 856 bp, Homo sapiens
  misc_feature (56)..(56): n is a, c, g, or t
  misc_feature (62)..(62): n is a, c, g, or t
  misc_feature (145)..(145): n is a, c, g, or t
  misc_feature (155)..(155): n is a, c, g, or t
  misc_feature (174)..(174): n is a, c, g, or t
  misc_feature (184)..(184): n is a, c, g, or t
  misc_feature (198)..(198): n is a, c, g, or t
  misc_feature (211)..(211): n is a, c, g, or t
  misc_feature (221)..(221): n is a, c, g, or t
  misc_feature (232)..(232): n is a, c, g, or t
  misc_feature (235)..(235): n is a, c, g, or t
  misc_feature (239)..(239): n is a, c, g, or t
  misc_feature (249)..(249): n is a, c, g, or t
  misc_feature (251)..(252): n is a, c, g, or t
  misc_feature (259)..(260): n is a, c, g, or t
  misc_feature (265)..(265): n is a, c, g, or t
  misc_feature (275)..(275): n is a, c, g, or t
  misc_feature (294)..(294): n is a, c, g, or t
  misc_feature (301)..(301): n is a, c, g, or t
  misc_feature (307)..(307): n is a, c, g, or t
  misc_feature (315)..(315): n is a, c, g, or t
  misc_feature (327)..(327): n is a, c, g, or t
  misc_feature (331)..(332): n is a, c, g, or t
  misc_feature (400)..(400): n is a, c, g, or t
  misc_feature (404)..(404): n is a, c, g, or t
  misc_feature (443)..(444): n is a, c, g, or t
  misc_feature (449)..(449): n is a, c, g, or t
  misc_feature (451)..(451): n is a, c, g, or t
  misc_feature (454)..(454): n is a, c, g, or t
  misc_feature (473)..(473): n is a, c, g, or t
  misc_feature (505)..(505): n is a, c, g, or t
cccttgtctttcctactattgctacaatagttggtaaattgatgttcagtagtgtnactctnatttacaaaggacaatcttgggtggattgcgtttgttgccataaaaggagcaatttaaagtttacttcaaacagcagcaaatntttacgacangcacaccgcaaaattctgnattatccagnaacaagaagaagcntaaaactgacttntggttgttgnggcagttctcncancctnatgaatctgntnngttgttnngattncatcattaangcacttgtggagacttgtnataagcnggtgcncctatatnttttaagaaatntaannaagcacttagggcaggggaaatcatctcggtaatcatggaacctaaggatgtgatttgttttcattgnttgnatgtactacttttatggcactcatatgaaccattatctnngcatngnaancctgggttttgttcatatnttccccagacagaaatgcaaagatcaaactgngcaaatattaaaaaaatgcacatgctgttttattcaaatgcctcttttgtacatgttcatgtttagtgttttctcagaatcagcaactcaaggtactatgaggatttttctcactgacataatttgattacatactaaataagaggatatgttaatatgaggaaatgtaaattaaattagttataaataaataaccaaaaatgtatgtaaacattcaaatgattatctgaacaaatgagattttgtggtgttttctttaacccatgtgatgtcctccaaaattttttgggttaaaatttcacggggttcccagatcactttttcaatattaaattttatttacataaaaaa

SEQ ID NO: 567359 - DNA, 126 bp, Homo sapiens
caatgggcaggcggctgcaacatgcccagtgcgcgtggaggcgctgagggctgctgcaggaggcgctagacaaggatagtggctacccggagacgctggtcaacctcatcgtcctgtcccagcacc

SEQ ID NO: 567360 - DNA, 234 bp, Homo sapiens
attgtcttccagaactgtgtacttgtctggtcagctgtgtatgatcagttatcatacctcagagtctattttcttattgtgctgggacagtgttgctggccctcccgtgtttccaccagaccaagatcctcactcagctcacggagctcagggctacagccagttatttcgtttccacagtcattattatcagttacttcaaattttcattgcttgtcatttgcatgcatagca

SEQ ID NO: 567361 - DNA, 240 bp, Homo sapiens
atccggagagatgcgacagatctcggaggacacacgctctgattcgaggctgttccttcatgaagcccatactccccatgatattggctgccttcatctgtcaccttccacgctgtctccgagccagagattttgctgatggcggcctctatctggaaggtccggggctccctggctccatgttatcactcaccatgtacgccatggactcagttcacttactgcagcataaccatcgga

SEQ ID NO: 567362 - DNA, 509 bp, Homo sapiens
  misc_feature (223)..(223): n is a, c, g, or t
  misc_feature (312)..(312): n is a, c, g, or t
cgagttgaaaccagccaacccagccctataccaaaaggctggattaaagaaaagatttacgtgctcctttgtcggcaggcccaacagggtgggaaataattgtgttgaaacccctgggggggttggggtggccttgaaacacaggtgtgtacagggtcctgtagtggaagttttgtatcaaagaaatccggtttcccctttgttaaactcaacccaaaattgnctgttttaaatgaaatgtgaggttttttttcaatgggaaacccccggcacccccttttttttttttttttttttttttttttttaactnaaacatttttaaaagaatttaaaggaaagtttttttttgcccctaaaggtgggtcccagcccttcaactgtttaaatttattttaaaacattcaaaaaaaacccctttttcaaaatggggggggggggggaaaaccagtttacccatgtccccaaaaaaaatttttggtaaaaaaaaaaaaatttccttttgttata

SEQ ID NO: 567363 - DNA, 952 bp, Homo sapiens
gcggggatggcggtcgcagcgacgtacggcctgggccggggtcggctgggcccccggggctggagtgcggcccggcagaagtctggcgctgcgaggagaagaaggtgctgatgcaccgaggagatggagctgtacgagctggtgcaggcggcgggcgggctatcgaccccgagtgtgcaagatcctggtggacctgctgaagctgatacgtggacccgcctcgcgcgtcttccagatgctcgaagtccatgtgtgcccgggcaataggctagcgagctgagccccaggacccatgcggccgtgtctctgcccaccgtcgagcagtgcccgagaccgagggagaaacaaagggagcagctgcctcgtgggagcattggcctgggggaaagcagcagccgcggaggatcgatcccagacggatggatgacgcacagccaggtcgatagcatagcaggcctgcccaggggcaggcgggcctgtcgaagagcacctacacggggcagcacactaggatggggcagagacttgtagcatcttatgtccccagcaaaggctacatgttaccgtccttcaacttgataataaaccatttcgtgagatgcagagcggtccagggtcatcaccacctaaaagcagttttgaccccctctaaaagccccgcagcgagtccatactgactgaagcgaggcgaaacctggcactggcacacggcgcaggttccgccacagtgacacgaacacacaggcgtccgtgtgaacacgaggggagcaacgacgggagtccacagcctagggccgccatacacgcagagcccgcgtagacgcacagcaagagtcccacgcggcgaaggcctccgagaaagaaacaacggacccagagcgcagaaacgctccaccggtccagctcccttgcatgcacccgtcagcacaacgtcagaccacccgaccgcgcc

SEQ ID NO: 567364 - DNA, 931 bp, Homo sapiens
  misc_feature (1)..(1): n is a, c, g, or t
nggctttgggggctctgcgattgctcccctgttgcccaaaagtagccgttgtattggggcaaacacagtgtgtcctggtgtaggaacaccgcttgcgcttttataacccgccgcctcattcatgtattgttgtcggcccacaaactgtgcctatgttggtgcctaagcgccctaaaagtgggcgcctcccggaaggatctgcggaataagttgcttcccgacgaaagatcgttctggccccatcgtacccaggcgccttatccgcatccacataatgatttgggacggggaccgcccttgctttcgactgggaccagcctgaggcttctacgccaaagggtcttgttacctctcctggggcgcccccaacaccaactagcgagcaggcggcaggcgcagaacaccctaaggcacggacgcgacgcctgccaaaacatgagcagctatacccgcggggcgccctcgggccccttttgccattgggacccaggtcaaggcgcaccccccggcccctgggggaggggcgtcccacgccacccaacgcccaccgcgacagcttgggggaaacaacgcccccccccaggagcctcccagcgaagagaccccacaccacgtgttgacacaggaaggaaaggcgtaaagcgggggccccccacgccgcgcccaatggagagtgaacagcggttggcggagccccgagaaccgtgcactcggcacatgtcaccccccttccatgggcgcccgggcccccttcgccccgccagtaaccttgaagcagcggggcggcagctgcgccgcgcgcttcacgcacccggaaggatgagacacaacaggagagggaggggtcgagacccaggagtcggcctaggaagcacccccacgactcgtcccccccggccccggtaaaaaccccgcccgtccaacaaagaca

SEQ ID NO: 567365 - DNA, 129 bp, Homo sapiens
gtctctttccttgcctttggcgtccatggctcgttgtcccgagaagtatctgtagcggcctggcatgtccaaggcattgaatgctgtcatcaatttggcgctggtgttgtcagctcctacttcgcagtc

SEQ ID NO: 567366 - DNA, 131 bp, Homo sapiens
gctcgacaataccaccaaggattaaaggagaagaaggaagttgtggaagaggcagaaaatggaagagacgcccctgctaaacgggaatgctaatgaggaaaatggggagcaggaggctgacaaggtaggct

SEQ ID NO: 567367 - DNA, 1251 bp, Homo sapiens
  misc_feature (1251)..(1251): n is a, c, g, or t
ccacgcgtcgaatcccagcactttagtgaggccgaggcgggtggatcacctgaggtcgggagtttgagaccagcctggccaacatgtgaaaccctgtctctactaaaaatacaaaaattagccagatgtggtggcacacacctgtaatctcagcctcccaagtagctggcgactacaggcgcccaccaccacactcggctaattttttgtattatttacgtacagacggggtttcaccgtgttggccaggatggtctcgactctcctgacctcgtgatctgtccacctcggcttcccaaagtgctgggacttacacggcatgagccaccgcgcccagcctagccatattcctactctgcatatactcacgaatgtttctctcctttgaagctctatcaaccaaacacagcgcaccatcgcttccccataccctacacgtcctcaatctcctcacccctccatcgaccaggtctgctatcccacacttcgatccaatccatcctcacatctcccaccaacactggctccaacaccattctcgctccagctcaccatgctcctcccgtgtgaactggggaacatcggccactacgaacttcgactggttcaacgcatcacatcgcaacgtctgccgtgaccaagcgttcgccacgcccacactgcttctcccgctcaagcatggaccccgcagtctccccaatacttgcccgcgcataatacgccactcacgaccagaccactcaaaacagccaacgacgcgcccggcgcagatcacgactcgcatcgcggcccgcctgagtggcgtcctaccacacccgagggcacgcacagatcagcgcaagatcccgctgccccacccacgcacgcccacaccaccaacgcagcacacgagccgtgcaccagtccagcacaacgaaacacccaatccacacaccccaatcgcacgcgccacaagcgacacaaagcgaccagcgaaccagccaccgctgcgcacccgcgcactccacggcgaggagcgcaacccaaaagctcacccaccccgggagacccagcgaagacccgaccgggactccccaggccccacctcccaagaccccccagaggcaacacccgcaaggaacctccatgacgagaacgccccgaaccccaacccggcgagccacgcaggcacacgacacacgccacgcgaacagcgcggtcgcgcaccgtcgcacgccagccaaacgccgcgagcacgaccaccggcacggn

SEQ ID NO: 567368 - DNA, 304 bp, Homo sapiens
tgctctgacgtgtcagctgcgtgcgaatggagtccgaggtcatgatgagtgactatgagagcggggacgacggcacttcgaagaggtgacgaacccggccctgtgattccagcagcacacggaagtctgactctcaacttcccccaaagtggcttactttagtgaacctagaagtgatttgagtaattcgggctggtctttgcagcagtgcttccaagctttttttggtgagccgaatgggcatggctgcgctggatcctgcgcctctggacgtgctagccatttccagtgtcccagctactca

SEQ ID NO: 567369 - DNA, 307 bp, Homo sapiens
cccggatgacactgcaacactgattggctgaaacttttgagttactgacagctttgtttttttttgagatggagttttgctcttgtcgctcaggctggagtgcggtggcacaatctcagctcactgcaacctccacctcctgggttcaagcgattctcctgcctcagcctcccgaggagctgggattacaggcattacagacgtgtgccaccatgcctggctaatttttttgcatttccagtagaaacggggtttcaccatgttagccaggctggtctctaactcctgacctcaggtgaaccgccca

SEQ ID NO: 567370 - DNA, 272 bp, Homo sapiens
ggcagcttcggtgcttgtggtgccatcgggccaggacggctctcgtgcaaggagcgctgtgggactcgaaggcttgtatgttcaggccagatcagcacggtagagtctgacacgccgttgaggcggtcagaccggtgcgtgcagtttggtaacggctggggtgttcgagcccgtctctgagtacagagcgcacggccaccgtgctggtcttcctgaagcccgaacggttaggcgcgccggcttggccgagcgcgcatgcacaagcaagggat

SEQ ID NO: 567371 - DNA, 1036 bp, Homo sapiens
tctgactccgcagcagagtcaggccgaggcagatcagaagctgagcgtggccacgaggagcggagagggcccagaaggaactgagagtgcccgggacggtgcgagcgtgcaagaaggagctcctgtgaaccatggtccacgcaaatgcgcggtgcgccgacgaagatccatagtctaaaatccaaccaattcagcgagcgcgtgagcagagccagagagatgcaagcgagtaagacgggcagcaacgctcgaccaagggaccggcagattgggacaaccgggggcgggaagccgatcagatgaaggcttggaaatgatgacacgcgtgagagagtaaattcgtagaatcgcagggatgagaggaacgtgcgccccagatggcccgcacgccgttacaggggaggcagggcatgaccatacacggcaaaatgcccctggggcgaagacaagtgacggagaagcgcagtgggaagagaatagttggaagagggggaggccgcaagtggcaactcatacggtacagggcgtcagggagaaggttgcgcgtcgagtccggtggggtgaaggcccggggcaccctagcgacgggagagtcgtgggaccggggaaggttggaacggacaattgcccagagtccaggggtccaaggccaggtagacgttgatgcagctctcggcgggcccttacgtagcaatcgcttggcagggccggaagacgtttcccgcacgagtgctgaccggtgcatgcgggtggaaagcgaggccttcgagtgcggcagctcaccagtggaagccaggggcgagtgaaatagagccatgttcgacggagtgtcgccccgggacaaggagtggctagagatatcaagggaaagcaacgtgcaccgaagggccgggccccagtgcggagagagtctttcagacaacgacaggcgccgcccggataggggagcacgggcactgttcaagagagcgcccacaaaggggtgtcaccccaaaacacgggggcgcggaccaaacagggtttgtgatatatcacg

SEQ ID NO: 567372 - DNA, 734 bp, Homo sapiens
  misc_feature (97)..(97): n is a, c, g, or t
  misc_feature (320)..(320): n is a, c, g, or t
  misc_feature (476)..(476): n is a, c, g, or t
tcgcaattgtcccccaagttgtccccggaagtgactttcctgtttgggggtcagaaggaagaagaggcatcatcaaccctcatacccatcccccgcngccccttcccccgaccctgggcgcttaccttctctaatgggcgtgccctgcaagcctctgcactcaatgcctggcgagggcaccgggacaatgctggggctgccactgagaagttcatcaagcgggctgaggtgaatgggcttcagcccagggcaagtatgaaggcagtgaaaaagatggtggagcaccagcacagtcactttacattgccaaccatgcctantgagtatccactccataccacagcccttggcccagccatttgcacccacttttgcttgtagtcatggccagggccaaatagctatgcagagcagaaatgccttcacctggcaccaacttgttttcctttcttttttcccttcccctctttcattgnggcacctgggaccataggatgggaggatagggagcccctcatgattgagggcaaaaaaaattgttaaaagtcagaacaggatgggtgggtctccccctaccttttccagctcccccaattttcccataatgaggtagcttctccctgggctctcctttttgcctgccctgtttcctgggatcaaagggtagtacaaaagccctgactcatgccttgagtacatcccatccagcaaataaatggtagcaaaccttttta

SEQ ID NO: 567373 - DNA, 1054 bp, Homo sapiens
gactgacatttttacgtttaattttcttgcagttttattcttgctagtaaaggtaattcgttagaaacccttaaaaaaaaaaaaaaaaaaaaaaaaaaaaaaaaaaaaaaaaaaaaaaaaaaaaaaaaaaaaaaaaaaaaaaaaaaaaaaaaaaaaaaaaaaaaaagggagcgggcagagagcatggattatagatggaaggggtaggcgcacacactagcagagacgatcacagagtgaataggcacgacgcgaaccgtcgacaacgtagtatctattaatatacctggcaggcgggtgcccacatacacacatcggcggcgacacacggccaacaacgcccacccaccaccaactagggagacaccaccgtactcttgacacgccccacatggctacccagaacaccataaagatgataacacagaggccggagagaaaaatcaacgcccaacagggcctcacagggagcaacaactcagacaaaccgggcgcggtgcacgacaacctccgcccacaagatgatcaccacaccaacaaccttactaataaccgcagcgccaagccacaacaccctaccacaaccacgagcccacaaccacaccccactccacccccagtatgttgtagtgtctatctgctaagagatgtggtgtgtgtgtaggtattgatttttgtgggtactagtgctgcctgtgttcgtggctgtgcgggtgttaggtcggtgttgattgtgtgtgactgactgttcgctcacttgctgcgtgttgttttcgtctgtcttgctgtgagcgcttctcacaccggttctggttggcgtgcgtccgattatgacatgcggatcttattgtctggatggttgggctagctttctatgcagttcgtgctgttatggcgtgttctggttctgcggcgttgtctggattgcgtggttgtcaagctgctcttgcgcgcagtgtgcgtcacctgctacttactttgtgacaaacatacaagacaccaaactacacatacacgggacaacgaatcgaccctcctacgcacagagaaaaca

SEQ ID NO: 567374 - DNA, 437 bp, Homo sapiens
gttgattgtcagttttgtctttcacatactatgcacctattgactctgatccctgatattcattgtatgatgaatgaaggatcatagagcatctacgtagtactacgcatgcgtcatcattagtcgattgaatgcaagtagtgcctctattatagatttaaaggaaatctagtgggtttcgactttggccacaacaaacttaaacctctttttttctttaagtccaggaaaagtaagaaccatttggttcatggcccacaataaagtatgcatgttacgtcaccatctgtcattattcaaatattccaaatacaaacatagagcattaacaaaacaggttaaaaacgcttctcaacattttttttttcaataagacaaaaaaggttaatagttacaatggtttacaaataaagtttagtgattgtgcttttaaaacc

SEQ ID NO: 567375 - DNA, 239 bp, Homo sapiens
  misc_feature (8)..(8): n is a, c, g, or t
  misc_feature (34)..(34): n is a, c, g, or t
  misc_feature (60)..(60): n is a, c, g, or t
  misc_feature (64)..(64): n is a, c, g, or t
  misc_feature (125)..(127): n is a, c, g, or t
  misc_feature (132)..(132): n is a, c, g, or t
  misc_feature (136)..(136): n is a, c, g, or t
  misc_feature (142)..(142): n is a, c, g, or t
  misc_feature (147)..(147): n is a, c, g, or t
  misc_feature (166)..(168): n is a, c, g, or t
  misc_feature (176)..(176): n is a, c, g, or t
  misc_feature (180)..(180): n is a, c, g, or t
  misc_feature (191)..(191): n is a, c, g, or t
  misc_feature (200)..(200): n is a, c, g, or t
  misc_feature (232)..(232): n is a, c, g, or t
taagaggnctaaataactcattaaagtttattanattaaaaccaaatatcacttttaaantgtntttgccatttcggaacaatacaaagtagaggcaaataggaacacttaaaaaaaaagttgcnnncccantccnttcccnaaganccagccctccctcaaaaannncctcccancccnaaaagaacccngtccttaanaaaacacttaaaaaaaacaaaaaaaggaaatnaagaaaa

SEQ ID NO: 567376 - DNA, 183 bp, Homo sapiens
ttgcccgatgagctgatcaaggccgcgatgctggacggcgcgggctatctggaaaatcttctggcgcatcgtgctgccgctgtccacgccgatcctcgtcgtcacgctcatctggcagttcacggcgatctggaacgacttcctctacggcgtcgtgttctccggggccgactccaagccggg

SEQ ID NO: 567377 - DNA, 707 bp, Homo sapiens
  misc_feature (58)..(58): n is a, c, g, or t
  misc_feature (133)..(133): n is a, c, g, or t
  misc_feature (213)..(213): n is a, c, g, or t
  misc_feature (222)..(222): n is a, c, g, or t
  misc_feature (236)..(236): n is a, c, g, or t
  misc_feature (263)..(263): n is a, c, g, or t
  misc_feature (294)..(294): n is a, c, g, or t
  misc_feature (298)..(299): n is a, c, g, or t
  misc_feature (302)..(302): n is a, c, g, or t
  misc_feature (305)..(307): n is a, c, g, or t
  misc_feature (309)..(309): n is a, c, g, or t
  misc_feature (311)..(311): n is a, c, g, or t
  misc_feature (321)..(321): n is a, c, g, or t
  misc_feature (328)..(328): n is a, c, g, or t
  misc_feature (332)..(332): n is a, c, g, or t
  misc_feature (337)..(337): n is a, c, g, or t
  misc_feature (354)..(354): n is a, c, g, or t
  misc_feature (372)..(372): n is a, c, g, or t
  misc_feature (379)..(379): n is a, c, g, or t
  misc_feature (381)..(382): n is a, c, g, or t
  misc_feature (386)..(386): n is a, c, g, or t
  misc_feature (389)..(389): n is a, c, g, or t
  misc_feature (427)..(427): n is a, c, g, or t
  misc_feature (483)..(483): n is a, c, g, or t
  misc_feature (486)..(486): n is a, c, g, or t
  misc_feature (512)..(512): n is a, c, g, or t
  misc_feature (514)..(514): n is a, c, g, or t
  misc_feature (518)..(518): n is a, c, g, or t
  misc_feature (557)..(557): n is a, c, g, or t
  misc_feature (559)..(559): n is a, c, g, or t
  misc_feature (582)..(582): n is a, c, g, or t
  misc_feature (594)..(594): n is a, c, g, or t
  misc_feature (609)..(609): n is a, c, g, or t
  misc_feature (614)..(614): n is a, c, g, or t
  misc_feature (618)..(618): n is a, c, g, or t
  misc_feature (681)..(681): n is a, c, g, or t
catgtaaacacaagctttcaatatctatgaatatttcattgcaaatacaccctaagtnacttcttctctacataaaggcagaaactccaagttctgctctttaggaagacatggagggcaagcaataccttangaacaaccattgctatttctcccctttccttgggtgacctaacattttacagggactaacgacataaagaaatattagantccattgantttaaacacaaatntcccactgagggcattaaatatttgangcttatgagtgtgaataaataaacattaggnatanngcngannncncncccccctgangtatganaacnaattngcatagatacctaacantcagtaaaattaaatttnactactnannatanccnacagccggccggggagaagaaacgcccggagcacgggnggcgagaaccgaggagcagccaagagaacaaacgaaaggcaagaaaagaaaaaccnggnggcgaaccccagggaggggcccaagncnaaanaggaggggggtggttacagaatccggcgaggggggcagnangcaggagggaatagtaagtggcnagaaagaagctntctattggaaaaccnactcncaancgcagagtgcggccagcggaacaacgcgttgctagccggttgttatctcaatagatcaagccnattgtgtcgctccaagacgggagcaa

SEQ ID NO: 567378 - DNA, 343 bp, Homo sapiens
  misc_feature (13)..(13): n is a, c, g, or t
  misc_feature (72)..(72): n is a, c, g, or t
  misc_feature (110)..(110): n is a, c, g, or t
  misc_feature (207)..(207): n is a, c, g, or t
  misc_feature (282)..(282): n is a, c, g, or t
agaacagacattnccctttgagccttagtccttcatctgtatttgggatatgacataaaactctatatgggnccggtgcatggctcagcatttatcccgcatttgggagnccaagacaggtggatcacttgaggtcaggattcaggacgagcctggccatgtggtgaaaactgtctctactaaaatacaaaaattagctgggcgtgntggtgcacacctgtaatctcagctactcgagacgctgaggcaggagaatcgcttgaacccaggaggcagaggttntagtgagctgagatcgtgccactgcaccccagcttgggcaacagagcaaaactctgtcttt

SEQ ID NO: 567379 - DNA, 1707 bp, Homo sapiens
  misc_feature (1456)..(1456): n is a, c, g, or t
  misc_feature (1467)..(1467): n is a, c, g, or t
cgcggccttgtcggctgtggctgctggtcgtctgtggcggcgggtctggtgctgtgctgtgctccgtcgcgctgcttggcgcggtggtgcctcgtcggtgccgacacttgtcgtgcgtgtgtgattgtgggcgtccgccgttccaattttttatatatccccgttagcccgcgtcgttgtagtggtgtattgctcacgattaccaccacgcacatctcccggcgatttatttatagggggggcagccacccgcctgtggtatgtgggaaccctcttccctggatatgggggagtttccccccccccccaggcgtggtgtggggtgaccccacaaaagatgcccactgggccgttttgtgttatataaacccggccccgtggtcccccctggtttacccttttttttgtcacccggggttctccctctttaataaggggttttattcctcggaagcggccccgctcgtgggtgtttgtggcccgagaaatttttcttgggcgcctaccagtgaatgagcgtgtgctgttgttgttgcccccccgcgtagacggtgcttaagagtgtagtcctcttcgtcacaggtctgccgcaagggcccccccccgatcttgcaacaaggacgttgttcctcccccccggggagcccccctttatgcgccgcccccacaccccctcgtgggaggagcgccccccgccccgtctttgtccatttgtcggctccctctcttgtcctacatgtctctccgcgcgggtatccgccgggcggctgttttcctctaggcggcgctgcagcgtcgccctctctggtggtttgtggggggcgcgcgaagagatgatccttatatcccccagaggcgctcctttttttcgtcgaagcgccccgcacataagagggggtgattttttcccggccgcccctctcgcgtgggggcccctcaccatcgagaaaggttgtttctcctcctcccgcgggcccctctctcggagatagagaccacccccttcgagatagctcacgcgcacacttatcacacgtgtggagcacccctcgtagaagagtagcccgcagcccactctgtgtctctcccctcgcgggtcctcgcgtttggaaaagatacacaccatgtaggacaattctcacgcggcacccgcgcgtttgtttggccccaccatgtgttttctgttgagagagagggccctgtgagacacgcgtgtggtgagaagagcacacgcgccccgcagagcttgatatgtctctttgtggggagagagacccacacatgccacaccacagagagtttcacaaagcccacagcgacacaccacatgttcgctggggaagactcttctgcacatttcacgcgttgtgccacgcgagacacactcacattttccatggccacgctgagattcacgctataaaaagtgtgctgtagaaaaagagaaatcacgccnctatatgggtnttatagccctcgtagagagacctgggttgacataccaagtctttgtgcgtccaatgagcctgggtcttattgaaatataagaaggtggaccacccacacgccagtcttcccttccagccccggccgtggtgtgtcccctggacaccaacgtcttccattccccttgacttagaggccaccggattgatccttctttttatagagccatatttgccccattaagcttttgggaacccggga

SEQ ID NO: 567380 - DNA, 476 bp, Homo sapiens
ccaactttgtactaggggtgctgtatctttccctttacgccttcaaatagactgctagcctctgtccttatcagcactttccagttgaaattagaaggcagtaaaggcgaaatgacacaaacaacatggaattagcgtggctgacacacagagatcacagcaggtaatggagacaggtgaggacccagtgaggggcatggggaaggggctgtggagctctgaagtgcatttcccacatttagccttgcactggatgtacaaatgtccacatctctaaaattaaattatgtaccttatggagcaatttgcataaaacaattttgtatctgttgtgtgtttcataacctgcggtacatctgtacatttatagattttaaaaaatagtatatatcctgctttgtaacatgctttttttgttggcacatgcctctttatgtccataaataaatacagacgtcataattgccgatgaaaaa

SEQ ID NO: 567381 - DNA, 83 bp, Homo sapiens
ggatatggtgctgcagtccaactaggctttatagggactcgattcgagctcgaattcgaggctcgaattcgagcaagcttcta

SEQ ID NO: 567382 - DNA, 156 bp, Homo sapiens
gacagaccgtcgttactcatacatctccactggtcacgaatcctgacggtaacgggtcacatgatctcatcggtaccttccacaccagcttggaccagctgctgcaccttctcccacttggagttgatgatttgcggggcagctcgcccctgagtt

SEQ ID NO: 567383 - DNA, 796 bp, Homo sapiens
gaatgtggaaaaagcaccttacctttgtgagagactgcatatcaaagtacactgtcctcacatctgagcaatctgtaaaagatgggaaaacacatagaatcatgtggtgggtttactgccctagagagatacagatgacttcaaccatcagtaagctttagaagtgcggctcggccttcatgacaattcttacattacacttggaaatctaattggagccaccatgttcagaaccaatagaatttgggacacactgtcacaaagctggaagagaaaactatcctgagggaagccaatatgatgcagactctgtactgatagattagagctcaaaaattctctgtaagtagtcgtgtataaacttctggctatcagattttaaatggtggttgtatataaaattcgtagttaaatggtctatacgattggtccacacttaaatactcgatatacctcggaagttttatacgaggtggggatcgacgatcgaaaacgtgtcatttactgtcaaacgtggtcgtgggccatcatgtcaaaagagtttgaggaaaacatcagttcgtaagttattctgggaagggtccgattctctattgcggagattgactttatcacaatatgattcttacatctttataccatttacaatgtgtgttctaagatctacagagttagaaattcgaaaaatattccaggactaattctttatccggcttatttatacccaaaggtccagtaacatttaataagcgcaatatggctggcaatgacttataacgccctctggaaattttac

SEQ ID NO: 567384 - DNA, 217 bp, Homo sapiens
agtagcgtatgatgggcagttgaggggcgatatgcatctaggctataatattcggagtatacgtagcggtaagtaacaacggacctctagaatatagtagcatggcaaattaaagcgtgatatcgatcgcgcgcagatctgtcatgatgatcattgcaattggatccatatatagggcctgggttataattacctcaggtcgacgtcccatggccat

SEQ ID NO: 567385 - DNA, 302 bp, Homo sapiens
ggctgttctgaggtaccggaaggctgagagtaaggaggccagtaccgtagctgtcatgcaggtcgataccaggcgtggccaacattgcgaagccccgttctctactaagaatacagaaactagctgagcatgatggagggcgcctgtggtcccagctgcttgggaggctgaggcgggagtaatcgcttgagcccgagaggcagaggttgccgtgagccgagatcgtgcaggcaaaggttgccagtgagtctgcagattgtgcccatccagcctggggcgcacaaccagcaagcacttcgtct

SEQ ID NO: 567386 - DNA, 460 bp, Homo sapiens
  misc_feature (19)..(19): n is a, c, g, or t
  misc_feature (29)..(29): n is a, c, g, or t
  misc_feature (84)..(84): n is a, c, g, or t
  misc_feature (94)..(94): n is a, c, g, or t
  misc_feature (100)..(100): n is a, c, g, or t
  misc_feature (102)..(102): n is a, c, g, or t
  misc_feature (137)..(137): n is a, c, g, or t
  misc_feature (141)..(141): n is a, c, g, or t
  misc_feature (209)..(209): n is a, c, g, or t
  misc_feature (367)..(367): n is a, c, g, or t
  misc_feature (431)..(431): n is a, c, g, or t
ggaaaaaccaacccactgngtaagtgacncatctaaggaaaaaccaacccatcattcatggagggctgctacctgacccttggngccatgagangctccncngggggtggggtttgtccacagagctgctggagcanaccnaagagccagtcttgaccgggatgaggcccacagacaggttgtcatcagcttgtcccattcaagccacncgcttcaccacagacacagtggagccgcgctcttctccagtgacacgtggacaaatgcggggctcatcagccccccaagagagggtcaggccgaaccccatttctccttcctcttaggtcatttttcagcaaacttgaatatctaagacctctcttcnaatggaaaccctccagtctatttataagtcacatagataatggtgccacgtgttttctgatttnggtgagctcagacttgggtgcttccctct

SEQ ID NO: 567387 - DNA, 116 bp, Homo sapiens
tagctcgcacacaactcctgcggatagctactcccgagcccggagaggacccacgcgtaacccgacgccaagtacttcattacgagatgagtattctagaggatacagcactagcc

SEQ ID NO: 567388 - DNA, 430 bp, Homo sapiens
atacgcctgctccttatatctaccccaaggcaggccgtagacactaaaaatataatctcatctcccccaacctttctatctatggagctggccataaagaaattctctgaccttcctatgtctcattacaggccacaagaccttcatatcagaaggggtcctcccccataccctggaggaaggaaagctacacagagagaccaagaagaatctgaacagacaatccttgcagaattatcacactcagtctattaatattagatcataccctaaaaagtctaatcacataactacataggaagactagtacttaaatcatagactatccaataaagtcttaccataaaagacggacgaggacaggatatgaggagctcccagagagctgaacatgtagagatgtagattaggccacaacacagggctccgc

SEQ ID NO: 567389 - DNA, 405 bp, Homo sapiens
atcttccacacaacaaggagcaagctttatactaatagtagctcaaaagccaataaatcaaatcgctaggtggaatattttactattgaaatggagtgatagtttggttaataatttgagatccactaatcctaaatggggtagacccatttaaaatggcctctgtgtacatatcacagttcattaaatagagtctaggtttgaacaggtcattatagtagttagtatataagtaaatggatagagcaaggataggcaggggatacccatggggacacactaggctgagtctggtggctttcataacactgtcaagctttcttataatagtgagattcatttaaatcaccaactataaatttaggtggtattgcttagtaacctcttttggtatacagtcatact

SEQ ID NO: 567390 - DNA, 273 bp, Homo sapiens
tagagacctgtgcatgtgatgttttggtatatgtttacattatggaatgattaaatcaagctaattaacacatccatcagctcacgtatttctcagtattttgtggtaaaacatttaaaatctgctcatttagcaattttgaaacatacagttcattattatttattatagtcaccattctatgtaataggtcactaacacttatttcttgtaacggaagtttgtaccctttgatcaacatctcacctttctccattgcaacacggtctctca

SEQ ID NO: 567391 - DNA, 702 bp, Homo sapiens
cgccttctccagtccgcggtgccatggcccccgcccgtctgttcgcgctgctgctgctcttcgtatggcggagtcgccgagtcgatccgatggagactgatggtcatcgacccccatggacctcctagaaggccgatacttctccggagtccctacctagacgagtgaggatgtaagtgtgggcccgggcaggaatctgatgactttgagctgtctggctctggagatctggatgacttggaagactccatgatcggccctgaagttgtccatcccttggtgcctctagataaccatatccctgagagggcaggggtctgggagccaaagtccccaccgaagcccaagaaactagaggagaatgaggttatccccaagagaatctcacccgttgaatgagagtgaggatgtgtccaacaacggtgtcaatgtccatgcactgtgccgggcagcaagatctgtgagcagaacggaggtcctggcagcatctgaatcgctgggtggcaatcggcgggctatcctctttgccgtgttcctgatacctagctggtcatgtaccgtatgaagagcgacggatgaaggcagctatggacctgggcaacgaaacccatgctactcagaaatggccccaacaactgagttcttacgcgtgaagcttgctagtgggcgactgggcttggactgaatcgtgggagggaagcc

SEQ ID NO: 567392 - DNA, 825 bp, Homo sapiens
agcggatgatgctcacagggagcctggacaatcgaatgaggcctcccagcattcaggggtatatggaaacagctggtcaggaaatggtgactataaatatcagttcaaaaactcctaatacaagatgcttaggatggatcaattcatgtatccattcatttattccagtaaacatttccagagtgcctcccatgggccatgctcggacctaccatcgaggaacacaggaatgaatgatagatccatacctcctgagcagatggggctcatgtactatagaagttcaggatgcattaccccatatctcagagaaatatttcgtgcctaagtcccagaaaaagacgaagaattccacaagagggatacagagccatcagaaaatagctctgatgattctaactcagctgaggtaccatcaccatcttcccagaatacgcatgggaagaaaagcgagagaagcaaacgtacggatggctgggacttgcaaattacaaccaggaagcagaaatgatacagcttacatttatgtggatgccttcagacaaggccagactgagagatggaggcacacagatgagagaccccgcgaaggaacctggaacagaacaaagaggacaatgagcatgtgcgaggaagtcagagacaacggcgaaccgaccaacaaacgacgagacataaaaagaaagagaacagggaaacgagctagaaccaaaaaaaagggggcaataaaatcacccagaataaaaagtggaaagggaacacaagataataaaaggaaacgcgaagagcccataaacggacagaacaaggaaaagaagaagcaga

SEQ ID NO: 567393 - DNA, 930 bp, Homo sapiens
atttatctattactctccatattcgagcactttataacgcacatgagtcaaattgctaatgaggacaacaggctccccaaatcagcacaccaaactgtcaaagtggtgatccctcttcatttgacatgctcacaaagaggagaataagacaagaaagcaagctaacccagaaacagtgaggtgactgtgcgcctcaaacacaggaaaataaaatgcataactatactgattgtatgctgctcaaatatcactctatcatgccatcgctctcgtacattgtgaactaagttaccaatttctatctctaacttatgatatcctgcaaaactgtaccatcagctcctggctacgctcctaaaaaccaaagaatctagaaatcccttattcaaaaaattataatagaagtactagtggagacattttaggtatataaggaagccaagatactctttgaggatacatgtgggaactaacctaccatgaataccttattgtgactcgcgttaaatatcactataataatcctcctctcttgatcgtaattactatgaaacattatagacagcatcctatcctttttaagagcggtggtattgtcatgaagctccacagaacttaatttgttttaaattggtaaaaatagatatcgcgccttcaccttcatattctctactgcagggcagagcatatcgatcttcctaaccaactaatggtgaattgcctatggaaaacaccatatctgacatactatcgccagcctaatggatctatcatagcaatagaacaagatatgtgtcccgcacacaagttgcttttaacgtcgtccattttgatcttgctaaccaaattcccctgtctacatgcacacataccaaaacaccattcttcattgatgattatctaaattgttgcctcaggagaggtacaaga

SEQ ID NO: 567394 - DNA, 107 bp, Homo sapiens
ccacgggcagatttagatctttgacgttgggaaattctggcagcagtgttccgagtttggaccgggtgaatatccactgtctgtttgctcacttctttcttgcccgt

SEQ ID NO: 567395 - DNA, 878 bp, Homo sapiens
  misc_feature (4)..(5): n is a, c, g, or t
  misc_feature (258)..(258): n is a, c, g, or t
aggnntgtggggtgcaggcgtgaggggcgggggggggggggcgactggccggggggccattgagggttcgccgaagggtgtggacccctcgggttcaggtgtccccgcttggtccgaacggcgtgtggctgttgtcccatatcgaaggccattttgtgtagcgggtttccccgccattggctttttccaccgggcgaaaggtccgggtgtctacagaagccgctggtgccccccaattatatggtgcatccccctgtngtggaatccgctccttaactgtcaacaccaacacaagctggtggtgccggaaacccgtttttttatacgcccggagaactcgtctattaaagatgggtgggaggaaacacatttgcgcgcgctcctggtagaattccccgcctcagtggggaacacccggtttccggggcgagccccagtacacaagtccggtacaagggtgtcgcaccagtgccccccctataggagccttacaaggacctagagttgtgggattactggtgtccccccggctgcttgtcagcgtctggcccccaacaccccagttcagagagggcccctgtgatagtagcttccctcgaggcgcagccagtgttctttcaagaataccacgcgcctctctgttacatcccggcaaaaagttgccctcccggcggctggtaacagtggcggtgcatccggcagtgaaagtccacgcgcttgttgggggtcggtgaggccggacgggaccatctctcgcgggcccggggagctttcaagaccccccttttcggggcactctggcaaatccgctgccattgccgcgtacaccaaaatcatttcataacccgcccccaaaaaatataaacaacccacatgac

SEQ ID NO: 567396 - DNA, 128 bp, Homo sapiens
ctcaaagtcagctccccagaccactgctcgccatggacaccggtgtgattaatggtggattaattgtcactctcaccatccggctactattgcatggaaggaaggttggcagtatcatcggaaggagg

SEQ ID NO: 567397 - DNA, 242 bp, Homo sapiens
agaagattggcccatgcacaagctggaatgttctccatggttgttttgggaaaactgaatcctcggagactgtagactatcagcacggattctcgccaaacagaaatccacccagagagacaccttcggaaaattgttagctgtgaggagtttgattcacatctggatagttagacaatgagagaggtttgattcagagtgccatagctgctctcatcactttactcaggcatctggattcc

SEQ ID NO: 567398 - DNA, 118 bp, Homo sapiens
caacgatggtcctcagctccgcgagagaagtgatggctcttgctctcaggggagctccgaaatgtcgcatttattcacaggatacgtgtgtgagacagcagttggacaaaatcaatgc

SEQ ID NO: 567399 - DNA, 307 bp, Homo sapiens
  misc_feature (16)..(16): n is a, c, g, or t
  misc_feature (35)..(35): n is a, c, g, or t
  misc_feature (123)..(123): n is a, c, g, or t
  misc_feature (128)..(128): n is a, c, g, or t
tcatcgttcccccaanactaattaatcacaaacanctggggctgggtgtggtggctcatgtctgtaatcccagcactttgggaggccaaggtgggcagatcacttgagccccaggagttcaanaccancctgggcaacatggagaaacacagtctccacaaaaaaatacaaaaattagccaggtgtggtggcacgtacctgaggtcctagctccttagaaggctgaggcgaaaggactgcttgaacctgggaggcagaggttgcctcctacactgcactccagactgggtggcagtgagaccttgtc

SEQ ID NO: 567400 - DNA, 207 bp, Homo sapiens
actcagatcctgccggcagaatccactccactatccgccctggactaataggtgaacggattacgagtagagtagaatcccaagcactcactactgactggctatactacccaaatctagtagctggaaaaacaaggctccagctagcaagccctcataggacaaatgagtccaggggccagcccacgcagtgagcgcagtgcacca

SEQ ID NO: 567401 - DNA, 358 bp, Homo sapiens
tatatatatatagtatgtttatgtatatatgtgatgctgataagaatagacggtgctattctgtattctatatgtaaaaacaagacaagaaaaaatagagaattctacatactgagacatctgctctccttccttataatttcaatatcttgttatcgatttattatatttggtgctactgtgtatccgtagtaattgtggggaaaagatattaatgtcacgtctttgtctctaggtgcaggtttttcgagatagttccgctagtacatatattatttataaacaacgagcagagaaagtacagcattatatcttaataaaaaaaagatgcctttggtattaaggaattaatatgctg

SEQ ID NO: 567402 - DNA, 1553 bp, Homo sapiens
  misc_feature (819)..(819): n is a, c, g, or t
  misc_feature (1553)..(1553): n is a, c, g, or t
ggctactccaatcaaaattccttgttagttcctgagtacttcagggcagaatcatgaatgtcattggagaagctatcgatgaaaggagagtcgccactcacaaaacttccgaagacatagttgtgcgtcccgatatcatgcatggaatgctccatgagcttctatgggaagaatgcagtgttgacgctaggcaccaatgctgcgtagacctgattatccaacggttctcgatccgtatgccttgcataagtctccacctaatgcctagatgggttgcgctagatacattcggagcgtatacattggtgagctgcatggaactcgtgttagaagactcgttacatgatatatgtgcagttgacatacaatcataatgtccgacgcaaaatgccccatggatcggttgtaacgtcgtcggctgctgtcgacttcggagtgttcgcgggtggagaaaggcgtgaccgccaggtaagagagcgtgcacagggagtgttagatggacccaatgcgagaatgccacctctgaaatctctgggtttcgatttaattcaaaccttttgaatgacgcatggaacgaacccgtctgattgggggggcctgccatcgcgatagtactagtggtcacacacttgaaactggagaccaccacgcgtgcgttgaccttctggctcgaccgcagcgcgttaagcgttcctgagccttgtgtggctggatgctgttgagctgggacatacctctcaggtaggacaccatagaaagcggttccacacgaagtgctatctttgactaatttgaatcgagtagatccactctcgttgntgcgggctttgcagagcgcctagagcctagggtatcccgaggaagacagttgctccatgtggccactattgatctcgtgcggaccgcgcaaaataccgccttagctggacctagcatggggagccttaaattcgagaaacgctttaggccacctggagagggccaacgttgaacccactgtggccgattacctttaattggcatgtggcacaacaaggaaattaaagcgccaaccctgtgaacccaaaaaggagacgtgggaaatacataatacaaccctcctaggtcaacgaaaggcgtaaatgccgtgatccgtgggaccttggttctcgaattaggaactccggaagacttgaaaaccgcctcagcacccgtgtggggaaacctaaccggttttattggccccggttttttgggacttgggctaacccaactggataaccgtgggttcggacggttttgcaccatttttgcggttggatagcgtaaggggcggcagtacattatttgccaacaggctcggtggggtcgttcccttcggataaagaacacgtccgacaccgtcatacagctaaatatcaaattgggaaatgccccaacacaatgttgatatgggcggaggtcgtgaacagcaaattaaacagcgatatggttctgccccacgttgtggtgttggccaacacacacggactatctttgggagcgacacttaattagatatatgccccgtctan

SEQ ID NO: 567403 - DNA, 125 bp, Homo sapiens
  misc_feature (118)..(118): n is a, c, g, or t
gtttcccaccaaaatccatcgaagaacagagaggccacggttgaattagggaagagaacagagcacagttcagtcaataattcacgcggagcaattggaaatagatagagaggttgangattcat

SEQ ID NO: 567404 - DNA, 149 bp, Homo sapiens
tgtggtggtgccttctgggagaagagctgagatactcatgccatgtacagcatgaggggctgctgaagcctctcaccctgatgatgggagccatcttctcagtccaccgtcccctttgtgggcattgttgctggcctggctgtcctagc

SEQ ID NO: 567405 - DNA, 949 bp, Homo sapiens
gagaagtagccggcaggcggaggcaggcccgagggggcggttgcatgtgtgccagacgttcgtagcccactgagcttcctcacgccggctgtcgcaggcctagccccaccggcggctctcctgcgcttccggggccgtgggagctagtgcgcctgcgtgccggccatccgcgcgccttgcagctgtccttgcgtcggcagctggcagacagttcctgcaggcttaccgactggcctcatctggttccgtggcgcaccggagggcagatgtagacggtgggtgacaaggacgagaacgacggtgggcagctcacaaaaggagaaagactctgatgcaaatgaaagtgaagatcatttggaatctttaatatgtaaagtaggagaaaagagtgctgatctttggagaagaactaaaaagttggaatggatggtaaagataaaggtgatcatatagtcaatacaaagcagacaagaatcgctgaaggggaacatctgccgctacaagaagtggatgcgacctaagtaacatgatgtacagcggaaccgacatacatcgacaacagcggaatgcgacaaattggatgttccagaaattgacaacaagcgagtggacggaatggatacacacccggagtgagagaacaaacaaacaagatgagaggacaacagttacgggagagaggtatggggaccaagaagtggagagggaagcgaggaggagcagacaaaaagggaaagagagagcaaggagggcagcaggcgaagacagcagggacaaatgaggggacaaaggaacaagcggggagcacgaagaggagagagacgagacgacggaaccgcgaacaggcacgaaacaagcgagaagaagaaacaaaaacggagcgcaacagacgcagaagcagcaaaggggaggacggggacaaaaagaagaaagagaaagacagcgctac

SEQ ID NO: 567406 - DNA, 902 bp, Homo sapiens
ataggaatcgggagctcgccaatcctgtgggcatgctggatccagcagagaaggatgaacacagggcatgcctgtgacagctcgatgtggggtagttacgtcctgataagaagctgacgcggtcatatacctcctacgccacaggtaccacatggcaggaacttggatgagattctcagggtagtcatctctctccagctgagagcagaaaagaatgggttgtcaccccagttgattggaaggatggggcatagtgtgagtggtccttccaaccatccctgaagaatgaatgccaagaaaattttcccgaaaggagtcttcacaaagagctcccatctggccaggatttacctccgttagacaccccagcctttaagtctctgtggagaagctggtgctgtgagccaagaggatgtcagctgccaacttgtgtgtcattcctgcagcacattccataagagcacatcctggtgtcatcacagccaaggttgctcaggttgctataccaattggttattaaatgacatgggcactaacaagttgctggagattcttgtatactctctgctttcagccagtcaattccatgccatacattaagcacctctgggtggtactggtgcgcacctatgttctgtatttcagcacgtcaaatcctgtggatctctgcagggttggtgccactgaactccatttggggggcggtggccaacgttgttcctccatcgagagacttcaccgttttttaaatggccaaacgtccctccgtcaccacttggcgtcgggactgtgtccactctcggaatatcacgaaagcgcgatgtaaaacaagcgcacatttcactgtgggccacctataaagagcgttattttcacttgccagggggacgatttccccaaga

SEQ ID NO: 567407 - DNA, 154 bp, Homo sapiens
ggccggtaccgaccagagactcgagacaaagtgggacggatgtcatctgactcttcatttatttctgactgtgatttatttgggagtggagcgcactgtattctaacgcaaaagaacatgtcattgtaggttttcttaccaataaaatgcattt

SEQ ID NO: 567408 - DNA, 174 bp, Homo sapiens
tgagccggtaccggtggaatgacgtagacacacgagcatatttcacctcgctaccataatcatcgctatccccaccggcgttaaaatttttccctgagccgaaacactccacggaagcaatatgaaatgatctgctgcagtgctctgagccctaggattcatctttcttttcac

SEQ ID NO: 567409 - DNA, 100 bp, Homo sapiens
aagtaccacttggtgcgagctgctgtcgatgctgctgtggtgtgtgctgggtgttgtcctgtgtgatatcctcacgtgatgttctgcggcccggttgatc

SEQ ID NO: 567410 - DNA, 217 bp, Homo sapiens
aggtatatcgatcgtataggtagggaaaccatgcaaaggtttgtttcagtgtttccgtgtgtgtgtgtgtatataaatatcaaatccctctcccatcggattttttttcgtgttcccacaattaaaaaatttacctagggtcaagtcgggagagagaaatgtacttgagatgaatatgttctgttactataggtatccaataaattgtgtcaaactc

SEQ ID NO: 567411 - DNA, 338 bp, Homo sapiens
tctgagggggttaattccccatgaattgaggaaatcaggacgttttcatggaggacgtgaattagcaggattcctaatgatgagaccaatgaagttggccatttcaagctgaaggaagcatgcaagcttatttggcaaaggaagttaatctaattgtcaaattctgaatgatttttggtggctgtcttaagtgctgccctgagataaatcttaaaaatgcttccatactaagtcacaatcaattagaagggtctgctctggttacagcatggcaagaggtatctgcaataactgccatagacaaaaaaatttaaagaaaaaaaaaaagggcggccgct

SEQ ID NO: 567412 - DNA, 158 bp, Homo sapiens
cttccgtctgcccactccagcctgggcatagagtgagactccatcttcaaataaaaaaacgttcagttaggctggcgcgcggtggctcacgcctgtgatcccagcactttgggaggccaaggtgggtggatcatctgaagtcagggtcttggctgagg

SEQ ID NO: 567413 - DNA, 215 bp, Homo sapiens
  misc_feature (165)..(165): n is a, c, g, or t
ttgaacctgtgaggcaacatagcaaatcctggtctttactaaaaatacaaaaaaaattagccgggtgtggtggcgcatgcgtgtggtcccagctactcaggaggttgaggtgagaggattgtctgagctcttgcctgagcctgggaggtcgaggctgcgtgagtngagttcgcaccagtgcactcccgcctggacaacagagtgagactgtctca

SEQ ID NO: 567414 - DNA, 433 bp, Homo sapiens
cgactctagagcatcccgtccccgggtagcccagatgcgtagagcctgatgtgtctcagtttgtcctcactgaggggaaccctcgctgggaggaaacacatctgacctacaggattgaaacttacacgccagatttgccaagagcagatggggaccatgccattgagaaagccttccaactctggagaaatgacgcacttctgacattcaccaaggcctctgagggtcaagcagacatcatgatatcttttgccaggggagatcatcgggacaactctcctttagatggacctggaggaaatcttgctcatgcttttcaaccagtcccaggtattggaggggatgctaatttggatgaagatgaagggtgtaccaacaatttcagagagtacaacttacatcgcgttgctggtcatgaactcagccattctct

SEQ ID NO: 567415 - DNA, 153 bp, Homo sapiens
aggagcatgcgtatatccagctactttgggaagccgaagctctggggggactgcttgagccagtgttagggtgcaatgagccgtgatcatgccaccaaactccagcctccacgctccagcccaggcaacagcaggacatcctgtctcaaaaaa

SEQ ID NO: 567416 - DNA, 517 bp, Homo sapiens
  misc_feature (469)..(469): n is a, c, g, or t
  misc_feature (498)..(498): n is a, c, g, or t
gtcacccaggctggagtgcaatgggagtacgatggcgcgatctcagttcactgcaaacctcaacctcccgggttcaagcgattctcctccctcagcctcctgagtagctgggattacaggcacacgccaccacagccggctattttttgtatctttagtagagccggagtttcaccatgttggccaggctggtctcaagctcctgacctcgtgatctgcccgccttggcccccataaagttctgggattacaggcatgagccaccgcacctggctctacataattttaagtattgattaattttcttccagacagattagatttttttttttttttaatgagatggtcttgctctatcgcccaggctgagtggcatgtcttggctcactgcaacctctggctcccaggttcaagctattctcctgcctcagcttccctagtagctgggactacaggcatgcgccaccanacccagcttttttttttgcattttgagtngagatgggttttcacctgt

SEQ ID NO: 567417 - DNA, 567 bp, Homo sapiens
  misc_feature (11)..(11): n is a, c, g, or t
  misc_feature (482)..(482): n is a, c, g, or t
aggatctccgncagaatcacactcaaatcagccggacaaggtggaacacatctgtagtcccagctactgaggacgctgaggtgggtagatggcttgtgcctgggaggcagaggttgcagtgagctgagatcatgtcactgtggtacagtctgggtgacagagggagactgtttcaaaaaaaaaaccagaaagattgaagggcaaaactttaaaattagatttcccatgtgatctaacaatttttatttcgggattattatattccaaaattattggaaaacaaggaaaaagaaaaacagagtctcgatgagatattggtacccagtgttcataacagcgttatccacatttagctaaatggtggaagcaacccaatatatcatggagggatgaatagatagggaaaatgtggtatgtacatataactgaaaattcatccagggtcaggagggacggtactcctgacatatgctacaacatgnatgaaccttgaggataatcatgctaggtgaaataagccagtcatgtaacggacattaccatataattcacttagaccttggagtg

SEQ ID NO: 567418 - DNA, 341 bp, Homo sapiens
  misc_feature (33)..(33): n is a, c, g, or t
  misc_feature (40)..(40): n is a, c, g, or t
  misc_feature (42)..(42): n is a, c, g, or t
  misc_feature (55)..(55): n is a, c, g, or t
ctctacaggagctttaaaaattagcgagatggncgagggntnctcatgcttggtncagctccattagacctcactcaagcaggactaggtctcactctgggctgtcactggcctcagagtgatctcaggaagtgcttcctctccctgcagccaatgtccttgtttgcgaaggaggcagcagaaaaaaaaaaaaatttattggagcttccatggtgtgtcgagtattttcacattcaattccctactatctgtgaggcagctagcatcatctgcatttaacagactaggaagttgaggatcccagaggtgaaggaaccaacccaaggcccgtcggctaattt

SEQ ID NO: 567419 - DNA, 445 bp, Homo sapiens
gtccgaggattctaattttatggtttatcgtagatgtagatacatgtattcataatacataacatagggagaactaaagcaaagattattctgtctcaaatgtagtgtcatattgcaaaaaagaaaggtgtaattagctgatttaacagaaaaatccttggtgatatgacaaatcatataacctcggaaaagcatgggaaagagaatggctataaagactcaactgtagttggtcatcggaaagagattaccgagcacagctgataagacacacaaacttacagaacaatgaagtcaaactttggaggatctgccaaccccagtcctgctccacacttttcacttccataactatcatctttggcctaagacatctacacaaaggccagactaaggagaaggcaatagaaacaggaaaggggtaagggcacaaatcaataaaaga

SEQ ID NO: 567420 - DNA, 103 bp, Homo sapiens
atgccgctgaatagaagtttggcagagcccaaagcccagatctggagtcagtgcattgatggtggtcacttgccggggtcggtctgtctgcaaggaagccacg

SEQ ID NO: 567421 - DNA, 1358 bp, Homo sapiens
atcctgacccaagcacgtggctgacgagatgctgaacgacatgaagaaagacgagagccagagaggaccagcagcagttcaacagcatgtacatgtaccgtacacgagaacgtcagacatcctctttgccgacatcgatgggctttacccagctgtcattctgcctgccggtgcccaggagcttgctgacgcctgctcaccgagactcctattgcccgcctttgaccccctcggccgctccatccccaccagcctgcgcgcttcaccgatcctgcggcgcacctgctcctcactgcctctcgcggcttgcccgcctcaccgcccgcgcacctcgccgtcttgctccactcctccatcggccgctcgcccatcggtcggcccgcccaccctcgctctctcgcgcgccaccacgacaccgcacctcccgctcggccctcgcgctgctccccgctcgcccactccgccgcccccccgccgcctgcccggcggcgctccctggctgccccccccctcccgctgccacccgctctccgcacctgctgcgctccgcactgcattgtcccacccgccccgccccctgcgccacccactggcgcgcgacccctgccgccccacctccccctgcgacaccccccggtcgcctacgcgcctacgctcaccccaccacgacaaacccccaccgctcccccctcgcccttcgaccacccccacggacagcctctcccgcaccgcccgcgacccaccccacgacgcacacatgccggacagcccaagccccagctacgcctgcacccccccccccccacacgccccgcaggagcggccccgccccaccccccccccccccccccagccccgacccacaatcccacccggtcaccctcaccccaaccgccacaccgccacgccctcacaccgcacacccaccccccccgcccccccccccccccgccaccgcgcgcccgccctccacaccgccccactcgccgcacctcgtgacagacaacaccacggaacgccacacacccagcccaacagcacgcacagcaccggcccccaacgcgacccgacccaaccactacgcccaccatacggataaccggacgcggaacagaaacggaaaccgccccacaaccccggcgcgacggccataccccccacaacagacgccaagcacggcacgcgaccccagcgcgctctaggcacaacaaacaagacccacaagcacaacgcaggacacacgcaggcacagcacgccacaccgcccacacgacaccaacaacccgacgaacacatacccacgacacgccccacacaccggcagagcagacagcacacaccaagcacaagaaaaccaa

SEQ ID NO: 567422 - DNA, 205 bp, Homo sapiens
aatccgggcagtgcgtggctggaggaccagatgccaacatgacagaagaaaatgagtatgctcatctaccagcattatggatactacagcagaatataaagcctggaaaggcagactggactccatctagcagagcactctccaactcggacaccgggatgttgagcgcccctgggatggtcccagctgccgcctcctcgcgaga

SEQ ID NO: 567423 - DNA, 129 bp, Homo sapiens
gcttataccaccatggacttacaggtttgcatgggttccaaatactggctttatggtactgtttttcggaactacttgtgggactatagttttggttgtggtatagagtggtatagggtggtatcaggc

SEQ ID NO: 567424 - DNA, 367 bp, Homo sapiens
atgccggtagtactggatagcgcgacttcacggtcaacttcacggacgtctgcacggggctgtgcaagtgcatcacaaagcgccgtggtgctagattggctaagtatggtgcgtattatgagaccaacggtgaaacaagagttgtatgagaatcttgtcgcggacaatgatatatatgattatacagacaatacccacagatgggaatacatgtgtgatggaattgctcattatggcttacgcactgaagactgtctgcgacaggaacattgttggggtaatccactacttcccatacagtgagcataccaagatgatggaggtgcttcattgtgtgcaggcagctagcatgcatgctgtcttcgtg

SEQ ID NO: 567425 - DNA, 513 bp, Homo sapiens
  misc_feature (123)..(124): n is a, c, g, or t
ctatattgataattgaataaaatgtcaactttcagtaagaagaggttggagaaaataaagtcatttttttcatccaagttcatggttccctgggggagaaggtgggccaaggttaagaacccnntaaatgggtgaccctttcctcttaccccacataaacgtgtgtgtgtatacatacatagctatcaaatatatatgtatgtatgtatatatatatacacacacacacacgtacgtatagacacacttcaaatactgttccagaactatctcctataagttcttaacatattagaaaatcttagtatttatggatttgtgaaacaaatttcctttttttttttgccactgaaggaccatgcctcttagagatgggttagagaaaaacagtcactaccacaggggttcctagactgtgtcctcagtagccccaggtttccattagaggtgtttcagaagtacccgcgttgtgtatgtgtagggttaaggggttgatgagaaggtccctgccgc

SEQ ID NO: 567426 - DNA, 1023 bp, Homo sapiens
tagccaggcatagtgttgtgcacctgtactcccagctaatcaggagggtgaggtgggagaatcacttgagcccaggagatcggagatgcagtgagccatgattgcaccactgcactcctgcctggttgacagactgagaccctgtcaaaaaaagaaagagaagaagagaggaggaaatggaaagaagaagagaaacgaaaaaggaaaaaaaaaaaaaaaaaaaaaaaaaaagtgggctgggccgcgcccctgggccacgcgaaaaagccttctaagaacaatgccgctggggagcgccgcggggccccagtgaggatacagtgaacagtgtggccactaggggttacccagggaaaaccggggcccaggacaaaaggggcgggggaattcctcccccaatatcacaaagcccccgcgggggaaaacggaaaggatcgggaaacaaacccgaagcgggcacatagcgagggacaaaaaagcgggaaccatatcaccgggggatcccaagggagagaccaggagtcttaaaaatttagcccccggccgggggggaaaacgaaacagagggaagaaagggacgagccagagaagagcagacatacagagggagaacacagacagaacgaaaaaccagaaagaaggggaacaacacaacaagaaacggaaccgaaaagagagcgaagcggcagcacgtccaggagcgaagggggaggagcggaagggacagggcggcagcggagcagagcgcgagaggcagacgagacgaagcaaaaagtagccgagagcagaggaaacagggagaggacgggagaaaagggcggggagagaaaggaaaaagagagagaggggcggaggcgggagaagggggcaccgcgcacggacagagacagagaaaaggccggagacaccggcagaagagagaagagaaaggaaacgaagcgggggagggacaccaggcaaaacaaacaaggaaaaaaaaagggcaaaggagcaggggcgggaccacagggaaaggaaggaaga

SEQ ID NO: 567427 - DNA, 210 bp, Homo sapiens
acctcctaccccacgagggataacccagccatgagaaaacatctgcgacacccagcggtcccagagtccacgtctggtgcagaatgtggcaaagcttttgtgtgagagttcaaatactaaagacgacaccagactggttcgtgactggagagaagccctttcagatgcacggttcgaacggctgtggtgaaacgcattttcactgtgact

SEQ ID NO: 567428 - DNA, 316 bp, Homo sapiens
cacttgaaggccctcctcttccttccgcgtacaacggactgattcacctgcaagactgtgggcgtggatccggctgccgacggcaagaggtgtcgtggtggtcattaagcggagatccggccagtgtgaagcctgcctcctcctatgtgcggaccaccatcaacaagaatgctcgcgccacgctcagcagcatcatacacttgatccgcaataacaagttaccgaccctacctgcgcatggcagccatccgcagggccagtgccatcctgcgcaggcagaagcctgtgatggtgaagaggaagcggacccgcccca

SEQ ID NO: 567429 - DNA, 292 bp, Homo sapiens
aagattcccccccgggagatgttcttgtctgaacccgacgaatgcttcaaggtcgatgaaaatgtcatcatggtgtgtccacacatgacatggagggcaatgagctcacccaagggcaagccatgaatctgaataagctcttcccggctcaggagaagctctacaaggaatatctgcagatggcccagaatggaagcttccactgagggggcacaggactgactttttaaaccattgtggactagaggctgctgactgcctcaacgacaatgtcccagcgctcctatcatgt

SEQ ID NO: 567430 - DNA, 593 bp, Homo sapiens
tgcggtggcttatgcttgtaatcccagcactttgggaggctgaggcacgtggatcacttgagctcacgagttggagaccagcctgggcaacacagggagactgtctctacaaaacattttttataataataaaattagccagacaccgtggtgtgcgcctgtagtcccagctgcttgggaggctgaggcgggaggatcatttgagcccagagagattgaggctgcagtgagctgtaataaagatactgtagccgggtgctggctcacgcctgcaatcccagcactttgagtggccgaggcaggcggatcacaaggtcaggagttcaagaccagcacggcaagatggtgaaccccctgtctctactaccaacataccgaacaattaggccgggcatggtggcaggcgcctatacatccccaagtctgctcaaggagggctgacgcgccagacgaactgctgtgaaacccggggagggcgcggaggtttgcaggttgatgccaaggatcaacgccaacttgaacttccaagccctggagcacaaaagagccaagtttcccgattctcaaaacaaagaaacatacaaagcataaaa

SEQ ID NO: 567431 - DNA, 1168 bp, Homo sapiens
gtcctgctaaaatagaggagcctccaccggctaaagttcctgaatgcacctaagaaaattgtgcctagaaacagaaagttcctgctccagttcctaaaaaggaaaaggtgaccaacacactaaagtgcctgtaagagccaaagaaaccagttaccagaaataaaaggttcctccaacaagctcattaacgcatggcacagaacctcatcccagccaaagtgccagaggaacccgaagcagagctgtcccagaaagaaacaacgcactagcacacacacacctacacaagagagcgaggcaaccaaccagctaaacagcgacctgacatacacgaaaacaagacaaggccaacaacgaaccacaaacgcaaacccacacgcaacgctccacacaacaccaccaccccacaaaccccacacacacacaatctactactcatacactgcaccctacccacaacaccccaacactatactaccccctacccaactcacccacacccacctacccaacccaacccacccccctaacacacacaactccttcacctgcaaaccaccacaaccacctatatccctacacctcaaaaccaaacacaccagacaacaaaaatatttccaaaccccacacacacatacaaacaacctacaagtacacacaacccacctacacttcaccctcaacacacatcacactcagcacacacataacaacaaaccacaaatcaacccccaccaatgatcccccactataacattcacaacccaccccacggaccaacgacctaaaacccacagaacaaaactacacatgacaccagtgacagaaacccagaattcaacaccaaagaaacacgaatgcgcaccccaacacggacaacaaacagaccgacggcacacggcctgcctctcctataacactaaaaaacaatccaatagcccacacacacaataagaacaacctcacaccctcccaccctcccctcaacaataccatacataaccacactacaccaacactataccacacaccccacctctccatcccaaaaatccaaaaaacactacatcttaccccacatatctccacttattccacacacaccctccatcacaataccagccaacacacaccctacacaatcaaccccttacactacaaaccaact

SEQ ID NO: 567432 - DNA, 869 bp, Homo sapiens
ggcaagcgtaacagaatttcccgtggaattgttcaaatatcacctcctgttttgagactctgatagactacttcattgtactgataggtatgacatgggaaaaaattagaactaataatgtatgtaatgaaaggaattacttgtatgtcatgattttctgaaatcaaagtcactggcattatgttggccaatttttggattttatctcaaagccatatttatgacaatccagtgaagtgagttttattttctccaatttgcagatcagaaaactgagaaaatgtctgctcaggtaattgttccatgaagcttaaatttgaatttaggctgttgactctgaagctttcactcctaaaattatatcagactatactgtctcatctatagcttttatttacaaaacagaaagctccattttattaggagaattttgaatatacaataacaagtagacagagtaattttatgaatcaatatgtactcaacacccagctgcactatcaatacttagccattaatatctcttctatgtttttctctccttatttattttgaaggaaatctcagacatcatttaattttatctataagtaagtacttcagcatgagtatcaaaaaagataagtgcttttaaaaacatcgatgatatcaggccaaaaaaaattaacacaaatcttttatcatcatcagatattcagtcaatgttcaaatttccaatgttccataaatgtttttctttgaaattttaaaatttgaatcatgattcaaataatgtccacacaatgtaattgattggtatatattttaattttattttaatctatatgtttccctctgtttttgataatcaataaacatgtattttcaaa

SEQ ID NO: 567433 - DNA, 111 bp, Homo sapiens
taaataaatcaccaacatgtgtaccatgcaaatcacccccacaactccttttgatctctagatgtctgacctgcattgcatcaatgctttgcactgtgcctgtctgtttta

SEQ ID NO: 567434 - DNA, 298 bp, Homo sapiens
aaatgagatcaaaccttcctgcttagaggagcagtggcctggtctgtctactgactgctgtctctgctcctcgttcttgtcttggcattgctgtagcggactcctgtggggcctgaagcttgtaatcttttctctgctgattcgtggccctgatgaggtcagtgcctgacccttccacccgggccctgctactcctggccttgctgatcctctacgccctgctgagccggctcactggctcccgagcctctggggcccaactcgaggccaaggtgcgagggctggaacgccaggtgaa

SEQ ID NO: 567435 - DNA, 649 bp, Homo sapiens
ataccttgtttatacctaaagcattagatgtgttaaaaactgggattctggccaggcgcggtggctcacgcctgtaatcccaacactttggaaggctgaggcgggcggatcacgaagtcaggagctcgagaccaacctgaccaacatagtgaaaccctgtctctaccaaaaatacaaaaattagccaggcgtggtggtgcacgcctgtaatcccagcaccttgggaggccgaggcgggcagatcacaaggtcaggagatcgaggccatcctggctaaaacggtgaaaccccgtctttattaaaaatacaaaaaattagctgggattacagaatttgcagattgctactacgcaaagattggaggagaaaattcagaaacttcagaaacagctcagtgatttgaaattgtcaaataaaaatatgaaaactcagctgacaagagtaaatgtccttaaagacaaaacaattgaagagctcaggcaatctttagcaaatgttgaaaggatgaaagagaggacattactattgaccttacagaattagaaaggatcatcatgaacaactgtataccaacatacagttttgttatttatgttatttcatgttggataacttatatgaaataaagacaaagggaaacaccggggat

SEQ ID NO: 567436 - DNA, 100 bp, Homo sapiens
tacaccgaacccagcctggtggcaaagctcgaggaactagagatcggtcgcccatcgacgtacgcatcaatcatccgcactatcaccagccgtgactacg

SEQ ID NO: 567437 - DNA, 249 bp, Homo sapiens
atatgtacaacagactaacactgaagttatgggattccaactaacaatagtacaaacactttaacattatttacttcaaatattatcttgaaattattcaaatgtattcgaagtttatagttaactgatgtgtaacaatagaattccagcaccaacattgactcagcgattagactatattacgtgctgtctgcattgtccattcacattgatcacagagatgacagctcccgtttggtaaggaaacat

SEQ ID NO: 567438 - DNA, 766 bp, Homo sapiens
  misc_feature (59)..(59): n is a, c, g, or t
  misc_feature (62)..(62): n is a, c, g, or t
taccgccacctgtgggaatgtgctacacggaggaagaagccaggcgctgctgaggaagntgnaggtccaggatggccctaatgatgatggggagatgttcatgcggccagggcagttgtctgactattttccaaaaccataccctaaccctgaggctgcaagagctgctaacaatggagctttaccccctgacctcagctacatcgttcaaacttaggcatgggtggtaaggactacgtatttttccttgctccctgggttactgtgagcccccccactggggtgtcattgcaaaaaggcctctatttcaacccttactttcccggccaggccattggcatggctcctcccatctacacagaagtcttggagtatgatgatggcaccccagctaccatgtcacaagtagctaaggatgtcgccaccttccttcgctgggcatcagaaccagagcatgaccatcgaaaacgcatgggtctcaagatgttgttgatgatgggcctgctgctgcccctgacctatgccatgaagcggcataagtggtcagtcctgaagagtcgaaagctggcttatcggccacccaagtgaccctgttcagtatctgcttgtcatcttgccagaacaagctctcagcagcccaggaacagtccatggccttctcaggcctggcccttttcatcagatacaagggccaggagaccagactcttgcttctgatcttccttcagccctcagtgtgggaataaattaagtttctcaacataaa

SEQ ID NO: 567439 - DNA, 400 bp, Homo sapiens
ctaatatcgtaccgagcctgaagcttgcgggttgtacacgagaggtgccgagggctactgtaaatgggcccattgagccctatgaaggcctgagcgagtcaaactgctagttcaaagcgcgacagctctgtgtacactatgagctgaccttgggtaccgcttacaaagttcaacacccgtatgaggcctgccggccctagttctgatcgcgtttgagctcaacagccagtacgctatgacctgctgcttggccgctcctcaaagctgtgtccgccagatttcgcgatcggcatctgtccgcatgcttatgcatgacagcgaacatcgagatcagtggcacttccacctagggggagtagagttgcagttcagtggctcagacatggcctacatgcagtgg

SEQ ID NO: 567440 - DNA, 183 bp, Homo sapiens
tcgtgactggcgacttatccttagattggataccacccgctttgggctgcattcccaagcaacccgattctcggcgagtcacgagatgggcatgctctagagctggaaccggacgcataccgtctaggggcttgtcacttcgcttagaaggtactcgtggtgctaaaatcgccggttcacgag

SEQ ID NO: 567441 - DNA, 285 bp, Homo sapiens
gtccaatctactatgtcaaccatcctaagtcaccctctgtattacatgaattactaattagttgatggcatgtcagagtccctaccacttaaagtagagatcatgatgatgctatatcttatcttgtgacctgggcttatttctactctaatcataatgatctacggattcccattcatgttgttgcagattactggatctcactcttttttatgggtgaatcgtacttcatagtgtatatgtaccacggtttctttaaacattcatctgttgatagacagctct

SEQ ID NO: 567442 - DNA, 458 bp, Homo sapiens
gtgcaaatatccacacaatacatattggtaaatcgtacatgtataaactcttacctgtaatatacttccaagttgttatgataagaacttacaatctctttgctctcatcattttgctgggtaagggtcaaaaccatgcgccttactgaagttagaagctgcgaggagcatacttcatccatgtgctcctgagaaaaatcctagtgtggttggaatatatacttacctattgtttgaaaagagagcatcaatccatatcatacaaaatgttaattttgaatgttcttgccgtagatgctcctcaatcttcagatgtctgtgtagaaagtatccattcgtaagaaaagccatactcctactttattcatacgtcttgagaggttgggcaatgtcgacccacgaaagcaggtgatggccagtaaaagaactggctgatccagtacttttcagcactttct

SEQ ID NO: 567443 - DNA, 608 bp, Homo sapiens
ggatatgtctatcacttctgtcacctctattagctatttgcttagcatatagtgcagctctagtgttaggtgcactacatatttacggattctctaggtagattgacccctttatcatagtttaatgttcttttctttcttgctaatttcgtgtgctgaagccttcattatataatattaatatagcctttttgctttctttcaatgaatgtatgcaagatatatccttatacattcttttactttcaacctgccagtattgttatattgtaagtgagtttatagtggacagcacataggtgagtcattatccttccaatctgccaatcttcatcttattaattagtatagttaggttatttatatttaatgttgttaatgatatgtgagagcttcagtctgccattttatatttgatattctagtatttcattagtggtttacttatatcctttctgtgacttacttgaacatttttaagaattttatttaggtttatctgtagtgttttcatttcttgatacagcttaatatcatgattactgtacgtattatattatatacacataacttatcaaagactactggtgtcataatcttaccagttc

SEQ ID NO: 567444 - DNA, 196 bp, Homo sapiens
ccccaaatgggaatccttttggttgtttttattatttgttatacgttgtcgtacaacattgagcgcgatatttgcgaggttcttgagggcgtgtcaagtcgagaagttatattatgacttgcggtgaaacgattcaagcgcagcggcacggtcgccccctgtaggagcgagtttgatcgagacaaaatcgtcaagc

SEQ ID NO: 567445 - DNA, 1139 bp, Homo sapiens
  misc_feature (140)..(140): n is a, c, g, or t
  misc_feature (979)..(979): n is a, c, g, or t
cgccgctatccccgagctacccgcgccggccgtctacgctcaccgcgccgatgtatttcgtaggcgcagatctgctctggacttgtagactatgtgctgtgggtacagcgtcttcagttgctcgccattcgacacgcacnaaactcttctctaatcgacaaaaacgcatcctgctaagtccttgcaatactcgctaatctctacggacttagcatacctagctagcacagagcatccatcggtcatcaccacctgctaccagtggtaccctcgcgccgcccttgaccgacgactgttgtctcgcgcgtccgccgctgcccggcacgcggcgccgccactgcatctccacgtgtgttgtcgtggggcctcgccgcgccgcatgtgggcgctcgctccccgccgcctccgccggtgtaccttccccgcgctcaccccgtccgccacccacgtcgccgtgtcgctgtcggtcccctcgcgttccacgtctcctgtcgcgtccccgccgccccccgccccagtcccgccgcacgcacatcgtgtgactacctctccctacagaatacgtggcccgcatctcacttcactgcccccccccccccgctccggcccggcttatccccccgccgcgcaccggccccgcacccaccccctcccttggcggagtgcccgtgtggagccagcccgccccggctccgccgcgtgcgcagaccccgcgcctcgacgcgggggggctgagcctcgtatatcctcccgcgtctcggcccccgccgtcgccctgccgaccccgtcctccctcatcccgtgccgccgggctccaggtagtccggagtatatgcgcgcgcgccgtgagcaccgcccgacgctatcgccgcgcgccgccgtgcgcgtcgtcccggcgccgcgcgctcccgtccgcctgccacgccatagtgcagctatcccacaggtcacaccgccagcgcatcccgccgcattttgnacgccgaggctctctcgtccacgcgcccgcgctgcgaggcgcgtgttgcccgttggtgccggggccggcgccactgtcggcggttcattgttcctccgtcagattcgtgttcgcgctcgcgcacacaccgggcgcccaactctggcgtatgcgcggccgt

SEQ ID NO: 567446 - DNA, 1114 bp, Homo sapiens
gccaaccttccagcctgcgacctgcggcagaacacaaaaattacttattttctctgccccactacatacctctgaggcgagcaaaaaaacttaaattttaaccactgaggcgaaactcgtgcacactccaggctggctcagctgctggcaaccagcactcggtgccacagcttctggcgacggtgactcacgctgcatgacaccatgcgcatcgacccccccaccgcgccaccctaccaccggccgcgcacccgccgacccctgcccccctgcgcaccgcccactctcctgctgctaccctcacaacctgacaccccaccaggctgcgccccctcctgctccccctcgcctgccactccctgcgcctcgcgcactcctaccaccccccctgcggaccccactcgccacctctgctcccccctccacgctcccctcccgcgccccccccctcctctctaccacccaccaccaaaccctccgctcctccccgcgctcacgccccctgggcgcacccgcctcaccaaaccctcggcgccccccaccccgcgcccaaccctaccacccaccaccgccgcccgccccgcaccccctcgcgccccgcccctctcccttgctctcttctgcgcactcgctgcgcctccccgcgccccaccgcaccgcgcccaccccccacccccctccgcctcgcacccctcggccccctgcccccgccgcccccctctcccacgcccctcgcaccccgcacccctcccccctgccgccgcccgcgcccccgccacccacgcgccctccctgcgccaactcgcgcgccccccatccctccccccccccttccccccccccccactcccccccccccccgcccctccccccctcgccctccgcccctcccctcgcacccccccccccccccccccgcccgccccgccccctcccccccccccccccgcctctgcaccccccgccggccccccacccccctccccccgccccccccccctccccccccccccacccccccccccaccccccccccgcccccgtcccccccccccgcctcgcccccccaaccccccccccccccccctcctccccccgccaccccccccccccc

SEQ ID NO: 567447 - DNA, 1338 bp, Homo sapiens
gacatctatcggagctgaacttcctaaaagacaaagtgtttatctttcaagattcattctccctgaatcttaccaacaaaacactcctgaggcagcaaagcaaaggagcagggcagggcagcagcaaacacagcagcagcagcagcagacaaccaaaacaaccgaccagcagcagcagcaacaaaatgcaattccatcgtcaacatccatctgtaacacaccaatgcgacagcagcagcaggcatgcttcatcttccacaaaatgtttcttatgggaacttgtttgcttggggaatcccccaagtcccttatttttcttcacaggtggcctttgtttttccattcaacccacagagaatggtgcgtagggtgagaaagttttccgagcaattttttctcaaaaacccttggatagatttcgacagaccacaacagtgtatctcaaggcatacccatagaaaaatatacaccaccagagacgaccatctcacgtggtcaataccacaagatatactgcggaactcaagggactgccaaggtcaaaacggaacattggtatggtacccactatggacaacttgggggacactcatcgtttccaggtcccacagcctgtcgtaacattccatttgtccctaactggaaccacacaagtattccctgggggcgattcacagttttaacgaaggaaacgtggcatccacgaccaatgggggggcctacaccctggcgtgggttaatccaacgctcccaccagaggaagggaacgccagggaaatttccccttaattacccttagccagagaaaaaacccctaaacaacatttgaggcaacgcaggatacaaacaaactcttgggaacctcgtgaccaagaacaccacggggttaggtcccacacggggcatcacaatgggccaactgggcaatggagcacgggcaccaacccttgcggagcacacggatcatccggaagactacctggaggacatgcaggggggaaggacccaaccaaagccaaagccgtaaccacaggaagggaaaatggatgcacaagcaaaggaacaaacgaccacggcgccagacccacaaagagacaaacagtggcgacaatgcccgatacccagtgttccaccccagtccactgaccggcgaatcaggcgcaagagggaccagcacacactaaccccgttcgcacaccaaccggggaaaacgtcgcccactaccgaacccagaaagcgacaaacagccacaccgactgctaccacccacagcacacagcaacgacagccttggcacaccaacaacaacggacccccgacacacagacaaacagtggg

SEQ ID NO: 567448 - DNA, 1054 bp, Homo sapiens
  misc_feature (119)..(119): n is a, c, g, or t
  misc_feature (125)..(125): n is a, c, g, or t
  misc_feature (238)..(238): n is a, c, g, or t
gcgtattactcgcatcaggatgtattcatcacctgagctcaccatagtctaatagaaatacaagacgaaaccaaattaattcgaatgacacttgctgtattcacaattttactgggttnctctantttttacccttcctacatagaccttcagaaggtactgtcgaataatctccctttcaccaatttccgacggcagtctacgcgactcgaacactttgtcttgatagaccacaggncattccacgagacttcacagtcacttattggtctcagatctttcctcaactagtctgacttcatccgccaacataattagttgtcacatttacattccaaagcaatcagctgtctgggcgttcggaagcacgccgcactgattactgggcattttcgctagactgttgcgctttagacgtatttactgtatgtctccgatcttattgatgagtggtcttaaacgaaagaatcaatataagaagtaaacataaataacacatagacatcaattgaataaatgacaagaagaaacgtgcggggtgcgtaacatgtttacggggtgcgtcgaacgcaggatggcgctaatgcgtcttgaatatatgcatatgggacaccaacaaatgaccatcaggctaataatttctttagcgagtgtgtattaatcctctcttcaattgtggttcaaagggtctctttggtgaactattcagggcgtggacctttgtcccctgggatatagagcctatagagcggttcctccatctggagtgataggtcggaaaaggggaggcattatacgacaggagagtgtacacatgtgggtcacaccagcaaaacgtttaggttaaaaagctctctctggccccacgtgggtaacggacaggactttgcaccggagggactaaagtccagaggcaccacacaacaaggacgtcacagaccaccggagagacaggcacataaacacacactacagggccctctgcaacacaatgtcacgcagaaggggtacacaaacgcgtgaacaactacaatggctcaaacagccacgccac

SEQ ID NO: 567449 - DNA, 1177 bp, Homo sapiens
gatctctataggttcgctggagcaggctgcagggctctgatcctgtcagctgcaggccatgaaggcttctactccaagttgtccgtgttgttagcctgaacgacagccttggaatcatggcgtgcgatcctgagcgcatggtgcggatgaaacgcatcacagaatcgtcatcttactgggcgtgtggactgccatgagatagtgggaggaaccctggtgaccggtgtgaccacactggttgaccatgtgtgctataggcccaaagtgcgtggtcagcccaggcaagacgcagtggcctcggcgggtgcgaggagtcatgtcgtagcaggaattgactgaggtgcgcgtgccgacgtaggtgcctgatgggacctaacacgtggttggcgagtaccacttgtaggcttgatgtcgcatgggtctcgatactgccggcgtgacccctggggctttgcgtccgaagctgtgcacccctcgacaggcgatcctcgaggtacatgagaggcttcgtcgttctctttgcgcatatcgcgcatctagagtgcccctcaaattgatatgaccttgagcaccagagagagctcgacaggaatcgcgcaccggagccaatttcccgttgcgcccatcgggaggtagcgccccagttgcgtagactttagctttccaacctagtggtggccctcggtgcatgtgcacacgggagggacaagacctttttgcaacggaggccaactttacagcaaagggaaggcagggagccttcgggggtaggttggagctccctttgaccaagccccacgagtttggataatacccgcactgggggaggaattgcgcgacttgcggtaccatccttgggtgaaaacttcctttgcttcccaagggggggaacgctcttgccttgcccatgatgagggcggcaacctttggtgtgcaacacgcgatattactttcaaggaacgggattggcactcccgtggagcgtacggccgccgttggaacggaccttaccatgggttcccccacgttgcattgtccgttactccatggagttgtggttgcgcagcgtggggaccgtcacagtcggaaaccagctttggacttgtcgaaggacctttttcaatgcgttgcggacttcaagacaaccagcggtgtgtccactggtaccccgtgagaa

SEQ ID NO: 567450 - DNA, 251 bp, Homo sapiens
atctataggagtgaggagagatgtgtaccggagcggattgagtgaggagatatgcatgatcagctggtgacagagggatctgttgaaataatatatataatgtatgtttattgcttagtttacatagggaatcaagttatactttgattataaaagttgtttgatttagttcaagaaccagaattttcatataaaggtatgagaggggccagtgtggtgggtcatgcctgtaatcccagcatatggggagg

SEQ ID NO: 567451 - DNA, 312 bp, Homo sapiens
gagaaggagtctcgctctgtcacccaggctggagtgctgtggcgcaatctcagctcactgcaatctctacctcctgggttcaagcgattctcatgcctcagcctcctgagtagctgggactacgggtgtatgccaacatgcccatcgtattatctatcatgctcgtaaagttgtgctctatactgtcgtccaggctggtcacgaactcctggctctcaagtgatctacccgcctcggtctcccaaactgctgggactccaggtgtgagccaccacacccagccgtcgagcggccgcccccggagtagtagta

SEQ ID NO: 567452 - DNA, 100 bp, Homo sapiens
cgccaaggcagtgtcacacactgaacatcagtttaatcagctctaaaatacagactgggctagatcatgggtagctgctctacctactctcaggcctcca

SEQ ID NO: 567453 - DNA, 577 bp, Homo sapiens
  misc_feature (432)..(433): n is a, c, g, or t
gctgcacagttaaatcagccaccgggagagcccagtgcagtttctgcctaaggccaaggtaaagctgagcttattctaatcctggctgcagctcgaacacaacataatgtagatgcagccgcttcactcactgtgcccgagcagtatgtcagcgcgttctccaaactggccaaggactccaacactatcttactgccctccaaccctggcgatgtcaccagcatggtgctcaggccatgtgtgtatatggagccctcaccaaagcccctgtcccagggactccagactcactctcctgtgggagcagcagagatgtccagggtacagatgcaagtcttgatgaggaacttgatcgagtcaagatgagttagtggagctggcttggccaggggggggggggggggggggggccggggaaaaaaaaaaaagggnnttttctccccttttgggtgggggggaaaccaaaagcgcaagcagattttcctgattctggctctagcttccctgccaagattttggtttttatttttttatttgaactttagtcgtgtaataaactcaccagtggcaaaccaaa

SEQ ID NO: 567454 - DNA, 460 bp, Homo sapiens
gtgctatttgtatttctactgtttagttgtaagagttttaatatattataggtacagatgtaacgcaaatgttattaattttagtgaatactattttattttactgtttattgcttgcagtttcatattatatctaaaaaccactgcctaatccaaggtcaaagaaatgtatgtacagtgtataaaataaatataaaaaagataattatgcctatattttcttctaatagctttgtaattttagctcttaaatttatgtatgtaatctattttcagttaatgttttacatgctatgaagtaccattccatatttattaatttgtacatgagtttccatttgccctagcaccatttgttgcaaagactattctttctttcatggaattttcttggcttcattgttgctcaacttactattaacctagagtttggttctggactcagaattctgtttccttg

SEQ ID NO: 567455 - DNA, 643 bp, Homo sapiens
tactggggacggagggtagccgatggggccctgagcaggacgtgcctcttctggacttgaccacagaacccaagcatggttcaagcgattctcctgcttcagcctcctgagtagttgggattacagatgcccgccaccgcacccagtcacagatggactctgagagagaaaatagcacccctgtccaaacatcacatgcctggcggaggaacgcagcctggcctgtgcagccgaatgttggagagtgcaccttcctctcttattttgttttatttccagggaaagggaaaggaagacatgcagtctcattgaagtccttgggtcactttacccctgcccttgggttgatggacgatcagatgtcttccttctcatgctggctgagacatcaaacaccagagtggacttacttggctccagtgctggtgatgggcacttctgggtgaatggaatctggggtgtatgtacactagcaaatttgctggttcttagtgcaggatcatttgaaaatttattattctgccaaattgatcaaatcactttgaacaatttatgcatgtacttcattacacaatagtttccatttctgcacattctaacacctattaatttttgcaaatactatagccataatataacaaaa

SEQ ID NO: 567456 - DNA, 861 bp, Homo sapiens
ccatgagagctgtgtgttactcggacgagggcattcttctggagagtgtccctgaactgctgcccaatgtctgggaagtgccctttctctacttatgtaccacctcatggagacccccgctggctgccgcccccgctggtgagcttattcccctccttacctgctccttgcctgctgggactgctggtgtgcctgccttgcttgggctgcctgcatcacctgcctgtgtgtgctctatctatcatgacttgcttgcacaatgtgtgtgacaatgttgcaatgctgtcctgtgcatggctgtgatgatgaactgttggcctgctgttgcttgatgtggcccattggtgttgctgtgtatcgatcttcactgcctgtgtctgtgttggtgtgcacattatccccttgcttgcttggttgtgccttgctgatgagaacttggtggtgcatcctgttgttgtgttggcacatcactggccagttgatgtgtcatctgtgcctggtctctttgctggctttgacttgctattgtgccctgccttgtcctgtgtgactgtgtgtgtgctgttgtgctgttgcagttgaccatgcatgttgcccttgtggcctacaccaaacactgtgttgacttgctgtgtgacagaattgctcatgatgtgctcatgtccctcaattccttgcttcttgtgggttgtggtgctttgcctgcactactgctttgcagacacctgggtggttgctgctccagtgcttgtctgatcagctctgtccctctttcctgtgccaccctagtactgtttgtagtgtcttgtgctgagtgttgctgacatttgtgcccaccctggtggccggatggttggcgca

SEQ ID NO: 567457 - DNA, 590 bp, Homo sapiens
ttttttcaaagttcaaccagtaatttaatatgaaaacaggaatgttagttattatgtaattaaataccattataaagaattttagtgtgtcaaacaaaatattaaaagtgctgctagaatctattataaaattttaagaattcagatgttttggataattctatttgtgtattaaaattgtttctataattcttattaatgttccaacactaatctgcttcaagaaacacccctttgctttcctttttagtctcattgaagtccttgggtcactttacccctgcccttgggttgatggacgatcagatgtcttccttctcatgctggctgagacatcaaacaccagagtggacttacttggctccagtgctggtgatgggcacttctgggtgaatggaatctggggtgtatgtacactagcaaatttgctggttcttagtgcaggatcatttgaaaatttattattctgccaaattgatcaaatcactttgaacaatttatgcatgtacttcattacacaatagtttccatttctgcacattctaacacctattaatttttgcaaatactatagccataatataacaaaa

SEQ ID NO: 567458 - DNA, 297 bp, Homo sapiens
tgaaggttatatcctcagccaacacgagctgtggttggtgtggtggctggaggttggctgaatatgacaaacccatcttgaagtgctggcctgtgtgtaccacaaatataagtgcaaagaggaactgctggccacgagtacggggtgtaggcatgaatcctgtgcagcatcctttttggaggtggcaaccaccagcacatcggcaagccctccattatccgcagagatgcccctgcttggccgcaaagtgggtctcattgctgcccgccggactggacgtctatcgggtcgttagga

SEQ ID NO: 567459 - DNA, 238 bp, Homo sapiens
aagatacagaatattcatcaccacaaggatacttcaagtcatcctatcatagccacgccttatttccctcccaccctaacctcctacttaacccctagcgaccactcatctattctccatttctaaaatacagttgtttcaaccgaggttatgtagtaaaatagaatcacacagtatgcaaactttagggattttgttttcagtcagcataattttctggagatccatccaggttgtt

SEQ ID NO: 567460 - DNA, 473 bp, Homo sapiens
aggcagcttatgggaagcagggccccatttgtccctcggtccccgtgtggccagagtgggtccgtcgtcccccacactcgggctcgttcagaccctttggcaggaggtttggggcctccccagcaggagggcgtgcaacccgggcaggcggtccccctagacccccagcccctcgggagccccccccctctgggtgtgaggtagctttctctccctcagccggcaagggtccgatttgccatcgaaaaagccaccctctacttttttcttttgtattttgataaaccctgaagcgggagctgttaaatttatcttggggaaccctcagaactggtctatttggggtcggggaccctcttccggctttcaaaacccaattagtaatcaactgttttgtaaacttgttttcagttttcatttcgccaaccaagccctgtaattaaagctattagaataaaattttttaactatta

SEQ ID NO: 567461 - DNA, 356 bp, Homo sapiens
tactggggacggagggtagccgatggggccctgagcaggacgtgcctcttctggacttgaccacagaacccaagcatggttcaagcgattctcctgcttcagcctcctgagtagttgggattacagatgcccgccaccgcacccagtcacagatggactctgagagagaaaatagcacccctgtccaaacatcacatgcctggcggaggaacgcagcctggcctgtgcagccgaatgttggagagtgcaccttcctctcttattttgttttatttccagggaaagggaaaggaagacatgcaggtaatttatcaactaaattacaggctgactgataataaagtccccgccccaca

SEQ ID NO: 567462 - DNA, 514 bp, Homo sapiens
ggatttttcttggatgccagcatttgacatctctatgtgagatctgcttcttccctgatcgtgacattccctccaccagcaggcagccgcatgaggaccagcgcctgctcaccgctgtgtccctcctacgtgcggggcaggcacccagcagcaggtgttcggtgcccactgggagcgtgcctgggcccctgctcctgctcctcagagggaacaaacaactgacctgctgatggaggctgtgaacccacacgggttgtctgcagacgtaacagggcatctcctatgacgcttctggagagggcaaggctccacggctgagggctttctttgggtgacaaccatgtgaaatgccatgaccttgtgccaccctgtggcagatgactctctcagaaggtggtgcgtaccctttcaccattatggtgtggacactcagatgtggggcctctcccacctcttacaactggggcaggctgacaaccacagtagaagggacaccctgcaaccacatcataag

SEQ ID NO: 567463 - DNA, 238 bp, Homo sapiens
aggctccagttccgatattatggaggtcagcacggtgctcacgtgtcgacggaacttgtacagtggaggcatgcaccggagtgggtgaatacacgtctgaccaggctccatctatagcgatatttggaggtcagcacggtgctcacgtatcgacggaacttgtctagggaggcatgcaccgcagtggtgaatacacgtcgagctgtgaggcaatgattgcgagtgctcgggtactgga

SEQ ID NO: 567464 - DNA, 938 bp, Homo sapiens
  misc_feature (37)..(37): n is a, c, g, or t
  misc_feature (73)..(73): n is a, c, g, or t
  misc_feature (96)..(96): n is a, c, g, or t
  misc_feature (126)..(126): n is a, c, g, or t
  misc_feature (141)..(141): n is a, c, g, or t
  misc_feature (189)..(189): n is a, c, g, or t
  misc_feature (205)..(205): n is a, c, g, or t
  misc_feature (209)..(209): n is a, c, g, or t
  misc_feature (218)..(218): n is a, c, g, or t
  misc_feature (221)..(221): n is a, c, g, or t
  misc_feature (224)..(224): n is a, c, g, or t
  misc_feature (242)..(242): n is a, c, g, or t
  misc_feature (245)..(246): n is a, c, g, or t
  misc_feature (250)..(250): n is a, c, g, or t
  misc_feature (252)..(252): n is a, c, g, or t
  misc_feature (274)..(274): n is a, c, g, or t
  misc_feature (283)..(283): n is a, c, g, or t
  misc_feature (307)..(307): n is a, c, g, or t
  misc_feature (312)..(312): n is a, c, g, or t
  misc_feature (314)..(314): n is a, c, g, or t
  misc_feature (320)..(320): n is a, c, g, or t
  misc_feature (325)..(325): n is a, c, g, or t
  misc_feature (346)..(346): n is a, c, g, or t
  misc_feature (367)..(367): n is a, c, g, or t
  misc_feature (374)..(374): n is a, c, g, or t
  misc_feature (396)..(396): n is a, c, g, or t
  misc_feature (399)..(399): n is a, c, g, or t
  misc_feature (446)..(446): n is a, c, g, or t
  misc_feature (448)..(448): n is a, c, g, or t
  misc_feature (453)..(453): n is a, c, g, or t
  misc_feature (457)..(457): n is a, c, g, or t
  misc_feature (460)..(460): n is a, c, g, or t
  misc_feature (462)..(462): n is a, c, g, or t
  misc_feature (464)..(464): n is a, c, g, or t
  misc_feature (470)..(470): n is a, c, g, or t
  misc_feature (505)..(505): n is a, c, g, or t
  misc_feature (587)..(592): n is a, c, g, or t
ctatggcagtttctttctgggattcaaaaccaattcntcagatcgctgcctctgagggatgtacagattggcnggggcgctgagtgctacaataanggaggaagtaccggggaacagtgcagggcnaaggcagggcagagntctgagctgcctggagatcatctggggtgcggagtacaaagctttgcnagggtgtggttttggnatgncgctaaacnggnggnggagagaacagataaagnggnngggngnggcacactgtacactgttaagnagttgagcntttatcttaggggcagcagaaggnttggngncaaggngtganatggtgaggcgtccttcaggnaatgggctccagctgccgtgnggcccgngcaggaagactggcagctgtcnacnctggaacagtccagtgagtatgtgcaggcccgggcttgggcagttangngggcngggngcncncntcactnttctgcggtagaaccttctagacggaagaccaganagagaggtcaacagagttgaaaggagaaaataattgaggatgaggtccaagtttttagtttcagagactaggcatatggttnnnnnnttaggtaggaaattcaggaaaaggagcttgttgggcaggaagggaaggaacggcagcttggggcactctgacatctttaacaagtcttgtaaaggcttactaaatacaacgaagcattgtaccaactataccctaataaaaaataaaaatttacattccagttaactaccttaaaagttaagtccactttcatcccacgcccccatcctttccgtcatccctcacccctttgtcttgagaaaggaggtttagctgcttcttttagttctgcaatttctttttcttgctctattatcttcatctgtagggtgaggttaacatttccagaattttggaaaagtcactc

SEQ ID NO: 567465 - DNA, 338 bp, Homo sapiens
caggctgtacgccttcggttacgggatctcgggtaacccttgtcgctgggccggggcgctggagagtgaccgtgttctgagttgacactggtggcgcgctgctgttggggactgtaggtggtgctctcaaatgccgggtcatccagacgggatggtgcggcgctctgggccgcgctgctggccgcgccgtgtgtcctggctgggcggcgaggctggggctgactcctgcctcaggatgccggggtgaggacgaggagcggtccttcctgtgtggcccgcgaggagctggcgagcgccctgaggagggattccgggcaggcgttttccctggagcagct

SEQ ID NO: 567466 - DNA, 792 bp, Homo sapiens
  misc_feature (124)..(124): n is a, c, g, or t
agcggatcttgcgggagaccgggttgggctgtgacgctgctgctggggtcagaagtgtcatacccaggactatccgccgcaacaggcgtacccacctttcccctgggatatcctacctgcaggntcaggcaggtcatcatttgtcccccattctggctcgagcagtccgtgtatcctaggtggcatattccatccaagtgggagcgaggatgccttacctctactaaggtgaccaagctagctggactagcctagcgagcgtggacggactacgcactgcgcctggcaggattatgccaggtcctccgtggacgtgctaatgcgctgggtgtccgccatcagtcgcatcgggggataggctccatcgctattcctcggagctgtcctccacgggctaaggagtttcggaggtcgctctacctagggctggaagcatcggcatgtcttcgtcgagtgtactccagcatgccgacgctttcagcaagtcgatgatcgagacggatggtcctatagcatcgaagggttccaactaccgtaggtggcttttccaatggaagagacaggactgccgtatcgtcgaagtgaattcccctgggaggggacgaaacctaacgtttacccgcttgaaggtgcaaggtagttcgaaataacaggaagtgccgttggctaccaaatcctcttaattccctggttgtgacctcttcgcgtggattttcccttctgggaatttagttagccagtggaaacccagaccctaggagttggacttccaggattcaccttcctagggaa

SEQ ID NO: 567467 - DNA, 347 bp, Homo sapiens
tcttagggcacttcctcaagatttgacacgtcacggttgagccagtgtatctggtatatgatcacgcaaaaccaaggatgagaagctaactaaagaggaaatatgggagaactggaacatgtttgtaggaagccaagctaccaatgacggggaagatctcacaaaaaatcatgatgcgctttgctcgacactcaccagaatatggcagactgtcataggcattctgtcatggtcttggatttgtcagctaccactggtctaatttaccagcacgttgtgatcccacacaaaaggaagttcatacctcgagattggggtataagaaattggtttttcgctcaaggatt

SEQ ID NO: 567468 - DNA, 242 bp, Homo sapiens
ggctgggcataagaataggagcagagaatgagtcactgacagtgctgaacagtgtcctgggatgggcagataccatgacagcacgtcatgcgagctagggccagcctaaccctatgcaggctcaatcagagtgtagtatcctgcaccatgcagtggcagccggtttttactacacatgcattgctcccctgcactctcgaggagcacttgaggctgccttcactgtcgctgcatacaatagg

SEQ ID NO: 567469 - DNA, 542 bp, Homo sapiens
ataccgtgtaggattactatttgcccacttggcggattctacaaaacagagtttcaaaactcctcaatcaaaagaaaagtttaattctgtgagacgaatgcacacatcataaagaagtttctcagattgcttctttcttctttttatgtgaagatatttcctttccacagtaggccttaaaatgttccaaatatccacttgcagattctacaaaaagacagtttcaaaactgctcactcaaaagaaagttttaactctgtgagaggaatgcacacatcataaagtagtttctcagattgcttctgtctacaatttatgtgaagatgtttccttttctaccgttaggccccaaagcactccaaatgtccacttgcagattctacaaaaagagagtttcaaaactgctcaatcaaaagaaaggttaactctgtgagatgaatgcacacatcactaagaggtttctcagattgcttctgtctagattttatgtgagggtatttcattttctaccgcaggccacaaaactctccaaatattcactt

SEQ ID NO: 567470 - DNA, 1187 bp, Homo sapiens
tacggctctgggttggttgacgccctgcgcctggtgtcagccccgagctgttgcacgacgagttctccacgcaggctctagccaggcagcatctgggccctggaggaggagattcgaagccaccggtcaaccctgtgacgccttgagggaacaggcagcagtcctgccccccacactgagccgcacgcccgaggtgcagtggccgggtgcccaccctggagcggcacatacgaggagctgcaggcccgggcatggcgatgcgagcgcggtgccttgtgaggcagccctggcgctctacaccatgctcagcgaggccggggcctgtggactctgggtggagcgagaaggacgcacgtggctcaacggggctggccctgcctgaaacgccctgtagggaccttggagggtcgtgccatgcagaggttcgaggacccctggagccttgaacattgaacaccccttgctagtcaccaaattcaccgcgtgtgaactgacattgccgagcatgtttactgacaggccaatccccccaggctaaagaccgccattgtcaacacccaggagcagctcaaccacaggtggcagccagttttcggccgtcatggcagacggcaagaaggcagctctcacctcagccctgagcattccagaactaccacttatagtgcacgtagacccaggcctgattgagcgcagacgaccaaagtcatcgagttcaccaggtctaggcaagatctggctgcggtgctggccctgcagcgccaagtctggccggcactgaaccggacctggaggcatcggccgaccccgggtgggcgaagctgacctcgaagactgcaaaatgcgccttgttgcgggcgcaatccccggtcagccagtggccatcacggccgggttacacaggctcagaccgggctggcagcacctcagggccacgcaattcccgacgtcgcacgaccgagaccgctgggccgcacgcagccgcgtgcctcgccaacaatcttttcccgccgcttagagagacgactacagggcgtcggcatagcggccgctacagaacttcgtcgccctcgtcatacaagccgcgagaccacctagctcgtagaaggccagtctgccacaagaggtcacccagcagagcgctagacgggcccgcgagccattatcccgccagaccaaccggacgg

SEQ ID NO: 567471 - DNA, 167 bp, Homo sapiens
cgtaaatgtgtagatccactgcaaacggtagaagagcaagcttcatatatcttcaccaaaaatgtccagttttacgggcttgtacatgcatgcacgaggtctcagcgctgtatccccatccacccaaaaaaaaggaaaaaagtctagatatataggggggaacagga

SEQ ID NO: 567472 - DNA, 626 bp, Homo sapiens
  misc_feature (420)..(420): n is a, c, g, or t
gcggctaagtctcaagagccgagaaggcaccaaggaaggggagagagggagggagggagggagggagagagagagagagagagagagagagagagagagacagagagagacagagagagagagagagagagagagggcgagagcgagagacagagagagagagagagagagagagagagagagagagagagagaacgcgccgcgagggagagcgcgagagcgagagagagacgagagaagacagagagaagaaaaaaaaaaaaaaaaaaaatggtgggggccgccctcccccaaaaattttaacccatggtggggggccgggccccagagaggaagagatagaacggtgtggtgacaaggcgggtccccaaagaagaacaagcgcggcaactagaacgcggtggggtggttcccaccacnaaaataaaaacgcgccgggggcgaacacagcgcagtcgttatgaaaccacaccagggagtgggcgtcgggcacgacaagagggggtgccacagaaaagggggacccaggagggcccgagaatataaataccccccgcctggggtgagaaaaccgagaacagaaatacacataaaacagaggagcaaccaacacacagaaaagacgc

SEQ ID NO: 567473 - DNA, 252 bp, Homo sapiens
cccaataagtattgcaatagattcaacttgacacgatgattcttaaaaaaaattcttttttgttattgagacagggtctcattgctgcccaggccaagtgcagtggcatagtcatggctcactgcagcttcaactgccgaggctcaagcaatcctcccccaacctcagcctctcgagtagctgggaccacaggcgtgcaccaccgtgccctggccaattttggcattttgagtagaggcggggtttcaccat

SEQ ID NO: 567474 - DNA, 116 bp, Homo sapiens
cgactttagaggaacccccacccccgcccaaggagcagagttgtatgagaagagatttggtttttttcagaagaatgcaggcgatgaagctgtgaactttatcatggccatcaaaa

SEQ ID NO: 567475 - DNA, 484 bp, Homo sapiens
tgtcgcagctgcgtacacaacaagtcttgccttgtcacttgatcaggaggcaagatagcatcttctactacagatgaatgtgcagtgggttgacttggtggtagaaggctcaggaagttctctcagtaagttaactaggtgagaatgaggggtgtgtgtgtatgtagtgccagagatgtggggagcagcaataacacaggtgtgagcaaagtcacccttgcataataagatagtaaatatacccaccaaaattggggccgacagtgccaagaaatcacttgagggctctccattcataaacatttatagtaggcacagtcagcagagtccttcgttgaacatctgcatcatgataccatgtcaggcaggtgaccagagcatctgctggaaaccaactggggcataatgacaataggacaggacagaagtgtgggagcatgttccacctggatttatgtacaggcatacataaagatgggcaaaa

SEQ ID NO: 567476 - DNA, 426 bp, Homo sapiens
ggcggggtgtggtgctgggcgcggtaatccaagctactgcgaggtggctaggcaagaagatagcttgaacctgggagagtgaggttgcattgagccaagatagtgccacagcactccagccttggcgacagagtgaggctgtctcaaaaacaaaaacaaaaacaaaaggctgtcccaggttgtaccctaccaacaatgggtgacggtgcctatttcactaaactcaacatcaaacttaccttgtttgcctgttaccttgtagcctgttatatagaagaaaagtatttcattgtatttatctgcatttttctgcaggtgagattttcgtttgcatttcttcgcagattatactcttctgataattggacatttgtgtcgtctgaatggccttttcatgccctttgccaatttctgtgcccatttcaa

SEQ ID NO: 567477 - DNA, 283 bp, Homo sapiens
  misc_feature (201)..(201): n is a, c, g, or t
  misc_feature (208)..(208): n is a, c, g, or t
ccagttttagaagtccccggcagaaatgcaaaagaacagaaattataacaaacagtctctcagaccacagtacaatcaaattagaactcaggattaagaaactcactcaaaaccacacaactacatgaaaactgaacaacctgctcctgaatgactactgggtaaataatgaaatcaaggcagaaataaagatgttctttnggctatngaaacttctaaaactaggcctagttttagaaggttcaatagcaaaaggaaatgttttttcttttttttgggggta

SEQ ID NO: 567478 - DNA, 734 bp, Homo sapiens
  misc_feature (139)..(139): n is a, c, g, or t
cctttaggctcccggctgttattttggggaattttaaccgaatacaattttcacaagggaccagctatgcccttgtttccgcaagctcgaatttacccttcttaaaggaccaaaacttgaagcccccccccggtgccgnccgttctagaatagtgattcccccgggctccaggattccggccgaacctgtgtgaacaaagaagtcggttagccagattatgtcgtagccactctgaatgatgttattgaaactgcacccatctctccaggcacaagcactcaactaactgaactgatagctcttacaagagcactcaaattaagcaagggaaaagtaactaacattggccctgactccaagtatgctttcttagtccttcatgctcatgctgccatctggaaggaaaggcacttctttacagctaatgggctctctataaaataccatcaggggccgggcgcggtggctcacgcctgtaatcctagcactttgggaggccgaggcgggcggatcccgaggtcaggggatcgagaccccggtgaaaccccgtctctactaaaaatacaaaaaattagccgggcgcagtggcgggcgcctgtagtcccagctactcgggaggctgaggcaggagaatggcgtgaacccggaaggcggagcttgcagtgagtggagatcgcgccacagcactcccgcctgggcgacagaacgagactccgtctccaaaaaaaaaaaa

SEQ ID NO: 567479 - DNA, 122 bp, Homo sapiens
acgggcgcagaatgatgcgaacaggcgtgatgatacgcgcctaagcatcgtgtaagcgttcggattagtgggctaattatctgctagggggtggaagcggatgcgtaagaagattcctgcta

SEQ ID NO: 567480 - DNA, 418 bp, Homo sapiens
ttttataatgggacacccgtatagggcccttaccatgaatggagtttgcaggactggaagttgctctgagtgagtcagtgagtgaatgtgaagacctaggacattattgtacgctactgtagaccttgtacacattggacgcttaggcgacattaaatctacaaaagaatatttttctttcccttggcttactatatcttttttattactattttataaactttttgactcttatgtattaacacttagcttacaacacaaacacattgtacagctatacaaaaatattttctttcttggcaaggcatggtggctcacacctgtgatcccagcactttgagaggcagaggcgggaggatcatttgaggtcaggagttcaagaccagcctgaccaacatggtgaaatcccatgtccact

SEQ ID NO: 567481 - DNA, 1559 bp, Homo sapiens
  misc_feature (72)..(72): n is a, c, g, or t
gccacggaggagtctgacctggtccagcagtacggcgtgcgcggatatcccaccatcaagtttcctatcagngaagtggagtacagcggtgttcccccaagtgaactatacatgtctggcagagaggcgtgagtgacggtcgtgatagctggctgaagcaagacgacacggggcccgtgcgtgccaggcaccactgcgctgacggcggccgctagcgtgcgagcagtcctgtggctcggcacgtcctagcgtaggttgggcttgctcgatcggcccttcgttcgacgtggacgttggcagctctgggacctcttgggcaccggccggctctttttcgcgaggggcacgccgacgaggtgccgactacgtagtgcaccagtacgacactgtgttggggcagtccagcgttctcgaatcgagatgcaccgttgtgccgtgccaagaatagccagacgtcgaccacaacgcattcgggcgtcctgctcccgtcgttttagacggaaccgtttctggacatggaccacggcccctgggaaacctagacctctttctgaaagcgggcagcgagcggcgtcaacccgacactgggcactgaaaaccccattgcctttgggaacatatataacgtcgaaatacgaccaaaccgaccaaggctttgacctcccatctgctcaacttccgagtggttttcagccacaggagggccgagaacacagcgggcaccccccgcacaccggacgttctctcctagcggcacgaggttgcacacaacttcacagggaaacatccaaccaacttcatcttaggccttgcgtttccgtatggccccccacaggcaaagggtggactggtcctggagcacttactgcgaccgcggctcgcaacctttgcacaccaaaccgtttccaacaagagcaggccaaggcccaagaatgcaagcctttctccccagtggggcccaacaagaagttcacattgggttcaccttcagtaccaacatcgggacccaaggcgtaactccccacaaacccgcgaccaaaacctccaagaccaggccgatttcccgtcaggaaggtatacctttatgcagcgacccttgaacatgcaacagagacgcagaagattggaccacgggaccggttggccgccccttcaattccagccccctggtggaggggagcagacgccatggaagaccaaatgttcatcaaaagaacccggaaattcgggaacgaacagcctggacggggacaggacaaacgtgatcctcacgacgacaggatcctatgacaacccgtcgctttcccaggggcaagagaccaccaaagaccacgacgccacaccacaccatgggatgtgaaagcccgcagcagctcttgtcctgggcagcgacctgcgtgaaccaaaaagaggacatagtactacaggcgcgctcgtgtgcccgcgcccacatcacacttctggagacacgccgcgcactatccagacgtgaccacactaaccacctaccacatcgactgcgcagacacccacacctcacaagcgaccagccagaccac

SEQ ID NO: 567482 - DNA, 204 bp, Homo sapiens
atatcaacacaaagaccagtaatgtgttgggtggtgacacgttggtcagcgctgtgaagaaaaggaggctacaggataaagcaggggtgctgttttatatattttggggacagtttctctgtaatgtgtccccagtacccctgctttctgtccgtgtcctgaccaggctgtgatccagctagctggaggggggggtcctctaga

SEQ ID NO: 567483 - DNA, 625 bp, Homo sapiens
gaaggtagcgcacggtcggtgtgtacctggtaggtgacttcggtctggttatcgcccttggcaccagcttccagaaaccctccacctgggcgaccgcacgtagccttttgcttcaggcttgtaggtcggcacgccttccagtttgcgcgtgacggtgccgtcagcggctttggtggtggtgacgtggatgtacgagtcgcggtccgtcacggggaacggggccttgaactgggtgtaggtccaggcctcgtcgccttggttgtcgacgagtttctgggatttgcattcatggatccatgcgcaagcaccgaccacatcttcctgcagcgcctggaccttggccaaaggcgccttgatcacggtcacgccgcgataggccttgtacttggaaccggcaatctcgctcagggacaccttgataccgtcttcgtccttggcgacttgccaatcctcagcctgggcagtggccgcaaacaacagcgtaaaaccgcacagcacagccactcgtttcagcgaacccatcgttgtattccttatggttgaagttccgatagtaaagcccatcaagccgccgtcatctgctcccaccagccgatcgactcaggtggtgtgggggatctctaga

SEQ ID NO: 567484 - DNA, 710 bp, Homo sapiens
catcctgataggataaatgttcaacttcataataaagaggctggcatgtggctcatgcctgtaatcccagcacgttgggaggccaaggcaggtggaacacttgagcctaggagttcgagaccagcctgggcaacaaagtgatacccccatctctacaaaaaatataaaagttagcacccggcatggtggcgcgcgcctgtagtcccagttactctgggagactgaggtgggaggatcacctgggtccgggaggcggaggttgcagtgagctgagattgcatcactgcactccagcctgggtgacagggtccagacagggtctcactctgtcacccaggctggagtgcagtggcgcaatctccacacaagaaaaagcaaactgcaacctcttgtgcctcagccacccgagtggctgggactacaggtgcgcaccaccacacctggctaaatttgtatttttagtagagacagcaagaccctgtctcaaaaaaaagaaagaaagaaagaaggaaggaaggagggcaaagacagaaacgaaaacgaaagaaagaaagacacgaaaggacgaaaggacggaaagaaagaaagaaatgagagatagaatatataggaactacatctcagctaaaccagcattaacatcaaaaagactcacatggggccaggcacagggctcactttggaggcactagcaccttggagctgagtgg

SEQ ID NO: 567485 - DNA, 344 bp, Homo sapiens
aaaatacatacaggatcttcgatgctgtatgatgagtcatttaatcttacgagatccattgaggcatctgtgcacagcgcgtatccagctcatacgtatataagtgctgcagtaaaaactcgagttgatctggagcggcggcggtcgcgcgagcgagcaccgccgtcccgcccttgctctggggcccctcgatgctcttactgagtgtccgcgggcccgagcgttactttgaaaaatagagtgtcaagcaggccgagcgcctgataccgagctagaatatggataggacgcggtctatttgttggcgccggatgggtgctggtacgagctcgatcgtatcatgt

SEQ ID NO: 567486 - DNA, 160 bp, Homo sapiens
  misc_feature (51)..(52): n is a, c, g, or t
  misc_feature (67)..(67): n is a, c, g, or t
  misc_feature (76)..(76): n is a, c, g, or t
  misc_feature (94)..(94): n is a, c, g, or t
  misc_feature (99)..(99): n is a, c, g, or t
  misc_feature (141)..(141): n is a, c, g, or t
gcactgagaagagatcgggacatcttaggctggtggcggcgcatcacgaanncttctgattgagcgnttgcatggncggtctccgtgggcaggnttggnccgcatgtggaagggctctgagctgtgtcctccttcattaanagtttttatgtctcgtgtc

SEQ ID NO: 567487 - DNA, 131 bp, Homo sapiens
aggttacttgccatgctgctctctccttgacacgctgtctttggctcgggggctcttctgtcggtgtccctcccatccccatgtgtgctgcactgagttctctccttcttcttcctgctgtcctgccacaa

SEQ ID NO: 567488 - DNA, 120 bp, Homo sapiens
tcttaggatccccgcatccagagccatcatctggcgagaactgagggctcttcggccgttagtgcgaccatgagacgatgaaggcacgctggtgagcctaatccgtaggcataccgagcg

SEQ ID NO: 567489 - DNA, 352 bp, Homo sapiens
tacggtaaaaatgcggatcaacctttatttcggcgaagggatactctcatggtgtactttaggttcagctatttcagggtgaaagccaacgcatttctgccaagctaggcaacgaatgtaccatgccaaggaggctgctttgcgctctgtccgtttggtcgtacgagagtggggatctctcggcctatctccctctcgtggtaaaattaccgtcaagtcgtgatggttgttcgaccgcacttatcactggttttgcgtttgattatcgcagtagtcgattccacaccttcgcgatcctatcctcggaaaacacggtcgctttcatgctggctgcgtgcccaaatgtcgacgc

SEQ ID NO: 567490 - DNA, 405 bp, Homo sapiens
cattgaccttttcaaaggggaacagtttgtggccttggaaggataagtggtcaacaattaattccgccaattcaaggtttttaaataagttttcacaccccaggtgggggtggaattttttttgaattacatgggggtacagccacccaaaattttgccagagggttggaagggccaaatccaagtcctccgggcctaaatcaaggcccaagtgaacaaagggctggggcagctccagggggttgtgggggggcgggtcaaggccagggggggaagggtcagcagcaagttgaattcaattggggggcccttccaggtacctccgggttaaggcaagggcaaggccaagtggcccccaacatttttcccaataaaggtttgggcccgaatggccccatccctgca

SEQ ID NO: 567491 - DNA, 151 bp, Homo sapiens
caagaacaacaacattcaaagatcctcgtaatgggaagccacctgtaactaaaggtggcccacaaatggcttatgaacgcggcttgagggggagctttctcactgcctttattggcgccagtctaatgcacaccgagtcatggaagatcat

SEQ ID NO: 567492 - DNA, 185 bp, Homo sapiens
aactaaacctattgattttttttttttaaaatttttttttccttttgatttaatatactgaaaaaaaaatgggagactttttaatgttaacaaaatcccttttaggagtgtttggggttgtgtattaaaaaaccattcattttggaactcaaggacaggactgtaataaaatggaatggaaccca

SEQ ID NO: 567493 - DNA, 535 bp, Homo sapiens
ctgagtatagattccgagtgccttctcctgctatctgttgcatctgtctccaagatatgctctaattctgatccaatggtaatcccaagaatgctgatctcgctaatatagaaggtatctagtagaatgatcgcatagattgttctatgagaacaagcaaatcgagtgcacctgggatgacaaaaagtcatagtggtgtgacaagtaagttactttggttttctaaagattgctgccattaattgcaaatggggcttattttatcagcttttcatttagggggccattatgtttctgggtacagttttcactccttgctgggtaatcatacatcagtagttagggaagaaatcagtgatgatgatagaagttataacctaggggctgtcattaattcttgcctcagagcaagacatgtgattatgtactctgcctgaccctggtccctctagggtaccctcttttactacatttcacagttacttttcttctgaactactagaactaagtcttgttttctagaacagagtacttg

SEQ ID NO: 567494 - DNA, 150 bp, Homo sapiens
  misc_feature (34)..(34): n is a, c, g, or t
  misc_feature (103)..(103): n is a, c, g, or t
ctcatcctctcctattacatagtgaagcccatgncaaataggaagaagctcagtatcgctcctcccaccataaccccccttaatgcctcctgaaccatagttncctccactatatatccccccatgttcctgctaccccaagttttcact

SEQ ID NO: 567495 - DNA, 305 bp, Homo sapiens
  misc_feature (105)..(105): n is a, c, g, or t
caaagaggggcttgtgaacaagaccggagagggacagtggattgtttatactccagtgtacatagtgtaatgaagcgtgtttacatgtgtagcctatgttgtggnccatcaccccctcaaattcctaggggtttgagatcctgtaggtggtatgtgacacccaagccacctctgtcatttgttgtgatgtcttttcttgcccaaagccttgtgtaaatttgtatattacacatttgtacagaattttgggagattttcagtctagtttcccaatctggctcctttaccaaagaaaaaccttgaaa

SEQ ID NO: 567496 - DNA, 531 bp, Homo sapiens
  misc_feature (531)..(531): n is a, c, g, or t
attctagaggcctagggagccgcacctggtcatgtaccatcaataaagtaccctgtgctcaaccagaaaaaaaaaaaaaaaaaaaaaaaaaaaaaaaaaaaaaaaaaagggaaaaaaaaaaaaaaaaaaaaaaaaaaaaaatttgtggggcgcgcgcgcccggcggagccagaagaaaaaaggttttctcaaaccacactttgggttgggggcgcggcggcgcgcccaaaatgatggattaatggagcaaactcggcgcacaagcagcacgtgacccaaagaggcaaccccggcgcagacgacaagcacggggggcggggtgctctctctcacaaaaaataaaaaaaagcgcgcgccggggggaggccagcagggggggctggttggagaaaacacacactccacaagagggggagcgctcgagggaagcgagccaacaaggggggcgactactaacacaaaggaggggcaccacaagggcgagcgccgaaaattaaatagtagcgcgcgagcgggggggggggaggtagn

SEQ ID NO: 567497 - DNA, 362 bp, Homo sapiens
aacaggatgtgcactgcccctaagtgagaacttgctctacgtggtcaggaaagagcaggagaccaagcagagtctgtgagcaggagtagaatggaaggagaggcggctggagaggacaggtggtggagggccttggcttctgctaagtgagatgggaaccactggagggtttgaacagaggagtgccttgattgatttatattttgcaagggtcattctagctgccatattgtgaaaaactttagtggacaagggcagaaggaagagggaagacctgttaggaagctactgcaatgttccaggcttgggcctgggccacagcaacagcagtggtcaaatatctagatttattttgaaaagag

SEQ ID NO: 567498 - DNA, 145 bp, Homo sapiens
ctgatgatcattacagcatcataaacaactccactgtggaaattcttagtatatgttggctggccgtggtggcatcacacctgcaactcccagcaccgctgtggaggccaatgcagtgcggatcacctagaggatcaggtaattc

SEQ ID NO: 567499 - DNA, 168 bp, Homo sapiens
  misc_feature (131)..(131): n is a, c, g, or t
acggtcttctagaggatccctgggctctgggcctgtccaggggcacaggaaaagggcgatggcctgagctgatgcttcctggccagatctctgctagtccctcccagacatggtcgcaccaggctccccanaccaatgacgttcctgtgcatggaccacgccactgca

SEQ ID NO: 567500 - DNA, 362 bp, Homo sapiens
  misc_feature (87)..(87): n is a, c, g, or t
gtgcagggattacggggcatagagccacgagcatctgggcacaagaacaattctttaaactggatctacaatggtcagggcagctcnaggagagcagcagtttctggaactttcgggctcttaagaagttttcaaatggacctatgtatgggaggacctggggtcaggggaccagagacaactaggggctctggggtgtacgcaggtcgggagaccccagcccatccggcctccttgccccgccacctcccggggcactgggaggacgccggccacgacaggctcctcggcttccagatgactcctgaggactacgaaaagctgggctttcccggtgcccgggaactggccaaaatgttccg

SEQ ID NO: 567501 - DNA, 305 bp, Homo sapiens
tttatcactgggcttgtttacacaggagatggagcaagtcgttacaacttgagcaaaacatatataataaatcattgtcattccttatatcggtacaagcccatcctttgttgatcgcctccacatttatatggcatagtcatagctgttgtctgacttacctatgacattatttttatatcccttcatttgtggatcttaagatgttgcagaaggttcattcctgtaccccaatacagattcacttcctttagctgccttttctagcaccaatatgctttaaaaaaaaatgcgcaaacaacaag

SEQ ID NO: 567502 - DNA, 187 bp, Homo sapiens
gaagtagaggggccaattataggctcatggcaaccttcaactccggggctcaagccatcctctcatctcagactcgggagtagctaggacttcagtggtcacgccaccatgcctagctaatttttttttattttttacggagacaagtctggctatgtcgcctaggcgggtctggaactccgggccg

SEQ ID NO: 567503 - DNA, 158 bp, Homo sapiens
cggcatggggtgggctctgccattttttgaaggctggcagggggacccctcaggaggtacttggggcagtaccatatgctgtggctcctgagtgagagtcagctctgcgccccacaagaccactccctacccagaattcactgtcatcatgtgctggg

SEQ ID NO: 567504 - DNA, 1236 bp, Homo sapiens
cgagttttttgatgccattgggttccagaaggtgtttcttcggccgctcaggatcaggaggaccgcctgaggagttctacgtgctgagcgagaccaccttggcgcagtcccagagccttggagaggcacaaggaacagcgtgctggcttgcgggagcccagtgcgcggccaagcgtggacaggcgagcgccgtcgtactttcctagcccttcgagccctgggctctagaagttcgaactgcctgtgggacttcgttcaagcctcacagcagaggagatcaagcgggagcagaggctcaggtcccgaggcggttggaggcgggcttgacgcgttgcttggggcaccaaggcccgatgccgggaagaagcgagcgagccagccggggcgcttggcgccagtttaccaatttacacgtctgatggcgcggtgcggccattccccggatggtctgccatcctggcagagggaccacttttctaagcggcttcgagggatcccgctcttgccagaggccgtgtgtacacaggagttctcgcaccaggtgaaggcccccttgcataaagccagaattgggcttggcatttgaggaagccttgctatgcccttcggggaggtgcacacaactctgtgccccggatgcaccgacaaatcccttggcctttggaaccggattttgcatcatttggatcgccctttttggccttccgttgggccttttctcggtgggcaacattggctcgctcttgacgccaccactaaagggcctggaggtgcccagatgcggggacccccattcgttagaaaaccaccggagcttcttttggcacgcactgctggagaacgtcttctgggcgaacttacgaaccgtggggtgttgagtcctcaaccctgtgagtgctttctgtgcacaagggtgctcccgtgtgaactccacccccagggcacccctaggtgcttcaagcacccttttgggatatttgggtctccccttgagaccggatggccccaacggtgaaattcgctaatgtgcccctgtggacgcccacccctttggggtgtggaatcccccccgcagtatgggtgtgcccagtattccgcctcattgttgagtggtcacgtgccaacgaattcttcggacgaccctatgtctcacggagctgcaacacgtgccgtggagagtcggtcacagataaattttatgtttttagactcaattctgtgtcgcacgttgtatgg

SEQ ID NO: 567505 - DNA, 350 bp, Homo sapiens
  misc_feature (259)..(259): n is a, c, g, or t
  misc_feature (298)..(298): n is a, c, g, or t
  misc_feature (300)..(300): n is a, c, g, or t
gtgatggcactgatgtcactgtattgttgaaatgcttgtttctgtgctagtccattcctgtaggtggggactccttgaagcagggacagtgatgtagggaaaggagcatgagtttggagccaagttcagatcccagctctgctgatgactgctgtaggacttcaggcaagttactgagctggcccaagcctcagctttctcatctgttaaacagggataataataatcttgactgattgggttgctgagtgatgcgganacaatgtatacagtgtgctcagcaaaatacctggcatananaagcggtcctggccctgggcacagttgacataaccagcggtcacatgagt

SEQ ID NO: 567506 - DNA, 350 bp, Homo sapiens
ttagcaggtatcccctggctagcgctcgggttcacaacgaatgccaagcagcacgggcaggctgaggttcctgccggttcctatggctctgtctccgcacgcgatcccggccgcttttctgcgcaactggaggctgactgctgctgccctttatacatgtagtacgtgaaggtccacgggcgcggagactgcaactagcagcgccgtcggattctagcctgtcagaggcgtctgtccggagggaggaatcatccatggatgtggaccagccatctcccagtgctcaagatactctatcccttgcctccgtatggaacccccaccgtggggcacgcacacggaaaaggaag

SEQ ID NO: 567507 - DNA, 165 bp, Homo sapiens
aaggtctctgtcggagcagcggacgcggtctctgttccggagatgggggtttgttaaagtagtaaggatagggcctcttttaggagataccaggtgaatttaggaggacggaccgagagggtaaaactaattatatttcttcggaaacgcttgggtaataaccgg

SEQ ID NO: 567508 - DNA, 311 bp, Homo sapiens
cagatcaagaatacgatggcactcacagtcgcatcataatcctctctcaaggacttcaaagcgtgctacgccgcacgtaatagctttttggatgacttctagcaagcctcgctaacctcgccttaccccccactattaacctactgggagaactctcagtgctagtaaccacgttctccggatctgatatcctagtctccgttatcggattcatcgtcctagtcatagcccctctcctgtcgtgaacattactcatttacaccaccccagtgagttatgtgcgtactaattatgtgcgtactagttatgtg

SEQ ID NO: 567509 - DNA, 172 bp, Homo sapiens
ggacaagtggtgcacagacttggtattgatgtcttatcgcatttgagtgagatagagaatatttgtgatttgcagaaggcagagatatctactgtataattgcaccagagtacatttgaaaggaaggttttcaatagtgtaatactgcagcgatgtagatgaaatcacaaat

SEQ ID NO: 567510 - DNA, 200 bp, Homo sapiens
  misc_feature (70)..(70): n is a, c, g, or t
acagaatgctttacaccatgaagtaggaggtctaggtatccccatttcacagacaaggaaactgaagctnagtttcccaaaatcacagagagaattttgccaagctgggattcggattcacacagccttgacgtcttgagcccacaccttagtcgccagagtcatccttgtctcgtggacccgaggccactcctgccaat

SEQ ID NO: 567511 - DNA, 367 bp, Homo sapiens
gactgagctgcctcagagagttgtcttacatgtcctacctgagcccgtcgtctggaatcgtcttgcagtggcataatcttgtgggccttcctcctccatcttcagatcctttaacacatctcttggctgagttcttgctggtggctgctaactcgatgccaatttcatctcgatcttgcccctcttctgtaaccgccttcttgagccgctccatcaggacgctcttgttgccgcccgtgtccaggttccgcttcttcagctccgcccgcacatcgatcaccctgcagctcgctgagccgcgctcgtcccagtctccgtaacgccctgggccgcgagaagccgtgccatgggcccgagtcgcccgacc

SEQ ID NO: 567512 - DNA, 251 bp, Homo sapiens
  misc_feature (8)..(8): n is a, c, g, or t
  misc_feature (96)..(96): n is a, c, g, or t
  misc_feature (149)..(149): n is a, c, g, or t
  misc_feature (156)..(156): n is a, c, g, or t
tgggcctntcaagtcctcctgtccttgctgtttctgatgatttggggcttggagccctttgcctcatctgagactgaaatgtggggtccaggatgnctcctcctcttccctcctccctcagcctgcaacctctatcctggacctgcctnccttttncccaactatgcatctgttgtctgctcctcttgcaaaggccagccagcttgggagcagcagagaaataaacagcatttctgatgccaaaaaaaaaa

SEQ ID NO: 567513 - DNA, 717 bp, Homo sapiens
  misc_feature (20)..(20): n is a, c, g, or t
  misc_feature (91)..(91): n is a, c, g, or t
  misc_feature (103)..(103): n is a, c, g, or t
  misc_feature (127)..(127): n is a, c, g, or t
  misc_feature (150)..(150): n is a, c, g, or t
  misc_feature (190)..(191): n is a, c, g, or t
  misc_feature (209)..(209): n is a, c, g, or t
  misc_feature (231)..(231): n is a, c, g, or t
  misc_feature (238)..(238): n is a, c, g, or t
  misc_feature (259)..(259): n is a, c, g, or t
  misc_feature (261)..(261): n is a, c, g, or t
  misc_feature (318)..(318): n is a, c, g, or t
  misc_feature (391)..(391): n is a, c, g, or t
  misc_feature (394)..(394): n is a, c, g, or t
  misc_feature (452)..(453): n is a, c, g, or t
  misc_feature (462)..(462): n is a, c, g, or t
  misc_feature (483)..(483): n is a, c, g, or t
  misc_feature (542)..(542): n is a, c, g, or t
  misc_feature (583)..(583): n is a, c, g, or t
  misc_feature (689)..(689): n is a, c, g, or t
tctccttcaaattaaaaaanaaaatacaaaagctacgtagaaaacgtcagatcagacgactaaactttcccgactcagggccaagttcttnttgagcctgcgntctcgggacgcctgcgagtgggtntccgagtacggggggcgtgtcgngggcgggtagtaggcctcttcctcctcctccttgtggggnntcctcctctcctccgacncctttttcctcacagcctcctncagtagncgcccatcataggggaggtcncnggacctggagccgttgtcccgagggtcccgggtacggtggtggtgggacctggggtnggcaggagggcgctcccgaggagcctgaatgttgtcgtagatgggggtcgcctgtggtagcgtgggaatgtcnctngagttgtcttggtcatagaggtcgtcccggctggggctctgcgggggcatgtagtgcnnggcttctcncaccattattcgtgggagagntgctccctgactcgtgcggtgctcggcggggtgaggtcgtccagtggcgtctatcggancgggcccggggccgcctggcccgccagcccccgcctgcctnctccctggcgggctcctggtcccatcccctgggactccggggggagtggccaccccactcctcatcccggatcggggtgagggcagggccccgggaaggccgagancgccaatcgtcctcgtggagggaggtga

SEQ ID NO: 567514 - DNA, 175 bp, Homo sapiens
cggggtttcgccgttggtccaggcttgtcttgaagtcctggactcaggcagtctgcccaccttgtgtgctcccaaaggtggttgggttacaggcgtgatgcactgtgaccggtccccacactgtctgtgtgcttgcgatgctgctttagagtacttggaaaagctgtgaggggcg

SEQ ID NO: 567515 - DNA, 362 bp, Homo sapiens
cccccccagaacaaactttaaacctctccttaggtccttatattcctaaacgatggggaacctattgtttttggtgggtttataaaaatgggatcttattatacacatttctttataactggttggccttactctacaatctattacagacagccttccaggtaattccatacagacttataccacattctttgagtggcgaaatattccacagtacaggtaaatgacaatttatacttcctactatggagggatattcaggctgtttttagtagcaaatattggaaacattataaaaatatccttacatatacttttatatgtggatactttaattcctacagaacagattcccagaggag

SEQ ID NO: 567516 - DNA, 345 bp, Homo sapiens
atcactcatacactcgcacatgactccccagtatcctcgatccggacggcgatcgatcgaagcccttcaagcccgctcatctggacaccaccaatcccacctgtacacacccccgtgcacaggatacccccactctccccctccctcgctacacggaaaaggggaagaagcatcggacataagaggccccatcccagtggacaacgccatccacatcccgaccgatatcggacctgcgacccatcctggtcccaacccaacatccgctcctactagggcgcttgtaccccgggcatgaagtcccatctgtgggggaaagtaccaacccggaccataccgacacat

SEQ ID NO: 567517 - DNA, 144 bp, Homo sapiens
cacccaccccatgaaaaggaagatctaacagacactaggaggttgaaggcgaaggagacctcgctgggggctgcttgttcgcatgtctaagtgttgggtgtgtgttcccgtgtatgagcttggtggcgctagtcttgggatgtg

SEQ ID NO: 567518 - DNA, 130 bp, Homo sapiens
ggcaagctatccggttcatacatgggaagataactgtataaaactatctgagctgtgaaaagaagtcactggttcggccaggtgcaatgacttaacgcctgtaatcccagcactttggggggctgaggcg

SEQ ID NO: 567519 - DNA, 160 bp, Homo sapiens
acccccccggttttgggattggggggggataccccgggttcgggtggggccaatttttaacccctcttgggaaaaatttttcctccccccccccgggggtttttttttgggtggggttccaacaccccttccattttcgggggttccccccccaccctta

SEQ ID NO: 567520 - DNA, 107 bp, Homo sapiens
tgtcagtcagtgcaccatgaagttgaggcatatatggagacacctcagccccacctctctggaacagtgaaatgatgattggtggagggagcacaggtcagcgtggg

SEQ ID NO: 567521 - DNA, 143 bp, Homo sapiens
caaacatgcataccctactggacgccgagcgggtcggccccgcctatactgaggacggcatgctgctggcgcgccgcaagacgcgcgaagcactcgccgccattgccgcgcgcatccgccccggcatgctggaagaagacgct

SEQ ID NO: 567522 - DNA, 287 bp, Homo sapiens
  misc_feature (55)..(55): n is a, c, g, or t
  misc_feature (250)..(250): n is a, c, g, or t
  misc_feature (253)..(253): n is a, c, g, or t
ggatcgagccgcaccgctctcgtgaactgatgagttggctgtaggtgtgtgggtngaattctgggctttctagtctgttccactgatctctatttctgtctttgtgccagtaccatacggttttgatgattgttgctttgtagtatagtctgaagtccgggagcctggttccttcagctccatttttctttttcaggatgtctttggctattctgggtcttttgtgcttccaaacaactttaaaatattntgntcaagttccgagtctcacgaagcggggccgagct

SEQ ID NO: 567523 - DNA, 172 bp, Homo sapiens
ccataaggataaggtatgcataatcccttctgattcctaagatgaagctgtttttgtgctctttgtcatcattggccctcattccaagcactttacgctgtctgtaatgggatctatttcagcacagcaatatctgagaattgcaaaactagaccaaagtttcacaacagat

SEQ ID NO: 567524 - DNA, 395 bp, Homo sapiens
ttgtttttcccaacaacagagggaaactgcattgcaaggtcattaccaacaccccccaaaccagggatgcttttttttttttggcacgcttatcgacccttcagcaactttaaactccttttaaaactcttctctcctctgtttccttcctaactaaaggctgctccccttggaatatctttgcctggtttctatttctctatcttcttcccttctctatctgatgactacatattggagtgctttgggtaccaccctagacattagttccatgaatttttgtcagaaatagatgctgaataccatgacttgccctaccacaccacagtttgatggcttagcaatagcatagttttattgcaatttctcaaactgcaattgaaattttcctgaac

SEQ ID NO: 567525 - DNA, 591 bp, Homo sapiens
gcaccagcagcattgaagactcagatgatcaggcggtaagatacataaagtgcatggggatacactggtatgtaagcggaacaggtatgcggggtgagaacccaccacatgacggatgcgcacacagttgcactggttgccctacaagcagctactagctccagatgcacggacataccaagttctcactgaacttgatgactgtggaagccacggacacctgggtgcacagtgtgatacaccaaggtctgaagtgtagtcttcggctagagtaaagaagacaacctgacatgctgccaccagacctgaacagcaggcaatgttctccaccttcatcgggaacacatccgtcctaatgcccgaccgatggactacacacgcttctttataaatccagcaacattgggaagaaacagatctgttaaccgaggcagattgtttagagcgaggttatcctttttgccggcagttggtaccatgacaatctatcgccttagtgcggacatgttgaagaagtcgtttcgggtgacagacggtagaccttccgctggtcacttttgtccctgaggattaggtccatattcgtgccaa

SEQ ID NO: 567526 - DNA, 538 bp, Homo sapiens
caaatctaaaaattttaaattaaaggggggtcccccccccaaaaagggccaaatcccgggaaccaaaaaaaaggggccccttcccaaaaaaaaaaaaaaaacttgcccaaaatttgggggttggggcaaaaaaggcaaaaaggtactccctgggaaaaaatggggcccccaaaaaatggtaaagatattttttattttttggccccgggtttaaaccaaaaaccccccttgaatttccaacggggaaaacccggtaaattctttcccggggggactgggaaaaaaaacacccccccgaatttttgcgtttagcccaccacccttcggaataaaaaccaagcaccctctggatattataagggcccccaaaaaaagccggcggaaaaacggaaacaagcgttctcctcggaaaaaggttccccgccacaaatcccaacaaaaatacagccgcgaaaataaaaatgtaaaccctggggggctcaaaaggggggacaacaccaaaaaaaatgggggcccaacataccccgctttaaaaacg

SEQ ID NO: 567527 - DNA, 213 bp, Homo sapiens
tccagggctgggtccgttcagcatagccactaagtagattaggttcgccatgtgccccttcaatcttagtatttttctcctggatgaaatatgatcttattgactctacctggtacatagaaatgtttagagagcacatgtattaatatatcccatgtactctgtggattgtaagataagggctgactattatgcttcattattctttattta

SEQ ID NO: 567528 - DNA, 170 bp, Homo sapiens
gcattaaagtgtaataacgctgcttctctacacgccggtcatacctggaacaattgcgctcactcataccttcggactcaactgtcccgtgacgcttacgtcaacctacggctgtgacctatactctacggccaaggtgccatcacgcgttcagcggttattacggctca

SEQ ID NO: 567529 - DNA, 158 bp, Homo sapiens
ttgggtcgttgcttctgctaatgacagaagatgatggaagctattgtacagtctacagcagaacagctcactttgcctcagcttccacgtcaaagtaatgaaaagcatgctcactagaatctcacaggcacactgtggtacggtatgatgacaggacg

SEQ ID NO: 567530 - DNA, 133 bp, Homo sapiens
aatgtcctatcactctatgcttacagaaaatatagccatgattgaaatcaaatagtaaaggctgttctggctttactatttgatttcaatcatggctatattttcttagctcatcttaaataagcagtacact

SEQ ID NO: 567531 - DNA, 1056 bp, Homo sapiens
  misc_feature (1019)..(1019): n is a, c, g, or t
agacttggtaatggcgacgggctttgtcagagcaccataacatggtgtgggaagtgacaagacaaatctagatgccgtacatgcagtgacagaagagctccgtgttggtgatggacaagagagcctcaggaatgaatgactcattggaggttgcgtgcacgtgtagagtgagacatttgccagtcttcacctggatataactcctgtgatgaacacatggagccttgatgaccttcctgaacttcaggcagttcatcagtgatcctacccaatctggctatgtacctagctgagttcagatgtttcacagtcaaggaatacccaagatcatcttggaaccaaaatagctcagacatagccagaaactacgttaccgtgaaaagtgaggtggactggctaacagaatgggcaaatatcgtgaccagtccacaacagtccactgatgctgtgctcattttacaatacgagtcatctcctgtacacatcatagccgactagcaaaagttgacattcctatggacgccgtccaccaagtgtcctcttcttcgaagagtgaaccagcctttcccttattcacattgggcggcggaacaccagtaagacccgccgggccactcgggagttcgaactggcttttcggcattgtctccccgtccgtgtagataactggggagggggaacacctggcgcttaaagaatgggcccgctgttgaaagcgacgcatgaggtctcctaggggacccaagagcagtgcgcacttttcacattctttcaccaacgagcgtggaaaaagagagactaccaagcggcacgcagcggagttctgcggtcacctgcatgcacaacacggatgattcggtgccatagcacacgcttatctcgcccacaagggttttaaaaagtggcgcacacacaataaaggggcgcacccatcgacagacgcgtcaaaagtaaacagccgacatgaatcgcgtcctttatgcctcctccttctcgactccctcctctaccactacctngccgaaaaaacaagaaagagagagaggaagagagtgt

SEQ ID NO: 567532 - DNA, 445 bp, Homo sapiens
  misc_feature (122)..(122): n is a, c, g, or t
  misc_feature (309)..(310): n is a, c, g, or t
ttttgctattagttttgtgccatatgtaagcattatttaaacattggccacaattaataacaacacatcaatagatgtcataccttttatcctaaatgtcagaagaaattctaatatgaacntaagccagtcacagtttgatgacaccatcatcaggaagcaagatttctaatctacttggaattcttaagtttcacttaagaaaacaatgtaagaaatgctgaatagtaatttgacttaaagagacaagttaagagactgtagagacgaccaaattcttatattaagaaggtagtgattttgattggnnattggtggcacataacatttaatcctggcatttgggaggcagagacaggcagatctctgagttcaagaccagcctggtctgcagaagcaagttccagggtaaccaaggctaaacagatgaacaccctgctcccct

SEQ ID NO: 567533 - DNA, 733 bp, Homo sapiens
aatctgagccctattgtggaggaggggagactgagggggtgctggcatctcctcacttgccagcacctgtacgcattctcgagtatgcaccctgccttggtagctgggcagttccctcctgggagtcgctcactgggctgaagactaaggaattggagaaccagaagcttggttcccagggtggggggaatgtgatacctgggctgagggatgggagttagtcacttcctctacccgacccctagaagccccttgtagtagctgctcctgtgtgagctgtggtgccctctccttctccctttggctcctctcctgctgccttacagtgcccccagatgcctggctaggggcatggacttcacctcctggtcctctcttcctcaggtatggcgttgacgtgtggatgtggccgtgtggccagctgccctgcgggcttccgtatcacatgtggcggcagcggatttccacatcgcccatcagtggtgactactgtggccgactctgcggccactcttccaacggactgctgacctccggaccttggacacataactcagtggccatctaacggggaaagctgcggagcggcattgctgcattgcctgatggcccagtatgcaacgatcccgctatagccccttcgcccccttgcttgctgcagctgtgacctgtctctacatgctacgtctccaggggcataccacatgggtcacagctccttggaagttctggc

SEQ ID NO: 567534 - DNA, 243 bp, Homo sapiens
  misc_feature (101)..(101): n is a, c, g, or t
  misc_feature (142)..(143): n is a, c, g, or t
gacatgggacacggtcagtgctgccctactcggaacgttgctgtctcgatggtgatgggtgctgcatccttgttcctaagcccttctaacgagagtctcanacaagcggaggcgagggccacttcaaccccattctttccanngcgcccgcacatagcaccttgccaccttgagaaccaggaacgcacccttctctgtgggagctctgactggctgtagctggaaaacaaaacagcaactttg

SEQ ID NO: 567535 - DNA, 429 bp, Homo sapiens
caccaggagagagagagatagagctgctgtaccgtgcctgtaggatattccacggctgaggatcccataggcatgaggagcctgtcagtcctgatcttgatgctgaacgcctgcctggcggtgagcgctgaccctgtgccaacgacgcccgacatcattcaagtgcacgataactacaatatatatcggatctatgagaagtggtacaatctggacataggatccacctgcccctgactgaataagatcatggacatgatgacagatagcacgctgatgctgtgagaagacgctacagacgccgagatcagcatgaccagcactcgttgtcggataggagtgcgtaatgagacgtgaggagcttatgagacaacagatactgacggtaagtctctctatcactcccactggatcctaaccatggttctg

SEQ ID NO: 567536 - DNA, 259 bp, Homo sapiens
tagtaaaggctaataaccagctgtataaaagaacaaattagcatatataacagtatgctaacaggatttaagactattcactatagggagttatatttaaaaatccacttttatactgagtcttactacataccaggcactgtactaggccatctaggtaactaagacaacgtaggttaagataggaaagcaccatacatcagtcctttggttaccaaattcaattattaacttacaaacatcctccaagatcaagaaa

SEQ ID NO: 567537 - DNA, 384 bp, Homo sapiens
  misc_feature (22)..(22): n is a, c, g, or t
  misc_feature (37)..(37): n is a, c, g, or t
  misc_feature (242)..(242): n is a, c, g, or t
  misc_feature (271)..(271): n is a, c, g, or t
  misc_feature (325)..(325): n is a, c, g, or t
  misc_feature (365)..(365): n is a, c, g, or t
  misc_feature (382)..(382): n is a, c, g, or t
aagccttatctgaggctgtaancctgctcttttggtncctggaacatcctcccaaagcctcagtgtttacaataggcagcagtgtgtactacaattgtcttgtgaaagtgatgacctggtggtagaatactccttggctttgcttggcaagaacttcattgtgctgtccaccagtgggaccatgggcatactagggtgggtattcacaccctgattttggggggctgctgagaatctctagntcacactgcttcttgccaggagtgaattncctagatttatcaaccactccagttattttaagtaactcctcaggctgaatagntccctatcttgcaatatatctataactcattcattgcatnccaaatgaagtatttcnct

SEQ ID NO: 567538 - DNA, 554 bp, Homo sapiens
tggtttacacattttccttccttttattggaaaaaaatttaaaaaaatgggcagttaataaagggcacaaacaaatcaacggggatatactagtggaaaacacaatataaaactaaaatgccatgggcttcttaaatgggttaaaagcaaaaatgtaacaggcagaaagtctgtttcaaacaatttaaaaagctatgtgtttttaaattcttcccaaattcagatttttacacacccacaaaaatagctggtggtgaaggaaagcgtgctcatacacaagaaagctggtactccgtgaatcctctcagggaaacacatttttgaaactaggaattagagagttcagcaagcagatttaataatttttataaaaattgggagtctctataagagagtgcctacgagtgggccccaagaggcctattaccatattattaagagttacgtggcataggtctccacaagagcaaacagagtctcgtgtcacagcctttttatagccaaaaagcgtgcttttccccagaaaaagagccaaatttaacaattaagtgcac

SEQ ID NO: 567539 - DNA, 321 bp, Homo sapiens
ggttctccactaactctggtagacaaactagtatggaaacctccttgcagccatccataatttcttgctccaagtcgggggtacatttcacttttagtataggactctgggccaggcatagtggctcacgcctgtaatcccaacactttgggaggccaaggcggctggatcacctgaggtcagatcaagaccatcctggctaacacggcgaaaccccatctctactaaaaatacaaaaaattagccaggcgtggtggtgggcgcctgtaatcccagctactcgggaggctgaggcaggagaatggcatgaacccaggaggt

SEQ ID NO: 567540 - DNA, 643 bp, Homo sapiens
aggaatcttatttacccgtggtgcacatttgcgatggcactttcagaaatggagggcccttcgacgaggacgctggcccggtccggcttgggccaaggccatgtccccgccatccatgtcgacgtcatagggatgaggacaccgtaggggcgcctaattcttataggatgcaggcacgtcttcttagggcatgtttcagcagctcagactgcatctccttcttgttgggtcaacgggtgttaaatataatatgtctgactttctgtgcaataataacgtggtgcctttaacaggaatcagatgtgaattagacacctcatttatcaaacctagcatgtcatttctgtagttcctctcatttgacgttttcatgtatgacaacatgtttcatttgttgtacatacccagcttttcaaacatcttttgaattggaacttcattggcatccaccataacacgtttttcatctagcattaagacattcatggaaagccatttggatgacatccagagtggatgatcgtctgggatgattggtgttggaggagtaatgatagtccatcctgctttcttgaaaagatcaatctggtgacatggtcggtcagggttggaaagcacaataacaggtccaatgatgttgaag

SEQ ID NO: 567541 - DNA, 741 bp, Homo sapiens
gcccaggtcctgccctcttcccgcccgccctagggtccagctcccttcacctaggagctgccaaacatctggatcaacctgggaacataaagaggggttgaatctaccattatcgcgcctttgatatttcacacccagacctcctgctcacatccgtaaagcccactgattcttcttacgtacactttttatgagaacacagacatttctaggaagatggtggcagacacaagagaccctgagcttaaacaaatgcccagacaagatgccgaagaggacccaagatgctggcaccaacagccgctcccggtgcagccagccctcaactctctgtgtttctagagggcttacaacatgtccaacagcccatgatgacccacactccagtcgtgagagggccaccacgctgaaccgggggactctcaaaggaaagacccaacgcacaggccaccagcactcaccgaacgcaatcccagtgaaggcgaggacgacataccccaaaaatcggcccacgacgccatgacccgacacgggaaaacaacacaccgcccgggacaggcacacaaaactagacccaacccgtggacctcacgcactccactaacgacatggacaccaagggccacagcggatcgcgcgcacaagggaaacacaggacgacatacccccaagacgcagcacaaaggcccacgcggcaacaggaacaaccaacagaacactggcacgcacaccacagcagcg

SEQ ID NO: 567542 - DNA, 203 bp, Homo sapiens
agaaagcacaaaagagcattcctgttctgaacttaattgtttccaataaagaagagctagttggtgacatagaagtgacaagaaccttatgaggaagggactcatgctagagcttaaaaaaccactggacataattagagatttttagaaaagtaggtatcagaaacatctcagaaaaaaagatataaatccatacctctaaa

SEQ ID NO: 567543 - DNA, 235 bp, Homo sapiens
atcgagcgcttaccgtctgagcagctgggaatgaacaattttatgaaggaaaggtggatgaaattgttgcaacttaaaaggggcaacttagacgcccccctcaagacgcaggaccaagtgcagagaggactcttatctggatgtcgtagtcagacagggtgcgtccatcttccagctgttgcccagccaagatcaacctctgctgatcaggagggatgccttccgttatcttgga

SEQ ID NO: 567544 - DNA, 215 bp, Homo sapiens
gaagctggagctggggcagtgccatgcagccgctggttctcgctcggtggccaatcagtgggatccgaggtggctcggccatcatgcccaggatctgagcccacatctggcaccagatctagcaagggcctgttgggcccacacaagcttgcttgtacctagtcaggctggtaccggcacctccttgcaatgggtcacccgtccggttcctgctc

SEQ ID NO: 567545 - DNA, 174 bp, Homo sapiens
  misc_feature (37)..(37): n is a, c, g, or t
  misc_feature (47)..(47): n is a, c, g, or t
  misc_feature (53)..(53): n is a, c, g, or t
  misc_feature (131)..(131): n is a, c, g, or t
  misc_feature (133)..(133): n is a, c, g, or t
tgggatgtgatccaatgcatggtgcttaagagcgatngccagtggtngcctantacccagtggcatggctgttttatacttccttttgtttgcaggtgtgctctatagtgggggtgggatatttttttccntnaccagatcttctcctgggccctgggggagtctcctgcaatc

SEQ ID NO: 567546 - DNA, 316 bp, Homo sapiens
actggccccgttatatcctataggcttgttctgttgccattaagttatggcaggacgctgtcaccagaaaccagtggaaaaaggaagaagagaagaacaaatgaaccagtagttcttacattgattatcaagtttagacacaaggtgacataacaaatagaaaacgaggatgttctttacttagaaaataagtcgacgacattgtaaggtcctgataaccgcacgtgctactccttaccagctagatgcaacaacgagcaggaagttctatagagccagaaaatcaaacgagatggcagagcatagaagacttttt

SEQ ID NO: 567547 - DNA, 235 bp, Homo sapiens
acctcacacgcactgggtgggtgtgggtatatactaagtggatgatatatttacgggggaagggcttgtgaataggcttattctcttgtcctttcatacagggaggaactttgaagtagatagaaacgactggattactccggtctgaactcagatcacgtaggactttaatcgttgaacaaacgaacctttaatagcggctgcacatcgggatgtctgatccacatcgaggtcg

SEQ ID NO: 567548 - DNA, 399 bp, Homo sapiens
  misc_feature (39)..(39): n is a, c, g, or t
  misc_feature (64)..(64): n is a, c, g, or t
  misc_feature (139)..(139): n is a, c, g, or t
  misc_feature (225)..(225): n is a, c, g, or t
aaggttattaaaaaagtattttgggccctccatatatcnggaaaaatataaccaaatttgaaanctttggatgtcagaaaagtataataaatcctgtagccccccttacagaaaccttatataaaaaataatgatttantcttttgttaaaaattatttagtactggctgggcatgatagctcatgcctgtagtcccagagctttaggaggctgaggcattaggntcacttgaagcccaggaattcaagaccagcctgggcaacatagtgagaccctgtctctacaaaaaaaattaataaattagccagacatggtggtacacacctgtagacccagctacttgagaggctaaggtgggaggatcacttgagcctaggagttcaaggttacacacacgc

SEQ ID NO: 567549 - DNA, 490 bp, Homo sapiens
atgaaatgaaaggctcaccacttcataggctttaaggaaattctggccaggtgtggtgcctcactcatgtaatcccagtgctttaagaggccaagatgggaggatgtttgagccagctgtttgagaccagcctgggcaacgtcatgagaccccatctccacaaaaaaaaaaaaaaagaaaatgggggggtgcgggggctcatgtctgtaatcccagcaatttgggaggctgaggcggggggatcacttgaggtcaggagttggagaccagccgggccaacagggtgaaaccccgtcactactaaaaatacaaaaattagccaggcgtggcggcaggtgcctgtaatcccagctactggcgaggctgaggaagaatggcgtgaacctaggaggtggaggttgcagtgagccaagatcatggctggctggcactccagcctggggcaacagagtggagactccatctcaaaaatattaaaaataatttaaac

SEQ ID NO: 567550 - DNA, 427 bp, Homo sapiens
  misc_feature (207)..(207): n is a, c, g, or t
  misc_feature (213)..(213): n is a, c, g, or t
  misc_feature (304)..(304): n is a, c, g, or t
  misc_feature (315)..(315): n is a, c, g, or t
  misc_feature (336)..(336): n is a, c, g, or t
  misc_feature (354)..(354): n is a, c, g, or t
  misc_feature (379)..(379): n is a, c, g, or t
ttgagatagagtttcactcttgtcacccaggctgcagtgcaatggcgtgatcttggctcgctgcaacccacctcccaggttcaagcgattctcctgcctcagcctcccaaagtgccaagattacaggcgtgacaactggcacctggccctgaaattttttttttttaacaacaaaaaaaacaataaagagcaaacagaccagcagantaaatntaggacaaacctgggccttgagtcatggctctaccacttaattaaacatagtagtcttaatacttcgtaggaatctcaggaccttgttgtncataggggctnttgggaggaccaatgagagcnttttatttaaggcctttntttattcaaagttttggcccattgnttttaaaaacgggcagcaattatttttgggagaataataattattttc

SEQ ID NO: 567551 - DNA, 450 bp, Homo sapiens
tctagaggactcccccccgtcacgttacctcaaacaatcagaggtattaaccttcacctaaatccatctaatactagagtttcatggaacccgactttcaacttgaaagaaaatagtcacaccggccaggcgcagtggctccatctaatattttgtattttcatagagacggggtttcaccatgttgcccagactggtctcaaactcctgactttaggtgatctgcccaccttggcctcccaaagtgctgggattacaggcgtgagtcaccacgcctggcttctatttattattattattttttgcagacagagtctcgctctgtcgcccaggctggagtgcaatggcatgatctcagcttactgcaacctctgcctcccaggttcaagcgattctcctgcctcagcctccagagtagctgggattacaggcatgcaacaccatatgcag

SEQ ID NO: 567552 - DNA, 894 bp, Homo sapiens
ggtgacatctacttcaataacgtgtgcgtgccaccgccgaggtcgttgtgcttgcttgccaggatgccagccgatgcccaccgcagtgagatctcgaatgtcgcaggtgccatacgggcactggacttcatggctgcaacaaccaagctatggcatcgtgggtcatatgcccgtatcaccccagacttcgcagcactcgacgcgtttcagtcgtcaagtcaggaaccatgagtggtgcgtgctcaagcagcaggctattccctggttggcctgcgccgatctccgtctcacttcggcagtgctgacatgggtagtttacctagcactaaatccgtgttatgaacctacaggccatcatggccgactcatggcgtcctggcagtcctctgctctgatggccacaagtaggtgcgagcacatgcaccacacatggggtttccccaggattctttccagtcatgtgacgttgcgcacaccacatgacgctgtgtcttgtgcattggggctacatcccattgatgcgctgtcttagcgccgacacagttggacccaggcaagggcactggaagttattggttggggaatgggcccaattgttacgccgggccctgtgtgggcaatcacgaaagggacactagaagcgacagacggaggcgaatcccacatgaaacaggaataccgacccccagtagtcgacgttggaacccttggtttgcggaccccaaagggtaaccgacattcatatgggtcaacggcaaggtattgagatgctgaatgagcaattaccatatttatatgcaagaccacgaaattacgatatatcctggtatacttgggtaaagaccgtacagcgggaaagaagctcagctaggcacttaggcaacgcccacgcaa

SEQ ID NO: 567553 - DNA, 125 bp, Homo sapiens
  misc_feature (83)..(83): n is a, c, g, or t
agacacactgctgcatgagtaaggtggcttgactggtgtacagtatttcaaaggactagtattaaacttgtgattttcgtttngtttttaaggaatacaaaaaataaacatttactaaaaacgtt

SEQ ID NO: 567554 - DNA, 1551 bp, Homo sapiens
catggctgcaggttgctcagaggcgccgcggccagctggccgccttctgatgggctctctggatagggcaggctggcgtcctgcttggcataagagtggccagacttatgccgcatgattgtgcgctggtgaacagtcggctactcatgcctggtggccggagcccgcaccaaagggcacaatcggcgctgctcgccccagataacctttaacagggaaagcgcaccggggcaatttccgacgacacaggcctcggcgtgccgaacagctccctttccgccatacttccgtgagacacgccatattagaggtgtggtcccctttattgggccaatagtgcactacacattcaaaacgttgttttggccaacgacgcctgtgtgcgacagaattcatttacacactaggaatgtgaaattcaagcggggacccacaatttcacaactacttaaacacactattgtgcgacgccgccccggaactatgcgtgtgctatatttcatctcggtggcacccctgtgcaaccccagagtgggcacacactgaacggcgacatttactgtgggcggacatacttacgctaccaaactaacagcgggttgcgtctcatctctttaacccccacacttatgttggggcagctgtggcatataaatggacataccaatcgtgggcgatatggtatctcacaaagtgtgccccttcccaacattctcccgataaacaccctgttggcagcccaggttgtggcacaagtggttgtactctgtggttgggcaaaaccgcaggtgggaagatttcacactggtgggggctggcttgacaccactagacaattttgtggaacaggtacttctaccgggatgagaaggaacctccaagcaatagcgtgggcggggaaaggataattgctgtggcatctcccgcggcgcaacaccacaccatcactgattacttctcaccgcgacgtttataaccagcttagcagacgcgcgccgtagtgaaaagttttcgttgtgcaagcgaagtggtctcaccaagcaacaatgggtgtgcccgtggcgtcgcaatctctgtgcctaaaacgacacactctctaagacgcaacgtcagcaccacacgcgacgcggcacacggaaccccgacggaagaacccatatttgcaacggggcacagcggggtgtaccccccaacgacgtagccgacaattcatgcagacgagatcaaccccatagggtagaagtacagccgcgggcaagcataccacaaaccggggaggagcaaccaggtaggcgagagccacaccagaaacacatagtcaacagaactcacctagcagattatgacgcacgcacgttttcacaacggtagcacagatgacaacagtccacacagaccaaagaccagcaagaggcggacggcctacccgttgtgctgaaaagaaaaaaaaggctcgcggcgacagcaggccaggagcgtacgagtagccagcctaactcagcaccgctcacgctaggtcactagctgcccgcaagcgactgccgacagctg

SEQ ID NO: 567555 - DNA, 169 bp, Homo sapiens
accacccgaatatcaacagattaatagcaaaacgtggtatatacactcaatggtatattacttcaaccttgaaaaaggaaggtaattctgatacatatctacaacatgaactgaacagccatttaaaaattcaatgggtgagaacttcttgggtgtgtgctttcagggt

SEQ ID NO: 567556 - DNA, 336 bp, Homo sapiens
  misc_feature (81)..(81): n is a, c, g, or t
  misc_feature (131)..(131): n is a, c, g, or t
  misc_feature (298)..(298): n is a, c, g, or t
ccagcgagccgtcagcctgataaccgcgatcggcaaacacttcctcgcgcgttgtcagaccatattgcttgcctgcacgantcagctcgcttcccgccagcccgacgagaatcaatgctggatcgcaagcntataccgctctggcgatggcgtctgccagttgtgcttctttcgccgcctggttgtacaacatgccgtgcggtttgacatgacgcattacgccgccttgcgcacgggcaatcgttgccagcgcgccaatttgatacagcgtctgggcgtaaacggtttctggcggcantgcatggcgctgcgaccaaaattttccctgtcgggaaa

SEQ ID NO: 567557 - DNA, 129 bp, Homo sapiens
tccaactaattctgacaaaatcttactttgaagttatagtcgtttagaccttacagttacacaaacacaagtatttctatctcaggcaagtatttaatttcttaaaagctcagtccagaacaccaaaag

SEQ ID NO: 567558 - DNA, 106 bp, Homo sapiens
cacttctcccccatttcatcctctacccgtagtgctacatgtttccattcatttacaccattttgtcccgagtgtaactgtaagcagccacgttctaaaaagacaa

SEQ ID NO: 567559 - DNA, 145 bp, Homo sapiens
aaaaagactttatgaacagttattctatcttatttaaaggtttaaacctgcccagaaattaccttggtatctgaagtttcctctgtctcctcctctaattagcttgttatttgtcatgcaccagacttggagataataaatttct

SEQ ID NO: 567560 - DNA, 554 bp, Homo sapiens
ctaagttggatcgtttctactgtagagtttagagaattctttgtacatttaaaattctagtcttgaccaggtgcagtggctcacacctgtaatcccagcactttgggaggcttaggtgggtgagttgtttgagactagcttgggcaacatggcgaaaccctatctctacaaaaaaagaaaaaaattggctggatgtggtggtgtgcacctgtagattcagctatctgagagactgagatgggaggatcagctgaggccaggaaggttgaggctgcagtgagctgtgatcactccagcctgggcgacagtgagactctatctcaatacaataaaataaaattctagtcctatgttggatatgtggttttacagatattttcttcccagtctgtagcttgtcttttcatcctcttcacatgggctttcacagggcaggcatttggaactttgatgcggtccatttctcaatcatgcttttggactttcctctcttattgtggatcatgcttttggtatctaggactctgtccatcatagatccaaatatttcttct

SEQ ID NO: 567561 - DNA, 866 bp, Homo sapiens
cccagcattgggtataacattcctctaactcacactttaatggccccttgcactcacgcgcgcaatcacgatcaccccacgcgaaaacggtgcctaacgcccctcatacactccgcgtcctgcgcttcccaagagagaaggacctcctcgtcatctctcactcgaaagatcctttcctacgctcccataatctctacttccgcccccctcacccacagtgcacttagctctgtcttaaaacgaacttttcctttgcccgcgacccacacgtgtacccttaattttggatgccccgcccatggccgagactccgcgccgcgccttctctgtaaccaatctcgctcgcccttttgtaaggaggaactctctcctatctactatgttggggtaatttccccgacacccacatcgtatgtctctatcgtctctcacacaattactaatatccctctctctcgctcggctcacacgcgtcacgtccactcactatacacagttttgtctctccccccccaacggtaaaatctctcgtctctctctctcacatattgtgttctactcacgcacacacacatcgcacactgcaggttgctgtgcactctctctctcacgctcgcacccctagtgctcacacacatgtacacctccacttcctctcccccactgagtaccacaccacactctctgtgcttatctcacgccctcctcacgccactacgtctctctctactcgctcctctccccctctccaccccgcctcctcgctcttgcgctctgctctgtctattctgtctcttgatttgaataaaccaaaagaataacaaataaaataaaaaataataagaaaaaaaacccaacaataatca

SEQ ID NO: 567562 - DNA, 314 bp, Homo sapiens
attcttgaagaagtggatctaagcgtaaagatgaactcttttcagatcttgggaactgaaaccatttgaaatttattactaaggtaaagatgtgaaaatttgctaagtcagcccaccttgtcctgcctttttgcagatagatattcatatggacagctataactactagtgttttttatattatttataatctttaccataaatcaattacaagaaaagagtttcagtcctagtatttagccccaaaatgaacatttaaacatttttatggtaattattatattttatgtctttttaaaaatattaaattctgg

SEQ ID NO: 567563 - DNA, 1007 bp, Homo sapiens
  misc_feature (66)..(66): n is a, c, g, or t
  misc_feature (148)..(148): n is a, c, g, or t
  misc_feature (169)..(169): n is a, c, g, or t
  misc_feature (176)..(176): n is a, c, g, or t
  misc_feature (179)..(179): n is a, c, g, or t
  misc_feature (195)..(195): n is a, c, g, or t
  misc_feature (224)..(224): n is a, c, g, or t
  misc_feature (241)..(241): n is a, c, g, or t
  misc_feature (243)..(243): n is a, c, g, or t
  misc_feature (245)..(246): n is a, c, g, or t
  misc_feature (260)..(260): n is a, c, g, or t
  misc_feature (271)..(271): n is a, c, g, or t
  misc_feature (291)..(291): n is a, c, g, or t
  misc_feature (299)..(299): n is a, c, g, or t
  misc_feature (322)..(322): n is a, c, g, or t
  misc_feature (325)..(325): n is a, c, g, or t
  misc_feature (331)..(331): n is a, c, g, or t
  misc_feature (334)..(334): n is a, c, g, or t
  misc_feature (349)..(349): n is a, c, g, or t
  misc_feature (352)..(352): n is a, c, g, or t
  misc_feature (354)..(354): n is a, c, g, or t
  misc_feature (367)..(367): n is a, c, g, or t
  misc_feature (372)..(372): n is a, c, g, or t
  misc_feature (382)..(382): n is a, c, g, or t
  misc_feature (390)..(390): n is a, c, g, or t
  misc_feature (393)..(393): n is a, c, g, or t
  misc_feature (396)..(396): n is a, c, g, or t
  misc_feature (406)..(406): n is a, c, g, or t
  misc_feature (415)..(415): n is a, c, g, or t
  misc_feature (419)..(419): n is a, c, g, or t
  misc_feature (449)..(449): n is a, c, g, or t
  misc_feature (453)..(453): n is a, c, g, or t
  misc_feature (468)..(468): n is a, c, g, or t
  misc_feature (489)..(489): n is a, c, g, or t
  misc_feature (508)..(508): n is a, c, g, or t
  misc_feature (517)..(517): n is a, c, g, or t
  misc_feature (519)..(519): n is a, c, g, or t
  misc_feature (537)..(537): n is a, c, g, or t
  misc_feature (588)..(588): n is a, c, g, or t
  misc_feature (612)..(612): n is a, c, g, or t
  misc_feature (919)..(919): n is a, c, g, or t
  misc_feature (933)..(933): n is a, c, g, or t
  misc_feature (975)..(975): n is a, c, g, or t
cctgctgcaggcatgtgacagagggagtatactttatgtacaaagttatttatttatagaaatttnggtacagtgtacattgaaaaccatgtaaaatattgcagtgtctaacaaatggcattgaagtgtctttaataaaggctcattnataaatgtcagtatcgttggnggctccntcntttacaaacgccgtcnttctgcctttaattatcttcccccaaaanagaaaaaaaaaatgggngnanngggaatcacatacngtttgtttgcncccgggcagacaacactgcnagattccngacattttgttttgaatttttcnacncccggngcntgtcagtcaaggtcnaananccccaagtgtggngaccnttccctttcnccccgccnttnccnagccggcccnggccccccnttcngtctgacatgagactggcgagagtggctcncccnccgtgcccccccgcncgaagccagccgggcccaccnagtcacttgagttgcagcngccttctcncncacaccacagggggcgcnggacacatctctgtgaaataatacaattgtgcgtttttatgggtgaaatcngagggtaattaaaaccagcagccnagttacccagaaagagtgcctgccatgcacctgtagttcaatctttctttctttttcaacaaagcctacccttacacaacaggaattaactagggggagaaacacccacatacacaactcttccccaagtctccttttcccaaacaaacaaacaaacaagctattcttttagaattataaccatcttgccttctgctgaatccaccatcaggtggcaggaaatgaaagatcagatacagatcaaatgaaagctctaaaaggcctggcctcagcattaccaaacttatttatttagaggttctgaggnaattgttcagagtnccgccacagaccccgttttcttctcttagctctctggcatanaggccaatgacttcataccagccagcctatac

SEQ ID NO: 567564 - DNA, 976 bp, Homo sapiens
  misc_feature (849)..(850): n is a, c, g, or t
cccccgcagaactggctgctgcgtgtgaactgaacagacggagaatgatgtgctagtggagaatctgtctccacatgtcacccatttcatggctcgctgcgcaaagaagacgtgagactgacatatgccattatctctttaccagtattaaacactcatatgcttatggcttggagaaatggcttagattgggtgaattagaggttaatccgagaattagcatggatataccgggacctcatgcgacttggcagatatctgagaaatggttgaattcatgctcaggagctgtgtgactgttccatcccttccggactcccgtacgcctcagattacaaggggtctctctcctgcttgcgcttaggggtccgtagatggggttgtgaagcgatggaggtcctcactggaatcggctctctcctctcctccccccaggaggaactggaaaggagggtaaacagaactaataatgagggggaacagagtttcacgggtacacattaggggactgttcaccaaatattcattaaaagaactattagtacagtgcccctgtcgtctcggcaatggatgaccaaaagtaattaagaatgcacaattggttccggtatcgggaccaaggtatcttacagaaggtggtcgctagggatactaggatgagagaataacggaccgccagggcgggaccgcctcacggtgtcgattgcattaggttccggctcgagaatgtgctctttagtccacactgcctgaaaggcaacattgattcgaccatggatgatcggaaaaacagtcagcctggggacacgggcaaggagggctgtcttgtctctgtgcatacgttgtttnnccgaccaacgaatgcacgcacaatattacaaagagcacatcaagtacacgaacgcgcaagagaagtgcagcatgcaaagacaatctacacgaacaccgcatcagaacaacatcctcagacacgtgg

SEQ ID NO: 567565 - DNA, 396 bp, Homo sapiens
ttattacttctctctgataacatgatgaaaaaatcgcgcaacgtgtctattactactcagtatctcaaaatgttcatttcaaaaagattcttccttttgccacagactgtttacactttaatgaaaaattaatgaaataaagttgccctaaaatttggaggaaaaaatcagtatcactggagtcagttcctcccttgtgctggtgactattttaaaaaaaccacatgagtgacttagaacttggcaggcatagttgttcttcaaactgaaatgactaagaagctatagctacagtagtgcctatccaacactgtacatagaacgatgtgctaagatgacaggaagaaacagtattcttctaggaaggcaaaggaaggtaaaacaatcaggacacct

SEQ ID NO: 567566 - DNA, 649 bp, Homo sapiens
  misc_feature (247)..(247): n is a, c, g, or t
atttaaatactacgttagggggccaccataattacccccatactccttacactattcctcatcacccaactaaaactcttaaacacaaactaccacctacctccctcgccaaagcccataaaaataaaaaattataacaaaccctgcgaaccaaaatgaacttatctcggggtgggtcattcattgcccgcacacttctagagcctaccccccgcggttctgatcattctatctccccctctattgntccccacttccaaattttttatcttcatccggctaatcaccacccttctttgccttttccatctaacctcttatcatttttttggtcttccacaccactaaaggccgaaccggatcttcttatactcggtgtcctttatcattttcattgccctcaacttttctttctttgactcctcgctccctccttcccccccccccccctctctctattcccctagtcttgtcattcctttttgtgccgccctgcttttctaggcctctcctctttgtttttttttgcttcttcctcttttttcccctggtatttttccccgtcttcccccttcctccgtcctctcggttccctcgcccctgtcgttctcccggcggcctttcccggttatataaattaaaacaaaaa

SEQ ID NO: 567567 - DNA, 905 bp, Homo sapiens
  misc_feature (131)..(131): n is a, c, g, or t
  misc_feature (227)..(228): n is a, c, g, or t
  misc_feature (245)..(246): n is a, c, g, or t
  misc_feature (314)..(314): n is a, c, g, or t
  misc_feature (321)..(321): n is a, c, g, or t
  misc_feature (774)..(774): n is a, c, g, or t
  misc_feature (796)..(796): n is a, c, g, or t
  misc_feature (818)..(818): n is a, c, g, or t
  misc_feature (826)..(826): n is a, c, g, or t
  misc_feature (875)..(875): n is a, c, g, or t
gcgcggcgcgtggaggctgctcccagccgcgcgcgagtcagactcgggtgggggtcccggcggcggtagcggcggcggcggtgcgagcatgtcgtggctcttcggcattaacaagggccccaagggtgaangacgctggggccgccgccgcctttgccgcccgcgcagcccggggccgagtggcggcggggacctgcggcttgggatgacctggcctggctgcccannggacaaattggagcaannttctgaccccacctggccttggatgctgctgcctgcaatggctggcgctgcgatgctggatgcactcngctgttnatgccaatggacgccctgaatctggcacagatgcaggatgcagacgctgcagttggatgcaacatgtccaatgctcaaaagagtatgagtgcctgcctgtggatgcagctcaatgagcgagcagatcctgggcgcaggctgaggagaggaggaagaaccctgagcgaggagaccctggcagcaccaggccagggcccagtatccaagacaagctggcccggcagcgctacgaggaccaactgaagcagcagcaacttctcaatgaggagaatttacggaagcaggaggagtccgtgcagaagcaggaagccatgcggcgagccaccgtggagcgggagatggagctgcggcacaagaatgagatgctgcgagtggaggccgaggcccgggcgcgcgccaaggccgagcgggagaatgcagacatcatccgcgagcagatccgcctgaaggcgnccgagcaccgtcagaccgtctnggagtacatcaggacggctggnaccttgtntggggaaggattccgtgcctttgtgacagactgggacaaagtgacagcnacggtggctgggctgacgctgctggctgtt

SEQ ID NO: 567568 - DNA, 882 bp, Homo sapiens
ccagatcaaggtatcggcagatttggtttcttctgaggcctctctccttggcttgcagatagacttctatcggctagaagacttgtcttctcacggtggtgtcctcacatggtctttcctctgtgcatgcacatgtctgtgtgctaatctccttataaagaccaatgagaaacttgcagtttgcatggtccgagtgttctccctattgccatagtccctctcctcctattgtaataatcattttgaatcaagtctctccttacccaaatccacatttgtttttatttgccatttccgtcctgcttaccatgtgtttagctgtggcagcctagtgggaattgagcaaatacatagccaactacaacctaggaaggtatgtattgtgcagggcctgttacatcattttcatgtaagatgaaaatgctgaatgccttattcaaaagacaaaggcaaaagtgcccctgaagtactaaaatatgtttttgcttttcttctatagtctctctcaacttgttacggtgtctcttttaatttagtgtaattgtaaataaataaaaattaaattttttatttagagaacagaaaagaagaacacaaaaacaagcaaaagaaacacacaaacacacacacaaaagacaaacaaaacaaaaaacaaagagggggggcgcggccctataaagaaattcccccgagagggggccacccattttggcgaccccccgggttttctgtaacaggagggggccccctaaaagagaccgcgttataaacgacgcaaacgctgggcgccgtgtgataaacaacgcgccgtgagggagaaaacgtggtcgtggagacactctggaggagcccactcgcgcggcggcaactggggcacaactc

SEQ ID NO: 567569 - DNA, 888 bp, Homo sapiens
  misc_feature (131)..(131): n is a, c, g, or t
  misc_feature (207)..(207): n is a, c, g, or t
  misc_feature (210)..(210): n is a, c, g, or t
  misc_feature (217)..(218): n is a, c, g, or t
  misc_feature (232)..(232): n is a, c, g, or t
  misc_feature (262)..(262): n is a, c, g, or t
  misc_feature (269)..(269): n is a, c, g, or t
  misc_feature (284)..(284): n is a, c, g, or t
  misc_feature (297)..(297): n is a, c, g, or t
  misc_feature (304)..(304): n is a, c, g, or t
  misc_feature (757)..(757): n is a, c, g, or t
  misc_feature (779)..(779): n is a, c, g, or t
  misc_feature (801)..(801): n is a, c, g, or t
  misc_feature (809)..(809): n is a, c, g, or t
  misc_feature (858)..(858): n is a, c, g, or t
gcgcggcgcgtggaggctgctcccagccgcgcgcgagtcagactcgggtgggggtcccggcggcggtagcggcggcggcggtgcgagcatgtcgtggctcttcggcattaacaagggccccaagggtgaangacgctggggccgccgccgcctttgccgcccgcgcagcccggggccgagtggcggcggggacctgcggcttggganacnggccganncccaaggacaaatnaagcaacttcgaccccaccggcctggaacncgccgcnaaggcggccaaaagnctatgagcactcngctgttnatgccaatggacgccctgaatctggcacagatgcaggatgcagacgctgcagttggatgcaacatgtccaatgctcaaaagagtatgagtgcctgcctgtggatgcagctcaatgagcgagcagatcctgggcgcaggctgaggagaggaggaagaaccctgagcgaggagaccctggcagcaccaggccagggcccagtatccaagacaagctggcccggcagcgctacgaggaccaactgaagcagcagcaacttctcaatgaggagaatttacggaagcaggaggagtccgtgcagaagcaggaagccatgcggcgagccaccgtggagcgggagatggagctgcggcacaagaatgagatgctgcgagtggaggccgaggcccgggcgcgcgccaaggccgagcgggagaatgcagacatcatccgcgagcagatccgcctgaaggcgnccgagcaccgtcagaccgtctnggagtacatcaggacggctggnaccttgtntggggaaggattccgtgcctttgtgacagactgggacaaagtgacagcnacggtggctgggctgacgctgctggctgtt

SEQ ID NO: 567570 - DNA, 358 bp, Homo sapiens
ttttttctgagacggatcgtgctctgttgcccaggctggagtgcagtggcgcggtctcggctcactgcaagctccacctcccaggttcatgccattctcccgcctcagcctcctgagtagctgtgactacaggcgcccgcaccacgcccagctaattttttgtatttttagtagagacagggtttcactgtgttagccaggacggtctcgatctcctgacctcatgatccacctgcctcggcctcccaaagtgctgggattacaggcgtaacgaccgcgcccggcctaaaatctatctcttaatgcatggggtatcattctagctaaatagttgagaagtacccttcctgtcgacgcg

SEQ ID NO: 567571 - DNA, 1828 bp, Homo sapiens
  misc_feature (672)..(672): n is a, c, g, or t
  misc_feature (1029)..(1029): n is a, c, g, or t
  misc_feature (1142)..(1142): n is a, c, g, or t
ggagtatatctttcggccgccggctcccgccgacacgcgtcgtccgtgcgcccgtcgagccggctagccatcagcagaggctgtgcagtagcaaggctgcacgggtgcgtcgccagttctgaccagcgccgagtcgaggcatggtgtgtgtcgaaaccaggacaggctgcagaggggccctgtggccccggcaatggtgcccggagaagcctgggtataggcagtctgcgtcctcgggggagtcgcgagagggaggcgccaggacggtacgcaagtgaaccgaggttataaccggatctagatacaactaggctgcatggtccctggggctgtgctgccggagacagcgctagcctgggacggtggcattgcacagtcgggacggcgagcatgccaccgagggaaaaggtaggtcgcccgctggaaatgcttccttgctactgcagcgagctgcgcgaaagcgccgcccgggcccaggggcagggctgagcatccaaatcgaacgtcaggcgcaagggaccatttgcctagcgccggggcaccgcccgccactgtactctgggctgcgtaggaccaagtccgacctcgcggactcggtcgatcactttgaggcagacactaattgtcgagcgcaagtggggcctagacggtcgagccttggagtcatgcccnttcgacttcgaataccaattggggtagactcgccaatttgagaaaaacgggcctagggcgttgtaatgcatagtagtccacacgcagttggctatcgagacactttttacagcgtggcacgctttacgcctcgcagttccaagatcccacattggcaggacagctatccacagtacgctactagagcaaaggtctaggaacaaagcaattgcagaactagaaacacaaaagacgaccttcttcactatcttagtccgcgatttgaaaaaccctcccactttatggggcgactgttcgcaatctcaggcaccccgaacgatgctcatgcacacagagtttacgatagcgactttgccnacagcaccgcaacagcccggctatatctcttctctgtttcgacgggtgggcatgcacgaacgacaaacgcagacgggaacaatgggaaatacggcgtttgtgggcacgagccntctcggccgcaacacacagcgattccgtttcacagtctgggtgcctgcacacatagtttcctcaacatacgacctgtatcactgcaggcgagaccagtgcacaaaatttcagtccccagccgcgatgaggcgattatgtgcacaagtgaacaaaagatgcgtgacttaggcgatgtcaccgccttctagagtctggaggactgacaccccaacagagggcacaaggacacacgccgtcgatgcgtagatagtcgtgacattcagttcacacatttattagtacagcgataccacacaactcaaaatatcctacagctatggcaatttccttcagatcggcactgtcagcgacatttacattggaccacagcgccgttcggaaagccatgcacaacacaaggaagtcaacaagcgagccattataccatttttctcaacagcagtgcagcatctgtgacataacaccacagtcgagtggcaaaaacgcaaaggacatacgaataacacttcacggacagaggcgcacagaccactatgcagttagggcccaacaggcatctgtcacgcacctccatcacccacaactagtgtagacgatcacagcgaaataatcagcataggagctattagcaaagacgaacatcgacagaataatcataacaacaacacataatcgcacatacaca

SEQ ID NO: 567572 - DNA, 1228 bp, Homo sapiens
ctttgtcatctcaacagtagcactctgttgtgcggtcctgtgtgtatcgacatgcgaacgtcttcattgcatcatgtttgtagtttccaccgctacgatacgtcgtctgtacaactctgcggtggttgtttcctcagaggaatctacctggtgcttcgagtgtatcggcaacatagtgtaatccccttccttttcggcggtatcaacttccgctagaatcaatctccccattgcggtaattgcataagggtaacaattatgtttatctagtcgggtttttccctataaatcccctgtctggttgtatttgagctagtcctcccgagtggttgttaccctgtgttctagatcctatggtcaatatgttctgtgatatgctccgtgttgtcccattgctggctgacggttgggcacaaacttataaatgttatttccatggttggtctagaactgggtgacccaacacgctatgacaacgaaagttcacgctgatttgaagtctgaactttgagcttttatctcttaagaatgagctgtcgtccttgcctctacgtcaggtcaatttctcccccattttccatccatttaccccttagccatttgagactaataggaaatagggaataaatcagacattacggtcatctctaggtcacgggtctaggaaacatttgggcagcctgctcccttggcagagctgtggtctcctctgcaaagcattcttaattaaaaaacctcaatacaagatggccctgcccagcgctgtgaccttgtgtctatcggggcattcgatagagtcgctgaaaggatgtgttgctttgaaaaggtgtggccttacgacactatggagatgatgggtagaagctccttcgagaaacctagcagtggccatagagaagtagactgggtatggggaacctaagtcatagttgtaacctacagctcgattcggtaagaagctatgggccagacactttaactctctcaatgctatgaaatagtccattctcatttatctaccttaggttatgggctcttctattagattggatattcacactgttatctcttcagtgttaactgggtatcagttatgagtctactactgtataatggcatccaaaagaattttaaagtacctcggtttatagggactttacaattcacgtagaaacttgttattacatgtgaaacagtgaacataatatactcaaccgaggtggagtaa

SEQ ID NO: 567573 - DNA, 586 bp, Homo sapiens
  misc_feature (83)..(83): n is a, c, g, or t
  misc_feature (90)..(90): n is a, c, g, or t
  misc_feature (97)..(97): n is a, c, g, or t
  misc_feature (147)..(148): n is a, c, g, or t
  misc_feature (163)..(163): n is a, c, g, or t
  misc_feature (176)..(176): n is a, c, g, or t
  misc_feature (334)..(334): n is a, c, g, or t
  misc_feature (348)..(348): n is a, c, g, or t
  misc_feature (361)..(361): n is a, c, g, or t
  misc_feature (393)..(393): n is a, c, g, or t
  misc_feature (397)..(397): n is a, c, g, or t
  misc_feature (409)..(409): n is a, c, g, or t
  misc_feature (415)..(415): n is a, c, g, or t
  misc_feature (436)..(436): n is a, c, g, or t
  misc_feature (454)..(454): n is a, c, g, or t
  misc_feature (459)..(459): n is a, c, g, or t
  misc_feature (467)..(468): n is a, c, g, or t
  misc_feature (503)..(503): n is a, c, g, or t
  misc_feature (518)..(518): n is a, c, g, or t
  misc_feature (547)..(547): n is a, c, g, or t
  misc_feature (556)..(556): n is a, c, g, or t
  misc_feature (563)..(563): n is a, c, g, or t
tataaataaaaatattaataaaaaaaaaaaactattcagcatctccattcttgcatcaatttaaatcaaaaaaatctgaattnaaaaatntccaggntccaataacaattctgttaagaacagacagccagtatcatcctgagcacnnaggtatgctttccanggccgagacccanccctactcattgcgatggtctggatgttcactacttgaagagccatctggagggtgtcaggatggaattctccccgccaaagcaacacttgctgatgaagcaactattaaggctaagccaagttttctcaaaataatcagcagtaaagctggcgattngtgactagcatganggctccagaatcngggagttcttgtaccctctccttgttctcttnaagnatcaagggtccngatgcngcaaatgatgaaaattaaggnaactctgggacacaaagntctgnacccctgnncaatttagaagaatagttgcccaattggctttacnatacactgacaccantgtgttgaagtctgagcgcccagctattnacagatctntctgccngatcctccaaaagtccaagagta

SEQ ID NO: 567574 - DNA, 752 bp, Homo sapiens
  misc_feature (41)..(41): n is a, c, g, or t
tcattgtcttccctggacactcagtacttagattcttgcanccgccactaggacgagctatgttcgtattttagtacatacaaggtctgattatgttgcacaggctggtctctaactcttaacttcaagtgatccaccggcctcggcctcccaacgtattgggactatagacatgacccatcgtgcttggcattcttgattcttaatacggggttttgaggtgaaagcatttcatgacaacttaggttcatacacaagagcatcatgaatcttctaagaaaggtatctgtgctttttttgtgcgcacaaaatattacttcttatggaatgtttacactaggtgaggaaaagttcattaattacctttaaaccgctccctatcttttttacagattttaaattgtactttggcttctgccttcagtatcccttctggttgctatggtttgaattaagttcctattatgctgcagcacatatcaaccttccctaagtaaccatttcctggaatgttaagcatcggtaccattatcagaccatatgcagaaatgtcgtggactcagcaattcttttttgtgcactgtataaggctggttgtgactcagatcagcatagctttttatattatgtaatttcactagcagctacagtccaaatgattctctctttgaacaatagaaaattattttaattttattttttccctcacatttctaattcgagtgtaaatgtttatcaataaaaaattactt

SEQ ID NO: 567575 - DNA, 286 bp, Homo sapiens
aatctaacaccaaacatgcgtaggccgaccatacgaagataatcagtcaccacataaggacaacagacacaggaggaacaacagagagagtgatcagccaggggtggtggctcacaaatgagatcccagctcctagggaggctgaggcagaagacttgcctgaacctgggaggtggaggttgcagtaagccaagatagcgccactgcactccagcctcggggacagagggagactccgactcaaaaaaaaagagagtggacacccaacccatgtgatatcccagcc

SEQ ID NO: 567576 - DNA, 128 bp, Homo sapiens
cctgatttgtcttctattataattagtgagttacccgtagtctacctattatgattctgtgcagcagactcgtgggtagtaatgctaagattagcatcacagttatgtgccatctccccacccgatcg

SEQ ID NO: 567577 - DNA, 169 bp, Homo sapiens
cccccaggcttttgtttggcggctgtaatttttaagtatttgagtttgaacagattagctttggggggagggggtttccccaatgtgagggggaaccaagaaaattttaaatacagggtattttccagcttcctgtttttaccccaaaataaagtattgacccaagaga

SEQ ID NO: 567578 - DNA, 291 bp, Homo sapiens
ttcaaactgctcccgcatctgctcctcctgctcccccacctgctcctcctgcttccgcatctgctcctcctgcttccgcatctgctcctcctgcttcagcatctgctcctcctgctcccccatctgctcctcctgcttccgcatctgctcctcctgctcccccatctgctcctcctgctcccccatctgctcctcctgcttccgcatctgctcctcctgcttccgcatctgctcctcctgctcccccatctgctcctccgtcgacgcggccgcgaatttagtagtagtagg

SEQ ID NO: 567579 - DNA, 230 bp, Homo sapiens
ttcgatggcgggcacttattgacattgtcaatatattagcaacagaaatgagaacagaaatgtacacttcagtaatatttttcaaacggtatgctttgatcctattaacatttttttttttttttttggaaaaagtctcgctcttctcccccaagctggagtgcaatgccaagatctgggcatcaccgaaaccttctgcccccgggatcaagcagatccccgtgctaagc

SEQ ID NO: 567580 - DNA, 595 bp, Homo sapiens
  misc_feature (506)..(506): n is a, c, g, or t
  misc_feature (518)..(518): n is a, c, g, or t
  misc_feature (581)..(581): n is a, c, g, or t
  misc_feature (593)..(593): n is a, c, g, or t
catgagaccacaacctgctaaaaatgagctttcctagtaacttgggactacctacctgtctaggaataaactgtcagcgcgagagatccgatgaaacctgagacgaaagattcattttcttctaaaatgctttctcaaaagtttttaaaaagaaaaggggggaaatgtgaaagaaaataaatcttggggcccccaaaaatcactaagctaaagggaaaagtcaagctgagaactgtttagggcaaacctgcctctcattctattcaaagtcactgagataaatgcatatctgactgcctcctctggagaggctaatcagaaactcaaaagaaaacaaccatttgtctctcacctacctgtgacctgaaagcctcctccctgctttgagctggcctgcctttccagacagaaccagtgtacatcttacgtatattaattgatgtctcacgactccctaaaatgtataaaaccaacctctggccaggcgtggtggctcacgcctgtantcctctatggtnttgggcatcatgagctaagttccatcttgctttgggtagtggttaataaaattcactctgagntcatgtcatacntt

SEQ ID NO: 567581 - DNA, 421 bp, Homo sapiens
gagtgtccacaagcctttgcctcctggtcacctatagcaaccttctcaacaagatacactacttcacagggcaaagaggtagtctgacataacagcactaccagccaaacccctcttgtacagtgtgtgtctacaagtttacaccctcatattaagctgtaaagacataaacaccaatattaacagtgtaatggatccatttttatgttttactcaaatccaaaaaggatacaaatgattatcaaacagccattttgacatcaaggccaatatcatgattgggtcatcctgcgatagagttaactagcgaatctcggagaaactaaagataccaaagtcaaaaattcccaaccttacccctagagacacaatatgttttatatatagatagagatataacctaccaataaatatagatccc

SEQ ID NO: 567582 - DNA, 490 bp, Homo sapiens
  misc_feature (401)..(401): n is a, c, g, or t
  misc_feature (413)..(413): n is a, c, g, or t
  misc_feature (476)..(476): n is a, c, g, or t
  misc_feature (488)..(488): n is a, c, g, or t
atcgatacagtaccgtgtctgtaagcttagctcggtagttatactccgaaatatgggtaggtgtgagatgcatttggtgtggggctgccaatggtgcctacgctacgcgtacgtgtcgagcggggacctgtacagggctcgccgggctctcatggtattgtgggtcgcggagacttatgcatatctgactgcctcctctggagaggctaatcagaaactcaaaagaaaacaaccatttgtctctcacctacctgtgacctgaaagcctcctccctgctttgagctggcctgcctttccagacagaaccagtgtacatcttacgtatattaattgatgtctcacgactccctaaaatgtataaaaccaacctctggccaggcgtggtggctcacgcctgtantcctctatggtnttgggcatcatgagctaagttccatcttgctttgggtagtggttaataaaattcactctgagntcatgtcatacntt

SEQ ID NO: 567583 - DNA, 1236 bp, Homo sapiens
  misc_feature (130)..(130): n is a, c, g, or t
  misc_feature (196)..(196): n is a, c, g, or t
  misc_feature (662)..(662): n is a, c, g, or t
  misc_feature (870)..(870): n is a, c, g, or t
  misc_feature (878)..(878): n is a, c, g, or t
  misc_feature (1197)..(1197): n is a, c, g, or t
gagctgaatcgcactggcctatttgccgcttgtatctggttgtgcacttaaggtactcttcttgagagcgccatcgttagcaacccatgttactccaagtatgcacccggaaccggaacacattcgcttntcccgtgatcgtacagtgctgaaggacgttcgtacgtataaatctagcagtctgagaaagactgtntacaatgttccctggaagccatgtgtgtgtggtgtcttgtctggccatggtgctgtgacttctagaatatgtagtatctaattgcaagcaaggcattctgtctagagtgtatgatgcaacacttgttgagaaagcccactctgcgagtaatcacgcaccttacatataccgcggcattgtgattctacatcgatttcccctcctaggacggaaaacaggccactaacataggtcgctgtttgtactcccacagataccacacgtgtaggcaagtaacgcaagagaagggtgatgatttggttcgacagagagttattcgtcctagaaagacagaggccattacgcagttaacacgactgattagttttcattgctcatcttgatcttccattgcgaaaggcagtagaaacgttgagagacctcctttcaacatgcgtacgaacaacagatattggctccaacctantgtcgtaccggtaactgtggacattcagacaaacagaaccccttgtagtcacagccggacacatgtgagcgaggtcttggccagaagtaacgcgcccctggacttcgtgcgttttctagcctagttgcaggcgcgacgcctcccgatttttagaccgcacgaccttgggaaaacgctcagcagtatgagcagcgtcagaagactgtgntccgcaancacacaatttgcgcagtggagatttgcttcgttagactagtacaatagcacttacttcgcgctcatagcgagtgaacttaggtcgcaagtcttcgtggctcaaaaggcgaatgtgcatagctcgcctccctttgggtcatgcttgtcgatatgacagcaggacatcaacacttcttatgagatgcgttggatgtcagcttacgactgcgcaaatgattgacgtttgacttcccgtttgagggagcgaagatccctggtgtaagaactccacgccatttgaaggccttcggtatttgcgccaaaactggatcgatccatnggcgcgtgtgactttactaaccgtggaggagagaaatcc

SEQ ID NO: 567584 - DNA, 821 bp, Homo sapiens
tctggctaccgggactaaaagggaagcgttttgggggtcgcggtccggacttggggcggggggtccggccccaggacagtttataccgcattccgtccactcccgattccttcagggatccggcgtctgcacttatacagaggtccaatcacgcggacccagaaaccccagggggaccgggacctcagccctcggggtaaagtcccgagggcggaggggtgattggccgcaaacatgcggggactcctagccggcccctgggctcgtatccgcaacatctctcgcataaggcgagtcaacaacagtaccaggcggggtgcctcgggcgactacgctgattcccagtattggaagcaagtcctcggccacatggtgatcgaagaggagctctcggggaaagggacacagctataagtccaaaagctattcctacacgggctgacccgggccatgtaaagccggcgcctctaaagatagaaccctcttgggtgaccaccacgggcaccgagagggcatacacaacagggaaagaaccacccccggatattgggcacaggcggggggaaccccaaaaaagccccctgccggggcccggggtcataggcgcccataccgtgccacaccccgtcggcacacatcttggcaaaccaccgtgcaaaccaaccagggccccgcacaaaaacaaccgcacggagtgcacaccagaagacccgttacacggtcaacccctcctcccaaggggtgctaaacacctacacacaaacggcacacaccctagcgcaaccaacccaaccaccaaacagcatacatcaaacaagcaa

SEQ ID NO: 567585 - DNA, 107 bp, Homo sapiens
  misc_feature (30)..(30): n is a, c, g, or t
  misc_feature (75)..(75): n is a, c, g, or t
  misc_feature (106)..(106): n is a, c, g, or t
gaggctcatcagaacagagtaatgacatgngtttggtgtaataaaaaaggtcttttggctacaagtggcaatganggcaccatccgcgtatggaatgttaccaagnt

SEQ ID NO: 567586 - DNA, 287 bp, Homo sapiens
  misc_feature (133)..(133): n is a, c, g, or t
gatccatgctctgagtagaaaagttaactacattcatgtcttgtctgtgtactcggcctgggtgtctacatttacttcaccccagtctgctgccatccagttgcgaagcatgattttcctaagaatccagggncatgggagatacaattccaagttctcgcttcctcctttgggcatctcttctgcctcccaatcaaggaagctccatgctcaggctctcagctctcgggccagtgctctgctctgtccagggtaggtaatactgggagactcctgtcttttaccct

SEQ ID NO: 567587 - DNA, 891 bp, Homo sapiens
ggagagaactagtctcgaggtttttttcttttttttctccaaaacaaggatattgtttttaatcaaattaactgcacaatatggaaaccaaagagggagccccaggttgggccaaatcattgggctgcacccctcccgcaaagagaacggggggagtgcaggtggtgcccctaaaaccctattgtaggcgtcgatgcgcggccccgtggctccactcttggtgcagcaatcactaagcgtggcagggccccaatgttccctgggaactggcggtaactctgcgtgacccagagctcgtgccaatgtgcccccagagcccccttcttttccaccaacaaaagaaaggtatcttgaggggcgaaggagcgaactctgagtgggtcccacgacagcccgagagtgtccatgtgatacgactagaaactaagtccgtaactgctgttgatgttgcccaagggatagctacaataggatgggcagtttgtttccagaaacagaaaccgcaagcaccaactcccgaaaaacaaaggagaacaaccaccatgccatagagttggtcccccaaacaagagaggtaacgacccatgggccgatagatcaaaacgaagatagcgaccacgtggcaaccccaaagaacaccactccagagagcgagcgataaccggacgaaagaaagcacctgcgaagaaaccgcgagaagccatggaaaagagcccgccggcaacagggctagagaaacagacgggaagcaaaacaacaaacgcatgagacccacgacaatatatcaaacgacaggccagaaataagcagatgacagcgaagagggaaagaagcaacaacagaaccaaggaagggcaccggcgagcacaccacaccaccacaccacaacat

SEQ ID NO: 567588 - DNA, 212 bp, Homo sapiens
  misc_feature (89)..(89): n is a, c, g, or t
agaatataagaattcacatcctcccaccttcttctttccgaagaaggtgggaggatgtgaattgttagatgctgagtgtataccgaganataacgatagaagtatgcgatggagttcgaagaatatcaaggagaatgcggacggatacagaatgaattgtaaaaagagtcataagtgatacaaaatagggaaatggacatagtgaaaaaacg

SEQ ID NO: 567589 - DNA, 622 bp, Homo sapiens
  misc_feature (533)..(533): n is a, c, g, or t
tgaacatcaagaaccgtattgacgcaagtgtcttgctggctgaagcctcgctggcacggaagcagcggaaaacacatactacctttattccactgatgctgaatgagatgccacagattggggacctggagggactggatgctgagttagtcacccttaatgaggatgaagcagagttacgctgtgatggtaccaagtctaccattaaaccatgccagatgtcagtagccaggattacctgtgttcggagccagagacccaatgagggtatcccctgcattgatgactacatctatacccacgagcaggtggtggattacttgactcaatactcgggtatagagcctggtgacctcgatgcctttactacatgcacctaacaactctcaagtgtacctactgagagcttcatattctcattgacattggagtccagcatgtgggacatggcctgcagaaggacttgccggatatcaaccggatggtgcccaaggaccaatggcttgacactgactacctgttccatatgcccngtcaacgggggaacccctgaacagggttgaaggaagccctgacaaacccttcagcttgaccgggttgtggagctcagccgggaggggtc

SEQ ID NO: 567590 - DNA, 120 bp, Homo sapiens
ataacacgtaatacaagctcagtgtgtgctgacacagtgttaggatacacggtgcatcacagaggtctcctgcagtgtgcactggagagacgtggcccagaagcaggcaaggtgggctgg

SEQ ID NO: 567591 - DNA, 163 bp, Homo sapiens
gtggtgatggggtctcataagggtccaagctgtgtccagagaagatcccggctgtcctagattctagagcagggaagctcagctgcttgcctgacctggaggggcacggaggggccctgcaactgggccaagggacagcaggaagtggagtggccatttacgg

SEQ ID NO: 567592 - DNA, 108 bp, Homo sapiens
ctatcaccttgaaacgattattgatttccacaaggatcaagctactggctgcatcgaggtgaggggtgaagtggtctgtgctagatcaaaaggcacggggtggtatag

SEQ ID NO: 567593 - DNA, 134 bp, Homo sapiens
tccagaggatacccgtcagtagggtgtgcccaggacgtggatggtgcagtgagccgagatcacaccatagcactccagcccgagtgacagtgcgaggctctgtctcaaaaaaaaacaaaaacagggcacaatat

SEQ ID NO: 567594 - DNA, 603 bp, Homo sapiens
gttcaaagcttgaaggagtcgcgctttgtcgtgtggttactgcgagacggaattgtgtgtcgcccgcggtgcgccgatcatcatgtgagaatatgtgagtcgggggtgtgggctgccccacggcggcagtagtttcttataacagtagatacaacaattgtgttaccacattggggtcctcctattgcggtataacacccggggtgcggtttagtgtctgtgcgagcactatccgctccccttttcggagaagatagaggtgcgccagcagccgttgttgcggggtcggccaagggcgcggtgcgtcgtggcctgattggctcgacactcgctgtcgttttctacggcgttatcgccgcctgcggtgtgctaggattctcccgcttctctcccggccgtgtacctgccgatgactctcccgcgacggagatctcttggtgttgatccgtgtgattttgagcgtacaacatatagtgcgtcttgcctagacctcagcgcgaaacagatacacgagccaacacgatctctctgaggcgaaggagttcgacacgcaaaaacatatacaatactacgcatacagtgtacacaccaagataaatcaaa

SEQ ID NO: 567595 - DNA, 578 bp, Homo sapiens
  misc_feature (485)..(485): n is a, c, g, or t
  misc_feature (574)..(574): n is a, c, g, or t
ggaccccgaggccaatgctgactggttcacagttcagccccctgctcagaaaaccatttgtccagctaaggagaggaggaggcaccttgaggcttccgtagtcgaggctctccagggttccccagcccatcaatcattttctgcaccccctgcctgggaggcagctccctggggggtgggaatgggtgactagaggggatttcagtgtgggacccagggtctgttcttcacagtaggaggtggaagggatgactaagttctttatcacagacctacaaaaaatgagataattagatattactctcactagtttgggcttcttttttctttttctttttacaaaacagcagctggaaagagaaatgtaggtggcagacgagccaggcacaaggtttcagattggaagggaccaagatgaggaccaaggtgtggctgcctgactaggaacgctgtgggctggcccaggctctcgccacacatcctgngagaactgccataggccctagaaggagggatgaaaggcgtatgggagggaagacagcggtccccgaaccagtcagcattaaccacgggnaccg

SEQ ID NO: 567596 - DNA, 175 bp, Homo sapiens
  misc_feature (160)..(161): n is a, c, g, or t
tcgtatagtctaaactgtcagcagacattaattcggtcgcaggtgaagtcccaccgcctagagatgaactctgcctccgatggatgttttccacttcagtggcactcgtctcgcagattactggggtcattacatatcattcgcatgcacattcagtganncagtagaaacgagc

SEQ ID NO: 567597 - DNA, 633 bp, Homo sapiens
tacgggaacgcgacccgcgccggtcccgcggcggtaagaagaaggggagacgacggcggaggctggggaacatcgggcagcgagagcggctgcgggcctcctgcgcactcacggctgcggctcggcctgccggggctggggtcctaccgcgaaccggcggcactgcgcaccagcccgccgtacgagctcgccgcagagcttcctaggcaaaatcaagaagaaagaagttcccatccacgaagtagccaagatgaacttaatgaaatcaatcagttcttgggacccgtggaaaaattcttcactgaagaggtggactcccgaaaaattgaccaggaagggaaaatcccagatgaaactttggagaaattgaagagcctagggctttttgggctgcaagtcccagaagaatatggtggcctgggcttttcatccaaacaacccatggtactcacgactaggggagatcatcagcatggattgggtccatcactgtgaccctggtcagcgcaccagggctattggcctcaaagggggatcattctttgtgccttggcaacctgagtgagcaggaaagccaaatacttgcctaaactggcgtccggggagcacattgcagccttctgcctcacggga

SEQ ID NO: 567598 - DNA, 612 bp, Homo sapiens
attcggccattatggccggggcacttttggcgagagtcgtttcttggataccaagcgcttgtgtttggcaaagctggtgtgagacgagacattcttgcccggccgccggaataatcaagagtttgggccgaacctttgagcatacaccgagagagtgaggagccagacgacaggcacacactatggcgctgaaacggattaatagggaacttagggattgggcccgggaccttccagaacaaggttctgcaggtccagttggggatgataggtttaattggcaggccacatttatgggacctaaggacagcccatatcagggcggggaattcttttggacaattaattttcctacagattaccctttcaaaccacttagggttgaatttacaccaggaatttatcatccaaatattaccagtattggcagcattggcctggatattctaggatcacagtggccgcctgctttaccaattcttaaggttctttaatccattggttaatgttatgtgatccaaacccagatgaccccttagtgccagagattgcacggatctattccggcggagttaggtccaacggaatatctcggattggacctaggtttgc

SEQ ID NO: 567599 - DNA, 848 bp, Homo sapiens
  misc_feature (32)..(32): n is a, c, g, or t
  misc_feature (88)..(88): n is a, c, g, or t
  misc_feature (119)..(119): n is a, c, g, or t
  misc_feature (134)..(134): n is a, c, g, or t
  misc_feature (159)..(159): n is a, c, g, or t
  misc_feature (199)..(199): n is a, c, g, or t
  misc_feature (204)..(204): n is a, c, g, or t
  misc_feature (243)..(243): n is a, c, g, or t
  misc_feature (273)..(273): n is a, c, g, or t
  misc_feature (312)..(313): n is a, c, g, or t
  misc_feature (353)..(353): n is a, c, g, or t
  misc_feature (384)..(384): n is a, c, g, or t
  misc_feature (440)..(440): n is a, c, g, or t
  misc_feature (493)..(493): n is a, c, g, or t
  misc_feature (585)..(585): n is a, c, g, or t
  misc_feature (588)..(588): n is a, c, g, or t
  misc_feature (592)..(592): n is a, c, g, or t
  misc_feature (597)..(597): n is a, c, g, or t
  misc_feature (618)..(618): n is a, c, g, or t
  misc_feature (627)..(627): n is a, c, g, or t
  misc_feature (648)..(648): n is a, c, g, or t
  misc_feature (651)..(651): n is a, c, g, or t
  misc_feature (711)..(711): n is a, c, g, or t
  misc_feature (740)..(740): n is a, c, g, or t
  misc_feature (745)..(745): n is a, c, g, or t
  misc_feature (767)..(767): n is a, c, g, or t
  misc_feature (770)..(770): n is a, c, g, or t
  misc_feature (786)..(786): n is a, c, g, or t
  misc_feature (788)..(788): n is a, c, g, or t
  misc_feature (840)..(840): n is a, c, g, or t
gggtggcggctggcccagccgggcccccgctnccctctgccctgggcgcttggtcggagcgggctgggcaaagcgggtacagggcgancgcggcggcccgggggctcggaggcgaaaanggcgtccggcaagcncgccccgccaaccgggcttctgganctgcgcgccggggcgggctcgggggccggcggcgaacganggcancgggtgctgctgaatctggcggaagacgtgctgaccgtnaaccccgccgacggcaaccctggtcccgancccggcgctccgcgggaacaagaacccgcgcactcaacnncgccgcggaaccgggcgccgggccccctcaactgccaaangcgctactgctccaacggcgccgcgttacgntgcgcaaagccgacgccggtgggctgggcatcaacatcaaaagcggccgggaaaanaaaattcctattctcatttccaaaatcttcaaaggattagcaactaaccaaanaaaagccctttttgtgggggatgccatcctgtctgttatatggggaatacttatcctctgctacccatgatgaagcgttgcaggtcctcaanaanacangcaangaggtggtgctggaggtcaantatatgaangacgtctcaccgtatttcaanaantctactggtgggacctcggtcggctgggactcacctcctgcctcaccccttcagcggcancttcctcccctggccccacaccccggaanttcancgaggccaaacacatgtccttnaanatggcatatgtctcgnanaggtgcacccccaatgacccggagcccaggtatctggagatctgctcggcanatggtcaa

SEQ ID NO: 567600 - DNA, 741 bp, Homo sapiens
  misc_feature (168)..(168): n is a, c, g, or t
agcgggagactgaagtgagagcccagccctacgctggggttcttaccataatagaggagacggattcagaagggctactgaccacatgtgtgttgcgaaaccagacttattatgatcgtctaaaggattaggcgatctccgaactagggtcgcgaggtatttatactnccattgccgcaaagagaacaagggagcttcctcgtgttctgccgcatcttcctaagcaaggctagtggggtgataatcgaagcagtgatggagtgtgagagaggcagaatatacacgggagaacgaagtacagacctccagcagctagacagctgcaacggggctgtgagtgaaagtgaaggatgtcgcactgatgactcgatcgatgcagttcatctgagactgtgttctgattcgtgagtgatgcatgagtgcaagagcatggagcccctcatgaggaatggggccttatgacccatgcgggacgtatgagcatggggccagatcactgcgtagaaagtgcaagggaactctttgccaagtagcgatcaggtagtgtacatcacctctcgaggttgattggatccctggagacacacacatctgagaggctcattgcaggttcccttggaatttacatccgcacggcgtgggtgcgggtgatagatcgagtggccagtttctctcacaagggttccctagcgctcgcatgggaatggaaggagtcctgtagaatgcattcggggcatattg

SEQ ID NO: 567601 - DNA, 163 bp, Homo sapiens
aagcaggattttcccatttgaaaattcatttgaaggggggtcctgccccctgctaaaagcagttccaactaaattttttggatcaagtccctgaatggaagtatgacgttgggtccctctgaagtttaattttgagttctccttaaaaaaaatttgctttcca

SEQ ID NO: 567602 - DNA, 292 bp, Homo sapiens
aaagcagataatcatcagaactataaacatgaaaagagtgtatgagactagaggatctatactgtgaaaggatcgtaggggatccctatgatgatatacaggaccaatgcttcagaactacaaagactaaagacactagtcaagacagaagaagaggagtgtgcaatgggtggattcatagtagacactgaagtgtgaagccaaggaatccttaagtatgcaagaagcaaagcatgtcctgaggactaacatgaaagaaatggcaggagctgattgtcactaaggggatcct

SEQ ID NO: 567603 - DNA, 473 bp, Homo sapiens
  misc_feature (32)..(32): n is a, c, g, or t
  misc_feature (47)..(47): n is a, c, g, or t
  misc_feature (61)..(61): n is a, c, g, or t
  misc_feature (144)..(144): n is a, c, g, or t
  misc_feature (200)..(200): n is a, c, g, or t
  misc_feature (205)..(205): n is a, c, g, or t
  misc_feature (230)..(230): n is a, c, g, or t
  misc_feature (252)..(252): n is a, c, g, or t
  misc_feature (431)..(431): n is a, c, g, or t
  misc_feature (433)..(433): n is a, c, g, or t
  misc_feature (436)..(436): n is a, c, g, or t
  misc_feature (438)..(438): n is a, c, g, or t
  misc_feature (460)..(460): n is a, c, g, or t
aataatacctcagttttattttctgtggtaanaaacatttaagaacnagagaaaacaaggnacccctgagcacacaaaggcagtacaggccgaccataaggcctcccgggaaagtagcaactgtggaaattacctgccctaggnaggatggatgcactgcctaggagaagacgcaaggttagacttcgccccattttccnaggcnaggcttagcgggaaactgggggccnaaagtgctgcagggtccgcacnaccagagaaagatggtcgagaaagttgataagggaaattcggagcaggcgacagtcttcagctttccagcggacggcccaggatcctgccgctcactgtgagatccttcccaaccaccctttggtggggttcggcatctggagcccagggacccatgggcaatttcccacctctaaggntnttngnaaaggcacgctgagggtgaatnatgtgcggtacca

SEQ ID NO: 567604 - DNA, 108 bp, Homo sapiens
gcggccgcctactactactactactgctcgaattcaagcttctaacgatgtacggggacatgagtttcccaattaaaaaaaaaatgacttcttgtccagtgcaaaaaa

SEQ ID NO: 567605 - DNA, 802 bp, Homo sapiens
gcaattctcccacctcagcctcctgagtagctgggactacaagtgtgcaccaccatgcctggctaatttttgaattttgtagtgatgggatctcgctctgttgcccagggtggtctcgaactcctggcctcaagcgatcctcccactttgggaggccgaggtgggcggatcatgaggtcaggagatcgagaccatcctggctaacacgatgaaacgccgtctctactaaaaatacaaaaaattagccaggcgtggtggtgggcacctgtggtctcagctacttgggaggctgaggcaggagaatggcatgaacccgggaggcagaagttgcagtgagccgagattgcgccactgcactccagcctgggcgacagagtgagactctgtctcaaaaaaaaaaagggtttgggggagatgaggtctgggggctgggtggcgttgcccgggctgtctggaactccggggcttaagcgcatcctcccacctcagcctcccagtgttggatttacagggcttgagccacgtgcgcggctgtcttgtgttaatatgaggtcctctctcccttaacatgagaagctttaaaggtgtggcccaagaatccctcggtcaaggaagcctctgtgggagtggccttacttttcatgatgtccatgatgtggcggctggtggatgtcgccagtgggatccttcatcatcactggcgaaagcatctatgaggctctgggttgaggggatgctcacctgaacctaatgaattaaacctaattctagccatttgatgggctgctcctattatcggtag

SEQ ID NO: 567606 - DNA, 475 bp, Homo sapiens
  misc_feature (218)..(218): n is a, c, g, or t
cacgcagagtagatgcacgagaatttcatgtgagtgatagtgtgcacgagacacatgtgggagagtagcatatgagttgtgagagaaagaggaagagcgcacagcgcggagaaagacacactcgtgagagaccacacacaacacgaggacacgagaatagcgtcgtgatagtgcgagacgcgtctctctgagacaaccactatacgacagacggcgcngcagagagcatcgtgctctccacatatcacacgcggcacaagagacagtgtagcgtgtgacacatatacacacactgttgtcacatagcgtatcacgcgcacatatgatatgcgatatctcgcgctcatacttttgtgagaggacacgagctatacacatctccccgtgtgctctgagatttctctcttttgtgcaggcgcacatcgctgtgtttcacactgtttaaggaagcgggaggattctgagtgcggctctt

SEQ ID NO: 567607 - DNA, 897 bp, Homo sapiens
  misc_feature (96)..(97): n is a, c, g, or t
  misc_feature (128)..(128): n is a, c, g, or t
  misc_feature (135)..(135): n is a, c, g, or t
  misc_feature (157)..(157): n is a, c, g, or t
  misc_feature (160)..(160): n is a, c, g, or t
  misc_feature (164)..(164): n is a, c, g, or t
  misc_feature (188)..(188): n is a, c, g, or t
  misc_feature (195)..(195): n is a, c, g, or t
  misc_feature (520)..(520): n is a, c, g, or t
gcaggaattcggcacgaggagagagactagttctctctcgtttcagtggcttctggtgctctagggtgagctctgcccggctgcagggatggcggnnaggggtaagctcatcgcagtgatcggagacnaggacanggtgactggtttcctgctgggnggnatangggagcttaacaagaaccgccatnccaattntctggtggtgtcaggaaggatacacacactatgcaagtgaggatcgaagagcactttgcggactacatatgtctaaaaccgggatgacatgtggcatcatcctcgatcaaaacagtactagtcgcagaacgtatggtgtcgggaatgcgctggaccgcccacaacagtcagatcgcatcccgcgcatggtccgtggtagagtcccctccaaggagcgatccagtatgacgccggcggggcactccaatggcctcgcggtccagtggtcgaggggcgatgtacacatgcacgtaagcagctgcagccttaggggactacctgcatnagcctctcgagtcattccctacgtatttcccaaggtcctctcgccaggcttggcattgcagcctttctagattgttggagcctctgatgatccgattccctggttctgttctcaactcctattgaagtaggttaggtgaggggtactagggtatggtgggggatctgaaggttgaaggaacaggatgcctgagcattttgcctcgaagtaactcttgcggtggtgctgtttgaccagtgtcaatgtcgatgttcaattgaaaggtcatattcttggtgctgaggaaaaaaaaggggggaaaaagacactttaaaaaaagattttggggggggcgccaaaaagaatttggcaccggggggggggggcccactaagaaa

SEQ ID NO: 567608 - DNA, 892 bp, Homo sapiens
cattgtgtggcacctgagacccgactcccggggtctcgaagacgcgtacggcgccgtgcccgtcgccatgaaccgcattcagaggtgtccaagttccggcacaccgagggtcggacgccccgtccgcgagtcctggatcagtgacgattcgagtcaggaaccgccccttcatgcatggaaccacagtcaaatcaagtctgcagcttgatcgccttcaatctccgaccggtcctggtgtactgggcattgtgcctctgcaaggccaaggagaggacaagcgacgcgtggccagctgggctgcattcagacctagtcaccgaggttggacttctcgcccttgatgacttcctcctggccagaggctcggctgacaggacgggaaaactctggcgacgtgccagggcctggggcagggccctgaccctcaggcagacctgggggtggtgctgggccccgatggacctacccagtggaaggtactgcgagtgccagcccaaactctgatcgggcatgtctggtgagcgcgatgtaggcaccagtgtgaacggtcttgggacgcatccaagacagcaagctcctgacagagctggcgcccatgcgggacctgggtgcccgagcgccgcatggagccgacgatggacgcccgtgggtgagagcacggcggagcataggacaatggcgaggaggcaggaatcgctgagccccaagaaccaacgcggtgggccatcgaccagagcactgcaaggccatgaggcaacggcaaggaaagcgggctggggaagaaaggaccatggggaaagctgaggtaactgggtacaccagacgggtaccgcacacgggaaacagggggagccacgtatcagcagcggctgggcccacgttgggacctgtg

SEQ ID NO: 567609 - DNA, 708 bp, Homo sapiens
  misc_feature (96)..(97): n is a, c, g, or t
  misc_feature (128)..(128): n is a, c, g, or t
  misc_feature (135)..(135): n is a, c, g, or t
  misc_feature (157)..(157): n is a, c, g, or t
  misc_feature (160)..(160): n is a, c, g, or t
  misc_feature (164)..(164): n is a, c, g, or t
  misc_feature (188)..(188): n is a, c, g, or t
  misc_feature (195)..(195): n is a, c, g, or t
gcaggaattcggcacgaggagagagactagttctctctcgtttcagtggcttctggtgctctagggtgagctctgcccggctgcagggatggcggnnaggggtaagctcatcgcagtgatcggagacnaggacanggtgactggtttcctgctgggnggnatangggagcttaacaagaaccgccatnccaattntctggtggtggaaaaagattccacccttaattagaaccaagacccttttcggtaatttctaaaccgggatgacattggcattattcttattaaccagtacattgcaaagatggtgccgcatgccctggacgcccaccagcagtccattcccgctggcctggagaacccttcaaggagcacccatatgacgccgccaaggacttcattctgcgcaaggccagggcatgttcactgtctaagacctgcgctaggggacttcttatagcccttagccctttcctcggttccaggcctcttcccaggctttgccattagccttttttactttttgagcctctgaattctcatttccctgctcctttccacttcatttagaggcttaggtaggcgcttctagggtgctgggggctctgctggtaaggaacacgaagcctgaccattttcttcacaccttttcctgtgctgtacaccatgtcattgttgaggtaaattgtcctatcttggtttttttct

SEQ ID NO: 567610 - DNA, 1013 bp, Homo sapiens
  misc_feature (784)..(784): n is a, c, g, or t
atgtagtacaggaggctcttatgtctccactccagctcgtcctctccgccgtagcgccaggcgtgtcgctcgcctaaccgggttgttgcgccacaattgggcacgattcattcgaaaacttctatcaaacagaacacactacgcatcagtcatcacacgaccaatcgataggccactcatcaccccttccgttaaccatcctacttctaccgtacggcctatatcttacgtccaccgtcaattcacactagctctcccactatctaacgatagcgtaaaaatataaactgccaggtttgaaccagtacaaaatcccacccgcattactccccatgagatcattctgccgcttaccacgctaatccttacctaatcttcccccttttattagctacagtaatcttatttgaaattaagaagaaactttgcccaaaatactttcttcaccaatctcatcgcaggagagggaacatgctgagaaagctgctgacgctgcagaaaccaactaatgttggccggaatcttccgtttgcagggatatcccaggtgaactaaagatcctaggggtgtcgtacttcatccatctgggcagtgtcggggtattccgagagtcccttaaatagaaatgcccttgtaaagtgatgattacgcttggcacccggcttggtgctgggtaggcttgcatctaacactaagtgaggccacgtagtaatgtcccttttggcccccgccggcgtgttacgcatgctggttggggactccaggtgtgggtcacagtcttacncttccgtcgccacccccatgttcgctgtgcacgtgctgtatgcaggcgttggtcacttggccaacgctggtcgccctgggcgcccacgtgcctggaacgagcccttggtatcctggcacttcgtcagggggacccctcgtgtgaccaccatcgacggccaccgtggagttttcagccgcctgaggcggcctggagtcgtcctgtctgcgccgggaacgcgtcggtgctt

SEQ ID NO: 567611 - DNA, 197 bp, Homo sapiens
tagtatcagctcggtaccagtgctactccacaaacaggtatcagaatgtttattgaatacttacaacgaattctcctctgaagaatttcacaatgaccctgataaagtatatattaaattttaatgctttggaaatggatcctattaattcattttctttctttccttctttttttttttttttttttttttggaaa

SEQ ID NO: 567612 - DNA, 371 bp, Homo sapiens
  misc_feature (131)..(131): n is a, c, g, or t
  misc_feature (134)..(134): n is a, c, g, or t
  misc_feature (138)..(138): n is a, c, g, or t
  misc_feature (149)..(149): n is a, c, g, or t
  misc_feature (168)..(168): n is a, c, g, or t
gagggggggccgcggcagctgcgcccccatgaggaggggaggaagatgccggctgagctgctgctgctgctgattgttgccttcgccagccccagctgccaggagctctcttttctgcgcagggttgcaanccnggangaacagacagngttttttttttgcgagcgnctggccttggccttggcccgggagcagatcaccgccatcatcgaggtcccagccaaggcccgagtggaagtagacatctttgagctgcagcgggacagccagtacgagaccacggacaccattgccatggctagaagaatggagttctgtgactccccaaggcctgcatcaggtgccagtccctcctgtgaaccctggactga

SEQ ID NO: 567613 - DNA, 409 bp, Homo sapiens
aagcagttcatacagactcagaactcggggccgggtgtggtggctcacacctgtaatcccagcactttggaggctgaggtgggcggatcacttgcggtcaggagttcaagaccagcctagccaacatggtgaacccccatctccactaaaattacaaaaactagcagggcattgtggtgggcgcctgtaatcccagctgctcaggaggtggaggcaggagaactgcttgaacccagaggcggagaggttgcagtgagccgaaatttgttccactgcactacagcctgggcaacagcgaaactctatatatagtgtgtgtgtgtatgtgtgtagtgtaatgtgtagtgtatgtatgtgtaaacactgtgtgtgtatatatgacagtgtgcctagtgtatgtgtgtgtgta

SEQ ID NO: 567614 - DNA, 193 bp, Homo sapiens
  misc_feature (18)..(18): n is a, c, g, or t
  misc_feature (45)..(45): n is a, c, g, or t
  misc_feature (84)..(84): n is a, c, g, or t
  misc_feature (93)..(93): n is a, c, g, or t
  misc_feature (150)..(150): n is a, c, g, or t
  misc_feature (159)..(159): n is a, c, g, or t
gccggacggacgctcgtnttcgcccgccatggccgagagcgactnggacacggtgacggtgctgcgcaagaagggccctacggncgcccaggncaaatccaagcaggctatcttagcggcacagagacgaggagaagatgtggagacttncaagaaatnggctgctggccagaacaaacaacatttctattac

SEQ ID NO: 567615 - DNA, 107 bp, Homo sapiens
tctatgaggatccacccgtggcgagttcatgcatgtgctgcgcatgagtgtgtgtgctgtgtgagcatgtgtgtgctgtgtgtctgtgggggctgtgtgcatgagtg

SEQ ID NO: 567616 - DNA, 599 bp, Homo sapiens
atggcggtgcggatggtgctgggaaacgatctcgttgcgcatgggtggtagtaggcattgaccgtctgcgggaacatgagccactcgtcgggatccatggggcccgagagtttctcaatggtgcggtcgagttggaatgaattgcaggctagaacggcgtcgaccaggcttccgtcaggtaaccggagtcccgagaaatcgcgccaatgttccgggtagccgatcttcgggcggaaggccgagagcttgtcaagggcttcagctcgggtcgactcgctcatccatgtcagtgtcgagatggactgacgatatgccgccagcaggttggcgacgaggtcgtccattcgctctttggctgctggagggaagtgcctagcggcataaagtttgccgacggcctcggcccatggccgattcaacgaaggagacgccgcgcttccatcgagccttgagcgcaggggtgccgttgaggacacgaccgtaaaagtcgaagttctcatcgacgaaggctgagctgagataggaggccagggaaagatatggcgtgccagcgttgccacgacttccactggtcaaggcgttcgtcgacgagcattccc

SEQ ID NO: 567617 - DNA, 1941 bp, Homo sapiens
atgtaagggagcataaatgaattcctgattactctgtaagctaagaatttaaacatatgttcaggattgtatttttataaaaatttttattgcaaattattaatatagattcacagatgaataaaaaatgatgtggtcctatttatgtaaagcaaaacaaatatttgataggtggtgtagaatgatgtttacacctgccttatggatgatttatgttggaactgctaggcctacgagtcagaatatctacttaccagaaaatcatagaaaaatatgcaagtttatatcactcacactgtggagaaaaccagtcagtaacaaactgttaagtcttaacagtgattataatattgaaaagaacaatatcaacagtagaacaaccatatcaagacagtggatcatgaagcaatgactataggattccctcctaaatttcgttcattgtaacacccacactgtgttctgtctctgtgcacagcacaacaaactcacttcaaagccaaatgaggacttggcatactcaggaaattctagtaatgagatgctcttagttttactgttacagtatgtagcacttcatcttaggcaaatatgacagtctgtggaatcctgtgtcattcatttgaaagaactgacaaaagaacatgtttttagatcaacttgcatttgcaggaacacacatgggttgccaaaaatatccatttagagtgtttaaaagaggcacacgcctggattggcctcggtgaccaataatgtctggtggtaatgcgtgttttttggagtagtctttaattactaaacaaggtggtgacatacataaagccagtgggttttttttccaccggaagatgggtgctaaagaaactgagcgattttatttttttcatcatataatatttctgatggtcttgcctccttcaagtctcaacatgtgtctctttaaagagaatatttcacctttcaaaatgaagtctcctaatgactcacttaaatgtttattgttttcttgccgtaaggaactttgtgacttgtaaatatgaatttatgtatgcatttttgtatgaataaatacatttataaaattgatatttaaaaagagctagcacttaagttaggccagacgtttttctaagcactttacagatgctaattttctaatcctttcaacagccctgaaaagtgactttcatatttaggattgaatataaactcattctaagattgtctataacctatttctgtgttgcttagcatagttctatttaagagaactaagacaaacatatagaaatatgatgatgacaatgatgatattatattactttcccaagtgtctggcactatgcgtatttcaccaagcatttgtagagaagcggcagaatatgatgattatgagcctcaattctggaatgagactaacctggttttaaatcctggctgtgcttcttacaggttgtgtgatttgtggtaagttacttaaattgtctgtgcttcagtttcttcatttgttaaatgtgtatgacacctatttcatagaattgttatacagattacgttaattactaaaaaattatttcgagctcttagaatagggactggcacatattcaatacaaaataagtaataaaatacagaggtatgtatttgaatattcaagacttcttggaaggaaaatacttaatgctgttgaggaaaattttaagcaattagaatggcaactagaagagattttgtaacaaactatagtggattatctcacatatttatccctcattcaggcaactacacatctgagttctctgcttgttactagagctcatggttgctggctccgaatgagaactgaatatgaaaattttcagtttgtgaaaaacatctggagcttttagttgactacaagcttaatatgagccaactgtatgttgcaactgcttaaaagag

SEQ ID NO: 567618 - DNA, 184 bp, Homo sapiens
  misc_feature (15)..(15): n is a, c, g, or t
  misc_feature (18)..(18): n is a, c, g, or t
ctcttcaaggctcantantctcggctggtgaatttcatggaaaattccactttgatcccgttcatctcaatcacgtccgtgctgccagttcttggtctccacggtttgtgggtccagctgtgatctgtcctttgcccatgatcttgtccacgatctcattgttgtccttgttgaccttggtctt

SEQ ID NO: 567619 - DNA, 332 bp, Homo sapiens
catcccctgcactgaaccgtgtcctcaatctggtggttagtcttggcacctgaagctgataggcaggtcaggctgtgctcggggggtgttgagctcgatgtcataggcggcttcttcagttcgtaatctctctgtgccttgcgcatctcgatctcactcaggtactgagcaagacaccttttcctgcttggctttagcttcccggatcccagcatctctcttgggctctgcttctccaatccgtgcatctttttggacttgagccgttcgagccttccccaaagagtgcaaatagtcctggtcatcgtggggggatggagcacccatgggta

SEQ ID NO: 567620 - DNA, 1208 bp, Homo sapiens
tcagtgggggaccagagagcaccgacccgggaggaaggggcggacaggcccgtaaagccgaacatccccctcccagaccacgagagctcgtgcggggcaaagtgaaccgagccgctgggcggatgcaaggtggaacgcccaatgcccgttctcccggccaaagtgaactttaatcagggagtggttggatgcaggagacggggcggcagagacctgctacgaagctggccgcaagatgaatccccagcaacaacgcatggccgctatagggaccgaccaaggagctgagcgacctactggacttcagtgcgactagttttccccagctgttacatagtgggaccaactagaccaagctacactgggaagcagtcaatacagtggatcaggtacttgatgaaagaggaggtacaacatctagggggaacaagtggtcaaccaagtccgttcctatgaattcatcatagaaggtaatacacgacatgccctcattacagtgatcacttgactgacagtccgattaggacggcccatgaagggctggtcccccaaaacactatgcatgaaactcaacattctgcactgggcacacaccattcagaagcagcaggctcaataagcgcctgctacagcaagcagaatactgggaattaccaaggagctggccaaacataacatctaccgtgagaccaagagaactatggggggcataggagaaggcccaggcagcacaggagtatgagtactatcaaggcacacaatcttgggaacaccgaatatacatatgtaccatatatccgcgcataagcaagattccaaggacgcgagaccccaaccaatgcacacattagcaagaagcaaagaagccaatgtgcaagacaaagaaaggaactaaaggggacgcaaaccaggagaaagcgcaaaaaccataacatgctagaagagtgacggacaacaacacaaaaaaactaaagcatatagatctaaaaaacgcgagaagattgtccctacgaaacaaacgcagccagaaaaaccaacaacaacaagaatgatgaaacgcacaaacccaaaacaaagtggcgcggagacgggagaaccaccaaagtaagagcaaaaactaaacaaaaagagaaaaaaacacacacgaaaagacgaaacacgtagagacaaaaagacgaagatgaaacacgagagaacacaaccaaaag

SEQ ID NO: 567621 - DNA, 111 bp, Homo sapiens
tacacatgaggctcttacacatgaggctctacacatgaggctccaataggtttggtcctagcctttctattagctcttagtaagattacacatgtaggctccccgttccag

SEQ ID NO: 567622 - DNA, 113 bp, Homo sapiens
gcctgcggaggagttcctgaaccagagctcgcccttctacttctggtttaatggtgaccgcatcgactccctgctggggaacgacctgcagcagacgcacatgctggatgtca

SEQ ID NO: 567623 - DNA, 176 bp, Homo sapiens
tgtgtccatatggcccttattttacttaataatggcttccaaatgtaagactagtgatgctggcatttccagatatacccaagagaagcttcctttaagtgaaaaggtgacaggtctagatttactagggcaggcaaaaaaatagttgctagatctatggttagaatgaatcttct

SEQ ID NO: 567624 - DNA, 261 bp, Homo sapiens
ggctcactaaacattctactactcaccctcactgcccaagaactatcaaactcctgagtccaacaacttaatatgactagtcttacacaatagcttttatagtaaacatacctctataccgactccacttattactccctaaaacccatgtcgaaacccccatcgctgggtcaatagtacttgccgcagtactcttgtatactacgcggctatggtataatacgcctcacactcattctcaaccccgctgcaaaccaatac

SEQ ID NO: 567625 - DNA, 300 bp, Homo sapiens
  misc_feature (10)..(10): n is a, c, g, or t
  misc_feature (138)..(138): n is a, c, g, or t
  misc_feature (286)..(286): n is a, c, g, or t
cataaatgtntccctgtttttttatggcttatgcagtttgccatccatgacggaacgataccgtatccgcctgtttaggtgtgggcgattgtaacagcacgtcaactgatgtccagacgccctgatttgctgatttgntcatagcctggtaatcgccgccctgtaggctacttgattctatagaaacagaaaaaggcaaacgcagccttttctacattttcagagtaactcccgtcagttgcgagcaaaaaagccgctacgctttagctatacgtgctaatttcangagaagagaccatg

SEQ ID NO: 567626 - DNA, 149 bp, Homo sapiens
tggcaaaaacccaaaaatttttttccgggcccctggggaattttaagggtgatgggaaaaaaagaaccctgagtggaaagaacaaagtttccaatttaccacctgccaattaggggccaaaaaaaagcaaaagattggccggcttttta

SEQ ID NO: 567627 - DNA, 599 bp, Homo sapiens
gctgacctgtgaggaccagaggcccccggtaggagcactgaatgcgagcaagatctgccattggtgtctccattgcccagctcctgcccacactcccgcctgttgccctgtaccagagtcatcatgcctcttgagcagagtgagtcagcacttgcaaggcctgaagaaaggccttgtagtgccctgagtgagaggccctgggcctgtgtgggtgcgcaggcgtcctgctactgaggagcatggagggctgcctcctcctcttctactctatgttgaagtcaccctgtggggaggtgcctgctgcctgagtcaccgagatcctccccagagtcctctagtggagcctccagcctccccactaccatgaactaccctctctggagccaatcctatgagtgactccagcaaccaagaagaggatggggccaatgcaccttccctgacctgtgagtcctgagttccaagcagcactcagtaggaaggtggccgagttggttcattttctgctcctcatgtatcgagccaggtagccggtccctaaggccgaagtgctggggagtgtcgtcggccattggcagtatttctttcctgtgatcttc

SEQ ID NO: 567628 - DNA, 226 bp, Homo sapiens
cgtgactggggaaatccctagctgggagttcaagaccagcccggacaacatggtaaaaccccgtccttactgaaaatacaaaacttagctgggcgcattggcttgcgcctgtagtacttggggggcttagggtaataaaactcagaatgcaatagccaagatttactcatcgaccacgatttactcatcgaccaagatttactcctcggccaagatttactcatcg

SEQ ID NO: 567629 - DNA, 901 bp, Homo sapiens
  misc_feature (225)..(225): n is a, c, g, or t
catgatgcattcgacttttcaatcaccatgggacgtatcctgtaggtagaagttactctaggagttgctaggaccctcgtgcatacgtagctatgctcaccagtggcatcctagatcatctgcggcatatgcaccgtgtgtattactcgcctgctcagcggagagaagttgaaatagtgtgtggacatcctcccactcgtgtctggactactcgagacttggtgntgcgcccgtgcgcgtgctgctttgttgttcgcgagtcctcatgattcgcgccgtcctgctaagcataccaaaccttcgtgatgcgtcgatatgcatttgctgtcgaagcttcgctcaattccagccttgcgcttactttgatggcacagaagcggtagtgggccctgacttccgcgttcctacggagtgtatacttaacaagcccaatgggatgtagtgtgttgggatggcgactatgatctctctcggggcctcctctccctatgcacgttgttattctctcccttgtctccatttcggcctgatctctgtggcactcctggcgtatcgcagctgtgccgtgggcatacgagtcttggagggacgagatggggagcatgtgcttccatgtctcgtctgttgctcccttttggaggtttgtgtggcccttctgtgtggtgtgcggcatatccagaggcataggctcggtaacgttgggaaaggccctacgtctggggatggtctcgtacgtataccacttcctatcgacatctacacgctcaagatctctctcatccacaaggtgctctcaatcgttatgcctcggtccattttctataccccaggagggtcccaactctggcgactcttggggcagccttccaaggctccctaggtgtgttcttggggaagagac

SEQ ID NO: 567630 - DNA, 595 bp, Homo sapiens
cagtgaacccatatcacgaaaaaagatctacctctctatactaatctccctacaaatctccttaattataacattcacagccacagaactaatcatatttaatatcttcttcgaaaccacatttatccccaccttgttatcaatcacccgattgaggcaaccaagccagaacgcctgaacgcaggcacatacttcctaattctacaccctaagtaggctcccttcccctaatcatcgcactgatttacattcacaaaacctaaggctcaataaacattctactactcatctcgatgcccaagaactatcaaatcctgagccaacaattaatatggactagcttacacaatagctttatagtaaagatacctctttagggactccattatgatccctaaagcccatgtcgaagcccccatcgtgggtcaatagtactgtgccgcagtactcttaaaaataggcggctatggtataatagcctcaactcattctcaaccccctgaaaaacaatagcctacccttccttgtactatccctatgaggcataattataacaagctccactgctaagaaaaaagacctaaatcgtcattga

SEQ ID NO: 567631 - DNA, 237 bp, Homo sapiens
  misc_feature (216)..(216): n is a, c, g, or t
attatgttgagctatgatatcttctatgctcagtttacgagggtttgtatcgaggaaaggttgaattgatcaaatgcttttcagcatcaatagaaatgatcatataacttttgtctttcattctgttgatctgatgtacacattgattaatttgagaatgttcaaccatcattgcatccctggtgataaattccactttggtcatagatgaatgantctttttaagtgcgacagtta

SEQ ID NO: 567632 - DNA, 100 bp, Homo sapiens
aattctgatgaacacaaggacattcagagttgtacagtagaagttcattttcaaaagataattgataaggaaggggatgattatgaagtcattcctaaca

SEQ ID NO: 567633 - DNA, 1280 bp, Homo sapiens
gctccccttcaacatgcggacgacggagagatgcagtagaacggtagagtcacactgctgactgtcgtattatgcaagcttctgcctggctgaatttcgctcgtcattcttgtcttagtctcgcctcgccctcctgttttgaattattattacatgcaccgccttgtttttgcatcggcgcatcacacattcgctggtatgcttgcctctcttctggctcctcgtttgattgaattcatctctctcgtgttgtgggttgtatttcctctttctgccgcgcccccctttgtgtgtttggacacctccctgcctaggaaccgtcctggggcgttcttggggcaccgtgtgttcccggggtaagacttttggctctgttgtgggagacgcaacacttttttggtcatctgggtaagtgtttgttccgctgatggtattgtgccttttctgggttactcggcgatatgatcagcttatgggacacagtgggccttggtggaactggccaaatggatgtccccctattgccacccctggttggaagtaactctcctctggtttgtacgtggttattaaaggcgctcgtgtagttatagacctattcccgatagtgttaaatataagatgtcttgtttcccctaatatagacctatggaatatatttaggtaatagatgtattacttggaaacttctgcctttgaccaactgcccaagtctcaatgagcacatgtatccccgtgacccgtaaatccatggaacatccccatgaagaggataaggatgcttaaaatggaaatcattctccaacgatatcccaattggacttgttcacactgctggatatatgctacccataaccccagcccccacttgaaattcttaccattcaagctcctaagagttcttgaatttataactaattttaaaagagaagtttcttcttctggttttaatttgggaatcatccattccattcaaataaatggtacttgtgcgtttatgcgaacagacccacctggcattaccgttggcctttccttcgacggtgggccaccagcctgggccagattgtggccacagtggtggcccatgtaagtcccatccggacgtagtcatgcctcctgcactttcgctaccccgagtttagtaaccacgtgcagactctccaccgtttctgtgttccgatacctctgagaagtgcctgatgttgatgtaccttaccagaccacccagagaccatctttgctataattgtataaagccataaatgtacataaattta

SEQ ID NO: 567634 - DNA, 248 bp, Homo sapiens
gcagcgcgtctgcacaatccttgtcataacatatggtatatcacaatcaatccaaggtgagaacatttcttctaaatagtacatatcacatgttcatactcactgagttgtcccaaaggtgagtgcctataaacttcccagctgtaacatatactgtcaacatctttcttcttgagttcaaactttcttaagcttatatgtttctcgttggatataccagtccaagcctctttgggaaggcacctgca

SEQ ID NO: 567635 - DNA, 158 bp, Homo sapiens
cgcgtaactgccggtacagtttcggttacgccacctgtccgaacctcgaatatcgagacaaggtggtgaaattactcgatccgacgaggatacagtgtacaactgtcagaggagttcaagcttcatcctggccagtacaccgacgccttcgtcgtcca

SEQ ID NO: 567636 - DNA, 160 bp, Homo sapiens
actcatgtacaaggcataactcaataagtcgggcaagttcgttggaatatcacccatgtgcgggaaggcaaatatcaaaccagacaaaataatgttggcccaccaccaactgtgacggaaaaaatatttaaccactaacccacgatgacaatttcttcaa

SEQ ID NO: 567637 - DNA, 92 bp, Homo sapiens
gggtcgacacggccgtgtattactgtgggagtgagaatggcttctcactctttgactactggggccagggaaccctggtcaccgtctcctca

SEQ ID NO: 567638 - DNA, 857 bp, Homo sapiens
aaaaaaatttttgttctttggtagagatggagtctccctctgttgcccagactggtctcgaagctcctgagctcaggtgatcctcctgccgttagcttcccaaagtgtgggattacaggcatgagccattgcagtgggtccagagatgggtatgatgagagcagttgaatgctctcaaaagtgcaaagtgacggtatgtcggtaaatgtctcatactccagaagcacatccagtttacatgttctgtcacattgtagtggggaaggctgaggtaacacatcacgaggaaactcaggagcgatagcaacaggagaccccatgtgagggatcctagtgacatcctacttggaagggctgtccggggagctggggcttgtccagagagccggagccagtccgtagcagctcagaagcatgcgagcctgaggttcttcctctggactcaattactgtgtcactgaaatactttcagtatctcaccagttggacacatttagcggtatgtagtgtgcaagaaatataggccaccaaattatagagagaatctcagatggggttgaaagttcctgcataaaatgccttattaagaaccacacgagcttgtacgaatttccagatgagatttaacaggcactagctacacaatgttgcggcggtctggtgtgtcccatggcttttctgttaaacactccagatgggctgtgaaccctattgaacccccgaaaaagcagtataagaccccatggtgtaggactaccctttgtacaaacttttacaaacaaaaggcacacccttaaacagggctcgtgaaacccctcgtttttatacgccacaaggggataacccagcccatcggg

SEQ ID NO: 567639 - DNA, 327 bp, Homo sapiens
tttatacaggtctgcagatgtagtggagaggatgtgtccacctggatgtccatctgaactgcacctctaatgtcaagtctaacggcaagatacatatcgacagcaagctccatgtgaccctctacaactgctcctttggccgcagagactgcagcctgtgcctgttcctgctaaccccgactacaggtgtgcgtggtgctgtggtgccagagcaggtgcagtagtaatgaggccctgtgcaacaccacctccgagtgcccagccgaccgtcatcaacaggatcttggcctgtgccggatcttggcctcgatgccgagtaccgagctc

SEQ ID NO: 567640 - DNA, 244 bp, Homo sapiens
  misc_feature (86)..(87): n is a, c, g, or t
  misc_feature (92)..(92): n is a, c, g, or t
  misc_feature (112)..(112): n is a, c, g, or t
  misc_feature (118)..(118): n is a, c, g, or t
  misc_feature (132)..(132): n is a, c, g, or t
  misc_feature (148)..(148): n is a, c, g, or t
  misc_feature (150)..(150): n is a, c, g, or t
gacactcacacagatgagaatacttcctgagacgccttgtatgatgcagagctgtcccagatgcagacccacatctcagacacacnngtggntgctatccatggacaacaancgcaanctggactggacagnatcatcgctgaggtcnanggcccaatacgaggagattgctcagaggagccgggctgaaggctgatatccagataccagaccaatttataggagctgtaggtcacagcagtgc

SEQ ID NO: 567641 - DNA, 199 bp, Homo sapiens
ctaagaaattaaaaaaaaaaaggctgtccttcatccccttcccccctaaagactgaattttatttgttttaaaaatgaacttctccccctacccaaaagtaacaaatatggtagtcagttttgtatttaaaaatgtattgggaccagggatgttttcataattttcaaagattatgcatttttcatgaaaacttttgta

SEQ ID NO: 567642 - DNA, 1008 bp, Homo sapiens
gctctagcgcggcggtgcggctcttttccctcgtgactcgtgttgctcctggcgccgcgacggggcctcacggtccgcagtcccgacgaacccctgccggtggtgcgcatcccagtggctctacagctggcagttggaacagctggcagagcaggctggctggaacctccctgaggcctggtgcttggttctgaccctggacctgctagctcggtttctgtgctgctggctggcctggaggtttgaaccgagtctggctgcgccttcacacgtgggcctgtttgggagctgctgctgccctgctaagcctcttcaaggctgggaaggagtctgacgctgcgctgtcggggaccacattctccagtcgagcgctgcgcaacatggaggcgcacagcgtgtgcgaaaggcctctcgtcctaaggggccagctttgccttgacccttgggccatggaagccccggtgtgctggcacgcacttacaggaggctgccgcctgacagtcgttcaggccacaaactgtgcagtctagcaccatccccttcactacttcgcggccgcatgtacgtcatgcgccggagaaacctggccagtggcaaagactctcagttatctcctgctgctgcttcaaccggttcttgcggccagccaagcctggactcccttcctatcccctgcgcccgaggctggtcctttgttctttcgcgaggaattgggccaccaggtgcgggctgtgggccaaccttgtgccgctccttggggcctgtggtgcgggacttggggggaggccacggactgcgtaggatcaggcttgcatgctgtcacgacaggcttcacgcgattgtgcttgtgcgcactccaagggctctgtggcagggcctgaaaagtcaatggatcgcctggagcactctccttcctgggtgtgcatgcaggcagaacactggtgatgaaagtactgggattgtgtgaacgtcttaaagagccaatgcaaggccgttattgagaccctc

SEQ ID NO: 567643 - DNA, 313 bp, Homo sapiens
  misc_feature (12)..(12): n is a, c, g, or t
  misc_feature (56)..(56): n is a, c, g, or t
agggaaacccangataacatacactcaccctgataaagaattaagccttcaagcgnctgcctggtggcccacgtctgtaatcccaccactttgggaagccaaggtgggtggatcacttggggtcaggagttcgagaccagcctggtcaacatgatgaaaccccgtctctactaaaacacacacaaaaaaattagctgggcatcatggcgggtgcctgtggtcccagctactcgggaggctgaggcgggaggatcgcttgaacctaggaggtggaggttgcagtgagttgagattgtgccactgcactccagcc

SEQ ID NO: 567644 - DNA, 891 bp, Homo sapiens
gagactcgcgtcggtggggatcccggacgtaggtagttgtgggccgggttctgaggccttgttctctttacttttcccactctaggccacgatgccgagtaccagacctggaggagttcagccgcgctgccgagaaagctttacctcgcttgaaccctatgaaggcacgtgtggttctcacatataggcatcctgatgggaacttgttgtgtcaaggagtaccaagatgattacgtggtgggtgtataaaacagaccaagctcacgatgtacacgaagattggagaaattccacaagtcaaatattgcgacttatggtagccaaggaagcccgcaatgttaccatggaacactggagtgaactggttgtgaactgaggacttgtgtcggtgtacttagggaaggtaaatatctttggaatagagaatgtgtggggacgagaaggtactttattgtaactaaggtgggcttgtacagaagctaagaggtcatttgtgtaatttcattgaataactttagaggagctagggatggaattgtttcaagtatagaacagcttttatttactttgtgaagtggaacaagaaatggatctggtcttaggaaacgtgggcgatattgggatgtaggtaaacacatgtactggtctcctggcaattgtactcaggacttcgcacatgggtatcaggacaaccacttgttctaaaatcacgtcactttcttaaagacactcaatgtaccttgtgccggctcagtcttgggataaagcttcgggggggccaaaaattaaatggactggatacgccaccatgtcctgtgcatcgggacaatttacggggccattgtgaatgggaacggtggttccaaaccgagagggtgtaggacaatacag

SEQ ID NO: 567645 - DNA, 246 bp, Homo sapiens
tccatgctccatgcattactgatcaatctttacactgctgcagcggatgtaaatggcgttatgcaagaaagtgttaatgtttccattttctgccccattcagaatccaggtggaaagttaacctttctaccacaaaaaaaactcaataaaaaagaacaaaatttttttaaattccccttttttttcaacgcggggctcaaaaaaaaagggtagaaatcagatttgttgggtgttttgctctctttc

SEQ ID NO: 567646 - DNA, 609 bp, Homo sapiens
  misc_feature (176)..(176): n is a, c, g, or t
  misc_feature (223)..(223): n is a, c, g, or t
  misc_feature (236)..(236): n is a, c, g, or t
  misc_feature (257)..(257): n is a, c, g, or t
atcgtttcagggacaatagggctttctagcattcctgactagaactagcagaacggtgtcccagcttatcctgaggtccagtatgtgcattgtgctagatcaccgggaggaccccaggactctctacataggataactcaattcaaatgtgtgcgcctaaagctctggaactggtnttccaaccagctgaccgaactcactgaccagtacaggcatggttatntcaacattaatancatgtcaactggactcctatntgtaaatgttatccatcgcagcaacccagctcatcaggtcattagtcagtttatttctgaaacaagtcaagtcatgcaaaaagtggcggcttaatgcagagagaatccccaggggcccgcacccgtaggatgtaaagtccggcagagggtttccataagcgacaagcagaggcctcggtcttgagagatgtccccggacaacaagaggcggcgtgtcagatcacagggcggaaggccagagatagttttcccattgtcatttgaggcctatggaaagtgagtatttcaaagccttcaagtttacgcgagttgtaattaaaaataaccaacattttcaaagttggtaaattta

SEQ ID NO: 567647 - DNA, 153 bp, Homo sapiens
cagcacctccgcatccgcaccaagcgcctgacccctggggggacggcaaccacactctgttctacaatagccacgttaaccctctgtccacgggttacgaacacccctgaggtcccggacgaccccggacacaataaaggtgtgaggcttcga

SEQ ID NO: 567648 - DNA, 291 bp, Homo sapiens
gtggagaggagacctgggggtagctgctggtgagggtaggtgagcctgcatgttagccgcagtcagcttggacagagagtgggcaagttcgcgtgaagaggctttgctaaccatctcagttaaatagcagtcggcatttcataatcataaagaggtcaattatctaagaagacagagcaatacttaatgtgcatgcacctaacaacaaagcatcataacacgtgaggccaaaaacgatagacccgtgaagagatgcatccactactgtagtaggagacttaaaatccctca

SEQ ID NO: 567649 - DNA, 164 bp, Homo sapiens
  misc_feature (1)..(1): n is a, c, g, or t
ntcagtttctacacggagggctgaggcatagcagtgtagcaggacgagccgcaggcaaaactcttcagtcaccaagttaaagaaggaaggagaaggaagaagaaagtaagaagaaggagaagacggtgacgaaggaagaagaacaactaaggagaaggaagaag

SEQ ID NO: 567650 - DNA, 212 bp, Homo sapiens
tgatacggaatgaacgcgaccaccatcatcgcgccgaacaggatgttggcgccgcgcacccgccatagcgacagggcgtaaccggtgagcgagccgaccaggatggagataacgacagacggcaccaggatgcgcagcgaattgagaaagccgaccttgatgccctggcaggtcagcccagtgcaggccgaggtccaggccttgacccatgc

SEQ ID NO: 567651 - DNA, 357 bp, Homo sapiens
  misc_feature (176)..(176): n is a, c, g, or t
  misc_feature (223)..(223): n is a, c, g, or t
  misc_feature (236)..(236): n is a, c, g, or t
  misc_feature (257)..(257): n is a, c, g, or t
atcgtttcagggacaatagggctttctagcattcctgactagaactagcagaacggtgtcccagcttatcctgaggtccagtatgtgcattgtgctagatcaccgggaggaccccaggactctctacataggataactcaattcaaatgtgtgcgcctaaagctctggaactggtnttccaaccagctgaccgaactcactgaccagtacaggcatggttatntcaacattaatancatgtcaactggactcctatntgttacacgtaatcaatctaagcattcctagcctcagtcagtatataatgtggtttctgtcgaagagactcccagggttttcccactctgaagattatat

SEQ ID NO: 567652 - DNA, 450 bp, Homo sapiens
cacggacgacgagtccttgtgcaagtgtgtgtgccatgtgtagtgctatttacatataagcgctactttagaagtttatcaaagtcatgacttttacaacccgtgtcgaatgctcttctgcattatatgcagcattgcaaatctgcaaagtagtaaaactataaagcacctttaggtttgcaccagttattacagaaatggggatttgtgaaaaggatgtaatttgatgtagaagggcaaagtcctttaatgactggcattcaagaggattacttaaaacaatttgtaagttcatgctaacctcttccctatatttatactactgggacctggggaaggatccatgacatggaagtatcttgagtgtgccttttaaatttgagcattactgctaagaatgttctgtaaaggtgcatagttaagcagctatcccttaactcttggagaaat

SEQ ID NO: 567653 - DNA, 977 bp, Homo sapiens
  misc_feature (41)..(41): n is a, c, g, or t
  misc_feature (48)..(48): n is a, c, g, or t
  misc_feature (51)..(51): n is a, c, g, or t
  misc_feature (64)..(64): n is a, c, g, or t
  misc_feature (121)..(121): n is a, c, g, or t
  misc_feature (156)..(156): n is a, c, g, or t
  misc_feature (171)..(171): n is a, c, g, or t
  misc_feature (337)..(337): n is a, c, g, or t
  misc_feature (339)..(339): n is a, c, g, or t
  misc_feature (392)..(392): n is a, c, g, or t
  misc_feature (396)..(396): n is a, c, g, or t
  misc_feature (399)..(399): n is a, c, g, or t
cacgaggcggcacgaggaaaaacagcaaattccttaatttnggtaatnttnattcttggtcttnttgttcttggaatcgccagcatactctattactatttttcaatggaagcagcaagtntaagtctctccaatctttggtttggattcttgctnggcctcctatgtttncttgataattcatcctttaaaaatgatgtaaaagaagaatcaaccaaatatttgcttctaacatccatagtgttaaggatattgtgctctctggtggagagaatttctggttatgtccgtcatcggcccactttactaaccacagttgaatttctggagcttgttngntttgccattgccagcacaactatgttggtggagaagtctctgagtgtcatttngctngtngtagctctggctatgctgattatgatctgagaatgaaatctattcttagctattccaaacttagtaatttaagcagttctgtcataatataacctcatggaaatcccaaaaatccgatgcttagcgtgtaaaaattgctgataactgatcctaatccctagacacattataaaagaggactttcagtaactgcacaagagggaaaccataaaagaccgggaagcaatgcacgcaaaactacagaacgaacaagatggatgatcgaagcaaacatgagaaatacatcgcataaactaaagaacaacacacggaaaaagcaacaccagaattccaaaggaatacggagactcgcacaacgcaaacacccggaaacaacacaaaaaagaaaaaatacaaagaacaaaccaaaatacacaaaagaaaaagacaagagggaaaagaagaagaaagaaaaaaaaaaacaggacagaacaaaaaggcaaccgaacgtaacgcaacaacacaagaacaaaaaaagagaactaaaaaaagcacgaacaacgaagaagaagagagaggaaagaaaagcgaaaaaaaaa

SEQ ID NO: 567654 - DNA, 491 bp, Homo sapiens
acaggatctattttgcgggcctttccgtccaatatagtaatgatagcaaagcataaccaccgtatgctgacatggagaaagttttagtggtatgaatggaaggataaagcagccacagcattcccttagtccaaatcctaattaagagcaagatctcaaaactcttcggttctatgaaggctgagacaggtgaggaagatacagaagaaaagctggaagctagtagaggttagctcatgagatttaacaaaagaaaccatcgctataacatagaagtacagggtgaagcagcaaatgctgatgtagaagctgcagtaagttatccagaatatctacctacaataattgatgaagatggctactctaaacagattgtcaatggagacaaaacagtcttatgttggcagaagatgacatctaggactttcacagctagagaggaggagtcgatgcctgacttcaaggcttgaagagacagtctgactcttctg

SEQ ID NO: 567655 - DNA, 612 bp, Homo sapiens
  misc_feature (61)..(61): n is a, c, g, or t
tccgtttctcgccccatgaccaaccgtgtaagtttgggcacaataagcttacacaattggntttggtgataacccaattgatttctcacaaaattccccaactatgccatttctaagacggtatccccatgaataagggttaatgaatgttaagaaaattacctggttcaagcttttccattttttcactccccaaatgatttccacctttttcttaaaaggtccattaaaggccttaaaaccttgaatcacggtcattacagtggaccttaagtgtttttctcgggttttggctggcacagttttcatgtcattaaaggaaaattttataaatgcttgaggagaatgagatacatcttgtataggggagagtacaaaaggtatggtggcaagagagaactccttaaaggggcactataatatgtaagtgttaacctaattgccagctttctctatgccatcctggacacagcgatcatattgtgtttcaaataatttatacacattcattaaaacttgagtcatttgtgataaaatggtgtgtgtaaaagtaatgaatctaaaattggtgtggggtgttaaaaggtgtaaaattttcctcatctatatcat

SEQ ID NO: 567656 - DNA, 228 bp, Homo sapiens
  misc_feature (8)..(8): n is a, c, g, or t
  misc_feature (41)..(41): n is a, c, g, or t
ccggccgngcgactacggctgcgagagacgacagaagggtnaccaagaaagagaaatcctctctactaaaaatacaaaagtagtcaggcgtggtggcacatgcctgtaatcccagctactcgggaggctgagggcaggagaatcgcgaacccaggaggtgggggctgtggtgagctgagatcatgccattgcactccagcctgggcaacaaaagtgaaactccatccc

SEQ ID NO: 567657 - DNA, 285 bp, Homo sapiens
catggcagaatatcttatatccctgagctgctttccactaaatgtcagtggtgaccccgatccaattattatgacaactgaacatgcttatgcttccctcatgcctttattttacatggggggaaatcttaacagctacagtatgcgcggatatacatgtgcatacttggtcctgcaattcaaatttctgggaagccaaaagagtctccttggctcagattacgtgattgggactagagcttctcacttcagattctgtcataagattagtggtaaccctaaggg

SEQ ID NO: 567658 - DNA, 316 bp, Homo sapiens
ggggtggaggagggtcctgagagcgaagagggacttaagactcaccggccgtacgccatgatgggccctgtgggtgctgagtgcctctgctgcgtcctgctgaccttcgggttcggtcagagctgacgatgaattaaaagtggatggtacagtagaagaggatctgggtaacaagtagagaaggatcaaggacggatgatgaagtagtacagagagaggaagaagctattcagttggatggattaaatgcatcacaaataagagaacttagagagaagtcggaaaagtttgccttccaagccgcgtagtcagatcg

SEQ ID NO: 567659 - DNA, 342 bp, Homo sapiens
tcctttgggatgatgggccctgctatccccagtttttgccagttggttttttttggagggttgtgggctttttttaaaaaaaaaaagtcctccaatccggaagaaacctccaaggctttgtcctagtggagggggttatcctaaccccccggctggcccccagctggcccctgcctttattccagactgccctcgtcccagctttttgtcccactgttgattattgggttttttttgaaacgccccttttccaaagcccgggggtttccattttcgctttggcccgccccttttgttttttaagctttttgggccccattaaataggacgggctgtttgcca

SEQ ID NO: 567660 - DNA, 301 bp, Homo sapiens
acgctctctctgtggggtactggaggtaggactttaaagatctttttttggccaggcgcagtggcttacgcctgtaatcccagcacttcgggaggccgaggtgggcagatcacgaggtcaagagattgagaccattctggtccacagtgttgaaaccccgtctctactaaaagtacaaaaattagctgggcgtggtggtgcacgcctgtactcccagctactcgggaggctgaggcgggcggatcatgaggtcaggagatcaagaccaccctggctaacacggtgaaaccccatctctact

SEQ ID NO: 567661 - DNA, 106 bp, Homo sapiens
atggctagatgctagcatacaggcaagtcgggggagctacgtcaacctgtccctcaagtcgggggctgtctggcttggtcatcaacctcaggctcaggtgccttcg

SEQ ID NO: 567662 - DNA, 1269 bp, Homo sapiens
cctgcgtcctcgcttcgttcctcgtgcgtttcttgctcgcctgttcttccctctttctgtctgtgttccttatgggctatgtgcctgttgttctctgcttctcctcttccctccgttctcttctatgcttcgtgttgtgccctcttcttgtgctttccttcctctttcttggtgtttctgtcgcgttttcctcctgcttcctgtggccccctccttttcccccttgcttcggcgtcccccccttacagcgtttttgcctcctgttcctctctcgtttcttcttctcttgtttcgttgtttccctttgggtattctcctttctggcctttctttcctgttgtcattctgtgcgcgctttcggtctttgtgtcattgactgggtcttcgtttgtgtcctgcgttgccccctgtcatccttcttcggctcccctttctctttgctcatttcgtcctctccccttgtccctttctttctgtgcgcccttctgtgtcagtaccgtcgctttccccctcttcctctgtttccccgcttgcgtcctactcactcggcgtatcgtgcgtctcggctcaggttatgttcctctggggtcttagggtcgtggagtgatgtcccctggggttctcatccctcgggcacatctcgctggccatcgccggcgtccatttcttctgtcttgtgcatcgctaaggagatacgtcatcagtagcccagggccttctgtcagctcgtttgtagccttctgcggctggccttgtgggcgggatctggggatgctgggtctctaccatccctcccattagtagctttatccagtccccgtttttgctgcttctcagggcctctgctcttcaaggcccccatggggctgtccatccatgtgctctgcctacggaaggggcttaatgcatgcgcctgcccctccctccagctgtttttaatgcaactgactagaatagactctgatcccggcaggactgtgatagccagagcctgagcctgcccagcctagcacccaagatctcaggagctttagggagaagacttggtggtgggctggagcacaccgtgggcactcagtggtgttctgtgctcctctgtggtgccacagtgcttctgggcagtgcaggcgggctgccaggcccagccctgacttccacatctggcgtcagcaacactggttatttatgtggggccgtgcaggcatgggcaccactgcactgtccatcctgtttctcttatttattgaaactcaccaggcacctatacct

SEQ ID NO: 567663 - DNA, 181 bp, Homo sapiens
aggactcatatatgctgtctcactatgttgcccaggctggtctccaactcctgggcttaagcaatcctcccacagtggtctcccaaagtgctgggattacagacgcgagccaccatgcccagcctttattattattattattattttgaaacaaggcctcgctctgtcttccaggctggaa

SEQ ID NO: 567664 - DNA, 442 bp, Homo sapiens
ctaaaaacaccgcaactccaaacttttttttcaagataggttattctatctccatatgcaataaggatcatgtatccaatttctgcaaagaagtcagctggaatattgatagggataatgttgaatctgtagatcaatttgggactaagtgtcatattaacaaatattacatcttctgattcattaccatgggatatctttctgtatatgtaggtcttttaaaacttctctacaggaatgtataatcactgtcagaggataagttttgcacttattaaaaacacgtaagctaagttagccattccccaaaattatatgagcatggtaactcccgaaatactgtggcataacaagattaatttcccttaatggcacagcatatactgggccccgacatactttagaatcaagtctagaattcacgagaatacaggctgcagca

SEQ ID NO: 567665 - DNA, 740 bp, Homo sapiens
gagttcatggcagtagcttgtaagagttcttctatatataagatcatgttgtctgcaagcgggaacagcttaacttcctccttcccgattggatgcccttatatttctgtgtctgtcgctaatagcttggctcaggctgaggacttccagtactagtgttcagtaggagtggtgatagtaggcatccttgagtgttccagcatcttagaggaaaagctttaagagatgtcccccatgtgcatctaattaaactgaaagagcttctgcacagctagaagaaacgtaccatcagagtgaacaggcaacctacagaatgggagaacaattttgcaatctgaccgatctgacaaagggctaattatccaggaatctacaaagaacttaaacaaatttacaaggacaaacacatttcatacagcccatggacatactctgccatcactcacagtttgctcgcgaggcctcagtcgcacccgggaagaaggggcggcccgaaggaacgaaggtatggatgcgcccggggccccccagtggcatcagtgacccctccggtcaaaccggttggccggtcccagaggaacgatcgtggcacaggcaaacaacgccgcgagacacacacccggggatgcaaagcgcccccggcgcaccacgccacggtgtcttcaaagacctcgaggcgggactcaccgccacccgcgggcaccttaccagagcagcgcccagcacactgcggacatccg

SEQ ID NO: 567666 - DNA, 888 bp, Homo sapiens
  misc_feature (3)..(3): n is a, c, g, or t
  misc_feature (5)..(5): n is a, c, g, or t
cantnccacataaggagaaagcatggcgcaggaggcagcgagacaaaagggaacgcgacacaagacagagtcgagccttcctccggaaacaccccctaaagcaggccctcttgagcccccatttctcggcccccagggcaccctggaaatcacggcaactgtcgaaattcgggaacgcaaatgggggggccaaaacctaaagggggctccaatacagccgaatgctggcccccgaccaagaaggccaattcctgggcaaaaacgattagtggccaggtctgcgcagaaccaccaagaaaggtgctcccgtcgtcatgaacaagcccgttatgtttacgtggcttttccgcgcaaagtgtttgcgccccgtgatgacgcgatcgagtctcttaaccccgtttgcctggtaacctaaggctcaggaaataacatggcagagggttcaactacgagaaaaaatatgaccccgtcttgccaaatcggaacacacagggaggcttgcgtctaaatatagggaaacaacttgtgcgtggagagcgcctcttttaaaatagcgttttttttatggagacgactccagcaaaggtctgttgaaacaggagcgatcacaatctgcgtcgagaatggcgcgccctcgccaatatgcgttctataagattccgctctcggcagaacgggggtcatgatcccgagtccctggtcgaacactaatagttcctatcaccatgttccggcaccacgagaacacatttctttctatgagtatccttgcgatctgcaaatcagtcaagaccgcccataaaaatgcctcgctagggcgcaccagttgctcccgcaagccaccccaaaggaaaaatttgttcccacaaaaaaatccaattttcaaat

SEQ ID NO: 567667 - DNA, 112 bp, Homo sapiens
gtgtgacagatgctactgagaccaccatcaccattagctggagaacgcaagactgagacgatcactggcttccaagttgatgccggtccagccaatggccagactccaatcc

SEQ ID NO: 567668 - DNA, 114 bp, Homo sapiens
  misc_feature (3)..(3): n is a, c, g, or t
agnagaccatcctcctgaaccacaccttcaacgagacgcagattgattgtttctcgcgctggcagtgccctcaacagaatgaaggagctgcaacagtgagggcagtgcctcccc

SEQ ID NO: 567669 - DNA, 177 bp, Homo sapiens
  misc_feature (29)..(29): n is a, c, g, or t
  misc_feature (31)..(31): n is a, c, g, or t
tgtcaacaaaactagttcctggtgcttgnanagccagtgctgcaggtgtgagcggaagatcccaactgaaggtaatgagagactgcagctctaaagccctttcttaaggagatcgggttggaaagctaactcagctgtatttattgtttaaatagaaataaacccagtgttgcttgc

SEQ ID NO: 567670 - DNA, 316 bp, Homo sapiens
cccttgaggtcagccggggcttgcgttggatgaaagcgggtgactgatctagccgctgaatcttctccgagatcgaactcctgcatggtctctctgccctcctccacctggtacttggcagttggagagaatcagtggagtcaggtcccgctccacttcataactgatgacatgcagttcagtgacctcgggggcatccacggaatagctgttgttttccttggagagtttttccacggcgtagaacaatttcatggtgtaggcgaatcaagtagctgacgagaacggtagcaacagatggcccaggcacccggtc

SEQ ID NO: 567671 - DNA, 526 bp, Homo sapiens
tggatcattcctttggtgccattctcacaatagtaagtttcatgagagctggttatctacaagtgcgtagcatttcccccctgcccttgcacttaccatgtgatgtgcaagcaccggatttatttttcaccttgattgtcagttgtcagaggcttcaccagaagcagaagccagtgctatgctttctgtacagcctgtagaaccataagccaatgaaacctatttcctttataaattaactagtcaccgattatttttacagcaatgtgagaatggcctaatatatccatcaaaaaactattagaagtaataacttgagtaaatttgcataagacaaaatcaacatgtacaaatcagtaggatttctatatgccaacagtcaacaaactggaaaagaattcaaaaaagtaatcctatttgcaatagccacgaataaaacaaaatgtgtgggaatttaccaaagaaataaaagttctcaacaattaaaaatgtaaaacactgataaaagaaagagaagacaaaaaag

SEQ ID NO: 567672 - DNA, 169 bp, Homo sapiens
aattccctacagtcgatctactgagtcaaagtacggctagccctctggccctggttcatgcctttgaattcaactaactgtggatcaaaaatatttggaaaaaaaattccagtaagttccttgtgccccagcaactatttatatagcatttacattgtattaggtcttg

SEQ ID NO: 567673 - DNA, 355 bp, Homo sapiens
actacatacttccggggggccggggctgccgtgggagagttcggttgctgcggcggggccggcacgttgacggtgggaaactcggataacaagctcacatcttcctgtgggaaaccttctagcaagaggaggagtctgcaggggactgcagtcgccaccttcctctatgcgggggtctttgtcgtgttgcttctctgcattcccttcatatctcctaagagatggcagaagatgttcaagtcccggctggtggagtagtgagtgtcctatggcgagatcttctttgtggttctcatggtcatcgctgtgcagttggtcatcgatgccgtgcgcgaaatacggaagtatgtagtcg

SEQ ID NO: 567674 - DNA, 145 bp, Homo sapiens
ggggggggggggggggaaaaggcccaatttgggggggggggggtttcccccccccccccggggggggggggggggggggaattcttttttccccctttggggggcgcggggtttggggaattaaaaaaaaccgggggccccttta

SEQ ID NO: 567675 - DNA, 884 bp, Homo sapiens
  misc_feature (44)..(44): n is a, c, g, or t
  misc_feature (73)..(73): n is a, c, g, or t
  misc_feature (77)..(77): n is a, c, g, or t
  misc_feature (130)..(130): n is a, c, g, or t
  misc_feature (250)..(250): n is a, c, g, or t
  misc_feature (262)..(262): n is a, c, g, or t
  misc_feature (266)..(266): n is a, c, g, or t
  misc_feature (281)..(282): n is a, c, g, or t
  misc_feature (284)..(284): n is a, c, g, or t
  misc_feature (318)..(318): n is a, c, g, or t
  misc_feature (479)..(479): n is a, c, g, or t
  misc_feature (603)..(605): n is a, c, g, or t
  misc_feature (620)..(620): n is a, c, g, or t
  misc_feature (640)..(640): n is a, c, g, or t
  misc_feature (642)..(642): n is a, c, g, or t
  misc_feature (644)..(645): n is a, c, g, or t
  misc_feature (671)..(671): n is a, c, g, or t
  misc_feature (673)..(673): n is a, c, g, or t
  misc_feature (690)..(690): n is a, c, g, or t
  misc_feature (702)..(702): n is a, c, g, or t
  misc_feature (759)..(759): n is a, c, g, or t
  misc_feature (781)..(781): n is a, c, g, or t
  misc_feature (794)..(794): n is a, c, g, or t
  misc_feature (823)..(823): n is a, c, g, or t
  misc_feature (841)..(841): n is a, c, g, or t
aaacttccacattcaaaagaaagactaaaccatgcacaaatganccctttctgtttcctttaacatacaaganagtnatttcatgaaatttattataactgttatttctggccaggcgcagtggctcacncctgtaatcccagcactttgggaggccaaggcacacagatcacgagatcaggagttccaagaccagcctggccaacatagtgaaaccccatctctactaaaaatacaaaaaaaaaaattngccaggcgtgcnggcnggcttgctggcaggnncntgcaatcccagctactcgggaggctgcggcaggngaatcacttgaacctgggaggtggaagttgcagtgagcagagatcgcgccattgcactccagcctaggtgacagagcaagactctgtcccaaaaaaaaaaaaaaactgttatttctgtccaattccaagcaaccaaagtacttcatgtcattaaatatgtntgtgtaacacacatacacatacatatatacatatagatattcaccaaaccattattcaactatctggccacttcattctactcaaaatgcagatccttagcaaaatttttgacagaaaaaaatnnnttctggggtggtggngttggcttgttgggtgttantngnngttttccacagttaaggggacatctnanttcttaattaaatcccntctactcttacntttccccaaattcaaactataatatcatttttcaatataatatcaatttaaaatcancaaataaattttcaatcaaaantcaaattttcacntacaaaaacaataaaaaataatacaaacntacctacaacaaataatntttaattaacaaaatcacacatttttacccataaacataattc

SEQ ID NO: 567676 - DNA, 234 bp, Homo sapiens
gtacgctctaacccaacatattggaacgaatcccagaacttaaagattggttctctaaaataagacagacaaaaataaaaaagaataaaacggaaggaagaaaacctccaataagtatggggttatatatagaggccaattctacaaatcactggcatccctgaaaggagggtggagatatcaatgcattgggttagagcatgctcatttagctctgtcaaatttgttataccc

SEQ ID NO: 567677 - DNA, 147 bp, Homo sapiens
aaaacgcttaagctaagcacaaccccacgggaaacagcagtgattaacctttaacaattaacgaaagtttaactaagctataataaacccagggttggtccatttcgtggcaggcaacggggtcacacgattaacccaagttcatag

SEQ ID NO: 567678 - DNA, 350 bp, Homo sapiens
  misc_feature (165)..(165): n is a, c, g, or t
  misc_feature (248)..(248): n is a, c, g, or t
ttaatggtattcaatgtaacatttttagaaagttatcttagcccagtgcaataggaatattttttggttacatacataaggggattaagactcaggctataaggcctgggtatggtggctcatgcctataatcccagcactttgggaggctgagacaagagaatngcttgagcccaggagtttgagaccagcctgggcaacatagtgagaccccgtctctaacaaaactaaaattagctggtcatgtnggtgcacatctgtagttccagttactcaggaggctgaggtgggaggatttcttgagtccaggagatcaaggctgtagtgagctgtgattgccccaggcaaca

SEQ ID NO: 567679 - DNA, 607 bp, Homo sapiens
gagcggggaggccgcgctcttgagatggccgtcgggctcctgctccccgctggcgccccggctgagtggcccgccagccgggcacctggctgccaccgctgcgttcctggcactagcacgggacacggtcagggagcggcgggccgcggccttgcgcgcgccgtctctcggggctgggcaccgtggccccttccgggggactgggccccggcgcccgcgtcggcctgtgctgtgcccggcccctcccctgctcggggcggggcgctgcggccggtgtccccgcccgtcaggtccggcccggctcggctgtgccgcaggaacagggccctgggcggccggcacatgagagctttacgcccggaggcggtcgggcgctgccagcttggacccgcgaccggggaacgggggctgaaaagggcggcgggaacccattgttcttccctcaagcccgggccagaagccaggcattcaagggtcctagcgtccgtggcagccggcgccagacgtgacgaatcacggatcagcctccggaaccgggcgataagaagatggaggccaggccttgacggccggagacaagggcgaaaatgaggcgccggggggacgg

SEQ ID NO: 567680 - DNA, 172 bp, Homo sapiens
gcgcacctatgcaggccggtgtagcctggctgctctagacactcctctggctcgatgacaccctctcttcggactgcctgcgttaggaagggagaacctgccagttctctcagaagaaaatgtagctctattataagataggcaagacagtcaagtagttacgggaggtagg

SEQ ID NO: 567681 - DNA, 527 bp, Homo sapiens
  misc_feature (38)..(38): n is a, c, g, or t
  misc_feature (520)..(520): n is a, c, g, or t
tgaaagaagttagtgactagtgaagttcacagagctanagagttgtaggactgaacaagaatctaagacgagattcctagcagaggtcttttatgagagcacattgcctctcagaataatggagctggagaagtgcacagggttgccgcctctgtatcctgccctctccatagaccagacacaccccagagcatatctgggcggttaggctttgaagtgagtcttgtgagtcctctctgctgataatagctgtctacttggaccttaataagccagttcataagatgtactgcaggccacttcatcgtttcctaagccatatctgtagtatcatgtgcttttccattcagacctgtttgtctccagatatctttaaccactgcattagaacaaactttggagcgtgtatccataatatatgtatttgttaataaattatattcatgcactaatatgtatttatattatgtattttatgaagcatagaaaaagttgaaataaaaaggcatttgataaaaanaaatata

SEQ ID NO: 567682 - DNA, 367 bp, Homo sapiens
  misc_feature (13)..(13): n is a, c, g, or t
gcaggaggggaanagcatctctcccaacccccattcccctccacacctttcaaacagccattctgtcactgcctctgtggggaacccgacagccggtgcctgcctcggtcactggtccgggtgggcatcataagactttgctaacccccttgtcttgggctggacgctccaagggctgaacttggttctgccctagtcagtcgggaatgttccttgaatggctaccaccaggagttccttcagggactatttatctcttggacctaaccccactgcaatccaagacttttgttagccgccaccctcactcagaggggatgaagcaagggctgagaccacttaagccctaggtgcctggaggccagcc

SEQ ID NO: 567683 - DNA, 461 bp, Homo sapiens
  misc_feature (16)..(16): n is a, c, g, or t
  misc_feature (58)..(58): n is a, c, g, or t
  misc_feature (75)..(75): n is a, c, g, or t
  misc_feature (81)..(81): n is a, c, g, or t
  misc_feature (259)..(259): n is a, c, g, or t
  misc_feature (294)..(294): n is a, c, g, or t
  misc_feature (371)..(371): n is a, c, g, or t
  misc_feature (379)..(379): n is a, c, g, or t
  misc_feature (413)..(414): n is a, c, g, or t
  misc_feature (443)..(443): n is a, c, g, or t
ccccttttcctcatgncattaacgagaaagagatgaaaataaagatgacagctccagngacaagctacgtggagnctggtncaggtccttttagtgagtctaccattaccatttccctgtatattccctctgaacagcaatttgatccacccaggcctttagagtcagatgtcttcattgaagatagagccgaaatgactgtgtttgtacggtctttcgatggattttctagtgcccaaaagaatcaagaacaactttngacattagcaagcattttaggggaaagatggaaangttttcgaatgagaagggtttactacaactgcaggctacaacagccctgtcaaattgctttaattagaaatactgangtggtggnagggattccaaaaaaattgaaccccacccaaagnnaaacgaattgagaaaaatgaaaggaagtnctgcttgtccagaggcaa

SEQ ID NO: 567684 - DNA, 1739 bp, Homo sapiens
  misc_feature (1056)..(1056): n is a, c, g, or t
ccttccgtggtgaaggctgctttttgagtgtggtgagaaggcctttcgttcttgtcgcctctcgtggggggcaccacatacactttggtggggcgctcactttctgacatacagtggtcgtcacaatgctgatgattgtggtgttcgtcctctatgttagacatacggggagaaattcagtgttgagctgattttgctgctggggggctacattactgtgattttagcccttgtggtggggatctacgacgtctgcctaattatgatttggggtagcgtctccatccttcctacatctggggcgaaaacttagctagcagtcctttggggtgcactgtttcttctacgtctggtggcgctcttctcaatacggcgtgtatgaattctatattgtctccgtccgtggtggtgagccacaactgtgcatcattagggggtcctcccactacatgtgttaatagtgacgcgtgcctacgagcggggcctataaatattggcctgcccccgccttggtgttgatattgtcggtggaaagtattgtgtgcgatgcatcatcgcagcgcgaggggctgcattgcaagagactaatgttgtgggtactagactttggccaagcaagcaggcttattgtgtccccttgggaaggagcctccttctaataagtgtgcgagaataataataggtacgtcgtttgggaagtgttgtcgccccgccggctttgttatctgtggcggcttatgaataaacataagtcccgtgggggaaaaaaagaatattggggtcccccgcgtgtcataggaattgtgttttctgtctgggaataaaaggttatctttcgtgtggctgcaggatatcaatggtgccgatctggtggcaccacatatgttggggggtgtaggaacgatgaatatatgggggtgttctcctgtgggggcaacataagcggcccaacagtggggtgggttggtgttctggagtagagagcggttgttgtgtgctactaggagctttattgatcgtccagcccgcggctgttgtgtggagtttcttcagcgnctttgttaggcgcgtggtgtttttctcggcgtcgacgatactatcgtagaggatgctgatagaagacctacctagtgttgttcgcctcggcgttgtggtggtggtgtgtgtcatctcgtctagatagaggacaactagtgtgtggaaccacagcagatgaaaagtggtccttgtggtacttcttgggagtagtctttggggggcacatggtggtgtcacgcacacaagttgtcttgtgtcacgcctacagagaaaagagtcgtttctacagaagagaggtcttatatactgtgagatagatgtgaagtgtctccctgagatgagacctcgcgacactccgccacacttcttatataacacagtgtggtggggataagaacacggtgtcttcacagagagctcgttgttgtgtgtgtcacacttggcgcccacttgtaaagtgtgttaagttaagtataaaagagactggtgtaaatgatagacacaatgcactcgtgaaaaccttcacgaaaggaaaaggaggaaatgtttctgtgggagccacctcttggtctttcttttttgcgctggtggcacgctctgtaacgttaattagttttctaaaatcagtactttttaatggaaacaacttggcccttaatttgtcacagaattttgagacccctttaaaaagttaaaagaga

SEQ ID NO: 567685 - DNA, 148 bp, Homo sapiens
  misc_feature (103)..(103): n is a, c, g, or t
cggctgaccgtgattatttctagcttcttagaaacggaatatcttgtggtgctgctgataaaactccttgacctgacgactgtctaagtcctaactgcatatntatattcccatagtaagagtgttgggagatagtgtttgagctttt

SEQ ID NO: 567686 - DNA, 176 bp, Homo sapiens
ttttgggggggggggggggggggttttgggggccttcccccccccccccccccccccttttggggggggcccggggggcccttttttttgggggccccccccccccccccccccgtttttccccggggggggggccccccttttttttttttttttttttttaaaaaaggggggga

SEQ ID NO: 567687 - DNA, 697 bp, Homo sapiens
  misc_feature (39)..(39): n is a, c, g, or t
agcggaggtctgcctggaatagcctggctactacccctncacctgttcccctgcatgtccccaggcgctctctggcctgaatctgcctctctctgccatcttgtctcctgtccctccgaggagtctcgtctgccgtcaagcgactctctctgcccgttcatctctctgagctggtgtgtctggtcctgaccctcgtgtttggggagctgtctgggtctgttccccacctcttggccagcctgtgtctcctgtctatgactgagccgcaattgcctgttgcctattctgcaggtgtttgccgacgagccgtatccgcgtacccgacctgtgggtcttctgagtctgtctgtgtgtccctttctccctgtctctgactgtcttccataggctcccctagcatcccctcctcccggccatctgtctttgctgtcccgttctgtggtctgtctgttccgtgtgctggtgctcatgcctgctttctttgtaacttcagttctcctactgctctctctgtgctcctctctgcgaccgtttttctgccatgccatcccatacctgctgtccgtctgctctgctgagtccatcccctcagtctgctgtcagtcgtctcatagctgtgggtctacaccctcaatctttcaggccatttgccccaacatcaacgcagaaaccaaaccgctgtctccctccaagaggc

SEQ ID NO: 567688 - DNA, 226 bp, Homo sapiens
tatggggttaggaagggggctttggtatgtctaatatttaaccaagtcactagagatgatgacccaggctagaaagtcctgattggggggcagatggccaaatgagtatatcccctctccgtggaatctccagggcacctccttgaatctccggagcatgggaaatataccatccggccctcaggattgtgtatgggagccccttgaggggaagataccgttattt

SEQ ID NO: 567689 - DNA, 213 bp, Homo sapiens
ctgggtctgtgttaatcatgttattaaatgctaatagagcaaaatctagcagcccactggaatacattctattaaactctcatctgcgtgggacactgggtgatatttgacagtgactgttccaccttgcgggtttgttcggtttctttattaaagtgtacacgtattaaaaaataaaacatagctttagttaaaacactaagctgaattagt

SEQ ID NO: 567690 - DNA, 599 bp, Homo sapiens
atcaagtatctttatcaattattggaaaatcaatagaagtgggttagcaaatggaaataaatgaatggcaactaggtatctggttaaacaggtatgtttgcttcatatcagttgaggcacttaagtatagtacatgatataatcatattaataaacaataattagactggaatattataaattatttgcacttgtaagcattccccaaatttgcaaatttttatacacatgcagtgctctgatagcaaactcagtagcatgaaggaaagagatagagactgtattttctatgtatttacatttctaatgcctcttggctgaaattatcttgtgacttcctatgaggaaggccctgcaaatgacatccctaattttttttgagacccttttctccttgaattctgtgacgctactctctgctagttttccccctgcctctcttccttcactttctgccttttgaacattactgttcttctgagggctgttctcatcccaatttttatctgttctgttctttttggttccacagctttcattgtgatttaagtgtcacccacccgagtccagacccttctcccaagccctaaatcatgagt

SEQ ID NO: 567691 - DNA, 454 bp, Homo sapiens
  misc_feature (1)..(1): n is a, c, g, or t
  misc_feature (117)..(117): n is a, c, g, or t
ntccggaactcctgtcagtcagatgttgggccttttggatagattcctgtgagtccttcttttctaccttttgcttgtagataagattttccttgaatccaaacacacacactctcnctgctttttaaaaaattagttttggggctggatgtagtggcttacacctgtagtcccaggcactttgggaggccgaggcaggcagatcacttgaggtcaggagttccagaccagcctggccaacatggtgaaaccccgtctctactaaaaatacaaaaagtagctgaatgtggtggtgtgcacctgtggtcccggctgctcaggaggctgaggcaggagactggcttgaacccgggtggcggaggttgcagtgagccgagatcacaccactgtactccagcctggtgacagagccagactgttttaaaataaataaaaataaaaaattggttttgga

SEQ ID NO: 567692 - DNA, 166 bp, Homo sapiens
ccagaccttttacaagttaactctttcaagccttcatgggatataattctgacactactctcactttgtcaaagaataagaaagaggaataacttctgaactatctttacacaatcagtataatactgataggaaactgactagttcagcaaaggaaacgagtaga

SEQ ID NO: 567693 - DNA, 239 bp, Homo sapiens
  misc_feature (29)..(29): n is a, c, g, or t
  misc_feature (202)..(202): n is a, c, g, or t
  misc_feature (227)..(227): n is a, c, g, or t
tggcatttgtggaaactacctaaagaagntagaaccatgtttactgggggcaggagggtgcacatgctccagttgaatatctgtgtatacttaaaattgtaatcaagttgagagggcaaagcagagctattgcccctcgaccctaagtgacctctctttgaaggatagggccaaagaagacaaagcctttaccactgtttgntgccctcttttgcttataaaggggnaggcattatata

SEQ ID NO: 567694 - DNA, 1049 bp, Homo sapiens
tttttttttttaacttgaggagggtgacgggcggggtgtacgcgcttcagggcccggtttcaacttaagcacttcttacttcttcagttttacgtgcttaaactccacctttcgaccctttaagttttcataagggcatatcgatagttattcgtggggttagaaaagtgtagccacatttcttgccaccttcagtgggcctaacaccttggacctaagcggtcttatacggtgggtactgtggcgcttacttgtggtagcccttacatcagggattgtggctgaagaatgggcggtattttagggcgtgagccaagaagggtggctgaaggtgtgactcggggatttatcgaattacaggaacaggcctccttctagaaggggatttgaagccaccgccagggtccttgtgagcttttaagcctgggggcctcgataggtgctcctgggagaggcagtttgggtgggattataactggttgaggttatagggactaagcataggggggtatctaatcccagttgggggtcttagcatatgggtggtgttccggactttgttaaaagccactttcgtagtctattggggtggtcaatgggagttttttaacaactcagggtgagttttagcttaatgggggaggggggtgatcttaaaaactcttttacgccggcttctatggactgggggtaactcggtgttgacgcgggtgggtgtgcgaaatttggccaaaccggggggtaagtaaaggtaagtttaaactttggttatgggtaagggtaatcactggcggttccagagggggtgtggtaaggtataggtttgaacatgattgcgggtgctgaaagcttgtcccttgggacgggggggataacaggggtgaacaaatgggaacgggaaattgtgacttgttagggtaatcagagagttaagaaggaggaagtaatagatgagaagagggattaaatttctcggggccactttgtaatcccgttttgtaaagggtcatgaaggagttattaaagaaggggcttaaagtcgggaatcg

SEQ ID NO: 567695 - DNA, 330 bp, Homo sapiens
atggcacctgtacatttgtggcgctatgagcaacgtggagcccccgtggagctggcaagcgcgaagaaccagttcgagtagtggactacattgtgagctgtgatgaatcgtgcctgataatttgaattccctcccgaattctagtgatcatgacatggctctggtgtggatggatgaaggagtgcgtgccatggcacgtaacgctccatgcgagtaccagttgattgactgtgcccagtactacctggacaagatcgacgtgatcaagcaggctgactatgtgccgagcgatcaggtcctgcttcgctgccgtgtcctgacttctggaat

SEQ ID NO: 567696 - DNA, 241 bp, Homo sapiens
tgaggatcctcgtctgcgtcagactcccgagggggtgggactgcagcttccggccaccgcgcctggctaatgtttatatttttagtacagatgaggtttcaccagtgtggccaggctgatctcgaactcctgacctcaagcgatccacctgcctgggcctcccaaccctgagggttttggtttttgttttggttttgagacagagtcttgctctgtcgcccaggctggagggggccgcgcg

SEQ ID NO: 567697 - DNA, 1017 bp, Homo sapiens
ggtccaacattgcggtgcccatcggagggtgtaacggagtcagcgcgagcttgtggtgccgcgctgtctcctagtgggccgtggactctaagtgctcgtgcgcgtaggcggtgtccgatcccacggactggtggacgtatgtacgtgtcgtgcccggacggacgtcgtgcattccttctcccataacgtgggccctgagtgacaaaatatactgtgtatgttctacttacgactctcctcaaagtgtagggaccgaattgaggctaatggaagagtatgcatgtcgtgcgcgtgaccgatcggaagacccagcagaccatttcacacttgatgccaactcttgggaggccccaagccgtgaatgtcctcatctgtactcttcgaccacaagttcaaggcaagtcggtgcagagcgcctgagcattgcatgtacgccatgagctacctcgtaatgcctgatcttgaatgggcactgtgatgtccctcttaaaatttgagggaactattgaatgtcgacccacaacaggcatttggctcgacaggtgcccggggagcatcaaaggctaaaactgtccaacgcatggatgagttgtggtcacatggcgatctggcactgatctgtgaccagcatgccatgcttgtgggtggcaccttctgcatctccggtgaatgcctaaggggtctgttttccctgacagggccagcacatcactggttgtctaggcagggactcttgagtctgtctagctgggactgacgtttgccttgtgccggagaggcttgcatgtgtgtgaatgcctggggcagagaaccagagggtccctggcctcctgagtcccaaaaggttcagtcccacttctgcttaggctcttctggatcaggatcgcaaatccgcgccaagcggtggcactgggtctcctctgggaaaaactgtcccgacttcaaaaattaaaaccggaaggttccttgtccgggccctcaaaaggggagaaagtcttaaaaagagaaaaaggtttg

SEQ ID NO: 567698 - DNA, 629 bp, Homo sapiens
gaatttttataaccagtgatggccacagtaatgatcactcttaagatcgtacctattggcaaatctggcacctttttactagaaaggttctacgctataagtctcatgttaccatgggtcctagatgcagacatcaccttcaagctgagttctcagcttgatctcactcactatctcaaatcttcgtacagatcatgctcctccagttgtccagtagagtcaatgaatcatgccctagtggttgcaccgtatcgcttggctgtaggtcatagtaaggccagtgtcatggatgtctctgatctcatcctaacctccttaaattctcctctagaattccgtagtgaacaaggctacgtcagtgatcaaagtcttttatatcagcgcagagtaatcccaacacaagtgaaggatccaggtgtagcatgttcattcgctgtatggcctgcagtcaatgaaaagtctggtcattctcagttccattctagtcagtgtcaacataggtctggagtgtatgagggtccaaaaagttcagctagtctcctgaattgtagtacatatacttaactctcaaagaatcaccgatcctggcgccatgtacatagttcacagaaggcactctgggtctactt

SEQ ID NO: 567699 - DNA, 1918 bp, Homo sapiens
  misc_feature (931)..(931): n is a, c, g, or t
gccctgagggatgagatgcgagccttggcgaggcaaccccaaggccacccctcaccccagaacagaaccgtgtctctgataaaggttttggaagtgaataagagttttagaatactaataaaacaagaacaaaaaataatagagaaaaaataagaaataaacaaaaaagaaaagagaagataataagaaaaaaaaaagataaacataggacaaaataataacacacacaaaataaaaacaaaaaagatcaaatagaaaaaataatacacgaagaagaaagaacgcgaggcgggggcgcgactccaaccatacactccccactccgcgcagcggccacaccgaagcaaccagccacaccacccgcatgctagtgcaataagtagagacgcggcccactcgctcaatagagctcaacagagtccggctaaatccctagaaccagctaggcatccgatgccgtcggcaattccatgatacatcacgaaagagaccccaacaacactgggctctgtgtacacccaaaagactactttcgtcacccgtggagtgaccaagattacaaagtcgtctgtgtgacataggcaaaatggacaacaccatggccatcaagagcatatcgctgggcgaagtccaaactataatatacccccgatgatgcgagccattataccatacaaacatatatggtttggcattaggaatacagatatcgaggaatctcatctggcatccttttcgaccacaattatccagcaaaactttacaggaataagacagcaattactggtcaaacgcaagtgcgacccaagattacacacttaggaaactacctataaagatctgaacattatcagcgcggttgaggagcttagtatactccaaataagtcaacgacgcgaatagtagcagctatacacgccgaaggtacagngtaatcaatactacttggagttttcctacgtcaccgagcactaataatagaacacaagtaagtttaaaacaacgcacccacaaaagcatatataggtcgtcacacaccgatcaaaacaagcaagagaaaacagcagcaggtctggccccataggacattcttgcaacaccaagaactgatgtcaaccaaaggacagacacggagagcttaagtctcacttcacaatacaatccaagcctgtagctagggaacgcgcggtgtaaacacaactaaaaacataacattccaacagatcccacggaccttataacaagaagacaaggggcatcccaacaaataaactcatggcacccgaacagcaacgaaataacactggaacagcaacacaatgcaaacaaagaagccaccacaaaccacagcctctaccagacaacaaccaacacacggcaacaagaagacaacccaaataccaaaatgagcaaacacacaacgagacacgcgaaacagcgacgacatactaaaacacacacaaagacagcaaggcagtaacccacacccaacacaaagacacacagcgcgcaagccacacaaacgagccgaaaaacaagccacacacaaacccaggagtggtcgaaaccacaaccagagacaaaccacaccgaaactaaacacagccggccccaccacgcacacaacacaagatgaaatccctaagcaacaccctactgctagacaaccatcggccatacgtgagacactatgacgcacaaagccttcatgcgatcaatgacgcactatcaaccaaacaagagatacaataatagcaaacaacaacaccgacagaaaaaaaacaacaaataaagcaacacaacgcaagcaaaacgaaagtaaagcaaacaaagaacagaacaagagcacacaatcacaacactaaccacgaaagcataccacaccatgcacgaaaccagcaaagaagaacagaacaaa

SEQ ID NO: 567700 - DNA, 356 bp, Homo sapiens
  misc_feature (157)..(157): n is a, c, g, or t
  misc_feature (355)..(355): n is a, c, g, or t
agaggtgtatatccccccttttctgccggcgcttatccccgcggacacacatcatatatgcccccgcgcgaaaatattctgcgtcccccactttccgcccgcgcggggtacacacacattgtgtgggagaatatatagggcgcgcgcccccccgggnatttgtgggtgtatgagaggagagtttgtgtgggagacgcacccctctcttggcgacacagagtggggcgcacaccctgtgccccctctccacacggtgtgtgttacacacacagaatctcccccacctctggaaagagtccctctggcgcgccacaaataaacaccacaaaggtcgcacgctttctccacaaaaaana

SEQ ID NO: 567701 - DNA, 298 bp, Homo sapiens
gctatactagaggatccccccttgaccgtgctgacttaaagtagattatattggtgagatattaagaggaggggcagcacatttggaagccctcatgagtgcagggcccgccacattgtccagagtggccacgactggggactgtacttgaccccacagccatctgggatgagcctgcttttcagccaccagtgtcttcaaatttcatcatgctttgaaccttggtgaatgccccaacttcttttgagcatgtggatcttcctggcggccatggaacacttgaccttggtgccctgcc

SEQ ID NO: 567702 - DNA, 420 bp, Homo sapiens
ttttgatctcatttgctttttctgcaagctcagcagcagaatgcccagagtcttccctggttagagtgccggttccatagactgacgttctcctgcatatgctcgctggtattctgcaatagcaggccatgtctctccttgagcctggatgctttggagccaagctttcgtcccatgcaagggaacccaccacttctgggatttccgctgcattctgctccggggtctgcagcaacctcgtcagctcttgcctggagtggctcagcctgggcctgcagggccacctggagaattgcagcgcgtgtatggcgagcgtcctcatgggctcgggtcacagatcctctagcttggccgggtgaccagagagggcagactgcaatcctctgtcccaggtcttctattgcaaggagcagcccatgt

SEQ ID NO: 567703 - DNA, 129 bp, Homo sapiens
caggatccccagtagagagacgagatgtcaccacctgcttgcggaccctgcatattgcgctggctgatcagtcacgctgagcgtggatgaatggatcttggcccagccctccgcttggagacctgggtc

SEQ ID NO: 567704 - DNA, 307 bp, Homo sapiens
tgctaataggagggtcccaggtggggagagcccaagtgagaacaataatgaacaatgtatgtatgaacaattgttagagacagctaatcacaaacaacctgcgggcacaatgacctcattccacacgtagcacccttcagcaggaccctataaaactttcctccagcccttgcctctttgcaggtagccccttctctgctgagctgcccactgcaacatattttcacaatttctctaataaatctgcccttctttacctacaactatcttggtaaatggctttaccacctgcaaaactgaccctagg

SEQ ID NO: 567705 - DNA, 1137 bp, Homo sapiens
ggacgcgtgggtcgacccacgcgtacgcgccggggcgctcgcgtctgcgtggagaccggtctggccgcgcgcgggaagccgcggcaactgcgccggaaagtcccccggactcttggggccccggtgacccagagtaagccgtccaagaaggaggaggaggagagaaaggcggctcttcccagtgccccgtaccagcaggcattcggtggagcccaccattgtgaactccgcgggcaggccccatcaagtggaactggcgtcccaacagcgggggggcgtccccagactcgtgggggccgagagaccagacgctgaccgctggggacgtcgcacgcgacaggcgccgtgggttccccaagggcagaggagaatacgcctggctgtgaatgctccttcctttccagtagaacccgagagactggacagtctgtgggattctcaagaagcctatggtggatcaggccttgcaacagagcatgcttgcaggcagttggtgcaaatggatctacgtacgacgcaaccatggcataccgcaggacggccgtatatggctgttgcccgacctggttacattgggcaacaggccagccctggctcttggcatatgtgggaacatgccttggattttcaaggggtaagacaaggaagatccgcgttggcagttggagattgttttggacaatggttgggacattcacagacgagtttccaaatatcacgaggatggttagaacttggccgacggcacaggtaccatggcatggagagcccacagaaccaaagccaagaagcaacgtgtgcacttggtaggtccatccttgtgcgaatccagtgcacagtacgaccggggccactcaccacacggcgaccgttcacaccagcaaatgtcactccttggaaccgccgcatggcgcttcaacaccagggaacacaaccgggttggaaacgaatcgacacgcgtggaccggggatcccggttaccagggacctgggtgccaccctaaaggggggggtgcaacacaccgtcgagacgggcacactgtagcacccctgagcccgcagcagacaccgagcacaaccagcagaaccacagggcctccaagagacacaccacggcacacacgaagggcagcgcga

SEQ ID NO: 567706 - DNA, 971 bp, Homo sapiens
ggtaactccagtgactattgtccatgaaatgaccatgagagccctctgtatgcccttgaccgcaaggcagtggccaaagataatttcgagattctggtgagcatttatttatactggtgattccactgggacatcccaccagtccagaagttcctacatccccagagaaattctctggggccacaggttgcatgagtgtattggaagtgaagagaagtactacaaggtgaactgcgttgcaggtttgactggaagcgtggaagtctacgcccccttttgcagtgccaaacaactggactgggaaggaccaacaagtcaacaacttggagaaaacgtcccctgcccgaggatcctgcaatttctgacaggcaacaccaggaggcggtccttcagcgcagtttgctgtggtgacgcagctgtgagaacccagaggagaccgtccgtgtccccacaagatgaactgtaaggagatgccctatcagaaagccctcctgatcttgtaaataggatctccatggaatcccagatgtagccctcctctctgaccttatctaaggggccagaagctgtaagcatgatttttaacaaaatgttagtgctgtgattggggcaggaatagaaagcagagcaggttaagctttggtgaattattatctaaaaaaatccgcgattttacaatattaaaatttgggcttggcagtagagtgtattcgggaagtgattagaagctaattgatacagttatctaatatgctatacctggtttctctgaagtgaattttcggtgggggcataggcggtaatataagttgaaaacgatagtaattggtttactagtttttgtggaaaaaaaaaggggggctaataccggggcgagaaaggacgtttaaagccaaagagtaaaaaggggcaaaggaagagtgtgactggagaaacataatttgtggtttttcatactttctctctcttgt

SEQ ID NO: 567707 - DNA, 381 bp, Homo sapiens
ctacaataaacaggggatggattccaaacgtcaatcagctactgaccatatactctaagactatatatcctcattcgtcatgcctgctgagcatcctattcagtactccacagcctcagctaaaatgccctttccgcaaggacgccttctctgctacctgtctggactactcacagattgcaagtctcttcttctggtactgtgatgctggaactgtatatgtctggctctgtttctcccagactgaaggctcctaggggattccagcaacaccaattggatgggacgacaggttattaaacagtctcacggatactgcactgagcattcaatgcctcacaaggacagcggtccaagtaagtcagattcaagccgggctct

SEQ ID NO: 567708 - DNA, 112 bp, Homo sapiens
gctcaggtgatcctccttagcagcatgggaacttctaaatcctctctacccacccctcccactttaaccggaattctcctttccattccagcggcctccaagagggggtacc

SEQ ID NO: 567709 - DNA, 402 bp, Homo sapiens
ctctcctgggtcatgattccatcactctcttccgtgatttggcggacctgttggtgctgagcactcgaggtcttccgtatcgtgattgttgcgctttgtttagtacaagctacacataacagacgaggctcgtaaccatcggtagtcttgtacctcctcgtgagtcttctatcattgtctgccattttttgaccgtggaacacattttgtctacggtgtaatatccatgccatgtaagttagtcaggctgttttaaccctgaagatcttcagtaatcagcttgaattttctaaatgcaacttctatcattctgcaaatcagcaagtactcacttcaaacacacgagccttgagaccatcagatgcaattttggttccttgggtcctggtgacgagcgtcttt

SEQ ID NO: 567710 - DNA, 134 bp, Homo sapiens
cccgaatctcgacgagtggtgcatcatgatataactgccgcatcaaatgaagagttggatagtaggtcttttttcatttctttcactaatggagccttaatcttcttttaattataggaggctggacactgtga

SEQ ID NO: 567711 - DNA, 244 bp, Homo sapiens
ctgatctttctggctgtcactggagaacatcctttgtgcagtgcgctgctctgtgcttgacagttcccaatctacgtctctgtcccaacttcttaagcacaattggtcttcttccatctccaggtattcttgcattcttaaacaatgctgctcttccaacagggtgtgaatcagacctactcccctaaggtcaccactctgggcactgctacagatgccccaaccttcactgagtactctggat

SEQ ID NO: 567712 - DNA, 419 bp, Homo sapiens
  misc_feature (159)..(159): n is a, c, g, or t
  misc_feature (185)..(185): n is a, c, g, or t
  misc_feature (332)..(332): n is a, c, g, or t
  misc_feature (390)..(390): n is a, c, g, or t
  misc_feature (404)..(404): n is a, c, g, or t
tagagtcgatatcttgctctgtcacacagtctggagtgcagtggcatgattagctttgaattcctgttcaggtgatcctcccacctcagtctccagagtggctagggctacgggcagtgctgccacacctggataatttttaaattgtttatagagttngggtcttgctatgttgcccaggcttntctcggactcctggccttaagtgatcctcctgcctctgtcttctgagtcgctggattacaggtatgagccaccatgctcagcagaaaaattaaatttttttttaacaagtcattagttcctggggaattctatttcacttccaaatncacctcattttggcagtggccctgttcttagtagtccgggttttgggaagagttcgtntttttcacatgatncaaggttggccaaca

SEQ ID NO: 567713 - DNA, 218 bp, Homo sapiens
gagattgactctagagtatcccgtagccatttcttgcactcatgtgctacaccttgaactaacgtctttacgtgggtacttgcgcttactttgtagccttcatcagtgtttgcttgaaagatggccgggaataatagggctggagcaaagaaggtgggtgagcgtttgatccgggggtttatccgatttacagaaacaggctccctctaagaggggat

SEQ ID NO: 567714 - DNA, 380 bp, Homo sapiens
  misc_feature (102)..(102): n is a, c, g, or t
  misc_feature (245)..(245): n is a, c, g, or t
caagctatccggttcaatcatggactaaacgggctccaggagctacaggctgcagcagcagcttctcctctacgtccttcactgcctcaaactgttgttgantttgaaagcttctttcagtctagttttatcaacagagctagtatttcgtgaggttctactacataccaggttccagaaagctaaatgccttttgtttgttattattctctaaatacaaatcacaactcctcattactcacacnacaaaatttagctgcgggagattgagtgactttcccagggtcacatagctactaagagcagagtcgtgtttagattcatgtgggaatattaacacagagttgaaccgatagctgctaatcctcggagtcgacccc

SEQ ID NO: 567715 - DNA, 405 bp, Homo sapiens
tgcccctggaccgtgaggaacaagataacaagggtttctaaaacatgacggaggttgagatgaagcttcttcatggagtaaaaaattgtatttaaaaagaaaattgacgagaaaggactaacaagagcccccgaattaatacccaatacgcacgggcaactgctataagatcaacacatgcacgggtgacttaaaacagcttacagtcatagtccaacaacgtcgtcaggtgactttccaagatacctttggcaagcgccgatccttcttaacaacaggacgattacaacccgacacgggtgacttaacccaggaccctggaaaattcccatggacggcagggcaacatcggccgtcatttaaaggcctaagttaaaccgcttttcactaagacgcagacgaaac

SEQ ID NO: 567716 - DNA, 847 bp, Homo sapiens
  misc_feature (22)..(22): n is a, c, g, or t
  misc_feature (130)..(130): n is a, c, g, or t
  misc_feature (153)..(153): n is a, c, g, or t
  misc_feature (211)..(211): n is a, c, g, or t
  misc_feature (221)..(221): n is a, c, g, or t
  misc_feature (242)..(242): n is a, c, g, or t
  misc_feature (244)..(244): n is a, c, g, or t
  misc_feature (248)..(248): n is a, c, g, or t
  misc_feature (264)..(264): n is a, c, g, or t
  misc_feature (289)..(289): n is a, c, g, or t
  misc_feature (298)..(298): n is a, c, g, or t
  misc_feature (357)..(357): n is a, c, g, or t
  misc_feature (370)..(370): n is a, c, g, or t
  misc_feature (479)..(479): n is a, c, g, or t
  misc_feature (482)..(482): n is a, c, g, or t
  misc_feature (504)..(505): n is a, c, g, or t
  misc_feature (514)..(515): n is a, c, g, or t
  misc_feature (520)..(520): n is a, c, g, or t
  misc_feature (533)..(533): n is a, c, g, or t
  misc_feature (535)..(535): n is a, c, g, or t
  misc_feature (575)..(575): n is a, c, g, or t
  misc_feature (578)..(578): n is a, c, g, or t
  misc_feature (582)..(582): n is a, c, g, or t
  misc_feature (627)..(627): n is a, c, g, or t
  misc_feature (823)..(823): n is a, c, g, or t
tttaatatttaaagattgtggnagtatagtcaaaacacataaatattataatatacatttagaaattaaatataaagtcaacacaacactccttaaaaactcatatgtacacttccaataagtctcaggnttgaacattcaagctcatcaganttccccatgggaatgggtgaatcttgcagggagattgtccacaggatacacggtgggnctggttttcnttgtaggaggtccatttagangnggcnagtcacaatgcctggncagctccactgtaaatattttgggnggaattttngcgaattctttgcctacacagctcctaaggcctcctccaaatgggatggggctgagccngggtgcgtcctcngggtgaggcagcatgaatcggtcagggttaaattcttccttgttggtgaagatctctgccacatcatgggtatcacagatactgtagataacattccagcccttggggntcngggatccatttgattcagaagnnttcggagcnncccgnaaccctcctgggncnggggggttcagtcgaggggtctccttaataacacacccgnggnattngagttgttccaaaatttccatgtccaacttgttgtcttgattgcncttgcaaagtaaacccttactcttcagctcttctcgcgctttctggggagcgtgtgggtggagccccaggtaagtgatcagagatgtggctgcactggccgtggtttcgtgtcctccaaagaggagttcggttgaagattgctttagtgcctgcatgtccagccgctctcccctctcccacgagtgctcgatcaanagctgcagcgcgtctttgcagccc

SEQ ID NO: 567717 - DNA, 1270 bp, Homo sapiens
agtcgtttcggagagagagtattggttagccatcgttcggtggtgagtagccagctggtgatcgaaggtcagcgttgggtcaaccagtattgtcagtttcccgtggggaattattgcggtcccccttatatctgtgaattaataattggttttgttagagtaagtctatgaatgtatgagaattctgccctatgaggagaaccgggttagagcttgtttccagcactggcattttctggggtgaattgtttgtcttaatttgtaattgtggttttagtttgggggcgaacttttaatttgagcagtttcttgcccaaatccggggtgttagaagtatactttagaaggctccccaggtgtacaagagaggtttgtagatttgattttttcaaggcttatcttggaggggccatagggctttgggggagttttttcgttttttgaaaaaaggaatatgtctgaatatatgagccgcctgttgaacatagagttttttcagaccactgttgtgccgggtagccccttggcaagtcttgtttaatgttttcgccatacaggtgttaacccccgctgggtattgtaatatttgtatggtgaggggtattaaaaatgtatacccctccattttctttgtttttgaccacccactcataatctcacagggacacatggcccttgtgggtgccttaaaaatagtgagatttcgatatatatatgtctgttgggccccaaaggtaattatctttggttcccaccacaactctccacttttgttttttgatgggggtgcccactttaatttgatatatttataaataaatgtttttggtaataaacttgtgtgttaatattgtctttgtgaaaaccccagatatgcaataggtgtgcacacaaagatgtttatggatgggttcttggtgaatgttctaattctaataatagattgttaagatgatttgttaattgtgttgttccctccttggggggaaacaccactttaagtataatagtggttaagaaatataagcttccactgacactgttcataataaggttataataacttgttccataacatgaaacatggaaattgtggttggtgaggaaatttctgttaaagcccaacactagtttaatttaggagcttgcaatttaatttgtgtgccttgaatctatttttatgtggccccttaaaaaatatcccaaaaaaccccttgctaatatagccaatccccactactcttgggtactgaccaaaagaaaaaagaaa

SEQ ID NO: 567718 - DNA, 813 bp, Homo sapiens
ggaggcggaggttgcagtgagccgagatcgcaccattgcactccagtctgggcaacagagtgagattccgtctcaaaaaaaaaaggaaaggaaaaaaaatagcattatacctcttccttgtctcaaccggccatgaaattttctgaacactccaaattcagtggaataatccaaaacaaaatttataagtatacaaatactttttacttcttatagtaatagtatactttaaaaagcctcagggtatattatcttctaaacagctacaattcagtgcagctactttaaccaactatgtctctagttgagaacaattaggcctattttcactgctgtgtagcctcagtgcctaacattggggtgccaaattaaatatcgtagactttacacctggatttgtaaaacccattcgttttgtgtttacaattgtgccaaaattctcaaaaggctctgtatttatgtcaatccttggaaattatatttacttggattctcagtaatgactgctgggtgtgccttagtacataagtctcaatattataaaaacctcaaataatggactggattttacacaagatccttcccttttcctacaagttacatttcttcacacaatcattggcggtatctcctaaataaggtaatcatttaatggttccaagaaccatgtttcaaatatatgtgccttatccgaatacttggtttaaatatttccacaacaattttataatttcaaagaccacttcttgctgagaatttgcgggacaggacttcacacttgtgctttcacactccgtgcgcgtgcgcccggat

SEQ ID NO: 567719 - DNA, 434 bp, Homo sapiens
atcatcatcatacatctgaattttttgaccgataatgccctgttctttggctaccgtttgtgcactaaagtaaggtgtttgcacaaaatcaagcaaatgcgcaagggctggcaaaacgttttgcgtcgttgaaaacagataactcgtttgatacgggttcgtaaacgcgttggctccgaacctaattcaccaaatcgcgtaaaggcatccccatcagccttctcaaacagtttgtgttccagaaagtgggctgtccagctggaatggtaatcggtgattcatcattgatttggattggcgcgcaatgacccaatggagtcgttaatacagcaaacgttttatgatatttggctttggtacatgacacagtaagccgtgagtaactcggtcgttaaacagttccttttattttggatatgtctttctatcatgca

SEQ ID NO: 567720 - DNA, 891 bp, Homo sapiens
gaaaaattggacagaggggtaaggcctcattgtccgtggggcaaaaaatacttgctcttcagagatctgatctgaatgctgtgaacatggactagtgaactccatgagaacttcctttatataaggatggtgcggtgtgtactaaaggttgaagcaattgggtggaggaggagaatatagatagatgcatgatgatgtggagtgttaagtagatctcctatgagagataagtatctaggattgcgattcccagagaaggagagtggggcataataccgaagctggggtgggaacaccaggatagtggaagaataatcggagagtagacaagactgtcaaaagtgtggaagtggggcccttgtaagagctgtgttcgagaagaagatgttctaatatatatggaatgtgttgaagaggtcttgcagtctgcaggatgaaattaaatctctagaggaggcagatagtaatggctatgagctaattcatccaatgggcaaccggaaagtaataagagcttggaaaaaatgtgtgggttcaggcagagagctatatcggggggaagcgttactggaacgaccatgagaatctgtttaggaacaggtttggagtggagctgctgaatttaagtaggatatgggtaagaaagtgaaatttctttaactgaattgtgggttcgggtggatgttgtccaaggtaaaggtcccgtttctaatatgtttactgttcactggttttacaatggagcttcagaataaccgaggtctatagtaacatgcggagtagggaacaatttacaattgaaagtcttaacacatttgtgcaaaaacaagggcatatgggagttgggaaaaaattaaattggtggaaatttggcgccaagaattttaaaaa

SEQ ID NO: 567721 - DNA, 1054 bp, Homo sapiens
gagagatgtctcgcacgttatgacgtcggtattgatgttgggagtagaccaccgagctgctcatcgagatcagaagaaggagtgagcaggaagatgagacaaggacatatgactcttgatccttggtcgggagatccctgtactatttgtgcgctcccctcaatagttagcccagcgtttctcggagatcctggaatggtgtcgtgtcccagaagactggccatgttccttccggggatacgctgtgttgatagtctatggagcgttccttagatcttacgtggcacatcgataagtattggctgattcctgtggttcatggtgccctagttaatcaccaccgttcagtggatatactgataaccccaacatgggagtaggcgcccttgttcccttgcgttcacgtgagaggtgagaccgtggagcgtttcccgtaaatcctgagacgaacagcatttggaggaaccctgttcttatcttcgattctcggtggtgtggcccatggacttccactcagaggagcggtgacgtaatcgacagttcttgcgtagcgtggtgtctattcggaaccgtgtcttatcgcatggactgttagaagacagggtgcttactctctttccctgcgtcctccccaggagaggggtcgttccctacaggaggcgaggtgaacgagaactctgagggtgtcgtccatccaggaggccgggcatttgttgctgtgctcatccattcctgcccagtgtcatgtgtccattggtcctgtcttcgcagtagcagaaggtctttcagggcctgcttgggagcgtgggaggggtgggtgcacaggtcaagtgagcaaagagagctaggagtacaatgcgtggaagggtcttcgggtgggtgcgtggttgaaggcacagggtgcgttgccacttgatcctccaaggtcaccccgggctggggttgagagactccttggccttctgtgtgggctgtttcaatggtatcgagcttaccttttttttgtggaccccgtgccacggagagaaaagcggagaggggcacaaagactgca

SEQ ID NO: 567722 - DNA, 752 bp, Homo sapiens
ctcttctcctgttttccgggaagaacctggcctgtgggaacctggctcagcacttcaggaggaatcaacagccggggttcgcatcccagcaattgcttccatcggcctgtgaccttgggggagggactcccccgcctgacctgggtgtccccgtctgtagacttccgatcataattggacccaccatggagcccaggtgagggcacgccgccgtgcggacgcgtggttagagccctgccctggtggttggaactgccccactgtggggaggttgtctttctgcccctgtgaatggactgtgtgacccctcacatggcaccttccctctcccaggctccagtttctctgctggaacctggagtcattcctgggctactgccggaattaagtgtaggcgagttacccgtttacacaggacttggtccatagcatgagctgctttgtagaaatggttcatgaccccgcgtggtagctcacacctataatccccgaactttgggagaccccggccggaggatggcttgagcctgggagctgaagactagcccggaccacatagccagactccatctctaccaaaaaatttaaaatcagctgtgtgtggtggtgcactcctgtggtcccagctactcaggagcctgaggtgggaggatttgcttgaaccccggccgttgaggctcccgtgagccttgattacacccctgcacttcagcctgggtaaccgagccaggcctgtctccaaaaaaaaaaaa

SEQ ID NO: 567723 - DNA, 776 bp, Homo sapiens
  misc_feature (147)..(147): n is a, c, g, or t
cagcagacggcagtcagcctggagcatcctgcagcctggttgccctacttgcctagaacatagggatcgcgcttcaaggttcactggtctcgagatagcgcaggatattgagtggttatgtgggcgcagcctgttggatagagcatntcgcctaattgagtgaactctggtctaaaacgctggattactacgtacaccagtcgttctcgatgcgccagtacaatggcatggtcaatgatcatcatcgagtctgtacgcgtggtacacgacagtactagagttccggagcatccacagagagatgagttatcacacgtagataggacgcgtttcgatagggacgtgcaatgatgcagcgcaatatgctatgacgcaactacccattggcaaaatagtcgggcagaatcgatggcgagtacaataacgctaggggaacgtacacgagaaagtcacacataccccacagtcagaccagaagcgttcgctggaaaaacatgtctagaggcagactagggaacctataaagggcttcgccatggccagcgattcccagcgttgaagttggaaactttgcccaccgcaagcaccgcagttgagacgacatatagaggtcagagtgtggcgcacgcattcaaccgcttccattagaggaggaaaggaagacgccgaccacacaaagttaggcgtccaacgtggctaacacttatggcgtagagcgacaaacaacattgcgatgaagcctggcaattggagcgcgcccctacgaagagcgaaag

SEQ ID NO: 567724 - DNA, 276 bp, Homo sapiens
  misc_feature (96)..(96): n is a, c, g, or t
ctgtgtgctgtatccagcatcgaggctaggcagtagaattgcttaccaggaggcggggttgtgcatatcgagcattgcactccggctggcgacagntagagatccgtctcaaaaaaaaaaagaaaagaaaaaggttcctcttccaaacctcaattttcttatttttgcaatggtaggaatgtgggtttataataacctgtgtgtatgctcatcatacataacccctaagggcttaggactcgagacattttatgagctctccccagccatagcact

SEQ ID NO: 567725 - DNA, 89 bp, Homo sapiens
  misc_feature (4)..(4): n is a, c, g, or t
  misc_feature (48)..(48): n is a, c, g, or t
gcgnccgcctactactactactactactactgctcgaattcaagcttntaacgatgtacggggacatgttcaataaaaagctgaactct

SEQ ID NO: 567726 - DNA, 322 bp, Homo sapiens
ccagtttccggcttcttgaaggcacttcactatgcttagcatatttcgtctggaattcccagattcctcttttgatctgtaggacatattgactagtttgttatattaggatcattataaaagaacatccagtaatagaatctcatccagatattgcattagagtatctacgactagattagccatttcctgaactgagagaacattttcagtcctatgatctggatcatatggcataaaaggtaccacagtcttactccatggattgtgatcatcgctgaatctttagcacagtgttatagtgaaacaaattgactaatac

SEQ ID NO: 567727 - DNA, 103 bp, Homo sapiens
gtacgacaaaacgttacctggctatagaaggatggtctgtgccactccccttccaccctcagctccacccagttcgcgagttgtgtggccagagtgcaagttg

SEQ ID NO: 567728 - DNA, 109 bp, Homo sapiens
ttagtggctgccaggcatcttcagtgtgcagcacaaatcagtaagggacggttcatggatgatacatggccttccttaagaaataagaatccctgaagatttgttggtg

SEQ ID NO: 567729 - DNA, 237 bp, Homo sapiens
gagcttcaacagatttgtttgtccaaactgctcgccacaacacttcgatccaccgtcttattactcagtggagctggcgattctttatttctcgccataggagcctgctgtgtgatgttgtcctccacaaaaagctcaccacctcttgctcagcctatataccgccatcttcagcaaaccctgatgaaggctacaaagtaagcgcaagtacccacgtaaagacgttaggtctacctg

SEQ ID NO: 567730 - DNA, 388 bp, Homo sapiens
gaagtctgatctgctgcaggttaatagctgtgtgacctggtcgagttcctcaggctcacccagggtcgtgtcctcatttataaaaaagaatagtaagtaccttataaggttttttttttaaacagagtccggctatgtggcccaagcgggtcttaaactccgggcctcaagcaatccttcggcctgggccccccaaagggcggggatggtgggcatgagcggcggggcccagcctccaggttttaatatcaactctcactccggaattcagtggcttggcccaagataggagttctcggatgcagaaattatggggctcttttagggtaagaagttggtgtcttggtcgggccacatctggactaggtatggtctactctggaaggtg

SEQ ID NO: 567731 - DNA, 1295 bp, Homo sapiens
aaaggactaggtacgaggaccgcgtgttttgagcgcggggtgtgtggcgaccggatacgctgacctgttatccgcggggcagcttcatatataccacggaccagcgacgctgctcgtcactaacacgctgggctgctgcgcgcgctcatggcggacggtgatggcgtgcgccagtcctggcgagatcctgagcccgtgcccgagccacggttttacgacccacggagctccgcgacgcatgtttgcaggtgggcatgcagcattgaggtcccttcctgcactacatggtacttgtacgctggacctgcctattccctgcgtctggcctccgaggcttcccaaatgtcctcaagaaggtcctcgtggatcagctggtagcctctccattgctgggcgtctggtacttctatgggccttggctgcctggagcggtcacgacacgctgggctgcgacgctgccaggagctgcgggacgaagtctctgggaccttctacaagcgcagactggtgccgtagtggccatgccattagcagcgagttcgtcgacactctcactctctcgtagccccacccaaatccacagagtacaccatcacattccaacgagaactgcacgcctgcgcgcctgaggcaccacggtacacacctgatccataactatggaacgtcaccgcgcagccccacgtacactctgcaccaccaccaaagggactgctgatacagcccatggcaaccaccccgacgcagcacttgcaccttgtcatgcttccctggcgaaccccacgaatatcgcgccgaccatggacatacccttgcgccgcgacacaacgaacccccttcgtgaaccaacacaagggggacattgggacattcatgactcagccacagcctccgcgccacattggacgcccaacggtaccctacgatcaccacttccacgccttccctcagacccccacatttggccgccccacaaacaccagtacacattatcccactagtacctaccaactatcctgtgtaaaccattaaacctcttaccacttcgaaagacacgcgggaacacaaccgccccgcatgtgaaccgcactcggacctggccatcaacccccacccatagagccccatgtctccacacaagggggaaacccaatactactgcaacactggctacaacccaccgaccgtgtgccccattacttcacggcacaggcgagccgcccgctccggagagacaacgggacaaccacagacacaacgcaccataccgaaggagagacccgcacacgcggggc

SEQ ID NO: 567732 - DNA, 171 bp, Homo sapiens
ctacccttggtagactaacccaggtagcctactttaaaataaagacaagggtggagtgcagtgctgtgatctcttagctcgcctggctaatttctgtatttttagtagagatggggttttgccatgttggccaagccggtgttgaacccctggcctcaggtgatccaccca

SEQ ID NO: 567733 - DNA, 128 bp, Homo sapiens
tcgtacttatgatctgtcgtctgagagcaggttaacggcaacttcgaattgacgggtccgctcgaattgacgtgtccgcgataagttaacttgatatataattgatagctaggtccactgtgtgatta

SEQ ID NO: 567734 - DNA, 1134 bp, Homo sapiens
gctgctaacgcggtccccggcacgcaccatctgtatgccatcccggacggccgaggccattgcagattttggaagatggcaaatgttcatgacaccctgtgatccaggacaaaccctcaggctggtggtccctgtgctggttcccgagcagtttcgggctatgccctaccagaccgttcagcaaaggagatcggctaggaaaggttgcagactggacaggagccacataccaagatcagaggtacacaaatacgtactcctctcagtttggtggtggcagtccaatatgcttctttccatgaggaggatgaaagtagcttccagcatggtggatacagagacgcacacagaagacggcctaccagcggaatcgaatgagatatgaccacgaggacactacgaagagacaacaagatcagatcggaacatgatacgcagatacaacctgcacaatccatgcctaagagctgcaaccagacaacgagagagaacgcatacgcactgcaccacaacaagtccaaaaaaccaaaaaggaggtaaaggccagaacatggacatccgacactcccagcaaaccccgaagaatcaaacagacagaaagaacggacgtgattagggcaagtgaacagagagcaaaggcgaacaaccataaagaagaagcaacacggagagaaaatagaaaagaaaacagaagacacaacgacaacatgaaaagaagaagaagacacctaccagcaccacaacacaaagacacgaaccacctaccacacaaagaagaagcaaacagacaaagggacgaccacacaaagaagcacagcaaacaaacaagaaacacaccccacatgcagaaacccggtcaacacggagcaagaagggacaagaaaaaccctcacacgacaacggagaccaggccaaccaccacagacaccacatcggagccgacacgacagaagaagagtacaccggataccagagaatcaaagcaagcagaagaagcgacagagaacacagcgacaccaaccacgaaacagcgaacatgacagcaacacagagacaagacagcagaacaagaagaaatgagacttgcacaagaaacacaccatgcacgtaacgagaaaaacgagcaacacgcag

SEQ ID NO: 567735 - DNA, 93 bp, Homo sapiens
ttccccggccttttttcattttgcccatttcggtttttttgcaacggcaaaatacccctttaccctctttaacccagatggcggcccccccca

SEQ ID NO: 567736 - DNA, 212 bp, Homo sapiens
gaatgtcgaggctgcaatgagccatggtcatgccattgcactcccaactgggcaagagaacgagagcctgtctcaaaaaaaaagagagaaaaaaaaaaggaaaaaatactccatttgagatgactgcaagtccaggatgtgtagcagggataaggtgtgatggctagtgaaagctaatatgggcttgagtgctggagggaggattagcttgt

SEQ ID NO: 567737 - DNA, 546 bp, Homo sapiens
gccccctctataggtcccgcctccaaatatctcatcaacaagccgacataatcaacacccaacaatgactaatcaaactaacctcacacacacagaccgtcacacaccacacacacagacctcacacagacaccacacacagacctcacattgacactacacacagacctcacacaccacacacacatccacacccacgcactcacacacaccacacacagaccacagacacaccacaaacacacatacagacctcacacaccacacacacagacctcacacacacaccacacagagaccacacactcagagacctcacacacagacctcacacacacagaccatcacacaccacacacacagacctcacacagaccccacacacagacctcacatagacactacacacagacctcacacaccacacacacatccacaccctacactatcaaagtttaccacaaccaccaccccatcatactctatcacccacagcaccaatcctaccaccatcgctaaccccaccctaccgtacggagtcgcgat

SEQ ID NO: 567738 - DNA, 617 bp, Homo sapiens
aactaagttgtcaggaaactgacaaattataatgaaaagaaaggaatgaaattaccacaaagtcaaacagaagttttctctaactgaggggaggaaatggtgagaacacttatcagagaaatgcccatgtggcacttttgggatgcaggctagattaaactttgtatgtgtctacacacatatgtatacatgtatgtatatgtccataagtatggatattttatttatatactttctatatgtgtattatgttacacaataaaagaccaataataacaaagaaccaactggattctgtacaaatgaagctcaaattaagttacctcaatagtgctccttttttttaattgctgtgagtattcttgtgtttgacaatttattcattctactgttgatggatatttgggttattcagatttttttttacatgaagacactgtgtctttaataaaaccacctaatcaagcagctctgatccatgttcagtgctcattgctcacagaattttactgtgaagtaatattgctgacgttagtttgtggcttgcttatagatcacccttgtctaacactctccagtgtcctttcacagatattatcttgtcgggggggatctct

SEQ ID NO: 567739 - DNA, 1018 bp, Homo sapiens
gacactacaaatatgtatacttgttatgtttatattgttttagagacagggtcgtcactctgtcacccaggctggagggcgagtggcgcttcacagctcactgcatcctcaatcgcattgggggctcacgcagtcctcccgactcagtcctcccaagtagctgggcatgtcgccgaacaagtccagctaatgtttgtatctttagtagagatggggtttcgccatgttgcccaggttggtgtggaattcctgggctccagttatatgcccacctcagactcccaaagtgctgggattacagacgtgatccaacgcgacctggtgcaaatatgtattctttttgaacatttcctctgatacgtatagagctttgtgcatttatctgaagcagtatacagtgcctttggttatcagcaattttaacagtttggatatacttatcagctatctgtattccaaagctacatcgtacttcttccagtatagaatctggtgcttcctgacgaaaaagatgagaagacataatgttggacaatatatgatgctttccattgagaatggagtgaaaacattggttctatatgtattcttttaaaataattttcttatgaaaaacttgtgtctttattatacttaagcttgtttatggcatattcagtagtatgttataagatgtggtctataaattatgtaattgtaggatacgggaatgcattggtccagtgaccttcataaggagggcctaatggtggtatccttttgtaacttcttattggtatagaaactattagaaatgtatggacttacagagggtcactttgggaattgacgttttttcaagacaggtttattaccgttgctggtgggttgcgcaagtgcacaactggtgaactgcatgtgtgtattctggagtaatgtgtttgacagtttgagaatcacgggggagagatagtagacacattgtgtgtgggtgtacccaagggtatttcagtacaaattgtgtgaacgtccgtgggaa

SEQ ID NO: 567740 - DNA, 524 bp, Homo sapiens
ctcacttatttctaggttatttaatattgttcagttagatgaaagtgtgattgtagatttgaaatacaaaataaaacttggatactgtgatttttttaacatggccagactgtcatgtattataatgacatatacttttgtccataaaatgaaattaagtttcactgaaaaatttacatactttcccctggggattctgttgcttcagattaaagtttataaagtatcattagtgtcttccacagggtcattttacacaaacacagttttagtgagatgtcaactggcttttgttggttgttggattgactgtgatttaaaatgttaaagatgatataatgcatcttgttctgcttctaggctgaaaggtcactgaggcagagctgtttgtaccttgtatcccctggaattttgcctaaacatttgtgtactcatagggtggtaggagatagtccgcagatggtctaaagaatgccatgtgatactgtgagatgccaataatataaataaaactttgttattat

SEQ ID NO: 567741 - DNA, 263 bp, Homo sapiens
gtgattgcaggcagagagctcacagagctacctggagtaatgtcctcacgtgtcatgttagcttggacatctgcaacatcgacccatcctgtggctgtggcagttgtcggccttccttcagagacaggcagagcggcagggagcgatgtggacctcgagatggcttgcatcttagacagcgctgagaccaccaacctgttccagttcaatgagatgaagaagtacatagcgtaccctagtcagacaacttggacatgagcccc

SEQ ID NO: 567742 - DNA, 379 bp, Homo sapiens
  misc_feature (3)..(3): n is a, c, g, or t
gcnattttcatccttttcctcctcctccttccccccctctttccttaggccttttgcattgaaaatgccccaggggagggtagtgagggggaagtccttttaaggagaaccaaactatgaagtttttttgtattattgttgggggggggtgtgggaggaaagggggcgaaaacaaccaacaaagcttaatgcatttggagagcctctcagagctgttccgtttgaggagcccaaagaaaaatccaaatgaactttcagttcagaaaggcagtttatagggagaatctctccccccccccatcgggggtattggggttttgggctgaatttacttgattattggaaaacctgccataaaaaattttaggggcggtgtgga

SEQ ID NO: 567743 - DNA, 684 bp, Homo sapiens
gtcagccggggccgcatattggaaaggcgccgcgccgctccgccttgtgagctcggggtgtatcggggactgcgggcacaggctggaaggcgctcctctcctgccccgccgacgcccgtgcagcccgcttcgccctgacctgtttcctcatgactgcccccgtgccctgctggcgacggacgtcgccccggcgtccggatttaacacggataacccggatcgtgaggccgctcggtggaggatggagggcgactccgtgtcggtcctgcgaccctctcggcccggctcggtgcctcggtgggagtcctatgaccttcgctgacccagtctcagctccggcctggtgcagcggcgcaccgaggtctcctcgtcaacgcctaccgacaaggagctgggcggcgggtcggcggcgccggcagctagcgaggacgactgcgcagagccgccgctgacgagcatggacgacgacgaccaagggcgacgtccaaggaaacgcggttgagcctgatggaggaagtgctcctgcttgggcctcgaggaccggagggttacagatcatttcggaatgagtgtatatcatctggattacgtggctgtatgttacttgaattagcatcgagaggaaggttacaacctagaggcttgtggaatgagacgtagaagtcgtattaactaagaaatggt

SEQ ID NO: 567744 - DNA, 321 bp, Homo sapiens
ctttgggggtctttgctcagtttgtcaaggcaacccaggaccagatgcataaagtgatagaacaatctaattgtatcacaaatgtataaaacaaccacagcgatggggtggatgaaactgttgtgggcctaagtgattttggaaatagagcctataaaatttaaggcaaaagatactgcatataagtactgcactctagttgaaaaggtgtttcctgagggatatgtgttaacaattatgatactgctgtacaggtatgctggggctgaactaataaatgcaacgatggtggctgtgggccgccagcttttacactttttg

SEQ ID NO: 567745 - DNA, 678 bp, Homo sapiens
gccttgagaggctctggctcttgctgcttagggcggccgaggacgccatgggcgagtgcccgacactcggggaggctatgtcacacgaacacaccgtgatcgcctgtgggtctgggagaaagttcgtgtatatggacgagaagcagtatgcctggatgtccttaaccatcgagataaaggataggttacagttacagggtgctcttgtcgtggggaagacgtcgtcctggggcaggcctatgagcccagacccagataggcccatgagccgtgtctgcggtatcatgtggcaagctctacccttgatgggacgataccgatcctcagactccagtttctggcgcttagtgctaccagcgagtcgaagcattgacggcggtgcgtagggactactgcgttctcggagcctgtctgcgcagatgactgatttgtctggtcttggcgaggacggctgttctcctttcaccccagggcctgaagcctggggccagcctacacatggggactgttgtgtttctgttctagcttcgtctccatctagtagcgctagtgtcgttgctccgaccatgctggggtctgggcaggaatggcacagaggagatggcatgagctctagccaggtgctgcgaggacctgcgtgtagcgccagtctggtcgccttagtaactaccacatctg

SEQ ID NO: 567746 - DNA, 1405 bp, Homo sapiens
  misc_feature (1405)..(1405): n is a, c, g, or t
gtatatcgtcaatgttgagtcggtagactatgtagtcaatgccaagttgtggtttcgcaatccccatgaacttttcttacatatgttattctgaactactaagatggattccccatagcacctggtgatttgtgagtggatgttctacttgcagtattctgcctatacttgtccgactgacgctgtatggctgccatagacattggtactccatcccgaggctagctgcacagtgggctgcatatttggggagagaaagagtgctaaacatcctcgtagtgcgctagcagtcgtacgctgcgtgtcgaccgtgtcgtgatgtcggtgactgcttctggcgaatccgtagtccgggcactgtgaggaacctaggaccatgtcggagtcgatgccctgatatcggacgacgtggtaggtgctgtccaagaaatgtgttcatgagaggtcgctttcattaatagcaagatgctgtcacaagggtaccggcaggggaatagttgcaaggcattgtgcgtactttgcgtatttgactttgcttcgctagctactttactgagcacattttgcaatggcttgggtagattgagtgccccatccactaaggaatgcgagtacccaaagtgggtagagacaggactcgtggtgatagagtggggagagtgcaccttgccggcacgtaagtcggcacaagtgccaacacgttctccgcgctgcgacggaagcttcaaccattgggtagtccgctgcaaagtgggcacccgttggtaccttcaattccccacgaacggatgtatgtctcagaggaccacgcaattagtgcatacacctagcgacagtgcagtcgagacgtccagggcccccacgtttccctacagttgccacattggtgggccaccgttcctaacccctaaagggtgacacagaccccatgtgtctaacatttcgcgaaggcgcatgccttcccgggacctttttgccgcacaagtagcagtgggaacacgtctggtcatggaacattaggcctacccaacattcctgctggaaaaacagcttcgaaaccacaaatggctttggaaatgaacccccatagcgcaatgcgcccctttctcatagggagaggggccacaacaacagattagccaactaaatcgagctttctgaacaattcccccctttgggcaactccaaggaatcacgaaaacgatgatgacaaagggctgtccaattatgagtagggcccctgaaagacccaaatatccccattgggtaccactcatggttcaatggtagtttgagacattcgctgcttggtcacatcggctttagagaactcctttggcctatgacacctttgtgcacgttagaacctttctctatgcctccgtggtggtagaagagcaacacn

SEQ ID NO: 567747 - DNA, 202 bp, Homo sapiens
gctgggagggtggaggtgaaggatggggcctagagccgtgtggtgaaggtcacagtgtcctgagctagaaccacctgtggtatatggtctcacatcagaggcctgtctgatgcctcccactcaaccgctctcagagagtttgcaactccagagaaggagagtggggcacttagtgggcacaggctgggcatccaagatgggc

SEQ ID NO: 567748 - DNA, 269 bp, Homo sapiens
  misc_feature (38)..(38): n is a, c, g, or t
  misc_feature (46)..(46): n is a, c, g, or t
  misc_feature (77)..(77): n is a, c, g, or t
  misc_feature (98)..(98): n is a, c, g, or t
  misc_feature (125)..(125): n is a, c, g, or t
  misc_feature (133)..(133): n is a, c, g, or t
  misc_feature (200)..(200): n is a, c, g, or t
  misc_feature (246)..(246): n is a, c, g, or t
attcggcacagctcaatcatagcaaaataaaccttctntttaagtntacatagaacatttaccaagatagaccatantctggtccataaaatgtaaanggattcaacttatacaaaattatacanaatatgtnctctggccgtaatggaaatcaaaaacataatgattaacgataacttgacaatccccaaatatttggncaccaaataacttatactccactagtcaaagaagataccaaaggtnaaattagaaagtagtataacctg

SEQ ID NO: 567749 - DNA, 684 bp, Homo sapiens
gttggccagcgagacgcagggagatgctgtctctgagactagctctgtcaggcgtggtctgcggccggtcccttagctggacccgtctccatccccagaaggctattcacatgatcgattctgatctttgcttactcgccgatttcccacgacacgatgtccctttctacagctgctggaggactggactgctactactagtcctggctgtgggcagtgagagaatcctggcagacagaagacaaacttgcgacttggtaggagaaaagggtaaagagtcagaggaaagagttggctctacgtgaagagtgctgaataccactgtttaataataagctatgagagcactgtgtgcgccagggctccagacacatacatctacatcttcagggtgtgccgggaagctggcaaccacacttctggggcatggcctgggttgcaagggtcaggcacaaagtcatgggaaggaggacagatggtagggacgactcaatgagcactcacatcttcaacggaagttattggatcatgctgcatctataaagggggtgatgaatatgtacagccactgtggcaatggagtcagcgtcgtgcaaggtggtgatgatctcctgcaatcgacacaacccgtagacggacaaattttaaacccttgatgtctgaggagcgtgggcaaagttccaa

SEQ ID NO: 567750 - DNA, 449 bp, Homo sapiens
gagctcgctaccgttacaggttgtgctgctcaccaagacctgactctccctcggttcctgtctctcctccctcaccttgacctctccctcgtgttcctgtctctcctcctctgaccctgacctctccctcgtgtcctgtctctcctccactgaccttgacctctccctcggttcctgtctctcctcctctgaccctgacctctccctcggttcctgtttctccccactgaccttgacctctcactcggttccatctctccccactgagcttgacctctcactcggttcctgtctctcctcactgaccttgacctctccctcggttcctgtctctcctcactgaccttgaactctccctcggttcctgtctctcctcctctgaccctgacccctccctcggttcccgtctctcctcactgaccctgacctctccctcggttcccgtctct

SEQ ID NO: 567751 - DNA, 324 bp, Homo sapiens
attcgcggccgcgtcgactttttttttttcctccaaaattgtatttatttacatgaaaacaccattttattcaaattgaagacacatcctaaaagaagggtttgtccaggcatgccttcctaatccccttatatagtcactatcattttcatattgtttagtgtcataaatgaaacttcttactggttatagaaaattgaattggtctcttctacccacccaaaactactttaattatttaatgtgtgtagtcatccttcaaagaaaagtcgacgcggccgccaatttagtagtatgtatgtccacccggggacttcggaccgg

SEQ ID NO: 567752 - DNA, 102 bp, Homo sapiens
cgtctgcaatgacggacacacagctccaatagtggagaagtacacattacgtatgtagtctcccgccgaccaaaaatacatactgcaaaatgcagtatactc

SEQ ID NO: 567753 - DNA, 236 bp, Homo sapiens
cagtcggcaaagctgcgtttctggccgcccagtgttcgtcttcagcaggtggctgtagaccattgtcgcccggggctgaggcccaggagcccttctccggacccctagctggggaagagccgattgccttactgaggtggctctgcttaaggccatgcctgcaggccggatggtgacagtaagaggtgggctatccgtgaatcagcaacgtgagcacaggggggctccctgtaaac

SEQ ID NO: 567754 - DNA, 150 bp, Homo sapiens
gcagggctggcaaaagctgtcattggtgttggaccttgcttgacaggaagtcgcagagaggctttgaatcttgacctcgtcctatatcaacaaggaaaggtgcacctgcctgccattcctgtgtgaagacatccctaagacctagggtac

SEQ ID NO: 567755 - DNA, 535 bp, Homo sapiens
tctcaaagatggggagacgggggtctcaccaggtgggccaggatggtctcgatctcttgacctcatgatccacccgcctcgacctcccaaagtgctgtgattacagggtgtgagccactgcacccggcctgaaatttttggaaggtgaaaaggtttggacaagttccttttacagaataggtttgggagcagaactctttcagttggtaagacccaagttggctttggtttagcttcacagcatagctgaaagtggccaaacggtacttggtgcaataaagtagaattctatatggataagcaaactatttccaaactaggagggtgatagataggggtgtgataaatcaaatgatatgatcagagtaaagaatttggccatttggatccttttagttggtttaagccacctatagggtaaccaaccatctttatcctggtgggcggggataataatgaactaatggagggttccaagataattgaaggatactatctttccaaagtgtgttagatttgaaaggtattatggacc

SEQ ID NO: 567756 - DNA, 466 bp, Homo sapiens
acagatattgaagggaccaatgggaagtgacacaagatgccgcgtcaattgacaattttagatttacccaggtaacggcaacgtacagactaggggggcggtggattaggaagaaggggcattacggatgaggggacgagagagagggtatgaagggaccaggcggggggggcggacaatacgaagaaaactgagagagcggaaggaaaacgagataggggggggtattgtatggaagaaaaattaacgggcagcagagaaaaaagtaataggtttggagtgctgcacggggattgcatgaaatgctagggtggagtacaccgtatcagggagacgcaatcgatgagggattataggcatacggccaagggggggggggattgcaggtgcgtgtgagggggggagtgtgggcaccgaaaaggcgggattgacaaatactacgtagtgtgtgtgcgggagagagata

SEQ ID NO: 567757 - DNA, 600 bp, Homo sapiens
gctccagtctacagctcccagtgtgagcgacgcagaagacgggtgatttctgcatttccaactgagctttggaagagagtagtggttctcccagcacagagtttgagatctgagaacggacagactgcctcctcaagtgggtccctgacccctgagtagcctaactgggaagcaccccccagtaggggcagactgacacctcacacggccgggtacccctctgagatgaagcttccagaggaatgatcacgcagcaacatttgctgttcagcaatattcgctgttctgcagcctatgctgctgatacccaagcaaacaaggtctggaatggacctccagcaaactccaacagacctgcagctgagggtcttgactgttagaaggaaaactaacaaacagaaaggatatccacaccaaaacccatctatacatcaccatcatcaaagaccaaaggtagataaaaccacaaagatggggcaaacacgagcgaaagtgaaatctaaatcgagcacctcacccctcaaagaatgcagtcttgcacaatggacagtggtggcagtgcttgcatggagacagtcaggtacttccgtaaggagtgcc

SEQ ID NO: 567758 - DNA, 144 bp, Homo sapiens
tgagattgtgccactgtgctccagcctgggcgacagaatgagactccatctccaaagaaacaaacaaacaaacaaagcactaactagctcagaggacaatgctaacatttccaaagggtcctagaagttggttcccagaaaaga

SEQ ID NO: 567759 - DNA, 1054 bp, Homo sapiens
  misc_feature (262)..(262): n is a, c, g, or t
cacgcgtcgcagaagacctgcccgagctctgcacccgagaggaggacccagaaggacgtcaggggaggctactgggacgctggaaggcgctgttgatccccccttccagccccatgccaggtccctagggggcaaggccttgaacactgccgggcacatgcatcgtgccctgtcagcccaaattttgccctcacatcctgcagtctcccgccagcacaggaagtgacaacatgacagaggggtgcgtgctaggcagtccagngtgacgagttcgctgacagtgggcttcctgtggaagataccatatggatggctctgagcggccagcaccaggctcactctcctcgccgtactcgctgggcacacgagatcttcacatcgatgggtccaggagtaggaatcccgtaggtgcctcaagtagccctctccctggctaggcatcttgtcccctctattcctctagggagcactgtgcccactctttctgggttttccaagggaatgggcttgcagagatggagtgtctgttaaaatcgaacaggaaatacaaacgtgtgtatgagcccaggcaagtgaagctagacatcataacgtagccaccacacaaagggggaagctcacctaagatgtaccgcgcctggagggcccgccgactgtttacactgttacctggtgcttacgttgaacgatagcggggcgcccctttacggctgcgcattcccccgggctgccgtaggtcccgtgcgacgattctagaggccagactgaagactggcaaagattcccgtcgcacccccggagttacccttacgtagacgcgacacgccctgcaaccaacgcccgcgtgctgacaccacaacggggcacactgacgccccccgtagcgcagcacttacacacgcgccttgaagcgcaacgcttcccacactccacgaacgcggctaaccacggggctctacacgcacagacgaccgttctcgccacgcccagcgctcgacaaaccttgggacactgacgcgcggcactcaattcctgcaccacttttctcttccag

SEQ ID NO: 567760 - DNA, 359 bp, Homo sapiens
ggcagcttctgagagcaggttgctccgttccgtgctccgactcgccagttgacttcctacacgctatcgccagtcgtcggccacgtcggtccttcggaggcctgggcggcggctccgtgcgtttggtggccgggggtcgcttttcgcgcgtcccagcatttcacggggggctccggtggtcgaggagtaatccgtgtcctccgcccgctttgtgtcctcgtcctcctcggggggctacggcggcgggtacggggcgtcctgagcgcgtccgaggggctgctggcggtgaatcgagaagctaatccatgcagaacctcaacgagacggctgtgtctcctacctgggacaaggtgcgcgcc

SEQ ID NO: 567761 - DNA, 380 bp, Homo sapiens
gggcctgggcccctgactttttaaagatctagaagctgaaataccatttgacccagcaatccaattataaatcattctattagaaagatacatgcatgtttatgttcattgcagcactattcacaatagcaaagacagaatcaacccacatgtccatcagtgatggactggataaagaaaatgtggtacctatacaccatggaatactatgcagccataaaaaggaacaatatcatgtcctttccaggaacacgaatggagctggaagctgttgtccttagcaaactaactcagaaacagagaaccaaacaccgcacgtcctcacttacaagtgggagctgaacgatgagaacagagggacgcgtgaaagagggaaggat

SEQ ID NO: 567762 - DNA, 412 bp, Homo sapiens
gtagtttgagaccagcctggctaacatggtacaactccatctctactaaaaatacaaaaattagcccggtgtggtagcaggcgcctgtagtcccagctacactggaggctgaggcaggagaactgcttgagcctgggaggcggaggttgcagtgagtcgagatcacaccagtgcactccagcctgggcaacagagcaagactcactctgaaaattaaaaaaaaataaaattaaaaaaacgtgataaactaatgactaagtctttttcttttctttttttaagagatggggtctctaccgggcacagtagctcacacctttaatcccagtatttaggaggccaaggtgggcagattgcttgtgcccagaagtttgattccagcgtgggcagcaatgtgaaaccccaactctac

SEQ ID NO: 567763 - DNA, 692 bp, Homo sapiens
  misc_feature (82)..(82): n is a, c, g, or t
  misc_feature (125)..(125): n is a, c, g, or t
  misc_feature (133)..(133): n is a, c, g, or t
  misc_feature (169)..(169): n is a, c, g, or t
  misc_feature (179)..(179): n is a, c, g, or t
  misc_feature (236)..(237): n is a, c, g, or t
  misc_feature (240)..(240): n is a, c, g, or t
  misc_feature (256)..(256): n is a, c, g, or t
  misc_feature (261)..(261): n is a, c, g, or t
  misc_feature (268)..(269): n is a, c, g, or t
  misc_feature (283)..(283): n is a, c, g, or t
  misc_feature (290)..(290): n is a, c, g, or t
  misc_feature (293)..(293): n is a, c, g, or t
  misc_feature (305)..(305): n is a, c, g, or t
  misc_feature (317)..(317): n is a, c, g, or t
gcacgaccacagcagccgtggtttggccttgtgtgtctggagctgtacaaggttgttgcaggggcaccgacagctttgactnctacaagaatggtttcctcaacttggccctgcctttctttggnttctctgnaccccttgccgcaccacgtcaccagtactattaccnagagtggacnttgtgggatcgctttgaggtacaagggctcagcctaatggtgaggagatgaccctcnnacngttctcgactattttnagacngagcacnnattagagatcaccntgctgtnccngggcgtgtccanactctattcctncttcatgcccgctgcccagctcaaggaacggttggatcaccgatgacacgagattgtgaccctgtgtcgaagcgaaagctgggccgccacgtgcgggcgctggtgcttgagctgtgctcgttacgacgagacggcgaggattcgaggttccctatgtccgatacaccactccgctgaccccctctgctcctttaggctggccccttgtccacccctctccacaccccttcagcccagggttcccatttggcttttggcaatggcccaactacccagtctggtgttccctcatcatccccctacctggacccctcttgcccctgccttctaccttgtttggaacctgaatcctaataaagcattaattactcccca

SEQ ID NO: 567764 - DNA, 986 bp, Homo sapiens
  misc_feature (303)..(303): n is a, c, g, or t
  misc_feature (440)..(440): n is a, c, g, or t
  misc_feature (456)..(456): n is a, c, g, or t
  misc_feature (674)..(674): n is a, c, g, or t
  misc_feature (684)..(684): n is a, c, g, or t
  misc_feature (732)..(732): n is a, c, g, or t
  misc_feature (743)..(743): n is a, c, g, or t
  misc_feature (765)..(765): n is a, c, g, or t
  misc_feature (767)..(767): n is a, c, g, or t
  misc_feature (812)..(812): n is a, c, g, or t
  misc_feature (836)..(836): n is a, c, g, or t
  misc_feature (899)..(899): n is a, c, g, or t
  misc_feature (908)..(909): n is a, c, g, or t
  misc_feature (914)..(914): n is a, c, g, or t
  misc_feature (916)..(916): n is a, c, g, or t
  misc_feature (935)..(935): n is a, c, g, or t
gaattacttcaggccttctccataatatctgttagatagaaattgccagtgagcaagtgagaatttttatttctcaatacctgcttcacttgatgaatcatattataattttttatcatgattattgactatatttttggagtcccattgtttcagtgggcattaacagaatgctttaaaaacttctaagacaagaatctatagcattagtatacactggcacataattttttaaaaagttttaagaaaagatttcatttggaattttattcacagtataaaatttcctcacctgaagtaacnttgtttgccaaaaaagttgttttaataaactataatttttgaaaacttccttttttattagtttagaaagccccttatttttcaacaaaggggatttgtacacataacatgggttatttagtttaactctggcaaanaaaaaaaaaaaaattntggtatgtcggatgttggtataccggttcagtataaaagtgtcctaagcatattagccaatcttttcacagtagagcatacttaaggctgctgggtactggagtatacttaaatataactccagaaatccagggactgggtgttaaaacaggattagagcatgtaaaggtacatctagattcatatttgaatcttaaactgtatttttctcttagtantggctaatgnagtaaagaaaagtctcataaggtagccaaatgaaaaagattgaagggnaaagtgaaaanttagaggggccaaaagatgggntntgtgaacagaagaattctagtttgagggtgactcatattcacgantaggatacaacgtgtgattgtgtnggacaacatgtcccaaatttctaaaattctgcttctctgccaaaagcaagtgtcttcttggtngatatcggnnttcanangggtcaatctttcaatttngatcttgagaggggagcctagaagaatcagcgggtctaatcccccagtaga

SEQ ID NO: 567765 - DNA, 859 bp, Homo sapiens
caagaggggttatgtctataaccttgagttggaccgtgtgtactggcctgaattcccaccgtaccgaaagtgtgtcgcagagaatgtagaagggaattttctaaaggggctccctcgggcaaaggtttctaccaagaagcaagttgtaaatgttggtttgctggggcgccacaacatatgtaccccgctttgccccgggccgccttttttattataaagccccccgtattgctcgcccacccgcccggcctcttgtccagaagacgtcgccgcagttttttacaccaagcgcgcaaatggttcccattattatataaccgttcggttagtagttctttccacgcggtgcgccctttttaaaatggtgatgcgacccaagggttttggtgggttctgaaaatttaagtgttataatgttatggccccccgggctgccggggaaatccacccccatatgcgctaagatgtttgtaagcaccacgaaatttaatattgggttcgcccctgctgtggttataagtgagaagcgaaacacgctagaagttgtgaaaaagttgtgtttagattacaccaacacctggggaattctcagagaactataaagtgttttgtgtaagccgaccccaaagaaagatattatagagatatttatctcatctcccagaccttttccaaggaataggatccataattctttaatggggatttacgccgcgtgttctttatccctaatagtgttctctccccctttttaccacaatgcctgctgccccacaccctccttgggtaaataaaataagccttggaacaaggaaattaaaccaacccttggaaaaaaatttttttaaaccccaaaaaa

SEQ ID NO: 567766 - DNA, 233 bp, Homo sapiens
tctgaggatcccaagcttacgaggcagcattgttaaaaagtctaacctaaaagcccaaatgtccattgagagatgaatgaatgaatacacacacacaaacacaatggaatactacccagccatatgaaaaaatgaaataatgccatttgcagcatcagggatggatctacagagtatcacactaagtgaagtaagtcagaaaaagacaaataccatatgatagtaccctcgtt

SEQ ID NO: 567767 - DNA, 1109 bp, Homo sapiens
  misc_feature (426)..(426): n is a, c, g, or t
  misc_feature (563)..(563): n is a, c, g, or t
  misc_feature (579)..(579): n is a, c, g, or t
  misc_feature (797)..(797): n is a, c, g, or t
  misc_feature (807)..(807): n is a, c, g, or t
  misc_feature (855)..(855): n is a, c, g, or t
  misc_feature (866)..(866): n is a, c, g, or t
  misc_feature (888)..(888): n is a, c, g, or t
  misc_feature (890)..(890): n is a, c, g, or t
  misc_feature (935)..(935): n is a, c, g, or t
  misc_feature (959)..(959): n is a, c, g, or t
  misc_feature (1022)..(1022): n is a, c, g, or t
  misc_feature (1031)..(1032): n is a, c, g, or t
  misc_feature (1037)..(1037): n is a, c, g, or t
  misc_feature (1039)..(1039): n is a, c, g, or t
  misc_feature (1058)..(1058): n is a, c, g, or t
gaattacttcaggccttctccataatatctgttagatagaaattgccagtgagcaagtgagaatttttatttctcaatacctgcttcacttgatgaatcatattataattttttatcatgattattgactatatttttggagtcccattgtttcagtgggcattaacagaatgctttaaaaacttctaagacaagaatctatagcattagtatacactggcacataattttttaaaaagttttaagaaaagattcatttggaattttattcacagtataaaattccaaatgaatcttttcttaaaacttctaagacaagaatctatagcattagtatacactggcacataattttttaaaaagttttaagaaaagattcatttggaattttattcacagtataaaatttcctcacctgaagtaacnttgtttgccaaaaaagttgttttaataaactataatttttgaaaacttccttttttattagtttagaaagccccttatttttcaacaaaggggatttgtacacataacatgggttatttagtttaactctggcaaanaaaaaaaaaaaaattntggtatgtcggatgttggtataccggttcagtataaaagtgtcctaagcatattagccaatcttttcacagtagagcatacttaaggctgctgggtactggagtatacttaaatataactccagaaatccagggactgggtgttaaaacaggattagagcatgtaaaggtacatctagattcatatttgaatcttaaactgtatttttctcttagtantggctaatgnagtaaagaaaagtctcataaggtagccaaatgaaaaagattgaagggnaaagtgaaaanttagaggggccaaaagatgggntntgtgaacagaagaattctagtttgagggtgactcatattcacgantaggatacaacgtgtgattgtgtnggacaacatgtcccaaatttctaaaattctgcttctctgccaaaagcaagtgtcttcttggtngatatcggnnttcanangggtcaatctttcaatttngatcttgagaggggagcctagaagaatcagcgggtctaatcccccagtaga

SEQ ID NO: 567768 - DNA, 128 bp, Homo sapiens
tcgtacctgcatatggcaggccaaggcacaactcctaggtagctttctatttcgtacgtggttcatcttcctagatatcctgcactagtccgctgccttacacaactccttggccttgccatatgcaa

SEQ ID NO: 567769 - DNA, 698 bp, Homo sapiens
acaataaaattagccaggaatggtagcttgcagctgtagtcccacctactcgggaggttgaggtgggaagatcacttgggcccaggaggttaaggctgcagtgagccatgagcgtgccgctgcactctagtctgggtgacagagtgagactctgtcccaaaaaacaaacaatagtcctcaaagtccaagccatggttttctctaccatgctgtaaggtatagaatttttatatttttatttgttacagggtctgtctctgatgcccaggctggggtgcagtggggcaatcatagctcactgcagcccccaactcctgggctcaagcaatcttttgccttagccttccgagtagctaggactagaggcacaggccaccacacgtgcagaatttttaacattctgtgttgacgatgggggcttcactatgttgcccaggcgggtctcgaactcctggcctcaatccatcctccctcttcagcttcccaaagtgctgggattacaggtgtgagccacgaacctgtcaagtacaaaatgtcgaggctgtagttgagaactttatttgctcaatacaatagatctaaacctactattgcaagtatggctggggtgcggggggctcacgcctgtaatcccagtactttgggaggccaaggaagcgtggatcccaatactttgggaggcctaggaattcacgacc

SEQ ID NO: 567770 - DNA, 296 bp, Homo sapiens
  misc_feature (119)..(119): n is a, c, g, or t
ctcttagaggatcccctctctgcccccagatcacacaacattataagatgcataactttatgtaccactaaacaaggaaaagcgctaccaatgtaaatattacaatgccatatgattgntacaatgcagtcctgagtttcacgagatcttcaaaatataaaaaagtatcagtactgtaatcagtgaaatgtggtatatttattcattgattgaagattgaggtaaatggatttcaaaagtcatttccagtataatcactgctaattatattgtattatacatgttctcagtcatta

SEQ ID NO: 567771 - DNA, 279 bp, Homo sapiens
atgtcttacggtgttctacggctaaatctgatttaacgccttttgtctcttccttcctcgatcagaaaagagcctcaccttttcctggtagatctctcagtaggacatattgacagagagagcccatggtcggccctcagcaccctcctcccttgtgagctgcaggaggtccatgaaagcgcgggggatcaccccaggcttgctctggtgccgtaagcacataactcgcggtggtaccgacgctcgaacttcgataagtctctggctcatagtctattt

SEQ ID NO: 567772 - DNA, 167 bp, Homo sapiens
  misc_feature (131)..(131): n is a, c, g, or t
caaaatcactctctctcgaaataggtggaccaaaattcttttaatctcacctccaaagtctagaaaactatgtccgtcctaaccagcacatattctcttaattacactgacacgcatatcgaattcctganacacattgactaactgctttatgactgtacattaaa

SEQ ID NO: 567773 - DNA, 737 bp, Homo sapiens
  misc_feature (737)..(737): n is a, c, g, or t
tactgtatttcttccttcctttcaatttcgtcgccccaaacaataaactacctaatttaaatgggttaccatttcccatcagcacccctctcctgtcctaggtgtatattcctaacaaagaaacgggcaaggaaagtaagacaacatgcgcacctgttctaaaaccactgggtgtctgctcacatgtccctcctcaaaataaaactgactttcacaagagatcacgggactttgactcacacaaaactaaatccaaatcccatctctactctctccgcccaattaccctttcggaaacccatttatcttcctaacaatttacctttttatctaggagatcaaaagaaccctatgtttccttccctaagaaactcccttcccacaaccacaaaacctgcgcagctttactggcttctccaaccatcaaacacatttctactctttatccttaacactaaacaacatcgcctctttgcctcccctcgcaactttcccacccctcctttacccaggcgtactcgtcacccccttactaatcccttcctccggcccctggttcgccaacccccccctcccccccagccttctccggtttcccctatccccggtaccccccctacacctctcccccttccctctcctgccgtgcccctgaccgccccatcccgcccttctctacctcgctccctacccattacatacatgctctcgtcgcggtgcggaccccaccgcctcan

SEQ ID NO: 567774 - DNA, 709 bp, Homo sapiens
  misc_feature (7)..(7): n is a, c, g, or t
  misc_feature (31)..(31): n is a, c, g, or t
  misc_feature (78)..(78): n is a, c, g, or t
  misc_feature (108)..(108): n is a, c, g, or t
  misc_feature (144)..(144): n is a, c, g, or t
  misc_feature (148)..(148): n is a, c, g, or t
  misc_feature (259)..(259): n is a, c, g, or t
  misc_feature (291)..(291): n is a, c, g, or t
  misc_feature (304)..(304): n is a, c, g, or t
tgtcgtnccggctggacgcaacatcaggttntcgccggtgaatctgccggaatcccgggtgatgcgcctcaagaggtngtatcccggatcggtggtcaagcaaacagngggtttggtgctggtgcctaaacccatgactgcaangatngggggccagccattgggcggtgccgacttgttgaagtggagtgccgacctcgtgacgaacgtcctggctgttgacaccccgatcggcgcgggccggcccactgagccatanaattgtgccgttggcggcataagatgaccagntgtaccctttttncgtggcaggagatgtgatgacgatgcgacgacgactcggtgccgctgcggtggctgttgctctggtgagtgtggcttccgggtgtgcgagttccccgagcaacgcggccacggtgggaaatacgacggtgaccatgaagtccgtttgacgatgccgtcgagcattgctcgaagttcatcaacccgtcctcggaactcaccccggcccagatcatcgccttcgaggttattcgtggagccgttgcgcaagaggtcctggacaaacgcggagcggaagctctctgacgccgaacggtgacccagatgtgtcgctcgaacatggttattggtgcttagattccgatccaggtctgtccacaccgagggggttccgtagctccgcgggttgtgttcccatcttttcgac

SEQ ID NO: 567775 - DNA, 212 bp, Homo sapiens
ctggactactgggctgtagcttccatgccttcctgagtgtacagacacagaatggggacttgaatcatggcaaaacaggtatgggagggggagaagatgaggtctggttagcacaggtggtcttggttagaaagtttacagatatgcagtgctcaggagagaatagagttgatgaatagcttttcgggacctttaaacgatgtcttgactct

SEQ ID NO: 567776 - DNA, 92 bp, Homo sapiens
caacaaacgtttcgccttttgttagatactccattccattgcagtcgggttgattccattccattccattccattccggaagattccattcc

SEQ ID NO: 567777 - DNA, 468 bp, Homo sapiens
gggccggcctggggctgcggggtgcctggctcaggtaagaccggagggtgggagcagttctagaggggtcaccaggggccgcgtactctcgttgcggcgcccgagctgctcccgtgccgagccgagggccttcggtgcgagcgctctagtggcaggacgcggcccgtggcggtgccctctgcatgctgctctggtccctatgcacatctcgtgtggtcactcaggcatcgtaggtgcggtcacccgctcgggcgcatgataggtcccaggtgattgcgcagcgacaaggacatgagcacgccgtggggtcgtcacacgacaagaagggcatccacatgtgcgcatggcttcacatacagaaagggtctccgttgtgtgaagaggtaggacaaaggactatctgacacacgaagggttagtgtcctaatttcacgtagaaggcatgcccagtcgaaatagattcgccag

SEQ ID NO: 567778 - DNA, 104 bp, Homo sapiens
gcaaacctcaaggagatggaggaccctttgaaacacagatttggctcaagtccgattgccatattaagcggattccatgcgttcagacgttgctgcagtctttg

SEQ ID NO: 567779 - DNA, 264 bp, Homo sapiens
cttgtcctctcttggctttttgggattccacagaacgcacatacagaaacacattgtgaacatatttcttcatcttcctctcttcactaatagctcaacttctagtccagttttatgtgtgacattttgtacctgagttcttcagtgaaattttacattgatctcaatatcacaatttccctgacggtttaccgctttcatcttcttgaaggaagaatatatggtcacaaaataaacttgttaataaagtgactgtgttggttt

SEQ ID NO: 567780 - DNA, 934 bp, Homo sapiens
aaagatcatgtgacattcggactgtactatattagccagtgtctgcctgacttagctaaatacataactatctccaagatggggctaaaaactgctatgattctacagctacacatagactcagggatatctactattgtattcactactagaagggctccatagtatgtcggggtactgtaggcagtaaacactgtccttgtggttatcatgtgtattaaattaggaaccaatgaacgatcaataatggattcgctgcagtagttatactttgtactggttgagcaactatggtgtgcttagtaggtgtagtgttgggtgaagaactcatccgtttattgtcttgtaatatgaagttagagtgcctttttatatttgtatattctgaaaatgttctgtggaatgttttgtatatcatttgagtgtatcagagcaatatgataccagtgagttttcatttcaacttttctttgaatgtataaagtgtcttttttgcctatttccccttgtacttgcattgaaatgaatatgaaaatgcttaagttttctataggaatagttgattttgcagtgctaaaatgctttcgtcttacgaaagtataaacataggtcagtattataggggaaaaagcatttagatagtgaaatctgagtgtgtataaaagtaattctagggacgatacctactgtgacctaaaaaatttcaggaacatatcttaaataggaagtttgctacataatttatgtccaagctggccacatactttgcaagccgagaacaactgggccgtgcatattgcgtacactggcagcacactgcgcggacagggaaggaagaggccgaccgcgtacaaccagaaaacaggcaggaaaacaggagaaacaagaaaacagacaccacagacaaagaacaaacagaagaaaaaaaaggcac

SEQ ID NO: 567781 - DNA, 807 bp, Homo sapiens
cagcctgggtgacagagcgagactctgtctccaaaaaaaaaaaacaaaacgagaaataagagttcccacatgacagcaagaatcactggaaaatggctgggacccactggtcaatggctggtattggttggcaaacgaaaatggtttatcttggcctaagctttaaatgtcacacatgccgtgggaacttccaactatgaacacagtctggcaaagcagacaccctctccctgcagcctcgtggaaaatgacctcctttacatttcctcatggagaatctgcccagtgaggactgtggcagaagagagtcagggagaattttctagctgataagggttagaaaatgaagacgagggctctctggtaatcagcaggaagctatgatagaaaagaatgccttttaaattgtgaagtgcaaaacctagaacaattcgaaaattacttaggggggttcgactatgaagtttcggaattcttttcaagacctgggtgtctgaagttaagattttaaataatggtcggaaggtcacagtctatactgatgggtcaggatatgctaacccaaaatatggcaccttggtgttcgagaaaatgcgggaagcacggaaggtcatttctcagcgatccaccgtcccttttccccctccgtgaagcaagttctacatttggaaagggccccctcccctggtaccacgaaggacagggaaccctgcttacctttggaagtcaacagggttcacagcagcaagaatcctgaaacagggacttccctaatccttccagttggtcaccattgcgctaatacca

SEQ ID NO: 567782 - DNA, 610 bp, Homo sapiens
  misc_feature (216)..(216): n is a, c, g, or t
taacacaatagtggcacgatccactaggtaggaggtgacaaagctaccgagtcgtggtgatagctgagtcggccacagagtagaagtcgctagtgtactaactcttacaatttagcccacgagaaggccgtctaaaatcacccgttgtttagaatcttaatctcgttatgtccgataacgttgggagtcagtctcttgtgagtactactcagagangagaagatccattgtagaagcagagtaatcaacatttacagcacccgatagtgaggcctaaaagcagccaaccaatttacgaaagcgttcaaggctcaacacccactacctaaaaaatcccaaacatataactgaactcctcacacccaacttggaccaatctatcaccctatagaagaactaatgttagtataagtaacatgaaaacattctcctccgcataagcctgcgtcagatttacaacactgaactgacaattaacagcccaagtatctacaatcaatcaagcaagtcattattaccctcactgtcaagtccaacacaggcatgctcataaggaaaggttaaaaacagtaaccaggaactcggcacaatcttaccccgcctgtttacc

SEQ ID NO: 567783 - DNA, 112 bp, Homo sapiens
gtccatttattacattaaaatgtttatccctctatattagtattcactttatcttaatctgttgctgtgtctggaaaattttagagctaggtatagtgaccgtgaactttct

SEQ ID NO: 567784 - DNA, 105 bp, Homo sapiens
atccacgctatccagaggctgagatctgagatcgaccacgtcaagaagcagtgcgccaacctgcaggccgccattgctgatagctgagcagcgtagccagaagga

SEQ ID NO: 567785 - DNA, 488 bp, Homo sapiens
  misc_feature (253)..(254): n is a, c, g, or t
  misc_feature (256)..(256): n is a, c, g, or t
atcagtcgcgtcgatacccctattgcttcatatcgactctagcaataagtattgcgcttgttctcccttagcggtaccttggttccgttgttcaccgttattgtatcaatgcagtctagtacttcagctctatattggtgatatcttttcatgtcccgctcttaggttgggttctgctccgatgtcgtcccgacctcgatttcttatgcatgttcgttactttatgatctgtgtgattgtttctcctatatgnntnaataaattacagctccatagggtcttctcgtcttgctgtgtcatgcccgcctcttcacgggcaggtcaatttcactggttaaaagtaaagagacagctgaaccctcgtggagccattcatacaggtccctaattaaggaacaagtgattatgctacctttgcacggttagggtaccgcggccgttaaacatgtgtcactgggcaggcggtgcctctaatactggtgatgcta

SEQ ID NO: 567786 - DNA, 340 bp, Homo sapiens
cggcctcttatacccattgtcgggcctccgggtggcgcgtgcgtgtcgttctagctcatctcacgaagagtgcctcgtggcgtactcggttgtcctcgtggagtcgaacgtgttaggcgtgcccgctattgcgtcggatcgtcgtccaacctggtcgagacagggaaactcttgtctcaaaaaaaaaagggtgaagagtattcaggaagatctctaggatacaaggcaaaaaaatatattttttatctcacccttttaaaatgtctattgggtaatgtgcctggcacattacatatttgcaaatacttatgtacttaaatacttatactaccacgacaca

SEQ ID NO: 567787 - DNA, 659 bp, Homo sapiens
cgggtctaaatacagtacagtcaggaaggaccctctatgctaactcaataaatagtgcattgagtacagagtacatataggagattacggcagataataggacaaagaagaaattcagtgtggcgctaacaataataaagtagcaccagagaataaccacaggaaacaaacactaatctccgactactagcatttgaggggtcgctatacacgtcgacagtgagttaactcggagggattaaccagtgggttacaaaccaacctctgaaagatactaaaactattagtaacagaagtctatctaatggagcaccgtagaattctgttggccagttttttacttactctacactgattagtcttaaatagcaacatgtactgatcccgaatctcgataaacataggtgtcgtacgagaatgatgaatggcatttgaactacaacagatgggcacgaagttaaccaagacgatgggatcaggagtattccagaatggcgaggtttgataactagagaagggacaggattcagattggaagcagattcagttttaaaaccctgctctgtgttacatgagtatatagtaagcgctactaagcgcaaaaagaaattccggggaaaacttccaaaacttgagtggtggtcacccaattgttaacc

SEQ ID NO: 567788 - DNA, 346 bp, Homo sapiens
  misc_feature (65)..(65): n is a, c, g, or t
  misc_feature (104)..(104): n is a, c, g, or t
aagcttttctgtctccgatttcctgaacggtttaaggaccaggaagaaacaggctcctgccagcnccgacagcaacgaaaatgttcccccggagatcaggatgnctttcttaagctcagtggaggttaaaaaggggcccgggaagtgtacagaatgttcttcctacgcccaacccaaacgtcagttaatgttccatccatgctgcttaaagagcattcctgtcctagtaaaatgggcaagtccctttacccccccccctcccctggtatgcttacattaatagctaaagtcaatcctgtaatgaaataaagcaagtggtagctgtttggtagcctccccttctgca

SEQ ID NO: 567789 - DNA, 485 bp, Homo sapiens
gctcgacttccattccattccattccattctattccattccattgcaatcgatttgaacccattgcatttcattccattctattccattccattccattccggaagattccattccattgcattccattccattccattcccctgcactcgcgttgattccattccattccattccattccattccattccgttccgttccattccattacattccattccattctattcgggttaattccattccattccattcgattgcaatcgagttgattccattccattccattccattccattccattctattccattcctttccattccattacggatgattccattccattgcattccattccattccattcccctgtactcgggttgattccattccattccatttcaatccatgccattccactcgtgttgattccattctttacattccattcaagttgaatccattccattgcattccattcc

SEQ ID NO: 567790 - DNA, 1344 bp, Homo sapiens
  misc_feature (613)..(613): n is a, c, g, or t
  misc_feature (621)..(621): n is a, c, g, or t
gcggctgtgctggctctgtcagacaagcctacagcatgtgaggctgagttcgagtactcgcatgcgttgcattcgagcatagtagccgcatctgactccaatggccgacaagcctcacgaaccagggagctatacgcattccgggagagagcgtcaagcagcattcatgagcgcataatatctgacgtatagccaccatgcctgcgtacccaaggagagacatctgtgaagcattgcggcacgtaccaacgctgatggactccgcagagtcagtgcgtggggcgtagcggtggtagcgtgtgttgagccggtcaagcccgctcagaaagccgcagacccttggctgggaatgtggggcgagaatcctatatggtacgaactgtgcgcctataatctgagattgggagaggagaaggccaatcctagtccatagaaacgcatggtgcccaggggcctgggcagtgcgtccgcaagatggacttcaggagcagccaattacggacacgctttcatgcttgcgggccatttgccctgaagtcgcgcaggcaaacccgaggacaagagcgccaagaagtggcccagtgcgcattgaaacgcgcatacctgagaggcntctagtgntccgttagccgtgaattgtgtccccggatgggaaaaccggaggcacgatgcgattccgaggtgctgtgattgggtgtggcttgagggcagcgagagtatgagtccgaaagggtgccgggaagaaggcactgtgcatgttcatcgcggttgagcattgcaccgccgcgttgtggacccgttcaggtcgatcgcccaaggggggattataggcgatggcgggttgtggtagacgtgaggattaggagggataccctggacaagaactacctgtgtccccccaaggtttcctcgtaccttaagcaaagggggggggcactttgggacgtgtgcccaattcttgcactggggcaatttcacggggccgctggtggcaaggaatatacaatttggcaataggccccccatgtctaggaattgaggaggcaccttacaggtaggtggggttacacaacgttactcgcaactaggctttgagtggcggctcaccttgagacattagcgtgttcccctcaccttggcctctcccaaaagggaaattgcaaccggaactttgtttccccgctttatttacagaacaccttacttgtatccagcaggttttcgtgggcccaactgcggggtaataccactttaccccaaattgtctttcatatgatggattccccatgtatatccctatacatttatcgcaagggttggcccccgctattgttattagaactc

SEQ ID NO: 567791 - DNA, 1045 bp, Homo sapiens
cgttgctcgcttgttctctctttgggttgcgtctgtgtacgttcccgtctggtcctcgtctttctctctcttcgtccttgtctgccgcgtctctgctgcgcgtgctcgttctcctgttccgcgtcctgcccagttgcgctactgctctgtctccgtctctcgttctgctcctgcctcctcgagccggtgcttgcgccttgctcgggcccttgcttcgttcccccccaccgcacgggcggagcgtgggactgctgtggggagcggcgcctctccctcgtttgatccttgttggtcattgagcgtctcgcctttggggggatcgccctactcttgggtctcccccgttctgttgtgttagtggtgcccgctgtgtgtatctcctgcggcctactcgtcccctcttctctctatgtagggcgcccgtgaattgctgtcccccgctttgttggcgcgccgttcgcgcgggcgtctcgactgcgacttttaagcccgttcccgcaacttgcggggttaccctttctggccctttattaaagtggttcacgccgtagaggtctgcttaagttgggggttcccccctcaagtgtgccagcggtcccctgctttcaggtcctgtgccgctaacacaacgtgggcccgcggagagcgtccacctaatgagatgggggcaactccatcagccgctttgtcgccaaggagatacaatacagggaatcccccgctttcgttcgacagactggttatcctgaagactgatacctcccaggctactcttcaagtattatgtgcttccaacgggcagccccgccggcgattcgctgtaagacacataggggaccgcttcttaatcttttgtgctttaatctggatttctcccatttttcacaggaaccaaaccttttaaccatctgtttccccaaataataaatattcgggaacacacccccacattctgagcagcaattctccccatcactgcttatttctccgcccacatttgcgcaccctatatataaaagattcctttcacaaaatcatagtacaa

SEQ ID NO: 567792 - DNA, 106 bp, Homo sapiens
agtctggttagtttcttttcctcgctgactaatatgcttaaattcagcgggccctcgagtgtcgcgccatatcattggtctgtggttgtagtccgtgcgagcccct

SEQ ID NO: 567793 - DNA, 847 bp, Homo sapiens
gagtctagttagtatcggcctgttatctcctttggcgcgagcacggtctcagctgtgtccgcctgaggcgagcgagcgctggccgccaacgaggtatacgtactgggagcctcgccgtcagtctcgtctccggcgcggtacctgccccgttttccctgtgagttgatctgctccgggcgggggcctggcattggtggggggcgtccgaccgcggtctgcgggcaggcgttggtcggcccgctcggattcagggaagaccagtactggctgggctgtgagtgaagttcctgcgcgcgtctggggcggcgtcgtgcgggtggtgacccctgggacccgggcaaaagaggggctcgccgtacggagtgtgccgtggacggtgggctgacctggtgggtcgggggcagaacgtgatggactgcgctgctacttgggggctcgataggaggtctggtacaaactgcttgggaggtacctggaaagcccatgctgatttgggctcggtgccaggattggagccccctcacgaggacgatacttccttcttgcggactgccaggctgaggagacgcttctgtacagcatcaagggggctggggaggaacgaatttgctgccccagagtggtgcatttgcgcaccatcaagggtggaggggggcacctcggtgctctccaacgaatggggggacctggccaggtcacttcaggactgggcacaccggggcaacgagctcgatgggaatgcccaataaactctttgagaaggccgggagaaatgggaggaggggccacagatcaaaacagggtggagcctcaaggggccggtagaaattcaacaagcggcaaaatg

SEQ ID NO: 567794 - DNA, 654 bp, Homo sapiens
  misc_feature (14)..(14): n is a, c, g, or t
  misc_feature (49)..(49): n is a, c, g, or t
  misc_feature (64)..(64): n is a, c, g, or t
  misc_feature (319)..(320): n is a, c, g, or t
gtctgctttgtcangtagggtatcagactgactcaggataaagcatggnagtaaagccactggnatggggtttggtggtttttgtttttggggaaaggttttaaccgggtttcaaaattaggaaattttaaaaaaaatttcttgggccggttttaaagggtttgcccctttaatccccgcctttttgggggggccgggggggggaataccgggggggggagtttggagccttttttgttttaaaaggaaaacccatttttttattaaaaaaaaaaaaaaattttgcaaagggggggggcctttggcccccttttttttnnatattgggggggaggagggggggttccccccccgggggagctcttttggggggggaaataccccccccctctttctcccgcgggggggggggggggcgtcttgcttttttaaaaaaaaaaaaaaaaaaaaaaaaaaaaagtgggggggggggggggcgcgcccccccccccctccttttgggggggggggggggaataataaaaaagggggggggtgtttttataaaaaaggggggggagaaaaacaaaacaccccccccaccaataaatttttgtgggggggagacgccccttctttcctttttgggaaaagaaaaaaaatcgcgcgcccccc

SEQ ID NO: 567795 - DNA, 2049 bp, Homo sapiens
cggccactacctaccacatacaaacgccacctaacgcccacaacacctctacacgtctgcgcacttcaacttctcgtgcgctacacacctgccctctactgcctctacgcaaccactaacgcacccaaaacccccccaagaccacagcaactcaaacaccacgcccacggcctcactaaccatacacgcaacgtacttacaactctacgcgcctcgaaccgctacgcgggcacccttcctcccccgtaccacccaacacgcaacttaacccccctaacccccccctccacagctcacaccacccacaccctcctaacctgcttacaactccggaagaccacacccccaacaccccggcaacctcttggcccccaattcatcatacttctatcctgggcgccttctcccgaaacgaagttaccctctacacccccgcaacaccttaacagacactctaccctcctggccccgccttggccttgtaaccgaccttcccctacgggcaccgacaccccttggcgcccaacaaccacaatccccttcaacatccaccccccttcgctcccaaccttggccaacaacccttatcgggcgccccgacccccgccgcctttcccaaacgccgcaaaacccttcactccctaacactccctgccccccccctttctctcggcacacacacgcgcgcaaacgtcttcccccattcactccgctctccagaccccccacggtatcgcgctacacacttgcacgcgccccctcctccttcgctctccgtcccccccgcccctcacctggcgcccgcgccccgctcgcccgcctccgccacgagccccgcccccccgccgtccgtttgggcgtcccctccccccccccctcccccctgccccgcctccgggcgcgcccccctcgcgtggcccgcccccagcgaccccacttggcccccccacctcgaaaccgaaacgcaacaccaccctgccgcgccgcacaactacaacccgccccccacccgctccacggcggaacgcgcaccccacgacaccaacaaccccacaccgcctggccaccgcccacgccacgcaaaccagcgtcccacagccacggacgcacccaccccgatctaccccccgcacaccaagcagcagcgcgcctcccctacaaacaaaacacaccccagcccgccgaccgcgaaacgccactcctgctcccccgacgacgacaccacgacacagaggcgggggcgccacctcccgtcctctcaccacagcaagacggccgacccgccccgccgaccaccccgcccccccgcccccgcgtcgcgcgcacgacacctaaccaccacgcaccccaccccgcctacggccagcacgaccggcaaccccacgccactttcccccctccaccaacaggaccaaccacctcgggcggacccaccacaaaaacgtatcgatgcgtagacatcacgccgcccccccccacccacacacttgtccgcaccgcatatatcaccctactcttagaacttacgcccgccgccccccctcctcacatcatcgactcccgctctcatcttctcccaacaaatccacgcagcagttacttcgcactaaatcgacaatggtgtaggcgcacatcaccaactacacatcttacacaccctatctatcactacctctctcagctaatcataatcactatatcgctaactatgtcaacacctagatcaatccactaactctacatatattgtgccgcaaccgaacgcagcacgaacgacgcagcccctcactcaaccccaccaccagacccggcgcacacacaccgcgcagcggcgaggcggcgcgacgaaatccacaactcccagcacccccgcgccgagacgctcaaccgcgaccgcaaagcatccagtcacaggccgccgcaccccccacccacacaccgcgggcgtcccgcccgcacgcgcgaacaccatctctccttaacgcccgacctccgccagcgccacacagccatcacccccgtcgcctatctctcccacgccacgagccc

SEQ ID NO: 567796 - DNA, 170 bp, Homo sapiens
gccacagagcacaagggtgacggtccttcccatggtgtgcaaagccaccgtggcagttttatcaccgcaacagcacatatgacaagctcacgttttcaagagtttccatgcgtccagtgatgaccggaattaatcatgtatggtgtttaataaaacacacagcgtaagca

SEQ ID NO: 567797 - DNA, 344 bp, Homo sapiens
cgatcccgttgacggggtctcagaaggctccacggtgggtgataatggataaaaggttgtgacagccgggcacggtggctcacgcctgtaatcccagcactttgggaggccaaggcgggtggatcacctaaggtcaggagtttgagaccagcctggctaacatgatgaaatcctgtctctactaaaaataccaaaaaatcagctgggtgtggtggtgggcacctgtaatcccagctacttgggaggctgaggcaggagaatcgcttgaactggggaggtggtttcagtgagctgggatcatgccattgcactacatcctgggcaatagagcgaaactccgtctc

SEQ ID NO: 567798 - DNA, 333 bp, Homo sapiens
taagggcaggtagttggctgactttgaactatgaagaaaagccagaaacaaaatggcagaatggtatgactctgggtgggcttagggacgctggtgccagaggacttggcttgaacccgctccaacacttacaacctgagtgaccgtgagaaagaactgtaactcctctaaacttcaagttcctcacttctcaaataagaacgtgaatagtacctccctcctagagttgtgaggattgagttagaaaatgctagcaattgttatgccctaaggaacagcacaagatacaataacacgtgataatgtgtgtcgaaggtgcagaaaaaaaaaaaa

SEQ ID NO: 567799 - DNA, 570 bp, Homo sapiens
  misc_feature (32)..(32): n is a, c, g, or t
  misc_feature (41)..(41): n is a, c, g, or t
  misc_feature (292)..(292): n is a, c, g, or t
  misc_feature (296)..(296): n is a, c, g, or t
  misc_feature (447)..(447): n is a, c, g, or t
  misc_feature (449)..(449): n is a, c, g, or t
  misc_feature (484)..(484): n is a, c, g, or t
  misc_feature (493)..(493): n is a, c, g, or t
  misc_feature (498)..(498): n is a, c, g, or t
  misc_feature (515)..(515): n is a, c, g, or t
acctattttcacaggggacgtttacacctggnaaactgacntttcattcaccgcagcccgccgggcgtgccggcacttcacttttcaccccctctgactcctctttctttgaagctaagagagatgattttcatttccagcaacgttcatgaggctttctgggcactcgcccgcctcggcctcccaagatgctgggattacaggcgtgagccactgcaccgggctcttctcacccactttaagctttcttccatccctaaactcctctgtgtatcctcttccaacttcatgntacngcttaggggtgcatttgcctctcaaaggccttttcttacaaacagtgcatttccagactttcaggagtccgcaggtgtctaggacagccgaagacccaacactggtctttaaaatttccatacgtattgttttccacgccactgacgcagncntggacagctcctttgtggactgattgtcaggtcanccctgtganctgcntgtatacatctagatgngctggagcaaatgaaggacacagaagatgacatctacatcgtgatctgttcctgt

SEQ ID NO: 567800 - DNA, 207 bp, Homo sapiens
cacgaggataacaacctgtagagcccgttttaaattgttgtttatagacccatacctgtagcacccatatttctagtaagaattgagttttcaattacagatagattagaaacatgctactgggtgcaatcttagatcacattttcaatatgcctcattccacatatgattgagcatatgtcattaactcacaaatgcactttctga

SEQ ID NO: 567801 - DNA, 453 bp, Homo sapiens
  misc_feature (25)..(25): n is a, c, g, or t
  misc_feature (33)..(33): n is a, c, g, or t
  misc_feature (97)..(97): n is a, c, g, or t
tgctttataggagaccagttgatcntgggaaancagcagtcgtgtgagctgcagggctttgtgcagtcccagcacccagttagaacagcctctgtgntgggccgggaaggtttctgagggcacaggagtctcagtggatgagaactgagattgtctgaactcagaaacttatcagggaacccgtgacctgtctttcttagagctgcccctttcatcttgcttaaaaaataaattctcagctcatgtgtcagtctgtttaacccttgagaggatgttcccagtgtcacgaggcattcaggagcgactagtgagctgtgcctgtcctgatctttcttaagttccttcattcacactaactctgagacagatgagcctgtatcagcaaataaccacaggagcaaatctaatctcatagtgaaaaagtacaaatggcattaaatcattttcaatgca

SEQ ID NO: 567802 - DNA, 196 bp, Homo sapiens
  misc_feature (46)..(46): n is a, c, g, or t
  misc_feature (64)..(64): n is a, c, g, or t
  misc_feature (111)..(111): n is a, c, g, or t
atggcgagactatagccaaggattgactgagctgtctgagcgctgngcccagtacaagaagganggagctgacttcgccaagtggggttgtgtgctgaagattggggaaanaccccctcagccctcgcaatcatggaaaatgccaatgttctggcccgttatgccagtatctggcagcagaatgggattgtgccca

SEQ ID NO: 567803 - DNA, 369 bp, Homo sapiens
ctttaggagtcaggatggctgaagacatcaagactataatcaagaactacaaaactgccccctttgacagccgcttccccaaccagaaccagactaagaactgttggcagaactacctgtacttccaccgctgtgataaggcaatgacggccaatgggggtgatgtctccgtgtgtgagtggtaccggcgtgtgtacaagtccctctgtcccgtgtcatgtgtctcagcctgggatgaacgcatagctgaaggcacatttcctgggaagatctgacctcgccgcccacctctcctctgttctttgtctttctcccctgatagaaaagggggacctcagcatatgatggtccttaccctgggaccctgaa

SEQ ID NO: 567804 - DNA, 506 bp, Homo sapiens
  misc_feature (40)..(40): n is a, c, g, or t
cccaaaaacccatagtgagacccagtctctttaagaaaanaataaaaaagaaaaatcctaaccaagaattccatatcctgccaaactaagctacatgagcaaagaagaaataaaatctttcccagacaagcaactgctaaaagaatttgttatcaccagactggccctacaagagagtcttgagagttctaaacatggaaatgaaagaatggtgacacctgctaccacaaaaatacacataagcacatagcccacagaccctgtaaagcaactacacaatccaaactacagagcaaccagctaatgacaccatgttaggaataaagcctcatgtctcaatattaaccttgaatgtaaacaacctaaacaccccacctaaaagacttggagtggcaaattggattaaaaacaagacccagccttctgctgtcttcaagagacctctctcacatgtaacaggactcataggttcaaagtaaagggatagggaaaaaaatctatcacac

SEQ ID NO: 567805 - DNA, 850 bp, Homo sapiens
cccgtctctactagggatgcaaaaaaattagctgggggggccaaattctggctaatttttgcatttttagtagagacggggtttcgccatgttgcccaggctggtctcgaactcctgaactcaagcgatccacctgccttggcctcccagagtgctgagattgcaggcgtgagccaccgcacccagcccaatgttgttcactttaaataagcaggaaggaatgcaaggaatgtggtagtttctagaagctagaaaagtaaaggaagtagattcccctgtagagcctccaaaaaaaaaaaaaagataagacttttcctctaaaaagtaacgcagaacctgcccacacctgattttagcccaggtgagacccatttgggaatttctgaccttcaaaactgtccaataacaaattggtggctttaagccactaaattgcggggtaattggttacagcagcaataggacatttaacacagtatattatactaagtggatttccagatgttaaagtaaccttgcatttcctatgataaatctcagtgggccagtggtatgtaatcctttcttctagtggctggattgggtgtgctggtgtcggttgagcattttgaagtctacattactaaaagatccttgtctgcagttccttttcatgtgatgtcttggacgggcttgggtatcagggtaccacgggcctcacagaaagagttggaacagtgtttccccctttcttcttatagccaacccagcttggtcatggttggccatttaacatggtatgtctttgtccattcttttactttcaacataatctggacctatcttagatggagattcccctacattaaca

SEQ ID NO: 567806 - DNA, 398 bp, Homo sapiens
  misc_feature (191)..(191): n is a, c, g, or t
cagcccaatttttgtatattttgtagagacacagtcttgttatgttgtccagactggtctcgaactcctgggctcaagggatcttcttgcattggcctcccggagcacttatttacaggaatgactgcatgtgctgttgtgccaaactttctggaaatacgtggttaggaattaatgagttggcccgggcncggtggctcacgcctgtagtcccagcactctgggatgccgaggcgggtggatcacctgaggtcaggggttcgggaccagcctggtcaacgtggtgagaccctgtctctactaataatactaaaatcagaggttgcttgcagtgagccgagatcataccattgcactgcagcctgggcaacggagcgagactatgtctccacacaaaa

SEQ ID NO: 567807 - DNA, 163 bp, Homo sapiens
acacttggtgacacgaactactacttgactaactgtccgtgacacaccacgcagacatgacacacggacggccacgacttacctcacaacggacgttcttctgtactactttttactacgactgcacttacccttttaaccttactgttacattacactgtta

SEQ ID NO: 567808 - DNA, 1475 bp, Homo sapiens
cggagcggcggcgggcgcagctagcgggtcggccgcggagccggaaggtgcagctcggcttccccaggacacccgtacacccgagaaacgacaatggcatcaaaaaagcacgatggaaaagatacgaaatgtcctcaagcggggtagagacacagccaacatccgctcagggaccccatgcgcgtacagacgaagacgccgaccacagaagaagggcctagagagacggatgcagggcacacaccaagagacaagggcggctgacgtgcacgaagacgaaggcaaatcaaggagaccgtcgccaaatagacaccaccgggcaggctaaaggcaccaaacgcatccacaaaacgaggccagaccaacacagcagaacgcgtcaggagaccgaacaacgaccataaccaatagaccacaacaagccaacacgacatatggagaaaagcaggatgacacaggagacaacacgtactatagcacaaagagagaagctaagcagagaccataaaagaaccagggacaccacaaccgaggcacccgaggcgccgcaaaagtggacccacacggggacacaacaaggggcaccaaacgggaacttcacggaacgcactcaacccagccacaccagagacgaacatagacgcacgaccaccccgaagaggaagatacacacgagcacatccaacacaccctaacaaacgtggccacacacgcacgacagagaggacaccaccccaatacgggcccccgcccgtacacgcaaaagagaaaggcgacgaaccgagacaccgctaaccgacactacactacctccgacacacgcgcgcaccacacaactaggacaagacgaccccaccgcgcacaacgaaccccacggcgcacgctcgcagacaccaacagacagagacaagccacagactaggcacaacacacaaacagagagcgcgaacaaaccccgagccgatcaaagcagccaaaaaggagcacagcgagcaccagaggagaggagagcacaccacacaccacaacggacagcaaccagaaaccaagcccatcgctgtcacacacgacacgacagcaagccacaccaccgcaagcgccgccagaagcacggacacaaagacaggcagcaaacagcaggcagcacagagaacaccaaaatcagcgacagcaccgcacggggcaagaaccacacgacagagcgcgggcagcgcgcagaagaagggctgacgagagagccggcggccgaagaagacgaggaaacaccgacccggcagagacggagcgcgagcaggcgagcacgagcggcggccgcggcgcgaacggcaggcgacacgcacgagaggggacgcagagaagcggcagggagcagaggcgggcacggcggcgagcaggcggcgacgcgcacgacagcaccgacaagcaacaaagacgcggccagagagaaggacacgcgacccaggcgagcgcacaac

SEQ ID NO: 567809 - DNA, 440 bp, Homo sapiens
  misc_feature (429)..(429): n is a, c, g, or t
tacaattaagtggtacattctgtcttctgtaaattatacctcaataagggcgatttaaataataaaaactgtgacaaatggttcattaatcagccatcatcagcaacaactgcttatattcagcctctgccttgaaaaaaggagctgtggctatcactggatatttaagattgtctgaggaagtgatgtgatgagggctttgctcaggacaggaaagatgctgagcaaggtcttggctggatagagctgaaaaaaaggactatcaaaatagaggaagaggtgtgctgagagaaggcaattcatcaactataattttgcttaagataacacattacctttgaatacatagaactgtatgtatatgtgtatttaggaaatttatgaaaatatcagaacaattccatacctctcaataaatcttactgttgnaacattttaaa

SEQ ID NO: 567810 - DNA, 1162 bp, Homo sapiens
ggcggagcacaagcggattgcagggtcagctcatgtcatctgagcctcccccagccaccacagtctccccacccatcatgcttcagtcggtgctgcatggacgaccactctcgagagcctgtgatgcgcttcaccatcacctcgtctgcgcggtgcctaacggtggtcccatatgcccatctgatcacagcgtcgaccggatcgagtgacctgtcattcggacagacgggtgcaggagcttacactagggactccctgtcgtacagaaggagatctgtcaaatggcttctgacccggctcctgatgggtccatggccttcatttactctcctaggcatgtatggtcaggtccccccgaaacattctttccgtgtccactaatcatctgaagttgtgagcaaggtggagcatggtagtgtccacagtgggcacatgcgctggactgcaggtcctccctaatacaatgttgtgctcgcatcctcaagcctatacgaatagagaatgcatgccaggtccggtgtgatgagtctgtctactccacgtgcagcccttgtgtctatcacatgggtcataccatgcactagaggactctgggtcttggaacattgttcatcaggctcgctaaggcagattgggtgggaagcgaccccatttgtcgctgttgcattggtggcgaagacgtttcgcgcgggacggagcgcagccagaacacttggtatgagtgacaattcgttccacaccgagacgggggcttcaagccgggcattggtcccatctcaaagtatctcctggaggacggggtatggggggcccggggatgtggggttgtggggtgttcccgggccatcaggcacagccgtatgaccatttggcaaaggaaccgtctcaccattctgaagagcatttacaagcatttaccaaagcgaaaaaaacagaacaccacacacacacacagcacatcccaagggcacatcaaattgccgggagatgccggcacacacgcagcgcgtgcggcaaacaggcgcccatgtggccatacgcgcggtgttccctgggacccagcagggtttctggggcgccacaggggcggtacaaacacggccgcgcacccccatatatgtgaggccgatactatcacttccagataaggccagggttaacg

SEQ ID NO: 567811 - DNA, 468 bp, Homo sapiens
  misc_feature (245)..(245): n is a, c, g, or t
  misc_feature (354)..(354): n is a, c, g, or t
  misc_feature (468)..(468): n is a, c, g, or t
tttctttttttgtactgttgtgatgattaaaacatttttttcccattcattcgccccggggagaccttaagaggtttcttttgaaaaaaaaaatttccggccctttaacttttcccaccttttcaccgggaaggtttttgtgggggggggggtttccgggggggggggtttttgaatttttgggagaaggggggggctcccccctttagagggggggggctagggcccaaagggggggctgggcngttaacccattttaaaaccccgggggagggccccttcggggggggaaactttctttccggctttttcccctacccacgggaaagggtggccccctgttaaggcccagtnccgggcggttagggccccagtttcccccttggggtgggaaaggggggggggggaagtgccccccggggttccacggctttttttttcccctccgggggggggctttttgtgttn

SEQ ID NO: 567812 - DNA, 231 bp, Homo sapiens
cgatagaaaaggcaatacgaatatgactgttgggctttcaatttatcttatatggaattacaaaatctgattaaaaaagatgcgtttgaaaatatcaaattatgcactaaaaaccactatttaataattttaggaaattttcaatatcattttgttgtgtttctagagttgttgttcctgaagaagaagtattgagagttttatttaatgaatctaaaaaactatttacat

SEQ ID NO: 567813 - DNA, 975 bp, Homo sapiens
ccgtgtcaggagcaacgcggggcggggtggttaagaaaaacacaaaagggcgtccaaacgcccctccactggggcccgggcgaggaaaacactctgtttggtgcccgcgggaccgcccgactaccctggctgcacggtgggatatccaacgaccggtgtcttcgcgtgcaagggacaaaagccgcctgttccgcgagagggcgcgccccactccttctcccacgcgcgcgcgagtgttggcttcaaaacgccgggggcgcggcgctccctcgcccagagacaaattgtgttgtattgaacagtgggcgggcgcgctcggtctcttttgcataaagatcccggggaagccttcttcttagtcgttgacctgaagacaacttcacaacctgagggcgggtcaatttcattttagcctccctctctacagtggtcgttgtcatgtcagcactcctgtgttgagatatatactcgaaccacttcgtgcgacatattggactgttccaccgtttgtatatacttcccggtgccgcgaccagacaacagtagctgtcttgtcaaaagaaaccatgctgctggagcagcgaataggggagagcgactctggagtgatgtcgcgccttggcggcggctgaatatagaagggggggtgcacaacacaagagagaggagtaaaaaggcccgcgtagtgcactcgaggtcagttttactagagaggtcacgtcgatactccgcagaggggcaataaagccttctctctcgtagccacacgtcacgagagacaacactgtggccaccccgcccgacggaatgtactaaaagtggccactcactggtgacgacgccaccacaaatgatcaggtcatgcacttcctcacctcacgcgggggcagaccacctccacgaccccaagaaatcgaccacaagtcggcgctcccttttccccttttaaaaagaaggaagaacacaaaaaaaaca

SEQ ID NO: 567814 - DNA, 160 bp, Homo sapiens
ccaccgcaggtttggccaccttgagaagctgcgaagatgggcggagttaaggcgtgccgcttgttaaaccttgcctcttgggcccgggggcgagcagccccgggaaggccgcagttcattcttttggacccctcccaggagaaggaaaaaaaattattct

SEQ ID NO: 567815 - DNA, 160 bp, Homo sapiens
  misc_feature (12)..(12): n is a, c, g, or t
  misc_feature (150)..(150): n is a, c, g, or t
gaagtgacaggnaagctacaggtgtataacaaatttgtaaactaaccaagcacaatgtggcagggcctagctgctacaaagaagacaatttaacaaatactcaacgcatgacaaaaaactcaggactgcatttgcactaatcgataacgngtcatttaat

SEQ ID NO: 567816 - DNA, 200 bp, Homo sapiens
gcccaaataaagtataggcgatagaaattgaaaccttgcgcaatagatatagtaccccaagggaaagatggaaaattaacaaggctaatttaggcagggcttacccctattacctctggaatatgtgattaactctggaatatactcttgcacaggagagaccccaagcgctagagcccccccgaaccccagcagcggcg

SEQ ID NO: 567817 - DNA, 178 bp, Homo sapiens
  misc_feature (60)..(60): n is a, c, g, or t
atgttcagagcatgggtatttgtatgatactataatggtggatatatgtcattataaatntgtccaaaatcacataatgtacaacttcaagagtgcatcctatgtaaactatggactttgggtgattatgatatgccaatgtagattataacaaaagcactactctaatggggtggat

SEQ ID NO: 567818 - DNA, 336 bp, Homo sapiens
  misc_feature (29)..(29): n is a, c, g, or t
cccataccaacacacaccccccaaacgantcctccacattaccagccaccctggttagaagaaaactccttgggaactcgggccgtgagaagcatccttcctgatcatcggggggtggaaacatccttatcgcaccctcccgggcaaaggcccaacagcctgactgcaggaacatccttgccatatcctgccgggcagcaagctctaccgcccacacccctccttcccagtcccatgatcaccccagcctgggagaggcagttggagctgggggtgagctggattcctcctctgcagggtttagctagtaataaaggagttgctgttgaagccgtc

SEQ ID NO: 567819 - DNA, 327 bp, Homo sapiens
agcggatgaacggattggcaggagattatagctctgtatgagaaggacaacacctacttagtggaagtctctagcctcctggtttcgataatgtcagctatgagatcccctcactggagaggaagcagattgccaagtgccagcaggctgcagtcaagaatacgagatcgcaagggaggaggagtgtgcaggccgggtgctgccgagatgcgggagtcagttctacctagttcctgcaagcacgtatggctatcacggcgcgaaaatgtccgaggagaactggtggccctggtgaaggacctgcactgagtcagctggctgagattg

SEQ ID NO: 567820 - DNA, 1422 bp, Homo sapiens
ggctagccgatgaggaggccgcggaggggaacccggcccccgtggccccgagaccgactgagggagacgacctgcgcgagggccctggggcagtcatggtctcctagtcgacccaatctccatgcttctgagtcctgctctctgctcagagctcccctgctcgggtgtctggcctgctgctgatccctccagtacagccctgctgtattgcgtgcgcccagcaaaatggggggaccggcctgtttggcgtgaggccccagtgtcaggtcctgtgcaaggactgcagtcggctacttggaactaggcgaagaagccctggtggagctgcttgccactagtgctggggccaaaaactccgcagcaacggttgcagtcgcatcaccatttaactcggaagggctgcattcagattcgtcctggaggatcaccttcattgggagtctgcgggtcatcggtgcccactccctgtggtaggcagggctcagcaacttggcaaggcacttaggagatccaggcttctaatcaaatccggaagaattggtcccgtcaccttgtgcaccatttctacgaacccaattccatcggatggttctcgtggtcagaccatttgtccagcttccttaccttgggggcttttacccagtctgcaattgggtctctcccctgaggttgttgttggcccgcctgggtcacacgcagggaggcgcaatgtgcgtcacgagccatccccgtacgctggagacgtcccaacctttcctcgccttttggccaggcccgccggttatccttcccgaaggagtatggggccgaaagggggttttggggaaaagcacatggctagttaaaaggcctagagcacccccgcgtatagaccttgaccgcggaaaatcaccactcggcggaagtgcaaatccttgaatcacagcgaaaacccatagtgctccaggaaaatgctcacagggggccccacacggggacacatgatagcttccccccaccacagggatggaataagaggtagtcctacccccatggtgagcccatgtagcaccccttgctggtcccggtgcacacccaggctgtgagacggaataaacccccagagagtttcttcgtggtgaaagcacccactttgtcgtgcagcactattcccctgggggggtggctccactacgaaaaaagtcaatcgacttactgactgaggccaacggtgggtagctccacaaaaaacgttgctgctcgtccaccccactgttagggaaggagtgtaaagataatatatccccccgtgtcagccaatcgcaataatcccccctgcatgaaagaaaacatggctcgtatcacacgccgctatgatataccctcgtgccaaacaaaacaagatacttgtcatacaacacaaagaggtggcttagaccacat

SEQ ID NO: 567821 - DNA, 1292 bp, Homo sapiens
ggctacctgagctccatcctcagggttctttgtcaagatccctgtgccgaacaagaactccgactggcattggcatacagtgcgacttacgtcatcattcgcccctcggtttcatcagccgcatgtggaccgaaactacttggcggtcagtcgacagtaaatacagtagttccttcctggattctggttggagagatctgttcagtcgcttcggagccaaccagatggtcagagctcaacgtggacgatgcgctgagggtcgaggtgatgcagattacgtccaacggggcagccacgaacaacaccagcttcccgtctgtgccagaagccaatgctgacgttgccggcataacgttccctgatgaaacgactcctatcagcaagtttattgcccgttcattggtcgtggctgaatggtgggtctggttgaacgagtctcgcctccagaggctagtgcgactgcgggcacggactatcatccctgtcgggtactagccctatacgtggtagcaccgttccaagagtcatccatgccatcctagtcgtcgcggcccttgagcactaaggaaggcctacgggcaaagccctcgcttcctccctatactatagagtcagctgcaccccttggcccaatcccgtggggaggatgccccattaataaggcgcaattattgggcgaccgttgattggggccacccatgggtggaactaaattgagatgggggctaccccccgaggggaggcgggacggaaactaaggggcaatactgaacggaacaacccagtctccaaaggaaaggatcgatcagaggaaactggaccaagccgaccaccaaaagcaccaggagggtccggaacagtccccaagaaagtgcggcgagggcaggacgggatccccggggggccatgggggaccaagaggcagtggggagacagcagagaaaaaagacaacaaaaaagattgccacacgagataccggaaaacaaacacccccaaggaaaacagagggtagtatacaaaaacgccagggaggagaggaacaagtcacacaccaagagaaccaccaaagcacgcaaaataaaaaacataaaaaaggagaagcggacacagacgaacaagggcacacaactatcacacgacggtaaaaacaaagaagaaaaagaacaagacaaaagagaccaaaaaaagacgagagaaaaaaagacgagggaagaaacaacaaaagaaaaaagagaagaaaacgcaacaagagaaagcaacaaaaagaaaaaagacgacactagaacaagag

SEQ ID NO: 567822 - DNA, 173 bp, Homo sapiens
cttagtctcacatgcaagcatgtagtcttcaccatggagaatgtgggtttgccatttctcaaagcttatttcttattacattaagaaaaagaactgatttatcagtctagtgtttcattttaaaaacatattatagggtgggtaacttgcataataaggtatttggagaccgg

SEQ ID NO: 567823 - DNA, 310 bp, Homo sapiens
atagtagaatattagaatatgtgggctttacatctaacccacagaaagcccaccgaaaatgtactgtgtatcagatatccactcatgtgtactatgaaagttccatttatgccccattaagtcaaaagtaaattatagtaagctaaagaactgcatatttacatatggatgaatgtccagtatatctaaataggcaaataaatggcgcatcctcatctacctatataaaaaaaatagcacatatctttccagcattttgccatactcctcaactgtcaagaagcaggtatgccaggtttcaaggtttcac

SEQ ID NO: 567824 - DNA, 954 bp, Homo sapiens
  misc_feature (217)..(218): n is a, c, g, or t
tggtggtaagggcccaaactggctgcaaacagaaggggtgatagcgcctaaccttagtgttaaagttgggattagggggctatttcctgctagggggtggaagccggatttgagttaaaaaaattcccgtgcttacaactatattatggtgcttgagtgtggagtatagcggctgtgaaactgtggggtgtgggcgccttctatatgtggcttgagnnggagagctccaggggtgtggtaacaccctaaattggggggcctagaattgtgcccgtgcgtggcgtcgcatagagagggagagcgtcctctaagtaatagtgtgagggcgtgtggagcgctgtgtggaaatatagacagttatatagaaaaggggctctcaatatgtgagtgtaggatggagcgtcctccagtgagagagtgtggcagtgtgtgtacggaatctcaatcaaccaatccttttccttacaagggaaaagggaccggaccctacaattgtacaattcgcaacggcgtgggaggcacgttgaagattagctgagttcaacaacatataatataatatgaagtgagctgtactgtgatcatgatgagaagcgaatcataatagaaacattatgagatccgaatcaacaaccaatcaataacgacgagaaaaagaggagacagccataatgtacaaaaaatatatcttcgtattgatagatagcgttgacatacaacttcggatagttggtgatgtgcaacacacaaaaaatcaatccccacacgccccacggactaaattttaaaatatttattttaatatccttttgtcccgacgcgcgctatcctgtagcaccccgataaaacaaaaattcattaacttattttcacgggcccacagggggggacgggagtgtatcagagcacctatgaattagtagggggatgtgcgattatatacaaattgacatt

SEQ ID NO: 567825 - DNA, 172 bp, Homo sapiens
tatccccagtaggtactgggaaccaaggggcattgaaaacaccatttggagcagttaccccaggagaaaaccagctcccgcttcctctaacagacccagtcaattcgaatgtcaagaccttgctgttccttctacgtgagacaccatgtcacaaacacacactccccgtggg

SEQ ID NO: 567826 - DNA, 240 bp, Homo sapiens
tcgaaggccgcgaaaagaccagagtgccccgcccctcatccccgaagtctccaaacccctcgtcggaagaggtgagcaagccttcacgatggcggtggcggagctctgggagacgctgaagcaggcgatcttagcgtacacggggctgtccccgacggccttcttcaccgccgtggcggtcgccgccgcgctgtaccacgtcgtgtcggggatctttgcgccgccgccgcctccccggca

SEQ ID NO: 567827 - DNA, 113 bp, Homo sapiens
cggagcgttctccaggagcccttagagaccgagtcccggcggcgacggcggggcagcgcaccggcaggcggattcattccacttaaaacctgaaaacattggaccacacagag

SEQ ID NO: 567828 - DNA, 489 bp, Homo sapiens
  misc_feature (114)..(114): n is a, c, g, or t
  misc_feature (118)..(119): n is a, c, g, or t
  misc_feature (131)..(131): n is a, c, g, or t
  misc_feature (135)..(135): n is a, c, g, or t
  misc_feature (146)..(146): n is a, c, g, or t
cctcataaagtgaacctaattgcttagccccaagaattttgttctctaatgagcctagtgtgggtaaggctgcacctggtgaaggggcagggcaaaactcccgggccccctttngggnncctggggggggnaaanggatttctttntccagcaaggaaaagtctcctgggacctgaaaggcacttaacctcacccagactgccgctaaagaacaatgaacttaggagtcttcgctgtgctcctcttaagtttgtaagagactgtaataagtctcttactctctccgggcctcagtttcctcatctataaattgaagaatctagaccagataagaggtctccagcctggcttgactagtggaggaccccttttaccatgtatactcttgccaacaccttggaagtattttatcatgcaataatttgtgtatgatgtgtaatagagaagggattgttaaataaaacttattttagatccatgtataacctt

SEQ ID NO: 567829 - DNA, 1534 bp, Homo sapiens
  misc_feature (252)..(252): n is a, c, g, or t
tttaagaacccttcatcaatagatgggagacatacagaaatagtcaaaccacattctacaaaaggccgagtatcaggcgggggttctcgaagccaaagggagtgttgggatgtgttaaaggtgaaatatattataggtgggcgggatgtgaacgcagaaataggtgagggaaagtgtgacgccaattaatgtgcacgggtgaagctccgggggaacgcctgtggtggcttacacaaaaagtgtgtgagcccnggaagaagtgccgcgggcggaaagagtgggtgaagaggggagacacctcgaagagttcacctcgtggaggcttgggagagaggagggtataaaaaatagagagcgcctccgagaataaaaagtgtggataagtggagacaaggtgtctctgtgaaactataatgtgtgcggttctcaggagtgtggaatgtctctctcaatatagacactctcagtgcggtgagagactctcagaggtgtgacagtgtgcgcgatcactctcctgtgagagctgcgagagatatacaatcagcgggagagtgtgtgtgtctatgaggcgaaacggtgggagacctctcctctataagggggggatattaacacgggcgggggggagagaaagtcgccgtgtgtgtgtgggagtgcggccaaagtgtggcgcactctctctatacaacgtgtgggcgagggcggaaacaaggggcgcacattaggcggcgtcgtgagccacgtggtgggataacacaggggtgcgccctccgaaaaaaaaagaataacttcccgtgggcgacaacagacaaaacacaaaaaacaccttctccggtgagaagggggcataaaacattaaaacaagttgacggagggaatatataatctctccgcggggataaatatcggaaaggagggggccccacatatattgtggggtggcacccgacgatggggtggtgggccggtgttggagtgcgtgggtggcgagccccactggtgcgagaaaaagttggggtagccacaaattcacccccacaggaagtggtcattacacccaatctcgcggggggcccccaaaaccccaaggtgtgggggcgaaacaataaatgtgggggagtaaacaagaagggggagacaacgagagggaccaacaagaaaaaggggccccacaaagctacacatgaacagaggacaagcacgcgtacaaagaggcagcaacctgtggcacaaaacgtgtgataaaccaccccccaacacaggtgggccatagaggcccccgcaggaagaggtacccaaacaacacagggaaagcgggggcgcccaaataatggcgcgaaacgggggggacaccacgataactaggaaaacactattcccgaaaacaacgtgcggggagggacaaccaattaatcatctaaccccaccgggaggaaattctcccccccaggaagaaaagaggaccaggggaaaaaaacaaccacgagcccacacccaacaagaagacacaaaaccgctgtcgtgagaaacaact

SEQ ID NO: 567830 - DNA, 444 bp, Homo sapiens
cccacgccgttcccggcaagttaaaaacgggggcttaccctttccccccaattccccaacttaaaggttttccaaacaaggtgggtaacttggaaaccccttgccttccccccaaaccaaggcggccccaaggaacttttggttggggggttcttggcaccaaggtggcccttggcccttaaaccctttttgggcccctgggggaatttaattgccttaaagtggcccacccaaagaaagggggacctggcgattcaatggaacttttccaataaatggcctcaataacccccaaatttccccaaaggccttttgggggaagaaggaaaagccttgggggaaaggccttgttttgggggaacaaggccttgccttggtaaaattttgggctttgttggaaggtggaatggttcaatttttttctttgggcccaaacccaacaaa

SEQ ID NO: 567831 - DNA, 875 bp, Homo sapiens
cgcacagtggtcggtgcagctgtcgccgcgtgttcgtatgggctgttccgcaaggttggccctcagcggtgcccgctttggagaagcacacatgggactggccccacagtcccagcttttttgccccccaggaaattgcgggggaccatatacaaggcgggttcctaaaccacgactatggggcccttaataacctttttcggcggaaccctgggacccgctttccggaagacccctgttggggttgcgccccgtgtcccccagcctgagttgccccttcaaccaaaacaagggggctttgtttaatagcaggtgccccactgggacaaagtgagtatatcatgtacacctgggaccaaagcggtgagcccccaacgcgagggtgaaaaaaatatgcgggtggcaattgcgcacgtagcaatatcggcgtttttatacatagcatttttctaaagctccaaaggggtcttattttgttactcggttgtgaaaaaaacaggacaccccgccttgtttggtcctgttgaatctataaaagctatgggggtgcacccccttctacacgctaacgttgctgtccccactagtgcaaatctcctaactgccttttttcctatttcaccaaccactggtgtcccccccatgttgtccaaatcgacacacaggggctgtgttaaatggcccgctcctcgtcataaaccaccgtcaacagttgtgccccgaaatcattatcgtctctagtagacagagacttggtatacttgggtcagaggacatactccccggggagaggttgttgaagtatgtacctcccccccctgggggggggtgtttttttgcccaaaaaaaatgaactctaacagtcccacataaca

SEQ ID NO: 567832 - DNA, 369 bp, Homo sapiens
  misc_feature (15)..(15): n is a, c, g, or t
  misc_feature (28)..(28): n is a, c, g, or t
  misc_feature (43)..(43): n is a, c, g, or t
  misc_feature (98)..(98): n is a, c, g, or t
  misc_feature (140)..(140): n is a, c, g, or t
  misc_feature (286)..(286): n is a, c, g, or t
  misc_feature (294)..(294): n is a, c, g, or t
  misc_feature (328)..(328): n is a, c, g, or t
  misc_feature (331)..(331): n is a, c, g, or t
tgtggtggaaaagcncctgtagtttgantggggtgattaccanaaatatacatgtgaaatgttagaagtatttatagcctgaaacatattagtatggnggtatatacatatttctgactaattaatttcgcccatgtttncccaggctggtctcgaactcctaagctcaagtgatgtgcccgcctcaacttcccaagtgctgagattacagccgtgagcccccatgtccggcctgtttttccctatgcatgcataattacgatcaagtttaatttgtaattgggcncattaagngattaacaatagctaacaaaatggaacaattacnacnatatattgtaataaaagttatgcaaatgtgaaaaatat

SEQ ID NO: 567833 - DNA, 130 bp, Homo sapiens
  misc_feature (109)..(109): n is a, c, g, or t
agtgacatgtgtgcttccccaggacactgtgacgttgggacaacagcattatttgtggagtgcaagcctgctaaagcttaaggcatcatctacgctgaaactcacaacncccatggacggattcaccatc

SEQ ID NO: 567834 - DNA, 245 bp, Homo sapiens
gctgcagttgtcgtgaggttgtttccggggattagtttgtaagtctgagtggactgagtggggaagatctgccttcaatgttggtgggtaccatccaacaggcgggggccagagagaacaaatacagaaggcaaattggtctctaagaggtaggatagatttttcttcttttttaagattgagttttgctcttgtggcccaggctggagtgcaatggctccatctcagctcacgacaactgcagc

SEQ ID NO: 567835 - DNA, 204 bp, Homo sapiens
  misc_feature (149)..(149): n is a, c, g, or t
tcagtgtgatctagagatccccggtacgagcggtctgaggtgataccctttcccgagccttatatcttggtatatgccaacgatgctgccatttctgagccagagagtgtggtagccagcttacaaggacacaggaatttccctgctgnagctatgcccaaactggatcgccaccttagggctgccctttctacagaaaggcgg

SEQ ID NO: 567836 - DNA, 749 bp, Homo sapiens
cggacgcgtgggtcgacccacgcgtccggttctagatcgcgagcggccgcctttaattatgtttatttattttaatttatttttttagagtgtacctttaaaaaagttgtaaaaagatttggaaaagaatagggggatttaaaaaacccctcaattaaaaaagttgggtaaacctgagtaaaagttggtgggttaaaaaaattgtgagtgagatccccagagccaaataaaagtgggtttaagaaaagattttataatagtgggtgacacaatctcgtggaattcaggggatttagatggaaaactcctttagagaggagtattagagcagcagttattttaatacaggttatatcaggttatcaaaactttaccgggtggtttaccgtacttaaaaattaaaaatagcatagtttgttcgcggggaataataaaagagattcttggaaaatgaaattgtgccgctttatttggagaaatacttgttgcccaataaagtatacaaggttgtgaaagattggtatttcacaaaaatatgtggggaacggaggaataaatgtggtaaggacaaagatttttatatattgctattctcaaaagtgggaataggggtcccacaaaaagttatatttggttgacagacacaaaatacatctgtgggaaataaatagcgtcgccccttgttgttcacagagtataagtaagacgacatttgtttcctttgcggattatcacttcagtaattgtat

SEQ ID NO: 567837 - DNA, 858 bp, Homo sapiens
  misc_feature (858)..(858): n is a, c, g, or t
cgcagtggtcacacctataatcccagcaccccgggaggctgaggcaggtggatcacgaggtaggagctcaagaccatcctggccaacatagtgaaaacccatctttactaaaaatacaaaaatcagctgatgtggtgacaggcacctgtaatcccagctatgtgggaggctgaggcaagagaattgtgtgaacccaggagtcggcagtttgcagtgagcgagatcgcgccagtgcactccagccttggttgcaatcatgggctcactgcaggctcaacttcctgagctgaaaggatcctcccgcctcagccttctgagtagctgggaccagaggctctgacaacacatacttggccttttttttgacgagaggggggattggatataggcgaggggtactggtatcgtacccaggttgtctcaataattaaggcctcaagtgatcctcctgatgggacctcaaaatggctggataacaggcgtgagcaacaaattcagcatatttgcgtacgggagggaaggaaagaaggtggtaataagtagttcacaaaaggagggacgaaaggcgcaccaccaggctagcgacacaggggaggaacacctggagcaagggaaaccctgcgcccaaaggtaaaaaggaagtcacccgcaagaaccgaacgaggacacgggtggggccccaccggagaatagtgtcaggaaacacggtccaggtggcagtgtagacaagaccggccaaaaacaaaaacagcgggcccagcagaaacaaaacggagcacaagagaagagcgcagcagaatggtcacaacggacgcaaggcgacgaacagaacggggaagaggggagccgtgcgcgccn

SEQ ID NO: 567838 - DNA, 504 bp, Homo sapiens
agcggggtctggaagccggagcgggccgagccgccaccgcggccggagctgtcccttagccagacccggcgagacacgagcggcgggagggaggcggtggctgcgcccgtgtcccgcacgcccgcacaagcgtcggactgcggaccggtgccgagccatgtatgcctgagccagtggaggactgtgtgcagagcactctcgccgacctgatatccaccctttgaggtaaacagcacacacaacctgattcgaggcccagagtgatcacaaggacagcgcggacgaagcgactatacatcgcgcgagcgaacgcaaccataggaacaggtaaccaccagccagggaaacgtccgacaagccataacccgaagcacaaaaagcaaaccgtgacacagcagccaaaaacgagcacccagcagagcgaacagccactcggcgaccagaacgatacacgaacgcaacatacagacaccaacaccaaagaacaacggtgacacacagaaa

SEQ ID NO: 567839 - DNA, 241 bp, Homo sapiens
ttggtgatctctaaagaattcccagagtactcaggcctgacacgttgataccctgctcagatcagagggtgctggtgtcacagactcaccaagtccagagacttgtcttccacaagcacgttcttaccttagccacgaagtgatcaagcctagacttactatcaggttgaactcgaagatatgtacagggtattaaacaaattccacggcgaacagttcatttcaatacaaggtcagaatc

SEQ ID NO: 567840 - DNA, 227 bp, Homo sapiens
  misc_feature (18)..(19): n is a, c, g, or t
  misc_feature (21)..(21): n is a, c, g, or t
  misc_feature (24)..(24): n is a, c, g, or t
  misc_feature (28)..(30): n is a, c, g, or t
  misc_feature (34)..(34): n is a, c, g, or t
  misc_feature (39)..(39): n is a, c, g, or t
  misc_feature (56)..(56): n is a, c, g, or t
  misc_feature (70)..(70): n is a, c, g, or t
  misc_feature (73)..(73): n is a, c, g, or t
  misc_feature (76)..(77): n is a, c, g, or t
  misc_feature (89)..(89): n is a, c, g, or t
  misc_feature (103)..(103): n is a, c, g, or t
  misc_feature (106)..(106): n is a, c, g, or t
  misc_feature (153)..(154): n is a, c, g, or t
  misc_feature (157)..(157): n is a, c, g, or t
  misc_feature (163)..(163): n is a, c, g, or t
  misc_feature (169)..(169): n is a, c, g, or t
tcggggtctccgggaagnngnggngccnnngganggggnggatgcggccgtgagcnggggggggaggggnggnggnngcctgccactgnactcagacccaggnagnacaggattgtccatcctccagcagctcagtgcaacggttgtgaactnngtntgtttnagagcntccacaccatgagttggaagaaggtggtgaagtcggtggctggctgtgctgatgacgc

SEQ ID NO: 567841 - DNA, 379 bp, Homo sapiens
gaatggctaaattcaaaagggctgaaactaagtgttaacatgatgtcggagaaattggaaccttattctgctcttgggaatgtaaaatggtacagccactttggcattctagcagtgtctcagatagttgagcctagagttgacatgtgacctagcagttctatccgtaagtacgtatacctaagataaattataacataactgcacatgactccttgtacatgaatgattatagcaacattattcttaattgctatacggtggatacagaccaactgtacatcaagtgctgccagatcttatgatatccatatgatgcaatattattctgccataataaggaatacggtactgatacatgctacaacatagtgccttg

SEQ ID NO: 567842 - DNA, 159 bp, Homo sapiens
gcgtcgttctagaggatccctgtctgcttaggactagctattcttttttctttactttcttttttcagccagagacttgctctgtcaccaggctggagtacgagtggcgcgatcttggtcactgcaaactctgcctcctgggttcaagcgattctcctg

SEQ ID NO: 567843 - DNA, 145 bp, Homo sapiens
aatgtgagcgtaatgcgcggaatggtgaggagactcgagtactctgaggctgaggaggtaaacagagacccgtaaattgtaatagcagtgttgaattatttggttcggtgtttctatagactatgtgagctcaggtgttgtactc

SEQ ID NO: 567844 - DNA, 330 bp, Homo sapiens
gtgtcggtcatttcctaggaagagtcttcatgttggacagtctcagggacaccatgtagagaatttcgctctcgcttcagagaagagaaagagccagtggtcgttgatacagtagaacagaagaaggaacctatcctagtgtgtccacctttacgaagcctgagcatacacacacacctgaagatctccagagtcgtatggaatcttacgttaaagaagtttttggttcatctcttcctagtaattggcaagacatctccctggaagatagtcgtctaaagttcaatcttctggctcatttagctgatgacttgggtcatgtagtcccta

SEQ ID NO: 567845 - DNA, 563 bp, Homo sapiens
  misc_feature (535)..(535): n is a, c, g, or t
gctgcaaaaaagtgtgcagcttgatgaattttcaagaggatatattttttatagatgggggtctcactctgtcacccactgcactccagcctgggcgacagagcaagaccctgtctcagaaaaaaaaaaaaaaaaaaagaagtccattttactggtcatagggcttaaaacaaatgaaacactctcctagccctctggggatgtaatgggctaccatcggcacaaactcttcattatggcacaagaatatcaatatacttaagggctactgaagggtgttaaagtgggccgagggggtgaaggtaagcggtatttaaccacaattaaagataagagggagggaaaaggaagtgtactttacaaccaaaaaatgtacgctggatgtgcaaaaaggtggtggcagtggatgaatttggcgagcgataccgttcgcaaaattcacgggaaattaaaacagttcacatagaaagggagaaaaaggtcaaaagaaaacaaagaaagggaattcgggtccacagcatctgaattactttgnactctcttgctggtcctggacggggctg

SEQ ID NO: 567846 - DNA, 576 bp, Homo sapiens
  misc_feature (462)..(462): n is a, c, g, or t
  misc_feature (541)..(541): n is a, c, g, or t
gaccttccccacctcacctccttcccatcccgccgagcgtcccagacactaactcttcccagatgatgacaatgaaattagtgcctgttttcttgcaaatttagcactggggacacttaaagtctctgctgtctatggagttgatttggaaataccttcctggccccgccctaccccttctttttggttttgacatcacccatttccaactggggatctctggtgccaagccagaaagaacgaggcatgtatacacctcttcttcatgatatataatctatatttttttaggaaaacagaaattgaaaaatttatcccattggggcatttaaagctactcttctttcttcttcctctcttgaccacatcctagacccagttccatatacacttcttcatcccaatacacaggaaacatggataaggaagttggcagaagtccaactgtttcccaatcagtcnaaggcagcaagcagacagacgccaggtatttgaaaggtcttctacacagaggatatacaactgtatgtctgggtcaganagtctgtctatgtgtgcatgtcagagggagagaag

SEQ ID NO: 567847 - DNA, 356 bp, Homo sapiens
  misc_feature (65)..(65): n is a, c, g, or t
  misc_feature (81)..(82): n is a, c, g, or t
  misc_feature (163)..(163): n is a, c, g, or t
cgcggtcagtaaggggactgagcgattcttctggtccgcacgctcctgctcctgtactcaccggnctgttcgctcctctannccgagtgaacgagagttcggtccaggaagccctgcgcgctaatagccatggcttttaaggataccgtgaaaaacgacccgnttggagcccggacggtggtgcgaattgcagcccgaacttgcgaagtcgacccctaacaatgccgcaacgtaaaatccttggaagcggtgtgtggctgactttgatcacagaggcgcgaagaagcaacaagcaagatctcgagaagctgacagggggacctaggttcgcaatggcctttaccaagacttgtgga

SEQ ID NO: 567848 - DNA, 111 bp, Homo sapiens
  misc_feature (72)..(73): n is a, c, g, or t
  misc_feature (102)..(103): n is a, c, g, or t
ggggtctccgggggccacagcttggggtgagttgaagacctcaggggatgtggaggggtctgcggggccctnnacaggatggccttcaggaaggtggtcttnnggcatggt

SEQ ID NO: 567849 - DNA, 208 bp, Homo sapiens
aggtaaagcactccagctcttagtcgggggtattaactccagcagtcttcaagatctggacatcagggcaggttgtcggggccaactctagctccccattcacctcgaatgtgcttcagcccattggtatgttgcggctgcagggtcacatgtacacctatacacataaacctccacgattgcgaccccgggctgatgtgggagtacc

SEQ ID NO: 567850 - DNA, 300 bp, Homo sapiens
ctattttagaagtttcatagcacaagacgggggatgtgggaatcccgatttatagctatgtcagacagaaggacaggtcacaagttgagggcagtcttggggactgagccaacaacctgtgtgatctgatgctgtctccaggtagggagtgtcagaactgagttgaattggaggacagttcacccagggggtgtccatgcagaactacttgcttggttggtgtgtggggaagccccctccccacatttgctcacagaagacttctgtgttgattgttgtgttgtgagagcagaggaaaag

SEQ ID NO: 567851 - DNA, 404 bp, Homo sapiens
gatggaaaagggaatagaggtgctaaataattttgaaaaagaaccaagagttgcaccagttcacaattacctggtttgaagaactgcatataaagctatcgtaaaggtgccacgcacagtggctcatgcctgtaatcccagcactttcagaggccaaggcaggcagaccacctgaggtcgagaggagttcgagaccagcctggccaacatggcaaagcctcgtctccattaaaaatacaaaaaattagcagggactggtagtgtgcgcacctgcagtcccagctactcaggaggctgatgaaggacaatcgcttgaatccgggaggtagtggttatagtgagccgagactgcaccactgaactccagccagggagactgagtgagactccgtctaaaaaaaaaa

SEQ ID NO: 567852 - DNA, 400 bp, Homo sapiens
aggcttggtggaaaatgatctccaggaaaagttacttgctaatactctcttcccttaagcaatgcaggtccttaggctacaataacttctggcagggcctccccagcaggaaggcatgtgctccccacattggggcatagctcaaacatctaccagtctgttctacttacagaaggagggaggcagtggtatagagctccgacgggggttaggcctctagaaacaggctgttcccaataagccttggatctcactttgattatttagaacttatttaccttgatttacaccatgttatgtgtaacatgtgtacctgttacacatgttatgtgtaccgtgtaaatcttacacatgttatttaccttgttacacatgttatacaatctctctgaaccagttt

SEQ ID NO: 567853 - DNA, 351 bp, Homo sapiens
aggcccccggggccctttttccccccccggtttttaatttcccccacccttctggcccgaagaggaagggacccccgaaaaattaacccgccccgaatggtttggggtccggggcctattttttgggtattatcccgaaacccgattaaaagggattttccagaaaggttttttttgccccctggaaattttttttttttgggaaaaggccgccaaaaaatttgggttggctaaaagggaaggggcctggatttttaaaatttttagaatttttttattttataaaatttttataactatattgggtttttttccccttattttttttaatttaaaacccccgaaaatgga

SEQ ID NO: 567854 - DNA, 152 bp, Homo sapiens
gcagtggtcaggccatctatcgggttatcttcggccgaaccttctggatgagcctggtgatcaccgccatctgcctggtgctggcttacccgctggcctacctgctggccaacctgccgacgcggcagggcaacctgctgatgattctggtg

SEQ ID NO: 567855 - DNA, 985 bp, Homo sapiens
  misc_feature (150)..(150): n is a, c, g, or t
aatcttttttttccacagggtgctcgttgttgtgtctcctttgcgcccttctttgggggaggacctccttctgttgaaaccagctggtgttggttccctcatcaaaacgaagcgggggtgtttcccttggctcccgtcgatattttttcncgcgcgagtattttttctctgtcgcacacactcacgtcgtctctcgcgctgcccacaagtatgtggtgtgctcgctctctctctcctaactatgattcctatcagaaaagtttttttctcctcccacaaaaaaatgctttttttctcccccctcccccccctgataaatggctatttcctcccctacgaagaatatatatatatagaatgggctccccctctgcataaatatataagaaggtgtatgtttatatatatactgcgatttcttttctccacaaaagatgagatacactctcaccaccccccgcctctctctatatttctccatagagaagaaaatcaccctcctcctcataataataaatagatgaccccccgtccagagagaaatcttttatacacacacctattccccacacacacacctctctcttttatataaagaagcatctctcttcctcccaaaaagagaggggagacacaccctctctgtgggggagaatatagaggcccccctatgtgggagaatatatctcacctcctctctcgcgtgcgccacagaagacacacccacaggagagaaatatatatttacaccacactcctctaaataattttttttaacacttttttttaaccccccttcgttttgtgtgaaaaatcaccgcgcgcccccctatagatattttgtgtgttttgtgtggaaaaaaatatattttttggtggggaaaaattatttgggggggggggtagtataatcggggggttttttttttttttttttttacatttgtgtgccccccccccaaaaaaaaacccccctctctatata

SEQ ID NO: 567856 - DNA, 359 bp, Homo sapiens
tgcattttctgggatttgagctactcccttgtggtacattgctgaggtcagtttcaacccagatgctttcaaccttctctacacttaaaatgactgcacgggagtacattgaatcctttgctaatggtcagcctcattcttggattccacataagggggaaatttaaaccaaatgggatatagaatttggaacacaccccttttggtcccgtggctgtaaaatccaaaaaccacctcggagaagggcctcatgtaacgtccccacctttatttaccccaaagttgagcaagaaatcttttattactatggggcgggcaattagaagtcaaggggcatcctccgttctctcccaaacaaa

SEQ ID NO: 567857 - DNA, 291 bp, Homo sapiens
caattattgaatccatcttgcagttactttctgtatatcgtaagggtacagtatccttcttttgcacacagcactccaagtttcccagcactattcattgcatagggtatcctttccccagtatatacttttgccaactttgtcaaagatcagttggtacacagtatggggcttaatgtctggactctctattccactccattgatttatatatctacttttataccggtactgggctgctttcatttactataaccttgtcgtatcattctacatcaggtaatgtgattc

SEQ ID NO: 567858 - DNA, 558 bp, Homo sapiens
  misc_feature (46)..(46): n is a, c, g, or t
  misc_feature (51)..(51): n is a, c, g, or t
  misc_feature (85)..(85): n is a, c, g, or t
  misc_feature (110)..(110): n is a, c, g, or t
  misc_feature (149)..(149): n is a, c, g, or t
  misc_feature (161)..(161): n is a, c, g, or t
  misc_feature (471)..(471): n is a, c, g, or t
cttttagttaaaaaaaaaagttggcccctttttccccacccaaaancccanccccaaattgtaaccccccaaaacccccccatgngtcaagggccaggacccaagtggangtaattggatccatgggggtggttcgcccatgctgttcncatgatagtgantgagttattgatggtttatataatggtctggcatttcccctgcttggcaactcattccgtcctgctgccctgggaagaaggtgcctgtttctcctttgcttctgccatgattgtaattttcctgaggcctcccagcaatgcggaactgtgagtcaattaaacctctttcctttataaattactcagtcttgggtatttcttcatagcactgtgagaatagactaatccagatggatttaaagctatgagactgcatgagattaccaagggactgagtgaagacagaggatggtataaaggccaggcatgngtgtcacgcctgtaaaatcagcactttgggaggctgaggcagaattgcttcagcctaagggtttgagaccagcctggccatctcctc

SEQ ID NO: 567859 - DNA, 114 bp, Homo sapiens
gggggggaagggggggagggggagggggggttggggagaagaggtgggggaggaggtgagagggagtggcaccattgcacttcagcctgagtggcagagcaagactctgtctca

SEQ ID NO: 567860 - DNA, 162 bp, Homo sapiens
gctgcattattttaaacaaagctctctgtgttcgaatctattgaacttgaggggatatattccatcatcctacttgaattctgttcctgagctagacctcatcagacatgatttcttttaggcaggctgcttctgacattcagataaaaggggcttgcctgg

SEQ ID NO: 567861 - DNA, 217 bp, Homo sapiens
tgacacaaatgtcatcatcatccccactgagcatctccaccgccttgattttcctgtctttggaggcccataataccaccacgacagagattctcaaaggcctcaagtctaacctcacggaaacttctgagacaaaaatataccagagcttccaacatctaccgtgcaccttaaataaatacaacggtgagctgtagctgagcctggaaaatgacat

SEQ ID NO: 567862 - DNA, 921 bp, Homo sapiens
cggacggtatggtactgatcccctacaaaccacaacctgtccctgatgctggcggcttattgacaaaccagtgccaggcccaggagaatgattcgcggtttcccatggatggagtgcactcgggttgaggtacactgaactcacgagtgaacttacattctcagtcgaacagatgaggtaacctgcaagttgctggacgtagatgaacctgtattcacattgatgcctaggcatacgcggggagaactctgttatgcggacaaaggctgatgtcggacgatatagcctggtagcaagtatgggatctgaagtgtgcttgggtcatagggggctctcgtgcataacacgaaatgtctcgatatgaagagcaaacagtggtttcgccttagtcagttggtgaccctatgcctgcgttgtatcttgtcaaacaagtatcgtggtttgcactagagtgtcctgggtctgtggtagccccttgtggtgtcctatgaaaactggcttgccttcttgtttgtaccttccctgctgagtcggatgggctgattgctcgagaggcgagcgttgaggtaggttgcttaccagtcgccccgtgggtgcagttcctcatattcctaaggggctatagtacgtaggagtgcttgatcctcgtgcgacgggtgtggcccatccaggtcagcgagggtgccctccgcaacattctcatgcgtggccgggttaggtgcctggggatgctcagaggaagttgcgtaggcgcactaccatccttgcacggctccccaggaattcccgtggccggagacccacggagggggggggccgggccccagggaccccccccttgtggtgtggcaggcatatacatttgtcccccaatgtgtatccccccgtattttgtgttccccggtcacccgcaattccaag

SEQ ID NO: 567863 - DNA, 132 bp, Homo sapiens
tacagcacttagactgaacatgcaatgtcaaatcagaaaggagagggacagggagagatgacggaaaggtgaaccagcagcagactggagcgcttggtctacgcagcaggggtggctcacaggagtccacct

SEQ ID NO: 567864 - DNA, 151 bp, Homo sapiens
  misc_feature (33)..(33): n is a, c, g, or t
agagagcttacctggtatacccaccctaggctngctgtaacagacatctctatgctgtgcctcggggttagagccccagaaagtgatgggcaagtgtactaagcccacaatcctaccctaacctgtgggggctagcctcgcataatcacct

SEQ ID NO: 567865 - DNA, 228 bp, Homo sapiens
tcaatgttgaatgatctgacctttccagttctgtagatactaacaaattaattttatgtttgcatgtgctcgtgtaatatttatagcatttcaaaccgtagtattatggtagaaaatcattatcacagaacattgttgtcagatgtattttgacataaaaatgtaagttgaccagctaattcacattttcaggtttttaaaattaaagttatactccaagtaagttat

SEQ ID NO: 567866 - DNA, 364 bp, Homo sapiens
tttgtgttttcattttagcccattctggtggatggcagagaccacttctttgtggttataatttgcatttccctgacaagtaattaacttgaacactttttctataggttaatgggtaattggccgttcttcttggtaaaaagctttgaagaggaacttttccaatatccaaaagaaaaccttttatttttctaataacattcccaacaattatgatgacgctattctaaggaccatactttgagtagtgaggctttattgtagaagagctaagtgaaatgatatttgaaagaacctgcagaatttgattgtggcgtagcttttggcagtcttagagggtttgaggtgagtagcagaaatctca

SEQ ID NO: 567867 - DNA, 182 bp, Homo sapiens
atcatcttccctgatgactgtgagttcaagcgggtgctgagtgccccagcggcagggtctacgtgctagaagttcaaggcaggctccaagcggcttttctatctggatgcaggaacccaaagacagaccaggatgacggagccttgccgggaacagtcaacgagctatctgacacaaccccc

SEQ ID NO: 567868 - DNA, 195 bp, Homo sapiens
ggattgaaacttgctctgggtgaataacgtgacctgacagtgcgacgcctaggacatgactgtacaccactatagacttacaaacactgtacacttacgtacactcaaatttattatgcttcttctttttgagacaggggtctcactatatagtctagactgaacttgaactcccaggctcaagcgatcctcctg

SEQ ID NO: 567869 - DNA, 340 bp, Homo sapiens
gcggccgcctactactactaaattcgcggccgcgtcgacttttgacaggttctcactctgttcccaggctggaatacagtggcatgatcatagctcactgcagcctcaactcaccgagcccaagagatcctttcacctcagccccccaagtagccggcaccacaggcatgcaccaccacgcctggctaattcttttgtatttttagtagagatggggctccaccatgctgcccaggctggtctcgatctcctggactcaagcgagatcggccttccaaagtgttggaattacaggcataagccaccatgcctggcccacttatataactttttgattcaa

SEQ ID NO: 567870 - DNA, 241 bp, Homo sapiens
ggctgctcgtggggcagcggctgctgctttgggctggccaggtccatggtgggcttgatgaactcaggagtcaggtggtcgcttgccaggtggtcacggggtcccggactcggtgctggtgtcccatattgggcttggatacagggcatctctggagagagaggagaccccaggcagggaaaggagagtcagtgggacaagcctatagccttgtctcaaagtatttgggcccccgagcaga

SEQ ID NO: 567871 - DNA, 732 bp, Homo sapiens
ggggctgttttttattcgaatgggggagtgggagggttttttgatttgtaattctaacgctcactctaaaaacaactccttgtacttaatttctttggacaaaactgtgatttaggtcaaattgattcaactatggattttgtggatacgggatatgactatcttagcttagacgtggatttatagggaggtataactattttaacgaaaccttcttagaattataataaaggacacttctatgtggggtaaaatgtggtcacaaattaattctttttacgagtggatctttctactcgctaacaatcatttagtgagtaggttcggggtaaacacctaggggtgatgtgtcctacgaacgaggacagtttctagaagcatatgcacaaccgagtcatgagctccatcggtctttgcaaaattgcaaagctctcattttcccattgtttaattcctaagcggaaggtggcagtaaccttacccctgacagagctgatggttaatggtaaaacgcctgcccgtcaaaaatcagtgaacaagaacaaaagctaattaggtcggccctttaaagcataaaggcttttcaacatgatcaatggtgggtttgcccctaaggctcccgttaagtggaacaaaccggtttgaaatgtttaggatttttctggaagagagcttttttcacttttccttgggatacaagccgggagacaccatttttgcccgcctgggggg

SEQ ID NO: 567872 - DNA, 135 bp, Homo sapiens
gctcctgttttggcctcccaaagctctgggattataggcatgagccagccgcacccagctccattgatttttttaaatattgagattgtatcctgcaactttgctgaactcatttattggttctaataatttttt

SEQ ID NO: 567873 - DNA, 101 bp, Homo sapiens
gcctgtgtcgccatgggccgcccgccccgccccgtttgttaccggtatttgtaaggaaccaagccgtaacccaaggtgttcgcttctgccgaggtgtccct

SEQ ID NO: 567874 - DNA, 169 bp, Homo sapiens
gtgggagagggggtctcacattgggtatactactacactgggaagaaatagggaggtttctagatgtccggcttggagaactattaacataagttggaatttaagttggtatgggtatgctggttccccacgtgtcattacagccaatcttactgtgacttatggagta

SEQ ID NO: 567875 - DNA, 1706 bp, Homo sapiens
ctcgacgacgtacggtacttgatgcgctgtccgttgatacactgtgcactgcctagagagtctaggactcttcctctcgtctgatgaccttcctttgactgagcatggcgtggccatggcatccaagttccgcacgtcatgctgatggacgctgtaggggaatcccctgcgaaggctctaccccctctcacgaaggttacagggcacctaggaggtagggagagtgcatagaaactctgggggcggcaagggccgcgtacgttggatggtggtggcatgggcgtcacgcttgacgtgtcccttgcttgcacttccacaacgtcctggccgactaacttgttccgagggctgccggcaggtgtagcgttggctgtgtctgcctagattcttctgtgagctgtggtggcaggcggcgtagatttgcccctgtgggccatgccaccgtccattactgccggtgcagacgcgacgtggacgtgtgggtccacggactaacctggacggtctgctgcggtagctcgctaggactgggcatactgggccgtgtgtgcactcatcgcggaccgtaggtcgcatagtagagaccgagctcgatccgctctagggcgctatctaggcgaccagagtccatgatctctagctccaaggtccgttgctacaatctctcgctaaaggtccagcggaacagggaaagatctaggtgagcgggcgaacaaacatcgacagagcccgtcggtgctatgttgggagcgaccgcgacaaaggtagcagcgctttggtatagcccattacgtgtgctcgaagtcgctcgcggagtaaacttcaatttcggaattgacgtagacaacaagttgtttagcaagggtaatggtgggtctgaaccttggtgtgcaccaactgacacaccttggtggcctccaccaaggtaacctccggagagttcgggagagggcaagcctttggccgagagagaaaaaggcacctgaaccacggggggcaaaggcaaaagggggaaggcccgagggaaacccatattttaccggggaggaacggaacaaaggaggcgacgaggaggaacttagcgcctttggtttgagcacccacaaaggacaagacgtttgaagagcccccaaggttagggccacaggttttggatttaggcaaaagactttggggttgagagaaacagggagaaaagacagggccgtacaagcttatgggaaacaagaacgttacaccaacatatactttaggatgttatgtgtatagagagaatatgtgagtggaggagaaacaattttcaagatgagaagagcaccaactatggagtaagagaccccaagactatggtggtgtaagcagagcccacagaaggggaggcacaacaatatagaaggacaaggggagatataaaagatcacaaggagggggagcccctttagggagaccaacatcttggcgagagaaatggtcgagacgaagaaaatatacgaacaacgaatatgggcgaagcacaaagtagtatgttaatagcagacaaaaatatagagaaagagataggaagaccaaaattatagaagaaccgaacgagataatataagatcacaaagccagcatcaaagagaaatagataaagccatcaatatacaagagaaaaacacaaagaaaagtacgaaagtagataaagattaggtagcagaataagt

SEQ ID NO: 567876 - DNA, 133 bp, Homo sapiens
  misc_feature (9)..(9): n is a, c, g, or t
  misc_feature (70)..(70): n is a, c, g, or t
  misc_feature (96)..(96): n is a, c, g, or t
agcaaaaantacgtatgtcagagagactgttaaaaggaagaggggaaatggggaatatgtgttgggttcncagaataatttacattcgcacaatgnacaaatgcaataaaatgtcttaacagtgaaaaaaaaa

SEQ ID NO: 567877 - DNA, 593 bp, Homo sapiens
gaatgataaataatgtcattaagcctagtctgtcttaagtatgttcagcagctaaataatgcgcacgtaggtacacttctacattgataaaactattcatgtgaatactgactatcaggggaaagtcataaacagtgttagaaaggctcttgggaaggtgtaggggttccttgtgttgttcatttttaaaattgaaactgtgtcatacagtgtttcacgtctctgaaattgggattataatagcactattttgatgtagctctaccgatactatgtggtaatgctatttgttttactaacaagctctggaatatttagcagtcattttcactggcacaagagccttttgtatgttattcaatttaaacttttaaaccaagaaattttatggtccagtgtctttggcaaaaagatgctggagggaatgtaacatacaattaatatgtggttatatatatatataaaaagacacaaattgccatggttatggttctgccttgaaacagcacaatgaagtgtatcagtatattctgtgattatgaaattatatgttgtgttgttgtgtcttctgttgcctgtcctttgggccagat

SEQ ID NO: 567878 - DNA, 343 bp, Homo sapiens
gcaccgcgggttcaaatgcaggcgattcatgaggacgccatccctaggagagtggcgatgaggacgaagacgaccgtgtggagggcgcatctcgatctgctcctctgacaaacgaattgcctgtgaggaagagttctccgattctgaagaggagggagaggggggcccgcaaggaactcttccaagttcaaaaaagccaagagagtcaaaacagaggatgaaaaagagaaagacccagaggagaagaaagaagtcaccgaagaggagaaaaccaaggaggagaagccagaagccaaaggggtcaaggaggaggtcaagttggcctgaatggacctctccagct

SEQ ID NO: 567879 - DNA, 629 bp, Homo sapiens
  misc_feature (619)..(619): n is a, c, g, or t
ctgcctgcaggtggagcaggcacaagaaccgccgcatgcgccctccatgtccaggttgtgaccttgagcgatgtccaggatggtttcgccctcacagacttcgtacgtcttctgggagccatccttcagaataaaagttatcttcagttcttcgcctggtttcggttttttcaaatggccatggtttaagaacgaagacgtagagaagggcagaaatcttgtggttgtggtggtgcgtgtgagcagagatggagaggtgcgtaaaagatgtgctgcgatgttcgatattctagctgtgtgtccagcccgagtaacaattttcagcattgggggcgggttgagtatagatacgagaagcgcctatttcgtatgagggtttttttttctattattatgtatattaggcatatatatacatatatatattttgcatacatattcatttttaaaaaaatgcaactgctacacgctttgaaagattcaatcaaaagtttttccgacgaccagaattggctagcaaaaaaacgaaaatgtaatggagtcatgcaaacatgactaatagtaacaaaaaaaaaagatatagtagaattgagtaagtaagttctatgtatattggtgntattttctct

SEQ ID NO: 567880 - DNA, 1377 bp, Homo sapiens
atacggccatattgttacaaacctcggacgaaaaatgtgggaagactagatacacaagattggcactatgtaataatatgggttcaagagagttttctataatagcataactggctaatcataaggcttaaggagcaaagtatctggaagaaagtatgtagtaaggattaggtcttactacgtataaagccccaaaaagttcgcgaattacaatatgcaccttgcaattactggacggatatctaatgggtaacccagttacgtttaaaaggcccatcaactgaaatgttctcggtggtgcaaaaagctagcaaggttaaagcttgatcaagattgaagggtgtttacgtaggatctagaatccaatttagaaagcaataccttgaagctagataggggatagttggttaaataatcaacatctattagctactataaggactggtgtaatgtttaaagaatactaaggcagaaggcttttggaagagcttagtagaatttggaaggccttaaatatagtagacttagtgtgaaaaaatgtgaaggactttcgtaacaggaagtaattcatagagtcaagagtaattacctacttaaagtttttgcaattggactttgagcttaagattattgctttcaatcctgaggactagcatttaattgacagctcgacccaggtgctacactagaagtggattcagtgaatcttaggaagacagcagcagacaggattccaggaaccagtgtttgatgaagctaggactgtaggagcaagtcgagcatagcagcagttcgtggtgaagataggaatagagtccatggtaggcacctagtgccgatctgtggtgaaaggaagactaggaacgaaggaaggagcgctaacgatttggtggtgaagctaggataaaaggattacaggaaggagcgagtgcaatttggtgatgtaaggtagcaggcggcttggcttggcaaccacacggaggaggcgagcaggcgttgtgcgtagaggatcctagaccagcatgccagtgtgccaaggccacagggaaagcgagtggttggtaaaaatccgtgaggtcggcaatatgttgtttttctggaacttacttatgggaaccctttatttattttctaaaaaaaagggggagtttcgtactgaggtgtaaaaggatttatatggggacgtaggcccatttcccggtgttgtaggtttctctttttcaggcttaaactcatgaatcttgtctgaagccttttagggcagactgccaagtcccggagaaatagtaaatggcaagttcgtgggttattttttttttacacgaatttgagcaaaacccaaaagagcaaagaccccaaaagggaaaccgagctcga

SEQ ID NO: 567881 - DNA, 799 bp, Homo sapiens
ttgcgtagaaggtggggggcggatggggggcggtgccaagcattactgcctgagctcagtttcctgttagatcagccatggcattagattctcaaaggagctcgaatcctgctgtgacaccgcatgtgcaagacgatctaggttgcatgctccttatgagaatctaatgataacatgtacatgtaccttgacttcatcctgaaaccattccccctaaaccccccagtcccgtggacacaattttcttccagcaaaagcccgtccctaatgccaaaacagtgggagatcgctccactagagaacagataacggcttacttcctttaacgtgccattacaatttcactgctcagcagctaggttctttacggtagggcaaccatcaattcacccatgacaatggcaattgtcatctatatatcatctatttaaaaatcccatctattcagggatcctacccaaaaagcaaatttaactttacattatcacaacataacacttatcttctcatgtgtcacgtgtcctgacattggccactcacaggggctctctagattcctcattagagaaatccttatgcttttcatcttgggagaaccagagcagaatggaatctttgctcaaaagctctaatgatgggtaaacatattccataataaagtaataaatcaaacttggtaacgagttgcattatattattgggcatcctaatggatataatataaataaattggaaaaaggctgaaataaagttgaattatataaggaataagatttaaatgaactgtaacttctacacg

SEQ ID NO: 567882 - DNA, 102 bp, Homo sapiens
ttcaagtgagagcactactagataggtgccctttcccattttacagatgatcaaattgaggcaaagaaagagtaagaaacgtgtactaccctcgttaagctt

SEQ ID NO: 567883 - DNA, 729 bp, Homo sapiens
ctctggccagcgccttcccgagagggacctttatgccgacatgtactccgcctggcaggccctgtcgcaccagggttcggcatcatcccggtcagcatctatcctgtacgggcagagcatctggcacggtgtctcccccgtggacctggcctcgcgctacgagtgttccccggtggttctgcactcgccgctcacctcgggcatgcgcgtcgccttccccgacccccaggtagaccttctgcttcgacgccttcccttacctcgagaaggtgtcccagatcacgtttcccgtgctcatcatccccggcccggaggacgaggtgatcgacttttcgcccgggctggcgctttacgagccctgcccccaggccggtggaccccctgtgggtggagggccccgggcaccacacgactctcgaggctttacacgcccgtacctggagcgcctgcgtcgcgttcatcttcccaggagctgcccagaccagcgcgcctatcggcggcccccaaccggccggaccctcagccaataaggcggcccccggaccctcaccccgcgccggcccccaaccacggggctgcatgtggaccccccgggcggcccacaggggaccccgccccgaacccacggggctgtggacgatgtacaggccacagagctacgcactcctttccttttggaagcccagaagaaaatacgtgaaaacggaaattaaagattttaaattttta

SEQ ID NO: 567884 - DNA, 342 bp, Homo sapiens
ctgcctcccattctattcaaagtcacccctgtgctcactgagatagatgcatatctgattgcctcctttggaaaggctaacagaatctcaaaagaatgtaaccatttgtgtatcacctatctgtgacctggaagcctcctccccacttcaagtcttcctgcctttccagactgaaccaatgtacttcttacatatattgattgatgtctcatgcctccctaaaatgtataaaactaagctgtaccccaaccaccttgggcacaggtcttcaggacttcctgaggctgtcacggacacatgtccccaaccttggcaaaataaacaattaactgaaaaaaaaaa

SEQ ID NO: 567885 - DNA, 164 bp, Homo sapiens
ctcaacgctttatacttcatcatctaacattccagaacaatggaaagtactctacttgtacatgcaaagttaaagtcatgtggtatgtgctcggtagtaacagcaaagaagagccttgtataacaaggttccaaggtaaaattatacacaggtcgttaacgttc

SEQ ID NO: 567886 - DNA, 998 bp, Homo sapiens
gccactccttttctgagtggggggcagtcaccactgctgggcgtggcatccgcctgggcctttctccgaccttctggtgtggccgccctgggggccaggccctcgccatcctccccatccttgttcctcagcaaatggcattagcttctgatgacagctgctaatgccatttgctgaggaacaaggatggggagggagccacagatttgggaaacgacctggacacactattgggaaggagatgtggacgggctgtctcctcctgcagggcccacccataggacatgtattcagcaacacatgaacctacgtatacgatcactcgataacacacaaccaccacccacaaaaacccgcgggcccatcaagagcacgcgggggcggaacaaggcggcaccgtgacagtggcacccgtgcgcccaatagcagcgaacccaggaccacaacccacaacccgcgggccaccaacgggagcacaatcaggaccagcgcacccccaaacagcgcacacccgcaccaccacctcccgcaaaagcccacagcgcacaccccgcgcagcctccacggaccccccccgccaacacccgcacgaacacaccaccacacccaacccgcgccacccccgaagcccaccaacccgccccacaaacgcagcacgcacaacgcacccccccacaccaacaccagcccaaaaagaacgagggagggaagcggcgcgacgcgaggacggacaagacaaaggaagcgagacgcgaaggagcgcaacaaggaggggcggagacacaccccgcggcgggcggcgaaacgccagaccagagcacaacacggcgcaacggacgacgcagggacaggagagaggagcgggggagaaggggtggatgagacgacaggagcgaggagacggaacccagacgggggaggcgaggaagaaggaaacgaagcgaagaggcaggaggagaggcggggagaaaggaagagagcaagagagagaagggagc

SEQ ID NO: 567887 - DNA, 286 bp, Homo sapiens
gaaagctgtacccaacgtgtcccactccatccatcccccagtcaccattattctgtccgcatgaatttgattattctaggtatctcatgtaagtggaatcatacagtatttgactttttgtgattggcttatttcacttagcttaatgtcctcatttttacccacgttgtggcatgtcagaacttatttcctttttaaaggctgaacaatattccactgtacatataatacctcattttgtttatccattcatcgttgatgaacacttgggtactacgctttggca

SEQ ID NO: 567888 - DNA, 456 bp, Homo sapiens
cacaagacttctcagcttcaggagatccagctgaggctagttaatggtttgttgaggccaccttaaacctgtagagggcaccctctaaaagtttgttcagggcattgcaagcatcaatccacctgtctcaggtagactcctagatttggctccactgagagaagtatgttctggtgtggtttttaactcctttgaaaagggcaaaagggattttggagccactgagcgtgcatgctgctggctgtgggaaagacattttctatcaaggaggccctcctcctgtgctcacatcacacattcccagacatgcatcccagtgtggtcagctcccagctgattgatcactggcagcccttgcttagtggtgctgcttacctaaacaccctggccactcctagggtgcttgtccatttctccttcttcaatatatgcaaatatatgcatgaaaactttttt

SEQ ID NO: 567889 - DNA, 1040 bp, Homo sapiens
gggcggatgacgccggtgcagcggtgggggcccggggtgccctggtggccctgggatggggaaccgcggtggcttccgctggaggtttctggcagtggcatcctggtggcctggtggtctgctggcctgtggactggtggccggggcctgaggcctgcggagctcgctggagtgcaatggcctgaggataacggagtggatgccctgtcacccaagttgggcctgcttggtcacatgacatgacagatcaaggtctcctggacggacgatctactcgtcttcgtcccgttgcccagttaacgggacatcacgaggattcagttgcacttgtcgttccttgggtgtgcccttcttcttcaatgggattcgacgggttttttggaaccgacttattggccaggttgccaggaatcgcatgacgcctgtagcctgtgcccagctgcagccagggtttcaactggcacttctggtctgcttatccgggcgacttaccaactggccccacgttcgggctcatagggcgtggcttaatgttagcatacgcagatgggcaccgtgctgggacaacactgacacaattccctgatagtgcgagcccccaattcgagttcccttggggctccaaatggcttcttcccaagtacagtaccccactggttgcctggccatgcaaccgcgccttaaccttgggtcgggtgcacaacctgacacgcaattcctgcggcgcaagaagggccacacgctagccgaacttgcttacccccctattgctccacatcgggctttggaaccacacggggccccaggcgattagacatcgagtggcccttccaatttgggatagggccagtttcggagcgttacatccgcggacgccgcttatacacaaattctcacccaccactatatgggcacaaattgcgtccgcacaagaggtgggggcgggcgcacaaacccctttggggcgccacatatcaggggtaccgtatccccatggcgagagcccacaattaggtataggccgctttacaaggggaaag

SEQ ID NO: 567890 - DNA, 275 bp, Homo sapiens
  misc_feature (31)..(31): n is a, c, g, or t
  misc_feature (100)..(100): n is a, c, g, or t
ctaaatattgcacatccattttaaaactatntgagatgcactttttgactcaggaggccaaggcaggaggattgcttgagcccaggagtttgagaccagncctgggcaacacagcgagcaccttgtctcttaaaaaaaaaaaaaaaaaaaaatgagagaaatcggctgggcatggtttctcatgcctgtaatcccagaactttgggaggctgaggcaggtggatcaccggaggttaggaattcaagactgaaaccttgtctctactgaaaataca

SEQ ID NO: 567891 - DNA, 242 bp, Homo sapiens
  misc_feature (42)..(42): n is a, c, g, or t
  misc_feature (201)..(201): n is a, c, g, or t
acctagaggatcccgtacgtggtgtaccgtcctagtcggatngttaccactgagccacgaccggaactcccataaagtattttaacctaaaggtcaatttcatgtgagtccacttaacatgttggataaagaccttattggcaggtcagtatcttaataatatttgtatcctgaatatctaatagattgtgaggactcacnggtaacaccccacagtgggtaccgggagctcgaacttcgta

SEQ ID NO: 567892 - DNA, 309 bp, Homo sapiens
cagctactcaggaggctgagtcagtagaataacttcaacctgggaggcggaggttgcagtgagccaagatcgtgccattgcactccagcctgggcaacaagagtgaaactctgtcttaaaaaacaaacaaaaaaaaacaaaaacttgtaccctctgctaaaaatattcccgaccgactgcaaaaagaaggtttcggccatgttaaccctttaaatgtttacagtcattttgaaaataagcaagcaaagatttttcttttttaaaaaagatctgtaggataaaaagtggaagtaaggatattcacgtcca

SEQ ID NO: 567893 - DNA, 200 bp, Homo sapiens
  misc_feature (23)..(23): n is a, c, g, or t
  misc_feature (34)..(34): n is a, c, g, or t
  misc_feature (39)..(39): n is a, c, g, or t
  misc_feature (57)..(57): n is a, c, g, or t
  misc_feature (105)..(105): n is a, c, g, or t
  misc_feature (107)..(107): n is a, c, g, or t
  misc_feature (110)..(110): n is a, c, g, or t
  misc_feature (129)..(129): n is a, c, g, or t
  misc_feature (146)..(147): n is a, c, g, or t
  misc_feature (177)..(177): n is a, c, g, or t
cattataccactgccgttaatgngcctttacgcnctttnccgtgttcgtcatacccntccttcactcattcccatatcgttctcacgccgtattagtatacgcgncnctnccccgatccttttgccacnttatttcgtgccggccnncacgcgattagttcggctggcgttcccttngcacggcgttatcgtgtataccc

SEQ ID NO: 567894 - DNA, 157 bp, Homo sapiens
ctaaggctctactgatctgaaatgctgcacacgtattatctcatgatcttgtcatctgttggaactatgtctcagcattgctgcgagacaggcatttttaccatgttccccatatcatgcaaggggcaactgcgaacccgctgccctacagcacatg

SEQ ID NO: 567895 - DNA, 660 bp, Homo sapiens
  misc_feature (490)..(490): n is a, c, g, or t
ggtcatgtggacgcatgtgtacagtgcacgcggaggcagagcgggtccggaagttctctccattttcccatagagaaaccctgactggccgtgtggggacaactgacgacacaggccctcacgccctggcgagcccagtgagggtcactatcatatgacaaaggcttgccggcagttcatcttcctccctgtgtactttccatttgccttcctggaatcctgtgcatcacagaagctggaaagttctgatgtccactgaaaatcacaatggaaagtcttgattgactgtcacagtaatgaaaaggcagtaactagaaataaggatcattcagcagaaggacgaaggggtgtggaaaacgaccaaaaggaaagtgtcttcaggggcatccatttgctagcaaagaaacttctgtgatttttcagaagaggaagaagaggaagacgaagaggaggatactgatcaaggttcacttctttggggccgatgggnctagagcaagatgttggtgaaactgaccgattgattgaatcaccagagcaagcgagcccggagaccaatgaatgctttctttatttgtgcaaaacgcaatcgctctcttgtaacgtcagggaacaccccaggttgataaccgggctgcttccaaaataataagtgattgg

SEQ ID NO: 567896 - DNA, 962 bp, Homo sapiens
gccaggtacagtcgcctctgtgcggagcttgtgactggttacttggtcctccagtggcggtccgaggcttcgttcgagtaacaacatgtgatatcggctgctttgccaaggctcacgcaactacactactgtctaggtagcgatcggaggctcagacaacttctacagtgtgttcgagggcgaggctctccgatagccatccccggtggctgcacgcgtctatcgccggctgctcgcatcatcagggtcgcactgtgtgtggggtaacagggcactggatctcctgggtaccctagaacacagtaccagccggacccaggagtcgtgcaagcacattcgcaagagtgctcccagacacagggcagattaggcgggtggaggatgcggttctcatacttgggcaatgtctgcacctgcaaattgactacgttgggctcttcggtccctactctcagacattggaacgacgggaagacagaagaaattgctgggcgcgatgtgctcatgggtgggtaatgtcgtctccatcaacagatcagtcgcgtcgaccacgtgtgctagtaggaaggctactgtgtcttcagggaatcgaggtgcagggctgctgcatcaccaatgacttcgattgtgagcgagcaatggatgagtttgtgctctgcttcttcgagtccccgcttgtgggggttgactgttgctcccgtggccgcggggtgatcgtcggcgcgtggtggtggctgatttgcgtgcatgtgcactatctgtcgtgcggtgctaccatcttcctcctttctcgtgtggtcggactgcttggcctgtggtggggctgtgtcacccccttggcgcagttgggattcagcctggggtgtctgtcagtgctgcctgttcggccgcgggggggtgcacttgcggcgctgatgctccgtgggaggctctgtttaaggggggccacctccggtgcgggc

SEQ ID NO: 567897 - DNA, 688 bp, Homo sapiens
  misc_feature (15)..(15): n is a, c, g, or t
ctggcagctaccatngttcgcgggctacagctggcggggagtggacgacaccggctggtccaggcggtggcattgcgggacgtacgtgcctgtctgacggtcctatgcacccgagggcctctcgcagattaccccaggttcgtggagtctgtggatgaatatcagtttgtggaggcgcctggttacctggctatcagggatccgcagatcccccaagagcatgaacattatcgctagccctagttgagctggcaggctcccaagagaccccccaaccaagctgaccttacttggtactgatagctcctcggtaatgctacaaacatgctcccgttgctatcaacggactatcagcgcatggtaatcggcagatgactgtgatccgcgaaagtgtgaacggggacatctgggccctgcagaaggacgtggcagattttctgagcccgctgctggggaagacacctgtcacgccaggtcaattgaggtgactaggtaccctacgcgatcaagggctagctttgagccaggagcttagagctcgtggctctgtggtagaaatggcgttctgaggctcgtagactgagctagccctgtttgtcatgcatgcacctgtggatctgagtctagggggcctcaggaggagggaggtgggtgtaggagttcctgtggatagggggatacgagaaga

SEQ ID NO: 567898 - DNA, 318 bp, Homo sapiens
tccttgtagccctgccgactagaaaggatgatctcagctaaacgcaacctctgcctcccaggtacaagtgattctcccacctcggccacccaaagtgctgggattacagacatgagccactcactgcgcccagtaaaaaaaaagaaattattaataagaatatatatatagacattatgcagctcatatgttttaagtgactagtatacatatattcaattgtataggataatacctataatattacctaaatctagtccactatctagagagacacagttacggagtgtatagcacatattgtagtaatacggtagt

SEQ ID NO: 567899 - DNA, 218 bp, Homo sapiens
aggcacattggctgcattcctgttacccacctggtagggatgagggaggagatagcatgaaagggtggagcgcatgaaggaaaagagaacgaatcagctagatcaaaggaggcaggggtggcgtgcaattggattcctttcagccgtccagggcctggcttcctgtccaccagcacacggaaattccccagagtaaccttctcgaacaggactgggaa

SEQ ID NO: 567900 - DNA, 438 bp, Homo sapiens
  misc_feature (337)..(337): n is a, c, g, or t
  misc_feature (343)..(343): n is a, c, g, or t
  misc_feature (354)..(354): n is a, c, g, or t
  misc_feature (393)..(393): n is a, c, g, or t
  misc_feature (420)..(420): n is a, c, g, or t
cttactgccgccccctcgcttcaatcaaactgtggctgccctttgtccacgaggcgggatcggatcgaaacttgcgaccacggtagatcagtcgaacttcaccagatccttaaagatcagttgaccccagcgatttccgcgcgcgtgcacaagcagtccaccttccgaaagcccgccaagtttgatcggcgagaaaccgagattttccgcaagcgcgccaatctccgctgcggcaccgtcatcgtcgctcgccaggaacacgactctcctgccaccatgtacggccggatcctgttcaaggacggcagcgcccaaatgattgaaaccttaaccagtntgccgncagtgaaggcntccgcgaaggcccaggaagaaggtttttcccccagtttntgaggaaggatttcttagggatttgtnaaattgaagatgattttt

SEQ ID NO: 567901 - DNA, 147 bp, Homo sapiens
acttcacaggcatcctgttcatcgacgagatcataccatcattggcgccggtgcagcttccggtggggtgatggacgcttccaacctgctcaagccactgctgtcctcgggtgatatcctgttgcattggcttgagcaggttggaag

SEQ ID NO: 567902 - DNA, 120 bp, Homo sapiens
taaaccaaaggaaacagggcttcaacattaaggattaaccaggaaactggatccatttaagtttttccaaatatggatttcatttaaaagcaagaatttttctttccgccttctgctatg

SEQ ID NO: 567903 - DNA, 349 bp, Homo sapiens
ctcagggcgcagatgagaaaaggatacacggtagcgtgctgagcaaatgggatctatgaccacagactgtgtactaaggaggagtcaatgatatacataaagcactgagcacaaagcaaaaatgcaggaaacatttgtttcgcttcagctgggacctgaaaattccccagggcccataacagctctttctttcccattcagtttcatatctacctccttagcatctagatatgcaagacctccagaccaggaatcagtaagctttcagatccatcaaaaacctaagctcgtcactgctgcaggaacagagttgctctgagtgtcatgctacctcccggcgaacctatga

SEQ ID NO: 567904 - DNA, 210 bp, Homo sapiens
caagtttattagaaaaaaaaagttagtgggggctgtggcatgtactgtaccggtagctctggctacctgggaggctgaggtgggaggatctcttgagcccaggagtttgagaccagcctgggcaacattgcaagaccctcatctacaaaaaaaaaaaataaagggtatgaacattgggctcaaagcaaagcagtgtgactaccccgtgat

SEQ ID NO: 567905 - DNA, 1096 bp, Homo sapiens
  misc_feature (147)..(147): n is a, c, g, or t
  misc_feature (607)..(607): n is a, c, g, or t
agcggctactagtacagcgccgccgtacgccaccgccaccgccaccgccactaaccaccgtactagagtactagcagtacccgagagagatacacagccatacatagtaccataagacgaagatactaggagcccgaggagactccnagagacatcccgcggagaacccccacaggaggacggaggacactgctatacgtattcaataaatataatggctaattctattaagaacccaagagaatcttgctgcatttatatagataagatgggcctaatagctaatgatacatggagcgatatgatggatactaaatgggcaaaaaaatatctggatatagaatattgccactagacaatttatcctattgaggcactgctggcgctcgacaatgatcgacaatatacacgacttataaagattgattcatagattaatgcgaatattatcctaataaatggaaattgtgcacacagtactgaatactatagcaggaccgaagtatttaataatttgaaaaggcaaccaagtgaaattatcagttataccattattaaagattacagatatatgatcaagacaggtgtctgttcctcattattatgnctttgatataacggcattctaaacgctgaatagattacatgactggtagtctaacgcattaatgaaactctacagatcggaacactaacgtgaaactactcatagctggacagatgaatgcatatcaaatcaaatcgcatgggacccgccctggattatgcaatagatctaatataatatgcgttttatgtatgaagatgagctcagaaattcggatctcacgattctatacatcgatgctgggttaaggcggtaggatatagcatgctatggaatagatggatttatattcattggggccttaaattttttgtaaattgaggaaactgttattactggaggaaaatatgcgtactgcggggtctttcattctttggattaaaataaattaacggggaatatgagcgaggtggattaatgttagataatgaaaactatttcatggatttatcctatatcttttccaaacattttgttgattgtaatgga

SEQ ID NO: 567906 - DNA, 106 bp, Homo sapiens
ttcgacacatcgagcttgctggtgcagacgaagtcggcgggctctggagaagattgacctttagttcagtagacacgcacctccgagtttgggcacttacaacgcc

SEQ ID NO: 567907 - DNA, 753 bp, Homo sapiens
gcgggctactacggacgacgtgtgctgcctggacgcacgcccccgctaacatgcgggggctgatgtggcagagcgcgagtgcacgagcctgctgaacaatctacggtctcgtcggggcgacaggccatcgctacctgaacacaaccgtgaccaatggcacaggcccgcatcccatgaatgccgtgtgggtccatcatcgtccgaggctcgtgctcggtgatctccttgtggagttgactgatgggggcagtacacgctcgcttgtaagtcgtacacccactcattgagggactgaatcgtgagaatcttgagggcgatggggacctccgtgaagggcggatcgcgtgctgggccgattgccggaaaccgtcattccccgtcgtttcacccgcgggaaagaggggggggttgcctgtccataatacgggacctacagtaatgtcatttgagcaatggggccggggataaatcagcgcgtctatcggttccagaaattggctatgaggctactgagtatgccaggagcccaggggaagctgcagcagcagggtctgaaacccctccagacacacgagcccagagggacagccaaggtccacgagcccgaaaacatgtcaaacaggaaatggacagccccggtccctgagaagcggccctgaaatacagcatttccgcatgagtgatgatgtcactcactgggaaaggtgacctcagatctggcaaataggaggaagctgaactccaggaagtggc

SEQ ID NO: 567908 - DNA, 238 bp, Homo sapiens
cagtaataaattagccaaaactgtctattattagcactttttgtaaacgtataccaattttttcttattccttttttttcaaaaaaaatctaatttcttcttcctagcgtaattatctttagaagctttatctctagttacatatttatggttgtttacgtgagatctaagagctatcagaataacctacattttctggatatggaaaaatacttttcctactttgtttcatgtggtg

SEQ ID NO: 567909 - DNA, 909 bp, Homo sapiens
taatgcccaaatgtttgtgcaatgagtaatgtgtgtgtatacactacatatattctctgaaatagacataccatcagagacatcattcagcaagtgactgatgtattggcatctcattcatatttctcgctgtgtgaggtatatggtactagttatcttgacttgatgtttgccaaatcctgaatagaagtgcattggtacgaaattactgaatgtaaagaaaatgttttcggcgtgaaaaattaacatattttatgacgtaccacagtataactctgtcccaaaccagcagcctatctatctttcctgttctttacatccctgttccccatccctacttcctcattttggtataacacagttctttgtagcatcattataattgcagttctatggcaattggacagtgtatagcatggaagacagactggtataagtagtacagtagtcaccagtgtgccacatttgcattagtaatgcaaaatatacattttataaaaggagcaaactatggtaatgtagatggcattacatcgtataatattgtaagactatgtatgtcctaatttgcatataatgttttcctacgtaaaggcataaatatagcaactctgtattaaccggtagcttaattagaattgcactatgtcaaataaaaaattgtccacagtgggactcccatggccaatggatattgaaggatggatttacccccatgtacattctttttaaccattacccaatttctctaggaacagacaatagtgggtcggacctggcacatgtgtcttatgcgggcggatcacagtacaatcgtgccctaacattgggaaagagccccgatggaatacctagtgatggcacacacaccaccacgccctagtatttcacagagcccatcatgaggaa

SEQ ID NO: 567910 - DNA, 343 bp, Homo sapiens
gatgtattcagaaacagtagagttcatcagagtatgctatgcgactaaaaacccactcaggccccaatgccacctccggaagacaaccaactggctgcactatgttgctgatgcctggccctcctgtactggcggatgtgtcgactcaaaagggacctcgctgtaaagtatgcaaaagccataatcgactatctcaagaactcatttaaagccgcccaagccccataaccgtgggggaccagtggaaactccgtggggtctcagggcagcctaaccaacgccagcgccctgtcaccgtcgaccatcgtcagcatcccacagcgcaaccaccagtgggcggcgg

SEQ ID NO: 567911 - DNA, 217 bp, Homo sapiens
caattttaaaaaccccccccccctgttatagttaatttgccaaaaaggtccccaaagaggactttattttatttaaagcattggtttaattcaccctttaaaaattttgcaaagaaggggagggggggattttaaaaaagcctgccccgaatttaaatgtttttagctttaggatttaactttttggaacaaaaaacccttttttaaaacaagttta

SEQ ID NO: 567912 - DNA, 461 bp, Homo sapiens
aagtacacgttccgccagccattgaccgaggatcgacggccatcagtcttggatgaccggcgaccggcggcatccaggccgtaggcggcggccgcatccagggagtcgaaggtcagatggttccgatcggacagcgcctccaaccgaatgtcggggaggatgatcagctcgtgaggggtcggggttccggatcggttcagcttgccgatcttggtctccccggagattccgacgtacagagagtcaccgaccttgatcgggtcaccgtggctgatcatggcgatgaagtgccaatgaccccggcgaccggtgggctccttcttggactccggtggcagcggtatgtcaccgaacaggtcgaaatcttcgggtcccatcatctcacctcagaactccgatccatcgggcacggagttgaggaccaccttcgccatctggagggcgagctgcttcatcatgta

SEQ ID NO: 567913 - DNA, 174 bp, Homo sapiens
gactgaggatagtgggtgctgaaatttgcgatgagcctgtgggtcttgatccccatcattctgaacctaaacacatatcgtgaacggtgtgaagtgtgctgatagtgtctgtcaccatctcaaataaacagggacttgctcctcattagtggttatgcctgcaaagctttgaaa

SEQ ID NO: 567914 - DNA, 119 bp, Homo sapiens
tagtcatgcagcattcggatgacagatgcacctttgctgatatgatgatagcatcaaatatctctatctaaactcagatagtggtagggccccaaattgatttcaataaggataggctg

SEQ ID NO: 567915 - DNA, 869 bp, Homo sapiens
gtcatcgatcaacccctctttttgatgggatttaattgtggttttttttttttaaccagctgtaagttgggagtaatgcatgtacatgtaaatacagttcacagggcaactccggatgttctaaatactgtgtaacattggcttatttggaacaactatggtatgagtacgtgtgaagtgatttttaaacatgtctcattttttcatgtccccattttattaaaaggagggatgcgacctatttgggtggacagctaagttgtaatttccgtctctaagaggtttctttccttttaagactaaaggcggcttaccagacagaaaacactttactcttcctcactggctaacttcaaagggctaattttttccctagatggctaagttggactattggatcccatcgtatcaacgctgtgaattcccttcatttcctggtcggaggttccattattacactttggtcaaaaataacggggctcatcaactctctgaaagtgtcctaaatgctatgtattttttggccagattggacatcctgattggcaccatgtgcctggaaccctggttatttaccaaggttaattaagtcccggtatttctcacctaggctccgaccacttacgggctgtcgtgacactgacagggctgtctactccagaaaacgattcctatgcccttcagttatggaggtgagcttgtaaggtattggccgtggcggctgacggatttttctggcagacttgtcactctgctggtgggaattctcgatcattccatatgcgcttttggacgggacccccctctccttaatgtcgttgttacccttttgggccccgtcgctctcacaactgcggtgttgcgccctt

SEQ ID NO: 567916 - DNA, 270 bp, Homo sapiens
taaaattggaatgcacttgagtttttctggcaaaagaagttaatttgtatatatatatatatatatatatatatatatatatatatatatatattatatatatatttggaaataaaatggaatattcaagaatttggtgaggccgggcatggtgtcttacacctgtaatcctggcactttgggaggccaaggcaggcaaattgcatgagctcaggattttgagaccagcgtggtcaacatggcaatatcccatctctaccaaaaaaaaaa

SEQ ID NO: 567917 - DNA, 419 bp, Homo sapiens
  misc_feature (413)..(413): n is a, c, g, or t
  misc_feature (415)..(415): n is a, c, g, or t
  misc_feature (417)..(417): n is a, c, g, or t
cgtagcatttccctcaacccatcatgaccccctgttcggccttttttgccaaatttaattttaattttttggttcagcctttaaaattggaaactttcctggcctgcgtgtgttggctcacccccaaagtgctgtaattgcagcactttgggaggctgaagtgagcagatcacttgagcccagggttccagatcagcctgggcaacatggtgaaaccccatctctacaggaaatataaaaattagctgggcatggtggcacacacctctagtcccagcacctcctcaggagtctgaggtgggagggattatctgagcccaggaggtccaggctgcagttagctctgatggttccactgcattccagcctgggcgacagagcatgacactgtctctaaaaaaattaattgaatntntnaa

SEQ ID NO: 567918 - DNA, 114 bp, Homo sapiens
  misc_feature (5)..(5): n is a, c, g, or t
cgtantctcagtgggaagaggggcatgggagattaaatttagggattcatcagtctagtagatagctactgaaggccatgtagcctagcaagcagcatcactctagggcaataa

SEQ ID NO: 567919 - DNA, 195 bp, Homo sapiens
agatgagcatcggcatcaagatgcgccacaggcgtggatgggcccagcagaggcatgacaatgacatcgacatcatcaagaaagaaaacgataccttcacacgtcaagtacacgccaccaggggcgggccgcatacaacatcatggtgctgtaagccaaacaggagatccccgccagcccattccacatcaaggt

SEQ ID NO: 567920 - DNA, 170 bp, Homo sapiens
gccagcaccgagatgacgagctttctgctgccacccacaagcagagggactcggagatcacgcagcagaagcagaaaaaggcaaacaagaagaaggaggaacccaagcagctttgcggcttcacgcccaaccctctcgcccttcacctgtgagcctggagccagtcccac

SEQ ID NO: 567921 - DNA, 141 bp, Homo sapiens
caaatgtaaaaatgcagtattgggtcataactgactaaaattaactgtgatactttactactataataattttgatgctacctcgtgctccatttgtggtgggctgaagtgttgtgatcatgtttaaaataccttgtgatg

SEQ ID NO: 567922 - DNA, 864 bp, Homo sapiens
  misc_feature (71)..(71): n is a, c, g, or t
agcggggccgctcgaggccgtgcgtcgcgggggcggggccgcgcaggcgtaccgggtgccccggctctggngcataaacaagagcggggacgggatgaggcggcggttgatcccagggtggcgagtggcggcgaccgaggcggcgagcggggcccggcgccgaccctgagtgcagcctgacccgccctcgcgcgcgcgccctccccggccgggcccactcgccgcgcgcccagccatgaacctggcgagccagagcggggaggccggcgccggccagctgctcttcgccaacttcaaccaggacaacacgtccctagctgttggtagtaagtccggttataaattttttctccctttcttctgtggataagctggaacagatctatgaatgcaccgatacggaagatgtgtgcattgtagagagattgttctccagcagcctagtggccatcgtgagccttaaagcaccaaggaagctaaaggttggccactttaagaagggaacctgagatctgcaactacagctactccaacacgattctggctgtgaagctcaacaggcagaggctgatagtatgcctggaggagtccctgtacatccacaacattcgggacatgaaggtgctgcattacgatcagggagacgcctccaaaccctgcaggcctgtgttgcgctgtcaatcaacaacgacaactgctacttggcgtacccagggagcgcgaccatcggagaggtgcaggtcttcgataccattaatttgagagctgcaaacatgattccagctcacgacagtcctttagcggcactggcctttgacgcaagtggaactaaacttgccacggcttcggacaacggggaccgca

SEQ ID NO: 567923 - DNA, 404 bp, Homo sapiens
tggattactgtagttgcagatctcagttcccttcttaaagtggcaacctttacttccttggtgctttaaggctcacgattctggctgtgaagctcaacaggcagaggctgatagtatgcctggaggagtccctgtacatccacaacattcgggacatgaaggtgctgcattacgatcagggagacgcctccaaaccctgcaggcctgtgttgcgctgtcaatcaacaacgacaactgctacttggcgtacccagggagcgcgaccatcggagaggtgcaggtcttcgataccattaatttgagagctgcaaacatgattccagctcacgacagtcctttagcggcactggcctttgacgcaagtggaactaaacttgccacggcttcggacaacggggaccgca

SEQ ID NO: 567924 - DNA, 851 bp, Homo sapiens
gtacaacccagccccatgacccctaacaggaggcctctcagcccttcctaatgacctccgggctagccatgtgatcacacgttccaggtccataacgctcctcatagtaggcctactaaccaacacactaaccatataccaatgatggagcgatgtagcacgagatggcacagtatccaagggggcaccgacatcaccagctggtccacaaaaggccttcgatacggggataatccatagtttgattacgcatcagaaggttctggtgtctgcgcgaggaattgaatctgagccttttaccgctccagacctaggccgatactcgcccgcaaagtaggagggcactggccccgcaagactaggcattcgatgccacggctaaattctcgcctagtaagtaccacctcctaatacggtcatccgtatgtagcatcagacagtctagtgagatgtcaagtgcaccgtgtagcttcacgcagtagttctacggtagagagagacaacacgaagagcaaagtaattcaccgccactgcttattacacatttctactggggtctcgtatttcagccctcctatcaagtcctcagagtacttcgaagtctcccgtcaccagtttccgaaggcatctacggctcaaccatttgtgtgagccacacggcgtgtcacgggacttcacgtcgagtgatggatgaactgtccttaagtatgtgttcatccgcaactaatatgtagtttatatcaaaccatagttggttcgaggacggcgctgatactggcatttgacgatgtggtgactactcctgtatgtctccgtcaatgatgagggtctgtacgccccaccaaacacaa

SEQ ID NO: 567925 - DNA, 438 bp, Homo sapiens
  misc_feature (1)..(1): n is a, c, g, or t
  misc_feature (165)..(165): n is a, c, g, or t
  misc_feature (255)..(255): n is a, c, g, or t
  misc_feature (267)..(267): n is a, c, g, or t
  misc_feature (303)..(303): n is a, c, g, or t
  misc_feature (313)..(313): n is a, c, g, or t
  misc_feature (315)..(315): n is a, c, g, or t
  misc_feature (317)..(317): n is a, c, g, or t
  misc_feature (321)..(321): n is a, c, g, or t
  misc_feature (323)..(324): n is a, c, g, or t
  misc_feature (329)..(329): n is a, c, g, or t
  misc_feature (331)..(332): n is a, c, g, or t
  misc_feature (358)..(358): n is a, c, g, or t
  misc_feature (367)..(367): n is a, c, g, or t
  misc_feature (370)..(370): n is a, c, g, or t
  misc_feature (377)..(377): n is a, c, g, or t
  misc_feature (424)..(424): n is a, c, g, or t
naacttcttgctcttaatcctcatcttttagttgaagaataaggcttaagagagagaaaggaaaaaccataatggctaaacttagcagcaccaacacggttctttcatcaaaaagtactcatcatttctccaaactgacatgctacagaaatgtcttccaaaaancgttaagttttcacagagtggggactatgatttccatgctcaaatagtgtaggaaatggtagattacgttagttttgtttactgtaacangtaatctcaggngtccttagacactctaatgtgggttgatctccaganggagaaaggnantnaganannatttncnngcttttataaagaaaacactccattnatcataggnacnacaaaanaaaccagtttggagtatgctggtaaatagtgttattggggacagganagtcacgacacaca

SEQ ID NO: 567926 - DNA, 1063 bp, Homo sapiens
tttttgacagagtttcgctctgttgcccaggctggagtgcagtgacaggatcccagctcactgcaacctccaccctctgggcccaagggattctcccgccttagcctcctgagtagctgggactacaggcgtgtaccgctacgcccggctaatttttatatttttagtagagacagggcttcgcatgccggccagctgggtctcgaactcctgacctcaagtgattcatctgcctcagcctcccaaagtgctggaggatcacttgagcccacgagtttaagagcggggacgggatgaggcggcggttgatcccagggtggcgagtggcggcgaccgaggcggcgagcggggcccggcgccgaccctgagtgcagcctgacccgccctcgcgcgcgcgccctccccggccgggcccactcgccgcgcgcccagccatgaacctggcgagccagagcggggaggccggcgccggccagctgctcttcgccaacttcaaccaggacaacacgtccctagctgttggtagtaagtccggttataaattttttctccctttcttctgtggataagctggaacagatctatgaatgcaccgatacggaagatgtgtgcattgtagagagattgttctccagcagcctagtggccatcgtgagccttaaagcaccaaggaagctaaaggttggccactttaagaagggaacctgagatctgcaactacagctactccaacacgattctggctgtgaagctcaacaggcagaggctgatagtatgcctggaggagtccctgtacatccacaacattcgggacatgaaggtgctgcattacgatcagggagacgcctccaaaccctgcaggcctgtgttgcgctgtcaatcaacaacgacaactgctacttggcgtacccagggagcgcgaccatcggagaggtgcaggtcttcgataccattaatttgagagctgcaaacatgattccagctcacgacagtcctttagcggcactggcctttgacgcaagtggaactaaacttgccacggcttcggacaacggggaccgca

SEQ ID NO: 567927 - DNA, 266 bp, Homo sapiens
ctcaatctgtcattccttacgaacatgccccaagccaggaactaagaaaaagctggattttggctgggcgcggtgactcacgcctgtaatcccagcactttgggaggccaaggcagtggatcacctgaggtcaggaattcgagaccaatctggccaacatggtgaaaccccgtctctaccaaaaatacaaaaactagctgggcacggtggcaggcgtctgtaatcccagctagttgggaggctgaggcaggagaatcgcttgaacc

SEQ ID NO: 567928 - DNA, 384 bp, Homo sapiens
caacgatgtgtcctcagctaccctccaggtgaggtagggatgactgcattaagcccagtgaggttgcgtgtgcgtgtagctctgattgtgtcagtgggctccaggctgggttgagaaaactagatcctgactcaaaagtgaaaatttgctactgcgttgaagattaaaatgtcagaggactccctttatcctgcgtccgcgatctgactttcagcttgcatcttccattaggagctacagattagagacaggatactaggaaacatgctagtgagtctgacgatgtttgcctggctgctatcttagctcagcagtgttgacgggtcataggaggttcttgtccccggtgtcatgtgcgttcttggtcagagaaaatccctacag

SEQ ID NO: 567929 - DNA, 1001 bp, Homo sapiens
tttttgacagagtttcgctctgttgcccaggctggagtgcagtgacaggatcccagctcactgcaacctccaccctctgggcccaagggattctcccgccttagcctcctgagtagctgggactacaggcgtgtaccgctacgcccggctaatttttatatttttagtagagacagggcttcgcatgccggccagctgggtctcgaactcctgacctcaagtgattcatctgcctcagcctcccaaagtgctggaggatcacttgagcccacgagtttaagagcggggacgggatgaggcggcggttgatcccagggtggcgagtggcggcgaccgaggcggcgagcggggcccggcgccgaccctgagtgcagcctgacccgccctcgcgcgcgcgccctccccggccgggcccactcgccgcgcgcccagccatgaacctggcgagccagagcggggaggccggcgccggccagctgctcttcgccaacttcaaccaggacaacacctggaacagatctatgaatgcaccgatacggaagatgtgtgcattgtagagagattgttctccagcagcctagtggccatcgtgagccttaaagcaccaaggaagctaaaggttggccactttaagaagggaacctgagatctgcaactacagctactccaacacgattctggctgtgaagctcaacaggcagaggctgatagtatgcctggaggagtccctgtacatccacaacattcgggacatgaaggtgctgcattacgatcagggagacgcctccaaaccctgcaggcctgtgttgcgctgtcaatcaacaacgacaactgctacttggcgtacccagggagcgcgaccatcggagaggtgcaggtcttcgataccattaatttgagagctgcaaacatgattccagctcacgacagtcctttagcggcactggcctttgacgcaagtggaactaaacttgccacggcttcggacaacggggaccgca

SEQ ID NO: 567930 - DNA, 861 bp, Homo sapiens
ccacacgtcgcccacgcgatcgggcgagggtcggggccaccgacgcggcgacctcgggtccggagcgaccgcagggcagccccgggcgccggccccggatgcgcgtctccatgtgcgcgccccatccgcgcgcggacccgtatgctggacatgacgcgaggcaccgctcccagcctagcctgcagccccgtccgtgcaccgccaagctccatgtcagcacgtggacggactccggacatcgcgacgctgccgccgatctcccagacggctcctgagggacctgtggccgccgacgagggagtcagcgcgtcggggggcagcaccggggacgaacccaggcaggagcgccggcggcacgacgcgcgttcccgggccatgacatccgccgacgaccagagatcagcaggtagactacaaaagggctacagacatgcgacgtctgctgaccacatgcacggtgccgcgagcgcgcggcgtgcggcagacgactcgaaagcccaagaccgcatgctgacagcgcgccaatgacacgccattccatcggtagtgaggcagcagagcaggcgccgcccgcacagctgtgccgaaccagtaacgccggacctgcaaccaaggcccgacgctcagccaagacggctgaggccaagctgatggccgcttgcatgagcgagcagcgagcaagcggcccattcgtaggcaggaaggcagaaccgccacaacggacacatgcaagcaacaaggaaaggaagcaccacacgaattacgaaagtaaccaagacacaggcgcaaggaccgaagcgcacaacaagccgggccaacaagcggactcacgactccgggcagcggaagctgcggaccccc

SEQ ID NO: 567931 - DNA, 1118 bp, Homo sapiens
tttttgacagagtttcgctctgttgcccaggctggagtgcagtgacaggatcccagctcactgcaacctccaccctctgggcccaagggattctcccgccttagcctcctgagtagctgggactacaggcgtgtaccgctacgcccggctaatttttatatttttagtagagacagggcttcgcatgccggccagctgggtctcgaactcctgacctcaagtgattcatctgcctcagcctcccaaagtgctggaggatcacttgagcccacgagtttaagagcggggacgggatgaggcggcggttgatcccagggtggcgagtggcggcgaccgaggcggcgagcggggcccggcgccgaccctgagtgcagcctgacccgccctcgcgcgcgcgccctccccggccgggcccactcgccgcgcgcccagccatgaacctggcgagccagagcggggaggccggcgccggccagctgctcttcgccaacttcaaccaggacaacacagaagtgaacggggcatcaacgagcagctggtcttggccgtcgcgctgtcgtctggtccctagctgttggtagtaagtccggttataaattttttctccctttcttctgtggataagctggaacagatctatgaatgcaccgatacggaagatgtgtgcattgtagagagattgttctccagcagcctagtggccatcgtgagccttaaagcaccaaggaagctaaaggttggccactttaagaagggaacctgagatctgcaactacagctactccaacacgattctggctgtgaagctcaacaggcagaggctgatagtatgcctggaggagtccctgtacatccacaacattcgggacatgaaggtgctgcattacgatcagggagacgcctccaaaccctgcaggcctgtgttgcgctgtcaatcaacaacgacaactgctacttggcgtacccagggagcgcgaccatcggagaggtgcaggtcttcgataccattaatttgagagctgcaaacatgattccagctcacgacagtcctttagcggcactggcctttgacgcaagtggaactaaacttgccacggcttcggacaacggggaccgca

SEQ ID NO: 567932 - DNA, 750 bp, Homo sapiens
aagagcacagccatgcaggtcggtcccgtgttatcgtccgtggctcgcgttagcggacgcttctcccgatgctacgtctacacacatggatgggactatggaaatatacatgtgacttttaaacctgaacagtagctgttggtgatagattggtggtcatccaacatgcatgaaatgaatgagcagtgaaaatgcagcattagtccgatgcggtcatgagacatgtaagctgcgtttgaagagcttccacatccctctactcctaggacagaatcattgtacattaaactggaggataagcacgcgaccagatgataccatgaagcagaagtttacaggccctctattgccaactgttaaggtttcctgctgatcttggcactgatcctgaagcgctggcatttgccatccaggaaccatctcccagtggaactctcttcagtgtcctcccttcaggcacttcccccgggaaccatggtgacaggagccccacagctctaccagacatacttctgtggtgatgctgacccccaatcccgatggacccccctcagaggctgcagctcccatggctaacactcgactccccgtgcttgaggggcaccctcctaagcgcaccatctccagccatctgctgcgactagtacctggccccccattctgataagctccctgtccacacgggcccgcgtccagcaggcctggcgacctcgttcctccaagcctgaagggcgcctcgaggggcggttg

SEQ ID NO: 567933 - DNA, 276 bp, Homo sapiens
gtggtaatgagttgaagcacagcatagtggaacctctagggcagagaacaaaagaatttcccagtgtcttcatcatcatgcactgctaacccaagaaacgtccggtcgcataagtgggaattttggcatgaggtgcttagagaaatctttggtcttttccatgcgcaggctcgacagactctcttttaagtgatgtatggcaatgagaatcatctttattctttagaaaagaactttatgttaatggccaatatttttcgtccgccaccgccacta

SEQ ID NO: 567934 - DNA, 308 bp, Homo sapiens
cacgctcacactgaatatttgctttaatgaaccgaccagcccctgaggagatcttctatgagaacatgcgtttaatgataccgacaactttaccaatgctactctcaacacgttcacagaggaacttaagaagtatggagtgacgactttggatcaattttgtgaggctacgtgggaggaagctccattggaaaaagaaggaatccacgttctagatcggccattggatgatggagctcctcccaataatcagatactacatgattggttaaacctgttaaaaccaaatttcttgagagagggaagat

SEQ ID NO: 567935 - DNA, 251 bp, Homo sapiens
gcgtggtcgcggcgaggtaccatctatgtatttgcattgaaaagttggttatttattccagtcttctttgtctggcttgctttggttcttattggatatgtctccttaggcagtctttatactttattagattattctctttttgtcccccaggttgctgcctccttttcaacactaaatgacaccttctgcccaggtttgcctcaattctagtaagcaatcaccacccatcccatatgggagagatccca

SEQ ID NO: 567936 - DNA, 341 bp, Homo sapiens
cacgaggcgcaccatgggaacacgcttgacctcagttctgcaaacctgctgatgcttcacaggtcgcatcgcaaccaccgtcttggacatctatcatgtgatgatcatcgtcttgttattcatctggcacccggtaaaggtggcccacagaatggcgtcatgcaagatcgcccagatgggccacatcacgatcggtgaccggatctccagcttccggctcatcacgatgctcttcatcatcatccctaacgctactggttagagttttcaaaaaacgggagaactagaagccgcccttcatgtccctgcaaatcattgactatttcctgtgcctgtccacc

SEQ ID NO: 567937 - DNA, 317 bp, Homo sapiens
ttacaggcgtgagccacggtgccagaccctaaattaagactgattgggttgagcaccgtggctcacgcctgtaatcctagcactttgggaggccaaggcaggtggattgcctgagctcaggagttcgatactagcctgggcaacagagcaaaaccccggctctactaaaaatacaaaaattagctgggtgtggtggcaggcacctgtcatcccagctactcgggaggctgaaagcaggagaatcgcttgaacccgggaggcgaggttgcagtgagccgagattgtgccactgcactccaccctggtgggtaccgagc

SEQ ID NO: 567938 - DNA, 322 bp, Homo sapiens
gcgtatcgcctttaccgctgacaacttatctgcacggcgcgggctattggttgaatgagtagcgctgatggtttcgataaagaactagttaatggggataaagggtgtaggcctatacccctatacacttactgcacggccaccctagcgcaactgcaccctaattggagcgcccccctagccaaatccacccttaaccttccctttacaattatcattttcaccaatttaattttactggctatccttggaattctgtcgcctttatcccagcctacttttcacaattttagtaagcctttacccgcccgcccaacacata

SEQ ID NO: 567939 - DNA, 321 bp, Homo sapiens
  misc_feature (197)..(197): n is a, c, g, or t
  misc_feature (228)..(228): n is a, c, g, or t
  misc_feature (252)..(252): n is a, c, g, or t
  misc_feature (310)..(310): n is a, c, g, or t
atggcaggcgagtctacatctccattatataataggatctggtatttctaaagcaggatggggtaaaaatgaggggtgtggaacaagcccagtccccagcccttccctagttcaaggacctacccctcagtgaaattcaaggtggccaatgctagaataacacgaaaccaggagaattttcatagattttctaacgnacttactagcatgtccagatattctactaanatgttttatcctgtgaagggtagnatatcatatatatatccccacttttacgagctggagaaccgtgaggctccatatttanagaaatttgcc

SEQ ID NO: 567940 - DNA, 255 bp, Homo sapiens
gggtcggtaccggacgagcgcccaagtccctagactgatgaaagcactaaatagtagaaagaaatagatttggccggtggctcaggctgggcgcggtggctcatgcctgtaatcccagcactttgggaggccgaggtgggaggatcatttgaggccagaagttcaagaccagcctcgccaacatggtgaaacctcacctctactaaaaatacaaaaattagccaggtgtggtggcaggcgcctgtagtcccagct

SEQ ID NO: 567941 - DNA, 136 bp, Homo sapiens
aaagtgggtgtgggtgagtcgggctgcgtggaggttgtgatagctcacaaaggtgatgtggtagtaggaggtgcaggcatagtgtcctttgagcttgcgcagctctggaaggtggtagattctccctgacgtgttg

SEQ ID NO: 567942 - DNA, 604 bp, Homo sapiens
acatttatgctcgctcccttggtggaatgcctccccttaaggcccccagggcgaaggtcccgaagcccagtaatccctggtgtcgatattgtcatgtaccctcccccgcagggaaccagtttccccaaagaagcctcccagaagttcctcaaagatttcatggaatccatccaaggggaacttgaagaaccgaggcccgaaagagttaacccttttttggcagggggtgcagaaccaatcaagcccctccttgcttatttccaaaactccccgtttttttttggggaaaacctgaatcccaatggcatgggtgcttttttgggcccccgtgaggatggggtgcccccctatatgattttctttaaggatgggttaaaaatgggaaaatgtttcccaaaggggccaatttttttgggtctttcccccgtcctcataactgggttttgcttgtcctcccccccccccccgggctttagaccaatggggctgatgtccttttgggcttttccttttttttggctgtgatttttttggggggggggccttgtttttaaaaaaaacctgtcctgtgggttgttttaaaataaaatgccttttaacccca

SEQ ID NO: 567943 - DNA, 112 bp, Homo sapiens
tcatacagctcctatgaaaaaacttctaccactcaccctagcattacttatattagtatgtctccagtacccattacaagtctccagcattcccccttgggcccttatcgag

SEQ ID NO: 567944 - DNA, 216 bp, Homo sapiens
aagaggtgatgattacggagttatatgtggtgttaccgtccctagatggttaatgagcgagtctcacagtgagacactacctcccaactcccatcccactgcatcccagtcttgccaccagatgagcctttctaaaacactgctgttttctcagagctcttcatttcaaaaccctcagctgattccctaaagcaaagaccccaaatacatcacagt

SEQ ID NO: 567945 - DNA, 357 bp, Homo sapiens
  misc_feature (87)..(87): n is a, c, g, or t
gggaacccatggaaaccgagtccggcgacacaagtttcgagggcccggcccaggtttacctgcccggccgggggccgccgctacccnaaggggaggagctggtcatggacaaggaggcctatgtgctttaccaccgagcgcagactggcgccccctgtttcagctttgacatagtccgggatcacctgggagacaaccggacaaagcttccttttacactttacttgtgtgctgggacccaggctgagagggcccaaagcaacagactgatgatgctttggatgcacaatttgcatgggacaaagcccccaccctcaaagggcagtaataaagggccaggaagaggaaaaaaaaaaa

SEQ ID NO: 567946 - DNA, 375 bp, Homo sapiens
  misc_feature (375)..(375): n is a, c, g, or t
gatttgatacgtttgtcaaagctgctgtgatgacttaatgccaggcttctccttggctgtgagtgtggcatgaagggctggcagcagtggttctcctggatgctagcacagtgggacgaaatgctgagtgctgtcttcttccttcagagtgtgaagaacctaaggagaccagcactgctgagtgtgggcctgacgcgagctgaactagcctggtatttgattctattatgtacatagtttttcattctgaacttggaggtgcttttcagaagatattaactatttgtaaattgtgttttaattaagctttgggacagttccttttaatgttccaaagattggccttgtattaggaaataaagctgaacctggggn

SEQ ID NO: 567947 - DNA, 231 bp, Homo sapiens
ctgaactcaaaattatagaaagctacctaagtaaaaaggaactgacttttatacaaaacaacctggatgatctcgctcgagggcgttgtgctgaatgaaaggagccagtctcaaaagactgcatgttgtaggactgggctggaaaaagccgagccgcagagttgagcagacatgtgcagctgccgggaggtccctgtgtggctgggtgaatggaaagggggaccatggagg

SEQ ID NO: 567948 - DNA, 118 bp, Homo sapiens
tgtgggcgaggactttgatcgcacattgttgttttttttaatagtcattccaaatatgagatgcattgttacaggaagtcccttgccatcctaaaagccaccccaccccaccagatcg

SEQ ID NO: 567949 - DNA, 331 bp, Homo sapiens
ggtacctggatccatcatcgccaatgtaccaggtccaagcaccataatcccccatcgggattatttgaataaatgagccatagcttgttgcttccaccgaaaatttctaaacgattatagccagggctagatcctttttcgtgctgaagactcttcagtagtcaaaggtctcccaatcccttataaagaccaacgggatgtgtcttcctgttaccctgctgatatcatctcgtttctaagtcttttcttcattctgttgaagtcacagctctacttattccagagaacatgctttggatgttatcacctcagaacatttatacgttaacta

SEQ ID NO: 567950 - DNA, 274 bp, Homo sapiens
gggctacacagttactagccaatatttatctcatgcctttcctcgctcatggttcgatatactggtgtcctaggcagtagaggaaccacaccaatccatcccgaattaggtggttaaactctactgcggtgcacgatcctgtaggggaggtcctgcggctgaaatagctcgatgccgagaatgataaaaagcttaacacctcttcatttgcacttttacactattttgaacataagcaaaaagatccaaatctaaaatgcatagaaaatatctg

SEQ ID NO: 567951 - DNA, 209 bp, Homo sapiens
cgggtgacgctagaggccccagttgagtgctgctaaaaaagtggcctcctgagcactgcaggtccacccacagggcagggcggtgcacctttaacctgggcctggacacagctgacacccacacatcccgagcttggacacgcacactagggagctggtggatgggcctcggcctcctgagtgctcaccaccctctctccccacagtat

SEQ ID NO: 567952 - DNA, 650 bp, Homo sapiens
  misc_feature (449)..(449): n is a, c, g, or t
  misc_feature (456)..(456): n is a, c, g, or t
ctctctccacactggactaagaatgacgtacttatagccaactactttccccctaatgtgactgaagggattcataatgatcacaattagcattacggttaagtattttagggttgacgtctaagctcacacttgaaaggtatttatctaatggccactggctcaccagcttcccaccctagcattcattgctagcttaccaatcttaaggctaataattttatcgcacattcaacttcaaaacacaccagtgtttaccattaccactaatcactgaatgccatgaagccatggcactgaaccaggagctttcaccttttatgtgaatttaaaatggtactgtggaggctgaggccattttcttcaggctaacccagattttctaaagcccaacttaaaaagtctacacctgccaaacttgttaaacgcagccacttgaaaataaccancagagcnttgccatcactccgataagctgcaggtttcatcacatgcaccagacaaatctacagggctagtttcagttctctcctgttctagagaatttaatcaagccgtgttataccacccagtatgttttatacactgacagtacgactcccgtaatatagactcaagcgaagactataaagtattatcgttattagacc

SEQ ID NO: 567953 - DNA, 221 bp, Homo sapiens
acagtgaagtgtatggcataatactgtagattatattgttaagtttttctgcttttatttaaaaaacaaaacaaaacaaaaaaaaacaggctgggcgcggtggctcacgccgtgtaatcccagcacttggggaggccgaggcaggcggatcacaaggtcaggagatcgagaccatcctagctaacactgtgaaaccccgtctctaatcattctatggttgt

SEQ ID NO: 567954 - DNA, 226 bp, Homo sapiens
ttagctttagtaagcggttggagcaattcacttccttaatggggtaggtcccaaagagggtattctggccgtgtgggagggctggctaggggtttgtgcccaagagatctgtggaatgaacctcctacagcatgctgctgctgaacagccacactgagtttaaacaagatctacatgtagggcttagaggataaagctcttatatatcttttttttttttttatta

SEQ ID NO: 567955 - DNA, 168 bp, Homo sapiens
ctgctcccaaaacctaagctttacatcatgacttagcactaagatattccttatctcagaacatacaatgtcaggttaaaaaaggtggcacctcttgtgatttcctgttgctactttagcaaatcatcacaaattgctgtataaaagaacacaaatcaagatgtcatc

SEQ ID NO: 567956 - DNA, 405 bp, Homo sapiens
  misc_feature (268)..(268): n is a, c, g, or t
  misc_feature (277)..(278): n is a, c, g, or t
ctctttgacaagaaaatgatagaaagggaaaacagacgaggttaaagcacatgcgtttgtctgaataacaatctctcctgctgttctgcacgttctttgcgtataatgtatgaattacacatagtggtgggtttcacaaaggcatttacataccagtacatcacgtcctatggccgtctttccacacatgtgcatcatatacaccgattctttacaggcatgcatgccatatacactgactacatttgcacacacataccttcccctntctctcccnncaccctcctgcaggtctcttttattcacctgggcagttttgtttctattttaatggtttgtacacatgaatgattttattgcacattattattcttacatggattaaaaagaaaactactttaatat

SEQ ID NO: 567957 - DNA, 581 bp, Homo sapiens
  misc_feature (537)..(537): n is a, c, g, or t
caattctcaagatgtcatacattcttagatctctaaggaacaatcaatacaagatacaagattgatggaatacatcgtcatggcagggaccaaaccaaataaaaatgctcaatggcacatcattcgctaacttcaaagaataatgtaaaagcccatgtaaaggcagcaacaattaccatatgcagagcagctgtcactaagcccaaactactggcttcccaacttaccatcttccttttcctttctgcaatctgctcctctgattccatttctacttcattactaataggagttttttcttctatatcatcaataaaatctggttcctgattatttgatactgatagtctcagtggagaaagctttcttggtttagtttctgggctcttcatttagttggtcgttccttcacaatccaaagtaatattctgattttgtgtatctttttcttttgaaatatctttgtctttttatttccttttttccgtctggtctcataaccactatggatattttccatggattcagaactacgtnttagaacagggcaactgggttaagtaagcggggacctctagagt

SEQ ID NO: 567958 - DNA, 136 bp, Homo sapiens
acacaatgcatcagctcaaccacaggcagcagtatataccccccaacagcacatcactcaccagtctcagcggttcagaacccttgcaccagtgccacctcactcagtctcagcacctcgtggcacctttcagcac

SEQ ID NO: 567959 - DNA, 103 bp, Homo sapiens
agcttgcgtgagactacgcgatggacgcacatatgtgatgtcatctccacctcagcacgacgggcgcctggttgttcgtaaacatgccccacgtggtgccttg

SEQ ID NO: 567960 - DNA, 170 bp, Homo sapiens
cacgaggttgctatccgcggttcctcccactctaagggtaatcggattcagatgcatcttgtcataaattaccgccagttttaactggcagtgctttcatttgtaaaacaagtgttgtcatcttataccacaggtgagtggatccttaggaaagcctgtaaaatttacaa

SEQ ID NO: 567961 - DNA, 256 bp, Homo sapiens
gttctagcctgccagtgggcgtgttagctttttcctgcaatggatggtccactcacgttcgctgtcaccctctggaatcacgtatacaaaaatccaaatattagttgggcatagtggcaagcacctgtagtctcagccacgtgggaggttgagatgggaggatcgcttcagcctggaaggttgaggctgcagtcagctgtgatagcactactacactccagccttggacaacagagggagaccctgtagtcccatt

SEQ ID NO: 567962 - DNA, 467 bp, Homo sapiens
  misc_feature (43)..(43): n is a, c, g, or t
  misc_feature (51)..(51): n is a, c, g, or t
  misc_feature (59)..(59): n is a, c, g, or t
  misc_feature (113)..(113): n is a, c, g, or t
  misc_feature (135)..(135): n is a, c, g, or t
  misc_feature (143)..(143): n is a, c, g, or t
  misc_feature (156)..(156): n is a, c, g, or t
agctcccctggtgacccaaactggtcccttcattagtgacgtnatttcaanttttccanatcagtttagagagttcggcatgcttacaggcagttatgttctaggtgtagccntttttctgggtgtcggagcagncccccccnttttttccccttnaagccggcaacatggcccggttgcccttgcgatcaaagagaagagggctgggcgctccatgatttagcctgaggctcttcaaacatccattctgcttccacgcatggcttctgccattggttctcttcccccagcaccctgaaacgacagaaacaagcaatccgattccagaaaattcggaggcaaatggaggcgcctggtgccccgcccaggaccctgacgtgggaagccatggagcagatacggtatttacatgaggaatttccagagtcctggtcagttcccaggttggctgaaggctttgatgtcca

SEQ ID NO: 567963 - DNA, 343 bp, Homo sapiens
  misc_feature (11)..(11): n is a, c, g, or t
  misc_feature (41)..(41): n is a, c, g, or t
  misc_feature (243)..(243): n is a, c, g, or t
  misc_feature (270)..(270): n is a, c, g, or t
  misc_feature (316)..(316): n is a, c, g, or t
cagagtctcgnctctgttgcccaggctggagtgcagtggcngttcccggctcactgcaacttccgcctcccaggttcaagcgatcctcccgcctcagccccgctagtagctgggattacaggtatgtgccaccatgcccggctaatttttgtattttcagtagagttggggtttcaccatgttgggccaggctggtctctaactcctgacccgcctcggcctctcaaagtagtccagtacttntactactactcctaatagaccaagganagttatttattagtacttattcatctatcctctgcctgggtcccanatatgggccagcagtagctatttattt

SEQ ID NO: 567964 - DNA, 378 bp, Homo sapiens
  misc_feature (13)..(13): n is a, c, g, or t
  misc_feature (42)..(42): n is a, c, g, or t
  misc_feature (76)..(76): n is a, c, g, or t
  misc_feature (98)..(98): n is a, c, g, or t
  misc_feature (178)..(178): n is a, c, g, or t
  misc_feature (285)..(285): n is a, c, g, or t
  misc_feature (309)..(309): n is a, c, g, or t
  misc_feature (324)..(324): n is a, c, g, or t
  misc_feature (338)..(338): n is a, c, g, or t
  misc_feature (355)..(355): n is a, c, g, or t
caagatctcacancccgtcaactcatcttgaagtacgtcaancctctaagcgggagagtcccctttaatcatgagntctcgggagcctatctctgtgnactgtctcccgtctcaggacagacaagttcaagacagatttttatgatcaatcaacgacgtgggctcatgcctacctcgnaccatcaccaaaacgtcaacaccataaccagtttgtaacaagttaatgctctcgaccgacaagcatcgcaggaaatcgcggctctttttctatgagggtcttaaggnttatggcaggggtaggaactatcnaaagggagggactanacttccttgagagnaaccgctgtcattaatnaaagggagcagccctgagcacaa

SEQ ID NO: 567965 - DNA, 455 bp, Homo sapiens
  misc_feature (291)..(291): n is a, c, g, or t
tgcactgtagaatctggaacagacacctgaacgttctttaggtgacttttagggatgttttagctcccctgccacctggggcccacagggagacacccagggacgagatctctctgagccttgaagacatttgcagcccagccctccctgctccttcctgcttgtctaaaacttcgcaattctgtgagatcatagacaaattgcatctcttctgtgaaggctgctctcaccttactaaacccccccccaaattaaaaataaaaacccccccaaaaaaaaaaattttttttnaattccccttccccttttttttaacttttctcaattcaaataacgttattgtcggtaccactcatttggcccttagtaaatgctgtcaatttttattgattgattgatcgagattgcaccactacactccagtctggcgacagagtgagactcgatctcaaaaa

SEQ ID NO: 567966 - DNA, 245 bp, Homo sapiens
taattatttcatggtgataatatgtccagttaaaaaatttggattcaaaatatgtcttcctatggggagttgccatgtgatgcaagttaaataagtggataatgttgggtggagagtcccctaaagctcattcaaaggaataaagacttatagttagttatacagttctgtacccctaaaaaaattgtcaaaggtagatattattttatgtattttggccataataaaaaaggaacaaaaactga

SEQ ID NO: 567967 - DNA, 360 bp, Homo sapiens
ccagttgagacgccggacgcaaatcccgccacgatcaggagtaaaagctcgaccatttttggcatccccatagcttgtacgccgcaagtggcctaaaaggcattggtctgcaaattggtctgcaaggaatggtgcatcatgcgggtagcggctgtcgacagtgcattgaaggagctgctcgagcggtgcgctccggacatcggtgatcgcctcccagctgaacgggacatcgcagctcagatggggtgtagccgtcagaccatacgcattgcatttaccaagatggagcatgcaggcctgatctggcgtcatgtcgggaagggtacgtttcgcgggcctgcgccccttgatgttccttta

SEQ ID NO: 567968 - DNA, 393 bp, Homo sapiens
tccactagtgtaggccattcccagaatccagcctgggtgagaagagcgagactccatctcaaaaaaaagaaaaaaagagagagagaaattagaattcttcttcctcagggcaagttatagaaaccagctatattactctaaccttcccctgccttctgtgtaggagctggccttaagaaattctctgacctacctttctgatagtaggtcataagaccctccttctagagggcttctgtcctataccaggaggaagaagtgctgcatagagaggccaaaaagaatctgaacagacaggccttgctgggttaactctgtctcccccagtctattaccattagatcatacccatttttccaatcacatttccacatggccgcctacactagtgga

SEQ ID NO: 567969 - DNA, 479 bp, Homo sapiens
  misc_feature (379)..(379): n is a, c, g, or t
  misc_feature (388)..(388): n is a, c, g, or t
ctttctttccttctttctcctactctttccttctctctctttctgagacagggtcttgttctgtcacccaggttggagtgcaatggcacaatcatggctcattgcagcctcaatctcctgggctcaaaggatcttccctcctcagcctccttagtagcagggactactggtgcgcaaccccacaactggctaattattgtatttttttggtaggatctccctatattgccaaggttggtcttgaactcctggactcaagtgatcctcccaccttggcctcccaaagtgctgggattacaggtgtgagccactgtgccgggcccacattcttattactaattaacaatttctcttcttctgtgaattgggctgggcattntcacaatgnccatgaatttactttttaaacagttaccttttaccacagaaagaaggtgttggataatggcagtcagaatagctgggatgatggtttttgt

SEQ ID NO: 567970 - DNA, 176 bp, Homo sapiens
agacaggatatggggtaggcaggctcatacactgcaactttgttaacatgagacatcaggcatcacattaacctcccctcctctcttcagaaccctacgttcataaacactgttatatgaaaaagttgccggatttccagctgagcgccggtcgtaccataaccagttggtctggt

SEQ ID NO: 567971 - DNA, 318 bp, Homo sapiens
ctctggagtcgtcgtcgaacctccgacttctgcgttctagattaatggaatacaccagtgcttgggataggctttgggtctaggattaaaaatgccctagcgcaattcttagcataaggcacacctagatcccgttatccccatatcgtagtgatgtagtcgaaaccatcaggctactcattcaagcaatagcgcgggacgtacgccgtaatcgctaagattactgcaggccagctactcatgcacgtaatgggaagcgccgacctagcagatatcaacattaaccttccctcttacatttatcatcttcagaattct

SEQ ID NO: 567972 - DNA, 408 bp, Homo sapiens
agtcggtcgcccttgttttctccacttagtaagtagttgctgttacactactaatctactagctacctgccatgtgttgcttacaatgttttatcctagtagtacaaattcaattcacaatggccagagaattaaaatggctaaggtacttgagagactacttgccactcttaattcagagactgttgtctcactttgaacgtttgtttcaatatccctagttattccttttttttgttacctaaaagtagggactatttataagaactttcatttggcctgcttcggtgtaatattttgacggggagcaatactgaggcacttatttacagaactatcataatgagacttatcagtcagtgagagccctaaattccactcgattcatcaagctccaatggtccctac

SEQ ID NO: 567973 - DNA, 125 bp, Homo sapiens
  misc_feature (47)..(47): n is a, c, g, or t
gaaggcgcacgatggcgcgtccgggtacggatctccagggtcccctngatgacagagtaggccaggacagcactgtggtgactggcagcacccgcttgatgctggacttactctccaggtgacca

SEQ ID NO: 567974 - DNA, 162 bp, Homo sapiens
attataaataatgctaagaattggaaggcgacaatggcttgtcctgatccttgacagcagagctcgaacaaccaatctgtctgtctcttcttcgccaggctcactgtgagttcacagttgtcctccatccctttactttcataatgtccatctttggctttt

SEQ ID NO: 567975 - DNA, 873 bp, Homo sapiens
  misc_feature (10)..(10): n is a, c, g, or t
  misc_feature (26)..(26): n is a, c, g, or t
  misc_feature (30)..(30): n is a, c, g, or t
  misc_feature (69)..(69): n is a, c, g, or t
  misc_feature (89)..(89): n is a, c, g, or t
  misc_feature (94)..(94): n is a, c, g, or t
  misc_feature (102)..(102): n is a, c, g, or t
  misc_feature (104)..(104): n is a, c, g, or t
  misc_feature (109)..(109): n is a, c, g, or t
  misc_feature (115)..(115): n is a, c, g, or t
  misc_feature (117)..(117): n is a, c, g, or t
  misc_feature (127)..(127): n is a, c, g, or t
  misc_feature (133)..(135): n is a, c, g, or t
  misc_feature (142)..(142): n is a, c, g, or t
  misc_feature (164)..(164): n is a, c, g, or t
  misc_feature (196)..(196): n is a, c, g, or t
  misc_feature (199)..(199): n is a, c, g, or t
  misc_feature (220)..(220): n is a, c, g, or t
  misc_feature (222)..(222): n is a, c, g, or t
  misc_feature (224)..(224): n is a, c, g, or t
  misc_feature (226)..(226): n is a, c, g, or t
  misc_feature (228)..(228): n is a, c, g, or t
  misc_feature (237)..(237): n is a, c, g, or t
  misc_feature (244)..(244): n is a, c, g, or t
  misc_feature (253)..(253): n is a, c, g, or t
  misc_feature (262)..(262): n is a, c, g, or t
  misc_feature (274)..(274): n is a, c, g, or t
  misc_feature (277)..(277): n is a, c, g, or t
  misc_feature (281)..(281): n is a, c, g, or t
  misc_feature (286)..(286): n is a, c, g, or t
  misc_feature (288)..(288): n is a, c, g, or t
  misc_feature (290)..(290): n is a, c, g, or t
  misc_feature (303)..(303): n is a, c, g, or t
  misc_feature (306)..(306): n is a, c, g, or t
  misc_feature (312)..(312): n is a, c, g, or t
  misc_feature (315)..(315): n is a, c, g, or t
  misc_feature (327)..(327): n is a, c, g, or t
  misc_feature (329)..(329): n is a, c, g, or t
  misc_feature (333)..(333): n is a, c, g, or t
  misc_feature (348)..(348): n is a, c, g, or t
  misc_feature (351)..(352): n is a, c, g, or t
  misc_feature (359)..(359): n is a, c, g, or t
  misc_feature (361)..(361): n is a, c, g, or t
  misc_feature (369)..(369): n is a, c, g, or t
  misc_feature (373)..(373): n is a, c, g, or t
  misc_feature (376)..(376): n is a, c, g, or t
  misc_feature (382)..(382): n is a, c, g, or t
  misc_feature (384)..(384): n is a, c, g, or t
  misc_feature (386)..(387): n is a, c, g, or t
  misc_feature (397)..(397): n is a, c, g, or t
  misc_feature (406)..(406): n is a, c, g, or t
  misc_feature (410)..(410): n is a, c, g, or t
  misc_feature (419)..(419): n is a, c, g, or t
  misc_feature (421)..(421): n is a, c, g, or t
  misc_feature (434)..(434): n is a, c, g, or t
  misc_feature (439)..(439): n is a, c, g, or t
  misc_feature (465)..(465): n is a, c, g, or t
  misc_feature (480)..(480): n is a, c, g, or t
  misc_feature (528)..(528): n is a, c, g, or t
  misc_feature (557)..(557): n is a, c, g, or t
  misc_feature (559)..(559): n is a, c, g, or t
  misc_feature (858)..(858): n is a, c, g, or t
gaggcgggcnccgccgcgatgctgcnaggnggacggcgcgggcagcttggctggcacagctgggctgcngggccgggcagcctgctggnttggntgatactngnatctnctggcncngcaccctgcnccgatnnntgctgcncccactgctcctcgggactgcnatgcacccgggatggggccctggatagcttcnacnacctgctcggcgcagagaacntnantnanctctacatngagaacnagcagcatnttcagcatnttgagctccgtnatnttangggcntngnggagctgagaaanctnaccatngtnaagagtggtctncntttngtggcgccagatgcnttnnattttantnctcggctnattngcntgaatntntnntttaacgctntggagtttntttnctggaaaantnttcagggcctctncttanaggaactggtcctgttggggaacctntgcactgttcttgtnccctgcgctggctacagcgtgggaggaggagggactgggcggagtgcntgaacagaagctgcagtgtcatgggcaangnctcctggccacatgctcaatgccagctgtggtgtgcccacgctgaaggtccaggtgcccaatgcctcggtggatgtgggggacgacgtgctgctgcggtgccaggtggaggggcggggcctggagcaggccggctggatcctcacagagctggagcagtcagccacggtgatgaaatctggggggtctgccatccctggggctgaccctggccaatgtcaccagtgacctcaacaggaagaacgtgacgtgctgggcagagaacgatgtgggccgggcagaggtctctgttcaggtcanctctccttcccggca

SEQ ID NO: 567976 - DNA, 342 bp, Homo sapiens
ggtttttcttttcccccccatcctttgggggttggggccttcccaaaaggcttttgtttttttgattcctttgggggggaagcagcccaatttccccccgggccccccagttgtgggggggcggggtttttttttaaaacatccccctttccccccggggtcctcccccttcccagggggccaatttttacccgcaatggggattttggggttgtttgttttgtttggggtataaaggggaggttgggggggtgccccccccctgggcgggggggttcttttcccttttccccgggtcgggggtttttttggggggggggccggtgggggccctttgtttta

SEQ ID NO: 567977 - DNA, 1010 bp, Homo sapiens
tcgcctgctgggatgctcgacgccctccccgccttcccccccgaataggcgcccttgtggagccacccctttgctgggcgttcgtcacttgttctcgtcaggattgatccgacgacacccagcggggggttcttccccgcccttcaggccgccccctgcctggggggtggtgattgactgtgccccgcaccttcatccgtgcgacaggtgcgcgcagtttttgctgggcgaccgcgcgggtctgttcctttttgtggtgagcacacacagagaggtggtttggcgagtccgccacgctctcctctcttgatcaagaggaggagcgattctggggtggtttggtctttctccccccgcaccccgcatattgctgcacgaacgatcgggctggttctttcatgggactcgccgcgagcgcaactcgtgcttgtttttgattagcctcgctctgtcttctccgctccatccatctcgctttcctctctttcagaagcccacccaattgttcgccacgcggctcgtgtttgaaccacattgttcctctcgcggtccgcacatagttgtgttttgtcccgctccttccttgctccctccggccgctctcccgcgccgtgtgtcccttcttctcggtgccccctcgggaacacacgagttacttctgtctccggccccgcacggatcgtgtgagggagccggtgggtgggctctgtctggtccgcccgtccgctcccgctccaccgcacgccgcgctcggagatctgtcttcctcacccgagacgcacccccggccttcgggcggtgggtggagaagagcgcggccgcgcgtcatattgtcttctctcgccgtcggccccccgcggtcggggtgtgagaggagtttctcttccttctctgcgctgtttttgcgggagggggtggaaaaggggggggtttccccccccctgggggggccaaaagggccccaaaaaagggggacccccgtgtgaaaaaacccaccctttttattatta

SEQ ID NO: 567978 - DNA, 225 bp, Homo sapiens
gctatacacctgtgaagagagaaagatacgttgttcttctgttttgaccgtttatgaaccgatatatgtttctggtgaaattatgtgtataaacaggtgaacacattgtatacgattatacatatatgtgcatacaacgtatatacaagatttacggaacagcatgtgcatggctgtgtgctgtgtgtgctgtgctgtgctgctgactaccaacccacactggac

SEQ ID NO: 567979 - DNA, 424 bp, Homo sapiens
tggcacacatctgggcaggctccatctcgtgtgctgctggaacccactagaaaccaaatgagccctgcagcaggcctaatcactctgatgtgagatggacctactaactggaagagttatgcctcatattattccaacactaaagagagtggggagaccacttttacctgaagatgaaagggtgctttgcgagattctttgactagcagatggattgttagagtgactttgtgcaggggacttggtcgcttgagtaccgttggaaccaacgaatgggaatattgaccaggagcagggagagggtgcttaggtttggcgtggggtggggttttataggttgtaagagaagggttggcggagagccgcgatggtggtgttagtgtatgtgcgctttggtgtctagaggcagcatagtattacgcat

SEQ ID NO: 567980 - DNA, 475 bp, Homo sapiens
gagatggcgccactgcagtccggcgtgggtgaaagagcgagactccgtctcaaaaaaataaaaatccaaatacaaaaaaaaaaacacaaaaaaccatagctgggattacgggcatgtgtcaccacacccagctcatttttgtatttttagtaaagactgggtttcaccattttggccaggctggtttcaaactcctgacctaaggcgatccaccagcctcagcctcccaaaatgctgggattacaggcatgagccactgcacccggcctgaatttatttttttaagagatagggtcttgctctctggcccaggtgggagtgtagtggcatgatcatggctcactgcaatctcaacctcctgggctcaagcgatcctcctgcctcagcctcttgagtagctgacgctacaggcatgcactaccacacctggctaatttagtctttctatgaaacctaaaaagaatgattggtaaca

SEQ ID NO: 567981 - DNA, 101 bp, Homo sapiens
  misc_feature (30)..(30): n is a, c, g, or t
tcaggtctaaagtgtttaattatcacagcnatatttcacaggaaaaggaatgtagcaaatgggtcaaggtggtataaaaaaaaaatccaggtttgtacatg

SEQ ID NO: 567982 - DNA, 357 bp, Homo sapiens
tgcagataggcacatgatgtttctgatgaacacttccccctgcccttttttttttttccaaagggagcctcgctttgtcacccaggcgggagtgcaggggcacaatctcggttcatggcaacctcggccccccagtttcaagcgattctctggtctcagcctccggagtagctagaataacgggtgcacgccaccgggcggggttaatttgggtattttaagtagagatggggtgtttacaccatggtgggtcagggcgggtctcaaactcttgacttcgtgatctggcttggcttacagcttcccaaagtgtgggaatcacgggctgtgagccacaatgctgtggcacttcaggaa

SEQ ID NO: 567983 - DNA, 298 bp, Homo sapiens
  misc_feature (159)..(159): n is a, c, g, or t
  misc_feature (205)..(206): n is a, c, g, or t
cgtcgacgggaagtataatgacagtagatggtagaccagggtaatataatgacagtagatggtagaccagagtaatataatgacagtagattgtagaccagggtaatataatgacagtagatggtagaccagggtaatatagggacagtagaaggtagnccaggttaatagattgacagtagatggtagaccagggaagtataannacagtagatggtagaccagggtaatataatgacagtagagaccagggtgatataatgacagtagagggtaggtcgacgcggccgcgaattta

SEQ ID NO: 567984 - DNA, 297 bp, Homo sapiens
  misc_feature (6)..(6): n is a, c, g, or t
cgacanctcttgagctatgctgcttagatgtacattccaccagatacatactaaatcatcacccccaagttcatagattcacagatctccagtgacaaggtcacatgtgcagacctctgattgggcaaatcaacatgtagctattggctccatattcacacggaaattacgtgatttttactccgacgaacttataagatctggcacttcacatgaccatcgcttctgtacagccttttgatcacacagtatataacaagatctctacacggggtccacagcattatgctcatcatt

SEQ ID NO: 567985 - DNA, 120 bp, Homo sapiens
atcaccttccggataaggcaggagagtcacggagcgcggacggacgcttcaagcacgggcctctctgggcgaaccattcaggcgcctgccttaaaagaaagagaatctcccgggtgcgta

SEQ ID NO: 567986 - DNA, 202 bp, Homo sapiens
gcgtcgactctcaaaaaaaaaagtaaataagtaaataagttaacatcaacattaagccatgaggatggtgtgcacccttcctacgatgggatgagaagggcactttacctctgtggtcataagaaaaatatcagacaaattcaactgaggggcattctacagaatacctgattagtattcctcaaaactgtcaaggtcattt

SEQ ID NO: 567987 - DNA, 1120 bp, Homo sapiens
gcaataagagcgagactccatctaaaaaaaaaaaaaaaaaaaaatccctattttggtgtcacagggggtttaggacacttgctgaaaatgggccctgttgcccagaaaggcctgctgtgggcccagaaactggccagagattgcgatagggaaatttatcttatcccaaattctagtatggggcccatttgcccctatacaaaccatgtcttcaagggtgagcctttgggcaatcataaagactgatgtctgggatttcctaccgtgtttatcctgtggggacataatggaccatattggggtccagaatcctagacaaaagaaacagggcgttctcacagtttggggtgcccgtcaaaattctagcaatccagtattacttgtgacccagaaattgggtctgcgaacattcaggggggcacatggtggagaccaaaattaaccaggggactccgtggcgtggggccagggtactagtggcacttgaggacctggggaattcaagaaggccaggttggcgcatttttaaaccccttgagaaattcctccgagaagaatatattccggggggtaaatacaagaactccacgtctttacacatgggtgcccgtggggcattttgaacctatttttgaacctgagagcaagcaccgtttaagcccaagaaaacctaattcccgttgagatacacagacgaatttgccactcttgcatgatggggtcacgtgaaagtgtttttgaaaagattcttttcaaatggggcggggcagcgtaaagaggaggatacaaggaaagaggggggaggaagaagagggaacggatgcgcgcagaacgggggttcttaacgtgtgtcaccacgggtgtgtaaattgacagcgagtggttgacaacataagcttacaggaattccacccttcaaagtccgtggggcacagggccacactttagaaaggggcgtgggttatgagagcgacaaaagccccaatttataaacgggggggcctggagggcaaattgtgtccattagggccttcgcccacctttaaggaacacctaacggtcctcttattacaaatacgtggtgtgcaaccaagggggcttaacattagcaccaaacact

SEQ ID NO: 567988 - DNA, 559 bp, Homo sapiens
aagaaagatacggattgttacagtgaaataagatggggaagatggctggaaattgaattttttcagtggtcattgttttctttgtaataagaaggtgtggttgtatgatcacccaaatggatgtaggaatggcatttgacaaaattcagatcttttcatgacaaaaacacttaacaaactaggagtagaagggaatttcctcaatctgatgaagtacatctatgaaagacttacagctgacatcatacttaacagtgaaagattgaatgctttccccctaagattggaaacaagacaggctgtccattcttgccaattatatttaatattatgctgcagattctagccagagcaattggaagaaaaagaaataaaggcatccaattggaaaagcagaagtaaaagcatctttactcacagatgacataatcttgtatgtagaaaattctaaggaatccacaaaaattattagaactaataaatgagtttaggaagcttttaggatacaagatcaatacacaaaattcaactgtattctatacactagcaatgaacaatc

SEQ ID NO: 567989 - DNA, 377 bp, Homo sapiens
aagcgtattgccaatccaagatggcaggtgcggtggctcacacttatagtcccagcactttgggaggctgagatggggggactgcttgaacccaggaatttgaaaccagcctgggatatatgttgcaaccttctgtctacaaaaaaatacaaaaattgctggccaggcatggtggtgcatgcctgaaatcccagctctttgggaagctgagaagggtggatcatttgagatcaggggttccagcccagcctaggtaacatgcctaaacttcatctctacaaaaaatacaaaaattagtcagacttggtggtggcgggcgcctgtagtcccagttactcgggaagctgaggcaggagaatggcatgaacccaggaggt

SEQ ID NO: 567990 - DNA, 148 bp, Homo sapiens
tgactccagcctaggtgcgactctgtctcaaaaataaataaaaaataagtaaatgaatcgtttgtcccttggttattgagttgtgagagtactatatacgtgtatcccggatgcaggacttctcagctgagccgatttgccgatgatt

SEQ ID NO: 567991 - DNA, 253 bp, Homo sapiens
  misc_feature (253)..(253): n is a, c, g, or t
ccaccggcagggagtcctggataaatttctagtatttagattaaaaataactttatattgaattgtatactttaaaatggcaaatggttaattttatgttatgtgaattttagcccaattaaaagaaaggacttcaaaaaggattgcaggctggtggctaacgcctgtaatgccagcactttgggaggccaaggtgggcggatcacccgaggtcaggagttcaagaccagcctggtaaacatggcgaaactcn

SEQ ID NO: 567992 - DNA, 513 bp, Homo sapiens
atctgatggagtcttcaaaaaaggctactagaataaatgagtatagcaagattgtaggataaaagatcaatatataaaaactatatggaccgtactactattttgaactaaatttttgaaaaattgtaaatttaaattttaaaaaaatatcatttgcaacatcaaaaatatgatacgcttagagataaatctgacagaagatatgaaagacatgttgataattacaaaacattgctgagagaaagaaaacatacataaatggaaaacaaacatacatatactttgttcatggttcagaagacttgaaattattcagttctccctcaaatttatctataaattcaatgcaatcccactcaaaatcccagcaggaatttgtgtagaaattcgtaagctgattttagaatttgtatggaaatgtaaagtaattaagtaagcaaaacagcctttaaaaaggacacaaactggagggctaacaccactcagtttcaacaataaagctacagtaaaaaa

SEQ ID NO: 567993 - DNA, 337 bp, Homo sapiens
ggggttcccccggccccgggggagggggggggctgttagtcccccccctcccggcctttgggggtgggacttggggggccccaaactttggggggtttttaaaaaaatttcctgggggggtttttgttttttggttaattccccgcctttgtcgcctgccccgcttgggagggttttaggtgaactgtggggggtgggcccacccccccgggtgggttccccccaggggtgaaccgaaccgggtaggaagcctttttcccccgggccgggggttcagggggttttccctttgcccgtttggccctgggtttaataaaaaaaagggggtttgggttta

SEQ ID NO: 567994 - DNA, 156 bp, Homo sapiens
ttttttttttttccccccccccaaaggggccgttttttccccccctggggggtttttttgggggatttcctttccccgggggggtccaaaccccttttgttttttttccccccccccccccccccctgggggggcggggggggcccccttttccca

SEQ ID NO: 567995 - DNA, 903 bp, Homo sapiens
catgaatggtgagacttacttatctgatctacaaggacacataaataggagtaaaaggaccagtgtagtaacataagttcaaggggaactttgggaccagaaaccactgtgatgtacaaaaaacatggccgaaattcaataaactcacatagaacaataattttaaattaagcttatgataaatgttatattgtcatacaaatagattgcttagaatggttctcaagacattagtaagagaaatgaactcacagtcacaaagaattttataattactatactctgtgtagtcgtgtgggggctgggaaatgtatcttgacattgtagccaatcattttatatttgtcaatgtaaatcttatgggtcttagagtttaatctctctcgatgtcagatttccataagtcttattgaataaagtccatttagattagaagagagatgagaacacatcaatacaagaaaaacaagaatgtgaaatgaaacttggatataggaatatgaaaagaaccttacagaaaagaaagaaaaagaaatgtgtgtggggggaaagcaaaaaacagataatatgcgagggtggagcgataaaaagccaataggagacccccaagaaaaataagaaacaacctacaaacagaaagctgactaaactgcaatcctggaagacacgatcatacaagagaggaaacaacacaaggagaaatagaaagaagagacccggagaatagatcagagggagacacacccgaagaggggggggagaaacaccaagaaggacaggcagaaagcaacgaacacgccagagaccacgaaaaacgaagaaagacgcgttaatgcagtgacacacacggcacacctcagcaccagacaagcccaaacaagagaaaaaaaagaaaaaacaacg

SEQ ID NO: 567996 - DNA, 349 bp, Homo sapiens
tccgtccgtagatcgagcgaggaggataagtgtgatggatagggcactgcctgaggagtcgggagtctggtcattccggggatcacgcatgagcttccgggcatcatgggcctggccctgtgctggtttgcggtttgagagctcgtgtgacagccagtccaaaccatcgtacagacctgtgccttgagtggcacaggtggcctggacttaccaggtgcggctgcgttagagtgctgtaacctcagcttgtcagtcagctcgctcacgggcatggcgttgggcatgtcctgcttgttggcaaataccatgtgcagtgcatcccgcagttcgtcctcctcggtcgatctta

SEQ ID NO: 567997 - DNA, 347 bp, Homo sapiens
aaccccctttaggttcaaaaaaaaatggggggctttgcccccttggacccagcgggtttatcctaaacagttgtcaaggcccccaaaaaaccccctcttgttccctgcagcaaaacccccgaaagtgattcatgcttttggggggccttccgcaagtttagggattgttttgggaatgtttccctgccccccgcaccccggggttgcggccccagaaaaaagataagtgtaactatgcaaaggtgtttggattttttcctgggccgggtccaagtcgggggccctaaaaaacccatttgggggggtttgtttttcaaaaaaaaaaaaaacccccttttttttggcca

SEQ ID NO: 567998 - DNA, 112 bp, Homo sapiens
agagaaaagaccaataccaataaacatgccagtggaccatataacatggatcatctataatgaagtaatcttgttggaggtgacccctactgaagtcatcatcatccatagt

SEQ ID NO: 567999 - DNA, 230 bp, Homo sapiens
agattgcccctgccaggctggctgttgccgaccttcagcgctcaagttctgagacctgatgctggccctgccgccagagcgtggcaggccgatcatcaacggcctgcgccgggctgctgccatgagctcactctgctctacagactgatcctggacgatgcaggatcgacgcagccgtgaagtgaaagtagctctgcctcaccatggaagtaacgaacccctggacacga

SEQ ID NO: 568000 - DNA, 211 bp, Homo sapiens
aaagaacccaaaacaggggcccgtccccccggggtgttttctccccgcccccccggggttttttaacgggtttttggggcccaggtttcccctcagggccccggcgggcccggttttgggtttcccccccggtttggcccccgggggggcccccgggttttggggccccccctttggttttttttttaaagggccaagctggtttttccca

SEQ ID NO: 568001 - DNA, 621 bp, Homo sapiens
ggacggctgtgaagtgggggggttccatgctgcgggatgagaacgtagacgccagtggctcactcgctcctggcaccttccctttcaggctccagatggaccctgggaaggacaaagagggggtgacccagccctcagggccgcagcaaggaagaaatttgtgataccacctcgacgaggatgaggtccctcctggattggcaagcccttattaccagatctacaacagaagaccttcccacatgtggaacaacctcggcaccaggcggacccatcagaactacgccgaatatgcacatctcacagacctctggaaggggcatggggccaaagtgccacacacaaggggtcagagcccgcagggaagagaagaagacggacacaaaacagagacagactgaaaaacgcgggggacaaaaaaacaaaaacaagacaatcaataaaagaacgaaacaacagagacatgaagggggaaacatagaccagatacgaaagcaaggtaacagatgccgaccacacgcgacacatgaagaaatcaagggaagaacgaacaagaacacggagataatgatcgagagaagagcagaaagacaagacgcagggaacacaagaaaagaaaca

SEQ ID NO: 568002 - DNA, 954 bp, Homo sapiens
  misc_feature (740)..(740): n is a, c, g, or t
ccacgcgtcgaaatattatactagcatttagcatctcacttctaggaatactagtatatcgctcacaccggtcatatcctccctactatgcctagaaggaataatactatcgctgttcattatagctactctcataaccctcaacacccactccctcttagccaatatgtgcctatgccatactagtcttgccgcctgcgaagcagcggtgggcctagccctactagtctcaagtctccaacagatatggcctagactacggtacataacctaaacctactccaatgcgtaagaacggtaatcgtcccaaccaattatatgtactaccacgtgacatgactttccagagaaaacacataatttgaatcaacagcaacaacccgacagccgtaagttattagcatcatccctctactattttttaaccaaatgcaagcaacaagcctatttagctgttgccccaagggcttttcgctccgaccccctaacaaggcccgcctcctaatacgtaagctaggctgactcctacccctcacaattgcatggcaagccaacgccacttatccagtgaagcactatcacgaaaaaaactctacctctcgtatactaagtctccctacaaatctccttaattataacattcacagcacagaactaatcatattttatatctgtcttcgaagacacacttatcccgcagctggggttatcatcacccgatgaaggtaacagccagaaangctgaaacgcaggcacatacttcctattcttacagccctaggtaggtgccttccctaatcatcgcctaatttacaatcagaaaaccctagggtcactaaaattctatattcatcttcacggccaagaaatttaaattctgagccacaacgtttatttgagatgttcacaaagctttaggaaaaaaccctttggggcccttagagcccaaaccgg

SEQ ID NO: 568003 - DNA, 153 bp, Homo sapiens
gattgggtgggattttttccccttttatgtgggaaaaagtagttacttgtggcaagaataattttggaataatttctattaaaatcaactctgaagccaattggactaatctgagattgtgtttgttcataataaaagtgaagtggatctgga

SEQ ID NO: 568004 - DNA, 351 bp, Homo sapiens
caatagatttctgaatgcctccagcactgttctttgtgacactctaaacacatgcatgcttctcctcctggggatatgatgatgggtcagccagatgccctgggccttctgttcccaaccccttgatgcccagccctgttcccaatggctgcacacatacaattccagccccaatggacatggttggggctggggggaatggcagatgatgtagatggggacacatgtgaacttgcccctatggaagtggagtgcccctgatggtccatgagatggggaacaaccttcatgtgcctggctcaattggagattgttgtccatgcctacaggagggatgcatggaatcaatgg

SEQ ID NO: 568005 - DNA, 252 bp, Homo sapiens
tgttcggactgggacaacctggcgtctattctacagatctcctctcctcccatgcagtaagctcacttcctccttcgaggattcaagtaactccctgccctctttgataaaaaatcccaaattcagtcttagcagaagtgcttccctccaaccagcatccttactccccgtatcctctgcccttcctactcatacttccactgatatcctggaccacgtacaggcacatttcccagagatttcataccgggt

SEQ ID NO: 568006 - DNA, 183 bp, Homo sapiens
cattgtgtgtggctgtgcatctgcgacaggaggaaaagcagaggatgctggtgcccgtgtgggggtcgctggatacagcgctgacagcatgagtgagttctcttgccatgacacggaacctgcttttttggtgaagcaggatgcgagaagctgtgctgcgtgaagacaaaagcgtggaccacc

SEQ ID NO: 568007 - DNA, 723 bp, Homo sapiens
  misc_feature (57)..(57): n is a, c, g, or t
  misc_feature (284)..(284): n is a, c, g, or t
  misc_feature (381)..(381): n is a, c, g, or t
  misc_feature (435)..(435): n is a, c, g, or t
  misc_feature (446)..(447): n is a, c, g, or t
  misc_feature (462)..(462): n is a, c, g, or t
  misc_feature (488)..(488): n is a, c, g, or t
  misc_feature (658)..(658): n is a, c, g, or t
  misc_feature (670)..(670): n is a, c, g, or t
  misc_feature (707)..(707): n is a, c, g, or t
  misc_feature (712)..(712): n is a, c, g, or t
  misc_feature (723)..(723): n is a, c, g, or t
ggccctcccgagcaaagggaagtgcattctcgcttccgtagcgtgtctccgacggtngggggaaagtaattccggctgttgcaccatggcgtccatggggaccctcgccttcgatgaatatgggcgccctttcctcatcatcaaggatcaggaccgcaagtcccgtcttatgggacttgaggccctcaagtctcatataatggcagcaaaggctgtagcaaatacaatgagaacatcacttggaccaaatgggcttgataagatgatggtggataaggatggcngatgtgactgtaactaatgatggggccaccatcttaagcatgatggatgttgatcatcagattgccaagctgatggtggaactgtccaagtctcaangatgatgaatttggagatggaaccacaggagtgggttgtcctggctggtgcctntgttagaaganncggagcaattgctanaccgaggcttcacccaatcagaatanccgatggctatgagcaaggctgctcccgtttgcctaattgaacacctggacaaagattaagcgataacgtcccttgttgacataaaagggcaccgaaacccctgattcaagacaagcaaaaaaccacgctggggctccaaagtgggtcaacaatttgtcaacccgacaanattggcttgaanaattgcctgttgaaattgcccgtcctcaactggtttncaaanattattgggan

SEQ ID NO: 568008 - DNA, 603 bp, Homo sapiens
  misc_feature (326)..(326): n is a, c, g, or t
  misc_feature (405)..(406): n is a, c, g, or t
  misc_feature (460)..(460): n is a, c, g, or t
ccttgctcgcggagcagatcccccccacaccaagacagtcttgcttcttgtcacccatggctggagtgcctgtgtcacgatcttgtgctcactgcaacctctgcctcccaggttcaagcgattctcctgcctcaacctcccgagtaggtgggattacgggcacccgccaccacacccggctaatttttgtatttttagtagagatgaggtttcaccatgctggccaggctggtctccaactcttgacctcaagtgatccgcccgcctcagcctcccagagtgctgggattacaggtgtgagctaccacacccagccatgatttttngtatttttagagatggggtttcaccatgttggccaggctggtctcaaactcctggcctcaagtgatccacccgacttgnnctcccaaaatgctgggattataggcgtgagccaccatgcctggccaaaaaagcntattttaacaaaagtactgggacatgaagttaagggcagaacaccagtttatctcttttggaaaaagtgccagccctcacctacctgtcttctgtctaggttttccgtgtgtatctgccccgcgagccggtcagacgctcgac

SEQ ID NO: 568009 - DNA, 489 bp, Homo sapiens
  misc_feature (57)..(57): n is a, c, g, or t
  misc_feature (284)..(284): n is a, c, g, or t
  misc_feature (381)..(381): n is a, c, g, or t
ggccctcccgagcaaagggaagtgcattctcgcttccgtagcgtgtctccgacggtngggggaaagtaattccggctgttgcaccatggcgtccatggggaccctcgccttcgatgaatatgggcgccctttcctcatcatcaaggatcaggaccgcaagtcccgtcttatgggacttgaggccctcaagtctcatataatggcagcaaaggctgtagcaaatacaatgagaacatcacttggaccaaatgggcttgataagatgatggtggataaggatggcngatgtgactgtaactaatgatggggccaccatcttaagcatgatggatgttgatcatcagattgccaagctgatggtggaactgtccaagtctcaangatgatgaatttggagatggaaccacaggagtgggttgtcctggcgtggttatgccaacaccccccttttggggggggcccgcgcctcttaccaggcccccaccatct

SEQ ID NO: 568010 - DNA, 1004 bp, Homo sapiens
agcgggcttccgcgccatcaggcccgcgatagcggcgaggtgcgcttacagagtatggtcttccctgccaaacggtgctgcatggtgccatccatggagggtcgtgcgctgggtcttctgtcctgtcgggcactgtggctcgccgagccgagccggaatggcatgctgggtctagtgcggactcgcatacagccctgaagagtcaagaaaggcagcgcgattggcacaagctacgatcctcttgccacgggtacgcgttatggccagccaatggctggtcggtctgtggatgatgagagggcaaattagtgtgcgagaagaaaattgcatgtatcctccttggaaatcaatgatggcgagctcggcgaagagaaaggtgccatgagaggcaaaacccagatactatggcgaaatggtacttcagtcggaatcctttatcgccgaagtttcgagagcttgtaaaacgattctctcattcatacgggagactaatgcacggtgcgtatgtcatagtctgaatcgctgtagctgcagagtgtcgggaaattgataatgagatgacagactagtttgcacaggtgcggggttcaattccagaaattcgtttctctattatgacagagaaagtctaaccaacaagagaatggggaacaatcagaagcttgtagaggactgagtggacttgccggctgagattatgttcataggaagttgcgccaccttgaaggaagagattcattcgagccagtgtgtgttggactagggattggaatgcggacgggctggacaatctgatctatttccaggtaggactgggatttgggcccagcttaaatagaaaggccgggtattcctgatgggagggacaaaggaagggcttccgaaaaccaagtttaggcccttgttgcgcgggcttacgaaccgtggcttgcatctgagtcacgtatgaggtccaatccgagtgatcagtgcatagagggagccgccctacacaacactgggag

SEQ ID NO: 568011 - DNA, 669 bp, Homo sapiens
  misc_feature (555)..(555): n is a, c, g, or t
  misc_feature (569)..(569): n is a, c, g, or t
  misc_feature (575)..(575): n is a, c, g, or t
  misc_feature (589)..(589): n is a, c, g, or t
ggctatagatcttggccttcttccctgaatgctttgtttttttgggcccccaagaaaagtcccttttatagcactttagcacaggcaaggctacgggaacaaagtttcaatgctgctgagagtgaaagaaaggaggaaagtctgccactctaccctgagctgggcagtagggcactggagtaccctaggcaagaagtcagagctatggtatacaataggaccttgctctgggattggctggagctaggatccctaattctggatgtcaagagatttaggtttaatcgtggcatagaagctatcacattgggttcttacctctctgagggagaaccaatcttccagaaacagtttgggagggggctcttctaaagcctttcaaattgggcaagtaactttattcaactagagttgacatacaagaagggcaaaaataatctcacagagctgggaactgctgatagcccttactgagggcaaaagatggctatatggtaagctatactcctaccaaagcaagcaaggagataggattatagataatttcacggacantgggaaataacatnggtgantatacagacaagantaactcacttcaagctgtctgttttaataaattttcaacgtaatgatctatttttaccctcccatctggaacagaatact

SEQ ID NO: 568012 - DNA, 1474 bp, Homo sapiens
aagttggccaaatgagcaagagcgagagtgtatactgtctgttccatcccgacccggggaccacggatacatgggccctgtattcccacactacctcggacccccgtagaagccagggctccagccttctgcagggttacccagagcaccccgactaccagggaccgagagctgacaccgaaatacgctggtcgcattcatgcgagaacattccaaacaggctggacacacgatcggacagggcacgatacgagcagctcgatgatacaaagcccagacacaccgttgacgggacgacggctggctggcgccttaacgaaacatccgcactggacactgcagacctgagcgcgatgatgcccagcctatctgcacatccgagaagatcatcatcatgactctaacggacgcattaacccaataccgtaactactctgctccacagacatggcctggcaactgctccacatacacacaacaccaccgacaccaccatcaaacaccatcttaaccatgggataaccactgcacaaatatatcgtgcacaccccacacggaatcatccaacggcaacactctcctcttggggcactgcccccgtcactggcacaaacacaaccaacgacatggagaccaacattaacacacaataccaatgacacacacacgaatccaaaatcaagaacgacaggacacaacctccgatgcgtaaccccacgaacactgaacagtcaccaaagacggcacacccatcaacacaaaaacaacaagggcaccaagactacctacacaacaggagagacccacacaatcaccaacacacacgcaacggcacacactgcttactacaaacacccaccagtacaaaaaggaaaacgtccctgggccgatgatcagtagacaaaacaaaaacatgcgaaaacagggaagcgacccacacattagcagccggcacatatacgaggcaaggaacgacgagcaggcgcaacatcaggcccccaaggacaacaaaataaaaggaccacaccacaccccaccggaccattccgagacaacccgaacaacgccaccaccacaagagcggagccacggcgactcgccaccccccccagacggcacaacaaacagacaaaccacacaccatgacaacacacacacaccaccacgcaggcgagcgccagacgccccaagactcaatacacagtccacaccaaaccaacgtggcgacaccccaacaccaaggccaacagacacagcggggccacagcaacaacaagcaaacagcaacaagaagcaaaagacagacgcacacacgataccccgagagacacaaccaaaaatacacacacaggaacaccacacatgacaggtgaaacacacgccaaccacagcaccgcaccacaccaggaaacacaagcaggagaacaaaacaaaagaagaaacacccccaacagccaacaccacagaacaaacg

SEQ ID NO: 568013 - DNA, 855 bp, Homo sapiens
  misc_feature (36)..(36): n is a, c, g, or t
  misc_feature (44)..(44): n is a, c, g, or t
  misc_feature (124)..(124): n is a, c, g, or t
  misc_feature (145)..(145): n is a, c, g, or t
  misc_feature (149)..(149): n is a, c, g, or t
  misc_feature (172)..(172): n is a, c, g, or t
  misc_feature (175)..(176): n is a, c, g, or t
  misc_feature (180)..(180): n is a, c, g, or t
  misc_feature (187)..(187): n is a, c, g, or t
  misc_feature (191)..(191): n is a, c, g, or t
  misc_feature (223)..(223): n is a, c, g, or t
  misc_feature (228)..(228): n is a, c, g, or t
  misc_feature (243)..(244): n is a, c, g, or t
  misc_feature (253)..(253): n is a, c, g, or t
  misc_feature (260)..(260): n is a, c, g, or t
  misc_feature (276)..(276): n is a, c, g, or t
  misc_feature (285)..(285): n is a, c, g, or t
  misc_feature (352)..(352): n is a, c, g, or t
  misc_feature (358)..(358): n is a, c, g, or t
  misc_feature (360)..(360): n is a, c, g, or t
  misc_feature (420)..(420): n is a, c, g, or t
  misc_feature (494)..(494): n is a, c, g, or t
  misc_feature (498)..(498): n is a, c, g, or t
  misc_feature (596)..(596): n is a, c, g, or t
  misc_feature (707)..(707): n is a, c, g, or t
  misc_feature (719)..(719): n is a, c, g, or t
  misc_feature (746)..(746): n is a, c, g, or t
  misc_feature (764)..(764): n is a, c, g, or t
  misc_feature (774)..(774): n is a, c, g, or t
  misc_feature (816)..(816): n is a, c, g, or t
gccgccgcgccccagctgcatgatcctgcaggagcngggcaggncccctgcctctctctggtgtgacccccccaccccttgggtccccaggacaccccgggtgggtgtgtggttgcaggaaggnaggttttttaaggcacaaggnagcnaagttgtggtcggggcgcccacntgnnggcnccacgcncganaaaggctccaccaagggatggccccgagggtntggcnccgggtgtggagggnngggaactcncgctgcnacagttaccaagagcntgagctgtncctgttaccgcaggtgagcaaggtgaactagatttaatttttttaaaaacaggtaaactgatttttntttaananaataaaatctttggtctgctaaggttactttagctgtttttaaagtggcttttctctggnatgatggaagttgttgctagggggctcggccgtgggggcctgtgctcctagatggtggacttggagaaggaganccgnagtggtggttcttcccgaggtcgtggttgtgcaggttaatgagggcctggaccgcctcctccacggagcccatctggatcagtgctatcttgcggtcnttctggaagaacttgaatcctttgacgacgcccccattgctggaaaacaggaccttgagatcctcctcggagactgagggcgggatgttggagaggtgcagcgtggccganggcgggaatatnttttttttttttttttttttttttttnttgaagcggtgcaggggngagtagccgnagtccttggtcaggccctggtcctcctggccctcgcgggganctgcacgttctggtgcttcgagagcgtgatgcggatggg

SEQ ID NO: 568014 - DNA, 442 bp, Homo sapiens
  misc_feature (29)..(29): n is a, c, g, or t
  misc_feature (34)..(34): n is a, c, g, or t
  misc_feature (369)..(369): n is a, c, g, or t
ataatggactaaacaccctttgggcgaanacagnaggcatggttcagctctctctggccgagtaaataggaagaaacacagacaccatgcaagtcccagactcatctgagaccttctgggacacggaagctgacattttgagatggggtttcaccacattacccaggctggtcttgaactctgggactcaagcaacctgcccacctcagcctcccaaagtgctgagattacaggacacagtgagaagatggccctctatgaaccaggaagggggccctcacagacaccagatctgccagtgctttgatcttggacttctcagccttcgaaactatgagaaataaatttctgttgtttataaggcacacntcaaaaacactaaataactacccaaaagaatattatcttattactagttaaaccacaatataatatatcacgg

SEQ ID NO: 568015 - DNA, 198 bp, Homo sapiens
catgataaaactctgtctctactgaaaatacaaaaactatctgggcatggtggcgcgcctgtagtcccggctacttgggaggctgaggcgggatagtctcttgaacccaggagacaggttacagtcagccgaaatcacattactgcactccacactccagcctgggcgacatagcaagtctcttttcccaaaaaaaaa

SEQ ID NO: 568016 - DNA, 254 bp, Homo sapiens
ggtcttaccttgaccttctggcatacctagaccttcagagcatacctcgaccttctggcatacctagaccttctggcataccttgaccttctggcatacctagaccttctggtcatacctagacctgtctggcatacctagacctgtctggcatatcctgaccttctggcataccttgaccttctggcataccgtcgaccttctggcatatcctgaccttgctggacataccttgacgcttctggtcatacctt

SEQ ID NO: 568017 - DNA, 463 bp, Homo sapiens
  misc_feature (42)..(42): n is a, c, g, or t
  misc_feature (47)..(49): n is a, c, g, or t
  misc_feature (52)..(52): n is a, c, g, or t
  misc_feature (84)..(84): n is a, c, g, or t
  misc_feature (88)..(88): n is a, c, g, or t
  misc_feature (135)..(135): n is a, c, g, or t
ctgggattacagctgcctgccaccgtgcccagctaatttttntattnnnagnggagaggggtttcaccatgttggccagtctgntctngaactcctgacgtcaggtgatccgcccaccttggcctcccaaagtgntggaattagaggcctgaccccctgctcctggcctgaaatctttaaagccgttttttccctaaaaaacgggaaataataacacctcagaaggtttttgtgaagatcaaagaagctaaatatatgtggcatgatttgtaaagtgttatgcatatgtatgttattcttcctactgtcttctaaccttcccttgcctgctatgacttatctgagagccatgttcccatttatctttttgccaactatgttactgttgtcacacctgaaatggctttgtttttatcaataaatacttgttgattgcggtaaacagcaacagaaaaaaaaaaaa

SEQ ID NO: 568018 - DNA, 1335 bp, Homo sapiens
cagaaaaaggagtgatgggaattctgaggctctccccggccttgtgaaaaccctggaagcggctgcacctccctcctgcctgcacggatttgagcgcggccccgacgtcctggcgtcctgatctggcctgcggagtcccccgctgggctgctgcacttccagcctgctgacccctgcccctgcaagcccctgtggtcatgatcctgcctgagtattgaatgctgctctgtggcttttcctttctgtcgtgatgtgatgcaccgcatctgacgcgccctggaccattggggctgccatgtgtgtggcagcgaatggtggcggaaaacgtgggtcaggtcgagcgtacccaggtccctgacgtaagcgcccctgtcacccgccgagaccctgacacagggctgccctgacggggaaggcccctggggacagggacgaacgggcctggggaaaacaggcgcgtggggccaataggacgaagcggggggccccgtttcccgcctttatttaaagcgcctcccaaagaggaagacccaccaaagtggcccgtgagacacgctggcgcagaacacaggcggtattccaagtcggccgatacccggggattcccatgagcccatgatcgctgcaggattaggtttaggtagcgcatttaccaccccccctgtgggatatcccacctgtaggtcatgcgggcggcgaaaacccatgtttccagccgccccatgagagaatgagagcccagtttcacaaaactgtttattaaacccgcctgcgtgacgagcgtttcggcggggcggccccccgtgagagtttggcattttagggcgatttaaactgagccgaccccgaagaagaaccggcggatttttttctcccgagaaaagacgatgggcgccccatatttacccgagtttacccggccatgccgcaggttttacccaacccatgtggggagctgctgctgcgacaaaacaaaacgggttttttggcgggccagccgcatattttttgggtcggccgactgcctcgtggggaccacttggggatggttcataccccactgcgtatgctggtgaaccaccaccggtgcaggcgctccacaaacaagcagcagctctttaaaaacacccggtgcgaggtgggtagcacgcgattttgattcccctgattatgatgatcccgacagaggtgaccgtgggcgaacaacgcccgcaagaaggtttttgtcttgccccaaagatgtgcgagccccctagtagactagagcaagaggcggtgcccccacgacggtgacggatccgtggcggctggccacagcacaagctgcgtgggtca

SEQ ID NO: 568019 - DNA, 468 bp, Homo sapiens
  misc_feature (36)..(36): n is a, c, g, or t
aaggcattctaaacccaatgtgtgcaaaacccagcncagggtcttccctcattcccacactcagacttgttaggaataacattcaaaatcctaaggaaattgaacactcgaacaaaggagtcttagcaaagcaattttacttctgcgcagaggggtgcctccttggccagtcgccatgagagcacacctgaacaaaggggcacgagagcctttattcctgacacaagtcctgcccctgtaccctttccacattggctggggttgggtcgtacaatctaaatgaatcccggttggctaaacatttgatttttttagataaggtgggcatgtaaaagaaagcagagaagaaaggggaaggggtgtctgtaatgagctagaaagttagtcctctttccgaataaggagaggaacgtgagctggtattggtaatgcctggtactgtggcgtgcctgtgtatctaacaaaggc

SEQ ID NO: 568020 - DNA, 1107 bp, Homo sapiens
tgttttgttgtgtgcttcgtttctgttctgtgtgttgtggggtcgtagttttgtgtgtttgtgtgtctggtcgctgattgtcttgtgtgtgtttgtcgtctgctgtcttcgttgtttgtattgattgttgccctgattatgtgtagcgtgtgacatcagagaacgaagtagaatcaatcaatatccctttcaacgtctccgcctcattgttttagggccgtggcttacccgggggtttccaccctttccgttctggcttcgcctttttacgagccttgggacttcctaccctgggcgttttctctatctcgccgttggcccccttggggctcccggatttgcacccactctccgggtaaccctgggaaaagcgaaagggttaccccattcggcagaattttttgaagccccatgtacctgttccgtgcacacgcgggatccacccgtcctagacttcggagaagatgcgtggggaatccacttgaaaatccgcacagtggaatcggatttgccacacatccaagattctgcgagacccaccagctggacaaccgcatggagtcgttcttcctgccgagactgtgaatacctctacctcctgtttgaccccacccacttcatccaccaccatgggtcccccttcgacccggtgatcacccccttatggggagtgcatcctgggggctggggggtacatcttcaacaccagaagctcacccctatcgaccctgccgccctgcactgctgcccgaggctgaaggaagacgccagtgggaggtggaggacttgatgagggaattcttacatctctccaacggagccaggtcgaaatttcagaaaaacactgttagttcggggccctgggaacctcccagcaaggcccaggaacacatcttctcacccaggaaacccatgacccaggcaagggagaggaagcctgcccaaaccagaaggtccccacttttccagctgcccccagtcagcccttcacctcccagattggccttactgggaccggttttcctagactcctcataacccctggataatttttttatttttatttttttgaggctaaactataataaattgcttttggctatcata

SEQ ID NO: 568021 - DNA, 771 bp, Homo sapiens
gcagaggatcattacagcgactgtagcaattacagtacaggcaggaatgttactgatttcctaaacttcatgatgccatagttgaagtggtgacttgtcttcttcgtagaaggtagcctgttacaaatgaaatggtccataacttagtggcaattgaactgggcgttatatcaacacaaaatgatccagacgtttgctgatgcattgatgggcttaatgaatcaataatatatgaggaacaacggagaaacaggctagccagagaataaccttcaggcttgtatcacgagacaagttaagttcaggacaagtagacaagagaaactaaaaatgttgcatcctggaggttggtggggtgggagatggtcgttcatgaaccaaccacaggccaactggagcaggaatgctggatacaacttcataatacgctgaagagttatctcagccagcatagaaacaatctaacacccattcacagattatgccagccagtcacactacaaaaggtccatgccagttgaacctgcatagatgtggcccagttcctcgttggcacgaccacacgtactctgctcgggaacagccggagattgtgaggttcattgaaccgactcagttcaaactcaatattgtctcatctgtcacgaccagactattcccgcacagtgtgccaaaggcaggtaactgcctgcttctgctcaacttcatgtgaaagacactctttccagaggtgagctacttaagccagctggataaatcaatcctccatgc

SEQ ID NO: 568022 - DNA, 138 bp, Homo sapiens
aatccacggccaggggggtttgggacccccaaaaagggagggggaaagcaggccccccccccccccccccttgttttgttcagaggtttcaaggccccatgaaacaaaaaaccccccaaaattttttttcccgtttta

SEQ ID NO: 568023 - DNA, 184 bp, Homo sapiens
  misc_feature (2)..(2): n is a, c, g, or t
  misc_feature (98)..(98): n is a, c, g, or t
  misc_feature (106)..(106): n is a, c, g, or t
  misc_feature (146)..(146): n is a, c, g, or t
  misc_feature (161)..(161): n is a, c, g, or t
gngccatggactctcaattacatccaaacagtggaggcttacgccctgggacaccctcactgcacccttacagatcacagcccctatacctacccccnggcccagnccctccctcagcactgctctctggggtagctctcaagggncagtttctggatttntccacaatgcaagctacagagct

SEQ ID NO: 568024 - DNA, 262 bp, Homo sapiens
  misc_feature (258)..(258): n is a, c, g, or t
ataaataccaagtaagaccatgaggatagtatgaccaagggtccagagatcctcctttccaaccttttagttccaatgttgcctaaaatattaggtggaagaaagacaacagtaaagacaaagttggagggagagtaacagcccacatcgtgaaacaccttctgtattgtcatcagcataaatttactaacaaactatcaaaacctctactgtttggcattttcgcctccagaagcaaacaagaagaatgaggcaagnaaag

SEQ ID NO: 568025 - DNA, 594 bp, Homo sapiens
ctcgacgtgtatgcctgtcgcgaagtggagtccgaggtcatgatgagtgactaaagagcggggcacgatcgagccacttcaaagaggtgatcgatcccgcctctggcattcccagcaggcacacggaagtctgactctcaactcccgccaaagtgcctgagctttaggtgaacctacaggtcatgtgagtaatccgcgctgttcttagtcagcagtgcttcactaaccttttattggtgagccgaatgaggcatagatgtgctgagatccagcgacctctagacggtgctggccatctccagtgtcccaactacgtgctctatgttatgtctcggatcggctgggccatttcccaacgtcttttgggatttacatctgtccgtgttaaaataatcaaacgaaaaatcagtcctgtgttgtcagcatgattcatgtatttatatagatttgattattttaattttcctgtctcttttttttgtaaattttatgtacagatttgatttttcatagttttaaactagatttccaagatattttgtgcatttgcttcaactgaattttggtggtggtagtgccattatctagcaccct

SEQ ID NO: 568026 - DNA, 995 bp, Homo sapiens
cagcaacacatggtccacggtgcgagttcccctgcgttatttaagatcggtcactaggtacctgatgcagtacatcacgtggcctcgctgaccaatataatgtaggtgcgtcgatctaccgttgctctgtcagcaattgaagtatctcttaccctatcatgctgctatctgcacaaatacagattgcgagagcaaattactgtagaagcagataaggaatctgactatgaatccaagatgcccatttccagaagaatatatgtcatgctggaaatcagacattccaatggtcagggagtgatccaagtgatcacaccaagaataccctgtgtagcgtagggtgcgttacgaacgagaagaagcaggccgttgagagcaaccttgtctaaattgctatacggagaaagccatatgtctcgtgactagctagagctgtgccgtacggttgaacaaccagagaaaagtacacactgggctacaaaggaatttggagatagccaaggaacaggatttcccctagcaagctaccttctgttcaaatcatgaaaaaacgactatttccccttagaatagggaagcttgctatttttaaacgctcttgtagtgcttttcttttaacgcggagatgtagtaaaacgggaaaatgtagctcttagtttacacttcaaacgatgtgggggtctttcagagaactaagaataacagtttatgtgccgacgagagtttgccagatctgaagcatatacctcatttgactaagggtgttactttgggataggttgcagtaccagaccacagccagcagatagaacgcaaaagacacacataaaactcgcttctgagcgtccacttctgcactctctggctcctgctgttactcagcccctggagtctagatcatttctgcacaacttctctgtgccctgaaagatacgtcttccatgggccaaccggtcctccgcaggcctgggacttcgaagtgacccatcccaaac

SEQ ID NO: 568027 - DNA, 793 bp, Homo sapiens
  misc_feature (195)..(195): n is a, c, g, or t
  misc_feature (230)..(230): n is a, c, g, or t
  misc_feature (381)..(381): n is a, c, g, or t
  misc_feature (527)..(527): n is a, c, g, or t
  misc_feature (591)..(591): n is a, c, g, or t
ggggcggggctcacgcgaggcgctgaacagtccgggagattctcgctctgctgctttagcttcggagtgtttggcgacggggcagcgcgagatgtggaggctcatgtcgaggtttaatgcattcaaaaggactaattaccatactgcaccatttgagaatgtccaagcacacagatgcagcagaagaggtgctanttggcacaacaccaaggttgcgcgggagtcataancactaaacagaccaaagttcctcaatgcactgactcttaatatgattcggcagatttatccacagctaaagaagtgggaacaagatcctgaaactttcctgatcattataaagggagcaggaggaaaggctttctgtgccgggggtgatantcagagtgatctcggaagctgaaaaggcaaaacagaagatagctccagttttcttcagagaagaatatatgctgaataatgcgtgtggttcttgccagaaaccttatgttgcacttattcatggaattacaatgggtgggggagtnggtctctcagtccatgggcaatttcgagtggctacagaaagtgtcttttggctatgccagaaantgaataggactgtccctgatgtggtggaggtattcttgcagactccaggaaaaactgggtacttcttgcttacaggattcagactaaaaggaagagatgtgttacagagcacgaattcgctaacaacttttgtagattcttggaaaagtcggccatgtagagggagcattggttagccttggaatctcccttagaggaaact

SEQ ID NO: 568028 - DNA, 589 bp, Homo sapiens
cacgccgcaccggggtcaaattaacactattaatcttccagatatcacttatgtgtcaaactcaagagttatgaagggaccttagcatactgtaactttctgactgagctcctctctactctgaatgcaggagaccctcataggtaggctgaactatcgcccctattcagccggacgaagtcatagacggatggatcttcgtccctctgcaaacccttggactcaagggtctcttataaaagggaagagggaaaatgtaggaggcgtgtgaaccagagctccatctttaacaggagcagggtaaaatgaggctgagacctaccatgcagcattcccagagaggaattctatgtcacaagatgagatgggaggtaagcacaagatacaggtcataaagatctggccgttaaaacagtgtttgcggtgaaggagctggctaaaactcgccaaaaccaagatggtgacgagagtgacctctggtcgactatactgctacgctctcatcagcgccatgacagtttgcaaatgccatggcactgtcaggaagtgaccctatatggtctaaaaggggtaggcatgactattccac

SEQ ID NO: 568029 - DNA, 284 bp, Homo sapiens
caggcactgtgttctgagtgggaaaggctgtatacaccagtggctcccaagggtggtccatggaccagcggcatcagcatcatttgggaacttgttacaaatggaaattcctgggccctaccctcgacatactgaatgagaaactctgtgtttcttagtcagtgtttcagcaatcctcccactcaagtagtccggatgtacccgaggtttgagaaccgctgctgtgcacctggcaggttgctgtgttttagcaatcctcctcccgaccgaagatccaaaattct

SEQ ID NO: 568030 - DNA, 125 bp, Homo sapiens
aatttggtaacaaggaccttattctaaacttcctgtgtcttaaggaatcgagaccgcgcaaaccccggatccggttagagacaaattaaaacacttctaaggaaaaaatttctaacaattaacct

SEQ ID NO: 568031 - DNA, 882 bp, Homo sapiens
cggggagaatgtagtgaataaatataaagaagaaaaggggcttgatggcgaccgcgcatacgatgtagcagctcgaacctcacctgcatgagagaagaatgaagagattcagagtggacgaagaattccaaaccccctttgcgagtcaaagtcgaggatattttttattcaggccagggaatggaataaagataataggggtaattaagaatggatgccaggtaatggacgacgagaagagaggtatgagaaacaactagtgctgtaatggggtttattttatgagagaagacgtgaatagaaggtccttgtgtgtatgaaagcggggagtgataaggcaagcagggtgtggcagaggggagggaggtaagagagagtggtagctataaatagtcatgcgtaagagggtgagtaaaggtgaccccggggagacgatcttgtggtaagtgtggtggtaagtagaaggataagtattgtttaagcgtgaaggatgggcgaatattttatttatgtccgcgtaggttgatgagttcaatggtgcgagatggacatagcgatataagtatctgtttgatgttaacggctagatatagattgaaaccgacaaaagaagttagttcggatgcagtaagagatgggttggggggagtggaaagaagagggaggcgttgagctgcgcgagtgcatttttatcgcgaataggatttatatgagttgataagctatgatgtgattgcgtatcagatagaatacggtgacgaatgcgggagagagtgggatgagtggatggggagaatattatgatgttgcgcggtatgctggagataatgtgcgtgtaatttgcgtcgcagtgatatatttgatataatgataagaagaagg

SEQ ID NO: 568032 - DNA, 86 bp, Homo sapiens
ggatttgctggtgcagtacaactaggcttaatagggacatgtccctattaagcctctcgaattcgagcctcgaattcaagttctaa

SEQ ID NO: 568033 - DNA, 778 bp, Homo sapiens
cttcgttcttcgaccccgccggtaccgaggagaccccattctataccaaacacctattctgatttttcggtcaccctgaaagtttatatccttattcctaccaggcttcgtgaggtaatctcccatatttgtaacttactactccgagaaaagaaggaaccatttggatacataggtatggtctgagctatgatatcaatccggcttcctagggttgatctgtgtgagcacaccatatagtttatcagtaggaatagacgtagacacatctgagcatattttcacctccgctaccataatcatcgctatccccaccggcgtcaaagtatttagctgactcgccaggacatccacggaatgcacactagtgaaatgatctgctgcaggtgctctgagccctaggattcggtgctttctttgcacccgtaggtggcctgactggcattgtagttagcaaactcatcactagagcatcgtactacgagctgacacgtactagcgttgtagctcacttccactatgtcctatcaagtaggagctgtattgccatcataggatggcttcattcactgatttcccctattgtcacggctacatcctagacaaactacgccaaaatccatttcactatcatattcatcggcgtaaatctactttcttcccacaaactttctcggctatccggaatgccccgacgtttctcggactaccccgatggtaccacacatgaacatcctatcatctgtaggctcattcattgcttctacgcgaatattaa

SEQ ID NO: 568034 - DNA, 726 bp, Homo sapiens
ggtggtgttgtacacctgtaatcccagctgtgtcaggaggctgaggcacaagaatcgcttggacccgggaggcagaggctgcaggtgagctgagatcgcaccactgcactccagcctaggtaacagagtgagactcttaaaaaaaaaaaaaaaaaaagggaatttaaattccgggtttcttcccaaaattcttgtgaaattcttgtgaactctgtgaatatttaattgccgataaaatttaatccctttgggtgactttaaccttggaaattttttataagttatttccagcagttttaccccatgggcattttaagtcactactagaaaggggtagttcaaaaatttttttcaaagttcaatattgggcaaattcgaaataatcgtggcaaaccctttttgccttgcatttacagaatggaaaacagccgaaaaaggggttcctggaatgccttgggcaaaacacttaacagcaatggggaaacgcaggtaccagttgacaatggcggcaaccttgtgcttgaacacctgggggcatgtctgcacaaaaccttaaaacagtcatgctgaggcctgggattaccaccgtcaggccactgggtgtagatcccttcagaacgctatccacctaactcggctatggggatattatccacaggtctgatgggccaacttttcgaaattgctgtggcactacttccacacaagcccttggccttagcgaga

SEQ ID NO: 568035 - DNA, 177 bp, Homo sapiens
tgcatatgggtcaataggagctgtatttgccatcgtagggaggcttcattgactgatttcccttattctcagggtacaacctagcatgcaaacctacgcgcacaatccatttcaatatcatattcatcggcgtatatctaactttcttcccaaaacactttgttggccttatcgagg

SEQ ID NO: 568036 - DNA, 239 bp, Homo sapiens
ccctttttgggccctttttttggccattttcccaaaatgccggggaccttataaaatttttttaaagaaataggtttggaaaaatttaaaattcccctaatttggttttgaattggaaaaggccaggattctggttttgggggttttttgtttttttaaaccttggttaaaagggccaattggccctttttagaatggttttttggggtaattttatgggccggaaataaaaattttta

SEQ ID NO: 568037 - DNA, 599 bp, Homo sapiens
tcaaccagtaccactcaagtagctggtgcctcataggctcgcagcatcaggtcgcatgcccagcgagggcaccgtctcgtcatcataggtgtgggtcttgataaagttgatggattgtctacgtcatagcagctggaagcattgtactgcatcccggggagctagcgcaacacccgtgtcggagtcgaagcacctgatcctccggcaccggcgtccagatggactcgggggacttctgctctcggaagcggccttcatacacagctgccacctgtgtcaggtcaaaggcgcagacagccgagccaggtatgctgttgctgggcgtggaaaaaacggccaggaccacgggccggcccccgaggctgaccacgcccgtgacagcctgcagcacgttgaagtagaaatgggagtctccgggtacagagcagttgagccgtgccttcaggaaggacgtccactgcttctccagcacgcggggggagcctcccacgtcgttcttgcacactcgggccacgcgggacaccaccaccttctccaggtagttaaactccatcgcaatctcccggaagaagaagtagacatggctgccccactccagc

SEQ ID NO: 568038 - DNA, 131 bp, Homo sapiens
acaaagggcgcttgtgatacattgagatcgaacttatggtccagggcgggcccaggcctccgcaagggccgggggtgttgctcagcattgcacacggcccgctgcaccttggccaggtctcccccggggac

SEQ ID NO: 568039 - DNA, 211 bp, Homo sapiens
caagcaccaggctctacagccctggttacctgcaggacaggtgggtcacgtgtagcgccaggggcagccccacgcgcagtcaaatgagagatccagttcctctcatattcttccccaaacactttggtgtttggcccaaaacctgcaccaattgtggcaagccccttgcccatttccgcgagacggctaggtccaccggttgaatccattc

SEQ ID NO: 568040 - DNA, 510 bp, Homo sapiens
atgcaaggccatcgctcaccttcctcatcacacgcccgacaggatatgcattacaggtttctgactacccttgttgcatatcttgtgagagaaagtctaatgggaaactcctcaagaaaggccgttatgactgtgaacagcgcgtcaggacgatatccatcgtactgcctactcctctgtgtaattttattccctgataccagccagtgccaccttgtttaatacatgggaactcactgaaattcattctgtatattgcccgcaaagtcttaaagatttcatccacagtcaggaattaaacttataccaatgagagcctcacacattcgaggatgtactaagcactacaggcctcacagaaacagagatcccatcttggagttttcagtcccacatgggagataaagggttttgaacattaaatgacaaaaacaacagccagaagaaaattctcgtcctttttcattactatcagacttcaataaatgtcttggccttgccatatgcgat

SEQ ID NO: 568041 - DNA, 122 bp, Homo sapiens
aagaaatcgcggtcgctttctccaagcctacgttttcacacttcttgtaatgcctctacctgcactacaacacataatgacccaccagtcacatgcctatatatatgtaaaacccagcccat

SEQ ID NO: 568042 - DNA, 149 bp, Homo sapiens
cgctcataatactccccgatgccacgttccggcgatccaggatctcaggtgagctcctcagtagtgacaaagccatccccatcattgtcgattcgatcaacaatcttccctagcctctccttgctctcgtccggggagtgatgctttga

SEQ ID NO: 568043 - DNA, 952 bp, Homo sapiens
tttttatgctttttctctctgtttcattgggtcgggtatctgttttgtgtctttgttgttttcgctcttttttcctgtgtgtttatttcccgcgggtggttccttttttttccttctcttggtatgcctgtatccgtctggtttctgtttagttccttgcgggtgcgttttcttgtgttcccttgttttcttctgtttggactgttgttcctggttttttggcgctctggtttccttgctggacgctttgtcctcgcatgtgcttcttggttgctgggtacgctcagcatgtcgcctgcaggtcccgagcctgccacacgggaaggcagctaaggcccggcgaggaatcgagcgcagcgccgcgtgggctggcacttctggggacccagcacaccctcagcagccgctggccacgggtgctaagcccctcattgcccggagccggcagggccaccgccagctgccatccgagtgcggggcccaccaagcccacgcccacccggaactccagctggcccgcaagcgccccgcgcagccccggttcccgctcgcgcctctccctccacacctccctgcaagctgagggagcgggctccaggccttggccagctcagaaaggggctcccacagtgcagcggtgggctgaagggctcctcaagtgccagccaaagtgggagcccaggcagaggaggcgccgagagcgagcgagggctgcgaggactgccagcacgcatgtcacctctcaccagcactttgggaggctgaggcggagtggatcaacgaggtcaggagatcgagaccatcctggctaacacggcgaaaccccgtctccactcaaaacactacaaaaagaaagttcgagcgtgggccgcctagtgcccgcagtcccagcaaatcaggaggcctgacgcaagagaagcggcgtgactaagccaataaacccgagagagca

SEQ ID NO: 568044 - DNA, 105 bp, Homo sapiens
ccatcagcacattactatgataaatcacactacatctactcacacaaaacctgcatctgctgctgtgcagaactgataattacttttcagcatgtaacacgaaac

SEQ ID NO: 568045 - DNA, 261 bp, Homo sapiens
gctcagtggtttcaccacagtctcgtgtgcgcctgagctctcagcgtgccgtggcgcgccgcgtggagagagcggcgcggtgagatccctcatcgctgccagaggtgcgggtgagcaagagcagccaaccctgtctaggaccattcggggtccccggcgcaacccggagggcagggagtgcccggacgcgacaggacagcgggttggtggtgaggggcagcacgcgcaagtggctgcaagaattgcgccgtcccggggcgt

SEQ ID NO: 568046 - DNA, 246 bp, Homo sapiens
gtcaggtaaccgaaggaaaaaacgccgcgcgccgctgccaatattggcgttggcgtctgaagctgatactcggcctggacaatatccggccgccgttgcagcatggtccgaggtcaacccggccggctcgcgcgccaccaggtcggcggacagcggttgtgccggctgagaatccggcaccgggccacccaccaggaacgccaggctgttgaggtcctgggccaccgagtctgaaggcagtctgga

SEQ ID NO: 568047 - DNA, 903 bp, Homo sapiens
  misc_feature (83)..(83): n is a, c, g, or t
  misc_feature (316)..(316): n is a, c, g, or t
  misc_feature (354)..(354): n is a, c, g, or t
  misc_feature (402)..(402): n is a, c, g, or t
  misc_feature (497)..(498): n is a, c, g, or t
  misc_feature (502)..(502): n is a, c, g, or t
  misc_feature (520)..(520): n is a, c, g, or t
  misc_feature (543)..(543): n is a, c, g, or t
  misc_feature (566)..(566): n is a, c, g, or t
  misc_feature (570)..(570): n is a, c, g, or t
  misc_feature (651)..(651): n is a, c, g, or t
  misc_feature (659)..(659): n is a, c, g, or t
  misc_feature (665)..(665): n is a, c, g, or t
  misc_feature (681)..(681): n is a, c, g, or t
  misc_feature (694)..(694): n is a, c, g, or t
  misc_feature (698)..(698): n is a, c, g, or t
acagtcctcggcccaggccaagcaagcttctatctgcacctgctctcaatcctgctctcaccatgagcctccgcctgcagagntcctctgccagctatggaggtggtttcgggggtggctcttgccagctgggaggaggccgtggtgtctctacctgttcaactcggtttgtgtctgggggatcagctgggggctatggaggcggcgtgagctgtggttttggtggaggggctggtagtggctttggaggtggctatggaggtggccttggaggtggctatggaggtggccttggaggtggctttggtgggggttntgctggtggctttgttgactttggtgcttgtgatggcnggctcctcactggcaatgagaagatcaccatgcagaacctcaatgacngctggcttcctacctggagaaggtgcgcgccctggaggaggccaacgctgacctggaggtgaagatccgtgactggcacctgaagcagagcccanntagncctgagcgggactacagnccctactacaagaccattggagnagctccgggacaagatcctgacngcancattgaaaacaaccgggtcatcctggagattgacaatgccaggctggctgttggacgacttcaggcgtcaagtatgagaantgagctgngcctgngccagagcgtggaggncgacatcaacggnctgngccgggtgctggatgaggtccacctctggtcttgagaaatgacctgggagaatgcagagacggagagacctgaatgaagagctaagcctacatttaagaaagaaccatgagagggaatggagggcgttagcaccagtggtcgggccgggtcactgtgaattcgtgccccccggatatacctaaccgggctgccaatacgggcgac

SEQ ID NO: 568048 - DNA, 835 bp, Homo sapiens
  misc_feature (18)..(18): n is a, c, g, or t
  misc_feature (31)..(31): n is a, c, g, or t
  misc_feature (33)..(33): n is a, c, g, or t
  misc_feature (55)..(55): n is a, c, g, or t
  misc_feature (59)..(59): n is a, c, g, or t
  misc_feature (74)..(74): n is a, c, g, or t
  misc_feature (93)..(94): n is a, c, g, or t
  misc_feature (159)..(159): n is a, c, g, or t
  misc_feature (239)..(239): n is a, c, g, or t
  misc_feature (241)..(243): n is a, c, g, or t
  misc_feature (247)..(247): n is a, c, g, or t
  misc_feature (252)..(252): n is a, c, g, or t
  misc_feature (258)..(259): n is a, c, g, or t
  misc_feature (266)..(267): n is a, c, g, or t
  misc_feature (271)..(271): n is a, c, g, or t
  misc_feature (335)..(335): n is a, c, g, or t
  misc_feature (337)..(337): n is a, c, g, or t
  misc_feature (351)..(351): n is a, c, g, or t
  misc_feature (355)..(355): n is a, c, g, or t
  misc_feature (357)..(359): n is a, c, g, or t
  misc_feature (378)..(378): n is a, c, g, or t
  misc_feature (381)..(381): n is a, c, g, or t
  misc_feature (383)..(383): n is a, c, g, or t
  misc_feature (389)..(390): n is a, c, g, or t
  misc_feature (394)..(394): n is a, c, g, or t
  misc_feature (399)..(400): n is a, c, g, or t
  misc_feature (402)..(402): n is a, c, g, or t
  misc_feature (405)..(405): n is a, c, g, or t
  misc_feature (408)..(408): n is a, c, g, or t
  misc_feature (420)..(420): n is a, c, g, or t
  misc_feature (428)..(429): n is a, c, g, or t
  misc_feature (437)..(437): n is a, c, g, or t
  misc_feature (439)..(439): n is a, c, g, or t
  misc_feature (473)..(475): n is a, c, g, or t
  misc_feature (488)..(488): n is a, c, g, or t
  misc_feature (497)..(497): n is a, c, g, or t
  misc_feature (505)..(505): n is a, c, g, or t
  misc_feature (524)..(524): n is a, c, g, or t
  misc_feature (541)..(541): n is a, c, g, or t
  misc_feature (548)..(548): n is a, c, g, or t
  misc_feature (579)..(579): n is a, c, g, or t
  misc_feature (583)..(583): n is a, c, g, or t
  misc_feature (643)..(643): n is a, c, g, or t
  misc_feature (653)..(653): n is a, c, g, or t
  misc_feature (662)..(662): n is a, c, g, or t
  misc_feature (664)..(664): n is a, c, g, or t
  misc_feature (668)..(668): n is a, c, g, or t
  misc_feature (671)..(671): n is a, c, g, or t
  misc_feature (696)..(696): n is a, c, g, or t
  misc_feature (698)..(698): n is a, c, g, or t
  misc_feature (708)..(708): n is a, c, g, or t
atgttttgcaatcttaanacagacatgcttncnaaaaagattaatacagaaccancctnccgttttggataacnctatccagctgtggaaagnncaacctgtggtttctctgcactggtgtttaatggggaagaatatgaacagctttaaagagctgtncattgtggttactactattaaaaaataagatctgcacgagtctcactggcctttgggtggcctttgtggacgcctcgtancnnnaaantgttnatctgnnttccctnncatncttttaagttaaaaagttaacatcgggacatgggtttgatcttttgttgtacctgatgacagtncngagatccccccccncccncnnnccgcgcgcccaagcccctnacngnccctgnnccgnccccnntnccnaancctaatatttcngctgtgcnnttaatacncnaaatattaggggatggggtgttgaagctttcccnnnttggcttttaacnatttatagnatttaacngatggactggctttcatgnggccccccatttaaagntatgagnacatacccatggtttacaacttttactatanaccnttccttggcccccaagtattttaaaagtgtgcccccttttaacctttactttttttaagntgaaggtganactttttcnanatangangaaactcatgtcaactgaagtgagngnaatctcaganatcaacattattatattttaaaaacccgctatggaaaaatcacctgaattctgtcatttgtcagaattacaggacctttttttctttaacctttagcattaaataaaaataaaattgggagccccga

SEQ ID NO: 568049 - DNA, 1048 bp, Homo sapiens
  misc_feature (83)..(83): n is a, c, g, or t
  misc_feature (461)..(461): n is a, c, g, or t
  misc_feature (499)..(499): n is a, c, g, or t
  misc_feature (547)..(547): n is a, c, g, or t
  misc_feature (642)..(643): n is a, c, g, or t
  misc_feature (647)..(647): n is a, c, g, or t
  misc_feature (665)..(665): n is a, c, g, or t
  misc_feature (688)..(688): n is a, c, g, or t
  misc_feature (711)..(711): n is a, c, g, or t
  misc_feature (715)..(715): n is a, c, g, or t
  misc_feature (796)..(796): n is a, c, g, or t
  misc_feature (804)..(804): n is a, c, g, or t
  misc_feature (810)..(810): n is a, c, g, or t
  misc_feature (826)..(826): n is a, c, g, or t
  misc_feature (839)..(839): n is a, c, g, or t
  misc_feature (843)..(843): n is a, c, g, or t
acagtcctcggcccaggccaagcaagcttctatctgcacctgctctcaatcctgctctcaccatgagcctccgcctgcagagntcctctgccagctatggaggtggtttcgggggtggctcttgccagctgggaggaggccgtggtgtctctacctgttcaactcggtttgtgtctgggggatcagctgggggctatggaggcggcgtgagctgtggttttggtggaggggctggtagtggctttggaggtggctatggaggtggccttggaggtggctatggaggtggccaggtcaacgtggagatggatgccaccccaggcattgacctgacccgcgtgctggcagagatgagggagcagtacgaggcctacatgaagaagaaccatgaagaggagatgaaggaatttagcaaccaggtgtcggccagtcaacgttggaggtggctttggtgggggttntgctggtggctttgttgactttggtgcttgtgatggcnggctcctcactggcaatgagaagatcaccatgcagaacctcaatgacngctggcttcctacctggagaaggtgcgcgccctggaggaggccaacgctgacctggaggtgaagatccgtgactggcacctgaagcagagcccanntagncctgagcgggactacagnccctactacaagaccattggagnagctccgggacaagatcctgacngcancattgaaaacaaccgggtcatcctggagattgacaatgccaggctggctgttggacgacttcaggcgtcaagtatgagaantgagctgngcctgngccagagcgtggaggncgacatcaacggnctgngccgggtgctggatgaggtccacctctggtcttgagaaatgacctgggagaatgcagagacggagagacctgaatgaagagctaagcctacatttaagaaagaaccatgagagggaatggagggcgttagcaccagtggtcgggccgggtcactgtgaattcgtgccccccggatatacctaaccgggctgccaatacgggcgac

SEQ ID NO: 568050 - DNA, 608 bp, Homo sapiens
cttttttttgattttgaacatatctgataataactttggaactgaagtaaggttctgttaaaatatactttgaagaccctttaaagcagtgaatctgaaacaatttcgacacccttaagtggttgatacgtacctatttcaggtattttgaggtatttaccataaactaaatttagaaatttttcagacttcactctgcacagctaaacattacaaacattggcatacggctggggctttaccttctagattctacttgagcacgcaaggtgacgtacaaagcaactttgcagcttgtctggtaactgacacagaattacgtggcgcaagctgtgaactcccaaaacgagctcatacgctcttctacaagttctccacaaaccactttggataacacttcactcgcatgcagctctctatcctctcatggatgctggccccataattagtcacagaccagtggcgtcttcttgccccacttccacactggtgcagaacagtttcaagtggcccgtctctccacagccaattcgtctaccgcgttaatggcaccacacacttccccagtacaaaactttgtacttgggacttggggcagatgccactcg

SEQ ID NO: 568051 - DNA, 228 bp, Homo sapiens
tgaacataacgcctagaacatttagactatgaacatccccactgttagtatactaccagtgtagactacccttcagttaaagacctctagaagtacacctgtcatagagcaggttggatttattgctcattgcagcaaagaacacagaccgcagtggaaccatggggatgtcctagtaacagggtgttataatgtattataggatttgggcttaggataatattgggg

SEQ ID NO: 568052 - DNA, 405 bp, Homo sapiens
gaaaggcaatttattgaaacaaaggctacaataactattgggaaatctggatgtattctgaaggtatagtcaggctgaactgatttctggactcagacgtttccctagatgctggctgccatgtgagatgcacgcacagcgttcccctgtctggtccatctgcccgccaccctctccgtttcccaccaaagtcattcattcagcgcttcattcagttattcattatttcattcggcactcagatagcagcagacttggaattgattcgctttggtggaaaatggcaataccatccagaaaactggacacagaatctctgctccatgtccggcagctactgttgttttctgctgaatgctgactaggcccaggactgcaggctaggttatgggcattgggagagac

SEQ ID NO: 568053 - DNA, 219 bp, Homo sapiens
  misc_feature (25)..(25): n is a, c, g, or t
  misc_feature (71)..(71): n is a, c, g, or t
  misc_feature (130)..(130): n is a, c, g, or t
  misc_feature (152)..(152): n is a, c, g, or t
  misc_feature (190)..(191): n is a, c, g, or t
tactttctggcactacaagatgctncctggcactgcacgtatattttgtgccctactcctagaattaggcntttgtccaaggagctgtggttccttttattggagaatgagattagaaaccaagacctgnacactagatgtgcttgctgttnctgggctgtcactgctttgaggccatctcagagcaacnnaatatgtgtgtatatactaacctatgta

SEQ ID NO: 568054 - DNA, 445 bp, Homo sapiens
tcgtacacacaagatagcctagcacaatactcagaatcactctggggttgtgctagctctgagctgaggcacttcaccctgtctaatcttcagcaagcactttgggtggccaagatccagcctgactgcaggtgactgtggttgctaacacgggcaaactcccaggaaagagtaccttggtccagccagtgagggctgctcccagagctgacttcccttccctccattcgtggttttaccccactcgggctttgtgtccctgaggagcgcatcttccccaatgtgcatgcgcatcaaagcgttcctactctgcactcgttccagctctacaacatctccagattcggaggatcaaacttgtaccccatagtctcagagcaactgaatctcggcatgaacaaagggaattagagaatgctttcccttaaaaacaaaatccctattg

SEQ ID NO: 568055 - DNA, 797 bp, Homo sapiens
ggacgaagcgcttacagcggcgggagcggtgcgggcatgaggggttggacccaggtctgaggcaggctcccccctccctcccgcctcagtggatcatgcccagggcggcagcggcggcggtgtgcgggggcggagagtgactggtgcggtgccgcgtcgccggcaggacgatgccgtttccacgttacaacacagggagtcacaaggaatgacacgaccgccacagaagcactatggcattacttctcctatcagcttaggcagcccccaaggagactgactgcgtacttactacagaaactaattgagacattgaaaccctttggggttttagaagaggaaggaggaactgcagctgcactgatttctaatttctgggaaaactataataacctggtaagagagagtggtataggagtaaatcgagtgaaagcaagaatcttccacaatctgtgattgacaaatgtgtggaggcatagaaattcttacatttggatctctacagagttacggagtgcatacaaaaggtgctgatattgatgcgtcgtgtgtagcagccaggacgatgtggatcgaagtgacttcttgcagcctcatgctatgataggttgaaattactggaagaagtaaagattgacgagctgtagaagaggcattcgtaccagttactcaaactctgtctagcatgggactagagattgatatgtcagtgtgcaagattagcagctgcagacaattgcctgaacgattcggatctacgagatgacagtctgctacagacaattagatatacgatg

SEQ ID NO: 568056 - DNA, 344 bp, Homo sapiens
  misc_feature (187)..(187): n is a, c, g, or t
  misc_feature (191)..(192): n is a, c, g, or t
  misc_feature (306)..(306): n is a, c, g, or t
  misc_feature (336)..(336): n is a, c, g, or t
taaggagttatgccgggcaggccgaacagccggggtgggtgaagacttgccctatcaggaatattcaagaggtataacaaatgcaagctattccgatgaccttacgcggcgctgaaaaattacgcgaagagctggattttctgaaatctgtgcgccgtcctgaaatcattgctgctatcgcggaagncgtnnagcatggcgacctgaaagaaaacgccgaataccacgcagctcgtgaacagcagggtttctgcgaaggccgtattaaagacatcgaagccaagctgtcgaacgcgcaggtgattnatgtcaccaaaatgcccaacaatggggggngttatttt

SEQ ID NO: 568057 - DNA, 381 bp, Homo sapiens
  misc_feature (60)..(60): n is a, c, g, or t
  misc_feature (136)..(136): n is a, c, g, or t
  misc_feature (155)..(155): n is a, c, g, or t
  misc_feature (174)..(175): n is a, c, g, or t
  misc_feature (194)..(194): n is a, c, g, or t
  misc_feature (331)..(331): n is a, c, g, or t
cccgacatcaatgcaagcttccaataagaaaaacaaattccccctcctaagccatggcanctcagttatacagaaataccactttgggaaacagtctccaggagagcctagatgagcccatacagtctcaacagancaccccccaacttgccctncaagttctacttcagtttnntaaggctataaatgcagcnctggctcagagggtcaggaacagagtcaatttcaggggctctcttaaatacgtacagcattctgcgataatgtgtggacttttgtactgaatgatgttggaatttcagagaggtgacagaactttattaaaagtggnattaaagtggaaaattgtagcctgtggatgggttaaaaatactgggttcc

SEQ ID NO: 568058 - DNA, 998 bp, Homo sapiens
  misc_feature (670)..(670): n is a, c, g, or t
  misc_feature (888)..(888): n is a, c, g, or t
gtacagttatgtctagtgattgtatatttacagagttgaacgcactattgtgtgttgctaatcattgacctgtagttccccacatataagcctagttgatgatgtcatgcacctatgtaacagaagagtacatataatataaaagtacattttataaatccatgtagtatggatcttgtaacaatagcatacccatatatcaagggacgaggtgaatttactaccttctctaacagttcctattgatactctccctgtatcactgtaaacatgtagctagtgatacctatatccccacgatatgtgcattgtgacatatttgtctatggatgtctggaattgtgtaacagtatgctactgcgatttcttcaagagttgtctccactagtatgatcaggtgctcatgggaccatctcttcgcctcaacatgatcaatgcttcctctggtgtttcgttggttattatgaccagattaatagtgccacgagttctttgataactaatcctaacatctctaaattccatcccatgatagggacgggcgcctcaaaaaaattatcggccctaatgtgaccccaagagtctttccctcgcccaaatgtatctctggtctccaagttggagccatttatagccgagaccgcatccaaaaaacaagggtttgttccgntcgtttttacaaccgtcgctgacctggcggaaaaacctgctaaccttggggggaagccttggtggaaaaggaaccctttccttctggggggggcggtaaacctttattgcgcccacctttccttatcgaaaaattgaacggccctcaaggccaactctcaacacttccacgagggccctacgctgcttttaacacaacacgcttatgtcttggcagcnactgacaacgttttggcttccctgggaatgagactcttcaccattttgttcacgggacaataccaaaacacaccattatactcccagtaaaaacaataagtatatagttg

SEQ ID NO: 568059 - DNA, 408 bp, Homo sapiens
tgaggtcccagctccctgatcctatgctctgtttgaaagatagcctttggccttagactccgttagcgcctatttcgtgccttcagacagacaggaaacttctgcggtcaggaaggctgctgtaccctgcttctttgccgaggccctgtcctgccggcaggcgaccccatcccgcacctgaagtgaggcgatcctggagctgcaggggactagtgacccgtgacttcggctgggtcctaagtcctctgaggagtgggtgactgctgttgccaagacctcagagtgcagggagagggaggaggccagcattgtgactgtaccactaggggcagttggatgtgggtgggaggagaaggtgacttggtatagaggattgaagctagatttgatactgaaagaaaaaaaaaa

SEQ ID NO: 568060 - DNA, 339 bp, Homo sapiens
cgatcatatagtgtggaaaacactgcaactcttctacttctagtctatgctgaaatatacaataaagtaataactataattaccctactgtattatcaaatgctacaactcattcacctaatctaactgtatttttgtacccattaagcaagttctctccattccccctccttgccttacccttctctgcctactacctccattccactctctgcctccatgagatccacttatttttggctcccatttaagaatgacaatatgtgatgtttgtttgtcttacagttcctggctcatttcacctaatataatgacctccagttccatccatgttgctgc

SEQ ID NO: 568061 - DNA, 158 bp, Homo sapiens
ggattcccaccaggacttcccacgggaaacagcagtgattaacctttacaataaacgaaagtttaactaagctatactaaccccaggtaggtcaatatcgtgccgagccaccgcgtgtcacagcgattaaccgcaagtcacatagaagaccggcgtac

SEQ ID NO: 568062 - DNA, 470 bp, Homo sapiens
atctaccccctcattgagagttgcatcactggagctttcttaccaggagagaggatatggaggcagaattagggtgagaactgttacactcgtaatctgagggcctgaatgggaatgtgctgagaaagaaaaacataacgagaaagacattagaaagaaatgaagatagccagacaggtatagaaggaacatgactccctttaaatagagaaacaggcacacgatactctcaaggtaatgctggtttgttattggtcccttattttggaccattgtggtacctgtccaaataggcctgatttccagggccagccctgccttgataaatgggactcacatagtaacaacaggtttcctaccacatcgatcttgttgatgttggagcaaattaaagcagatgttcctgtcaactgtgaatctcttcccaaagagcacatcagcatcctcaacctcttcaagccacacaaaag

SEQ ID NO: 568063 - DNA, 85 bp, Homo sapiens
gcacgagtggtattggtcatatgttacagtatctttgttcagctggattatgggttggttttggtcatatgttagactccataca

SEQ ID NO: 568064 - DNA, 129 bp, Homo sapiens
  misc_feature (90)..(90): n is a, c, g, or t
tggtcacaccaacaacctgcgtcccaagaagaaggtcaaataaggttgttctttccttgaagggcagcctcctgcccaggcccaaaagcnacgaagcctcaataaagtgtcccttactttatctggaaa

SEQ ID NO: 568065 - DNA, 120 bp, Homo sapiens
gacgtcacttctggctgacgtacctttactactgtggctttaacgacttctctcttggtcgttgacactacgttggggggactcctctacgacgtcgaccctgcacggcactgcaacgct

SEQ ID NO: 568066 - DNA, 410 bp, Homo sapiens
  misc_feature (405)..(405): n is a, c, g, or t
gctgctgagtagtctttcctaaatgctgctgagaacacctgtcggtgtcacttagtaacccgtcctcctactggcattcctgctcctcatctcttatcctccttactcctctgcaggacgtggatgctgcctacctgaacaaggtggagttggaggccaaggtggacagtcttaatgacgagatcaacttcctgaaggtcctctatgatgcggtgagggctccatcctcccctccatccagggaaagggaatcccccatctgtgacgctgctggttgggattcacagttttttgaaaggactccagctcccttattttagggcagtgggttctcatcaaggtcatgcatagaaaggtttgaagtgggaaattcaactgggagattcttagaaccagatgtgggtngacgc

SEQ ID NO: 568067 - DNA, 1282 bp, Homo sapiens
  misc_feature (1220)..(1220): n is a, c, g, or t
ggaccattactacctctcagaatcttagccaaaccatttacccaatataaagtataggcgatataaattgaaatctggctgcaatagatatagtaccgcaagggaaagatgaagacaactgctaaccgaagcataatatagcgagaggacgtaaccccatataccatatctgcataatgaattaactagaaataacgtttgcaaggagagccgagagagcgtaaggacccccgaaaaccacgacgagctacctaagaacagctaagaacgagcacagcccggtctatgtacgcaaacatagtgggaacgatttactacggtagacggcgacagaacctaccgacgcctggtgactacgctggttgtccaagactacgacatcttagattacaagcttgaaaattatgcccacagaaccctctaaatccccttgtaaactttaactgttagtccaaagaggaacagctactttggacactaggaaaaaaccttgtcacagagcagtaccaacactttaacacccatagtaggcctacaagcagccaccaattaagcaaagcgttcaagctcaacaccactacctaaaaaatcccaaacatataactgaactcctcacacccaattggaccaaatctatcaccactatagcaagaactacatgttagtcataagtacaccatgacaaacaattctcctacgaatcagacatgcgtcacgattaacacccctgaactgcacaatctaacagtccaaaaaatcgtaacaatcaaccagacaagtcattattaaccctacactggtacagccacaaacaagggccatgtcacatatcaggacagagttaaaaacagtacacaggaactccggaaaatctctactccgcgctgtaactaaagactacatacgaaaaatagccaagaattaaaggaccgctcaccaagtaaacgtgttaaagcacacgacaaccatcacgggaataagggttgcataaaccacactgagcttaaataaggcacaggcaatgaaagcgcaccaagagaaacaaactgataacctacaacagacatgcatgtcgcagagcggcgatcaaccacaagacatagacaattatcacgagacctcaaccagctatctatcttcctgtttgttgttgctttttcaatcgcgagatatcaaagactatggacggcgggactcatcacttagtcgaccgatacttncatataacgaaatgaatcaggcaccatgagaccatatgacaacaaacgatcgattaatcaca

SEQ ID NO: 568068 - DNA, 192 bp, Homo sapiens
ttttgctcatttccctgtctgattttctagcaaggattatagtaagtggttagtcacgacttgctttcttgtatgacccactcaggatcatcaagatttcttctattttcgtaaaaagccatagcaagaaagaaagcaagcaagaaaggaagaaagaaagaaagaaagaaagaaagaaggaaagaaggaaag

SEQ ID NO: 568069 - DNA, 198 bp, Homo sapiens
  misc_feature (2)..(2): n is a, c, g, or t
  misc_feature (69)..(69): n is a, c, g, or t
  misc_feature (110)..(110): n is a, c, g, or t
  misc_feature (157)..(157): n is a, c, g, or t
  misc_feature (168)..(168): n is a, c, g, or t
  misc_feature (173)..(173): n is a, c, g, or t
  misc_feature (187)..(187): n is a, c, g, or t
cnctgaatcgcggtctcagctcgcgcctgtcagcagaatcgagagttgtgtacctgtccatatacaagncgcaggaagagtgaggagatggaagagacacttatctcaanggaggagatgagaggaaatctctgcaatgagtcttggagttggcagntacaaggcaanatgtnggacccaattgaanaggcacagatc

SEQ ID NO: 568070 - DNA, 245 bp, Homo sapiens
ttcgggaaactgagacacgaatcaggatcaccccatgcgccaccgcaccattcccccaccggttccaacgccagggcgcccctagaccggggggggggttatgaggtggacttcctgcgcctcgtggcaacttcccaccaacaccactaaacgggcacagagacaccaccgctgtcccagaggcagtcggataccggtcaccgatcccgagatccgacagagcgaaagagggccgccagcggccg

SEQ ID NO: 568071 - DNA, 429 bp, Homo sapiens
  misc_feature (9)..(9): n is a, c, g, or t
  misc_feature (293)..(293): n is a, c, g, or t
  misc_feature (361)..(361): n is a, c, g, or t
  misc_feature (413)..(413): n is a, c, g, or t
  misc_feature (424)..(424): n is a, c, g, or t
cactctgcngatgtgatgaatagttttttactctggcttcacctattgtaaagctgatcaaagacattgagggtcttacccttgcagtgagccaatcagggcagaaccagaaccgatcctgttaattcagcaatgagttggtttgccgaatcgcccttccatggtaagccattaggatggaggccaatgatggttgtacacgcatgcactcacacgtgcactcttcacatgcctcctgaccaaaactggataaacagaggaaagcaaacaaacaaacccaaagccagaccgtntttttgaagggctccagtttcccattaattaaggcacatggggtaggctttttcacaggcacagggtnggcttaattcagtttgtgggttcaaaacggagccttttgtttattccaaacnggatttaaaancagtt

SEQ ID NO: 568072 - DNA, 497 bp, Homo sapiens
gtctccctattaatgcatatggaatgcacacgtgtgtgctgatcaaatgaatgttctcactcgcaagcacagattgtgttgtgccagtaggagacacatgtccaagtccttcttaacattgaatccagtttctcgtaaaatttacactgcaatcaagtctcttaggataagctagtccatgttagtccaaaccttccattgtgcaagtaagttaatgaattgctggtagctcttctgcaggttgaatatagtagcgcccgctctgtttagctccaagataggcaatgtgtaggcaatctttcccagtaatatcatggatttgcacgtgtgtcttggcaaggttccagtccctgtgcttcgcgttgggtgacgttctcttgcaggttctcaactctttactactttgaactacagatgtccggccaattccgaatactcgagtcatgtgctcgtgccgaattcttgcagcccgtggcatccactagttctagagcgcc

SEQ ID NO: 568073 - DNA, 190 bp, Homo sapiens
cgtgtgacatgtgactgagctgtgttgagctgggctaggctaagctaggctgggcggagctgagctgggttgggctgatgctgaactgggctggactgggctggactgggctgggctgtgctgggctgggctgagctgagctgagctgtactgagctgtgcctgtgccaggctgagctgggctgcgctga

SEQ ID NO: 568074 - DNA, 189 bp, Homo sapiens
tcgatatgcgcctgtctgcattattttccccatttgagttagttttcatatattgtgttatgtaaaagtcaacttcatttctttggcatgtggatatccagttttcccagcaacatttgttaaaaacctgtccttttcccattgaatggtcttggctcccccttcccaaaaatccctttgaccataaag

SEQ ID NO: 568075 - DNA, 624 bp, Homo sapiens
gtggagatacagagtggaccccatctcaggaaataagaaattacaaaaaggatgtcatcagtcaggtttaagggatagacgggtggaacattccagaaaacttgatacattcttcaaggatatagaacacacaatcctaaaattcatatgggaaccataaaagacttagaatagtcagctatcctgagcaaaaggaatcaaactggaggaatcatattacctgacttccatttattcaccagagctacagtacccaaaacagcatgatcctggcataagaacagaaacataagaacagtatagacaacccagaaacaaatacatacatctatggtgaccacttttgacaaaaggagtgaagaacatacactgggggaaaagataatgtctttaataaatggtgctgggaaaactgaatatccatatgcagaagaatgaaactagacccccatctcttagcatatacaaaaatcaaaattaattaacaagttaaatctaagacctcaaattaatgaaacagctaaaagacaccatcggggaatctctccaggacattggagtgggcaaagatttcttgtgtaatacctgacaaacaggcaaccaaagcaaaagtgcaccaatggg

SEQ ID NO: 568076 - DNA, 326 bp, Homo sapiens
acagtatggatttggaatcaactggaatcaggttgtctacatgggttttagctataagactttgaccttcaatttcttagaaaatgaggacagtagttcagcaggctgtattctgtatgaggaaactgttctgggtaatcgatttagagtcctttgaagggagcacagaaagctagggaatgtttggagttctcgttgtgacgcagtggttaacgaatctgactaggaaccatgaggttgcgggttcgatccctggcctggctcagtgggttaaggatccagcgttgccgtgagctgtggtgtaggttgcagactcggccgtaccg

SEQ ID NO: 568077 - DNA, 112 bp, Homo sapiens
gcagcctctcgtctgatgtgcaatcgttcttcaggtggagctgaagcattgaagcaatatgtgtcatactgggaggtgttgcatgtgaggatgtacaccccgttttagtttg

SEQ ID NO: 568078 - DNA, 101 bp, Homo sapiens
gagggctttgcatacctgtggtcaggagcccgtgccagctatggggtcagaaggggccgtgtatgcttcgagatgaagatcaatgaggaaatctccgtgaa

SEQ ID NO: 568079 - DNA, 773 bp, Homo sapiens
ggcctggtgtgattcctgtcctgcagctggttgtatctcatggatgcagctgtctctttatatctccagtcctgcgcttctactcctacctaagtgctgtgcctgccacccagatggaagcattcagcatggcacattggacatgcagccccgctgaggccccatgaactatcttttctgtgtttgtgaactaacatgtgcctgacaacagcattcatccactttcacaggttggctcacatgctgcacaacatggagcacccagttcatcctttacagcacacggctccagtcttcagcgggtctgtgtgccacaagtgcatgcaggttggcaccatatggttcggcaagccaggagcgccacatgcacattcactgcacaagtggcaagttccccacagtctcacacagctcacacccaccgtggaccacaaccctataatgcaacacacactaggttcataggataacgatggcaccaccactgcggttttgctcccatttgctgcgccgggcctcctcctgaacacactcataccaccagacccaaggtggggttcttctaaatagcggcttttggacaccggatgggtcgtcgctactcccagggtggtgcgatccagcggttggcccactaattaaacgctctgtcgaccccacgtcactcctttagccgcaacgactaggttggagaacgggacaccgaactggcaatcgaatgttccatccacgacgcaccttgcacactggaacgtgatagatcgactgtggac

SEQ ID NO: 568080 - DNA, 387 bp, Homo sapiens
gtgaatcccatgtcttaactcatttaccatgtgaataacgtctaaggggcactacaaggggctagttctaatattgatactagatgtaacagctacaatctcccatagtgcttggattaccggtatgattcaccgtacactctcttccatgacagactaacttacttactacttactagaacatgactttcgtacagtcttaactaccaattacatactgaactactatatcacagtacacctacgctaccatatacggagccatggaatcacttactatgtcactgtaatctagtggtcgaactactatcggaggagacataccttatctgatactacttgacgatgcattcagtaccatacctgtttacatgcctaccagatatt

SEQ ID NO: 568081 - DNA, 368 bp, Homo sapiens
  misc_feature (70)..(70): n is a, c, g, or t
  misc_feature (111)..(111): n is a, c, g, or t
  misc_feature (213)..(213): n is a, c, g, or t
  misc_feature (239)..(239): n is a, c, g, or t
  misc_feature (262)..(262): n is a, c, g, or t
  misc_feature (266)..(268): n is a, c, g, or t
  misc_feature (271)..(271): n is a, c, g, or t
  misc_feature (277)..(277): n is a, c, g, or t
  misc_feature (286)..(286): n is a, c, g, or t
  misc_feature (297)..(297): n is a, c, g, or t
  misc_feature (303)..(303): n is a, c, g, or t
cgtcgacatcatcatcgaatggaatctaatggaataatagaatgaactcgaatggaaacatcgaatgganttgaatggaatcatcatcgaatgagatcgaatggaatcatngaataacatcgaatggaatcatcgtcgaatggagtctaatggaatcatcaaatggactcgaacggaatcgtcatggaatgtaattgaatagaatcttctaanggactcaagtggaatcatcatcgaangcaagcgaatggaatcatcatcnaatnnnatngaatgnaatcatcanatggaatcgantggaancattgagtgggctcaaaagaaatgtcgacgcggccgcgaatttagtagtagtagtaggcggccgc

SEQ ID NO: 568082 - DNA, 241 bp, Homo sapiens
gagtctagactgtcttaaaaatgcctcatgtacagtagtttattttttgagacagtctcactctgtcacccaggctgaagcgcagtggcgcgacttcagctcactgcaacctctgcctcctgggttcaagcgattctcctgcctcaacctccccagtggccgggattacagtcgcccgccaccacgcccaggtaattcttgtatttttagtagagatggagtttcacatgggtaccgagct

SEQ ID NO: 568083 - DNA, 972 bp, Homo sapiens
gacagacaatgctgtgaagaatcactggaactctaccatcacaaggaaggtggacctgcgttaatgtgtctgaccaagaatcgtgcactaccggccctcgtcattatgagctggagcacgtgatacaaggaggacaactagaatgcccagaccaaacaggtcaaaaggaaaaactttcacacacccataacacagatggacactcacagaagaaacagaagaaaaaagaagaagacgagacaaaggccagggataataaaaaacaaagagacaaaaagagaaagcaaaaaaaagaagaaagaagaagaaagaaggaaaagaaagaggaaaacaacgaagagaaagcacacgaagacacaacaaaagacacaggaaaaaagagaaaccgaaaaatacacagaacacaagaacaaagaaaagacacaaaaaaaaaacaaaaaaagagaaaaacaaacaaaaaaaaaaaggaacaacatgatacaagaaagaccacagacaaaaacacaaaataaaaaagaccgcaaaaaaaagaccgagacacaacaaaaacgaaaaaagacgaaagaagaccacacgacaaaaacagaaaaagaagaaaaaccaaaaggagaaaaaaggaaaacaaaaaagaaaaacaagagagaaacaaaaaaaacaaaaaaaccggacaagacaaaaaagccaaaaaaaaacaagaaagagaaaaagaacgaaacacagaaaaaaaggacaagagcagacacgcacaggacaagagaagaagataaaaacgagaggcaacacagaacaagagaaataataacaggagcgaccaggaacagaaaaagacgaaagaagcagaaagaaggaaaaaagaagagaggaagaaaaagccagagaaacagacaacagaaacagagaacaacgagagaaaaagcaaagaagcagacaagacaagaagagacacgagacgaagagacgaagaaaagaagt

SEQ ID NO: 568084 - DNA, 99 bp, Homo sapiens
cctccccccgcaggtgcagtacaactagaaaaaatagggcatggggtggctgtagtaaccacctaccatcatcgtccatctattttagccactagcaaa

SEQ ID NO: 568085 - DNA, 281 bp, Homo sapiens
attcgcggccgcgtcgactgcagccataaaaaatgatgagttcatgtcctttgtagggccatggatgaaactggaaaccatcattctcagcaaactatcgcaaggacaaaaaaccaaacactgcaggttctcactcataggtgggaattgaacaatgagaacacatggacacaggaaggggaacatcacacaccggggcctgttgtggggtgggggcaggggggagagatactattctgacatggacctcctggcacacgatgagccactggccgtaagcc

SEQ ID NO: 568086 - DNA, 324 bp, Homo sapiens
  misc_feature (16)..(16): n is a, c, g, or t
  misc_feature (210)..(211): n is a, c, g, or t
  misc_feature (271)..(271): n is a, c, g, or t
  misc_feature (293)..(293): n is a, c, g, or t
tactcataattaatgnttatcttatactaattatcttattgttggattatactgcctttaacatgattcatggtacatttaaagcggtacaaatcaggcacagtgactcatgcctttaatcccagcactttgggaggccaaggcaggcggatcacttgaggccaggagttcaagaccagcctgggcaaccccatctctactaaaaatacnntttttagtagcatggtggcacacacctgtaatcccagctacttgggttgagacaggaganttttttgcccaggaggcagagnttgcagtgagccgagccgagatagcaccacg

SEQ ID NO: 568087 - DNA, 370 bp, Homo sapiens
  misc_feature (228)..(228): n is a, c, g, or t
  misc_feature (330)..(330): n is a, c, g, or t
ctgggtatcaggtgcctatgtgaacagctcccaataaacccttgggcactgagttgctagtgagctcctctggtacagaacacgtcacactggttcagtgttgcggctggtttaggggagaattaagtccgtcctgtccgtcttccctggtgaggactccagaagctcctgcctggggccctccggacagcccagacacctcttcgcgtggctgatctcgctctggtnccttttgctgaatgtagcttagctctgagggtggctctgtgctggacccagttgactcttcctgggggaatcatcaaacctggggggccccaaagcagccgnagccacagcttccacatccttttccggcaggcattcccgt

SEQ ID NO: 568088 - DNA, 902 bp, Homo sapiens
  misc_feature (21)..(21): n is a, c, g, or t
  misc_feature (102)..(102): n is a, c, g, or t
  misc_feature (219)..(219): n is a, c, g, or t
  misc_feature (326)..(326): n is a, c, g, or t
  misc_feature (342)..(342): n is a, c, g, or t
  misc_feature (345)..(345): n is a, c, g, or t
  misc_feature (370)..(370): n is a, c, g, or t
  misc_feature (412)..(412): n is a, c, g, or t
  misc_feature (423)..(423): n is a, c, g, or t
  misc_feature (452)..(452): n is a, c, g, or t
  misc_feature (495)..(495): n is a, c, g, or t
  misc_feature (502)..(502): n is a, c, g, or t
  misc_feature (505)..(505): n is a, c, g, or t
  misc_feature (520)..(520): n is a, c, g, or t
  misc_feature (524)..(524): n is a, c, g, or t
  misc_feature (530)..(530): n is a, c, g, or t
  misc_feature (537)..(537): n is a, c, g, or t
  misc_feature (541)..(541): n is a, c, g, or t
  misc_feature (545)..(546): n is a, c, g, or t
  misc_feature (575)..(575): n is a, c, g, or t
  misc_feature (577)..(577): n is a, c, g, or t
  misc_feature (581)..(582): n is a, c, g, or t
  misc_feature (600)..(600): n is a, c, g, or t
  misc_feature (611)..(611): n is a, c, g, or t
  misc_feature (628)..(628): n is a, c, g, or t
  misc_feature (705)..(705): n is a, c, g, or t
  misc_feature (719)..(719): n is a, c, g, or t
  misc_feature (825)..(825): n is a, c, g, or t
tcctggatgctagatccatcnaccaagctttcattgtactaacgtcgacagtctatatttctgctcttcagtctgtccttaggatagaagctctaactgaantgaaatactgtcttccttttgggctctgtgcaactacagctacagtggaaaaaagcaaactgctcttgatcccaggttggtatgtgcatgagcaccatgtaggggccttgggggtangggagtggggcatcatagcagaatctgagatctctactgattatatatccagctctctaccagctttaccacatgatctgtactgcctctcgtccttccatttaaanactggaaattgtaggnatnggcagagcaggctaaagttgaagangtaaaaaacgttaaactaagtctgtgaatcagcaaacacaanccttaacaccngtgtctgggtgctagcccgccaacgaagnattgtgtccctaaactcttcatctaaaaagaactggaataganacgaagnaanccagagccctaagcntcanttttancctttancccnaggnnctacctaagcctcagcagaacttgtaaancnaaannaaagagcctcacccgganaagcaggcatnccttaaccttaagcaanccaattccacgccctggatcagtgaataaccccagctgcaccatgagccgcgttcgggatgctggctgtgtagcggnggggatagtgatangggctggtgcctggtactgtgtctacaaatacaccagggggagagaccagaccaagaagagaatggccaagcccaaaaaccgggctgtggctgggactggagccanggctagagctgggctaagagccggattcacaatcgaccttgggtcaggattcagtcccccaaccccagtccgtgctg

SEQ ID NO: 568089 - DNA, 137 bp, Homo sapiens
gcgccttcctcaagaatgccttggacaaggagccagttctggtcgtgtccttcgtcgtcgggggcctccctgataattcttccccatttaggccctacttcaaggacttcgcatgatcaacaaggccacgccttaac

SEQ ID NO: 568090 - DNA, 102 bp, Homo sapiens
  misc_feature (2)..(2): n is a, c, g, or t
gngtacccctatcccatcaaaacaaaaggcttatccttattataactttggcaacagctagaagggccaaggagaagtgactaagtatttgttcaaacaaaa

SEQ ID NO: 568091 - DNA, 708 bp, Homo sapiens
ggatcgtcaccaactgcgacgacatggagagagatctggcaccacagccttctacgacgagctgcggcgtgggccccggcaggagcacccagatgctgctgaccgaggtgccccctgaaccccaagggccaacagagagatgatgactcagattatgtttgagaccttcatcaccccggccgtgtacgtggccatccatgtcgtgctgtccctctacgcctctgtggctgcaactacctggcattgtcatggatctctggagacaggcgtcatccacacacggtgctcgcatctaccgagagcgctatcgctcctcccgccattgccatcctgcgtctgtgacctggctggcccggggacctgacagagatacctcatgaagatcctcacctgagcgaggctacacgtgttcaccaccacggccgaccgggaaatcgtgcggccgaacttctaggagaagctgtgctacgctcgcccctggacttctgagacaggagatgggcaccgcccgcatcctccttcgttctctggaggaagagcctacgagactgcccgatgcgcctctggtcatcccctagtcgtcaatgagcggttccggtgtccggaggccgctgtgccaacgcttccttcctggagtatggaatctttgcggaatcctaggagaccaccttcaactccatcatggaagtgtgacgtgcgacatccgca

SEQ ID NO: 568092 - DNA, 154 bp, Homo sapiens
accccccgcattggggtctgtagcagtaccaagacgagcagatgcacatcgctagcactcattcagcggcgagagcggctgcacatgttccgcgtggggggccttgtgttccacgccatcagacagctgctgcctcaccagatggctgactttc

SEQ ID NO: 568093 - DNA, 116 bp, Homo sapiens
acgaaaacgaggatcaacagacactcgaggatctaagagcgaaggccgctgaggcaaggggcccttggcaacaggtggaattaagaaatctggcacaaagtaagctgtaccttgtg

SEQ ID NO: 568094 - DNA, 508 bp, Homo sapiens
gtgggcctgacacacaggcgtccacaaacacggcactgccgagaggtgcccctttggagaaagcccacacagggcaccttgtggcacacagggtgtcaccacattgcgccacacagttattcaatgtgccaatccgcaccccaagctgcaggacacaacaggaggcaatgtgatttgagggccctgccgacacagggcacacaagtgtcaaaggttttccttggccgcccacgagaggagtgccaccacttcttcacaaagaaatgttggggcttctacccacaagtgtcaaatgcgtgagtgaaattttgagagacacactgtgtgtgtctgtagaaaagcgcgtcttcacttccacacgaatgggctcgttggggttccaaagtacacttccccacgttcgtggcaccttctggaacaagtggcgggccctgcaactcatgagggcttccaatgtgctgccccccttttaatactcacccataaattctacttcctgtccacctta

SEQ ID NO: 568095 - DNA, 165 bp, Homo sapiens
ttttttctgagcacgcacttctccccatcggtcatctgacttcagagtatgacagatgactgaaactcgttatcagtgacgaggacaccgcaggagggccagtcaagttacatgctacagtctgaagaactccgggcctccctcctgttcaggaaccccataatg

SEQ ID NO: 568096 - DNA, 100 bp, Homo sapiens
agctacgcagtcctcaccacccagcccagggtgctcacactcaccactcctgtggctgaggaaggatagctaggctcatcctcgtgaaaacagacccaca

SEQ ID NO: 568097 - DNA, 168 bp, Homo sapiens
  misc_feature (8)..(8): n is a, c, g, or t
  misc_feature (40)..(40): n is a, c, g, or t
tcgggttnaagggccatacttttctttgagcaagaatcancctttatagcataggcctgatatgaaacagctaattagaaacacagctgagatttgaacccaggcattcagacctcaggtgcttaaccttatgtaacagcccatttgccctccaccaccaacagtgtc

SEQ ID NO: 568098 - DNA, 354 bp, Homo sapiens
tgtgatcggtactatggtagattctgtgtctttgctaattcgaagctgcggtgaacatacgagtgcatgtgtctttttttatgtagaactatttattttctttcgggtatatacccagttgtgggatttctgggtcaaatggtagttctgttttatgttctttgagaaatttccacagttttctgcagtgactgcttttctccacaatctcttcaggtttttattttttttttactttttagtaatagccatttggacaggtgtcagctggtatctgtgtggatttgatttgcatttctctgatgcttagtgacgatgaacttttttcatatatttgtgggccacatatatgtc

SEQ ID NO: 568099 - DNA, 196 bp, Homo sapiens
gtggcaggagtcccagattacatggtgaaccctgtctactggaaattaaaatagccgggcatggtggcacacactgtagtcccagctactcaggaggctgaggcagaagaatcgcttggacctgggaggcagaggttgcagtgagccgagatggtgccactgcacttactctgggcaacagagcgagattctgtct

SEQ ID NO: 568100 - DNA, 133 bp, Homo sapiens
cagcccccgcaagacgccttccccgaggcgcccggctccgagcccgcctgctgtccgctggccttcagtgctggacccgttcaccgactacggctcctcgctcaccgtcacgctgcccgtcttgcggggtctg

SEQ ID NO: 568101 - DNA, 334 bp, Homo sapiens
ctcctcacagtccgtctgcctgttgtcattattgatggtcctctcccttgcatcctcacagtccgtctgcctgttgtcattattaatagtactcacccttgcattctcaaaatgtactagtttgtgttgataaattatatggtcaccctacttagaaggtacaaagaaagaataaaagaagaaagttcttcaccccatctcagaataaccaagatctttatctttgcatggtactaccccaaggcaattttttttggataccattttttaaccttgacatagtggatacatcatatattcatccatatatatttttcactccattaaaaaaaaa

SEQ ID NO: 568102 - DNA, 81 bp, Homo sapiens
ccttttttttccccccccccgggggggctttttttttcggccccctttgttttttcccccaaaaaacctctttggggttta

SEQ ID NO: 568103 - DNA, 476 bp, Homo sapiens
tgaggtgtgccccctccctagattctcacagcaagcttggctgcaggtggggacggcctgatttttctcccattatgtacgtaagaaaataggctctagggtgggacctccccagtctcccagatggaatgtggtgagtccaggttcaggctcagtcagggctctcctgagaccaggacccacaggatgaacagatatggagacagttacaaggattctggaggctcagaagccccaagatctgctgtctgcaagctggagacccaggagagccagtggtgcaagttccagtccaagggaagaccaatgtcccacctcaacaggccagtgtcaggtatggtggctcgcgcctgtaatccgagtgctttgggaggctgaggtgggaggatcgcttgaggctgagttggagaccagcccgggcaacatagatgaggccttgcctcttcaaaaagtaaaagtgtggtggcaaacgaaaa

SEQ ID NO: 568104 - DNA, 1149 bp, Homo sapiens
tgggaaaaagtcatggaggccagggggtgggcttgaaaccagcttggggtccaggaatggcaagaaccagcaaaaaaatcaccattgtgcgtgacgtggtggacaacttcgaatataagttgtgacgtgtggtgtttaattcttaaccaccagaatcatttccttcgtgatagcctcaggagaagcaccccttccaccgccatttgtgcctcgacagatatctccttaaaattcttgtgggtgctctcttcgctgtggcagttctccctttgtggggtttcccagtgttttctccttgtgttctccctctcccatgtgcctatagccgtggtttgtggcagaagtttataaagtttatagtgcattatattgaaaacacaacaaaaaacaaaagagggggggcggcgcgcgcctctcctataagagatattatctccgcgcgcgagaggggggcgcaccctaggagctcttttatcagcgcggcgatataccccacgagagtaatttcttgtgtgtatacacacagaggggggggctctcccactatatataggcgtgagacggtctgcgcatatttatataatagacgccaaatagagcacaagtgtgagcgcgccgtgcgcgatgtatataccacaaacgcgctgtgcgcgatgaaacgtggtggggacaacacaccacgctgcgccgtataacccttgtggggggaacaccttctactgtgtggcgaccagacggcgaacccccctatttaactctctcgggagggggcggaggtgtgcggcaccatatacatgtgggggcgaacaaaactttattcccctataaaaaaacacataattttcaaaagagggctcctctataaggggggaataaaataattatgtacaacaccattttttatcaaaaagggggagggttaaaacaacgcgtgggggtgcgtatacaacccctttataacgtgtggtgcaaatattaatttgaactagagagagcaggcgtacttgtagagacaacaagatcttatgagggggatataaaaccgagggaacagatactatatcgactattttagcagaggaaaaaacacatagtcattttcaatttacgcaaggcggaagtagtatgtaagagagagaaaacaaaggc

SEQ ID NO: 568105 - DNA, 219 bp, Homo sapiens
cagcctcccaaggtagctctcttaggttcaagcgacaccttctgcctcagcctacccaaagatgctgggattataggcatgagaacaacagcctgcatgtattcttgacaagggctcgaagattaacatgaggattgcaaatatagtctccctctctatggttggccttatttccctcttagtggtgtctattgattcgttctacatataaatcacttc

SEQ ID NO: 568106 - DNA, 664 bp, Homo sapiens
attactaacccaaaaaacacctgggttgtcttaccaagacactttccggaatgccaggaatttatcacttttcgcagacaaaaattacgcccccacctttttttgaatgaaaacccaaccttgaccacagcccggggccaaaggcctcactctgcgaatcccagtgggaccaagcctcataaaaaattggcctcaacaacaactagggtttactggtgataattacagtttagaaccagggaggccacagagcccagctcccatgttctcgtccctatgtcctgaccaatatggcatgtctcgtcattcggctgcattcggagtcagaccaagcggtcatgctagtttacgagccagtagttccagaacgtagatatatttcataaaaccaatgatcaagataaggaacacgcatcaattctcagtatatgtaagacacagcaagaatttacttatctcacataaaaagagcgttcgcatcgtagtaaaacaatagattgattttgagtttagaccccccatgccagatccctggtctagcagtatttaatcttactctggcatggtgtaaatgcgtgtaatgacacctctttgaaagattagtgtcttaggaacacttgagaccagatgttctattccagcatggacggcacccctagacccc

SEQ ID NO: 568107 - DNA, 167 bp, Homo sapiens
cacatggtgaaactcatctctactaaaatacaaaagaattagcctgtgtggtggcaggtgcctgtagtcccagctatcgtgccaattatcccaacttactcggtgaggctgcaggcaaggagaatcgcttgaacccgggaggcgagatgttgcaggtgtgcttcgcg

SEQ ID NO: 568108 - DNA, 1108 bp, Homo sapiens
gggcgcggtggctcacgcttgtaatcccagcactttgggaggccgaggcgggcggatcacgaggtcatgagatcgagaccatcctggctaacacggtgaaaccccgtctctactaaaaaaaatacaaaaaaaaattagccgggcgtgatggcgggcgcctgtagtcccagctactcaggaggctgaggcaggagaatggcgtgaacccgggaggcggaggttgccagtgagccgagatcgcaccattgcactccagtctgggcaacagagtgagattccgtctcaaaaaaaaccaagacacagggaaaaaaattagctttatacctcttccttgttctcaaccgccagtgaaaatttctgaacactccaaattcccgttgacttactccaaaaccaaacttttactacagttattacacatactttcacttcttcatagtaactagtactacctttaacaaagcctcagggtatatcatcttctaaacagctacaattcagtgcacgctactttaacccaactatgtcctctagtggagaaccacttaggccctatttcactgctgtgtacccctcagtgcctaacatgggtgccaacttaaatattccgtacgaattaccccctgaattgtacaaaccacattcgttctggttcaacatttggccaaaaattcctcaagtggcccctgtattcatgccacttcctttcgacatcattattcgatctaggcttcccacggctattggacgggccttgctcgtgcactctaaacacactatagatcccctacacacttcatagaagaaagcccttataagcttcaagtctgaaccactgacattgttacacaccccaacatcgtcctattcccatttctcctatacaagcggttcgtaccttcctcgtccaacaactcccatccgggggcgtcattatccccaacaacagcggcggtataacacacagtcgcggcgcctcagccaagaaccacagggttatcagaccactactgatgccacacttcccgcaacaatacatcggtgaaaactatatattcccgcacaagctattgaccaataaatttgatacaacaacatactcgctcga

SEQ ID NO: 568109 - DNA, 443 bp, Homo sapiens
cagagtccaattcaggaacacagagcagcgcttcctggctgtaaatcctagacttgaaagtgtaccagtattagaacaacttcaaagctgaagtatttttattcactaatgtatttaaatgttctaatcagcatcagaacagctgaaatgccctcctacaatgtcagctgtatgtcacacgagtagctccaacactttgagcatttcaagggagctggcctcatgatcactagagacaaagtctttaaagaactagttctaaaattgggcttgtgatttccatttctgatgtctccagataaggcaccccttctctagattcaatgcctcacgagatttgccaggggcatccaaggcaaacaatacccaatctttctatatcaaactgtattcaagcaaacatcaaataaatttctgggatatgtaaataagaaaaaaaccat

SEQ ID NO: 568110 - DNA, 114 bp, Homo sapiens
aacagtaattggaaatgatgaaaatgagtagtttacatatatttctatgatcatctcctaattcttacaatgcaaaatcttgaacaatcatggataggcgcaagctaagagttt

SEQ ID NO: 568111 - DNA, 360 bp, Homo sapiens
tgtattttgtgtttcttgtatctgagacaggttctggagtgcagtggcacaatcatggctcactgcagcctggacctccagggctcaagcaatcctcccgcctcaagcctcccaagtagctggatcacaggtgcgtgtcaacagacccggctagtttttaaaattttttgtagaaattgggggtctcaccaagttgcccaggctggtcttgaactcctaggctcagtgatcctcttgccttggacttccaaagtacttggattacaggtgtgagccaccacgcccaggctgccatgtgtattttttttttccaagacggagtctcgctctgtctaccaggctggagtgcagtggcgcaat

SEQ ID NO: 568112 - DNA, 467 bp, Homo sapiens
atagcctgccgcatggcagcacactcttaaaggcttaaacacatacgacctttcttcccataaaatctcaagtgagtgtaacttaaaattaccatgcaggcctccataaaaaggaggggctgatatatagcttgtgtgctccacacctctgatgtaggcatctcacaagggacacctgtaataggttaaatatatgctgggttctggggctcatgtgcatgctacaacagcgacaggagacacagcctttacctctgcttgtgtgaatgggcgatatgggtgttgcggatgttttacttcacgcaggggctgatttagaacatgtatctctagggtggtagaagacctttgttgaaagctgggagagctggtcctttgtgcgctgtgcagtttcttcttagcgcaggttgccctgtttacaggggtacagccactaatgatcatacaggagtgttgctgccactgcg

SEQ ID NO: 568113 - DNA, 341 bp, Homo sapiens
  misc_feature (74)..(74): n is a, c, g, or t
gagacggtgtcttgctctgtgccccaggctggagtacaatggcgcgatctcggctcaacacaacctccgcctcncaggttcaagcaattcttctggctcagcctcccgagtagctgggattacaggcgcatgccaccatgcccagctaatttttgtatttttagtagaggcggggtttcaccatgttggccaggctggtctcgaactcctgacctcaggtgatccgccggcctcagcctcccaaagtgctgggattacaggcatgagccaccgcgcctggccaacaaaatatttttaaacgcatagctgggcagaaagctagaaagggcaatcgtcgacgc

SEQ ID NO: 568114 - DNA, 252 bp, Homo sapiens
ttctaaaattgtgcatgactaaatcaaaattcaggttccttaaaaaagaaagatattattttccatctactaatatactaatggatagatatatacagatatattgattctttggaaaaaaggaatcactaacaaaattaaacagaatgcccgtcttcacaaaaatagatgtattctgcacaatattacagtaggtaaggaaagaaatctggaagaaatactggatcacctgagtcctctgtctcccacctc

SEQ ID NO: 568115 - DNA, 252 bp, Homo sapiens
  misc_feature (187)..(187): n is a, c, g, or t
tggacagtctcgagctcactgcaatcttcacctcctgggttcaagcaattctcctgactcaacctcctgagtagctgggattacaggtgcccaccaccacgcctggttaattttttgtatttctagtagagatggggtttctgttattatggaccagcaaatagaagcttcttcaaagcctatttcnacaaacttctacgcctactatcattaggataccttttttttttggagagacagagtatctagctc

SEQ ID NO: 568116 - DNA, 184 bp, Homo sapiens
gcagatcgaatcgagccggtaccccgtagtttagaagtctcactagcagacatctgtttcaccacttctttggcttggtctgcaggcccagacggagctgcttcgctggcgttatcgcctggggtttcctagacacgggcctggtgctggtggatatccttctcatgggctggtttgatgatgg

SEQ ID NO: 568117 - DNA, 504 bp, Homo sapiens
ttcagaggatccgaaaagtgagatagaggcaggtagttctcctcgagacagaaaattaccagatggaagtccatggcatggatggctcacgcctagcaatcccaggcatcttggagaggccgaggtgggcggaccacctgaggtcagggtcttggaagagattaatgtcaaagaagggcctgaagtttcaagtctgttaccttcaaggtaagatctctttccagtcatggttcccaaatcaattattgcttgttcacttgacttacaggtcacacacatatatctatgagattgaacaatagtcataaaaatctatgaagtgagaaagttgataatcagcatcttaatcaacaaacatgaaaatcaaattccaggaaaaaaaagtagggattcacacggcattggctatagtggtacccagagaagtagctgagtgcaggggctgagatatgaactcgggagtcaaggtgcctgggttcaaatctcaggtttactagttaccag

SEQ ID NO: 568118 - DNA, 233 bp, Homo sapiens
agtattggactttttatcaaattgtatcaagcaactttcataacagagcactaaagcaactttgatacaggatattgaaaatccctcaggcggggcacagatcgctcacacctgtaagtctcagcactttggaagggccgatggcgggcaagatcaccttgaatgttagggagtatcgagaccacgcctcggcccgcgttggcgataaccccatctactactcaaaaataaca

SEQ ID NO: 568119 - DNA, 227 bp, Homo sapiens
cctagttctgctccgatgagactcatcccaatctttcttctttccctgctgtctgttccttcagtctccaccccaagctctgagtcctttgaatccttattttctatggactcatctgacctctccccttctccctgggctgctcctcgccaggccgagcccggtcccaattcttcctcagcctctgctcccccaccctataatctttctatcacctcctctcctca

SEQ ID NO: 568120 - DNA, 147 bp, Homo sapiens
ctgtctagaggatcccggtagcacagagtctcgatgccataatcagaacacactttttttccctttccccctttattttcctccttttctttctggaaagtttccttttatgtccataaaatacaaatatatggttcggggtaccgg

SEQ ID NO: 568121 - DNA, 306 bp, Homo sapiens
ccatccagcttgctgctgtaacagaagacaagtacgaaatactgcaatctgtcgacgatgctgcgattgtgataaaaaacacaaaagagccttcattgttcctgaacattcaacttacaatccctgttgttagaggaaggaattggggaaggtttagatctgggaaaacgctctatagagtacaagcgcccccccgacgcgtttctggcacagcacaggatatctcttctctgctcctgcgcgcccctcccgacacgacaatgtggtcacaggacagagccaacgggtgctggagtctggtgatca

SEQ ID NO: 568122 - DNA, 232 bp, Homo sapiens
cgacggtctttaccttgatcacatcggcttcgagcatgacctcctctatctcgatcctgaccaggctgatattggcgcctggacggcctagaatttccgaactcagcgaactttcggccagctcggcagcagataggtataggaggtttcgctgatctccttgtgcatattttttgcaaggctgacgtagtaggcactttggtgggcgtatacgggtagaacatgacgcttc

SEQ ID NO: 568123 - DNA, 437 bp, Homo sapiens
  misc_feature (62)..(62): n is a, c, g, or t
agaagaccttatacagcttgccaggaaatactcctcccaaatcttgattcattctttgattntattaattgtaaattacaacttattttcatagttttcatgtttttaagataaagggccaaacaccttttccttattaaaattggaaccttcttttaagggaattcactttgtttcctttttggtaaccaatgggcaatttttggacacaattatattaataatgacatatacaaaggggcttgataacccaatctaaaattttccttctgcaggtccatccttaagtgattgtaaaggtttcaccttttcaattaatggtaatgggttaattgaaccattattttaattgaaaccaggattaattaagtaggatccttcaccttgacttattaatatttccatttttaatcttgaatgtttttgtctcccaggcc

SEQ ID NO: 568124 - DNA, 837 bp, Homo sapiens
  misc_feature (582)..(582): n is a, c, g, or t
  misc_feature (589)..(589): n is a, c, g, or t
  misc_feature (608)..(608): n is a, c, g, or t
  misc_feature (610)..(610): n is a, c, g, or t
  misc_feature (613)..(614): n is a, c, g, or t
  misc_feature (630)..(630): n is a, c, g, or t
  misc_feature (645)..(645): n is a, c, g, or t
  misc_feature (666)..(666): n is a, c, g, or t
  misc_feature (672)..(672): n is a, c, g, or t
agcggaggaccagcaccggctgtaccagcagatcaaagccggcgcctatgatttcccatgcgtccggaatgggacactgtcagccccggaagccaaggatctgatcaataagatgctgaccattaagcgccatccaaagcgcatcacagctgccgaagcccttaagcacccctggatctcgcaccgatccaccgtggcatcctgcagtgcacagacaggagaccgtggagctgctgaagaagttcaatgccaggaggaaactgaagggagccattctcaccacgatgctggccaccaggaacttctccggagggaagagtgggggaaacaagaagagcgatggtgtgaaggaatcctcagagagcaccaacaccaccatcgaggatgaagacaccaaagtgcggaaacaggaaattataaaagtgacagagcagcgtgattgaagccataagcaactggaggatgtacgagtcctacacgaagatgtgcgaacctggcatgacagccttcgaacctgaggccctggggaacctgggttgagggcctggactgtccatcggatctatttgtgaaaacctgtgntcccggnacagcaagcccgtgcaacnancanncctgaatccccaaatncacctgatgggcgangagtcagcctggattgcatanatccgnatcacgcaagataaccatgagagccgccaggacgggcatccccacagcgaacgcacacaagtcggacgggagaccccgggtcatttgccagccgccgagcgaacgcgtgaaatgggcagaactcggtgccaacttaacagaacagaacaggagagaacacaccaa

SEQ ID NO: 568125 - DNA, 870 bp, Homo sapiens
  misc_feature (615)..(615): n is a, c, g, or t
  misc_feature (622)..(622): n is a, c, g, or t
  misc_feature (641)..(641): n is a, c, g, or t
  misc_feature (643)..(643): n is a, c, g, or t
  misc_feature (646)..(647): n is a, c, g, or t
  misc_feature (663)..(663): n is a, c, g, or t
  misc_feature (678)..(678): n is a, c, g, or t
  misc_feature (699)..(699): n is a, c, g, or t
  misc_feature (705)..(705): n is a, c, g, or t
agcggaggaccagcaccggctgtaccagcagatcaaagccggcgcctatgatttcccatgcgtccggaatgggacactgtcagccccggaagccaaggatctgatcaataagatgctgaccattaagcgccatccaaagcgcatcacagctgccgaagcccttaagcacccctggatctcgcaccgatccaccgtggcatcctgcagtgcacagacaggagaccgtggagctgctgaagaagttcaatgccaggaggaaactgaagggagccattctcaccacgatgctggccaccaggaacttctccggagggaagagtgggggaaacaagaagagcgatggtgtgaagaaaagaaagtccagttccagcgttcagttaatggaatcctcagagagcaccaacaccaccatcgaggatgaagacaccaaagtgcggaaacaggaaattataaaagtgacagagcagcgtgattgaagccataagcaactggaggatgtacgagtcctacacgaagatgtgcgaacctggcatgacagccttcgaacctgaggccctggggaacctgggttgagggcctggactgtccatcggatctatttgtgaaaacctgtgntcccggnacagcaagcccgtgcaacnancanncctgaatccccaaatncacctgatgggcgangagtcagcctggattgcatanatccgnatcacgcaagataaccatgagagccgccaggacgggcatccccacagcgaacgcacacaagtcggacgggagaccccgggtcatttgccagccgccgagcgaacgcgtgaaatgggcagaactcggtgccaacttaacagaacagaacaggagagaacacaccaa

SEQ ID NO: 568126 - DNA, 203 bp, Homo sapiens
cagaccgtctttcccctgactactaaggtactgggacgtcagcgtcttcaaggtctatcctctaatgaacctgtatcgttaatggggaggtttagcccgtggtggaggaagtcccgcgtactctggtataatttaagataaatgataaacaattaaataaaaaggcagtcaatacattttatttgtatgagaagaaggagggg

SEQ ID NO: 568127 - DNA, 162 bp, Homo sapiens
gcttctctccatactcctaagggactttgcagacacccaagccactgggacccctgctaacacatgcaggtcttctttttctgccaactaacggtgctcggctgccctccccagcacgttgagagcttcagttttcagataaacacggaagcgacacataga

SEQ ID NO: 568128 - DNA, 402 bp, Homo sapiens
  misc_feature (187)..(187): n is a, c, g, or t
  misc_feature (386)..(386): n is a, c, g, or t
gaactggagcctggttttctccatccatcctttcttctctgggggccactggtggtggtggtgtcaaaagaccctttgcagctgccttaaaattctttagcatgtcagctatatttacagtgcaggaatatatctgtactgccagaaggttactgcattttagctttagatccaataggctgaaatnactgcgttccagagtccctgatgtagcacaaatatataattaaaattgcttgaaaggaaacatgaaagaaacaacaaaccttccattcttgcagtaataaaattaaaaacaggaaaagtctgcacagacacttaacatttgtctgcagtgaaaggcttttgttattgcttttcccctaagggtttcgcgtttccagagnaactggccgcggattg

SEQ ID NO: 568129 - DNA, 374 bp, Homo sapiens
tactgtggtgtaccgtctttcctttccaatagttcttcatgggtgctctttccactactgtaccgtgttcgaaaccaataatgacgtctgcagctctgaccgtggataggcgatgcgcaacggaaatgattgtgtgcccatgttggatctgtaagcatgtacagggcaccattaagagaggctgtaagagtagacgatgacatttggcaggctcagaatccaaaagtaaggcaaaccctcagtccctaggaacatcctttaatggactgtgcagaaatgccagcctacttagaaaatgccagcagcctttcctgtggctaaaattcaccatcacacgttggtcctatgctgctatcaatcaacagctaaagacc

SEQ ID NO: 568130 - DNA, 248 bp, Homo sapiens
agctcggaaatggcgggatttggtgctatggagaaatttttggtagaatataagagtgcagtggagaagaaactggcagagtacaaatgtaacaccaacacagcaattgacctaaaattagttcgttttcctgaagatcttgaaaatgacattagactttctttcctgagtatacccatcaactctttggggatgatgaactgcttttggtacaagggtctaagatctgtatactatattgctgtagc

SEQ ID NO: 568131 - DNA, 371 bp, Homo sapiens
  misc_feature (153)..(153): n is a, c, g, or t
agggtcttttgggtgcaacaggtgccccggcgccccttgcccctttctcaaagatttccaaacccaatttaaacctgggaactgggccgtgtaatgggaacagttacaaccctttttcaggcccttaattgccatgcaaaggccctcaagtgnccctagggaaaaagcaaaaaactttggggctgcaccctcaggattaggcaaaaggaagggtaagggaaaggatggggcccccaaggaaaaaccaggttctgctcaccaaaggatatgggtgggagcgaaagttgtaacaagtgggggtggggggtgcgggcccccccccctgctcctttactttcccgtttcctaataaaacctggttccccctttca

SEQ ID NO: 568132 - DNA, 119 bp, Homo sapiens
ccagatcaataggtgggtggacacatgagttggaagtctataaagagaacaggaagatatgacgcaaaggtgagagatgtggaggaaaggtgttgaaagtttgaggggaaaagaccctg

SEQ ID NO: 568133 - DNA, 865 bp, Homo sapiens
  misc_feature (509)..(509): n is a, c, g, or t
  misc_feature (711)..(711): n is a, c, g, or t
  misc_feature (776)..(776): n is a, c, g, or t
  misc_feature (799)..(799): n is a, c, g, or t
  misc_feature (855)..(855): n is a, c, g, or t
ctaacccaccaaaagggcctacagcccatcgtaaacaagctctgctcatgcagtcttcttagaccaacacactctccatataacacccctatcctccctgttaaaaagtctgatggctcataccgactcgttcacaacctccaagccatcagtcaagctgtcctccctattcatcccatagtccataacccctatccacttctctctctcgtcgctaccaacaccaccctctacactgcaattgacctgaaggatgccttctttaccatttccctacaccctgattcccaaaacctatttgctttcacctggactgaccctgacaccctccagtcacaacaactcacatggactgtcctccctcagggcttcagggatagccctcatttctttggacaagctctagcccgaaacctcacttccttaaacctgtctcccagtcatcttcaatatgtggacgaccttcttctttgcagcccctctctaaaagactctcaaactcacacggncactgctctcttaaactttctcgctatcaaagggtatagggtctccccctccaaggcccaactctccatctccatgatgacttacttaggaattcaactttcccctggggcccaggctatgactccagccagggcagcattaatagaaaatctacccccacccttcttcaaaagcgaaatcctttccttccaaggctagcangcttctttagaatatggatttccactttggccttctagctcatccctctatgaagtgggccaaangcccttccaatgaacccctaaancccttacataacatactcccaactttcacaaacttccaaactggtcttggcactgngtaagttcgg

SEQ ID NO: 568134 - DNA, 146 bp, Homo sapiens
aggatcacccggaggcggatgtagtgcagatagtctcggggatgacaatggtcctctgcatcttcatctggtcacacggcagagaggatcgcgccgtcgtaatggagacattaccagtgaaggggcatttctggtcaatgtaggtg

SEQ ID NO: 568135 - DNA, 905 bp, Homo sapiens
  misc_feature (630)..(630): n is a, c, g, or t
ggccgccgccgccgccctctcggccatcgctgcctccgccgctgctccacctcgagggacgcgagcgggcggcggggctggccgtgagagagacaggagaggaaggagggcaggggcggagttgcccgccttagcccccgccccgggcgggcccgggccctgcccggcggcctgccggcccaccgagccctgtgtggagtgtctggcggccgtggggcccccgcagcagcaggtgcaggatggccatcagaaggtctgggcggcgctcgaagtggcgctccgcgagtgcacatgctttacatcatcgacgccatcttcaaatcctacccggattccagccaaagccggttctgcatcgtgctccagatcttcctccaggctctttggtgtatttgcatccagtattgttcgtgatcttgtcagcaaacgatcacattttcaagtttttacaagcagtacagctcagcctttctgttaggctgcaaacttcagatgttggtgaattattatgcttctttgcacaattgagttctatggtgcctacaacacgtcagggttttggaattgagctgcttcctcggaaaaggtccctcgctgtggatggcacttatcgtatctacagataacatntggaattggatacgttaagagtaatcagaattcacttacaatctattcacaaaataattaattaagtatctagtgagttctgtactaggcttatcaaagagattacattacaaaatagagaaaattattgttatttttcttatttcgactaagtcagtgttggcttgcaagaagtgaggggtaatagtcacacagaatgtcacttttggtgaggaatttcagatttgggtcggatgaagagaatgaagcgaaacttgaataacgatatggaagga

SEQ ID NO: 568136 - DNA, 183 bp, Homo sapiens
gacagcacacctgtacctgacagtggtacgagtaccactatgcgctgcccctgggcctgcaagaagggagccaagctgacacctagacgaagaagagatatttacacaaaaaatgatctaaaaaaattcagaagaaatatgatgaaaggaaaaagaatgacaaaatcagcagtctcctggagc

SEQ ID NO: 568137 - DNA, 1453 bp, Homo sapiens
tgggtacttttttggtaaaggcggggttcgccccgttgtgcccaggcgtggttctggaacctccgtgagctcaagcatatccatccaccgtgcctcggccttcccattaggtgcgtgggactccaggcgggagcacagcacctagcccctttcctttccgtggtgtcctcgtggtgaaagtggaggtttgggaacgccgaagacaccacgtgaacagttcatcagaatcaatgtgcgaaaagagcgcctcgtggtgtgtgcctcccggagaaagtggaacacaggtgtgtttgcagacaggggtgtaagaaacccccaagcttctgtggggacaacccgaaagtctccacgtgtgagcttcactttaactttaagccaagacaacttattcgacacttttgaagccaacacacgtgtgagacacccgtggggacagtgagagagaaagtgtatcgtaggtgagggcctctctctcggcgtggtccgtgagtgtgacccactctctgtggggggaggagagagacaccccttttatacatccactcccagtgtagaatcactcagtgggtgagcactaaagttggcctctccagcttccccccagtgtggggacccccaagtgtgaaacacccctttctaaagagagccgtgtctcgaggggcacccgtggggtacacacacccaagcttttgaaggggcaactcacatgtggcgcaccatacaagagtgcccttctctcaagaaacctttcccacagagaaagggtcgtggtttcccccacaacaaggaggcgttgggacaattgcccgtgaaagtgggaccaccgggctgatgctacagcatcggggggaccctacaattttcccgaagtttgcaaccgattttcccaaaccagggatttcgtgatttgcccctccacaggggggcacgaataatccaactcccacgggaaactacacgccgggcaggcgcaaaacgagcagactttatgcccactatatgagcaggcacccgtggaccctcacagaagccaaaaccccagggaggggccctcccccattgaaacaagaaaaagagggcgcggcgaaaacacatctcagcgaaacgcaataccacgctggggggcccaagggagtaaaccaaatgcacccaagaaacacaagggggtgttcccacaggacggatatcccctgtacgaaccaccgagacacacaacagcacaaagaagcacccccaacctgcggaatgaggaaaagtacacagcggagctgcaaagacccaagacacagacagagaagcaaggagcacaacccaccagagacccacgacaaggagtacccgcatgagagaggagcacaacaaggccacaaacaccgggggcaaaaccacacaccgcagcaccagcaaagagaagaacccactatcgacaaacacagcaacacctacagaagcc

SEQ ID NO: 568138 - DNA, 840 bp, Homo sapiens
tccctctcagcccttggtctaggccggtgattctcgtcctggcctttttcgggaagaagtcatagccctgtgccggtgcgatgccgagtccgtgtatcgggacggggcggggtcgggccgtgagaggaagggtaaacggggacccccttactttgaggaccccaagtagattgttgaccctctgggacgtttgccacaggaccctcgggtcttacccgacgggagttgatcaagcccatccatgaaaagtttgctgggtcttctggctgggaaggcaccgaatcgctgtagaacccgaagcccaaaccatctgggagatttctttggcatgtcccacagttatgcagagtgctaccccgccccgatggatgacatggctgtggatagtgatgaggaggtggattatagccaaatggacccgggtgaccagaaggggcccttaggcccttgggactttgataccccggaagataacacgcgagtatatgaccaccaagaagctttgccccaggctgcacttcccgtatggtatccaaatgtctgaagggcggagaaacccggcgcttcaaggagaacccatgaccaagcacgagcttgagtcgcccgtggaagaagattagtgccatccttgagaagacggaagaagatggaagctgatggggttgaagtccaaagaccccaatactaatcactagttaccacccgagatgctccccacaggatatgctcccccctgttttctttctaccatttcccaaggttgccagatgtttttttgtggatgaatataaaattttattgtgtaattacttggttcccttaaaattggttaacttgcca

SEQ ID NO: 568139 - DNA, 328 bp, Homo sapiens
aaaaagcctttggggttttttggccccgcccgccaaaggggtttggccccttttaaaaaaaaggggggccccttttttagggggggttttattgggttttttttaaccccattttggggcccgttttgtttgggggggtttcccccccccgccccccacccccgggggttgtttttttttgggtaacccccccccggggcctaagggtgggggtttgctttgttttttggggggccccccccccctttcccggggccccggcccttttttaccttttttttttcaagggctttttggtttttttttttttttacccaggtttggggga

SEQ ID NO: 568140 - DNA, 898 bp, Homo sapiens
  misc_feature (89)..(89): n is a, c, g, or t
  misc_feature (203)..(204): n is a, c, g, or t
  misc_feature (207)..(208): n is a, c, g, or t
  misc_feature (378)..(378): n is a, c, g, or t
  misc_feature (391)..(391): n is a, c, g, or t
  misc_feature (416)..(416): n is a, c, g, or t
  misc_feature (422)..(422): n is a, c, g, or t
  misc_feature (457)..(457): n is a, c, g, or t
  misc_feature (491)..(491): n is a, c, g, or t
  misc_feature (508)..(508): n is a, c, g, or t
  misc_feature (511)..(511): n is a, c, g, or t
  misc_feature (515)..(515): n is a, c, g, or t
  misc_feature (524)..(524): n is a, c, g, or t
cgcccacgcgtcgtggatataccgggactcatgcagcttggtagatatctgagaaatggtttaattcatgctcaggagctgtgtgcctntccatcccttccggctccctacccctcacttccaagggttctctctcctattgcgcttagtgtcctacatggggttgtgaagcgatggagctcctcactgcactcgcctctctnntcnnccccccccaggaggaacttgaaaggagggtaaaaagactaaaatgagggggaacagagttcactgtacaaatttgacaactgtcaccaaaattcataaaaaacaatagtactgtgcctctttcttctcaaacaatggatgacacaaaactatgagagtgacaaaatggtnacaggtagctggnacctaggctatcttaccatgaaggntgtttngcttattgtatatttgtgtatgtagtgtaactatnttgtacaatagaggactgtaactactatttaggntgtacagattgaaattnagncgcnccattggcngtctgaggaggtgtggactgttatatatagatctacataaaaactgctacatgacaaaaaccacacctaaagaaattttaagaatttggcacagttactcactttgtgtaatcctgaaatctagctgctgaatacgctgaagtaaatccttgttcactgaagtctttcaattgagctggttgaatactttgaaaaatgctcagttctaactaatgaaatggatttcccagtaggggtttctgcatatcacctgtatagtagttatatgcatatgtttctgtgcatgttctctacacaattgtaaggtgtcactgtatttaactgttgcacttgtcaactttcaataaagcatataaatgttgaaaaaaaaaaaa

SEQ ID NO: 568141 - DNA, 871 bp, Homo sapiens
ggggtccagagcagactcattcaacacaggtatacgggatactgatcgcgatgcgatacgccgatgcgagccgcatgcgcacgatcggtcgggcgcatcgcgcgcgcgattaacgatatcggggccgtatgcggcgcgcgagcggcgcggctatttttatttttattatattactgatagcgtagcgatcggcgcgattcgcggtatataatattcgcgcgcgatatctctctctgtgttgtatagaatctctccgcttatccgcgtcttatacggcgatctatcggtgtcttcgcgttcatctagctatcgttatgtagttagattcggctatcgatcgagctactgatcgatctcgatgcgatgtatgctatctagcgcgatcgcgcattcagcgatgcgtagcgctacgacgcgcgctgtgcgtcttctcgtgctcatattcgcgatgcgtgcgatgcacgtagcatgatctagcgacggatagtaggacgcagagtaggagcatggggtatagcgtagcggcggagggcgcgattcgggcgcgctaataagcgatatcgggcgctagcgataccgcgcgcggcgcattatatacgggctatgtacgtagcgatcgatcgcattattaatttacgggctagcggcattattagcgtctagcgcgcgctagattatggcgcgagcggcattagcgcggatcggatcgtacgatcgctagcgtttagcatgatgcggggcatctatggattagcgggttatatcggggagctatcgatgcgatttaggcggctatgcgcgcgtagcgagctgcggagcatgcgcatgctaggatcgcggcgcgcgagggaaaaacgtctcgtcaaaaaaa

SEQ ID NO: 568142 - DNA, 294 bp, Homo sapiens
ggctttacattctgcagaactgaccctaggttgttgctacccgatatggttgggctgcgtccccacccaaatttggatcgttgaagtgtagttcccataatccccatgtgtcgtgggagggacccggtaggaggtaatcgaatcatgggggcaggtttttcccatactgttctcgtgatagtgaatacatctcactaaatctgatggttttataagagggcagtttccctgcacgtgctctcttgcctgctgccatggaagacataccttttagctccttctttgccttccacc

SEQ ID NO: 568143 - DNA, 838 bp, Homo sapiens
  misc_feature (8)..(8): n is a, c, g, or t
  misc_feature (76)..(76): n is a, c, g, or t
  misc_feature (78)..(79): n is a, c, g, or t
  misc_feature (81)..(81): n is a, c, g, or t
  misc_feature (143)..(144): n is a, c, g, or t
  misc_feature (147)..(148): n is a, c, g, or t
  misc_feature (318)..(318): n is a, c, g, or t
  misc_feature (331)..(331): n is a, c, g, or t
  misc_feature (356)..(356): n is a, c, g, or t
  misc_feature (362)..(362): n is a, c, g, or t
  misc_feature (397)..(397): n is a, c, g, or t
  misc_feature (431)..(431): n is a, c, g, or t
  misc_feature (448)..(448): n is a, c, g, or t
  misc_feature (451)..(451): n is a, c, g, or t
  misc_feature (455)..(455): n is a, c, g, or t
  misc_feature (464)..(464): n is a, c, g, or t
taattaangataaggagatgtgtgaatttaaataaattaaggataaataaaaataaattaaaagggttatatatananntngagattagtgtcctacatggggttgtgaagcgatggagctcctcactgcactcgcctctctnntcnnccccccccaggaggaacttgaaaggagggtaaaaagactaaaatgagggggaacagagttcactgtacaaatttgacaactgtcaccaaaattcataaaaaacaatagtactgtgcctctttcttctcaaacaatggatgacacaaaactatgagagtgacaaaatggtnacaggtagctggnacctaggctatcttaccatgaaggntgtttngcttattgtatatttgtgtatgtagtgtaactatnttgtacaatagaggactgtaactactatttaggntgtacagattgaaattnagncgcnccattggcngtctgaggaggtgtggactgttatatatagatctacataaaaactgctacatgacaaaaaccacacctaaagaaattttaagaatttggcacagttactcactttgtgtaatcctgaaatctagctgctgaatacgctgaagtaaatccttgttcactgaagtctttcaattgagctggttgaatactttgaaaaatgctcagttctaactaatgaaatggatttcccagtaggggtttctgcatatcacctgtatagtagttatatgcatatgtttctgtgcatgttctctacacaattgtaaggtgtcactgtatttaactgttgcacttgtcaactttcaataaagcatataaatgttgaaaaaaaaaaaa

SEQ ID NO: 568144 - DNA, 1068 bp, Homo sapiens
caggacccacctggtggtcgtctgccgggtttcatgaggggcccgagcagaagcaggatagttgctccggctctgctggaaaatttccccagacctgagctcccctccgaccacatctgttgcaccattgctctcattcatggcctcgtaagtgatagcgttgactgtccatacgaatcggcgcgctctcatagtctgtattgatgggctctctcacctacagcaatcgggaggcgaaggtcctaattattacaggatcactctcgcctacctggggaacagcctgtagaagcggtggcgtggttaatgccatcctggcctgtgtcaaaatagtaggcaggcaggcgcatgacaataggggtaggatcgcgtccgcggtggagggcctaacattaatttacttctgtacgcggggtcacaggaatattccagatagcttttagctatccggcagtcccaataacttggggaccggatcgtaggttctcatgaatcattggggacgtgttgatctagccatcaaagtccgcttgcgcatcgacaacagatgaacgtattacacgtattcgagcatatcgagtccatatgccccttccatgttatatggataggcccttaggcagcgaagccaccgttccctgatatcttttggcactgaaaatggagatcggaggataatccctttagggagtcaacggcccgatcccgataaccatcgacccttccaaccccgttacatacaacaatcaagaacgacggccgtcggtttagattcttattaccctgctctccttaagtgacatttaccaagtagtcttcacccagaactctgagggcgaaccagacaaatgatagcctgagggcaaagccctgtaaacagcgcttcccaaattgagccgaactgaattgcctatacggctacacgaatcatgcgattcggcctaacgaataggaggcgtgttgtcctttagtatcagccggatcgagaagaaccatactcaatttggacacgagggtaataggccaaaaggcgacatatgaacaggggaacccttaaggaaggggcgc

SEQ ID NO: 568145 - DNA, 158 bp, Homo sapiens
cgtgtgatcaccaccatagagtagcacctcatcgacagtactcccagattcactttcttcgattgccaccacgtgagaccacctcacacactcctcccagcttcacttctttgatcactaccaccgagaacccctcacacagtaacggcgtaaggctg

SEQ ID NO: 568146 - DNA, 324 bp, Homo sapiens
gcctcccggcgcagtcaccggtgcggtctatggctggacttctctaatgtctgctttggtgcccggtgctgcagccgcgcacagtgctcccttcgccttcgccctttccacctcgcggcagttcggaatcaacagtgagacaattatgaaagcagcttcaatttcagaggacgaatggtggattcaatcaataaactgaataactgctgataatgtagatggtctcctgtgttcagtggcctcttccagagcatatggctgagagaaggatctggaaatgctgttctccagtacaaggcctgtcgatggcttccactgtcctcc

SEQ ID NO: 568147 - DNA, 1525 bp, Homo sapiens
  misc_feature (206)..(206): n is a, c, g, or t
  misc_feature (1219)..(1219): n is a, c, g, or t
tttttcccacaacccattttttttacccagggggtgtgggctgtgggctgtgtgatgtgttgggaaaacctttgggggttgggggcttgcaggaatgtgcagttagagcctctctctcctgtggcctcgtggtcgtgcgtggctcatagcgccagggtgtgggcgctgactcaagggcgcagaaagcgcctcaatctcttgtgggngagaacagaggagaacagaagaggcgaacagagagagaggcgcgcataaacaccttctttttctgcggccgagccggctgtggtgtagaaccaggagaccccggttccgccatgtggcgccgggtgtgtagatctccgggtgaaccagagagagaagaggggccgcccgcggtgtactcgtgtgtgttctcgccgcgcgcgcgcccagcgtttgttagagcccacgcgtataaaagagggcgcgccgtggcgcgcgccctgtggggcgccgccgcgggggggaaatttcgcgcctgtaaagcgcggggccccagcggggttatcaccattctcaagggggggcatctctgtcttccagaggggacccatctactatctcccacgagaaaccccggcgggccgcgggggggggcgcggcccccctttttcgcccacaggggggttgtctcttctcgcggagaatctcgcgaaatattcggggtttatagaacacgagcgcgaaaagcggggaagtcttgtggttatcccatttgtgcccgcgcccacgagaggggggcactttttttccacccgaggcgggggccccccagtcttttgtggggtcgtctcatgtgcgcgcggcacaatagaaagaggggcccccacaagtttctcccacacccctttgtgggcccaatgtggtggtggcctccccccgtgttgggtggggcgcccacccctatgttgccctaggtgaacggggggcctcccacactctcggggtgtgtgtgtcctttgcccctgtgagagcgagaaaaaaaacgccctgttggggaacaacaccctcgcgggtgggtcacacagtgtctttggcgcccccccgggggggcacactctccgacggggggcagaaacactttattgtgcccccaccccggggggtgtatacttcctttcccccccgaacaaaaaccacctcttgttgtaagacaacccctagctgaaagaggaacctcgctggttgtgttctttgnacaggcgtggtggtccccatctcaggggggctcccccagaggaggaagggagcggtaatcatccgtccctcattcaagggaccaaacgaaggagacgccgtgggtggtattagcagtatctgatctgtctgagcccttgataagcgtattgtgccccatcatatttttgatcaaaaacccccctttttttttggaagggcggggtgggccgccggggggctctccccccaaaattttctttcgtgcggcacacagagagaaatcctgtcgtggtgcccccaaattataatgggtggtggtgtggcc

SEQ ID NO: 568148 - DNA, 199 bp, Homo sapiens
atgcaggctgaactgaccctgggtgatactgctctctgcagccctttctcacccctggtcccacggccctggtctctcccctctgctagaatctcgctgagggattggtggggaggggtgtgatcacgcacgtgggtggagatctaggcgcccccgtggaggcctggacagagaagggccacgggcgggacaacggtct

SEQ ID NO: 568149 - DNA, 396 bp, Homo sapiens
cactccagcctgggggacaagagtgaaactccatctcaaaaaaaaaaaaaaaaaaaaagcacatctgactcagtgggctctgtgctctaacaagctcccagggaacgcgaggctgctggcccagggacccactgagaggtcctgggaagtacatggcagagcaaggacatgaacctgggccaaggctgtccagctccaaggcccacgttcttgctgctccacagccaagaatttcttccagattctctaaggcttttggcaagagaggctcacaccctggtattcccttcctctgtggctggaataacttgactgttctctgccttccctggataaaggtgtatcatgtttaaaaacaaaacaaaatacaacttaagcacatacttgcttgcagga

SEQ ID NO: 568150 - DNA, 569 bp, Homo sapiens
attttaaagatgatcgtaggtagaaggcattttataccgtgcagaattgaatcctaattttgacgttggtatacaacaaagattagtagcaggctgtagcgtgatcttagtgctgtacatgatgacaactggctccctctactgaactgccatgaggaaacgtgcgcagtgtcacccttctgattacagccacctttgggtttcatttaattttggtagtgttaatgtctattaatgtgatttttggttgtgttttaagcctttctcccaataggtggatgacaacaagaaagctaggagaatgggtaggccttggtaaaattgacagagaggggaaaccccgtaaaggggtgggttgcagtcgtgtagtacttaaggtaagtcaccgttgatcctagggatgaaggtctagtgctgggtaatcatataaaagcctgggattggaaataagttgaggatcttataaaggggaaaagaactgagttcagacaggtttaaagcattttctggagtttcaggaaaaaaataaagagctgtaatttacaagccagccaatgaatcggcttacc

SEQ ID NO: 568151 - DNA, 375 bp, Homo sapiens
agccccgatcagtcaggaaactgacatgagcatggtgcttgaatccactcacatttcatactaacgctacattttcttccagtcattgccatctggtacacgatactatgcaacttttgaactgtgcaaataaagaagaaaacagagaatataaacagatctcccaacatccttcccaggtaggattttattttgatgttttgcagtgatccagtggtgtttgcactacactctgctttgccttgcagctccccatgactgcaggccattcctgttgctcagtaggccccatatcagtctaactgctctgcatttgcaccttggactccagaacgttcctctttaggttcccatctccctgcacaggccctgggt

SEQ ID NO: 568152 - DNA, 810 bp, Homo sapiens
tctcccgtgtctgccatggcggagaagcagagagatgctagcgtaagagtgagtcccggtcaacaatctacagatgagtctgaggaagaacagagcgagagtaggaactccaccgctgagagtatggataggctttccagtggggtaagtgaactacttcagacggatgcgccctagctcgatggagagtcctctgactagttttgtgcttagggagcgagcatctgttagtggcgagagggtgttcatgttaactgtgtagtgtctcgagggtgaactatctaggtcgaagataggtgtggcatgtgagcgtgccgtgtgtaagtagtaagatctaggatataagctctcggagtgaccagatgggacgtagacatcactgtgggatggttgtggttgcaagtagcgactggatagaatgtgaaagggtgatttaggcactgtaattctaggtagcaatgaatttctaggtagactgttcagagctggttcgcctactatgaacaagtgtgatgttggctggtggcaactccaacgagttgtcggtagtacaatgcctagctctcgtcgagagacacgcttttcgtggatcccggatgggggacacgcataaactagacgtacctgtgttcgtaaacgcgatcgttgggactgtatgcagggatggcacagtctagtcctagaatctcggactgcaaagcgggacagggactcataagcgaagtgtgaagctgaaagacggaccactctgagtctgactgtggggcccaactaaataatgccggtgtgaataaactttctgtgaaccct

SEQ ID NO: 568153 - DNA, 883 bp, Homo sapiens
gtgaagatctggcacaagatagaatggtaaaaaaaaaaacaattttaaagtgacagtgccatagttgggcacagtcccttctcaatgataaatttaaatagcctgtgagtccaagtaaatgatcacttatattggctagggagggaagtcctaggggggttcagtttctcccagaatacctaaatttttacatcaatcctttaaaagaaaatctggtatttcaaagaatctttctctgcaagtaaatctcgcaggggattttgactataacacttgaaagtggttatgtgtaccctttttcgggcagcttttaaataggaaagttaaccgtttaaaacatggtacgtactgaaattttacaagagtttacctagcattaaactatgtctaaattgtaccttaaagacaaatagtaagcatgacctggggaaatggtcagaccctggaatggttgtttggccttgaaagtagcaggtggccagaatttgtcatggcaacaaggtttaaaacagagacccttaaaaatgaactgtctcaaatgttggggttagaaccagcagctctctggtacatgggctaggctggagttttctaagactgagtcaactcttatttttaagaaaagggaggtctggtttgtaattccttgtactaactggtaaaagttttttccaaacaacattatgtgtgaattggtagcattctcatggaatatagactgtgaattgggaagtcacgtattgttgggaagtgcaacattaattgggaaaaatttcttaaaaaggttttggctaaaacaaaaaaaaaattggggccaagtaaatgatgggcgaaaagaagtaaagagagggatcaaacgggattagttagtctatcagtgaaa

SEQ ID NO: 568154 - DNA, 185 bp, Homo sapiens
aacgcgcagtatgctggtcacagacgaagtgtggtggtgccctggctggctcctgccgggatgcccaagtcaggtactatcatcgatggggcagactccatgatgaccccatgcagccagacgaaccagcacatccttgagggctgaagccacgtgccaggacacgtcagcgtcaccagcatcgt

SEQ ID NO: 568155 - DNA, 189 bp, Homo sapiens
gcgtatcacattatacatcatattaacaagtagctcagaatacatattctggcatagtgtaaatatagactttttaaaataaaactgttacattgttttttgaaatgtatcaagtggtatgtaaataccgttaatgaagtgagtaataaccacacccaggtaaatctttggattatgagttatttatca

SEQ ID NO: 568156 - DNA, 127 bp, Homo sapiens
caggtgattggataggtagtggtggtctggaaggatgttgcagtcctgtctcttccacaggtcctatgactgcaacgaggcttccagaccaccactacctatccaacaccatgactctctcagacca

SEQ ID NO: 568157 - DNA, 142 bp, Homo sapiens
cattatcatcaacagttggtatgatggcctcaactgcactacccagcgggatagtaggtgtatctgcagataaggtctacatgctgtacttaaatagcctccaggtgaaagccagagttggtcgggctatttctggcttcct

SEQ ID NO: 568158 - DNA, 119 bp, Homo sapiens
tccctccatttattgaaaacttacaataaagttagaaaactcataagagattgactcatgtctgtgtgctgggaaataaaccacaggatccatgtgtatgttagatgcctgggggtgca

SEQ ID NO: 568159 - DNA, 185 bp, Homo sapiens
tgacacagaatctcactctgtagcccaaggtggagtgcagtggtgcgatctcggctcactgcaacctccacctcccgggctcaagcaattctcatgcctcagcctcccaagtagctgggattacaggcatttcactgaaagcagaagctgtctcagtccagaaagaattcgaagatccttattac

SEQ ID NO: 568160 - DNA, 344 bp, Homo sapiens
aacccaccaattttctagggattctacttatacatagctcttttttgtatagagccgtcaactaaagggggtctatttgacaccataattttaacaaagcataggataggtgttttgcatttgaaagagtcaagacttaacttgctcaagtgggatgaaaatagttcctgtgtcaatttgctgttgccttctatttaagtactgtatttacaaaaaaatcaaaaaatctaatacaatgtaaaattagaaaagaaactttaaaaatgcttatgatatagcaactgaaataaaaatctcaaaagaatgtcttcatactgtaaaatgcctggtccttcacgaatgaa

SEQ ID NO: 568161 - DNA, 470 bp, Homo sapiens
  misc_feature (356)..(356): n is a, c, g, or t
ggccttccaggccaagaatttagcatgagggggaggctgaggcaggagaattgcttgaacccaggaggtagaagttgcagtgagcaaatattgtgtcactgcactccagcctgggcaacagagtgagactcccatctcaaaaacaaacaaagaaaaagagaaaagcaccaggagacccaatgcagtggctcacaccagtaatcccagcactttaggaggctgaggcaggtggatcgtttgaggtcaggagttcaagaccagttgggccaacatggtgaaacgctatctttactaaagatacaaaaaaagtagctgggcgtggtggcagtgcctgtaatcccagctactcgggaggntgaggcaggagaatcgcttgaacccaggaggtagaagttgcagtgagcaaatattgtgtcactgcactccagcctgggcaacagagtgagactcccatctcaaaaacaaacaaa

SEQ ID NO: 568162 - DNA, 502 bp, Homo sapiens
  misc_feature (381)..(381): n is a, c, g, or t
gtctgaaaagatagaatccctacccctgatttggttgccccgtttgccttttttgtcagtttaaggtcactgtagttcaaattgtgccccgagggatgaagtggtcccggcacgggtggcatttctttcatgaatgaatggtccccttgtgtatgcaggtttcgcgtgcagctaggcagcatctccgcaggtccaggtagtgtaagccctcacctccacgtcccctgggacctcggcataggctgcctttctggccagatccaatcaccctcccgcgaaggtggctttcgcatgcgcttctgctccccagcgatctgaggagtgaacaggaccccacggacgaggtatctgccggggtgtgggccctgctctgatcaccanccgtggcgctccccagggccggagccggggcacccagcactgggggcgggctcgttaggggcggccgttgcgatgtatgtggcaaggtgttcagccagacgcagcaatcctgctgaggcac

SEQ ID NO: 568163 - DNA, 594 bp, Homo sapiens
tggtaaacagggcttggttgctggtggtccgggttaattgtttcccaaaatgttaatgttgcccttgccccatcaaaacaagggcagggcttcagtgtgtggtttgggcccccctggtttaaaggttgggatccactcaagcctccccttgtggggcctggggaaacctggccaaggttaaaaaaattgtggggtttgtagaacaccccaacccttttttgggggtggggtcgcctgggccccaaattttcccttatttttcaccagggggcccttttttcctgggacgggggggaggggaagggggaaggggggtttttaaaggccccgtaaaaaatggccgccccttaaaaggatttttaggggggtggggtggattttttttaaagaaaggggggggaaaaagggaggggaaattaattttcccttccttttgggcccgcaggaggttttggtccccaaattttaggtttcggtttatttgccaacggttaaactttttgggttgattgttttcccctgggggtcatgttttttccctgggggcccggaaattttttcccccctttttccaaggaaaggcctttaccccca

SEQ ID NO: 568164 - DNA, 359 bp, Homo sapiens
  misc_feature (171)..(171): n is a, c, g, or t
  misc_feature (198)..(198): n is a, c, g, or t
  misc_feature (214)..(214): n is a, c, g, or t
  misc_feature (332)..(332): n is a, c, g, or t
taaaatagcatagtatttgcatataacctacgcacttcctccctatagactttaaaccatctctaggttacttatagtattgaatacaatgtaaatggtatgtaataatttttatactgtgtttttttatttgtattctttttaaccattatattgttagtgttgtttctnttcttttcttttctttttttttttttnttttttttttgaggancttcacttggaggtattaaacagattccagttcttcgactgcatctgtgcgtgggtccctaacccagtgggcaccactgaggcctcatctcggtcctgaatcacaactttctggggtnaggtccagggccacctcgggctagaga

SEQ ID NO: 568165 - DNA, 190 bp, Homo sapiens
gcctgcatagacgagaacctggaggtggtgcgcttcctggtggagcagggtgctactgtgaaccaggcggacaacgagggctggacgccgctgcatgtggcagcctcctgtgggtacttggacattgccaggtacctcctgagccatggtgccaacatcgccgccgtcaacagtgatggagacctgtctt

SEQ ID NO: 568166 - DNA, 390 bp, Homo sapiens
cacccactcgctggcgtgccaccgggagcagagggcggctcggccgccctccactcagtctcagaccttggggcttcagaggcgtctaggctctcggaggaggcgcgggtcttcttttccgagagcaaatttctcggagatgctggcaggatgaccgcggccccggagaggacgggacagctctgatcgccgctgcgtgccccgcactgcccatggccaggaggccccaggaacggacagcccgactcttaggcgccgggacctcaggctcagatcagtggccgaggccccagagtttgcaactcagctctggagttcagcagcacagcagcaggaaaagcctgtcccttgtggggggcctggtgcctcgagagagacggccaagggtct

SEQ ID NO: 568167 - DNA, 939 bp, Homo sapiens
ggtttctctgacagtataatgatagctatgtgatgttagtttcaatgtcgatgctgggaactgatctatgaggtgcgtcataagccagcaaccgagcaccgaggaacacgccacgttgcagtacgtattagttatggaaccatttgcattcggtcagtttctaaagctttactctggtccttgtgcgatccggagcgaagtaatatagtgcttcgattgatgagttgaatgtgattgatggtccaataatgtgaggctgaggttatagaccttttggtcacacaagtttgctctgggaactgtctatttgttagagttatgaaacacataggatctaacatgaaagggtataatggtaggtggtgtacataatcttcaggtttgaaagtggacagaagttgtcattacagtttgtaaccttgttacagaggattgttcactatgtgcgctagcgtaggtgtcctagttcagttaaaattgcaaatggaacttagggggcctgaatcttaatctctcagatacagtgtatgtgtgtagcatgattgtttcagacttcttatgttgagcaagactcggatcttggacttgcgtagcccccctgttgcgcaagtttttcttcgaggctcatttgagtggcgactggatccaagaggaaggaagctagttttggtgaagatgtgggggctgttgagggactggactggggaaatactgggtcggtgcatttgtggccagaaaaagcgaacttcaccttattaccaagttaaaaccatgttcgggatcgcgagcttggtctccggaaagaaacctttagctaacccatggcttttgggggaaggaagggccctacctgtggatgggcaccagcttattcaaaagtgtcgagacgaaggaattcccgggaaataacctggcggtgacctgttccctatataaaag

SEQ ID NO: 568168 - DNA, 255 bp, Homo sapiens
cccctgcaacgtgtatccactttgggtctctacactctctgatagttacaacagagacccacagggatacagcaggaattagacaggtgatgggagagagggcacaaaggcttgtgccaggtgagcgactagcatactcaccggctacgtggtaagactaatcttgaggcatgagaagaacctggaacgcagtccactactgacctggacggaggacggaactaccacactggtaccgactgacggctggcgtgc

SEQ ID NO: 568169 - DNA, 621 bp, Homo sapiens
tgcaacgaacagggggtagttcaacggttccttgtgtgtgctcccccgaccggcaggtcctcggtcttgaatgttaagaccctctcattttttcggccttcccccccagactgtgcagggtaagaccagtttgggcagagtatgcttcacatcccagagtatgttgggaaatgtcactttctggttttacagcaattttttttctccctattgcttgacataatttctcagaggctcggaactaaactttaattctctcaaaagaattttttgaaacagtcttgctctgttgccctagttggtgagcactggtgcagtctcacctcagtgcaaccgcagcgttacacgtagctgggatttcaggtgagatccaccatgtcgccctaatttttgtatttttagtagatatggggtttcgtcacattggccaggctgatcttgaactcatgacttcaggtgatccacctgcctcggccttttaagagcgctgggattacaggtgtgagcccctgcactcagcctacttctttttcattaggatagactgatttctctctctagccgccagctcaatgggcaccgatgtgaatgctcctggtggggtgcggtgttgggtgttat

SEQ ID NO: 568170 - DNA, 196 bp, Homo sapiens
agaagatgccatagtttacgttactggatgtcaggagtagatactggtcagtgattggtggaatggagaacacacgtgtagatgcatctgggtagcactggtttgcataagtttatgtttccatgccagagtatgtgtgggcgggcgcatgtgaaacacagagtgcacacgaggggacattaagtacaggatacat

SEQ ID NO: 568171 - DNA, 830 bp, Homo sapiens
gggccgggcgcagtggctcacgcctgtaatcccagcacttgggaggccgaggcgggcggatcacagggtcaggagatcgagaccatcctggctaacacggtgaaaccccgtctctactaaaaatacaaaaaattagccgggcatggtggtgagcacctgtaatcccagctattcaggaggctgaggcaggagaatcacttgaacccgggaggcggaggttgcagtgagccgagatcgcaccattgcactccagtctgggcaacagagtgagattccgtctcaaaaaaaaaacgacaggaaaaaaaatatagcattatacctcttcctgtgtctcaaccggccatgaaaattctggaacactccaaattcacgttggaatattccaaaacaaatttatagtttaaaatattttacttcttatagtaataggtatattttaaaaaggcctcaggtatactatcttctaaacagttacaattccagggcaggttacatttaaccaattatgtcctctagtgagaacaaataggctatttcacgtgtgtgtagcctcagtgcctaaaaagtgggtggccaaataaatattcggtagaattaccctagaatgtgtaaaaccccattcgtttgtgtttaccaattggcaaaaattttcaaaggttctggtatttatgtaatttttggacatattatttatttgggtgcaggaaagagagggggggggactagtaatagtctcattttataaactctatatggtgtgtttaacaatcttccttttaaggaattttcaaccttgggttccaaaaggtttttggttgaacagtcaattg

SEQ ID NO: 568172 - DNA, 898 bp, Homo sapiens
ggggaaatgctggcgcgcgcgggcggggcactggggccttttgctgaggggctctctactggcttctggccgcgctcgggggccggcctcctctgggatggcccgcgaaaaccaccgggtggtactggttccgtgcagcagacagagagcgctcggggtgttgttggaacgcagaatgggggccggatttcccaccgggagattccgtggaaaccctgtggtttgggacacaattctcttacatccctcggtgttgttaacgacccgggatcccggaatttatgggtgggcccaaggaggctccctccacgggcaaacagttgggttccactccaccggggtggcccttgaacgacagaggtgcgggctgtggtgagacacctccttgcgcaccaatgtgggttatcatcttccgtgggacaaaacacgcgagaggggcgaaggtttcccttttgaaaaccgctgtggggcgcactatttcatggggaaccctcttttacaccacagggggaccaaacacggcccttaaacgcggggtggttgggaaacggggaccccccgctgtggtaagtttttagtggcacgcggattcacaacccaccaaagattagtgaaggacttacaaaaaaaagaaaagccctatgtgggaaaggaactccaagggaaggctgtgcggggcaaaaacagactcttcgttctgtccggttgcgcaccccaacacacggcttccttcccgcggggcgaaacgccggcggagaacgttttccccccgtgtgaaagatgttggccccagaggacatattgtgggtgcggcgatgtttgccccctattttcaacagccccaaaagtggcctgttgtctttgacaacctggggcacgggagcagagaataacatcg

SEQ ID NO: 568173 - DNA, 158 bp, Homo sapiens
tataaacctatatagccattaaggtgaagcccagtttaccaggttcaagggtacaaacttttcaaattttaaaacattttaggtaaaggtgtaatatacttaaactgcacctaaaatatcttttgcacctctttgtaagaaagtcctgattcctgtta

SEQ ID NO: 568174 - DNA, 595 bp, Homo sapiens
  misc_feature (209)..(209): n is a, c, g, or t
  misc_feature (239)..(239): n is a, c, g, or t
gcacttgtcgaggcttgcaacatcacatgttggttatttgtaaagtattggcttactaaggttgacagattttcctgatattaatacttttcatcattatttttaaaaaatcatatttgttacaaaaaaatcatatttgttaataccaccactgatctcatcagaaagttctttaaatgttgagttttcaagcccacagtggcaggtgnaagttttccagagttctaatttttgctcanaaaaattatgattatgagaaaagctcagattttattggtcacaaatagtgccaaattgccttgaagtgacggactcattttgttcattttggaaaatatctgacaaatatccaagtccaaataaccatagtttggcccatcagtcactttttgaagtaaaattgacatttcacaggtgaagggccattcatctcacaatgcacagtgagattcctcgaggcggactcttcctggggcgtgccggagaaataaatgctctgtgtatacttcccacttcgtcacgcagaatattcagaagacttgtgctcaggggttgagatttatgcaaaataattattttattgcatcaaggacac

SEQ ID NO: 568175 - DNA, 244 bp, Homo sapiens
  misc_feature (125)..(125): n is a, c, g, or t
  misc_feature (162)..(163): n is a, c, g, or t
  misc_feature (231)..(231): n is a, c, g, or t
cccaaatgtagagccatggtctagacaccccactttccacaccgtgtatacaccctgaccaacaggcttataaatggatccggaaactgctagaataatgtaatacctgattcttagaaccattntagtccgtcatatgacgaaattttattgttcatgaannctccatgtgtcgtgacatgcacactgtgcacacgactgtggttaacgtaacgcagtggtacctgagcnttcgaattcgtaa

SEQ ID NO: 568176 - DNA, 418 bp, Homo sapiens
cgcggtggctcacacctgtaatcctagcactttgggaggctgaggtgggtggattgcctgagctcaggaggttcgagaccagcctgggcaatacggtgaaaccccatctctattaaaatgcaaaaaattagctgggtgtggcagcggatgcctgtagtctcagctactggggaggctgaggcaggagaatcgattgaacccgggaggcagaggttgcagtgagccaagatggtgccaccgcactccagtctgggcgacagagcaagactccatctcaaaacaacaacaaaaacaaaatagttgtgggccaggtgtaatggctcacgcctgtaatcccagccaaaagtatgtaattccacaatttagtcagactccccattctcatatctactcatcttactgtctctattaataatat

SEQ ID NO: 568177 - DNA, 186 bp, Homo sapiens
gagggaactggctcgatcacagcccctccctctggtgaaacagtaggcggccaggaagaaggatgctgtggaagtctatcgccatggaaacacgttagcccatccgaggcagccgctgggcaccaagcacgaagctggtcagtggaggtggggcaggacgtgttccggtcatgcatggaccgagct

SEQ ID NO: 568178 - DNA, 98 bp, Homo sapiens
gttccgcgttcgggagtattcaaggccgttaccgtgtattattgtccgagtggccggaacggagccaacatggcagcggggtcgggcgatcttcattg

SEQ ID NO: 568179 - DNA, 238 bp, Homo sapiens
taatctcagcaggaccctggcgcggctctcgtactgggcatcatgtcagcagggcacaggcagcctttttctgggctacggttccaatacttttgggagggggtgccagcccctccaggcatcccacccccaaatcatcatctttagtactaacagggggtctggtcttcgaagcctcccttcagatcccagctgagccgggtgacggccgggccttgatgtgggctgcagccttctg

SEQ ID NO: 568180 - DNA, 240 bp, Homo sapiens
gcagaccagaatgcctgattgctgaagcagttgagcgtgttgctggtatccctgaagagcaattagcaatcttgagcctcctgaaacagccgtgtggaatcgcatcattgagcctgtggctgccatgagattttttgtgccatgctgcgactcttccctgagtatctgaagggcgaggagctctttgggctgacggagcatgccgtgctacgcatagctgaatcactgcccggggtggag

SEQ ID NO: 568181 - DNA, 380 bp, Homo sapiens
gtaaacagacagatgattgtatgcagctctctagaggtcatcatagacgagacatgatctgaacataccagatggcaagatcactacgccaagtagacaatatcagttttatagaactggctgattctgtaacatctgtctttgaggttacagttttcaaactatagatcaccccaaagaagttgcaactatgacatgtatcaccatcacacaaacggagtccagctgtagttcaaattagtcctgctttgtttcacatcatttaaatatttctagcataggacatgatacgaaccaaaactcaaagtagccataaaaatattattctgccgttgaataaaagcaacaatgtattagactgttagacttttaaagcttca

SEQ ID NO: 568182 - DNA, 672 bp, Homo sapiens
  misc_feature (465)..(465): n is a, c, g, or t
gacaaagactgaattataaatgctacgtggcacatcaaggatgaagtacaggtatcttataagacttgggcaatagccatcatggacatgataaaagctcataatcgcccagagttgtgcgaagacaacctgcgttcgagggctacccagagccaagctaactaccagacgttaccagacttggcgctgggttttcccacgacaggcatcaaacgtgtttgcggagatgagggcctaataaatcccagacaacaacgattatgcggcgcctgcaagattcagtttgtacataatgccatcgcgtgctgttgggccatataatgactcacgaagaggggatctttacacgaagcagcttctatatgcgagtctggaagtccaacatgcacttgcagttggaggcagcggtgcctggacagcttgatcaagaatatgacacaggtctttctacgcactaagttctgnagaggcgggagtggtgtgttactaccttccaggacatttgaggagttgttgaaaactgagtcctggtagtgaacggcgaagataatcagagattcttattcttgcacgcccggggcagagtaattgctatggccatggcgaaacacaagcgtgccgaagactgccagaaactaaaagggatcatgcgcgtcttcctggccatttacg

SEQ ID NO: 568183 - DNA, 134 bp, Homo sapiens
cttggcgcaggtcagctttaagttcgcctcgattcatgccgaaccgctgacaatggacgccgcgtggctgatacgcgtgtttggtgcgccctggatctacggggcattcgttggctacatcggtgcatttttta

SEQ ID NO: 568184 - DNA, 333 bp, Homo sapiens
aagagtgtgcagtcaatagtgtaagtacattcacgtgtcgtgtagcttttggtgtttctttcacctagcataatgcttttgagcttcaccaacattgttgagtatatcagtagttggttccttttttactactgagtagtattccattatgtagatctactacaacttgcttatccattcaccagctgatgggcatttgaggtgtttccagtttgggggtattatgaataatgctgctatgaacatttgtgtacaagtctttgtggacatatgctttcatttctcgtctgtaaatacctaggagtggagatactgggtcatacggctatctat

SEQ ID NO: 568185 - DNA, 107 bp, Homo sapiens
  misc_feature (55)..(55): n is a, c, g, or t
  misc_feature (65)..(65): n is a, c, g, or t
  misc_feature (87)..(87): n is a, c, g, or t
tttgagggttccttacccaaaataatacccctgcctgcgtgatattctaccattnattttaattnctttgggtcttgcacgtttttnaggaggccttgatttaaatg

SEQ ID NO: 568186 - DNA, 526 bp, Homo sapiens
gctctttccggtgtggagtctggagacgacgtgcgaaaatggcaccaaaaaaaaaaaaaaaaaaaaacaaaaaacaactgtgttgcgcgcgcgcgcccgcgggcccctctcggagaaacatttccttaaaacccatattgcgttgtgggcgcgccgcgggcgccccacaggaggtaaagacgacaacgtgtggccccataagggtggtttccccaagggaaacaccggggttcgagagggaaatatagcaagggtgcgggggatatcttccaccacaatacataaaaaaaacagcgcgcgcggagggggagcaacaaagcgcggagcggcttttcttctgtacaaacaaaatctctccaaatgaagtggtggagccgtttctctgcgaggagcacccacatacccgggggggatcatctccattcatcctaacaccgaggggagctctcccaccaagagacgaagacctgctctcgactagatctatcaaactcttttcgacgcgccccagcgagcctggcggggt

SEQ ID NO: 568187 - DNA, 213 bp, Homo sapiens
gtgattgggatgaaagacaaaatccagatcagaagctgtcagccagatgactgggatgaagattgccctgctaggattccagatgaagaggccacaaaacccgaaggcgggttagatgatgagcctgaggtacgtaacctgatccagacgcagagaaaactgaggattgggatgacagactggctggcgaatgggaggctcctcagattggca

SEQ ID NO: 568188 - DNA, 897 bp, Homo sapiens
ggtgcgctgagctccgggctccggagcggtccgtccccttcccgccgccgccatgaagtgatgtcaaggaggaccacctccgctgaacacagatgcgtggatctccgcgaagattcgagcgaacatatcccgacagggtcccggtgcttggtggaaccaaggtctcaggctctcaagaatgtgttgacatcggacccaaacggaccattcacttgtggtcccatctgatatcacttgtgcgctccagttcatgttggctcatcaggaaacagggactccagcttcccttcctgaaagggagacattctccctgtcgtgcataaggacagtccccaacaggtccatgcctaacctaatggcgaacagccttcacgagacagggcacaaccgacctcaacgccatggcttccttcatattgctgcctacaggcgggcgagcaaccacttctgggctttctgagggccattgcctgggcttaggtgccaccggaaccgtgcctgtggtactccttgtaaattagcccagccatttttcaggtattataccagaacctccttcacattacgcccttattcgtgcctttggtaccctgcattctattcctctcactatctcgaccggctctcgtctccccttaagactagtaacctactcataccgacgccactccgacgtcaccctccggcctgcaccatggccgtcttctccagggaacttggcctccggaacccctcttgacgcatcccacccccaccacgccgcgcgaatacacggaacgacgagcgccaaaaccgggacgcaacgccatggcacttactacaccgtacctcccccaaccgtccaatccccccatcgggcactgcttcccacgcataacctctgaacaaaacgtgccg

SEQ ID NO: 568189 - DNA, 189 bp, Homo sapiens
gatgacagctgacgctaagagtgaagctttcgtcacgcaggacatcattctatacaactggtgatgaaacaccttccctgggcgacctaagctcgtgctgctgggcgccggtacgaaggaactagagcgcatcccactcagtgaaatgaccgcgaagagatcaatgcgctaagtcagagctcgggtttc

SEQ ID NO: 568190 - DNA, 313 bp, Homo sapiens
cgggtctagcagatttattcccttatttgtcccctcccatgttccgttttgccctatcagagtgccctttttttcaatcctccctgtgatgtctacttttagaatcctgctgatgggtgcattttacagagtgctgattggtgcgttttacagagtgctgatgggtgcattttacaaacctattgctagctacagagcgctgattggtgtgttttacagagcactgatgggtgcattttacaatcctcttgtaagacagaaaagttctccaaggccccactcgacccaggaagtccagctggctagacccagg

SEQ ID NO: 568191 - DNA, 1452 bp, Homo sapiens
  misc_feature (549)..(549): n is a, c, g, or t
  misc_feature (794)..(794): n is a, c, g, or t
tctgtgtgtcgctgttgtttgttcttttcttttttgttctgtttgtttctttttcggttttgtcgttctgttgtctggtttttctgagttttgttcgttgtgttttgctgcttgtttgtattcttttcttgtatttgttgttatctatgtctcttgctcttgatttcttgtgattgttgctgtcgttctgctgtctgtgtctgtttgctccttttcattatcgtacgatgactcagcatcgaagcgaaggatgtatactgtgtgttggtatgttggttagtagtgatggagaatattttttaattaattaaagtgttatgtttttgatcgcgatattgtgtggtgtggagtgagtgtatggataggttgtcttattcttatgtgtttagtttgcttggttatcgtttgtgattattctactgtatgtatgtattgttttgcttgtagtttgttgtgttctcctgcctcattatgtgacacaccctcgcaaataaaccaaccccttaggtcgccagacccaccgcgagtttggcgcccaccctttggacnctcggagaggaccccccccagggtgtggtcccacgaaacaccacggcctttttttaacccgctgcgtctcctctaccttattatcccggtcctttaaaggtataccgagcgcctctgtggtgaccgaaacttccgcgcaaccaaggggggcccctttgcacccccgcacgaggagttgttgagtgccctttaagtataacccccgggggtggccacatttattgaagcttccctttattataagngaaggggagattcactgggtgcgcccacagaagaggagttgtccacccacatgcgcgtaaggcacctcccgaggcgtggccagacacacaagagaatgtgcgcccacccctcttcactggttcactgagaggcccactggcacgttcttcttcaaagttcccgcagggtcttatacgctggatagggagaccacgctgtttgccctcggaggaccacttgtgctaaactgggtgatcccctagacccactgaggtggtatttcccgctgatgtctcccgctgagttatgcctctgcactttctgccccccgcgaggagttgtgcgctgccacccctacggccgtatgcccgtccacgagagctggcacggcctcggacctataaaggttctggagagggtgagagcgagacctgcgaggagcctcacaccaggaaggggagaaggctgaccacgaagaatacctaccacgaccggagagtgctgtgccaccacccggggccgacaccacagagaagaccgaggctggggctgggtccagccaccgaattcccacatttagaggcggatttggtcgtggacgtggtccaccccccctccagatataaattggagaggatttttttgccacttgaataaaccttctaccacgcccctaaa

SEQ ID NO: 568192 - DNA, 171 bp, Homo sapiens
gttcttcaaatatctactcatcttccgaattaccatactaatcttagttaccgctaacacctattccacctgttcatcgcctaagaggccttaggatatatatcctcctggtcacatcagttgatgtatacgcccaagcagtgccacacacgcagcatcaagccattccta

SEQ ID NO: 568193 - DNA, 530 bp, Homo sapiens
  misc_feature (423)..(423): n is a, c, g, or t
cgcgccacaccccgctgggggcacataaaaggccccccgcgcaagataattcggtacaccgcgcacccacccctcttgtgggccgaggaggggccctccgccatagtggggcaccccacagggggaggttgctccccagccccgccggaggctccccccgccgggggagaggagaagaagtgggcagaaccctcgctctctctgtggcccaacacacatgtgtctgcataactccccctctggttgtaccccgcgttccaatagagtctccccccccaccgtttttcccccgcggcgcacattgtgtgtgtggggaggccccccccccgctagaagtacccccccgcctcttctcctacgcggtgcgttcgctgagcgggccacgctgaggtaattctcgccgtgtgatcaccacgggcaggntgaggagggctcccctgagtggctgtgaccttaacccgccctgggacactccacacgccacgtgggcgacccacgcagcccacagaggtccgcttattcctcagaga

SEQ ID NO: 568194 - DNA, 356 bp, Homo sapiens
cccactgtgtgctcccccgctttgatccaggccctcaaccgacgcacgccgttcttcaagttcttcctgaagaaggaactgatctgggtacccttcctgggcctggcgtggtgggcactggattacccgttcatgaagcgctacaccaaggcgttcctggccaagcaccctgagctggcagggcaggacctgaaaatcaccaaggaggcctgcgagctgttcaagcgccagccggtcacggtggtgaattacctggaaggcacgcggttcaccccggccaagcgcaaacagcaggattcacccttcgagcgtctgctcaagcccaaggcgggaggcgtggcgttcgtgctcgcggc

SEQ ID NO: 568195 - DNA, 1058 bp, Homo sapiens
  misc_feature (660)..(660): n is a, c, g, or t
aagtattgacagctttgataaaatctttttggtgcagtggagagagttatattaggagtgaagcattatcgacacgaaagtagatctgttatagtgaatcagtctagtgtgagtgggacctgtctaaatgaagaaagctatagttaacgaaaggtaaaattgtattaacatatattggtttgtttctgggtgagtatgatactccgaagataatagactaccagatgtaactcaattatgctattaaactgcttccaatgattattaatatattggagcatcagaaattaactttgaaagtgttcgtacctattctgttttgcagaacttactttctaaatcacttgtgtaatatcatgatacctcattatacctcattcggacttgcccatattactcttcgtctctgtgggtaatttataactggacgtatattccttggatatcacttatagggctagatatactattactcactctttggtggcttaccgaaatttattcgcattgtcacacatattcccaatatctaaatgtcttatgtcttattagatcgcgaggtagtaagccacgtgcttcaaataatggatgatggcggttctgagtaccaaaaataccctagtctcactttggcggattactatgttatctaataccaantatgattggttcctcgattttgttccctggagcaagatttcactttactctcaagagatatatcatggatagtgatatgcttgtctgataagacaccagaacaggtgggtggagagttagtcgaggggatgcgagggaaaagaccaagaaaaggggttaatggagtcccactgccatatttacgtttgctggctgcacaataaccaggctctgggaggtgtattaacattgccttgggggaaatattgtggtccccttctccattgttaacacaaagagcgaattgttcccttgcaagtgaaacgcaacttgatccaaaattttcgggaatctttgtggtccttgtttcaaatttaggtccgatttctcttattggtgaaattttgacctaactgaaa

SEQ ID NO: 568196 - DNA, 453 bp, Homo sapiens
gcctcggaccaattacgaactccaattccctcatctgtaaaaaagggacaatactgtgaggtatttatatattaagtggggatgatacaaactggtgagaattttacagataaaataagtaaatactagatatccctaaacactaaggttttttctttgtaagaaaatgctcgcctgtaatcccagcactttgggaggctgaggtgggcggatcacctgaggtcaggagttcgaaaccagcctggccaacatggcgaaacactgtctctactaaaagtacaaaaattggccagcgtggtggcaggcacctgtaatcccagctactcaggaggattacgtgaactcaggaggcagaggttgcagtgagccgagatggcgccactgcactccagcctgggtgacaagagtgagactccatctcaaaaaaacaaaacaaaacaaaacaacaacaac

SEQ ID NO: 568197 - DNA, 594 bp, Homo sapiens
  misc_feature (112)..(112): n is a, c, g, or t
  misc_feature (119)..(119): n is a, c, g, or t
  misc_feature (134)..(134): n is a, c, g, or t
tcatccctcaaaattcctccctttaaattccttccgtggtcggctaggcccggcttttgggagggaccaggcctactaattccaaggctatgaaaggggggaaactggttanggaactnccctgggggaagaanaaggagacttatgatgtgggaggcaaatcaccacacttacgctgaactcatgcagacgctccggtttcttggactctacaggggtgagcatcaggattttatgggtgagcaaaaacgactaaaggagcttcggggaagggggaaaccaaaggaggggggagggaaaagggcagcaaaaagggaataggggtgggccctcaagggggggactttcttcctcaggggcggagagaagaaagggcatttattggctttccacatattgggaggaatggcatcttcctaaagggaggttatttgggaggagcacaggcatctccttggggggaatctaatccggggtacatgggggggtgggttctgggacacattctaacgtggcaaaattatcttggccttggccgggtaatgggagggttacctgattctctatgggaataaatacctaaggtataaaaaa

SEQ ID NO: 568198 - DNA, 190 bp, Homo sapiens
ggactgtcgggctccttgtgtggttctgggcgtgagcagactgtttggtgccagtgaagtgacctaagcagcagcgcagacctgtggcgctcccacccagctccattcaaacaaggcgggacctgccagagacggtgctcgctggcagcttaaatccagctgctggaggggctgtccctatcggcgaaga

SEQ ID NO: 568199 - DNA, 165 bp, Homo sapiens
gagcacttctgagtgataactaaagcagtttggtggccttttcacattctccatgttcaaacatattttccactttccattttctctttcacctcaccttgcctctctatcccccatccctgcttatttctcaagccactcgatgggactcatacaaatgtattt

SEQ ID NO: 568200 - DNA, 602 bp, Homo sapiens
  misc_feature (232)..(233): n is a, c, g, or t
  misc_feature (264)..(265): n is a, c, g, or t
  misc_feature (489)..(489): n is a, c, g, or t
  misc_feature (514)..(514): n is a, c, g, or t
  misc_feature (529)..(529): n is a, c, g, or t
gatatgaggatgtatgaggatctagcaaggaggccagtgaggaagagaacagaggaatgaagggggcgggctgtgggtgacagtaaatgagtccagaggggcagccaggaccctgatcctggaagtctatggttaggtccttggacttggctctgacacaatctgatttgcacttttacagtcactgactgctgggtggagaccttactgcaagagggaaagagtgggggcnnagggatttgtgaggggggcaggcgcgccctnnagggcagaggaaatagtggtaagtaactaggaatgattgatgggtgagcacttcaacagcatctgcagttattaatgcaacaacaacaaacaacggcatccatgctgcaggtgtttccgagtcactgtgctgggaaagcagacactaatcatgaaacagcagcaattacagagttcagcatctcacaggcgacagcacagtgagggtccttgtttttagcatcntccttttctgaaacaaaattcgagnttcaaaaggtcaccngcatgcctgtgcctattagagggaaacaaacaaacaaacaacataaaaaaaacacgaaaaaaaaacacgatgc

SEQ ID NO: 568201 - DNA, 497 bp, Homo sapiens
tccaagagagacattgaagatcgcatcgttgctcgtagtgttgatgcagatgattctgacgttgaagtcaatagtgatgatgacagtgatgaagatgatgatgatgaggatgacactgaagcattgctggctgagcttgaacagataaagaaggaaagggcagaggaatagctacgcaaggaacgccaacaacaggaggaggagcttaaagtaaagcaggcagagcttctgcgtggaaacccactgctaaataatccaacagcatctttcaatgtgaaaagaaggtgggatgatgatgtggtgtttaagaaccagtcccgtggtgaaaccaaaacagctaagcgattcatcaatgacaccatcaggaatgatttccatagaaaatttctgcataaacacatgaagtaagtccttgtgccagaagtccgagttgtttggattttggtctccacagaacttattaatttgcagtttgtatctaaatgtatgattcaatg

SEQ ID NO: 568202 - DNA, 191 bp, Homo sapiens
ggagctcggcacctgtaacattcgtgtcatatccacgacaacatgaatgctgatgcagatctcatcaatgcaggcgaggaaacagttactattcttccaggagcctcttttttctccagcgatgaatcagtttgcaactgagttagagcgtggacacgttcggaatctgacaatcgctagtgagcgcatgc

SEQ ID NO: 568203 - DNA, 706 bp, Homo sapiens
  misc_feature (350)..(350): n is a, c, g, or t
  misc_feature (626)..(626): n is a, c, g, or t
  misc_feature (629)..(629): n is a, c, g, or t
  misc_feature (643)..(643): n is a, c, g, or t
accctgaagtgccagattatcccaggcaaacctcttgtgtgctccagacctatacatccaattgctactaggcatctctacttatatgtctcagctctcaagtttagtaagtctccaattgaaaaatgaccaatacctcccccttcactgaaactacaaaataaaaaactgctcctcccccagtactctcaccttaggcacaagaactactggccctggaagtcagccttttcctctccccaggacccccaaatctcatccatctctaaatcctatcaatttttcctcccaaaatttatttgtcaaatcaggctagtttatctctatcactgccatcctgaaccaaggtnccaccaactcttgactacattattgtaacagctaatctcaacgctattcaaattgtgacctgtgcactgacactggtccaaaaacttttgctactggtctgaaatgaaataaatatagaaacctagagaaagcatttaggaacgtttacagcaatttgacactgccaaaacaaacatcttattgtgtgttactaaataccagaatgaatagaaaattaaaacaaaattggtccttcaacacagacaagtttgagaagcaatgacttaattagtctnccngtatttacacttgnctctttccaacctgttcttgcagagcagcactgatttttttaaagcaaaaatttggcaattaa

SEQ ID NO: 568204 - DNA, 1031 bp, Homo sapiens
ctattgtgactcatgcctgtaatccctagcatttagggcattgccgagtctgcgcgggtcacctgagtctaggagttcaagaccagcctggtccaacatggagaaacctggtctctactaaaaatacaaaaattagccatgtgtggtggcaggcacctgtaatcccagccactcaggagggtgaggcaggagaactgcttgaacctgggacgtagaggttgcagttgagccgagattacaccactgacactccggacctgggtgacagagcgagactctgatctcaaaaacaaaaaaacaacaaaaaacaaaaaacaaacacaacaaatattatgaagaaagagagcagcaccaaaaacaggcttgatcaacacaagctcttcagtataaaaatgagcgacagataacacaaaggagatagaagagacaaatgagaacaacaaaccgatataacagcatgagagaaaacaaagagataaaacacacaaaaaaaaacagaaaaaaaaggagcacaaaagtagaaaccgacgccgaaataaaaaataaagaattataaaaaaaaaacatacacagaattataaaaaataacaaataaaaacaaaaaacgacaataatagaacaaaaaacaaaatagatatattaaagaaaaaaaataataaaccaccaaaataaaaaacataaaaataatacacacaaacacaaaaaaaagagagaaagcaaacgacaaaaaagacaaagatgaacacgaaaaacaagaaagaaaaagagaagagagaaagaacaacgcaaatagcgaaaagaaggaagcaaagaagaggacaggacaaaaaagaacgaccacaaattcaagcgaggtaagaaggaatgagaaaacgaggcagaatagaagaggagacaaaaggacaaataaggactgcagagtggacaaaaaaacaccaaacaacaaggacacgagaacaagaaataaataacaaaaaaaaacaagagaagaaacaaaaagaaagacaaacagaacggagaaaagacgaaag

SEQ ID NO: 568205 - DNA, 698 bp, Homo sapiens
cggattttagtgcgtgtttgagttgttttattgtgtatgtatgtttgtgaatgtgtgtgttatgagattggtgtgtttatttttaaggttttatattttcagaggattgtttgtatattttggtagtagtgtgtttttcctgttaatagtctagttttgatgtttttgttttgggggtataattgtgatgggttgtggtggattaaattaatttttggtggggttgtgtgaaaaatttttttgttgttatttgttgaggtagtgtttttccttgaggggtgagggagtaatgaagtaatgtgtggtttgtgtattggtgggttctggtttttggggtggtgttgtcttctgacagataatgattgttttattttgtttaaattttgggagttttttgctgttgttcagttttttattgatgtgtttgtggtgtatgtttacagtaaagacgttttatatatttttttttttatttagtatggggggggggggcccatattttatggtgttatattgttttgtgggtgtttggtgattgttttgtgctttgatttatagggtgtttgttttcccctgtagatttatagggattgtgtgaatatgattagtattgttgtattagtattatgtggggaggattgtagttgaaaaaaaaaaatctgtgttagtaaaaatgtaaagaaagaaaataatacagt

SEQ ID NO: 568206 - DNA, 182 bp, Homo sapiens
tttgaaagaaaaccatttattgagaatcaaaatcaatacctttctttttagtatctaccaagccaagagagaactgattcattcaagaatgaacacaatgtacaaaaaaagtatgcttatattataaaaatatgtcacatttactctgggtgctagcgagtcattaacaatcagcacgctga

SEQ ID NO: 568207 - DNA, 354 bp, Homo sapiens
gctactactaataaattagaagagtacgacggggacgcagctttgggtagctgaagtattaccctccacccccccccaaccgccatgtcctcccgtacattactgccagcgaccatgaatattataaggtacaataaatacttgaccacctgtagtacataaaaacccaatccacatcaacgcccccccccccatggcttaatagcaagtacaggaatcaaccctcaactattacacatcaactgcaactccaaagccacccctcacccactaggataccaacaaacctacccacccttaacagtacatagtacataaagccattttacgtacatagcacattacagtcaaatc

SEQ ID NO: 568208 - DNA, 233 bp, Homo sapiens
  misc_feature (17)..(17): n is a, c, g, or t
atctaaacgaccatcanacttcagttctcttcgcttttctgtaaactccttttccaaaagctcattgtgtaccaagcaagcacgtctgtagttaaaatttgttactgaggttggttcaaggtaagaagaatggagaatatttacaacatcttcaaattctcgagagcctggagttaatggctggaaaagtgctttcttttctctgctcttcctggggatctgaaaactcctcc

SEQ ID NO: 568209 - DNA, 951 bp, Homo sapiens
  misc_feature (787)..(787): n is a, c, g, or t
ttggaaaaaaaaaaaaattatttttattgggaactcatctgaacatcagatataccgggggtgggttagcaagaaccgttggtacattggatactggatgggggccaaagaccaaaacagggactagacagtgagggggcaaagatgtggcaggaacaaaaaccgtggatttgggcagcaggaaaataacaagccagtcagattcagggtgagggatgcacaacaccggcgtccaaaacaaaaacaaaacaaaacaacaaacaacacaacaaaaaacaacaaaacaaaacaaaaaaaagaggggggggggggcggaagaagaagaaactacacccaacgaaggaggggggacgacacagaaaagcacacaccaaagcagcacccacaacaagaaactcagtggtaaaaaaacaacgaggggggcgcccacaaaagtaaggagaggaaggaacaaaaacaaaatatcaaaaacacgagagaggagagagcgagggggcgcaagaggaagtacaaaaaaacaaagagagcgagaaagcgggaagggaagaaaaaaacagcgagagcaaagcaagtcgagaaggaaacaatcaagtgaggagcagagaaggacgcaccccccaactatccagagcggcggggggggcggcgcacacaagcaaacagcgcggcgacacacaaccctaacccacagacagaacagcaaagtaagaaaaacaccacgactcagacggaggacaacacacaaaatagacaacaacaacctgccaagcagaacggacacgtaganaaccgggggcgagcgacaccacaaaaaacacgagcgaatcaaaatgcacaccacgctaacacacacaacaagtaagtcgagagacaacaaaagcaggaaaccacagttaccgaacaccaaacaaaaattaaataacaaacccagcgcagaagcaaagacaaacg

SEQ ID NO: 568210 - DNA, 180 bp, Homo sapiens
agctgaagccctaatccccctaagttaaagacttctttccagtccaaggcaggcctgaatcccctgtctttaaataaaattttaagtgatgctgttttatatataggaaaaaatgcttaaaatcctgtcctttagaccagtgaaaagtatcttttgagattaaagtgactctttcctgta

SEQ ID NO: 568211 - DNA, 1054 bp, Homo sapiens
ggcttatcttgaccgcccgagccagccaactcaacgagacaaacgacaacaacctttgaacgtacgtggatctggatggactgtcaactacccctgatttaatggcacctgtgtctgctaaaaaagacaacacgaaagttatcctgcatgttcattacctgatgggcgggtgtactgtctctgctcgaattgacagaaacaggattctgtgaaggtgatagagatttccatccatgctgactttgcagaatacatgtacccgaattgtggtccccaaagctgccattgtggcccgccacacttaccttgccaatggccagaccaaggtgctgactcagaagttgtcatcagtcagaggcaatcatatgatctcagggaacatgcgcatcatggcagtgaaaagagcctatcgaggttcagaagatcaggccattctatcctgggactgcaaacatccttacgagttagaatattcctatactgatctatgtcagccgtacctggatccaatgaaggtcatccttgaacttgcccctggtaaattggaagcagatcaggtcaaaagccagaaaaaccatccagcatggcacagaccgaaccagatgaaacagagatgggaagaactgacacatcctgatacccagaaggaccaccctgaaaaaggatgaacaacactgaaaacaacgatagaagaaaccaaacagcctacagataaatgacaggaatgatacaaggaaagacaataataaatgaatggccgaatacacgtgaatacagcaccgagaaaaaggggagacacgaaacccacaacaacagtgccagacaaagcaacaaccaaaggcgcgttagcaaagacaaaagaggcacaacaagagccaagtagacgaagcacaagattacaagattggacaataaaagaaaacaagtgagtaggaagacacaaggagaaaaagagatcacagagcaagtggagtagataaagaaaaaaagacagattcatatcagaaaaagacacgaaagctggcggccagcgtccgcctcggaaagaagaaaa

SEQ ID NO: 568212 - DNA, 753 bp, Homo sapiens
atttacaataggattaagattttattaccagtttatattagtggtattatattattatctttaaggagacggagtcttactctgtcgcccaggctgaagtgcggtggcgcgatctcggctcactgcaagctccacctcctaggttcacgccattctcctgcctcagcctccctagtagtggggactacaggcgcccgccaccatgctcagctaattataggatattagtaagatagagacggtttcatcgtgttagccaggatggtctcgatactccgtgaccattggtgatccacccgaccgtcaagcctcccaaagtgactgagaatatacagagcgtgagccacacgagaccatgtgccatagtttccagatattatatggtgagctcatgtaaacaaagccttggctcatctacgctgactatcaagccaagtgagtctcttaacatcataatactaatcagtgaaaagcgtttcaaaagcatttgaatgaggctgtcgaatgactacgtgttgggaccactactattttaaggtaataagacgacaaacccttggggaactcagggaaggacaaaagacacaacacggaggaccatctagggacaagcagagatacaaacagacagttacacgtgaaaccacacatccggggagaaaccgatacccagttaaaaatgacgcacaaaaacagaaagagacaagacaggcaccagggaaacccgggacgacgcagtgaaacagaccccaa

SEQ ID NO: 568213 - DNA, 806 bp, Homo sapiens
ctcgggccgtggtggcacgggcggttgcctgggccggggtcgcccctcctcctaccgggctctccgtaggcgcctgtgtctagcctggcgcgtgtggccgattttcactgcgcggtgaacgatcggggccgtgcttcttctctgaggtctaccatggttcggcagccgaacagttcaggacataagtctatggatgctgaagatgagcagagctccccagtaatcgcggggcatacagcgacgtacgggaaggtgcatgctagagtgaaccggctcagtgcaccccagagatcctaaggttcatggcgagtcgtgtgtgcaccagcggacagcttgtcgacagctgcattagcagtagtagtagttgaactggggggacatttggaacagcgtgctcagactcccctgaaccgcctgtcctggcctggtctaggctcacagtctggccctgagtacattgcccgaggccttgcggtgtaccttgaagtcaaaaggtgtatttcaccgacgaagctcacatccaagaactgtctagtccgacgggaagatcgaggcttcaacgactgtcgatgggttgacttcagggctggccgaggaagattcctgtgtatagcggagggggcaatggaaggcagccatgtgggccgatggtgagggctccctcagtacttggcatggcatcctagagggtgttagcgggagtgagctgtatgatgagaaaggctgcaatgtctgtagacttccgggattgtcctctgtgagcttcatcgacccgagttactgcaagaccgttgactacctaccac

SEQ ID NO: 568214 - DNA, 271 bp, Homo sapiens
gtctcgcggtcgctctatgagcacccccgtctgcttcgcggtgctgactcggactgcagctctggagcggtctgcaagtgcagtcagcctactgcagtaattttctcatgaagtgagaagaaaagctcagataggactagtacggagcagctggagttcagatctctcctaagtcctcttctgttcagatttttcgtcacctttacagtatttcacatggtcccctgggcccgggggtcatggccagaacacagagactttataatgagga

SEQ ID NO: 568215 - DNA, 220 bp, Homo sapiens
gtacaaagcattttcacagatcgcttctttctagttttatctacttgggaggctgagtgcaggagagttgcttgaactcaggaggccaagattgcagtgagtcaagacggcaccaccgcactccagcctgagcaacagagcgagactccatcacaaaaaaaaaacaaaagtttatttcttgtcccccttattgctttgaagggcactcattactcattag

SEQ ID NO: 568216 - DNA, 390 bp, Homo sapiens
actccattgtgccactgcacagcgggtatttgatatagagagacggttacatgtgccaggtgtctcgagtctgactgtgatcaccccttggctccaagtgtgggtacagtgtgagcactatgcccgggcaattacttttacagtctaaaattatcttgtcagggaaacacctcaagccctttcctgtgatttgggcaggtggagatcctcagtagagtgtgcaggtctaggaagagttctcatcgctcccaaaacacatttttcttgagcttgtgggctcttaggttctttggaccaggcttcttgtatgtggtcatagaatatgcctgcatgagatgactaagaagtcaagcgacaatacttttgtgcacttttggggtgggttgggta

SEQ ID NO: 568217 - DNA, 144 bp, Homo sapiens
  misc_feature (93)..(93): n is a, c, g, or t
cgttttaaaatttttatatttttttacccaaaacaaaaatggtcaataatacagaagacttctgtgaccaaatgtggggttttttgccacatnacgagcagtagacaccagctgggtgttctccaattcagttccaacacgatc

SEQ ID NO: 568218 - DNA, 706 bp, Homo sapiens
ggctggtgcctccctgcggtgtgccctggccctggctccgtgcccccgctggtgtgcaatgctccccgtgtggcctgctgggatgatgccatgtgatcctgaacttgtgttccttgcccacatgtgcactctgtgcctgtgtcctggtgcatggcatgacccatgtggctgtggcatctgctgtgtgctctgtgctgtgccaatgatgctgtgctgtgccatttctgctccatgtgatgtgcctactgttgtgatgtgccatgaagtgatgtgacctgtgcctgagtgtgctcaatgccttgtactgtgcctggggtctccctgtgtgtgtgttggctgatggcttcctgacagtggctggccactgtgtgcactgaccctgtgccaacagtgccaagctgcctgtgacctgagtgcttgcccgtgcattggcagcctgccctgccctgtgccctgagggtgtggccttccatgtgctgcacagtgtagtgccttggctccttcatggcagctgcgacaacgtggccaccttcatctggctggttgccagcgtaggagctttggttgtgcctggaggttgctcatgtttgagactgaggacctggtgctgcgcaagaacgagaagagcgtggtgctgtgcctgctggagtgtggctgcggcgtggggcacgcctggggcctgctggcccacgcctcgtgcagttga

SEQ ID NO: 568219 - DNA, 846 bp, Homo sapiens
  misc_feature (82)..(82): n is a, c, g, or t
  misc_feature (102)..(103): n is a, c, g, or t
  misc_feature (113)..(113): n is a, c, g, or t
  misc_feature (117)..(117): n is a, c, g, or t
  misc_feature (581)..(581): n is a, c, g, or t
tgtcagtcaggagctcctcccccaggctttaagatctgagttcacaggaccacagaatactggccatggtgcaacttctggnttttggcagtgcttttacanngacaacaagngatntgaaaattcaggaccatgggttctggacatggcttgggaactggtggaactactaggatatttgttctggcagtcaactacgcatgcggcgaacatccacttcgtcaagacatcgctggtacgtaccacgtcctaatcgctccctcctaccctgagcagcgtggaaactagtggcgttactcagccaccttcatggcacgtgctacgggacagcataattcggtcatgttcaaagctccagacaccgaagaaccctagaacttgcatcacggactatgcgtgcgtaccagtgacgacgatacaacgtagcaaacgttggtagtcataatcactgagatgcatgacaattcttggagttttgtcatcactttgctctttagaaagaacaagtacgtacgctgttaagcaattgcggaaacaggggatattcaaagggttctggtggtgttatagtccacgtgtancgtttctgtattcgtattatttgaggctaaacagttgatagtgtgacaaaagtacttcatatgttagtatgtcagtggtaacagtgcagaatgtatatttgcagtttttgaaagtgatcattactgtggaatgctaaataatacattaatgtctaaaacctgtgatgccctaagaaagcattaaggaattgaaggtgttgtactaatagaaactaaagtacagaaaattgcagatatagggtgggtagtaggctgatggagttat

SEQ ID NO: 568220 - DNA, 372 bp, Homo sapiens
gggccgtgcggtgacgccacttcagggccggcccgcggaacttttgggcagtgtcagcgccgtgtcacgcacgtcgcggacatgtgatttcagaaagtatgatatactcttcagatagagagcttgatttgcttttcagctagctactctaatgaattttctcagagcactgaaacatgtgttgagtgactgtcactagctgtcttcaacgccttgtgttcagaattgcacagttcagtgtatatatgctagcagtgacataacacatctgagactgactgatgctctgctgtagacatactgcgcttatcattgagcagagagatatgaaattcatgagaagagacgtatcagacatgcatcaatagttat

SEQ ID NO: 568221 - DNA, 413 bp, Homo sapiens
atatgacatgccctcataagatgagagcacgttcttttttccctgactcgacgtgaatgatttcatggggctctttgtgaatgttaatagcaccactcttctctctctaccgaccccatttggataaaaaattatatggtcaccctacttaaaggtcgatttccccttatgtcaactcatcatagccctatttcacaatcacacatttaaccaaccaaccaaccaaaatgctaaattctattcacatatatgattataaatggggcatttctagacagttttcctacctctccctcaccaaagcccatagaaatataaaattataacggaccctgagaaccaaaatgaacgagaaggtggtcgctttattcagttgcccccacattcctaggcctacgcgcctgagaactgat

SEQ ID NO: 568222 - DNA, 436 bp, Homo sapiens
acgtgaaaatacccgcctaccccgacacgaaacacgaagaccccgctgccgagtaagaggtggccttggcacttacctaagagctatgctgaagatagtgctacggacaccttactgtggcttggctagaataaactaacacagggtgcccatgcgtatgagcccatgaccgcagtgagtgctgcaacggccgtaaagtagttcgacgttacaactgctagaaggacatgacattttggcaacggaaggaatgcacatatgtagggcgcaacggacgcgggtggttgataaagataaaaccataactagagtaatgatacaatatacagcgtgacggggggcaacctgaaggctagtaatggcgggatggagggccacccgagcgactgcagcgggcataagacgagggacgaattaaaactattgagcggggcac

SEQ ID NO: 568223 - DNA, 294 bp, Homo sapiens
ctcgtgtcaacgaagcacacaccacaaatgtccccttcgtctgcaccgtcctcctgtctacactggcatcactgccccagctataccaccaccccgtctacagtatccacctgtgtacaccacaatgtccgcgttcgtctacactgtcctcctgtctacaccagcaccactaccccatctataccaccaccccgtctacataatccacccgtgtacaccacaatgtccccttcgtctatactatccacccgcctatttcacaccaacccctgttcggttgagcggagaggggat

SEQ ID NO: 568224 - DNA, 406 bp, Homo sapiens
ggtggaagtgacccgattttccagttgtgtccgtaacccttttctttgactcggaaagggaactccttgaccccttgcgcttcccaagtgaggcaatgccttgccctgcttcggttcgcgcacggtgcgcgcacccactgacctgcgcccactgtctggcactccctagtgagatgaacccggtacctcagatgcaaatccagaaatcacccgtcttctgcgtcgttcacgctgggagctgtaaaccggagctgttcctattcggcatcttggctcctccaacccagtggaggcaggaagactaaaccagaagacagtcaccgtagtccagataagagatgcatatgttatcaatcggtcttcgattagatattacttcttttgaacaatcttccctgatgaccca

SEQ ID NO: 568225 - DNA, 294 bp, Homo sapiens
  misc_feature (2)..(2): n is a, c, g, or t
  misc_feature (65)..(65): n is a, c, g, or t
  misc_feature (87)..(87): n is a, c, g, or t
  misc_feature (176)..(176): n is a, c, g, or t
  misc_feature (199)..(199): n is a, c, g, or t
  misc_feature (269)..(269): n is a, c, g, or t
  misc_feature (284)..(284): n is a, c, g, or t
tncggcaggacgcgttccttgtggaggccctggcagaggatctgttccagccttcctcccagctnctggcggtgcggccattgcttngaaggaggcttggcactccttgcgtgtagacgcgtcactccaggctctgctccatcatcatgcagccttctatgggtccacgtctcctnctctgtttcttagaacggcactnctccctaggtttagggcccaccctaatctaggatgagctcatgtcaggagccttaagttaatcacatctngcaaagtccctgttntccaaataag

SEQ ID NO: 568226 - DNA, 150 bp, Homo sapiens
agggcagtgcggtgaaagtgagagcagatataagagagaacccagccagaaggtgatgctgtggaaggtgaaaaggtaactcaaagttaaaagcccaagaggggaagcccattgcagcccaaccctgtccttgtcagaggattggcaggt

SEQ ID NO: 568227 - DNA, 105 bp, Homo sapiens
aggtgctaaccgggattactccggtgagaaacttcatctatgagggctgggttcactgcttagatagcttcatgtgtttatcctttgccgggacgcacgcatacc

SEQ ID NO: 568228 - DNA, 859 bp, Homo sapiens
agaaacctgaatacttatccaggtgacctgatggcaagcttgcatcccccccatactacgacagctgatgctctattgaaaatcccacctccaggttggaggtcaaccaactcaagccattgcagcaactcatcaaagaacaaccccatccaggtggtgtggctcacacctgtaatcccagcatttgggaggctgaggcaggcggatcacgtgaggtcaggagttccagacccccctgaccaacatagagaaactgcatccagtttctactaaaaatacaaaattggacaggcctggtcttgcatgcctgtaatctcagcttcttaagaggctgaggcacgagaatccgttgaacctgggaggcagagattgtggtgagccgagatcacaccattgcactccagcctgggcaacaagagcaaaactctgtctcaaaaaacaaacaaacaaacaaacaaacaaaaaatccccactccaataaaggagaaaacaacagctaattccatcacctgtaacatcctggctaaccagaagtcctcctcagtctttccacgtgacaacttcactgctagaacaactaagcatatccaaaagaaaaacaaaaaaaaaacaaaccggggcgctaaaacaggaattacaacccaagggaccctcacaaaaggtcccacttttacctccccgtggtgggttctaccccagaagcgaggggggataaaaactccaatgggtgtgagaaaaccctgaaggacaggatcccatccaccaggacctctttgggcagaacacctcaccaggtccagggcccagagaccaagtaagccccgggggggggttaaccccaggagaagggaaaaagatg

SEQ ID NO: 568229 - DNA, 165 bp, Homo sapiens
cttgggacccctgtacacgtatttcctgaaaaccttgagggcctttaagggtcttatttttttacttaattaattttggggcttcagggtcccccggttgcttttccgcaccaccccccacctttccattttttgggccaaaacccaaccgcgaccccccttgaa

SEQ ID NO: 568230 - DNA, 224 bp, Homo sapiens
ggggcgatctagaggatcccgaaacctaattacgtataacatttttggatgtgacattaagtacatttacattgttgagtaatgtcaccgccctctatctccagaattttttcatcctcccaaacgtgacactatgtatccattatacatccattcccctttctccctgcctctcagcccctggcaaccaccattccatttggtctggatgaatttgactactc

SEQ ID NO: 568231 - DNA, 1229 bp, Homo sapiens
  misc_feature (642)..(642): n is a, c, g, or t
  misc_feature (1048)..(1048): n is a, c, g, or t
  misc_feature (1067)..(1068): n is a, c, g, or t
  misc_feature (1097)..(1097): n is a, c, g, or t
  misc_feature (1136)..(1136): n is a, c, g, or t
  misc_feature (1168)..(1169): n is a, c, g, or t
  misc_feature (1195)..(1195): n is a, c, g, or t
ttaagccggagtttcgtttttgggggggaaccccgctccaggttttgccccttggggggagccggcgcatgcccgccggctgggttgtgggggaccccgcccccttgagggaaggaccccccgcggggggcccgcgggattccccggcgctctttccccggggatcttttcttaggccctttaggggcccgcccgggggtaccgcgggatttacccaatttgtcgaccaccccgggggcacccagcctttatggcaccctcttttagcgcgccttatattttaaggggtggcaccccgtgtattagggcacacccagtttgtggggcgacgcccaaaaaagcccccagcgcttgggtgacccccgcgttcccccggggaattttcccccgggggagttattttcgtctcgagccccccaaccgcgggtctccgggcgccgagatttctcgcccgctcgtgagagcgccgcgagaggcgctcttttgggggtgcgcgcgtgctctcaacagaagatttctcacagcgttttctcacgccgcggtgtagaaccctcccctccccgccctactcgtggcgtctctgagagagagagagggcacatctttgcgtctgtctctgggagagggtgtgttaaaatgtgngagcgcgtctgagatataactcgtgctcttttacacacacagagagggtgtttctctgagaagacgctctcgcgcgctctcactctcccacgcagagtgtggcgccttcagagcgacacgtgtggagagtttttccgcgcgagatagctgtcgcgcacacagagcctctagagacgacacacagcgcgcctacacagcgcacactctctctttgtgttgtgtgcgtctgtgcgactactcgccacacactctgtgggagtggagaggctacatatgtgagtatgtgctcacacagtttgtgtgtggagaggcccctctcttgtgtgtctctgagaacacccaacacacttcacacacctcaatttaaagagtgtgtgagtggaccacacacacacgagaaacttanggaggaaatgggtaggccnnttgtaaaaattgaacacagaagaaggggnaaaccccctaaaagtggttggttgcacgttgtgtagtangttaaggactatggcaaggagtttccggccannggatgtcattgaagagtatttccaangccagaaatgaagaaataaatctttggctcacca

SEQ ID NO: 568232 - DNA, 627 bp, Homo sapiens
  misc_feature (163)..(163): n is a, c, g, or t
  misc_feature (187)..(187): n is a, c, g, or t
  misc_feature (203)..(203): n is a, c, g, or t
  misc_feature (390)..(390): n is a, c, g, or t
  misc_feature (444)..(444): n is a, c, g, or t
  misc_feature (514)..(515): n is a, c, g, or t
  misc_feature (591)..(591): n is a, c, g, or t
  misc_feature (614)..(614): n is a, c, g, or t
ctctccctgcatagtatctcaccactcaagtagtctggccccaacttctgtacaacatggcagatggcttctaagagagtaaaagtagacactgccaatccacttaaagcctggctcaaaagcctcagaatgtcacttcttctccattctattggtcaagacnactcacagggcaaaccacattcgncgggtagggggcaganattcaaggggaggcatacatgacgggaggaaggaattgatgggtggctgtctttggagactatctcccgcatactcgaaaagcagttgcatctaatacttaaaaactgaaaagtttatgaataaatgagctaaattaaagtgtcatccctttgaaatttcaccagatgttaattgtacatgaaattnttaagtgtgaagtaaataaccagattatagctgtttaaacgtaaacaaatatantaaacacagaaattttttctaaagaagggtgacagttaacactgaaagtgcttttttttaaatgaaagannaaatatctttaaaaattacatagtttctccaattctgtctactgaaactattgctctttggagctgtggatagganaaggtgatcaccagtaggtgatnatgaggcattctt

SEQ ID NO: 568233 - DNA, 1480 bp, Homo sapiens
  misc_feature (81)..(81): n is a, c, g, or t
  misc_feature (149)..(149): n is a, c, g, or t
  misc_feature (1132)..(1132): n is a, c, g, or t
  misc_feature (1238)..(1238): n is a, c, g, or t
aatcacgagaaaaagtctcctaaactgctaagcaactgtgaggctaccacatagacctatgattctatgtcatacactgantgatcttgatatcattatacatggtggaatagtaagaattcgagagtaactacaacatatgattattngaactacaatactagatactagacaaacacagttaatgatagtgaacgataacagtatagcatgactcagctaatactgtgcacatactttgtctcgagctatccggttacaattgatcgtgtggagcaccaactctggttgagattatcaataacaggaaacacctgaaaacgcacaagcaagtgcgagacgaccacgcgccccctttctcgttccaatgtacttttttaacaaagaggacacctggtgagcacgtccaaatttcaaaccacccttgcacactcttgtaatgcgcaacaaggacttacccaacctgacacatattttccactaatagttatttagcgctcacattcacaccacacctagtctgaagtgtgaatcaccgctaaattcgccaaactcccataaaccacgcaatcctccgcggtgtaaataacttaagattcaacttacttataaagatttaaacctagtcccgcatctaggggtaaccaattttttttcatcgccggttgaaccaattaaaaggccaaacaaatttttaacaccaaagcttccggacaaaaatatccgcaccatatcatcatatacgcgccttaccctcaacaaacctggtgtaggcgttagaaaccccacacggcaatcctcctgtgtccgaagagccaaaattacacgccgaagacgaatcacacacccatatatggtaggcaccggaacccccttggagttccccccatcccgcgggaacaggcaattccacccttccacaaactttacctctctccgccccttgtaccaatctaaccacctcgaaaaggtggggcattaacaacctttccatatcaataccattatccgcgcacaacttcacaccttggcggagttcgcaccggagggttcacatcccctattgggtattttcgtaagccgccgccggtttaccgcgacaattcacaacactctacgttcagactaacancctctcagaggtgttacccttcccctccttgaaacctatcatttcacccttgcgtgacaatcctccacaccgtaaaaaaccggtaactcgcaaacgctggcaagantttcgcacactagctaactctcgggccctccggtttctactacaaattcctcacgaccgtctcgccccatactcggatctcgtggtataagtaactcccccacacgtctctattcacacccaccctttatgcagagcgaccaattccaccctatctccaagcgccggcaacacacatcgcgtcgcaacaccttcgcctcaaccacagagcggggtgtaaaccctcacaaatcgtcgagaaca

SEQ ID NO: 568234 - DNA, 1302 bp, Homo sapiens
actctttgcgaggaccccggtggctggcccgggggagtgcggccgaggtcgtgctggtggcggcggccgggggcgacatggctggatggagcagtgacctatctggaggtggagctttgagcccctgtgtgtctctggatgtgagcccctgtttgccttgtcccctggtgtgagcgcgcccatcgcttaggtgccctgactggctggcggctgtgcgtgatcgggcctgcggaagccagccctggggccatggcgagcttgggcaagggtcaacgaaggagcatgcagtgactggcagagtgcggactgatgacaaggttccccgttgtgcatccggcgagggccctgtcagcccatgtgtttgcctcagcgggctacgaactttggacgcgtggtttgcccattgccctgttgcgcgttcaacgtggcgcccagtcaaaaatgcaagccgcatcgttcaaggcgggccccatttgaaacgccctttcagtggggtcgttgcggccctccaggggcatgctgcggcaggggaaatgcttcggcggggacccatgtttacccgctgcaatcctttgcgacaaacgggccttagaagtctacagcgcaaggaaccggcttgggggcaaaggctccttgggaagggcttgattggaaccgaaacatgtttgacaaaggcggcccccgctttctatccggagggaagggccttgaggccgggcatcccggtaattgccgaggcaccaaaggaaagaggacccaagcccggggaacctttacccaagtgttatcacatagggccccccaagtggtccgtgtgctggggagaagcacacccggcggtgaacaacgggtgccctggcccccccacggtggggtcgaaatgtgctcgttgtaatgttcttcccccccccggctgttgtcgtcgggacacgggtgccgtcatagacaacatgtggttttgtgtgctacgcggtgcgccggtcgccaaatacgctaggtgggcggcccccaacattttaaaccagatagtgaaagtacctgcggccaccccaactttttttgtggtagccccacgcccgggtgggtgtaggcccccccaacgggctatagtagaggtggggggctctcccccccgccaattttttttcagaaattttgggtgtcaaaacccccctcgagaggtgactagcgcctcccttcataggtgtgtgcagtagatcatccgttggtggtggtcggctcaaacacgacacgacacttttaagaaaatcgacgccgcgctggaaaagaaacagtgcgtgt

SEQ ID NO: 568235 - DNA, 156 bp, Homo sapiens
  misc_feature (154)..(154): n is a, c, g, or t
tcggtaccctattgggacctctgctcactgctgcagggagagcagagctgcatttatcactaccctcatacatatttttattatggtctgcctctgtccatctaatccttaggggcaagctggttcgccaggggattcctctgagagctctganct

SEQ ID NO: 568236 - DNA, 1569 bp, Homo sapiens
ggatctgcctgccttggcttcccaaagtgctgggattacaagtgtgagccactgcacccagcctgaatttctccattcttcccagcacaccctccccaggttctccttcctgagcctcatgacccttcttgtgtttcttcttttgttttatgtataattttgttggaaaatagcattctacacctgttgttcaccccaaagtgggagtgtgacaaaagccaggaaactgcggaataaaaggaaaacacattataacacgtccacgaaggcatcagagggagaatccctccgtggtctatatagcacgcctcccagagtataccgtgaggaatataatgaggacacaccgagcagcaaataccgcgcgcgtgcgctactaaatcgtgagggcacacgtcattaggaggataaaacaaagatgggaggttacaacgaccgagggacgagcacagagacgagtgagcaaaacggaacaacgcctaccatgcatcacacacaggagccgtgcacacagcgtaaccacagacgccagacaaccacaacagcgaaagaaaaaagagtgagtgagagaggaatataaccaaggagagaataaaagaaccacgcaacaaaagacgagcgggggcccacagaacatggacacagaaacgcaaaatagcagagacgacacagaccgccacatcacaggcaaacacacaaaggagcagaactaaaaaacaaaacacaagagaaaaagacacagaaaataaaaacacagcaagaagaacggagagacagcacaaaacaaaaacaaaaaattatacaagacaaagcagccacacagaaacaaagacacacagacgaagaggaagagacgggaaggagaaacacacaaccaagagagacagaagaagcagcaagcgacccgcagccaagagataggagaaggaaaaaacgaaacagcacactagaacaagaagcaacacagacgaggagcaagcagacgagtagagacagacagacgacgaccgagaaagagagcagaacgaaccgctagcagcgcgcatgcgaaacacacttacagtacaatacaccacacgacaagagaacgaaaaaccgacaacgatgaggtcagcacacgaaacagcgaaggcaaacgaagcagcccagagccaacaacacgcgagacaaaccacggcaacacagccagggcgaacaacgagagtcacacgacaaagacaggcggcgacaaccacacgccactgacacaacgaggtcgagcaacaacaaaacaagccagcaggggcgaggtcaccacaccacgcaacaacatcgacagacaccgtcgctcatcggaacagcaagcacgcaaagagaaacgacacagacacaacggcgcagaggtagagagagaaagaacaagaaacgccgggaagagagaggagagaacaacagcacagaacgacaccggcagagcagcccaacgaccagcgacgagccagaaggaagaagaaagcgcagacaacgaagaagagaaagcagacgccgcacacgggagagggcaaacgcgaccacaaacgaaaagacaga

SEQ ID NO: 568237 - DNA, 161 bp, Homo sapiens
gcccgaccgccgctggtcttcgctggacaccatgaatcacactgtccaaaccttcttctctcctgtcaacagtggccagccccccaactatgagatgttcaaggggggcccgggttgcttttcttgggcccccaaaaccttttccccgaggtccacgtttc

SEQ ID NO: 568238 - DNA, 425 bp, Homo sapiens
caggggtcccccaacccttgggccacagacccagtactggcctattaggagccaggccgcacagcaggaggtgagtggcaggcaagcaaatcaagcttcatctgtatttacagccactccccatcactagcattattgcctgagcttggcctcctgtcagatcagtggcgaccttgattgtcataggagcgtgaaccctctagtgaactgcgcatggcagagatctaggttgcactctccttgtgagaatctaatgcttgatgatctgtcactgtctcccatcactccgagatgggatcgcctagttgcaagaaaacaagttcaaggctctcactgattttgccttatggtgagttgtataattatttcattatatattacaaagtaataataatagaaataaagtgcacaataaatgtaaaaaa

SEQ ID NO: 568239 - DNA, 753 bp, Homo sapiens
gagggaattcctcctgtatcagcagagactgatctttgctggcaagcaggctggaagcatggactgtactttgtctgactacaatattcaaaaggagtctactcttcatcttgtgttgagacttcgtggtggtgctatagaacaaggaagaagaagtcttacaccactcccaagtaagaataatgcacaagcacgaaagtaaggttcaagctggctgtcctgacaagtatcatacggtggcatgagacatggcaaacagttagtcgccttcgtcgagagtgcccttctgatgaatgtggtagctggggtgtcccattggcacacttcgctatcgacactagcactcaattgtgggcatcagtgttagctctgatcgttactgtatatcaaacaaaaccagaaagacaagtaaacctgtactgacgtccactcacacacgaccatgaacctcacaccacaccaacaaccaacaaaaacctcgaagcgacaattcatactgctacgcgggatgccgcgatccacaacactcgacggctacaactcaaacaatttgagccgaccaagtcgggcccaacatcacgcattggattccaccgtggacccccaagaacttactttgctgtccacaacaaggttgggcaaacgcactctcgcacggggttcccccacatacataagccgagaccaagaacacgaactcttccgaactaactgccagggtataaacccgtgctctacactgaactccggcac

SEQ ID NO: 568240 - DNA, 391 bp, Homo sapiens
ttttgcccaagaacctttattggaaaaatgtccaacaagtgatatcactagcagctgaaggggctgccaggtgagagggggagcacctgaggctccatggaagacattggagtagtgcagtgcagcatctgcctctagggtcagacaattccttttatttgctggggtaagaggagtacccacagaaacacccctctctgagggccagaggcaagatgtggggcagctggggatgctcagagtcctgatacaggtgaaattgggcccccctttcggtcctaaggtagtacggtcctcctagcctctctcctcctggccttcggaatgtaagtagataccccatctcatattccactccccaggctcacgggtccatcctttccacaccctt

SEQ ID NO: 568241 - DNA, 250 bp, Homo sapiens
tactagtatgggatagggtgtagtgtctgtgtagagtggctaggcatataatctagaggaagctatatcatggccgtcatagggatgcatgctagttatagatagtggtgttgtgtagtagtgagcagagtcgagaggtagtgtgcataaaatgataggatactagtatagaatcagtcgtcttatgtgtgttgtacattgtttgagtagttgatagcattgtggtgtgatagcggttgtgagaatattg

SEQ ID NO: 568242 - DNA, 763 bp, Homo sapiens
gagccaggtgcaaacatttcccgtcaattggcagaaaacaaccttgaggaaccttgacgagtgtccggagtttagaaaacttagggatggagccccccaagatgaacccagtggtggagccactgtcctggatgctgggcacctggctgtcggacccacctggagccgggacctaccccacactgcagcccttccagtacctggaggaggttcacatctcccacgtgggccagcccatgctgaacttctcgttcaactccttccacccggacacgcgcaagccgatgcacagagagtgtggcttcattcgcctcaagcccgacaccaacaaggtggcctttgtcagcgcccagaacacaggcgtggtggaagtggaggagggcgaggtgaacgggcaggagctgtgcatcgcatcccactccatcgccaggatctccttcgccaaggagccccacgtagagcagatcacccggaagttcaggctgaattctgaaggcaaacttgagcagacggtctccatggcaaccacgacacagccaatgactcagcatcttcacgtcacctacaagaaggtgaccccgtaaacctagagcttctggagccctcgggagggcctggctactgtgcctcaacggttcggctcctcaacagacagtccctgcggcagaagtgggtgtggccgtgagcctctgcaggctcaagagtgttgtccagatgtttctgtactggcatagaaaaaccaaataaaaggcctttattttta

SEQ ID NO: 568243 - DNA, 790 bp, Homo sapiens
gagccaggtgcaaacatttcccgtcaattggcagaaaacaaccttgaggaaccttgacgagtgtccggagtttagaaaacttagggatggagccccccaagatgaacccagtggtggagccactgtcctggatgctgggcacctggctgtcggacccacctggagccgggacctaccccacactgcagcccttccagtacctggaggaggttcacatctcccacgtgggccagcccatgctgaacttctcgttcaactccttccacccggacacgcgcaagccgatgcacagagagtgtggcttcattcgcctcaagcccgacaccaacaaggtggcctttgtcagcgcccagaacacaggcgtggtggaagtggaggagggcgaggtgaacgggcaggagctgtgcatcgcatcccactccatcgccaggatctccttcgccaaggagccccacgtagagcagatcacccggaagttcaggctgaattctgaaggcaaacttgagcagacggtctccatggcaaccacgacacagccaatgactcagcatcttcacgtcacctacaagaaggtgaccccgtaaacctagagcttctggagccctcgggagggcctggctactgtgcctcaacggttcggctcctcaacagacagtccctgcggcagaagtgggtgtggccgtgagcctctgcaggctcaagagtgttgtccagatgtttctgtactggcatagaaaaaccaaataaaaggcctttatttttatggctgaggattttgaatattagaaaa

SEQ ID NO: 568244 - DNA, 743 bp, Homo sapiens
tcacagttatttgctttcccagtcaggctttggacccaccattttgaatttaagtgcagtatttttttagagccccccaagatgaacccagtggtggagccactgtcctggatgctgggcacctggctgtcggacccacctggagccgggacctaccccacactgcagcccttccagtacctggaggaggttcacatctcccacgtgggccagcccatgctgaacttctcgttcaactccttccacccggacacgcgcaagccgatgcacagagagtgtggcttcattcgcctcaagcccgacaccaacaaggtggcctttgtcagcgcccagaacacaggcgtggtggaagtggaggagggcgaggtgaacgggcaggagctgtgcatcgcatcccactccatcgccaggatctccttcgccaaggagccccacgtagagcagatcacccggaagttcaggctgaattctgaaggcaaacttgagcagacggtctccatggcaaccacgacacagccaatgactcagcatcttcacgtcacctacaagaaggtgaccccgtaaacctagagcttctggagccctcgggagggcctggctactgtgcctcaacggttcggctcctcaacagacagtccctgcggcagaagtgggtgtggccgtgagcctctgcaggctcaagagtgttgtccagatgtttctgtactggcatagaaaaaccaaataaaaggcctttattttta

SEQ ID NO: 568245 - DNA, 161 bp, Homo sapiens
gcggcaatgcttgactcacgctcatgtaatatcttacttcatgcagcacaactctccctcaagctgaggatcaggacttgggttgcttcctcatagaactctgaggctcttgtgttttttttcttctgctatgtgacttgcatcgttgagatcaggcatgt

SEQ ID NO: 568246 - DNA, 585 bp, Homo sapiens
  misc_feature (17)..(17): n is a, c, g, or t
  misc_feature (51)..(51): n is a, c, g, or t
  misc_feature (67)..(67): n is a, c, g, or t
  misc_feature (72)..(72): n is a, c, g, or t
aggtcaaacgagatcangtgcgttcagggtggtatggccgtcgacaaaaanggtgactctaaataancaatncctgtgttcccctggtggtcttctggaggcagctgaagggcacctggattgtgacatgcccaggggccctgggctgtgtgtctaccctcctctggcagggccactgcctggctcacagcccgtgatgagtgtgtggcatgcagtgggcgcacaggcattgattgaatcttttgaagataaaactaagctatctttgttccattctcctgctcagatcacccggaagttcaggctgaattctgaaggcaaacttgagcagacggtctccatggcaaccacgacacagccaatgactcagcatcttcacgtcacctacaagaaggtgaccccgtaaacctagagcttctggagccctcgggagggcctggctactgtgcctcaacggttcggctcctcaacagacagtccctgcggcagaagtgggtgtggccgtgagcctctgcaggctcaagagtgttgtccagatgtttctgtactggcatagaaaaaccaaataaaaggcctttattttta

SEQ ID NO: 568247 - DNA, 283 bp, Homo sapiens
  misc_feature (91)..(91): n is a, c, g, or t
  misc_feature (195)..(195): n is a, c, g, or t
  misc_feature (269)..(269): n is a, c, g, or t
  misc_feature (271)..(272): n is a, c, g, or t
gtacctcctgacctgaattaaatattccctcaaatgagccagaaccaaaaccctggtatccccaaaaacctaagccaaagaaatagatttnaaaaacaaaaacaatgcctgtaagaaatgaagtgggaattcatcaaattcaggaaagaaacagaagaaaaagacaaaaatatcttagaagtgaagaataaattnaaaaatgctcaagagaaaatagaaagaagatctaatgaaggacattgaatggaaatgagatttttgtaaaagtngnnaaggatctcag

SEQ ID NO: 568248 - DNA, 400 bp, Homo sapiens
aaggagccccacgtaaagcaggtgagcccagccctgctcccagcacgctcctgtcttctgtttgcagcggtctgtggagtcagcctcttcctcttccgtgagatccccggaagttcaggctgaattctgaaggcaaacttgagcagacggtctccatggcaaccacgacacagccaatgactcagcatcttcacgtcacctacaagaaggtgaccccgtaaacctagagcttctggagccctcgggagggcctggctactgtgcctcaacggttcggctcctcaacagacagtccctgcggcagaagtgggtgtggccgtgagcctctgcaggctcaagagtgttgtccagatgtttctgtactggcatagaaaaaccaaataaaaggcctttattttta

SEQ ID NO: 568249 - DNA, 208 bp, Homo sapiens
gagccaggtgcaaacatttcccgtcaattggcagaaaacaaccttgaggaaccttgacgagtgtccggagtttagaaaacttagggatgggtaagcctgctttcagtgtcttgggccaaaacatgaaaatttaaatttcttgcaggaaatttaaatttttgtttttgtgttttggttgagattttaataaaagaaaaatgaaatcaga

SEQ ID NO: 568250 - DNA, 339 bp, Homo sapiens
ccaaccacaaataatccatttttccagaatttgcctcctacgagggtggggggcaggattttgaacccaaaaaaaaacaaagttcaaaattttccatgtttttggaacccttagccctgtgcaaatcaaaggatgtgaggggaaaaaggggggggtcccccctggtcatttcgggaaaaaaaaaaggggcaattttggttggttgccccggaaaaaaaaatattttcaagcaggggtttccttggcttttttttttggatttcccactaaaaaccccaaggcccggaattttaaaaaaggaatttttggggggccctttgaaaaaaaaagcccttggga

SEQ ID NO: 568251 - DNA, 263 bp, Homo sapiens
gctttggcgtgcgttgacagcaaatgagcatgacctagcattgctattcgatttgacttgtaacccggcatcagcagagaggcccggatatccgcatccccacgcctgttcatccacaccaagcattaatctccccatcgccagctgatgactcaagattccaatggagttctgctcatcctaatgatggcccattctacttgctctggacctgccctcgcatcccctgccttcatcccagtaaagactccttgctatgttga

SEQ ID NO: 568252 - DNA, 2115 bp, Homo sapiens
  misc_feature (16)..(16): n is a, c, g, or t
  misc_feature (81)..(81): n is a, c, g, or t
ggcgaggacgcgggcnggggctggggcgggggcgggcccgctgcggggcgcctgcgcctccatcttgccgtacggcgcggncgccgcgggccggcccacgtcccgagccgtgtcgccgccgcgctccctccctcggggcggtccgcgggcgggcgggcggctagggccggggcctggctgcgcggctgggccaaggcccgcgatggtgatctgctgtgcggccgtgaactgctccaaccggcagggaaagggcgagaagcgcgccgtctccttccacaggttccccctaaaggactcaaaacgtctaatccaatggttaaaagctgttcagagggataactggactcccactaagtattcatttctctgtagtgagcatttcaccaaagacagcttctccaagaggctggaggaccagcatcgcctgctgaagcccacggccgtgccatccatcttccacctgaccgagaagaagaggggggctggaggccatggccgcacccggagaaaagatgccagcaaggccacagggggtgtgaggggacactcgagtgccgccaccagcagaggagctgcaggttggtcaccgtcctcgagtggaaacccgatggccaagccagagtcccgcaggttgaagcaagctgctctgcaaggtgaagccacacccagggcggcccaggaggccgccagccaggagcaggcccagcaagctctggaacggactccaggagatggactggccaccatggtggcaggcagtcagggaaaagcagaagcgtctgccacagatgctggcgatgagagcgccacttcctccatcgaagggggcgtgacagataagagtggcatttctatggatgactttacgcccccaggatctggggcgtgcaaatttatcggctcacttcattcgtacagtttctcctctaagcacacccgagaaaggccatctgtcccccgagagcccattgaccgcaagaggctgaagaaagatgtggaaccaagctgcagtgggagcagcctgggacccgacaagggcctggcccagagccctcccagctcatcacttaccgcgacaccgcagaagccttcccagagcccctctgcccctcctgccgacgtcaccccaaagccagccacggaagccgtgcagagcgagcacagcgacgccagccccatgtccatcaacgaggtcatcctgtcggcgtcaggggcctgcaagctcatcgactcactgcactcctactgcttctcctcccggcagaacaagagccaggtgtgctgcctgcgggagcaggtggagaagaagaacggcgagctgaagagcctgcggcagagggtcagccgctccgacagccaggtgcggaagctacaggagaagctggatgagctgaggagagtgagcgtcccctatccaagtagcctgctgtcgcccagccgcgagccccccaagatgaacccagtggtggagccactgtcctggatgctgggcacctggctgtcggacccacctggagccgggacctaccccacactgcagcccttccagtacctggaggaggttcacatctcccacgtgggccagcccatgctgaacttctcgttcaactccttccacccggacacgcgcaagccgatgcacagagagtgtggcttcattcgcctcaagcccgacaccaacaaggtggcctttgtcagcgcccagaacacaggcgtggtggaagtggaggagggcgaggtgaacgggcaggagctgtgcatcgcatcccactccatcgccaggatctccttcgccaaggagccccacgtagagcagatcacccggaagttcaggctgaattctgaaggcaaacttgagcagacggtctccatggcaaccacgacacagccaatgactcagcatcttcacgtcacctacaagaaggtgaccccgtaaacctagagcttctggagccctcgggagggcctggctactgtgcctcaacggttcggctcctcaacagacagtccctgcggcagaagtgggtgtggccgtgagcctctgcaggctcaagagtgttgtccagatgtttctgtactggcatagaaaaaccaaataaaaggcctttattttta

SEQ ID NO: 568253 - DNA, 825 bp, Homo sapiens
  misc_feature (332)..(332): n is a, c, g, or t
actcaatgcgtgctgcccacgcgatacggaccaggtcagtgcgaggattgagaggctatgcgttataaactactcacgtctgtatgggtgcgttggacttggatatcgatggtcaagattaccttccacaataacttaaggttctgacataaacgactgatgtactatatacacttcatggagtactgaatagatttagtctttggtctgacgagtagcaactgatatgcactgagtgtgacttcagattgcttcttgtacgtgacgggtagagcgtgacatgagataggtggcacacacatactgcccatttcatacgactacagtacggngttttcctgtctagtaggagatctactcgtgtgactgtacatatagatagccgctagtatctcttaacgtacgtggttatcctggtcgcctttaggctctcagcagtacatccctttgactgaatctcttcgctcgtatctaggcgatataaacgattaatgaaattacagtcgatgcacctataccaactcccgatgcggtgtagcggcaaagtgactactttttgtgattgatttgcgcattgtccccccaggggcttgatatcagtactatgagggcttttgcatgggtcaattatgcgcgaatggaccttaactgactcactctctagaacataagtggcttttgggccgaaacaactttttctccttgactactttcattttccacgcgcacataccctataggaatactaacccgaaaatacaattaaccaaggaagtgactccatgcgttcatttccttaatcgggtaaaatcacccgggacatca

SEQ ID NO: 568254 - DNA, 645 bp, Homo sapiens
  misc_feature (116)..(116): n is a, c, g, or t
tatcatcctcttccatcatcgtgcctatcttcctgctgctggacaaggatgacagcaagcctgccatgaggaagatcacacctacgagggcctgaacattgacccagacagccacnctatgagtacatagtgacgctgcgaccagggcaagtgaagtggtctgtagttgagcacccaggcccaggagtgagacccaggtcgccccaatgacctgggtgcagcctccctggcctcagtgactgcttcggagctgcctggctcatggcccaacccctttcccgaaccccccagctgtcctctgaagctggcccaccagagctgccatttgtctccagcccctggtgtccagctcttgccaaagggcctggagtagaaggacaacagggcaccaacttggagggagttctctgggcatggacggaacccagccttctgggggtcttatgaggtaatcctcccccacacatgggatggggcaggcagagactggtccagagcccccaaatggactcggagccgaggccctcccagcagagcttgggaagggccatggacccaactgggccccacaacagccccaggaacacccttcctctcccccaaccactcccacccccaggcagccctggcctccactgccttccc

SEQ ID NO: 568255 - DNA, 234 bp, Homo sapiens
aggtcgtggagggtctggtggtaattaggtttagattaaggcggtggatgtcttggtactttatatactcccctccaagggcactatcagacctcccactagaaaacagagagtacaatggtgaggggaagcgtggctgtagcacagacagcggaccaggcaggaccgacctactcctgagtgcagaagggcttagaggcaaacaaaggggaggaacactgccccgggccacca

SEQ ID NO: 568256 - DNA, 1958 bp, Homo sapiens
  misc_feature (93)..(93): n is a, c, g, or t
  misc_feature (99)..(99): n is a, c, g, or t
aagtggatgaagtcaatacggcttagggtgcgtgcaaaaatacttgttttgcttttacagttgattattttaaggggagacatttaattattnctaatnactttttgtcatttgtcctgtaggttccccctaaaggactcaaaacgtctaatccaatggttaaaagctgttcagagggataactggactcccactaagtattcatttctctgtagtgagcatttcaccaaagacagcttctccaagaggctggaggaccagcatcgcctgctgaagcccacggccgtgccatccatcttccacctgaccgagaagaagaggggggctggaggccatggccgcacccggagaaaagatgccagcaaggccacagggggtgtgaggggacactcgagtgccgccaccagcagaggagctgcaggttggtcaccgtcctcgagtggaaacccgatggccaagccagagtcccgcaggttgaagcaagctgctctgcaaggtgaagccacacccagggcggcccaggaggccgccagccaggagcaggcccagcaagctctggaacggactccaggagatggactggccaccatggtggcaggcagtcagggaaaagcagaagcgtctgccacagatgctggcgatgagagcgccacttcctccatcgaagggggcgtgacagataagagtggcatttctatggatgactttacgcccccaggatctggggcgtgcaaatttatcggctcacttcattcgtacagtttctcctctaagcacacccgagaaaggccatctgtcccccgagagcccattgaccgcaagaggctgaagaaagatgtggaaccaagctgcagtgggagcagcctgggacccgacaagggcctggcccagagccctcccagctcatcacttaccgcgacaccgcagaagccttcccagagcccctctgcccctcctgccgacgtcaccccaaagccagccacggaagccgtgcagagcgagcacagcgacgccagccccatgtccatcaacgaggtcatcctgtcggcgtcaggggcctgcaagctcatcgactcactgcactcctactgcttctcctcccggcagaacaagagccaggtgtgctgcctgcgggagcaggtggagaagaagaacggcgagctgaagagcctgcggcagagggtcagccgctccgacagccaggtgcggaagctacaggagaagctggatgagctgaggagagtgagcgtcccctatccaagtagcctgctgtcgcccagccgcgagccccccaagatgaacccagtggtggagccactgtcctggatgctgggcacctggctgtcggacccacctggagccgggacctaccccacactgcagcccttccagtacctggaggaggttcacatctcccacgtgggccagcccatgctgaacttctcgttcaactccttccacccggacacgcgcaagccgatgcacagagagtgtggcttcattcgcctcaagcccgacaccaacaaggtggcctttgtcagcgcccagaacacaggcgtggtggaagtggaggagggcgaggtgaacgggcaggagctgtgcatcgcatcccactccatcgccaggatctccttcgccaaggagccccacgtagagcagatcacccggaagttcaggctgaattctgaaggcaaacttgagcagacggtctccatggcaaccacgacacagccaatgactcagcatcttcacgtcacctacaagaaggtgaccccgtaaacctagagcttctggagccctcgggagggcctggctactgtgcctcaacggttcggctcctcaacagacagtccctgcggcagaagtgggtgtggccgtgagcctctgcaggctcaagagtgttgtccagatgtttctgtactggcatagaaaaaccaaataaaaggcctttattttta

SEQ ID NO: 568257 - DNA, 161 bp, Homo sapiens
tgggattacaggagtgagcccccgggcccacccttgccctgctttttaggagatggagttttttgaatttttctggatttaggttttctgtactattttttgtccccttgatgcaaactttttcagctgtgtagaaactttatgaaaagatgagggcttga

SEQ ID NO: 568258 - DNA, 111 bp, Homo sapiens
ttatcaccccttcccacgtaggtgaaacgtgcttctcgacacaagggacaaatggcttctattcccagagaatcaggtacaccataacctccctcttcagaatggaggtag

SEQ ID NO: 568259 - DNA, 2142 bp, Homo sapiens
  misc_feature (16)..(16): n is a, c, g, or t
  misc_feature (81)..(81): n is a, c, g, or t
ggcgaggacgcgggcnggggctggggcgggggcgggcccgctgcggggcgcctgcgcctccatcttgccgtacggcgcggncgccgcgggccggcccacgtcccgagccgtgtcgccgccgcgctccctccctcggggcggtccgcgggcgggcgggcggctagggccggggcctggctgcgcggctgggccaaggcccgcgatggtgatctgctgtgcggccgtgaactgctccaaccggcagggaaagggcgagaagcgcgccgtctccttccacaggttccccctaaaggactcaaaacgtctaatccaatggttaaaagctgttcagagggataactggactcccactaagtattcatttctctgtagtgagcatttcaccaaagacagcttctccaagaggctggaggaccagcatcgcctgctgaagcccacggccgtgccatccatcttccacctgaccgagaagaagaggggggctggaggccatggccgcacccggagaaaagatgccagcaaggccacagggggtgtgaggggacactcgagtgccgccaccagcagaggagctgcaggttggtcaccgtcctcgagtggaaacccgatggccaagccagagtcccgcaggttgaagcaagctgctctgcaaggtgaagccacacccagggcggcccaggaggccgccagccaggagcaggcccagcaagctctggaacggactccaggagatggactggccaccatggtggcaggcagtcagggaaaagcagaagcgtctgccacagatgctggcgatgagagcgccacttcctccatcgaagggggcgtgacagataagagtggcatttctatggatgactttacgcccccaggatctggggcgtgcaaatttatcggctcacttcattcgtacagtttctcctctaagcacacccgagaaaggccatctgtcccccgagagcccattgaccgcaagaggctgaagaaagatgtggaaccaagctgcagtgggagcagcctgggacccgacaagggcctggcccagagccctcccagctcatcacttaccgcgacaccgcagaagccttcccagagcccctctgcccctcctgccgacgtcaccccaaagccagccacggaagccgtgcagagcgagcacagcgacgccagccccatgtccatcaacgaggtcatcctgtcggcgtcaggggcctgcaagctcatcgactcactgcactcctactgcttctcctcccggcagaacaagagccaggtgtgctgcctgcgggagcaggtggagaagaagaacggcgagctgaagagcctgcggcagagggtcagccgctccgacagccaggtgcggaagctacaggagaagctggatgagctgaggagagtgagcgtcccctatccaagtagcctgctgtcgcccagccgcgagccccccaagatgaacccagtggtggagccactgtcctggatgctgggcacctggctgtcggacccacctggagccgggacctaccccacactgcagcccttccagtacctggaggaggttcacatctcccacgtgggccagcccatgctgaacttctcgttcaactccttccacccggacacgcgcaagccgatgcacagagagtgtggcttcattcgcctcaagcccgacaccaacaaggtggcctttgtcagcgcccagaacacaggcgtggtggaagtggaggagggcgaggtgaacgggcaggagctgtgcatcgcatcccactccatcgccaggatctccttcgccaaggagccccacgtagagcagatcacccggaagttcaggctgaattctgaaggcaaacttgagcagacggtctccatggcaaccacgacacagccaatgactcagcatcttcacgtcacctacaagaaggtgaccccgtaaacctagagcttctggagccctcgggagggcctggctactgtgcctcaacggttcggctcctcaacagacagtccctgcggcagaagtgggtgtggccgtgagcctctgcaggctcaagagtgttgtccagatgtttctgtactggcatagaaaaaccaaataaaaggcctttatttttatggctgaggattttgaatattagaaaa

SEQ ID NO: 568260 - DNA, 332 bp, Homo sapiens
  misc_feature (124)..(124): n is a, c, g, or t
  misc_feature (134)..(134): n is a, c, g, or t
  misc_feature (210)..(210): n is a, c, g, or t
  misc_feature (222)..(222): n is a, c, g, or t
  misc_feature (234)..(234): n is a, c, g, or t
  misc_feature (237)..(238): n is a, c, g, or t
  misc_feature (247)..(247): n is a, c, g, or t
  misc_feature (327)..(327): n is a, c, g, or t
gcttccgatacaagcgccaaaaatcgggttaaaagcagattaaagaagttttttacccgaagcccttccctgaaaactttgcaagaaaaagggcttattaaagatcaaatttttggctttcatntgcccaaagngtgtgaacgtgaaaattccccagttccgtggtttgtaaagcaatgcattgaagctgttgagaaaaaaggtgggtgnctgaatgtgcancagttccccccnttnntgccccctntacccaaccaatactcaagttagcagggccccctgatttgtttgagaagccatgcaattaaaacttgacttgtgttaatnggtta

SEQ ID NO: 568261 - DNA, 171 bp, Homo sapiens
cgagtacgtcgggcatactggataggcaagaaagtgttgtgggaagaatgtagattacgccgatgaatatgatagtgaaatggattttggcgtaggtttggtctagggtgtagccttgagagtaggggaaatcagtgaatgaagcctcctatgatggctatcaatagacga

SEQ ID NO: 568262 - DNA, 1690 bp, Homo sapiens
aaccacgtctaaggtccaaatgggtctatatagcttgtttcaaaagagataacgtcgagtctcttgtgagctcagacgttcaagtgagacctgctgtaccagcgtctcatttcctgacgaaaaggctggctgcgccgaagatccagccgcgtgtgagggacactcgagtgcgcacgcagagactgcagtgtcacgtctcagtgaaccgatgcagcaatccgcagtgaacagctgctctgcagtgacacaccagcggcagagcgcagcaggagcaggcccagcaagctctggaacggactccaggagatggactggccaccatggtggcaggcagtcagggaaaagcagaagcgtctgccacagatgctggcgatgagagcgccacttcctccatcgaagggggcgtgacagataagagtggcatttctatggatgactttacgcccccaggatctggggcgtgcaaatttatcggctcacttcattcgtacagtttctcctctaagcacacccgagaaaggccatctgtcccccgagagcccattgaccgcaagaggctgaagaaagatgtggaaccaagctgcagtgggagcagcctgggacccgacaagggcctggcccagagccctcccagctcatcacttaccgcgacaccgcagaagccttcccagagcccctctgcccctcctgccgacgtcaccccaaagccagccacggaagccgtgcagagcgagcacagcgacgccagccccatgtccatcaacgaggtcatcctgtcggcgtcaggggcctgcaagctcatcgactcactgcactcctactgcttctcctcccggcagaacaagagccaggtgtgctgcctgcgggagcaggtggagaagaagaacggcgagctgaagagcctgcggcagagggtcagccgctccgacagccaggtgcggaagctacaggagaagctggatgagctgaggagagtgagcgtcccctatccaagtagcctgctgtcgcccagccgcgagccccccaagatgaacccagtggtggagccactgtcctggatgctgggcacctggctgtcggacccacctggagccgggacctaccccacactgcagcccttccagtacctggaggaggttcacatctcccacgtgggccagcccatgctgaacttctcgttcaactccttccacccggacacgcgcaagccgatgcacagagagtgtggcttcattcgcctcaagcccgacaccaacaaggtggcctttgtcagcgcccagaacacaggcgtggtggaagtggaggagggcgaggtgaacgggcaggagctgtgcatcgcatcccactccatcgccaggatctccttcgccaaggagccccacgtagagcagatcacccggaagttcaggctgaattctgaaggcaaacttgagcagacggtctccatggcaaccacgacacagccaatgactcagcatcttcacgtcacctacaagaaggtgaccccgtaaacctagagcttctggagccctcgggagggcctggctactgtgcctcaacggttcggctcctcaacagacagtccctgcggcagaagtgggtgtggccgtgagcctctgcaggctcaagagtgttgtccagatgtttctgtactggcatagaaaaaccaaataaaaggcctttattttta

SEQ ID NO: 568263 - DNA, 320 bp, Homo sapiens
  misc_feature (124)..(124): n is a, c, g, or t
  misc_feature (134)..(134): n is a, c, g, or t
gcttccgatacaagcgccaaaaatcgggttaaaagcagattaaagaagttttttacccgaagcccttccctgaaaactttgcaagaaaaagggcttattaaagatcaaatttttggctttcatntgcccaaagngtgtgaacgtgaaaattccccagttccgtggtttgtaaagcaatgcattgaagctgttgagaaaaaaggtctagatgttgatggaatatatcgagttagtggcaatctggcaacaatacagaagttaagatttattgtcaaccaagaagagaagctgaatttggacgacagccagtgggaggacat

SEQ ID NO: 568264 - DNA, 878 bp, Homo sapiens
aatcttaacaacgggccccatccaccagaggggccccctaccccagaggggccgtggccccaagcggagtaaacaaaatgggcaaacaatggggaaagaatgcaccctttcagccccgcgggggtgggaatgttaacggcgccccccctgagcgaaaggtgtccccggtcgccgaacgtgtcacataagggtagacaccgggcgcccccactggttggcgagcgtagggcttgccccccaggagtgtgtcaaagaaccaaagtgtcgcaagacaggcgaagctggttttatacgctcaaattgtttggccgccgctttcgccctacgagcccccaactcggtgggcccaccccccacaaccattccatgcttgaattgccagacatccacaagtcaacaaatgtcaaaccacttgggaaattagtagtaccccccgtaaaatgcaagagcaacacctcttgagataacccttccaaaaaatgcaacaacctcattggacaacagcacccatgtaaaatgcccgaacttccatcacaatagttcccccacattctatatatctgcaagacccaccacggagtattgccttgactcactcaaggggaccaccaggagtgaccgcgtcgtggtcccccagagctccgagaaggcagaaggttgtgagtccccgagactttggacaacagccccgctgtactggggaacccccctgcatttccacggggaatcagacaatcgctgtttagacttagacacaatcaggggtgcacccaactatctgcggtagaaaaatttccacacgagctgagatagtatgaatgaacaagaccttgtacaagggtgtagtttcaaaaaaataccccccggaccacaagtcg

SEQ ID NO: 568265 - DNA, 635 bp, Homo sapiens
ttccccagaccaagaagttggaactctctatgagtgtttggcagtgatggtaaactggttttacattactgcaagtctcaggcgtggggatgaaccacaaagaaaatcaacttgctactacatgaactggcatttctccccggcaagagacagctctgaaaagttttgatgcttggtggcaagagattcacccagcatgtgcatcttcatttagtcatgtgtctcactctcatgttttatgccatcaagcaaaaacatccatcagccatgcaatggcactcccagcaacacacatgtggctctgctattcatgccccccccagccccatccatccaacagcatggtccatgcatcagtcacaccccattgctccctacttggtcaactattattgctgcagatctgcctccaaggttgaacaaggagactaagactgtataaacatcttcacttgtccagttctcacaaatgactgcaacttgttctcatggtaacaagttaaatatacctaaagggttcctttttattctctcaacggtcctaccatccatctctatgttttcccttttaacgccacatttgcactgctggctgcattccctcaactagtccagcaccaggccagtccacccgc

SEQ ID NO: 568266 - DNA, 758 bp, Homo sapiens
gttgttgttgtttatgcaaacagtgttgttatcagcctaaaataatgggctataagatagtatttacaagcctcaagttaccctcaaacaaaaaaacatacaacagataaaaataaaaaacacaagaaactaaatcatatcagcagagaaaattaccttcactaaaaggaagccaggaatgacagaaataaggaagagaagaccacaaaatagccagaaaacaaataacaagatggcaggactgagtccttacttatcaataataacattgaatgtaaatagtctaaatactccaatcaaaagatatagagtggctgaatggacaaaaacaaaaaacaaaaaacaaaaacccaaaaaacaaaacaaaaaaacccaccacaccaataaaaaacccaagacccattgatctgttgcctgcaagaaacacacttcacctataaagacacacagactgaaaataaagggatggacaaaaatattccatgccaatggcaatgaaaaagagcatgagttgctatacttacttctatcagacaaaaatagctttcaagatggaaactataagaagagacaaagaaggtaactatataatgataaaggggtcaacttcagtagaggatgtatactttaaaatattatgcaccaaaactggagcacctagactataagtaaatattattagagataagagaggagacggatctaatacaataataggtggaactttcacactccccttcaggctgggcgatttttaa

SEQ ID NO: 568267 - DNA, 142 bp, Homo sapiens
tggctggcatcgaaattgatccaaccctgggggttagtatagcttatttaaactttcgtattattgcataaagtgttaatcactgtcttgtttcccgtgggggtgtgactagcctaccgtggactactgggtaccgagctcg

SEQ ID NO: 568268 - DNA, 224 bp, Homo sapiens
gtctagcctcgtcagtggatatgaacttctcttgggtctagcctcgcctgtggtggtgcatgcctgtaatcccagctactcgggaggctgaggcacgagaatcacctgaacccggggcgatggaggttgtatgtgagctagagactgctgccacttgcactccgagccgtgagcaacaagagcaggactccaccattggcactggctgaggctaggacgtggta

SEQ ID NO: 568269 - DNA, 383 bp, Homo sapiens
  misc_feature (56)..(56): n is a, c, g, or t
  misc_feature (65)..(65): n is a, c, g, or t
  misc_feature (84)..(84): n is a, c, g, or t
ccaataggttccacaaaaaaaaaatttaataaaccacccacaccacggcaccatancacaatacnccatggtagccattctaantttttagaaccagaaatgagcttttaaaaagtcaccataggctgggtgtggtggttcacgcccggtaatcccagcacattgggaggctgaggcaggtggatcacctgaggtcaagagttcgagaccagcctggccaacatggtgaaaccccgtctctactagaaatacaaaaactagctgggtgtggtggcgtgtgcctgtaatcccagctacttgggaggctgagacaggagaatctcttgaacccaggaggcagatgttgcagtgagccaagattgtgccactgcactccagcctga

SEQ ID NO: 568270 - DNA, 99 bp, Homo sapiens
  misc_feature (29)..(29): n is a, c, g, or t
gttaatgtgtgctcacttcccctccattngttacgtgagagaatgcgtctgctgatcactgaaagtgtcccttttagtctcctgatccataggcgttct

SEQ ID NO: 568271 - DNA, 211 bp, Homo sapiens
ataccagctgattccattcacggtaaagtatacataaccagttgtcacattaaatcatttataagtatatggttagtggtctaagtacattcacactgctgtgcccccatcaccaccatccacctccagaacgttgtcatcttcccgaactgaaactctgtacccatgtaaactataactccccagtacccaccaccctcccagccccttg

SEQ ID NO: 568272 - DNA, 152 bp, Homo sapiens
  misc_feature (33)..(33): n is a, c, g, or t
cactctaccagattttacttgtagcacagcatntactccttaaaaaatgaggagagagaaaatctgctttctggacttgtaactctggtggagatcacgtttcccttgctgtttgcaggttcagaccccttaggacaagtatgaccccaaat

SEQ ID NO: 568273 - DNA, 1658 bp, Homo sapiens
  misc_feature (1250)..(1250): n is a, c, g, or t
  misc_feature (1491)..(1491): n is a, c, g, or t
  misc_feature (1658)..(1658): n is a, c, g, or t
taactggatcccaagtccccagggagggctttattttttcttttcaaacatccggtcctgggggctccctggggctcttttgggcgccggtatggccagaaaagccggggcggtggggcacggggccataacgggaaactaagcagaaggcttagagaaatttctttcttcttcctccagtgagatagactcagaggcttttctctcttctcttataaagacatggtcccggagacggggacttgagaccgggtcccgggtacacaggtggggtgggccaagttatacagagtgttctctacaggacaagaacgtggtgctccctctattctgggaggggccagaggggcgcctctcgcgtggagagaaaagaaggagagaggagaatgtgggagaggcgaggacacctctcatctcaagcacgcgcggtgcccagcgtgtgtggaccgtgagagaggggggaacactcgcgagggagaacgtgtggtctcgcggccctctcgcgcggagaccccacacagagaaaaagagtcgcgcagaaagtggcctccgggaggggcaccacatctcttctgtgggggtgaaaagtgcgcggggcgcaacacctgtgagaggacctcctctcccagagagggcgtgagaaacgccgggaggcgccgagaggggcggacacaaactatcgtcgcgctggggtgcgagataccgcgaaatcaacgcggtggggtgggccccaaagcgccaccagacgaagagggggccgccggagagtgtgtgacaccccgcgataaggcgcgggggagcgccgacgcgaggagggaaagacaacagagcagaggagaagcagcgcacccctggtgtggggacataggtgccgcggggggcccccattataaacagcggatcaacgaggagagagagaaacatccttacacaacggagagcgaccccacgtgacttgtggagctgtcgaagaaacacccccacaacgggtgttgtggccccaaaagagccacgccccacgatatgtagcacccaaaaggatcccacttggtggtggtgggcagaaccaccagggtgggggggcggcggacgactcatcaaaaagagagacaccccatatgggtggccccaataatctacacacaggagagacgaagtgagaggggcgcggcaccacaactgaggtgagcaatttgacgagcaccaaattaaacggaggggcgaccccacagtgaggagcagagagaacnagcacactgttaggcagggccaccaggctagatacaacaaacccgccggggcacgaggaagtgtatcgacccaagcaacggaagggtcggtagggtagcggccccaatgtgagaaggggcctcgctctggtgtgtggtgtgagcaccgccatgtgtgtgagcaatttggcggcgcgagaaacccctcagcgcggggtgagagagaagcacaaccaccgacagcaggagaaaagacgagagntcgacacgggacaacaaggctgagggaccaataccacggagagcgcacgacggaggagagagcacaccaacgggccaacgataggaacataacgcgcgacccacgtgcgtccaccaaaccagaggccggcgagtaaagaactccaggcggagacgaaggcacaagan

SEQ ID NO: 568274 - DNA, 170 bp, Homo sapiens
tcgactgtgttgcgtagtagtatgcggcagtagttacggactactataacttgttaacttaacgaactggttatgttacgggttgtacggtagaactgctattattcatcctatgtgggtaattgaggagtatgctaagattttgcgtacctgggtttggtttaatccac

SEQ ID NO: 568275 - DNA, 177 bp, Homo sapiens
aaacagggggcccaaaaacctggtttttttttttccaaatgggttttaaaacccctaaaggatccggtttccccaaaccctccgggggggggggtttcccccctcctagggggttccacccgggtttttgaggaaagccttccaaagggctttttaaaaaaaaatttttttttgcca

SEQ ID NO: 568276 - DNA, 706 bp, Homo sapiens
ctgatatttctggtcgagcagacatccccggcgctctccttccttaatatgggaataaacaccatgatcgtgctaagggaagcgagactcctggagacaaccccaggctcaaaactatggaatcctacacctagccacacaccagtgggagctgatactcctggacgaggtgatacaccaggccatgcgataccaagccatggaggcgcaacttccagttgctcgtaaaaacagttgggtatgaaacccccaaaaggagagagagatactcctgggcatggaaatggatgggctgatactcctcgaacagatcgaggtgtgagattctattggtgaaacaccgactcctggagccagtaaaagaaatatcgcggtgggatgaaacaccgtgctagtcagatgggtggaagcggtccagttctgacccctggaaagacaccaattggcacacctaggaatgaacatggctacccatactccaggtcacataatgagtatgactcctgaacagcttcaggcttggcggtgggaaagagaaattgatgagagaaatcgcccactttctgatgaggaattagatgctatgttcccagaaggatataaggtacttcctcctccagctggttatgttcctattcgaactccagctcgaaagctgacagctactccaacacctttgggtggtatgactggtatcaaatgcaaa

SEQ ID NO: 568277 - DNA, 379 bp, Homo sapiens
  misc_feature (222)..(222): n is a, c, g, or t
cccgaaccagtctttatctctccatcttccacttaatacccaagatctggtaactgtcatctgttgctaggatgatttaaatagcttcttactccacagccaaaaaaaaagattctttggaaaaaatgtaaatcatatactcagtcttccatttgctagattccaatggctttgcattacactgagaataaaatgcatactctaaaccatgacctaaggggncacggctaattctccaacatttccttccattttactcctccaatcattctctgcaccctttgaaaactttacaatttgactcactgcatgattcttcgtcactacctgtcatccataatgacccggattccagctgagggccggtcgtaccataccg

SEQ ID NO: 568278 - DNA, 210 bp, Homo sapiens
ccggatcccggtgccaccgcccgtgttgggcctcggcacctgttgcttgtgccaccgctaccgttgcgctgttacttgctcttgagttggatgcggttgcatttatctgcctgtcattctatttcattcttaatttatgctaggttttttttgtacgcgattcactgtacacactgagaaagggacgaactggacggtgcgttggcccca

SEQ ID NO: 568279 - DNA, 516 bp, Homo sapiens
cccgggactaaggttatctggtccaagcatcttctgaggaaagcatgaggctctagaggtggggaagttaatctctccaatgcgagatcaggtacgaccataatctatgtctcttctccgcccccctgtgtttacatgtatctctcccaatagaacagctgtctccttgatagaccacaaaaaaactttttgttagaccacaaaaaagcttaattcagataaacagtgctaattgatcatagaattaaagtcttggcctaatgagtggctaattgttttttagggatttaattcaagtccttagctgtcacattttttcatacgtattatacaaaattatatgtcaaaagcagattacttttatgtttaggttttcagactataagagtgactgatacatatcttctctattcttagagaatagactatgttaggaaagatttagtctgcattggctttgagggtgactgtctttggttaatgtctctcaaggtagattatattccttggcctttc

SEQ ID NO: 568280 - DNA, 1373 bp, Homo sapiens
  misc_feature (205)..(205): n is a, c, g, or t
atcatagagaatgtttaagagcagactgcattagtgacatttcgcacataagagatccctacaagtagcctgtatactagcacacttatgtcgaagttaatagatgaggacaccaagtatacctagtgaaccagcataacagagtggatcgaacgaagccataaaacggaaattctagagtcatggtatgagctcctagtctacntagtccggtatgtatagcatgaactagatatagagtagcactatgactgagaagcaattctgcataagtgaatatagtaaaagtggaagacgatcctcgaaaatatgcattgtaaaacatacagtctaatagcgcccacacgtgcaaatgacttttctctagcttgcgaatgactaaaaaaatgatgttggcctcttatgatcacataactcactattgaacgtgcgcaacttatccaggagccataatattagaagtaacacatagaatggagaattaaattcaaagtggcctggaaccattcgaaagaacattaatacgttgaaaataaaagaagtccattccacaagttggcgtatcccggaacgtctgaattgattgaaaagcaagcagctaaatccggagtagaacagcaccactcggaccgaacgcgaaaaggaacaaaactaaggtctagaaaattgactgaaacatgacaaacaagaggctacataaacccccgaacaagattcaggcaaaactctagaattgatgtagaacaaaacagcaccaacagaattcagacagagtgtaacctacccacgaagtctaaacaccaagaatgggcaacaaacgaaacgtgaagggaaaagcacgaaccgtacatagcaaaaagtcggccacaggcactccgatccccagaaaaagcaaaatgctggcgcctgacacacaacaaacacgcaaaacactgacccgtccaaccaaaagaacacaaaatgaacaccgcaacaacccagagaaaccctcactggacagacaccatccacaaaacacaagaccccaaaaggcacacaacaaacaaacaacccagaaattaaacggaaagaacacaaagagaaaaaagactggatcataaacaacaccacctcacaacaaaaatggaaccgacccactaagcaaaaacaccaaaaaaaagacaaaccacgcgcgaaccaagcacgacaacagatagcacaccacgcgcaccccacaatacacaggcacgtaccaccaaagcccggagatcatatacgaaagaatgaatgcaaaagagcgacgagacgacccacgttcaagacaacgaaccacacacccacaacacacaccgacgaacgaagcgacccaagcaacgacagaacgaatcaggacc

SEQ ID NO: 568281 - DNA, 567 bp, Homo sapiens
  misc_feature (85)..(85): n is a, c, g, or t
  misc_feature (281)..(281): n is a, c, g, or t
cgcttttatgtgtgccgcattggcgcaggcttttaaacgcgcttttctctcgggccccccccttggaagacacagtagggccacncctatttgtgctatgtggcccccgcgttttttcagtggggggggggccgccccatattgccttcaccacccacgacccgcaccccttttttttgccctcttggcaacaacaagcccaaccaatagtttaaggggtttaagtaggtttgcgggccccccctttcccaatcaatcccaaatcagtgggtgggaaaaancccccccccccccccagggcccctgaataatgtgcagttggaggatcccacccctcttgttcttgccgttccccccattggacctgaggggtgaaaccttgccccccctcctgtaagaaaaagggtatgttttaaattggccaaattgggccccgggttaccctggggggttcaaaccctaaggaaaaattggtttttgggggccaagggggattaaaccctttttgggattttgggtatagtttttttaaattttcccccaaataaaaaagggacatgggtttta

SEQ ID NO: 568282 - DNA, 104 bp, Homo sapiens
ttacgggtaaaacgagacaacgaaagtggctttaacatatctgaacacacaatagctaagaccaaactgggattagataccccactatgattttgggcttagaa

SEQ ID NO: 568283 - DNA, 140 bp, Homo sapiens
ttacccacaacaagcctcagtagtattcgagtctcccttcaccatttgcgacggcatctacggctcaacatgtaggggtagccacaggcttccacggacttcacgtcatgatgggctcaactgtcctcattacatgccat

SEQ ID NO: 568284 - DNA, 950 bp, Homo sapiens
ggcctcatcacttgtggtgagccgctgatgaagtagctgacaaggcaagtaccgttgggcattcgggcacattgtgggagaccaagccgccctgtcttgcgggttccacgtgcacgagttcacgtggtggcccggcgccgtcataggcggatgagtggcaacgcgtgacaatccacgggatggcagaagaactgtcctcgagcttcggccgcagcgtgagccatggaagggacatgcatatcctagtgtcccatcgcgcacactgcccgtcgatccactctgtcccgcgcgccgaatcgtcgttgacacgtcaagctgcgccgatgctcgctgggccgctatgcattcccacgcttggtatgcatccgacgtgtcaaacgcgccgcacgcacagagggatcatccaaaggcgtggtctgtaacacacctgttgaacgccaggggcccacaagtgcacgtcgattcgttccaccgcgtgggaccgaccaccgtgtaggcctcgagctttgctaggcctgtcctgtggtgaccacaggcttttcgccccaggtcgtctgaatggacgacacggtgttcgtagaaagggggctgcatggtcgaggaccaggcccatctcgtcacgctgagcgttcaggctcgcgctaggcacataggatgcccgacacctcccggtgaggctcaaatacatcattgtcactcaggtgcaggcacagggcctcaaatctctggatgacaccctgcgcccacctcctgggtctctgacggcctgccgaagccaagctgcctgactgcctcatgatgggaccagcatgccgcttggagaaggggtggcctcgccggagctagggagctggatgatggtgggctggccggactcactggacatgtgggtgttcggcttgaccccgggcccactgggcagcttgctgatggggcagtgcagggagtcc

SEQ ID NO: 568285 - DNA, 473 bp, Homo sapiens
tccaacaccgcatctaccaagattgaatcatgaagaaatggaaagtctgatcagaccaataatgagagagattgaatcagtaatcaaaaacctcccaacacagtaaaagcccaggaccagatggcttcatcggagaatgctaccaaacatttaaagaagaattatcgccaatcctcctgaaactcttccaaaaaaatgaagaggagggaacatttccaagctcattccatgaggccagctttaccctgattccaaagccagacaaagacaccacaaaaaaagaaaacttcagaccattatctccgatgaatattgatgcaaaaatcctcaacaagatactagcaaatcaaattcagcatatgaaaaggattataagccacgaccaagtgggatttgtccctggaatggaaggtttgttcagcatacaattaatggggagctgggcgcagtggcttatgcctgtaatcccatca

SEQ ID NO: 568286 - DNA, 199 bp, Homo sapiens
cttgcttcccagcccaaaggcccaataggggaatcaggtaatggccttttttgccggtgaattttaattttttgggagagaagagaaatcaaaaaagggtccaaacaggggaagaaaaggacaaaggggaaaaacccttttcaaatgcaagtaattcccttaaacacttggaacccgtgttttagacacaaatttaaaa

SEQ ID NO: 568287 - DNA, 698 bp, Homo sapiens
cacctaaaagccaataatgggaataggaaaagactcatatcaacattgtcgtcattggacacgttagattcgggccagtccaccactacgtgtgctcactctgatctataacatgcggatggcgatcgcatcaaagacgcaaccattgagaaacatgtgacaaggaggctgctgagatgggaaagggctccttcaagtatgcctggcgtccttggataaacgtgataccatgctgcacgtcgtgagacgttggtatacaccattgatatctcgcttgatggaaatttgagaccagcaagtactatgtgactatcattgatgccccaggacacagagactttatcaaaaacgtgattacagggactatctcaagactgactgtgctgtcctgatggttgctgctggatgtgtaggcttcgacatttgagaggctggttatctccaaaaactgggacagacccgatgagctagtgcccttcgtggcttacagcactgaggatgtgaaacaactaagttgtacagtgttaacaaacatggattcccactgagcctgcctacaagcataagagtatattgaaggaagttgttagggcatagtctagtcatctctcacattcaacgtatccctttgggtttaccaaaacgcacgtagtacatgtgagcattgtgtgccaaatttctggttcggaattggtgac

SEQ ID NO: 568288 - DNA, 885 bp, Homo sapiens
ttccgcccaccaccacgcgatgatcgtccagccccccgtggggcgacttcttcttctggtcgcccgccacctcatcacgacgccccgcaggtaggggttggtgctcttctcttgtggtgtgagtacgaccccacccctcacaacgcggtggtctgccaccgccgcgcgctctacctcttctcgtctcgttctacgccgcagcagcgcgaggtgtgttctcctctctctcgtcggaggcgggttgtcccccgcacccgaccacgacgacgcggggcggcgcaccgcgcccctcccccgcgcgcatagaattccactcccccccccccctccgttcactctctctcgcgcggcgtgcccacaccctgttgtttctccgcgcggaccactccaccctcttctctgtaggctcctctctcgcggcgtgctgctctctcccaccgcgcgccccgccgggcgcgcgccctctcttcgccgaccccagcgccgtgtcccccccacacgcctctcgcgctcgcacaatgttcgcgcgcggcgcgcgcgcgcacattacacgctctctctctctctcaccacgccacagcttggctttgtgcgacgcctcttctgtgcgcgcgcagcgggcgctggctctttcacccccgcgccaccgcggtgtgtctgtcactcccctctccttttgtcgcagccgattatcccggccctccctatgtgggtgtggcgacacatcccccatctctctccgctcgtgatggaaccccccgcaggacccacccctctttcttcggcgctggtcgctcccccgggagacccccccccccccttttttttggcccccccccccccccctttttggggggggaaaaaaaccggtttgagagagaaata

SEQ ID NO: 568289 - DNA, 203 bp, Homo sapiens
gagatcgcgccactgcactccagccttggcgacagagcaagactcaaaaaaaaaaaaaagaaatttctatttggggggtggatcctaccaccctgttttttaacacatgatggtgtttcaaagagcagagcccttaacccggtataaggcgttgctttgggttggggctgaagggcctgggcttgacttgggggccaaaccag

SEQ ID NO: 568290 - DNA, 384 bp, Homo sapiens
agcgtttaccgatcagtgcactggcctccagcgcgacgagtctcgtctgctttctacctcatgaactggcctttctctaacactgtcagatagctgtgaacgtgtaacagtctccctttttggtgtctggctactttcactaagcatcatgtcctcaagcgccatccacatagcagagtgtgtcagaatttccttcctttaccagactgagtaatactccattgtatgtacggacactttgtttgtctatcacccatcaacagacacagcctgtgtccacatatggtcactgggaacaacgctgctatagaccatgtgactacgcacatccgcttgagtctgtgttcagctatttcggatacgtgcgcaaggcggtaaaagctt

SEQ ID NO: 568291 - DNA, 652 bp, Homo sapiens
  misc_feature (2)..(2): n is a, c, g, or t
  misc_feature (84)..(84): n is a, c, g, or t
  misc_feature (101)..(101): n is a, c, g, or t
  misc_feature (166)..(166): n is a, c, g, or t
  misc_feature (269)..(270): n is a, c, g, or t
  misc_feature (272)..(272): n is a, c, g, or t
  misc_feature (319)..(319): n is a, c, g, or t
  misc_feature (359)..(359): n is a, c, g, or t
  misc_feature (447)..(447): n is a, c, g, or t
  misc_feature (468)..(469): n is a, c, g, or t
  misc_feature (558)..(558): n is a, c, g, or t
  misc_feature (563)..(563): n is a, c, g, or t
anaaccagacacagttcctttcgctctggttagttggttggcagtccgtgcgcacaccaagggcggacttcgattcaatgcccntgccccagccagctgtngggggcagcccatattccagggcagttcagaagttttctctctgaactggcctctcctccccgcngcctggcctctggcctgttcttcaaaaagctgccgctgccgcatgggatcattcagctcagtatacgcattgcatatctctttcttcatgacaaacagctcgnngngctcagtcagaccctctttagagcggtgccatttagcccagggctcnttatctgtgggtgatcacagatgaatgtaggattgatgcnagtcacttccaggaactccccaacaagcttgtcaaggagcctggctgtggtccgaggtggagggcattcaacagcttttgccacacanatatcatcaagaattttgcgnntttcttcagtttcaaagaggttcgtttctggcagcttcatccccagggctttctcaagctcttctaccatgttgattcgccggaagggnggggngaagtcaacatcgtaggcttagccctctgggcatcctgggtggtaggtgaccttgtaactgcctgtaatatgcttcaccatccctgaaa

SEQ ID NO: 568292 - DNA, 102 bp, Homo sapiens
  misc_feature (21)..(21): n is a, c, g, or t
tgggaggatgcttgatcccanggagttggcggctgcagtgacctatgatcacatcactgtactccagtctgggcaacagagcgagatttgtctctaaaaatt

SEQ ID NO: 568293 - DNA, 563 bp, Homo sapiens
  misc_feature (33)..(33): n is a, c, g, or t
  misc_feature (38)..(39): n is a, c, g, or t
  misc_feature (51)..(51): n is a, c, g, or t
  misc_feature (57)..(57): n is a, c, g, or t
  misc_feature (73)..(73): n is a, c, g, or t
  misc_feature (80)..(80): n is a, c, g, or t
  misc_feature (93)..(94): n is a, c, g, or t
  misc_feature (108)..(108): n is a, c, g, or t
  misc_feature (134)..(134): n is a, c, g, or t
  misc_feature (140)..(140): n is a, c, g, or t
  misc_feature (142)..(142): n is a, c, g, or t
  misc_feature (154)..(154): n is a, c, g, or t
  misc_feature (156)..(156): n is a, c, g, or t
  misc_feature (411)..(411): n is a, c, g, or t
  misc_feature (478)..(479): n is a, c, g, or t
  misc_feature (484)..(484): n is a, c, g, or t
  misc_feature (488)..(488): n is a, c, g, or t
  misc_feature (492)..(492): n is a, c, g, or t
  misc_feature (496)..(497): n is a, c, g, or t
  misc_feature (499)..(499): n is a, c, g, or t
  misc_feature (501)..(501): n is a, c, g, or t
  misc_feature (507)..(507): n is a, c, g, or t
  misc_feature (509)..(509): n is a, c, g, or t
  misc_feature (511)..(511): n is a, c, g, or t
  misc_feature (521)..(522): n is a, c, g, or t
  misc_feature (526)..(526): n is a, c, g, or t
  misc_feature (539)..(539): n is a, c, g, or t
  misc_feature (541)..(541): n is a, c, g, or t
  misc_feature (544)..(544): n is a, c, g, or t
  misc_feature (551)..(552): n is a, c, g, or t
  misc_feature (558)..(559): n is a, c, g, or t
cacagtaacatgaccagtcccgaacgtgacgantttanngcccatctccancgtaanctcggcgccggtgacntccctcncgctggtcaccannccggcaccagaaanctgtgaaggtcgaaacagctgcgttncctgtntnaatgttagcgtngntaatactacctgcttgcggatagaatgtaaagatgagagctattgttcacataactcaacagttagtgattgtcaagtggggaacacgacagacttctgttccgtttccacggccactccagtgccaacagccaattctacagctaaacccacagttcagccctccccttctacaacttccaagacagttactacatcaggtacaacaaataacactgtgactccaacctcacaacctgtgcgaaagtctacctntgatgcagccagtttcattggaggaattgtcctggtcttgggtgtgcaggctgtaattttctttctnnataanttcngcanatcnnangnacgaantnancacactctgnnaacngacccattgaatnantanggactgnntcattnnagtg

SEQ ID NO: 568294 - DNA, 537 bp, Homo sapiens
ggaattgctgcgtttgtgttgtgttgtgttgttgtcgtcgttttatgagatggagtttcactctgttgcccaggctggagtgcagtggcgtgatctcggctcgcccgcaacattctgcttcccaggtctcaggtgattctacctgccatcggcctcccgagtagctgggattagggcatgcgcacaccacaacctggcctaattatggacgtccctccagtacgagatcgcgcgtttctccaatgttggtcacggctggctctcgaacctcctgcacctctaggtgaatccaccacgacactcgaccctcccaaaagtgctgcggcatgatatacacggcattgacgccacgcagtaacccggaccgcgacgccagcccagcacgcccaaggcctcaccgatcgcgtccgcgtacaacgcacatccgaaacggatcccttaccccaaacaaggacgggcgcaccatgtcgggctacaccaccctggtgacatcccccgagcgcaccttccacggagcggccgaacgccgcgccggcg

SEQ ID NO: 568295 - DNA, 526 bp, Homo sapiens
  misc_feature (33)..(33): n is a, c, g, or t
  misc_feature (38)..(39): n is a, c, g, or t
  misc_feature (51)..(51): n is a, c, g, or t
  misc_feature (57)..(57): n is a, c, g, or t
  misc_feature (73)..(73): n is a, c, g, or t
  misc_feature (80)..(80): n is a, c, g, or t
  misc_feature (93)..(94): n is a, c, g, or t
  misc_feature (108)..(108): n is a, c, g, or t
  misc_feature (134)..(134): n is a, c, g, or t
  misc_feature (140)..(140): n is a, c, g, or t
  misc_feature (142)..(142): n is a, c, g, or t
  misc_feature (154)..(154): n is a, c, g, or t
  misc_feature (156)..(156): n is a, c, g, or t
cacagtaacatgaccagtcccgaacgtgacgantttanngcccatctccancgtaanctcggcgccggtgacntccctcncgctggtcaccannccggcaccagaaanctgtgaaggtcgaaacagctgcgttncctgtntnaatgttagcgtngntaatactacctgcttgcggatagaatgtaaagatgagagctattgttcacataactcaacagttagtgattgtcaagtggggaacacgacagacttctgttccgtttccacggccactccagtgccaacagccaattctacagctaaacccagcccatgaccccttacaggggccctctcagccctcctaacgacctcagcagcctggacttcactgtccatatcactatcagtaattcggtcacaaccactgaaccagtctctaagatgttctaagctttccctcatcatcctgtcttcctctgagccctccaaagtctgccacctctgcctattgcctagtccccaagtgtaatttatttttagccgt

SEQ ID NO: 568296 - DNA, 540 bp, Homo sapiens
agatataactgaagcttaaacttttgtggcttgaagggggtgtggtcaatagaggggctcaaagtcttccaaggaaacagtggaagccacttatgttcacacattgtttttggaacttttaccattggaaaacccccccctctggccagcagtttaacacagtgaactttccattaaatatactttggctgggcttaattcccaaaaattggctgagaataaccacatgatgtagagacatactcctcaagctcatggtttaaatgcaattgagggggtgacgaacgtgggctgtggtcaacctgacctcatcctagcctgaattgagagcttgatcaaaggccatgatgaactagtgcaaattattggcaagtgaaccttgaccaagtgagttttggacacataggcacactctggcataccgggccttgtccagccgttctttcaggtagcacttggaattccacttctgaataaaacaatccctcttaaacaagggggcactttacttacggtcaaattagagaagttttctttctg

SEQ ID NO: 568297 - DNA, 227 bp, Homo sapiens
gcggctttgaccgagaggctgctggagctcgtgtttggacgcgatgtttcgtctgaactaactttctgctttggaaaactggctgtgggttctcgatggtaccatggaggatcaagaccatccagatccggcgagactaatgatggtggctttcctggagactctcagtaactacagatactggtctttgtggaaaggccatcgaatctccacctgtatgaacacta

SEQ ID NO: 568298 - DNA, 128 bp, Homo sapiens
  misc_feature (83)..(83): n is a, c, g, or t
tacacgagtaaacatctctgggtgtgaggactctgaattctaacaaatgccagtgactgtcgcacttgagtttgagggcagtnggcctgatgaacgctcagacccctccagcttagagtcttgcattt

SEQ ID NO: 568299 - DNA, 113 bp, Homo sapiens
cggacttcgacaaccagacactggcagtgctgcggggcccatggtgcgtacctgatgcgctcgcgtgagatcaccctgggcagacaaccaaggataaccagattgatgtggac

SEQ ID NO: 568300 - DNA, 184 bp, Homo sapiens
tctcaccgtctacacctggactacgtccaaactctccacggcactgcacagaaggctgcacgtacaaaacacacagaggcggagaatttcaccatgacgaatcgatgtgtgccagatgagggagcgagaacatggacccgccccaagtgttccgctcttcctgcccaaacatattctgtgacgg

SEQ ID NO: 568301 - DNA, 720 bp, Homo sapiens
tagacctatttatgattcagtgccaatttcagataggatgtgaacatgggatgttcattggaaataggttaaatgttgttataataaaaagggttttgtatataaatgtgtggtcagtgactattttccgaaatcatgtttcatcaagaccaccctttgttctaaaataggccttgcataacaacatatgcaccacgtatgtgcacgggccacacatatttttgtataatagttgggtttgattataaaagtgttgtcaaaagttttatttatctgcatatagcagtggttggcttttttgaattgaaattattttgcgcattgaaagcattgaaataagggaaattatttatcttctgagcactaaacttatttttgcataatattctgtaataattgcagtccccagatccagaacatgggaagttaggggaaatagtgtgattttgtgttttgaatatactgtcaagaattacataacaccaattaccgaccaaactttttttaaaagacatttcattgtgactgccaaaaatctgaataatttatatttcttgtttttttctttatatgttttgcattttaatatgttgagccactgggaatttgtaacagattaatttgttataggagtttaaatgtgttgtcattgtctcccttgtctttgtccagagcctattattatgggaaccataaaatttattgtgtcagttgctttga

SEQ ID NO: 568302 - DNA, 488 bp, Homo sapiens
  misc_feature (4)..(4): n is a, c, g, or t
  misc_feature (183)..(184): n is a, c, g, or t
  misc_feature (187)..(187): n is a, c, g, or t
  misc_feature (195)..(195): n is a, c, g, or t
  misc_feature (206)..(206): n is a, c, g, or t
  misc_feature (209)..(209): n is a, c, g, or t
  misc_feature (266)..(266): n is a, c, g, or t
  misc_feature (272)..(272): n is a, c, g, or t
  misc_feature (286)..(286): n is a, c, g, or t
  misc_feature (301)..(301): n is a, c, g, or t
  misc_feature (306)..(306): n is a, c, g, or t
  misc_feature (314)..(314): n is a, c, g, or t
  misc_feature (321)..(321): n is a, c, g, or t
  misc_feature (327)..(327): n is a, c, g, or t
  misc_feature (331)..(331): n is a, c, g, or t
  misc_feature (400)..(400): n is a, c, g, or t
  misc_feature (411)..(411): n is a, c, g, or t
  misc_feature (483)..(483): n is a, c, g, or t
ggcncaccacgggcaggggcctgcacccagctgcagacgctctatcaaatggaacaaggagttggggaaaggcggggcaggcagcctgttgcaggcaggaggaaggagaagagacttaggggctgttacctctcctgaggcccccagcctgaaactatacaacatccaggtggaaatagaacnngtncctcaacnggggggcagtnctntacagtggaggggagggctttcacgcccacccaccccctggccctgccaacagaaantacatnaacacaatagaagnaaactaaaaaactcnctgcnccctgtantaaaganaactgntgancagaagtttcttgtttgcttggctccccatattgccttttgagttggcaaccctgggcttgggcccctncctccggcccnaagtgttggctctgcaaaaacactggggttcccttcaagtacacgaggggttaggctgctgtacctaagtantccat

SEQ ID NO: 568303 - DNA, 209 bp, Homo sapiens
atctagcaggattccccaatctgtgtcgaccaggttgagactgtcgaccatggttgagatcatatctggatgagggtgggtcctggtccatagtgaccgatgtccttgctaggatgggaaactggacacatgacacagcgataaatgccactgtgacggcatttaccgtggagttgtacgccacatactaagcacagagggtagcacca

SEQ ID NO: 568304 - DNA, 496 bp, Homo sapiens
gctctgccttcccacctctttgaagtgccttttcttggatgctccttgtggcccatgaggactctattcacttttttgctggtttttggcctacatgttttgaatcttttgccagggctgtttccctgtgtgttggcatgtttaatgaactgtgtatgtaacattgattccacatctagtgtttacttgctgagaaatatgtgcaaatgtaacttagtgcactgataacctcactctcgtcattggtgtctagctgccacctccctccccgcccctgccccccttccctttcctcctcttccctttctatcgcttcgtcttcccttcccacccccccatcttcgctccatccttccacgcttgccttgtctcctaacctctcctttcccctggcccttcggctctcccctacttcccactcaccctgccctcccctcccatgcatctccctctattccaattctcccttccaccctctcctcctcccacctcctca

SEQ ID NO: 568305 - DNA, 246 bp, Homo sapiens
gcgttgatatcctaagcttctcgacctgcagatgcacgcaggcatccacagctaagctggaacactgaagcgttccagcagactgagtccctgatcaggtaaccctgtgtatgcgacagaaaggcggtctgaaacatgtgatgcgctccttcatagaggccgtctgctccctctttgctgcccgtagcactgggagtcaggcccagtctgctccaaccttggtctggtatgaggacactgcacaaa

SEQ ID NO: 568306 - DNA, 312 bp, Homo sapiens
ctggcttactgtacacatggctggcaaaaagagaagatgtagccaccattttgaacatgcctagtcccaggtagtatagtccagtgggcacaactgctggcattcacctgtgcaagcttacagcttggttgtttatgtctgcagctcagtttcacaggctgctctttgttagagaagaaaatgattttggggttgcttttctggaaaaccttaccaaggactataccctcgctatctgcctaagtaatttcttcttaactcctatatcactgtgaaatctgaaagcaaatcaataagtatttcactctctac

SEQ ID NO: 568307 - DNA, 822 bp, Homo sapiens
aataaggcttaggtcgaggcctgtgtttggtgataccagacgaagcagtggcatgcatgctgccgcttgacctggactgtccagacagcacgcgcaggatgcgcaccaggtcgaagacgttgcggcgcgcgtgtaagcgttcagtgcagtgggtgaactgctcccgctccgcctcgctcagcagcgcggtcagcgcttggtgcagctggcgcacgttggcatgacaagtaacctgcatgccccgtgcccccgcctgcgcctgcccctgtgcgcctgatgcccagctgagcctggtgtgaggactgagctcacctgactgtgcctgtccaggcggcgctgttcatctccacgcctgaggcccgtgcgggctctgagcgcgcggggtgtgggcgtgtgccgctgtcctcgcggggtactggcgcgaccggctggatccccggtgagcgcggagacgagcggctggagccgtgggtttggggagcacgtggtacagtgggtggagtcctagggggtcggggagacccctgctagagtcccgggaggcgcgaagacggcgggggtcgcggaacctggaatccgggtgacgcggagacgtcggcgtggttcctgacgatacgccgcagtcggcttgctccagcccggagtgtgggcggagaactgttgctggaagtccgtggtttcgcggggatcagcaggctacattctggagggtccggagacgagcggtggtggtgtttggtgggcacggaagctgacctgctaccgtcaccatcccggggtccccaccgggcgccgtcctaggtgtgtacccagtagagtgtc

SEQ ID NO: 568308 - DNA, 407 bp, Homo sapiens
acagcacgcgctaacaattaggtgcactcagtaggttgtctgcagttaatgttagcaggtgttaggcgtacggccaggctattggttgaatgaagtaggctgatggtttctataattactagttatggtgataaggggtgtacgtgtgccttgatggtatgaagtgggctatggcatttttaatcttagagcgaaagcctataatcactggctgcccgctcattaatggggcatggtccatgtgctaggatttatatgatagttgaggtggttggtgtcaatcagtgaggcaggagtccgtaggaggttatttgtggctgtaaaaatcattaaggatactagaataagagatcaggttcgtcctttagtgttgtgtatggttatcatttgttatgaggttagtttga

SEQ ID NO: 568309 - DNA, 217 bp, Homo sapiens
ccataacttggtttagactgatgatgaggaattacactttggcaccaggttatgggtctggtattatttacgaacaaatgtttatccagcggtttgaactcttctatgtggattagtacagtctggacttctttgccttttaccagggtccgggattgtgactgttcgtttcttcagctctgtgcctccagaatttcatgtttatgctgcacaaggc

SEQ ID NO: 568310 - DNA, 175 bp, Homo sapiens
atccccgatggaaacgggttttcatcttataaacccagacagaagaattctcagagtcttctttgtgatgtgtgctttcaactcaccgagataaagatttctcttgatagagcaatttggaaacactctttttgtagaatttgcaagggtacattgagagcgctttcaggcctat

SEQ ID NO: 568311 - DNA, 616 bp, Homo sapiens
agcggaggctctcctgcggagtccccgcgagagtaggggcggtcggcggcgctagtctgctgcggagcgccgggtgccaccggaccactgcgggtaggcctatggccgtagggtcgaggagctggtctgtcgcccggtggagcctcggcttacctccgcatgtcgcccaggctgtccttccacgcggctatagacgtagccagcgcagaagtgtcttcgccgacataagggactgctgtggtggcgacacgcgggaagtggggctccgtgccgagttgaacagtggcaagcgtgagcagcgagtggaacttggcgtgaatctgggacccctgactagaatagaagggcaatacgggtaatcgggccaacccatcccataagctgaagaagagcaaacatgccgcagtgccccgaggaaggaagaggaggcaggtgcgtggtactgtacagcattcccgctggcaagcgcacagccagcgccatgggagacatgatggaagagttcgtgtacaaggtctgcgagggacgttggagggtcatcccatatgatgtgctccctgactggctaaaggacaacgagtatctgctagcatggtcatagacctcccatgccctc

SEQ ID NO: 568312 - DNA, 197 bp, Homo sapiens
agcgtctcatccgggtccccggctcacggcgagccgcttggggccttcggtctctcttctcgttgtgactcgtttggcacattattggtccttcgtgtcttgccccttgcctgatgtctccgtttacgtgctcaagctctcggcattgctgtagggcgagcgaacttgtccttgtggttctaatttggctgctatat

SEQ ID NO: 568313 - DNA, 307 bp, Homo sapiens
aggcggtcctatctcgtcatagcctacagcagtgccgtcgaatggtcgacgccgctctggccacttgcagcccagaagaggcccgcacggtcgtcctggagctagctgacccgagtgtcgaggttcttgtcagctgatacatgatcctcaatccgctaaagcccccgcagagggggctttagcatgctccgcgggggaggacaatggggccatgactaaaactgccgtggtcacaggagcaagttcgggaatcagcgcggtcacggtccgcgctttaacggacgatggctgaccgtcatctgtgcag

SEQ ID NO: 568314 - DNA, 488 bp, Homo sapiens
atcataatctgtcattatattctaaattttccccaaattctagccgagtatgtaattggaagtaacttatggaagcttaactaatttaaccaggcttggagtgcaagagattgaagagttcaaatctgacccagatgttgatgttgggtaaagagaattctctgcttcccacctctaagttggcagccctcctaaagctacctgtggagcaacctgctcagatacatcaaacatggagacagcactcaaagtagaattataaagaagatcatgtccatgttaacattattataaccctacattttgtgcataaagtgtaagtgtatagcatatcaatattaaaaagcaagcaagcagaatttggaattcatccaatccaaatgcggcatcttcaaacctccatgatgctgcttacatgtctcgatcccacttaactatcttgggctgtgacaaagtcacatggttcacacggcaggcatactcatctt

SEQ ID NO: 568315 - DNA, 1397 bp, Homo sapiens
tggtatgaaagtcttggtaatgttaccaaatgaaaaaatgcagtactttacacctctattgatgtaaatgaggctcaaacatctcaattcacatcctcgttcctacccccgcagccatcaaagcgtaaataacgtgctaatatgaacccttaaaaaaacaagaagacaaaacaaagaaaaaacaaaaaaacaaaaaagaagaagaaaagaaaaaacaacaagaaaagaaaaacacaagaagagaagagagggggcgccgagaagaaaagaaacgacacccccagggggacgcaccagagatagacgaacgacacagcataactacaagacacaaggggaccccacaaagaaaggcacgcggaaaaaataaagaacacaagagacacacggagccacagcgacaacacaaaacacgagaaaagtaaaacgagaaacacacagtgacaggaaagtgagaacataaagggaagaaagagagaccccagaaccaggggcgcgtgacagacaataaatcagtaggaagagaacagcacacacacgccagaggacaagaaagcaagaagcgagggccagcgcgagaactggacgaagagaacagacgacatgcgccacgagggcatcgcagcgcaggaacgagaggcacaagccgcacgccgacaaagcatgagcgggagcgcggcgacacaaaacacagtcagccacaccagcgcgacaccgaggcgagcccgaagtgagccacacacaccaggaccacccaacaagaacacccacaccacgcgagagagagcacgcaaacaagacaacaccacataacgaactagaagccaacagcgcccaccagcagacacaaagcacgagcacgaaagcagcgccgcaagcaaagaggacacccgacgacaacgccaacacacagcgcagccggaccaccacaaacagacgccacgcaacccagcacgacgagccagacaggaggaaaggagacgcaagcgagagaacagagcaaggagagccgagggaagcgaagaacggtaaaaagaggagagcgagacgacgagagagagaaggaagactagcacaaaggtcgcgcgagcagcagcgcagaaggccgagaagagaaagaagaaagaaggagagaggccagggcgagacgcacacaggacacgcaacgagcacgcggcagagaaagggacagacgacgcggaagacagacacagagaagacgagaggaccagcaggcacagagagccgacacagaggaagaacagaggagcgaaacgcaacgaggcacaacaacacaaccgacggcaggcacaggaacgacaagaagagccaggcacctaagcagaacgcgcgcagacaggcggcgagcgcgagagagggagcaaaaaaagcgcagg

SEQ ID NO: 568316 - DNA, 207 bp, Homo sapiens
  misc_feature (171)..(171): n is a, c, g, or t
acaaggtatagctcttgagactaggctgtaaaaagcctgtggcttcgctttagctctgcctgattcacttactctggaagaggaccctcaatggccctgtggagagatccacgtggactgaaccgcaggcctctggcccaacagcgcagctctggactatgcaagccacgngtcaatcccatcaagccacggttcaaccgcacaagc

SEQ ID NO: 568317 - DNA, 257 bp, Homo sapiens
ctgatctagaggatccgggactgggtcgagttcaggagtgatctgaagatacagtcagaaagataggaaagacgggcgcatggtcactgctgtaatacaaactttgagaggtcacggtgggcggatcatctaaggtcaagagttcgagactagcctggccaacatggtgaaaccccgcctctactaaacaatacaaaaattatgctgggggcatggtggttgcgtgccctgtacatccccagctactctggacggct

SEQ ID NO: 568318 - DNA, 126 bp, Homo sapiens
cctagaggatccaggccggtcagaaaggaaggctgtgagagagggcaggtttgcgggcttcgtccccttttccaaagacaacaaagagtccttccccaactcccaactcaaccccttttggaacta

SEQ ID NO: 568319 - DNA, 460 bp, Homo sapiens
  misc_feature (190)..(191): n is a, c, g, or t
  misc_feature (338)..(338): n is a, c, g, or t
aaaggcaaagggagggcccagaacccgggggtgtcccccgccccccttccccgagggagattccaaaacccaggcaagccctccctgcctggttaaaggtttttttccccccaaccttcccttggggtgggagagccatgggcgccgggggaaccattcaaagaccccccctcccgtggttgggttccgnngggtccttttttcttttaaacaagcttcccgtggacaaaaacaggtggcagcagggggaggtttttttttggtccgtgaaggatgggggtttggccaaccccttcacgcaaaagagcctttccctgttcccgggttaattagttggncgggcggcaagccccccctccccggggtttttgggttgcccggggatgtttgggccgttccccgtttttattttttcccgggcccccgcatgggaattaagcccccccccctgccctgggga

SEQ ID NO: 568320 - DNA, 386 bp, Homo sapiens
tttccttgtcagtaactactttgctgacttctttccaatttctttctctaaatcccccaaccaatccctgcacagacccttttggggctggtgtctgccaacattatgttgaagttgccggggacacacagatttctgattttaagctgtttaggggtttgcaccgtcttaacagcaagcaaaggtgagtgacttgtacgtaactcgctcaagttgacacagtcggagagtggaagctgggactcaaagccagcctgtgacttcttagaccacatgctgtctcccagcattagttctggaaaaggaagagcccccaggaaacaccattctgtccatcacatccctgtgcccctttcatcttgacggacccaccctagcactggccc

SEQ ID NO: 568321 - DNA, 1035 bp, Homo sapiens
  misc_feature (33)..(33): n is a, c, g, or t
  misc_feature (67)..(68): n is a, c, g, or t
  misc_feature (104)..(104): n is a, c, g, or t
  misc_feature (107)..(107): n is a, c, g, or t
  misc_feature (118)..(118): n is a, c, g, or t
  misc_feature (128)..(128): n is a, c, g, or t
  misc_feature (160)..(160): n is a, c, g, or t
  misc_feature (164)..(164): n is a, c, g, or t
  misc_feature (166)..(166): n is a, c, g, or t
  misc_feature (179)..(179): n is a, c, g, or t
  misc_feature (184)..(184): n is a, c, g, or t
  misc_feature (205)..(205): n is a, c, g, or t
  misc_feature (210)..(211): n is a, c, g, or t
  misc_feature (232)..(232): n is a, c, g, or t
  misc_feature (243)..(243): n is a, c, g, or t
  misc_feature (266)..(266): n is a, c, g, or t
  misc_feature (276)..(276): n is a, c, g, or t
  misc_feature (310)..(310): n is a, c, g, or t
  misc_feature (378)..(378): n is a, c, g, or t
  misc_feature (424)..(424): n is a, c, g, or t
  misc_feature (429)..(429): n is a, c, g, or t
  misc_feature (451)..(451): n is a, c, g, or t
  misc_feature (467)..(467): n is a, c, g, or t
  misc_feature (548)..(548): n is a, c, g, or t
  misc_feature (557)..(557): n is a, c, g, or t
  misc_feature (613)..(613): n is a, c, g, or t
  misc_feature (1006)..(1006): n is a, c, g, or t
acccccaacaccgcaacacaaatcgacagccantcctcaggcggcacttttttggagtggagagcanngccctgaatgagccacctacatggaacatagtattngcnatacgcaactngagccccaancgctcatgacacgcacagaagcgcggctgtanacanangcacacacacgcngggangctcatgcggacccccactcnacacnncgcaacacgccagcgccagtngttcccgacantcgtcatctatacagtgcctgantctgggttcngggcctggctcatgtaagacaggcagcaaggtcngggtgccatgaatcacacctgcaatcccagcactttggaaatctgtggtgagaggatctcttaaagcnatggccttgaaaccagcctgggtaacaaaaccaagcccttgtatcnaaaanacaaaagggcaggtagattccngataaataatgttgcngggagggggtgataaaatacagaaatgtgatacacagcaaaccctcaactgctgtttcattggctcccagtgtcttaatcngtgtctgcnaacactttaaggtacatctgaaataccccccaaacccagaaagcttttcaacagcnaggttgtccaagaacttggaaaattcaccttctgatgtcctccaagacagattccattttttatacaccttatttgctcagacctgtaacttcagcctggagtgaacacagacacctagttttcctcaaactcctcttgggctttagagagaaggtgctggccctttgagccaagcaggttattggttagtagtacctctcagctctgaaggtttttcaatggtatatagcaacaagctgctctgtaagatagaggcagactgtcatcaggaatacctgtattcaccctgggaggcagctgaattccccaggatagattatgagatgctgggaacattactgtaacgctggctttgcataaagatgggtcttgtccccattccttcaccagtnagctcttgtgggctgaacattgcaacaac

SEQ ID NO: 568322 - DNA, 560 bp, Homo sapiens
  misc_feature (128)..(128): n is a, c, g, or t
  misc_feature (500)..(500): n is a, c, g, or t
ggtctctaagttccttggctcactacagccttcaagcccctggggctcaagcaatctgcctcccaaagtgatgagattacaggagtgagccaccgcaatcggcctagtggatagtgtatactaagcancatatacccctgcttttgcctagaacatactgaaaaacatggcattaaaaccaatcacaaaagttgggagctgagaaaaatcatatactgtaaaacaaatctgacagatattaatctcaggaagctcctgaaaatgtctcaagaactcctatgctgcactctccctaataatttagactttctacagatattttctgatcatctaccgtgtgtcaggcaccatgccaggtaccaagatgccatggtgaggaatacacaaaaccggctcctgcttgcaggacacctactctctcaaacagtgcttgccaagctcgactgatcacaacttgggagcttgtttaagttccaaatcggcttccctgcttaggtgancacaatccgtggcatttttatcaggtgctcccaatgattcctacgctctaacgggtttgg

SEQ ID NO: 568323 - DNA, 1241 bp, Homo sapiens
gtctatctcagtgacctgtgtgtggttttgcttagtgtgcgtgtgctgtgtgtgtgtgctttttctctagtgtgttttgggttggctggtggccctggtgccttcctgagtttccatgagcgcagacgtgggacacgcgtgagccaaccattgccactgtggcccggatgcttgtggtttgtctgcacaaaccttacttgtgaccccgctgtgatgacccttcgacgacaatctcgtctctgaccaagatgctgaagcttgatctggcgactgtactggggctccgtgaaccaaaacgttgacggtcttgggacgggtacaaattttacccttgtgccaaagactcctgcaaaggcctgcccggtgacaccttggcttgactgctttgcattgatgaccaggacccaccggtgcgtcttgtatctgaccgtgcaaattggccctggcatgcgggagcgggttgtgttcccggcatatgagggttgcttggattgatgggcaaagactgacagctttgctttcacattcctgggggccctgcacagatcagcaggcatctcctttagaacgagagacttgccttgggagaagcccaagtggacgttaccaatgcttggtggcttatgggacccaaaggttcctagtcccaaacaaatggattccagataaagaaacaaaacacgataacatccatagaccaatcacagcgattagctcagctgcagcattgtgcgcatctccagaaaagaattatatacaaaaaacctaccgcttttgtgtggcggtgtgccccaagagtgagtgtgtgtctgaccaactgtgtcaaaccaaccggtactccctcgtaagctccctccgatcacgagaaaagatagtgtagaatcacaccgatcatcagcgagggcgtggtggaaacagaggcagatgtctgaacacacaccatgatgtgataagtgggagacaagtgggtctatctaccagcggagtcctaacgggtcccaactcaattcccgcctcgcacctgtggagagagagtaggcagaccgcaggtgaaatggaggcagggacgaagggctttgaggttagtatggttaactggaaatcggtagctgggaatggtagcgtgcggtgcgttgtgggtgcgtgtcgaaccgggaatgggaggagagaggcagctaatggattgtggtgcaggtagcgctgagggagcgggtagggtgtgctaccatcgtgagaccggt

SEQ ID NO: 568324 - DNA, 89 bp, Homo sapiens
  misc_feature (16)..(16): n is a, c, g, or t
  misc_feature (52)..(52): n is a, c, g, or t
gaatccggaacgaganctagtcccgggttcaagcaattcctcatattgaagngagtaataaaataaagaaatgtgtaatttataaatta

SEQ ID NO: 568325 - DNA, 1008 bp, Homo sapiens
tcactgggaccaaaatttagtttaatcattttaattaacaagtgtatttaaaaaatcataaagggggttgcataatccaaagtgtgaaacatttattcttcagtagcgttcagaaatttaacaaccaatggtaaaccgatgcttatccaaatccagtcttcgttggctatttatcaaaacttctgagatctagtatttaaagcggttcacattcataaatgtattagtttagaaattaagtattggtacactgtgtggaataagggttgtctgaaagcagtttatcaaatataaagaagggtttcatatctaagaatcagcaggtgagggaagaaattttaaacacctatcaagaaatcaagtaatccattttaaaaatacacagaaccgagtgctgctcgtctgtcataaaagagaccatgtaaacattaattttaatagactctgggataatatttgaattcccccaacagaggccttcaatccgtacttaaagatattttacacacagtaaccatcaggatcaactgagtaaaaatctcaggtataaaccagtgcccttaaacatgtgcatattccctaagcaggaacaggttactttggagcaacaaagctgacttgtgtaaccttcccctccaatgttacttacacataacactgctgatggcacactctttcacaaacactcgggcatacatggcaatcgccccaacaaaagaacagcgaataaaattcgtccaattataaaaagttcacgcgtaaaacaggaacacctaggcgcaagacagaaagagaaagaaggaaacacgcgcaacaacagcgactaagagacacaagagctacaaaagatgtaggcacaagaagaaacgtgaaaaaatagagaaacattagtccagcaaacataatagaagaaacacacatagaacaagcagagggaaaagtaatgtgacagagaaaacgccacgacggaaagtggacacacacctaccatcgcttccttgccaaagg

SEQ ID NO: 568326 - DNA, 233 bp, Homo sapiens
  misc_feature (102)..(102): n is a, c, g, or t
  misc_feature (164)..(164): n is a, c, g, or t
ctgcaacccacacctgggtccagctgactccttagcctgtgtgtcctttctatcaacaggctgtaagggacccacaccacctcgtgtgccttctctcctgtnactgagctgtaggactgcaagtcccttaagacagggagattttaatctctggatgcccagtnatagcccagtgcttggcactgtcagacgggggaacaaaagtctgttgcagtggacgaggcgctgcccct

SEQ ID NO: 568327 - DNA, 154 bp, Homo sapiens
aagctgctaaggtgatgaagtagtcctggagatagacagtgtggcaaggctgtacaacaatgtcagttgtatgtatgccattgaactcgtatactttagaaagtcaaaatggtaatttttttattaccttttattttctaatacctgggggaaa

SEQ ID NO: 568328 - DNA, 679 bp, Homo sapiens
aagggctgctcctgtggtgtcagagaaagacagccccttacaagaaatgtcaacatccagaacttccacataagctggcaaggatggcctcgggttctgtgcttgtgatccaccgagatcggcccgagcttgattgactacgggaagtctgcggcaaggatagatcgcagctcacagaatctgtaatacgcgcttattagacgatgagcacgaggaaagtgagcctggatcatccaccaatgatgctggatgccgaagatcatcgtctggaagctggcgcgaccgggatgaagaaaagcccatcagtgaacttaacgctggtcctagaacctgtacatagcgcaagcggccatatcgtcctgggaaggcaccaaggaaagggcccgggaggaacaatgcggagccaagtgcgacgatcgtgcccaagggatgttaaggggcgcggatccaaaaccccaaggggaagggaaaagcggagcccaaggcgtctacatggcacaggacttaaccgaaaggaaatgggctggcgcgccaaggtggaaattccctggtacaggacgttgcgattcctgtctcgcaacaaaattcccccgttggggcatggaggaaaccctgtgtgttgcccccggaaggaaaacaaccaattggcatttgccaattgtgaaaaccaaggaaaagc

SEQ ID NO: 568329 - DNA, 156 bp, Homo sapiens
tagcggacgttatctctgatcgctcccgactcatgagtctgtctgcttcggctaccaaagtgctgggattacaggcatgagccaccgagccggcccactgattttttcttgtatttttctcccaccatctctctcaggctatcgcattttattaat

SEQ ID NO: 568330 - DNA, 106 bp, Homo sapiens
tcaggtcactgggtctgggatcagattctgtgaagttagtgagcttcaggcacgtgcatgtgtattgtgtgcatagtaatgtgtcccctgtgtcatgtgtgcaatg

SEQ ID NO: 568331 - DNA, 177 bp, Homo sapiens
  misc_feature (161)..(161): n is a, c, g, or t
aacatatacgaatcgagctcttaccagcctgctgcacagctgcttactcaccagtgtttttgaggcacaggcttcaagagaacaccaccactgagtggcctggagggctctccctgcttggagctaggtagtcaaacatgtcaataatcaggccgaccttnaggctctagactttgg

SEQ ID NO: 568332 - DNA, 210 bp, Homo sapiens
  misc_feature (141)..(141): n is a, c, g, or t
  misc_feature (149)..(149): n is a, c, g, or t
  misc_feature (194)..(194): n is a, c, g, or t
gctcgaattcgtcgagtggagtcttggcaggttctgttcccagccggtcctttgagatcctgcctcaggggatgtgaccctatatcatcctgatatcccaaggagcaaaaaaacaaataccctcccttcggggttttgggnggccttgnagacccactctgccctccttgggctcccagactggagcagaacanaccacacactgcccaa

SEQ ID NO: 568333 - DNA, 122 bp, Homo sapiens
aggatacccagctgttcttcatgactgtatctagaaaatttactactgtggcagatgaagactgattaaatcgaattggggggaacgggaagggcctgtggttcttctttttgattaattgc

SEQ ID NO: 568334 - DNA, 189 bp, Homo sapiens
ttgcggatcctgtggaatcctcctgctgctttcttcataaaccagttgggatctccacggtagtgcccatcattcttggtcactgccgtggagatcccaactggtttatgaagaaagcgcaggagcatatgagggaattcacagcagagccagctgcaggagggaaagcatgtcattggccttcagatg

SEQ ID NO: 568335 - DNA, 387 bp, Homo sapiens
tccggcgctgtggagtagtcaataaaaagtctcatcatatggcttattctgtgactcgttattgtaccgatccgtagtgtctgagtactatcacgaaacaaatctgtgcaagataccagttgacattcagcatatattactatatatttcgtgttctatgatgcaaagatattgatcaagacttaagaggtgcaacaaatgtgtcattgtgtcttaacacgagcatgtcggacaactctcgagatttaatatactgatttaagcacagtaaattagaaagaccccatttagtctcattcaggagcggtccattatgtcgatcatctagaatcagcatggattgaccaatctctgaaagccgggagccccaggtccagagaatcatta

SEQ ID NO: 568336 - DNA, 145 bp, Homo sapiens
agcttgctcccaatcagctcattgcaaaagtgttgtcccaccctgcggtcggaaaggcaaatccattcaggtggtcatataagtgccagtgcagaggaatctgtgttgagtagtataattcagtcatccttcccataccagactc

SEQ ID NO: 568337 - DNA, 400 bp, Homo sapiens
acagcactgactgagtctctctctttttttcttcttcagtctgtttggtaaagatttgtcattttgtccatcttttgaagaaccaactttggtttcattgatttttctcttttgtttttctcttctctatttatctctgctttgatctttattattttcttccttctgctagctttgggtttagtttgttctattttatttttttgagacggactcttgctctgtcgcccaggctagagtgcaatggagcgatctcgggtcactggaaactctggctcccaggttcaagtgattctcctgactcaggctcctgagtagctgggattaccggtgcccggcaacaagcccagctaatttttgtatcttaagtagagatggggtttcaccatcttgaacaggc

SEQ ID NO: 568338 - DNA, 274 bp, Homo sapiens
cgctgcccataggtgctgtggaccaactgagctgtgacagctcccccgccacagaatacgccagccgcatgcggaacggagggagctgtgtccagcctggccgctgcctgctgcctgcaggatggcggggtgacacttgccagtcagatgtggatgaatgcagtgctaggaggggcggctgtccccagcgctgcgtcaaacaccgtcggcagttactggtgccagtgttgggaggggcacagcctgtctgcagacggtacactctgtttgccca

SEQ ID NO: 568339 - DNA, 443 bp, Homo sapiens
  misc_feature (58)..(58): n is a, c, g, or t
  misc_feature (76)..(77): n is a, c, g, or t
  misc_feature (79)..(80): n is a, c, g, or t
  misc_feature (83)..(83): n is a, c, g, or t
  misc_feature (90)..(90): n is a, c, g, or t
  misc_feature (92)..(92): n is a, c, g, or t
  misc_feature (102)..(102): n is a, c, g, or t
  misc_feature (125)..(125): n is a, c, g, or t
  misc_feature (330)..(330): n is a, c, g, or t
  misc_feature (427)..(427): n is a, c, g, or t
gataagacggcgtcggtgttgcagtctgtgtccttggaggtgaccagggccactgcangcatggtgctagagctgnncnnctntgaccgngngggaagcaangcccgggagatggaaccaaaganaaaccatttaaaacaagtctaaaagctttaataacaataaggaaaaaaccatttcctaccatttacgtagattcacaaaaagaaaataagaagtaaaatgttatttctaaatcacagttaaagaacattaaaaagatataacatagaaaacaaataaagagtaaatccgcggaaaaaaaagaaacagaagatagtttactaaaanaaaagaacctagaagaaacaaagaagattaccattaaaaataatccaagtctcccagagccaaaatatataaaaattaatacattagaaaaatatangaaccaaagagtgaaa

SEQ ID NO: 568340 - DNA, 863 bp, Homo sapiens
  misc_feature (621)..(621): n is a, c, g, or t
  misc_feature (783)..(783): n is a, c, g, or t
gagtgggcaggcccgagcttccacccagttacccccaggccctgaagtgactcggtcccggatgaatatctcagtctcgattcacctctaagcctgagacccactgtaatgcttcgcagggtattccctgtagaagtcgaccgagtctgtactcatagccagtctcagggcatcacattgggacttgtcacggcagggaatgccgcacgtaggagatagaagcactcagcactatctagcccctggcacctacatggcgtggaaggtcgacagactgacgtgcgccccatctcagcgagtcacgttttgagcgaggtcggtattcaacagaccttggatgacccatcacggcccaggccccttggggtggttgcctcgcggtgcgacttggttactagcgcatcgcgcgatctggtcgttccccttgacgacgttagcagactagactgcccaacggctgctggattgccaaggatgcttcagcaactagactcagaggattgccccaatcgagcacaaataacggctcgcacatgcatgttagccagacatccccttgtgtccatggcgatagctctaaatagaagagcgtggagcccaccttgtggcacaaacaggtcntatctccaaagttggccgtggtttaggacaaattctacccaataaagcccattgttaaccgacggttatcggaaatctcgcttttccccaatcccaacgtgtaattcggatccgcgcggcttcaaaattgtacacctaatggcgaatgtattgtcgaaatcntcatattggcaatctaaccacattgttttaccttttccccattcatttttgctgcaacttggctgaataaacctaggtgt

SEQ ID NO: 568341 - DNA, 107 bp, Homo sapiens
ctgaggtatttttcacagattgattgaattaaaaaaactcaccttgcattttcattgtgggtgcttagagaggttctacaaaattcaactgtgaggttatgctcata

SEQ ID NO: 568342 - DNA, 338 bp, Homo sapiens
taaatgggggttttttccccccccccccagtggccccccggggggagcgggcttttttggaaaacccaaggggggcggccccccgttccaaaaaaattttttcccgggtgggtccttttgggttaaattttcctttaaaaccccttggggtagggttaagccttttaaaaggtggttttgggaattgggcccccattctaatccgggggggatggggggggccctgccttaaacccttttttgggcggggattccccttgggggggtttttgctaagggaacccgggtaaattttttgggaacaaaattttttttttaaaaaaaaggctttttcccca

SEQ ID NO: 568343 - DNA, 644 bp, Homo sapiens
  misc_feature (314)..(314): n is a, c, g, or t
  misc_feature (576)..(576): n is a, c, g, or t
agcagtggttcagctgtatgatgggaatatgaatattccagaactttctgtatgccaggtgattgagaacaaccagtctttaaatattaccttggctttttaaaaagtttttggccattccattttgaaacttaaagatatttttttaaaaaaataaaaatcttggtccagggtccaggtgggtttacccccttgaaatcccaacccttttgggaggcgcgggccggccaaaatccaagggtaggggagttttcacaaacctttttcttgcccaaattggggggaaacccccgcttcttctataaaaacaaaanaatttcgcccgcgcccccggtgggccctaaaatctcaagggggtggggggggggagagaattttttttaccccccgcggcggggggggtgtgttttgttttataagagaaaaacaatttttctttcttcccgggggggtggaaagccccgcctcccttctttttttcttataaaattttttttttattttataaaaagaatatttttttatttttttgtggcggcccgcgcaaaaaaagaggcttttttttttgttgggacnccccccctttttgtgggggggggggggggttaatatatatgggggggggcgggggtgttttttcacgg

SEQ ID NO: 568344 - DNA, 160 bp, Homo sapiens
ccttcgagaactcatagaacggaagaccagctccttggatcgcaacgatcaggtggacatgggaaggcagtggcttgcaatccagaagttgcgaagcaaaatccacaaaatagtagataggagagccagcagaggcaggaaacttcgggttcatgtcctt

SEQ ID NO: 568345 - DNA, 489 bp, Homo sapiens
ggaccgctctagagtatccccacctcctaccccacgattcagtttgccagtattttactgaggatttttgcatcgatgttcatcagggatattgttctaaaattctctttttttgttctgtctctgccaggctttggtatcaggatgatgctggcctcataagatgagttagggaggattccctgtttttctattgattggaatagtttcagaaggaatggtaccagctcctccttgtacttctggtagaattcggctgtgaatccatctggtcctggactttttttggttggtaggctattaattattgcctcgatttcagagcctgttattggtctattcaggaattcaacttcttcctggtttagtcttgggagggtgtatgtgtccaggaatttatccatttcttctagattttctagtgtatttgcatagaggtgtttatagtattctctgatggtagtttgtaattccgtggggtaggaggtg

SEQ ID NO: 568346 - DNA, 395 bp, Homo sapiens
  misc_feature (363)..(363): n is a, c, g, or t
  misc_feature (387)..(387): n is a, c, g, or t
tgtgaggggcagccagtgacgtcacggctggctgtcatctgtggaacgtcttcttgtcacatggggatcagcaaagacccgatttttgtaccaggcgtctgggggccttatttctcagccatggtacctgggttctggctgaatgaaggtggtcagagcgttactggaaaattgatagaccacatggtacaaggccatgctgcttttccagaactacaagtaaaggccacagccaggatgccagagtatatattgcatatttgaacagtcacctgggatcttgattaaggaagggttcagcctgtggggttttcctttactgtttgattttacatgtttgggccagatttccctgggcaaccngttttccctttaggcagatcttgnacattaaa

SEQ ID NO: 568347 - DNA, 156 bp, Homo sapiens
tcttccctctcgccttgagtgaagaacatcccaagccaaaaagaagttaactacagtgtattcctttgcaccgatccccaccccagttcaatcccggaagggacctaattaggaaacccttctttactagatatcctggacccctgggcttgtgaa

SEQ ID NO: 568348 - DNA, 244 bp, Homo sapiens
ctcaccaagtgcatctggcagcttctcagcagagcaccatggctcgttctggaaagggccagtcggcaagtatcgcccctgtacacctctgaaatccacactcccaattctttctgcgacagaatactcctgtatgttagcgatcacagatcctggccccagaggcttgggccttactctcctccccagcttccttctcctgctgctcacgaaaccctttcccctctgagcacgcagggacaag

SEQ ID NO: 568349 - DNA, 274 bp, Homo sapiens
cacccatagagtacgacaccaatgaatgctaatatacactttataggcacagacagtccagattctaatttctggtactgctagaatactagctactagctctgtgcatattcaaccactattcctatacaataccatcctctacctattgaacgtgctgttgtgatgattaaatcggctcccagaatcttcacttcccagtaactttatctcccagattccctcccatatcagaatctcctcttaggcggttagttattcaacttcttcctga

SEQ ID NO: 568350 - DNA, 595 bp, Homo sapiens
  misc_feature (21)..(21): n is a, c, g, or t
  misc_feature (59)..(59): n is a, c, g, or t
  misc_feature (89)..(89): n is a, c, g, or t
  misc_feature (95)..(95): n is a, c, g, or t
  misc_feature (122)..(122): n is a, c, g, or t
  misc_feature (136)..(136): n is a, c, g, or t
  misc_feature (152)..(155): n is a, c, g, or t
  misc_feature (164)..(164): n is a, c, g, or t
  misc_feature (257)..(257): n is a, c, g, or t
  misc_feature (287)..(287): n is a, c, g, or t
  misc_feature (291)..(291): n is a, c, g, or t
  misc_feature (295)..(295): n is a, c, g, or t
  misc_feature (311)..(312): n is a, c, g, or t
  misc_feature (352)..(353): n is a, c, g, or t
  misc_feature (355)..(355): n is a, c, g, or t
  misc_feature (364)..(364): n is a, c, g, or t
  misc_feature (368)..(370): n is a, c, g, or t
  misc_feature (383)..(383): n is a, c, g, or t
  misc_feature (388)..(388): n is a, c, g, or t
  misc_feature (443)..(443): n is a, c, g, or t
  misc_feature (477)..(477): n is a, c, g, or t
  misc_feature (492)..(492): n is a, c, g, or t
  misc_feature (511)..(511): n is a, c, g, or t
  misc_feature (523)..(523): n is a, c, g, or t
  misc_feature (584)..(584): n is a, c, g, or t
acaagggggaagtgctgggcnataattaatgtttttattaaatttggagggaagttttngcagcctttggcgtagggctggcgttgagncccgtnaggtgcaaagcaagtgtcgttgatcgnaattgctagttttncccccccccccccccnnnnccccccccnggcgtacaccgaccgcgcagggaaacatcgagagtgtaaataaatacatcgcctcttgttcggatttttgctactaccgaaaatatgtaaatngtgaactctgttggctctttttggatatantttnatanttatgtgccagatttnntaggaaatctccagtctaatagtgtcttataaatatctanncnccccccccnacannnctcaacacctatntactnagctctagttcaggggaggtaacagcaagttgcattaataattgggttacttaantaggtaagattttcgtagataattgttaacgatnaataaaaatataggnttggtaatgttttggttgntacagtgagcgntttttggagttattttattttgggtaattgtgtatgctttgtatatgaaactggttggcanttattgctagt

SEQ ID NO: 568351 - DNA, 325 bp, Homo sapiens
aagagctaagaatcagattgcttattaaaacagaatttttttattttttcctagaggaactcatacttaacaaatccagttaaccataatactccacccaaatcccaaatttaaatgctttatgtccaccctggcatagtaaaattataaaagggtatttctaaattataatatttatccataatgcaccatttaaactgtcacatttaccagcagaattatgaaatcaaaaacaaattctacattcaagggacaaacgatacatgctcttccatggtttaaagagtccattccattcttggtagtatactactcccatatttta

SEQ ID NO: 568352 - DNA, 101 bp, Homo sapiens
cacagtgagcacagttggaaagggtcagtgagatatgttactatggcatcagtgaggacttaatgagggtaagagactagtgagggcacaggaggatgaag

SEQ ID NO: 568353 - DNA, 164 bp, Homo sapiens
atcgagctcggtacctttcctaatcacataacctattcccccgagcatctcattacaatatacacaccaagcaaacaagtgttcaaccagtaactactactaatcaacgcccagtaagtcatacaaagcccccggtaccaataggcatcctcccgaatcaaccc

SEQ ID NO: 568354 - DNA, 269 bp, Homo sapiens
  misc_feature (223)..(223): n is a, c, g, or t
  misc_feature (246)..(246): n is a, c, g, or t
cgaccagtcagtcaggatgacacttcggcatcatctcttccctctcccatcgtatttggttccctttttttttggttttgtttgggctaatgaaagagcgccttgactttaagaggtttcgtagtcaacttctctagccatactggggtatgctacacacgtgagcggggggacctagttgaatgtgtctttacgtgtggctatgtaacaaacaaagcgaaancaactgatcttctatacccctgncctcacagaaaacccaataagac

SEQ ID NO: 568355 - DNA, 353 bp, Homo sapiens
gggagacaagcgaacaatacagtcaggatggctaaaggtgaccccaagaaaccaaagggcaagatgtccgcttatgccttctttgtgcagacatgcagagaagaacataagaagaaaaacccagaggtccctgtcaattttgcggaattttccaagaagtgctctgagaggtggaagacgatgtccgggaaagagaaatctaaatttgatgaaatggcaaaggcagataaagtgcgctatgatcgggaaatgaaggattatggaccagctaagggaggcaagaagaagaaggatcctaatgctcccaaaaggccaccgtctggattcttcctgttctgttcagaattccgccc

SEQ ID NO: 568356 - DNA, 733 bp, Homo sapiens
ttaatctacatcgtcgagcggcgcctttgctgtgattacatggcatgagccaccctgatccggctacacatttggatttctttatgccatgttattttttattttgggggattgcttttggcatttaattttgttatggccgggcatggtggctcagactaaagtcccggcacttcgggaggccgaggcgggtggataccacttgagcccaggagtatagaaaccagaccattgggcaagcgtggtgagacccctgtctctacacaaaaaaaaatacaaagattaactgggtgtggtggctcacacctgtggtcccagctacttgggaggctgaggtgggaggatcacctgggcctggggaggttgaggctgcagtgtgccatgatcgcgccactgcactccagcctgggcaacagagtgagacccccctatctcaagaaaaaaaaaccaaatttgtttcataattatgtaaattaggcctgggcatggtggcttatgcctgtgatcccaacacttgggaggccgaggccgggcggatcacttgaggtcaggagttcgagaccagcctgagcaatgttgtgtttaaaaaccccgttattctaccaaaaattagaaaaaatgggccatgcaccgcctggtggtccccagctacttgggagggttgaggcaggagggatcctttgatccctgagaggccgaggttgccgtgagttgggatggtgccctgcctcca

SEQ ID NO: 568357 - DNA, 161 bp, Homo sapiens
tactttccaagaatttgtgtggctgtgaaactggctaagcacagcttgttccttttgctttagttagactagcattaaaagttacagaattggcaggctacgtgcgcgtggtataggacgtggtatggatggtatcagggcgtaccgagcctcgacattcg

SEQ ID NO: 568358 - DNA, 411 bp, Homo sapiens
  misc_feature (4)..(4): n is a, c, g, or t
  misc_feature (11)..(11): n is a, c, g, or t
  misc_feature (29)..(29): n is a, c, g, or t
  misc_feature (47)..(47): n is a, c, g, or t
  misc_feature (62)..(62): n is a, c, g, or t
tttnaaatttnagccccaacccctaaaanggtgtaacaaatgaaaancctaaccctaattgnggttttaaaatttgcaattccccctaagtgaccctaatgatgttgaaacatgtttttccatgttcctttgccccatctgccgtattctttttggtgaaaattcctattcatgttcatgcctcattttcctaatggaatctattttttactttttttttggagacagggtctcactctgtcacccagattggagtgcagtggcacaatcatgtctcactgaagctttgatgtggtcccggctgctaggaaggctgaggcaagagaatcgcttgaaaccgggagatgggggttgcagtgggccgggatcacgccattgcactccagcctgggcgacggtgagactttgtct

SEQ ID NO: 568359 - DNA, 918 bp, Homo sapiens
  misc_feature (74)..(74): n is a, c, g, or t
  misc_feature (96)..(96): n is a, c, g, or t
  misc_feature (121)..(121): n is a, c, g, or t
  misc_feature (151)..(152): n is a, c, g, or t
  misc_feature (154)..(154): n is a, c, g, or t
  misc_feature (165)..(166): n is a, c, g, or t
  misc_feature (219)..(219): n is a, c, g, or t
  misc_feature (247)..(247): n is a, c, g, or t
  misc_feature (325)..(325): n is a, c, g, or t
  misc_feature (390)..(390): n is a, c, g, or t
  misc_feature (410)..(410): n is a, c, g, or t
  misc_feature (455)..(455): n is a, c, g, or t
  misc_feature (480)..(480): n is a, c, g, or t
  misc_feature (510)..(510): n is a, c, g, or t
  misc_feature (528)..(529): n is a, c, g, or t
  misc_feature (566)..(566): n is a, c, g, or t
  misc_feature (579)..(579): n is a, c, g, or t
  misc_feature (594)..(594): n is a, c, g, or t
  misc_feature (622)..(622): n is a, c, g, or t
tgcgtctatacaaaaaaccaataaccaaaacataaagcgataataataaaacactctgcttggtcctcccccanccccccacaccatgtgcggganacgcggggggtctgaaacacgaagncgaagacaaaccccctcaccacacaccagnngngtcagccaagnncacttctcggggtcagctagggcagctgtgtgggtgggacaggggtgtgaggnagctgtccccagaactccctggggagtnaggggtgggcaaagccaactaagcaccctggagaaaaaagctggcatcttctggagcaggtgactcactccatatctnctccccatctcccctggacggtccctgaacttttcaagagaagttttggattttgggggtttgcntctcgaccctgggccctggncgccctgggggcttagggcagttggtcggtggagttcagtgaganaatcagacccagagaaggaaccaanccccttccgggccccaggcagctggagacncggaggctggaggttttnnggggcgttgctgggggaaaacagaatgggtacttgantctgaagctttanttgccaggtccacangggcggggagggggtgtcaggccctggncccatgcccaggacagaaaagcaggagcagaacactatcccaagaaagaccctacggaggacctctggaggcgcagggtgcagcaggaagttacaccccggcttccccagctcaggcacttttctgtcttgccccatcgcctgcacggagagcctctcagatgaggaaccgcactgggggccaggccgcctaggcaagcatgtggtctgcagtggggtacgggggcctgaggccgtcgctgtaggtgtcgatggggtagtctccatccatgtccatgtgcatctccagcgggtcaa

SEQ ID NO: 568360 - DNA, 697 bp, Homo sapiens
  misc_feature (238)..(238): n is a, c, g, or t
  misc_feature (516)..(516): n is a, c, g, or t
  misc_feature (529)..(529): n is a, c, g, or t
  misc_feature (542)..(542): n is a, c, g, or t
  misc_feature (613)..(613): n is a, c, g, or t
agcggggggagctggaattcgcgggggagagagggttcgtgccagaaaccgccaaggccgagcctgaagtccctccacaggagggcgtgccagcgtggctgccgaggtccttatggacaccgcagggcaggcgggcggcacgcggcttccagccctcagatctcccagccgcagaagggccggaagccccgggacctagagcttccactcagcccgagcctgctaggtgcgccggganccgaacggaccccaggatcgggaactggctccggcctccaggcgccgaggccggcgctgaccctgtccctgcttcctacgcacacgttgaccccggcgctgctgacacccagctcgctgcctcccagcgttcacttccggagcagcctgagtcccgctgcgccccgcagcccggccaagctctcctgccagcttccgtccagtggcggcgcccaggtgcacatcccttccatcggcgtggctggcctctcgacccccgcggtgctctcgccagggccncagaggccatgancacacagcaccancacccttctggggtcctccatccgtgctctctcaaggagaaacacagttcaactgaaagactcatgctctngatgtggtggggtggggatccttgggaaggatttctccaggagtgactctcattaactcctccacagaaaacactcagttccac

SEQ ID NO: 568361 - DNA, 142 bp, Homo sapiens
gtccccatttttcccctggggtcccgttcctttttgggggaaaaattttttgggaccccgtcccctttttttttagccccctcataagttgtccctaaaacccagttttgtacatgtacccttaaagggataaatgccccca

SEQ ID NO: 568362 - DNA, 484 bp, Homo sapiens
taagggggccatccacctactctctccacccacaaaggctcgcctttgtggggaggataaaacctgcccaacctgcctcaccttggttattcgcattgcaaggagtcattaccatgggcaatatgggctcaggccactccttccagtttgctttccataaatgcaaactgtccctaccgtgagtcaggaatgactcctgactcacagtggggctgctgtaaacttggggatggttgagggaacacagacacagtcttccatgctccccaggtggtccagcctgctgcccagaagcaaaccatggcaggctcaccaccggttctatgccgcagggctgttgtaggacaggctgggctttctcctggactcaccttaccctgggctgacctttgcccctggtatccaataatggcctccactaaatcctgaaaaaaaaattaaacacacttccttcttaaaaataaatattctaaaagttcaaaaa

SEQ ID NO: 568363 - DNA, 163 bp, Homo sapiens
acagtaatcatgactggggactcactgtccaggcagagttctgtcgttcaggctgagctcaaggcagcagaggagggaggacagtggggaggctggggaacgtgggcctccttgcactgccaacttcctaccacttgcttaagccactgctccctgccctgaa

SEQ ID NO: 568364 - DNA, 1237 bp, Homo sapiens
gactgcgagagcagagctgaggatatacctggagccatttcctctgccctggcagccatatgcactgctcactgtgggcactgcaccgacatgcatgggatgccaaggagacaggtcatgtaggcatttggccaatcagctaactgaagacagcagccagctcaggccatccctcatctcatggcctgcagcatcccatccatgtgaccatgcaccattcatcaaggttctatacatccatgctgaccttgatcagtgagggccatgatgccagtcttcatggggcaggagccccatggccttggaatccctgtcgtatgttgattcagggcaaggtaaaagtagtagattgggaagagtctactgaaggtacgctcatacattcctctcccttcttgtccttacggctccgagagacctgcacttgtgagaacatggacgacagctaggcagatgacgctagcatacgtcatccttaacccaattcgcaatgtcgctctcgtcttgtgagatgacagccacgactgctctactagggacaggcatatgagacacgcaaggggtgaccataagaagcctcacccaaggcccattggacattggatagggccatagcagaaccaaccacaatgcctttgtacatgccaccctgacaagaagaggatcaccggaatgaactcaaaccaagggaagccagatgcgattcctaattgactgggacctcccataaatacaatcacttggaggacagcatccatacaacggaaacagggcgcaagggcataaaccacaaacaagggcgaacatgtgcaggtacagaaaatgaggaacggacgcagaggacacacgaataccacatggatacataaggatccccgacggaggcacacgagcaaggaacgggaagcacacgaagaaatacacacccacacaaaccacgaaccaaaaaggacaactgacaagaaacagggaagaggcaacgcggcaacaagggcaagagccagaaaaccaggagaccaagagcaaacaagcagtaacaaagagaagaacaagtgaaaagaaaaaaaggacgccagacacaaatagacaacagacagcgcaccaccaagaggcagaactaagggcatgatcacagagacacaaaaacaaaagtaagagacagaaaagaacaaaacaaaaacgaaaaagcacgatccatagcgcagaggaacaatagaaagcgtcccgctcatagaag

SEQ ID NO: 568365 - DNA, 187 bp, Homo sapiens
ctccccatgacccaactccctctaggtcaatctcaacctaggcctcctattatattctagccacctctaggccatagccgtttactcatcctctgatcagtggtgagcatcaaactcgagactacgccctgatcggcgcacggtgcgttggcccaacacggtgcgtttgcccaatacggtgcgttag

SEQ ID NO: 568366 - DNA, 3051 bp, Homo sapiens
aaaagatgtctataataaaatttatttataccagtggttctcaaaactgactgataatcagaaaaccctggggctctttcaaaaacaattaacaaaacaattctatttttagacccatgaatacatattttgggggaggaaggaggagggtatagatctgtattttgaaaagttccccaggtctccttgggaaattatatgaacaatcatgtttgggaacaaatgaatcatgttaccactgggaagaagtttgttatacatcctaaccaagaaacctaaatggttcttaagcatctgctagcagaaacagttataattatgaatacctaatgtctgttagattttgctgatccctcacctacctcaggaagaaacaaacccaaaaaagtaagatacggtcttttttatttgtgttaattaaaaaatgctactcctaaaaatatactaactttccacacttataaaggtgtttcttattttaaattcctcaatgagtgcggagaagacaacatagaagcttcttctctttctttctgtcttccttcaactctgtttctcttcttccttttatctttcctttcttttcttctttcctctgactggattgtttataacactttagaaaatttccctgactggaagagggccaatctgaatgagcttttgtctgtcttgggagtagaatgaaagcagattctgagcatggaccctgacttccagaaagactcccatctcctcctcagtgcctcactcttccctcagtatccagaatagagtggggtggggaagtagaaaaggaaggaaataagaaggtggtagaaaactgaggcaaccctagtaatttgtttttctctaagtaaattacaggaagtatacattttctttaaccttaatgtccactactgtgtggacagcctctgggaaaacatctgttgcattagatactttatggtgaatattataataaaatcaacaaaatatgatttatgaggtctgctagttgacattttaaatttttcattattatcatttttatatttctgtaatagagtttgacctacattagaatgattcttaacttttcttcctcattaaatccttttttaaaaagagtgttctgtgtatgccaatcttgaagcatagaattgatgccaatttttaagctacttgctgtttttggttttagtcctgccttttttaagggaagaaaagaaataatattaatttgagagtgtattatgaattatgccattatcctaacagtaacttttattgtaatctcaccatgctaaaaagtatccaaaatattttgagatgggaagggatttgagtttggtttctaatgtttatcttttggtaatccctaccaaattttcatagtaatagtagaaagaaggaaagtgaatattggatattatttcctttacttaaaagcttttgatggatactatttgaattggtgtaatatgctgaagtgtatgtaatggaaaaacattattattttctaaattgaataaaatggatttaataaatactgaaagcagaattaactaagcaaaaataagtatgttttgcttagaaaatggatggcagttgcttaagaaaaaaggtttttttactaatttaagaatatacagattgtctggggaaaagaaacttttttttgtattttacttgtacagtctcacatataaccactgttgttctcatgacactctcctatattgatgtgatctttatatggtttgtaccttttttatctcttattccattatttcttaaattctattttatttaccagtttcccaaataaagctatcagggttgacatcagctatttccaggaaaataaaaaggttattactgctgaacactggaataatttgattatgtagattgaagaaaagtcaatctgttataattgctgtaaagaagccatttaattttgtgcctgtttgcattagtctttttttaactagatatgcagattagtgggatgaaaatatatattctttatttgaattgtgattgccaactgaaagatgaatatgagggcagaaaatgaatctaaatctttggtttaaatgataaagtctttacacattgtagagaattaaataagcagttggtcatacttttatttatcttcaggatcttttgctctctgataaaagtagaaagctttagggaatagattgtgtagaaagtaaatccgacttcaagattcagttcctttttgataatttattgttttaaatcctaaatatctgaagcagtaatgccatgactcaccagtaatgccatgactcacaaacatatctttgtgaaatgatttccagagattgggagaaaaaaatactaatagttgattttgctttaagtgttttttatttctcacaacattccaaatgtttgttttaggagatacaagagtttatcattttttcttttaattgctaagaagacttgttacaactttcaaaaaaagtcctcatggaacctgataaataagaagttcaatgtcttatttcattacgagctatctaaatatttttgtcagattcagaatatgtaactgaatgtatgtaattcttttttgtagcagccaagaataatttaagtttcacaactaatactgatatgcctttatcatatttttgctaaccagccaaatctgttttcccatgatcatccttaatgtttgtactagtagaggactatagtggtgcaaactgaaccaaaatagcaactaataagaaggaataaatgaggccgggcacagtggctcaagcctgtaattccagcactttgggaaactgaggtgggaggatcacttgaggccaggagtttgagaccagcctgcccaacatgttgaaaccccgtctacactaaaaatacaataattaggcaggcatggtgttgcacacctgtaatcccagctgcttaagaggctgaggcaggagaatcacttgaacccgggaggtgtaggttgcagtgagcagagattgcaccaccacattccagcctgggcaacagagcaagactctgtct

SEQ ID NO: 568367 - DNA, 335 bp, Homo sapiens
  misc_feature (147)..(147): n is a, c, g, or t
ggcacgaggacggagctcgctctgtcacccaggctggagtgcagtggcccatcttggctcactgcaagctccgcctccccagttggaccgattctcctgcctcagccacctgagtagctgagattataggtgcctgcccccatgccnagctaatttttgtatttttagtagagacagggtttcaccatgttggccaggctggtctcgaactcctgagctcagcccatctgccttgctcagcctcccaaagtgctgggattacaggcatgagccaccacgcccagcctcatattgttttggactttccttaaaggatagtaatctttaaggaatta

SEQ ID NO: 568368 - DNA, 321 bp, Homo sapiens
  misc_feature (3)..(3): n is a, c, g, or t
  misc_feature (20)..(20): n is a, c, g, or t
  misc_feature (64)..(64): n is a, c, g, or t
  misc_feature (96)..(96): n is a, c, g, or t
  misc_feature (119)..(119): n is a, c, g, or t
  misc_feature (128)..(128): n is a, c, g, or t
  misc_feature (193)..(193): n is a, c, g, or t
  misc_feature (212)..(212): n is a, c, g, or t
  misc_feature (219)..(219): n is a, c, g, or t
  misc_feature (236)..(236): n is a, c, g, or t
  misc_feature (240)..(240): n is a, c, g, or t
  misc_feature (252)..(252): n is a, c, g, or t
  misc_feature (262)..(262): n is a, c, g, or t
  misc_feature (281)..(281): n is a, c, g, or t
  misc_feature (311)..(311): n is a, c, g, or t
  misc_feature (317)..(317): n is a, c, g, or t
ccngggtcagcctcctaggntctcctgactgagcataaacaggcagcccactgacatcccgggntgagagagcagcacctatagacccctcctggnttctaagttagccagtgcctgangctgcgggnccgcctggaacacggtcccattgccaccagaaaccgtcgttgtatggctttcttcagaacggggngagacagtcacatttactngaggggnaaaacctaaacattttngggnacaggtgaacangcgtgtactntgtcatggccactcactgnactcaccacccaaaaccagctaggccaagncacctnccct

SEQ ID NO: 568369 - DNA, 168 bp, Homo sapiens
cgatgggcagtggggcgaatgtctaggctataatcggagaatagcggaagtaaagtacttagaatatagtagatggaataaaggtgatatgacggcgagattgtatgatatattgaattgatcatatatagggccgggtataatacctcaggtcgatgtccatgccat

SEQ ID NO: 568370 - DNA, 318 bp, Homo sapiens
  misc_feature (168)..(168): n is a, c, g, or t
  misc_feature (287)..(287): n is a, c, g, or t
  misc_feature (298)..(298): n is a, c, g, or t
gcatgtggtatctcttcaaaatactggacggggttgatggcgggtgactgaaatgcagaaatcgaaactatagaaaaaggggggatgattatacttgttccagaaacgaggcccatcacctataggcttggacaatcactcgtttccaccatttgtttcccgtttagnattcgtgacgatgtaagtgaagattcacagtgggaagttttatcatgttaacccagatgcctctaaactgacactggagataagtagtcacagcctcttgagagcactctggagcacangaccccaaggngtgcagggcgtgaggatccc

SEQ ID NO: 568371 - DNA, 871 bp, Homo sapiens
atcttcgatgcagtacttcgagagcagccgccgaccggggagccagcaagaacgagctcacagctacggccggatggagcgtccgcaagctgacagaatgtcccaggattttgatcagaggccctggaaggaggtcaccaaggaggtgcacatgccatgggcagagaaatgctgaagttacatgaggaatctttgcagaagggccaggtgagccgatgacggcttcaaggctggtgattggcctcgcactgataccagcatctatggtggccctggaggagggagattgagcgcaaacaaggaagagccgcagatacttcagcccctgtgctacttgcccagaagagctgcaccgcaaggctgccctggagcaggacctggccttctggtacgggccccgactggcatggaggtcatcccctaacacaccagccatgcagcgctatgtgaagcggctccacgaggtggggcgcacagagcccgagctgctggtggcccacgcctaacaaccgctacctgggtgaactgtctgggggccaggtgctcaaaaagattgcccagaaagccctggacctgcccagctctggcgagggcctggccttcttcaccttccccaacattgccagtgccaccaagttcaagcagctctaccggtcccgcatgaactccctggagatgactcgcgcagtcaggcagagggtgatagaagaggcaagactggcgttctggtcaacattcaggtctttgacgaagtagcagagagttgttgacccaatgccaccaagcaaccaaagcccttacacgggaaccaaggggtttacaaagttggccacgaacaatttggaggattttggcccgtgtggaatcccag

SEQ ID NO: 568372 - DNA, 224 bp, Homo sapiens
agtatcttagccactcaaaactaaactctaccaagggtgacggatgtctctacagcaaggttaagggctcgccagagggggaacatcaggggtgcatggtgggcactgccaagggaattaaggtaaggaagcagcaggcctgctagtcgggtttgggccgggcttcatatctagggcaggcataaggtcgtccgataggcctgccctttagtaccagcggttgt

SEQ ID NO: 568373 - DNA, 612 bp, Homo sapiens
  misc_feature (1)..(1): n is a, c, g, or t
  misc_feature (20)..(20): n is a, c, g, or t
ngacatgcatgttcgtctgnactgcagacatcatttactctctggaatctcatctgtcagcctgtcatctaaaggcataaagcactcaaatggtcgattatcattagtgtatgttctctgatggtatctctgagaatactggttgtaggactggccagtagtgccttcggtactgggttcacccgcaggtctacgacagttgtcgcagtgcaagccaagctggcctccagagcatgtgcataagcaaatggcactgagatattccttcagccactgtgctcctacgtggtatgtcttcccatcatcataccgtgctgcttcatcagggtcacactatccgtgacggtcccacttctctccaatcttgtagttcacaccattgtcatggcacgatgtagatcaatcacatatcagatgaccacttccaaagcctcagctctgagcacagcagtttgtagcctgatacagacattcgcttccactcatctccaacggcataatggaaatctgtgtaggggtcaaagcacgagtcatccgtaggttggttcaagccttcgttgacacagttgcccacggtacattcctcttccgaacctatgcctctctggtcat

SEQ ID NO: 568374 - DNA, 252 bp, Homo sapiens
aagtgaagtaaggatcagctgtagtaccaactagagcttagtagttgtctaaacaagaaacacttatcttttcccgacattctaagcaatggtcactatcctaggcatgaatcatactactagtgaaacaggcaaggtatagaccttctaataaagtgggaaaacctataattactcgttaaaactcatgaaatgcgcagattgtgggtaacatgttgctcattctgctgttcgcggataactcttgcaatg

SEQ ID NO: 568375 - DNA, 663 bp, Homo sapiens
ctggtacgggagtggagactgcagtgagccgatatcgcaccacagcgctccagcctggtcgacagagtgagactccatctcaagaaaaaataaaaataaagttgttctctgaagagcaaatgtctcattccagtaatgacccactcagcaggaatatggtggagttcagtccaattcaggtcagccatatccaaaagaccacaagtcattactaagttgagcaaaagagtttttatctattagcagaaagggcctctctggcagcagagattaaaaactggcccaacttcatttccatacttcagggaacagcaaatagaccgatttacttatctaggacatgaatacctttctaggggaccaagttaataaaagaccaagaaactcctgattaaactgaataatgaaggattctgtagacagggctgcacgtatcggctttgtttgacttctcttttctcagttaacatctcagagctagaacattccacattccccagcagcgtgtgggggctgactaaagtttacaattccaactaaaaatcaccctgcttctggcttatctgaatcccttacccaccccaccccaccaccctactcctatttattcagcaccacactaaccaggaaattacactagcaaattgtgcaatggaaagaacg

SEQ ID NO: 568376 - DNA, 144 bp, Homo sapiens
catgcagtgatcactgtggctataatgcactactcacttggctagatcatagcaatgatcatagttgctaccatgtacaggtcacgtgaatagatcatacccccatcaggtagactagatcatagcactagatacacgtaggct

SEQ ID NO: 568377 - DNA, 544 bp, Homo sapiens
ggccatagccccatttgcccgtggcctgcagggctaacctccacgggagcccaggagctctggccggcaggtccatggcacagggcatcggaagactgcaaaactgctggacttaccctgggctgcagtccattgtcggcccctgggttgaatcaagatagtacttgcagctagatggatgcttttagccaggggacattgcgaggggaagattcctgcacccagtctggcctgtggtgtctgttttcttcctgagaccacaggtttctcaagtagcatactcaatggcgccaccaaggggaaacacctggagcggacctttgccatcagtggggaaagcaggtccctagacccatgtggtgtcagttatagtctttcaaaaacaactgattttacggtcggtaataacatgtctagtggtgtcacaataaccagtacattgctccgcttcaaacgcgcacaacctgcatatcttctcccgtgctacgtcacctttacaacgacatctgataacaatttcgccagtctcacacgaagacgacgt

SEQ ID NO: 568378 - DNA, 165 bp, Homo sapiens
ggggctctggcacatgtcatagggcaggaaatgctttatcagccaagtagtgtcattgggcccggctgacaccataggtgataacgtggtgctggagccagaccatagccatgtgtgcagtggtgtctcgagtggcggcgtggcatgcacgagatccatcacggt

SEQ ID NO: 568379 - DNA, 177 bp, Homo sapiens
atggctgactctagaggatacactcgctattcatcggcacctactctcgatccggggtggttctgacgaaaaataacactacagaactctttctagaccctgtgattggaatgagtccactttaaaacctctaacgagggtccattggggggcaagtctgtggccgatgaatatcga

SEQ ID NO: 568380 - DNA, 996 bp, Homo sapiens
  misc_feature (277)..(277): n is a, c, g, or t
ctggccgcctggatgatcgcctgcattggatgccatgtgctggttgatgtggggctgaagatgtgccccagtgccctgatgtggcattggagctggttatgtgagagaaagccagtctgcctgctggagaatgttctggcctgcagaaatgtgtgtgaatctagcctgtgtctggtgtcttgactgtgtgaccccctgtggcctgggcaatggtgtgctgcctaagtgggtatgtggtggtgacctaggaatgtcatgtggcccctgatgtgatgcntacttgtgtggtgtgacctgtgtgtgattgatgcctgttgtggagccgtgccctgggatgcaagtgttccctgggactgctgagctggaaatcaagcgctggctcactttgatgtgctgcctgctggctacgaatgtgctcttttcccgctgggggccgccgcccaccctgggccttgcctctacctcagtcgtttgccccccgattttctggctggaagcccacgggcccctggccctcagcccccgctctagcttcgccagtagctctggccagccgactgctgagcaagcctgtccagcccccggggcatgctgctgctggactggggcgtgggtgcttggctggagcttggaggtatgcctggcccttgcagcaagtctgcaaccaggtcggatcagcagtgggctaagagccagtgcccatgtggagccctttgcatgtggggccgtggctgtattggccacccctgtgtccggagcaaccggcaggggtatctcccgggaggcgtcccggccggctaacccgggggtcaagcggggccttggcccgtatttcccatcgtggccggggtatgtgtccaggaaggcgcctagtatccgcatgtgccggcatacagagcgcgggtgaagggcttcataatgtggccggcattatatagggtgtgggcggaactctttcttttctctcctcttctcttctttgttttggtggggggg

SEQ ID NO: 568381 - DNA, 782 bp, Homo sapiens
cgcgtgctctccgcaccaacccacttccatctagctcaaaccaatccgtaccccctgaatttctccgcaaatattcctgccggcaaggtcccagcatttcgaggtgtgaattgatcgtgacttctgatgtgctactgatgaagcacaccgcccattgcctacctatcgtcgcacgcaagtgagcgagctagcgcgggaacgtactccagacggcacgccagtccaggctgagtgcaagctggcgctgagcttggcctcgattcccgcataatacgattggcccctcaagcagatcacctcgagcgatagttcccctcagcttcgaggtcaatcattgccatcccatcaatcaaaccatgggcctagtgccagaatgctatacggaaggcacacgtgacgcgcagaattcttggagtgctgcttgagattgcttactatgaacgatcgaagtgacttatacttggtcgggcgtctgaaacggaagttgcacatttgggttagatccactcctaacaaggtcgtactggtcagcaccgttggctcccgctagtgcgtcctgagtgaacgacaagaggtttccttatgaagcgcctttgctatttcccgtgcaagaggtcattgtcccgcataatagcgcaatcccgtcatggctcttcctgcaatccagtcactttaaaccagccctgcaggtatcccgaggactatgtccttgggcgcctgaaactggaaaacctagttgtcgaatagaggatgggtccccagttttgatgcttaccaaacgg

SEQ ID NO: 568382 - DNA, 738 bp, Homo sapiens
  misc_feature (679)..(679): n is a, c, g, or t
cggcgcatgcctgtattcggagaaattggacaggctctagttgtcacatgaatcgagatcgggagcgtaggcgaggacaggccgaccgcgatagtctcgtactctagtaacagaacactcacctagctcggattggcgaaagacgcctgcagtaccgacgaatcactagcccgcggcagagtattgagacgacccgggcaggctgatatacgagtcatcacatttcatgtgactgtaatgcaacttctgagacaccgtcagcgtagtacacgttctactagtaggcaaagttcttacaagcgatagcttactatgctacccagatagtatcatggtcaaggcgtgctattgcttcacacgtaaagacaccgtcagattactgcgctgcctacacagccataggcccattcatagtaagaagtgcatgatcagctctgtagaggcaatgacttactacatgaatacacacgactagacattcttgctacaaggcggcctgaccagtgggctcataagtacatgtaaggtcctccgacctatacttggcatattaggacagtgcacgggacttagaactacgcatgctcatcccatgaagcactaccattaggctcaatgtgccaacttcggcctagtaccagcggccctacggccagatatgtatggactactagccgangtctgcttattattaaccgccccggtggccttccagtatggtccacattcacgcttccg

SEQ ID NO: 568383 - DNA, 384 bp, Homo sapiens
cctcccccccctcccacctcgttcgtcccacgcctcggttacgtcggcagtcgaccagacgaagtttacttagaccaagggcgagctcgttccctttggtttatcgatctaaacgccaactcttcccggtaatatttccatagacatatttaggactaacatcccgtacttcctaacttaactaagtccaattactatgttaattaactcaaatatcgaaggtccaccgcgaagcatgggacatcgagaataacacgacgtcggaatggaggcaaacagaatagcaggataaagaatttagaagtacactcgcgcgcgtccgtcggccactagaagcggggacccaataaacgccatcagagtccggccccttagacggggggt

SEQ ID NO: 568384 - DNA, 465 bp, Homo sapiens
cggattcttgaaaagcttgtagacaaattatcatccacatcaatctcatatggagatttcaacaaggggtctttcgctcttaaagtgaaccgaagctttgcaagtacattgtccaatatgaaaacaatcatacctcccagaacagataaagtccttaaaagagtgaaaaccaacataaacgtgtttttaaacgtaaacagccggtttggatccccccagatcgggaagctgatcccctacgatcgggaggatgtccaagggaaggctctgaataaagatggaatccatggagaacccccagcatatccaggtggcccacaagatgctcatatcctaaccggaccgacaggaaagccaaagagtatggccaccccagaagtcactgcattgagacgggcatcgtgacatttgcacatgcgccatccacatccatgcttactggcacagacgccttccaagttaaaa

SEQ ID NO: 568385 - DNA, 545 bp, Homo sapiens
  misc_feature (545)..(545): n is a, c, g, or t
ggaacattttgcctgttctagaagcaacggtgttatttgcacaggcgcgatttgctattcagaatgcaatccagtcaggcgatgggggatagcttactatgccggggaaatcagtcacttatttgaaacatagaatgactcccaatggcattcagtgtaatgactggaactgctgatgattgcgacttggatggtgagcaaacaggcgctgagagttaccaggatccacatttatgggctatactagaagaagtatgcctattgcctcctgtcttaacaatgacccaggtatattgatgcatgagctcatggtccgcagcttatactgatggagtgactgtagtagacatatgctgctctaacatgttactgcacattgcacccaataaacgttccactatgtttagaacattgctggatttccacatcttaacatgttttatgacgcatacaagagtctcacgtctcaacaagatttaatatagttggcgtactcaaatgctattccgtgacctacaccttcgctttctgtagtgtgaacactn

SEQ ID NO: 568386 - DNA, 351 bp, Homo sapiens
gtactctgcagtcatcatgctagacattgtctcagtcgacatagtatgtgattgtctctcactctccactttgctccgatcaatgtatcttgtcttggccatcgtaggacgctcctcccttgattcccgctctactcaggcagactcccatgaatccccccttatgctataatccataacgctatcattatccggaatatctggagatcctctttgagcctagctgctgtctctctatgcgtgttcgtgcatgcccgtcgtcactctacgtcgtgtctctcactgcctctgcggattctaccaacttaaagtgtggttgggattatccaaggcagagtatactctgtgatt

SEQ ID NO: 568387 - DNA, 549 bp, Homo sapiens
attctagaagccgaggcggcgacatgttatttccttctttttcttgctttttttcagccttgacaactccctttttgggcgtgcatcaatggctctccatacagactcgagtatgcagaacaatttcgggagatcgacaaggaacgtacaagcagcaaagaaccagagcaaacgacacgacccagccacaaacgcagcacacacactgcaccaagggaacaacagacgaacggaccagaacgcacggacgcagaaacaaagcacgacaaaggaaggcacgagcgacatacacgtgcacatcaccacagcgtgaatacacgacgcagccaagcgcgtgaagcacagcaaacgagccagaataacacagcgaatagaagaccacaaaggacaaaaagaaaaacccatcaacaagaaacaagcaggaggcagaatgaaaaggaaactgagtcagcaagaggcgcgacaagacagcgacacacataggacaacaacgcacaagcgtgaaggagagaaagagaaaaaacatgaaaagtgaaaacagaaaacaaa

SEQ ID NO: 568388 - DNA, 476 bp, Homo sapiens
  misc_feature (1)..(1): n is a, c, g, or t
  misc_feature (38)..(38): n is a, c, g, or t
  misc_feature (279)..(279): n is a, c, g, or t
  misc_feature (321)..(321): n is a, c, g, or t
  misc_feature (446)..(446): n is a, c, g, or t
  misc_feature (456)..(456): n is a, c, g, or t
ncagcaaaaggtatttattttgtctctaggcatgaggncattgggcgcatgctacttgtagacagtgattgcgcccaccgatttcatggttaattgctagttggtaggtaaaggcctctagatgattagcaatcttgataaaagaggcctagtaatgttcttttgaggttagaaatccttgctgctaggacagtctctgtgacaggttgcgttgaatgatgtcttccttatcaatggtgagcccaccagtgaggattactgatgtggacaagtgatggnggttggttctgtatatttaattttatggacagaactttgtanaaacgaaactatttaaaaaaacaggattaacatttttagcattcttattcaaggagaattatggacttcaatttggctatcaaacattaaataactttttttttcccccccaatacaacacaacnctaacctacnctctcccctcatcccccact

SEQ ID NO: 568389 - DNA, 110 bp, Homo sapiens
aggatgcgcgaccgaacctggattcgcgaccgaccgggagtcgcgagcgaccggattcgcgaccgacctggattcgcgaaccgacctggacttcgcgaacggaggatcct

SEQ ID NO: 568390 - DNA, 222 bp, Homo sapiens
  misc_feature (31)..(31): n is a, c, g, or t
  misc_feature (53)..(53): n is a, c, g, or t
acttaacagtattactcagctaagaacacancagtgattgtattaggattcancaaccttgcagcaaaaaaataatttctctgttgttgcaatggaaaaacaagttagattgattctactgcatagatcagaaaaatgctaaccttatagccacatgatgtgagaaacataggcaataaaccttccactgagatgttccagaaaataaacattatgaacttg

SEQ ID NO: 568391 - DNA, 979 bp, Homo sapiens
ctggttctattgtcaaaatatgtttctctttccatgttcactcataatctaaagggtaaactagacccaattcacagataactatgagtgaacatggacagagaaacatattatctgtgaatgggtctagttaccctttagattatgagcatctttaacagtgccaatggaaataagtatattaaataatgtcgcctgaaataatagatactcttgcggagtgtattttcaaatctaacacacagtttcaacgaggacttgtcatctttctaaaaataaattaaaagatacctgaactaaacttggagggcttgaacacatgtatttgcttcctgaacattcccaaacaagcacatgacacaactgatactctccactttcaaggcacttaacttgctaacagactgcaaccagcacagggaaaggacgaccaactagcaaccaaattatcgctacaacgcctggcacaacagaaggcaattgacctctaccctaatctcccaaataacatattttttagccactgcatcagaggcacagtcacaccggcagccccacgtcttataccaccggatctacatcaaaggctgcataactatggatgccacaatacttcttggaaaatgggtcatgaaaaatacgctgacacaactgcaaacctggatcgaaaactctgcaacagaacgccaggaaatctacaaacccccatatgcaagcagcagccggaccataccagaaacaccgaccaaccctaaaaccgaaacatacagcacaccaggacgacgacggagacacagacaagagcgcaacataacgcatcacaagcacaactacctaaagtcacaacaaacaacaccacaagagccaagccaataccacaacacaccgccaccaaacggataaccacggacagcacacactcgaacaaaaacgacacaaaaacaaatatcaaagtcacagacaacacaaaaaacatcca

SEQ ID NO: 568392 - DNA, 712 bp, Homo sapiens
cctcactgccggccggcatctccactcacgccctacctggtccctaggcctgtccggcaccaggcggtcacagctctgtgtgctcggacgcgcaggccacaccggctgcgagtgaccccctagtcctgccgcgcccctttatagcgtacgccccgcccccccgcgcctcgcctgggcccattcacctgctgtcgagaaccagacaccgcagaacggaaagctagccgctcggctgcggggtcccgccgtcggactcgaagggcgggggcgcgggtgagatggatccggtttctacctttcttaaatgctctgttgaaagtcgagacagcccccgcccaagagccagcgtcgcttgctgcccgcgcagctcccttctcaccctgagaccccccagcctcactctaggaggggccgtgaaattgcacccgcaaggtcctcatacatatttaaggtagcaggctcgaccagtaactggagctggaccggagtggtgagggggcggtccccagggacccgatatcccagatcgcttacagcccggggctccggtcggtgaagagctcggacgaacccagatccttactttgctggcccgacgagtgtaccaaggctgcatgcaagtattctaaccttccaaattgtgcctacgagctgcggaataccccaagctaagatacagagatcctcccttccagaagaacaagacactctg

SEQ ID NO: 568393 - DNA, 445 bp, Homo sapiens
  misc_feature (38)..(38): n is a, c, g, or t
  misc_feature (91)..(91): n is a, c, g, or t
  misc_feature (145)..(145): n is a, c, g, or t
  misc_feature (286)..(286): n is a, c, g, or t
ctgtagttaggatgaagtcgtgactgtgtccttataanaagaagggtgacacaggagcccatgtggtggtggaggcagagatggaagctgngaatccacaaacccgggagcatctggagcttcggaggctgaggaggcagggagnaccctcccagctgttgggggagcacagccttgctggcaccttgattttggacttcaggcctccagagctgagagaagatacatttctgtggttttgagctccccggtttgtggtacttttccaactgccccaggacactgntgcgccaatgcccttgaccttcaaggttgcattctggctgatggagctgatgggcaccccggcttcactgcccttgggctcccactctgactggcctgtgctgaaaggttaaaaatagctctgcatatattaaaatagctatgtcaattcaaaaaaaaa

SEQ ID NO: 568394 - DNA, 2004 bp, Homo sapiens
  misc_feature (1944)..(1944): n is a, c, g, or t
  misc_feature (1948)..(1948): n is a, c, g, or t
  misc_feature (1971)..(1973): n is a, c, g, or t
  misc_feature (1977)..(1977): n is a, c, g, or t
ggaagtcattcctagcagaggactcagatatatataggattgaagatctctcagttaagtctacatgaaaaggatggtttcttggagcttccacaaacttaaaaccatgaaacatctattattgctactattgtgtgtttttctagttaagtcccaaggtgtcaacgacaatgaggagggtttcttcagtgcccgtggtcatcgaccccttgacaagaagagagaagaggctcccagcctgaggcctgccccaccgcccatcagtggaggtggctatcgggctcgtccagccaaagcagctgccactcaaaagaaagtagaaagaaaagcccctgatgctggaggctgtcttcacgctgacccagacctgggggtgttgtgtcctacaggatgtcagttgcaagaggctttgctacaacaggaaaggccaatcagaaatagtgttgatgagttaaataacaatgtggaagctgtttcccagacctcctcttcttcctttcagtacatgtatttgctgaaagacctgtggcaaaagaggcagaagcaagtaaaagataatgaaaatgtagtcaatgagtactcctcagaactggaaaagcaccaattatatatagatgagactgtgaatagcaatatcccaactaaccttcgtgtgcttcgttcaatcctggaaaacctgagaagcaaaatacaaaagttagaatctgatgtctcagctcaaatggaatattgtcgcaccccatgcactgtcagttgcaatattcctgtggtgtctggcaaagaatgtgaggaaattatcaggaaaggaggtgaaacatctgaaatgtatctcattcaacctgacagttctgtcaaaccgtatagagtatactgtgacatgaatacagaaaatggaggatggacagtgattcagaaccgtcaagacggtagtgttgactttggcaggaaatgggatccatataaacagggatttggaaatgttgcaaccaacacagatgggaagaattactgtggcctaccaggtgaatattggcttggaaatgataaaattagccagcttaccaggatgggacccacagaacttttgatagaaatggaggactggaaaggagacaaagtaaaggctcactatggaggattcactgtacagaatgaagccaacaaataccagatctcagtgaacaaatacagaggaacagccggtaatgccctcatggatggagcatctcagctgatgggagaaaacaggaccatgaccattcacaacggcatgttcttcagcacgtatgacagagacaatgacggctggttaacatcagatcccagaaaacagtgttctaaagaagacggtggtggatggtggtataatagatgtcatgcagccaatccaaacggcagatactactggggtggacagtacacctgggacatggcaaagcatggcacagatgatggtgtagtatggatgaattggaaggggtcatggtactcaatgaggaagatgagtatgaagatcaggcccttcttcccacagcaatagtccccaatacgtagatttttgctcttctgtatgtgacaacatttttgtacattatgttattggaattttctttcatacattatattcctctaaaactctcaagcagacgtgagtgtgactttttgaaaaaagtataggataaattacattaaaatagcacatgattttcttttgttttcttcatttctcttgctcaccaagaagtaacaaaagtatagttttgacagagtggggtcttttatccttgtcgtaggaaaaccatgacggaaaggaaaaactgatgtttaaaagtccacttttaaaactatatttatttatgtaggatctgtcaaagaaaacttccaaaaagatttattaattaaaccagactctgttgcaataaagagaatggtacctctatccanggcncggccacgtcaaggaattcaaannncccnccccctgccagcccatacagaaaaaca

SEQ ID NO: 568395 - DNA, 303 bp, Homo sapiens
actatgttggacttgtgagcaaacaaagtgatgattgtctctaatatgctccacggtcaacattagtgctgttattctctcttttgtgtaatagttctttgacaggatggtaaaattgcttttacagagatcaaatattggtattgcaggccagcttggtatagcaaagaccagtagatctatagtgtagggaactcttccttgtgaaagttcaacagctccttttctggattacattttagtgtttcaacagatggatgcacccaagccctagccctaagtattctccagctcatatcaata

SEQ ID NO: 568396 - DNA, 1964 bp, Homo sapiens
  misc_feature (1644)..(1646): n is a, c, g, or t
ggaagtcattcctagcagaggactcagatatatataggattgaagatctctcagttaagtctacatgaaaaggatggtttcttggagcttccacaaacttaaaaccatgaaacatctattattgctactattgtgtgtttttctagttaagtcccaaggtgtcaacgacaatgaggagggtttcttcagtgcccgtggtcatcgaccccttgacaagaagagagaagaggctcccagcctgaggcctgccccaccgcccatcagtggaggtggctatcgggctcgtccagccaaagcagctgccactcaaaagaaagtagaaagaaaagcccctgatgctggaggctgtcttcacgctgacccagacctgggggtgttgtgtcctacaggatgtcagttgcaagaggctttgctacaacaggaaaggccaatcagaaatagtgttgatgagttaaataacaatgtggaagctgtttcccagacctcctcttcttcctttcagtacatgtatttgctgaaagacctgtggcaaaagaggcagaagcaagtaaaagataatgaaaatgtagtcaatgagtactcctcagaactggaaaagcaccaattatatatagatgagactgtgaatagcaatatcccaactaaccttcgtgtgcttcgttcaatcctggaaaacctgagaagcaaaatacaaaagttagaatctgatgtctcagctcaaatggaatattgtcgcaccccatgcactgtcagttgcaatattcctgtggtgtctggcaaagaatgtgaggaaattatcaggaaaggaggtgaaacatctgaaatgtatctcattcaacctgacagttctgtcaaaccgtatagagtatactgtgacatgaatacagaaaatggaggatggacagtgattcagaaccgtcaagacggtagtgttgactttggcaggaaatgggatccatataaacagggatttggaaatgttgcaaccaacacagatgggaagaattactgtggcctaccaggtgaatattggcttggaaatgataaaattagccagcttaccaggatgggacccacagaacttttgatagaaatggaggactggaaaggagacaaagtaaaggctcactatggaggattcactgtacagaatgaagccaacaaataccagatctcagtgaacaaatacagaggaacagccggtaatgccctcatggatggagcatctcagctgatgggagaaaacaggaccatgaccattcacaacggcatgttcttcagcacgtatgacagagacaatgacggctggttaacatcagatcccagaaaacagtgttctaaagaagacggtggtggatggtggtataatagatgtcatgcagccaatccaaacggcagatactactggggtggacagtacacctgggacatggcaaagcatggcacagatgatggtgtagtatggatgaattggaaggggtcatggtactcaatgaggaagatgagtatgaagatcaggcccttcttcccacagcaatagtccccaatacgtagatttttgctcttctgtatgtgacaacatttttgtacattatgttattggaattttctttcatacattatattcctctaaaactctcaagnnnaaaaaaaaaaaaaaaaaaaaaaaaaaaagaaattgtgtgtgggggggcttgggcccttgggaaagggttttttagaaccaactccgtgggggccagcggggccccagaaggtaggggcaccatgggggccaaagacgtggtccccaagagaagaaccctggtccaaagaacaacgggcggggggagtttctcccccaagtagaaaacacccgcggggggacaaccgagctgtcgtggaacaactccagaagggagctcaggagggcacaacggggtcctacacacgcgggcgcccgagcgaagcccgatatcaaaatc

SEQ ID NO: 568397 - DNA, 2182 bp, Homo sapiens
  misc_feature (1041)..(1041): n is a, c, g, or t
ggaagtcattcctagcagaggactcagatatatataggattgaagatctctcagttaagtctacatgaaaaggatggtttcttggagcttccacaaacttaaaaccatgaaacatctattattgctactattgtgtgtttttctagttaagtcccaaggtgtcaacgacaatgaggagggtttcttcagtgcccgtggtcatcgaccccttgacaagaagagagaagaggctcccagcctgaggcctgccccaccgcccatcagtggaggtggctatcgggctcgtccagccaaagcagctgccactcaaaagaaagtagaaagaaaagcccctgatgctggaggctgtcttcacgctgacccagacctgggggtgttgtgtcctacaggatgtcagttgcaagaggctttgctacaacaggaaaggccaatcagaaatagtgttgatgagttaaataacaatgtggaagctgtttcccagacctcctcttcttcctttcagtacatgtatttgctgaaagacctgtggcaaaagaggcagaagcaagtaaaagataatgaaaatgtagtcaatgagtactcctcagaactggaaaagcaccaattatatatagatgagactgtgaatagcaatatcccaactaaccttcgtgtgcttcgttcaatcctggaaaacctgagaagcaaaatacaaaagttagaatctgatgtctcagctcaaatggaatattgtcgcaccccatgcactgtcagttgcaatattcctgtggtgtctggcaaagaatgtgaggaaattatcaggaaaggaggtgaaacatctgaaatgtatctcattcaacctgacagttctgtcaaaccgtatagagtatactgtgacatgaatacagaaaatggaggatggacagtgattcagaaccgtcaagacggtagtgttgactttggcaggaaatgggatccatataaacagggatttggaaatgttgcaaccaacacagatgggaagaattactgtggcctaccaggtaacgaacaggcatgcanaataaaatcattctatttgaaatgggattttttttaattaaaaaacattcattgttggaagcctgttttaggcagttaagaggagtttcctgacaaaaatgtggaagctaaagataagggaagaaaggcagtttttagtttcccaaaattttatttttggtgagattttattttgtttttcttttaggtgaatattggcttggaaatgataaaattagccagcttaccaggatgggacccacagaacttttgatagaaatggaggactggaaaggagacaaagtaaaggctcactatggaggattcactgtacagaatgaagccaacaaataccagatctcagtgaacaaatacagaggaacagccggtaatgccctcatggatggagcatctcagctgatgggagaaaacaggaccatgaccattcacaacggcatgttcttcagcacgtatgacagagacaatgacggctggttaacatcagatcccagaaaacagtgttctaaagaagacggtggtggatggtggtataatagatgtcatgcagccaatccaaacggcagatactactggggtggacagtacacctgggacatggcaaagcatggcacagatgatggtgtagtatggatgaattggaaggggtcatggtactcaatgaggaagatgagtatgaagatcaggcccttcttcccacagcaatagtccccaatacgtagatttttgctcttctgtatgtgacaacatttttgtacattatgttattggaattttctttcatacattatattcctctaaaactctcaagcagacgtgagtgtgactttttgaaaaaagtataggataaattacattaaaatagcacatgattttcttttgttttcttcatttctcttgctcaccaagaagtaacaaaagtatagttttgacagagttggtgttcataatttcagttctagttgattgcgagaattttcaaataaggaagaggggtcttttatccttgtcgtaggaaaaccatgacggaaaggaaaaactgatgtttaaaagtccacttttaaaactatatttatttatgtaggatctgtcaaagaaaacttccaaaaagatttattaattaaaccagactctgttgcaataa

SEQ ID NO: 568398 - DNA, 852 bp, Homo sapiens
aatacggcacgatagctaggcagtctttgcccaggtgcctggcctggctgtgaattgggcccatgatcatgtgtggactatcaattgacttctaccctggccatagcagatctactattgcagagtccctgcagtgcaattgtggacttgtgatgtgccaatttgacccccaatgtgggtggctacttcgtggacaatgttctgttggccaccagtgtaccacataccttgcatgtttttgcctacgtaataatgtttgaagttgattgttgctgccatgtgcttgcccttgcatgctgcctgccatgcctacattgctacttctgacccccaatggacatgctgtcattgcagcatgaaccttgtgttgtattacctgtgttccacctgtggtgctctgcttgtgtgtgccttggaaggatgtgacgtgacattccatgcaccctgtggatgttgatgtgaccatagctactaaccagcacaccatgaacctgcctgatgcttgctgtgagatgcttgctttgtgatgtttcacccccacaatttgtagccttgtcatggtccatgaataggattgaagcactttgtgatcgcgtttgcggatgtgaccgagcattgaaaatccctggcccctttgtgatggcccttgaaggtgaatttgcccctaattacttgaaacgctctgacggttttttgatgtgtgtgtcgatgtgtgttgaacgtatctagaatttgatgctgtggcatttgttactttgccttgaacattgggttgtgccctgttgatgcccctgtgacttgccaaaatggtgtttgacccggattgggcctggaattgcttgacgaccctag

SEQ ID NO: 568399 - DNA, 1922 bp, Homo sapiens
ggaagtcattcctagcagaggactcagatatatataggattgaagatctctcagttaagtctacatgaaaaggatggtttcttggagcttccacaaacttaaaaccatgaaacatctattattgctactattgtgtgtttttctagttaagtcccaaggtgtcaacgacaatgaggagggtttcttcagtgcccgtggtcatcgaccccttgacaagaagagagaagaggctcccagcctgaggcctgccccaccgcccatcagtggaggtggctatcgggctcgtccagccaaagcagctgccactcaaaagaaagtagaaagaaaagcccctgatgctggaggctgtcttcacgctgacccagacctgggggtgttgtgtcctacaggatgtcagttgcaagaggctttgctacaacaggaaaggccaatcagaaatagtgttgatgagttaaataacaatgtggaagctgtttcccagacctcctcttcttcctttcagtacatgtatttgctgaaagacctgtggcaaaagaggcagaagcaagtaaaagataatgaaaatgtagtcaatgagtactcctcagaactggaaaagcaccaattatatatagatgagactgtgaatagcaatatcccaactaaccttcgtgtgcttcgttcaatcctggaaaacctgagaagcaaaatacaaaagttagaatctgatgtctcagctcaaatggaatattgtcgcaccccatgcactgtcagttgcaatattcctgtggtgtctggcaaagaatgtgaggaaattatcaggaaaggaggtgaaacatctgaaatgtatctcattcaacctgacagttctgtcaaaccgtatagagtatactgtgacatgaatacagaaaatggaggatggacagtgattcagaaccgtcaagacggtagtgttgactttggcaggaaatgggatccatataaacagggatttggaaatgttgcaaccaacacagatgggaagaattactgtggcctaccaggtgaatattggcttggaaatgatgactggaaaggagacaaagtaaaggctcactatggaggattcactgtacagaatgaagccaacaaataccagatctcagtgaacaaatacagaggaacagccggtaatgccctcatggatggagcatctcagctgatgggagaaaacaggaccatgaccattcacaacggcatgttcttcagcacgtatgacagagacaatgacggctggttaacatcagatcccagaaaacagtgttctaaagaagacggtggtggatggtggtataatagatgtcatgcagccaatccaaacggcagatactactggggtggacagtacacctgggacatggcaaagcatggcacagatgatggtgtagtatggatgaattggaaggggtcatggtactcaatgaggaagatgagtatgaagatcaggcccttcttcccacagcaatagtccccaatacgtagatttttgctcttctgtatgtgacaacatttttgtacattatgttattggaattttctttcatacattatattcctctaaaactctcaagcagacgtgagtgtgactttttgaaaaaagtataggataaattacattaaaatagcacatgattttcttttgttttcttcatttctcttgctcaccaagaagtaacaaaagtatagttttgacagagttggtgttcataatttcagttctagttgattgcgagaattttcaaataaggaagaggggtcttttatccttgtcgtaggaaaaccatgacggaaaggaaaaactgatgtttaaaagtccacttttaaaactatatttatttatgtaggatctgtcaaagaaaacttccaaaaagatttattaattaaaccagactctgttgcaataa

SEQ ID NO: 568400 - DNA, 1930 bp, Homo sapiens
ggaagtcattcctagcagaggactcagatatatataggattgaagatctctcagttaagtctacatgaaaaggatggtttcttggagcttccacaaacttaaaaccatgaaacatctattattgctactattgtgtgtttttctagttaagtcccaaggtgtcaacgacaatgaggagggtttcttcagtgcccgtggtcatcgaccccttgacaagaagagagaagaggctcccagcctgaggcctgccccaccgcccatcagtggaggtggctatcgggctcgtccagccaaagcagctgccactcaaaagaaagtagaaagaaaagcccctgatgctggaggctgtcttcacgctgacccagacctgggggtgttgtgtcctacaggatgtcagttgcaagaggctttgctacaacaggaaaggccaatcagaaatagtgttgatgagttaaataacaatgtggaagctgtttcccagacctcctcttcttcctttcagtacatgtatttgctgaaagacctgtggcaaaagaggcagaagcaagtaaaagataatgaaaatgtagtcaatgagtactcctcagaactggaaaagcaccaattatatatagatgagactgtgaatagcaatatcccaactaaccttcgtgtgcttcgttcaatcctggaaaacctgagaagcaaaatacaaaagttagaatctgatgtctcagctcaaatggaatattgtcgcaccccatgcactgtcagttgcaatattcctgtggtgtctggcaaagaatgtgaggaaattatcaggaaaggaggtgaaacatctgaaatgtatctcattcaacctgacagttctgtcaaaccgtatagagtatactgtgacatgaatacagaaaatggggcaggaaatgggatccatataaacagggatttggaaatgttgcaaccaacacagatgggaagaattactgtggcctaccaggtgaatattggcttggaaatgataaaattagccagcttaccaggatgggacccacagaacttttgatagaaatggaggactggaaaggagacaaagtaaaggctcactatggaggattcactgtacagaatgaagccaacaaataccagatctcagtgaacaaatacagaggaacagccggtaatgccctcatggatggagcatctcagctgatgggagaaaacaggaccatgaccattcacaacggcatgttcttcagcacgtatgacagagacaatgacggctggttaacatcagatcccagaaaacagtgttctaaagaagacggtggtggatggtggtataatagatgtcatgcagccaatccaaacggcagatactactggggtggacagtacacctgggacatggcaaagcatggcacagatgatggtgtagtatggatgaattggaaggggtcatggtactcaatgaggaagatgagtatgaagatcaggcccttcttcccacagcaatagtccccaatacgtagatttttgctcttctgtatgtgacaacatttttgtacattatgttattggaattttctttcatacattatattcctctaaaactctcaagcagacgtgagtgtgactttttgaaaaaagtataggataaattacattaaaatagcacatgattttcttttgttttcttcatttctcttgctcaccaagaagtaacaaaagtatagttttgacagagttggtgttcataatttcagttctagttgattgcgagaattttcaaataaggaagaggggtcttttatccttgtcgtaggaaaaccatgacggaaaggaaaaactgatgtttaaaagtccacttttaaaactatatttatttatgtaggatctgtcaaagaaaacttccaaaaagatttattaattaaaccagactctgttgcaataa

SEQ ID NO: 568401 - DNA, 1922 bp, Homo sapiens
ggaagtcattcctagcagaggactcagatatatataggattgaagatctctcagttaagtctacatgaaaaggatggtttcttggagcttccacaaacttaaaaccatgaaacatctattattgctactattgtgtgtttttctagttaagtcccaaggtgtcaacgacaatgaggagggtttcttcagtgcccgtggtcatcgaccccttgacaagaagagagaagaggctcccagcctgaggcctgccccaccgcccatcagtggaggtggctatcgggctcgtccagccaaagcagctgccactcaaaagaaagtagaaagaaaagcccctgatgctggaggctgtcttcacgctgacccagacctgggggtgttgtgtcctacaggatgtcagttgcaagaggctttgctacaacaggaaaggccaatcagaaatagtgttgatgagttaaataacaatgtggaagctgtttcccagacctcctcttcttcctttcagtacatgtatttgctgaaagacctgtggcaaaagaggcagaagcaagtaaaagataatgaaaatgtagtcaatgagtactcctcagaactggaaaagcaccaattatatatagatgagactgtgaatagcaatatcccaactaaccttcgtgtgcttcgttcaatcctggaaaacctgagaagcaaaatacaaaagttagaatctgatgtctcagctcaaatggaatattgtcgcaccccatgcactgtcagttgcaatattcctgtggtgtctggcaaagaatgtgaggaaattatcaggccgtatagagtatactgtgacatgaatacagaaaatggaggatggacagtgattcagaaccgtcaagacggtagtgttgactttggcaggaaatgggatccatataaacagggatttggaaatgttgcaaccaacacagatgggaagaattactgtggcctaccaggtgaatattggcttggaaatgataaaattagccagcttaccaggatgggacccacagaacttttgatagaaatggaggactggaaaggagacaaagtaaaggctcactatggaggattcactgtacagaatgaagccaacaaataccagatctcagtgaacaaatacagaggaacagccggtaatgccctcatggatggagcatctcagctgatgggagaaaacaggaccatgaccattcacaacggcatgttcttcagcacgtatgacagagacaatgacggctggttaacatcagatcccagaaaacagtgttctaaagaagacggtggtggatggtggtataatagatgtcatgcagccaatccaaacggcagatactactggggtggacagtacacctgggacatggcaaagcatggcacagatgatggtgtagtatggatgaattggaaggggtcatggtactcaatgaggaagatgagtatgaagatcaggcccttcttcccacagcaatagtccccaatacgtagatttttgctcttctgtatgtgacaacatttttgtacattatgttattggaattttctttcatacattatattcctctaaaactctcaagcagacgtgagtgtgactttttgaaaaaagtataggataaattacattaaaatagcacatgattttcttttgttttcttcatttctcttgctcaccaagaagtaacaaaagtatagttttgacagagttggtgttcataatttcagttctagttgattgcgagaattttcaaataaggaagaggggtcttttatccttgtcgtaggaaaaccatgacggaaaggaaaaactgatgtttaaaagtccacttttaaaactatatttatttatgtaggatctgtcaaagaaaacttccaaaaagatttattaattaaaccagactctgttgcaataa

SEQ ID NO: 568402 - DNA, 231 bp, Homo sapiens
  misc_feature (130)..(130): n is a, c, g, or t
  misc_feature (143)..(143): n is a, c, g, or t
aagcagccagtggtcaaatgaaaggcgggggaaacggatgcccctggcccagagcaggccaaagggagggggcacagctcacagctgcaccctggccttaccacagtctctacactacaaccaacctttncccaaaacatganccggcaaggccaggtcagagctagtccaagacctcaagcacagcctgccttgccaccacgtcaccaggtggatagacagaagcagggg

SEQ ID NO: 568403 - DNA, 2128 bp, Homo sapiens
  misc_feature (1041)..(1041): n is a, c, g, or t
ggaagtcattcctagcagaggactcagatatatataggattgaagatctctcagttaagtctacatgaaaaggatggtttcttggagcttccacaaacttaaaaccatgaaacatctattattgctactattgtgtgtttttctagttaagtcccaaggtgtcaacgacaatgaggagggtttcttcagtgcccgtggtcatcgaccccttgacaagaagagagaagaggctcccagcctgaggcctgccccaccgcccatcagtggaggtggctatcgggctcgtccagccaaagcagctgccactcaaaagaaagtagaaagaaaagcccctgatgctggaggctgtcttcacgctgacccagacctgggggtgttgtgtcctacaggatgtcagttgcaagaggctttgctacaacaggaaaggccaatcagaaatagtgttgatgagttaaataacaatgtggaagctgtttcccagacctcctcttcttcctttcagtacatgtatttgctgaaagacctgtggcaaaagaggcagaagcaagtaaaagataatgaaaatgtagtcaatgagtactcctcagaactggaaaagcaccaattatatatagatgagactgtgaatagcaatatcccaactaaccttcgtgtgcttcgttcaatcctggaaaacctgagaagcaaaatacaaaagttagaatctgatgtctcagctcaaatggaatattgtcgcaccccatgcactgtcagttgcaatattcctgtggtgtctggcaaagaatgtgaggaaattatcaggaaaggaggtgaaacatctgaaatgtatctcattcaacctgacagttctgtcaaaccgtatagagtatactgtgacatgaatacagaaaatggaggatggacagtgattcagaaccgtcaagacggtagtgttgactttggcaggaaatgggatccatataaacagggatttggaaatgttgcaaccaacacagatgggaagaattactgtggcctaccaggtaacgaacaggcatgcanaataaaatcattctatttgaaatgggattttttttaattaaaaaacattcattgttggaagcctgttttaggcagttaagaggagtttcctgacaaaaatgtggaagctaaagataagggaagaaaggcagtttttagtttcccaaaattttatttttggtgagattttattttgtttttcttttaggtgaatattggcttggaaatgatgactggaaaggagacaaagtaaaggctcactatggaggattcactgtacagaatgaagccaacaaataccagatctcagtgaacaaatacagaggaacagccggtaatgccctcatggatggagcatctcagctgatgggagaaaacaggaccatgaccattcacaacggcatgttcttcagcacgtatgacagagacaatgacggctggttaacatcagatcccagaaaacagtgttctaaagaagacggtggtggatggtggtataatagatgtcatgcagccaatccaaacggcagatactactggggtggacagtacacctgggacatggcaaagcatggcacagatgatggtgtagtatggatgaattggaaggggtcatggtactcaatgaggaagatgagtatgaagatcaggcccttcttcccacagcaatagtccccaatacgtagatttttgctcttctgtatgtgacaacatttttgtacattatgttattggaattttctttcatacattatattcctctaaaactctcaagcagacgtgagtgtgactttttgaaaaaagtataggataaattacattaaaatagcacatgattttcttttgttttcttcatttctcttgctcaccaagaagtaacaaaagtatagttttgacagagttggtgttcataatttcagttctagttgattgcgagaattttcaaataaggaagaggggtcttttatccttgtcgtaggaaaaccatgacggaaaggaaaaactgatgtttaaaagtccacttttaaaactatatttatttatgtaggatctgtcaaagaaaacttccaaaaagatttattaattaaaccagactctgttgcaataa

SEQ ID NO: 568404 - DNA, 1869 bp, Homo sapiens
ggaagtcattcctagcagaggactcagatatatataggattgaagatctctcagttaagtctacatgaaaaggatggtttcttggagcttccacaaacttaaaaccatgaaacatctattattgctactattgtgtgtttttctagttaagtcccaaggtgtcaacgacaatgaggagggtttcttcagtgcccgtggtcatcgaccccttgacaagaagagagaagaggctcccagcctgaggcctgccccaccgcccatcagtggaggtggctatcgggctcgtccagccaaagcagctgccactcaaaagaaagtagaaagaaaagcccctgatgctggaggctgtcttcacgctgacccagacctgggggtgttgtgtcctacaggatgtcagttgcaagaggctttgctacaacaggaaaggccaatcagaaatagtgttgatgagttaaataacaatgtggaagctgtttcccagacctcctcttcttcctttcagtacatgtatttgctgaaagacctgtggcaaaagaggcagaagcaagtaaaagataatgaaaatgtagtcaatgagtactcctcagaactggaaaagcaccaattatatatagatgagactgtgaatagcaatatcccaactaaccttcgtgtgcttcgttcaatcctggaaaacctgagaagcaaaatacaaaagttagaatctgatgtctcagctcaaatggaatattgtcgcaccccatgcactgtcagttgcaatattcctgtggtgtctggcaaagaatgtgaggaaattatcaggaaaggaggtgaaacatctgaaatgtatctcattcaacctgacagttctgtcaaaccgtatagagtatactgtgacatgaatacagaaaatggagaattactgtggcctaccaggtgaatattggcttggaaatgataaaattagccagcttaccaggatgggacccacagaacttttgatagaaatggaggactggaaaggagacaaagtaaaggctcactatggaggattcactgtacagaatgaagccaacaaataccagatctcagtgaacaaatacagaggaacagccggtaatgccctcatggatggagcatctcagctgatgggagaaaacaggaccatgaccattcacaacggcatgttcttcagcacgtatgacagagacaatgacggctggttaacatcagatcccagaaaacagtgttctaaagaagacggtggtggatggtggtataatagatgtcatgcagccaatccaaacggcagatactactggggtggacagtacacctgggacatggcaaagcatggcacagatgatggtgtagtatggatgaattggaaggggtcatggtactcaatgaggaagatgagtatgaagatcaggcccttcttcccacagcaatagtccccaatacgtagatttttgctcttctgtatgtgacaacatttttgtacattatgttattggaattttctttcatacattatattcctctaaaactctcaagcagacgtgagtgtgactttttgaaaaaagtataggataaattacattaaaatagcacatgattttcttttgttttcttcatttctcttgctcaccaagaagtaacaaaagtatagttttgacagagttggtgttcataatttcagttctagttgattgcgagaattttcaaataaggaagaggggtcttttatccttgtcgtaggaaaaccatgacggaaaggaaaaactgatgtttaaaagtccacttttaaaactatatttatttatgtaggatctgtcaaagaaaacttccaaaaagatttattaattaaaccagactctgttgcaataa

SEQ ID NO: 568405 - DNA, 144 bp, Homo sapiens
agatgcggctgactgcacagtgatgagccaggcctggacaggccccaggcgccccgccctagccctgggtggctggtgtaaccccagctccacgctgcttctcagaacaggttgcctgaggggttggccacacgggccttgacg

SEQ ID NO: 568406 - DNA, 1903 bp, Homo sapiens
ggaagtcattcctagcagaggactcagatatatataggattgaagatctctcagttaagtctacatgaaaaggatggtttcttggagcttccacaaacttaaaaccatgaaacatctattattgctactattgtgtgtttttctagttaagtcccaaggtgtcaacgacaatgaggagggtttcttcagtgcccgtggtcatcgaccccttgacaagaagagagaagaggctcccagcctgaggcctgccccaccgcccatcagtggaggtggctatcgggctcgtccagccaaagcagctgccactcaaaagaaagtagaaagaaaagcccctgatgctggaggctgtcttcacgctgacccagacctgggggtgttgtgtcctacaggatgtcagttgcaagaggctttgctacaacaggaaaggccaatcagaaatagtgttgatgagttaaataacaatgtggaagctgtttcccagacctcctcttcttcctttcagtacatgtatttgctgaaagacctgtggcaaaagaggcagaagcaagtaaaagataatgaaaatgtagtcaatgagtactcctcagaactggaaaagcaccaattatatatagatgagactgtgaatagcaatatcccaactaaccttcgtgtgcttcgttcaatcctggaaaacctgagaagcaaaatacaaaagttagaatctgatgtctcagctcaaatggaatattgtcgcaccccatgcactgtcagttgcaatattcctgtggtgtctggcaaagaatgtgaggaaattatcaggaaaggaggtgaaacatctgaaatgtatctcattcaacctgacagttctgtcaaaccgtatagagtatactgtgacatgaatacagaaaatggaggatggacagtgattcagaaccgtcaagacggtagtgttgactttggcaggaaatgggatccatataaacagggatttggaaatgttgcaaccaacacagatgggaagaattactgtggcctaccaggtgaatattggcttggaaatgataaaattagccagcttaccaggatgggacccacagaacttttgatagaaatggaggactggaaaggagacaaagtaaaggctcactatggaggattcactgtacagaatgaagccaacaaataccagatctcagtgaacaaatacagaggaacagccggtaatgccctcatggatggagcatctcagctgatgggagaaaacaggaccatgaccattcacaacggcatgttcttcagcacgtatgacagagacaatgacggctagccaatccaaacggcagatactactggggtggacagtacacctgggacatggcaaagcatggcacagatgatggtgtagtatggatgaattggaaggggtcatggtactcaatgaggaagatgagtatgaagatcaggcccttcttcccacagcaatagtccccaatacgtagatttttgctcttctgtatgtgacaacatttttgtacattatgttattggaattttctttcatacattatattcctctaaaactctcaagcagacgtgagtgtgactttttgaaaaaagtataggataaattacattaaaatagcacatgattttcttttgttttcttcatttctcttgctcaccaagaagtaacaaaagtatagttttgacagagttggtgttcataatttcagttctagttgattgcgagaattttcaaataaggaagaggggtcttttatccttgtcgtaggaaaaccatgacggaaaggaaaaactgatgtttaaaagtccacttttaaaactatatttatttatgtaggatctgtcaaagaaaacttccaaaaagatttattaattaaaccagactctgttgcaataa

SEQ ID NO: 568407 - DNA, 363 bp, Homo sapiens
  misc_feature (49)..(49): n is a, c, g, or t
  misc_feature (187)..(187): n is a, c, g, or t
  misc_feature (232)..(232): n is a, c, g, or t
  misc_feature (290)..(290): n is a, c, g, or t
  misc_feature (349)..(349): n is a, c, g, or t
aggaggctgaggcaggaaaatcacttgaacccttaaccagggaggcggnggttgcagtgagccgagatcatgccactgcactccaacctgggcgacagagcgagactcgatctcaaattttttttttttgagagacaaggtcttgctatgttgcccaggctggtctcgaactcctgagctcaagagntcctcttgtcttggccttccaaagtgctgggattgcaggcgtgantaaccacgcctggcccattcacggatctttttgtggtcattgtccagtgttagcctantgataacagcctggctgggatgaatgccagcgtgggacagtcgtgccattagacttttncccccttgcactcg

SEQ ID NO: 568408 - DNA, 162 bp, Homo sapiens
agctacaaagtctcctccgtgctaactcggaaagggaagtgtgactactggatcaggacttttgtcccaggttgccagcccggcgagtacacgctgggcaacattaagagtaaccctggattaacgagttacctcgtccgagtggcgaacaccaccaataca

SEQ ID NO: 568409 - DNA, 1952 bp, Homo sapiens
ggaagtcattcctagcagaggactcagatatatataggattgaagatctctcagttaagtctacatgaaaaggatggtttcttggagcttccacaaacttaaaaccatgaaacatctattattgctactattgtgtgtttttctagttaagtcccaaggtgtcaacgacaatgaggagggtttcttcagtgcccgtggtcatcgaccccttgacaagaagagagaagaggctcccagcctgaggcctgccccaccgcccatcagtggaggtggctatcgggctcgtccagccaaagcagctgccactcaaaagaaagtagaaagaaaagcccctgatgctggaggctgtcttcacgctgacccagacctgggggtgttgtgtcctacaggatgtcagttgcaagaggctttgctacaacaggaaaggccaatcagaaatagtgttgatgagttaaataacaatgtggaagctgtttcccagacctcctcttcttcctttcagtacatgtatttgctgaaagacctgtggcaaaagaggcagaagcaagtaaaagataatgaaaatgtagtcaatgagtactcctcagaactggaaaagcaccaattatatatagatgagactgtgaatagcaatatcccaactaaccttcgtgtgcttcgttcaatcctggaaaacctgagaagcaaaatacaaaagttagaatctgatgtctcagctcaaatggaatattgtcgcaccccatgcactgtcagttgcaatattcctgtggtgtctggcaaagaatgtgaggaaattatcaggaaaggaggtgaaacatctgaaatgtatctcattcaacctgacagttctgtcaaaccgtatagagtatactgtgacatgaatacagaaaatggaggatggacagtgattcagaaccgtcaagacggtagtgttgactttggcaggaaatgggatccatataaacagggatttggaaatgttgcaaccaacacagatgggaagaattactgtggcctaccaggtgaatattggcttggaaatgataaaattagccagcttaccaggatgggacccacagaacttttgatagaaatggaggactggaaaggagacaaagtaaaggctcactatggaggattcactgtacagaatgaagccaacaaataccagatctcagtgaacaaatacagaggaacagccggtaatgccctcatggatggagcatctcagctgatgggagaaaacaggaccatgaccattcacaacggcatgttcttcagcacgtatgacagagacaatgacggctcagtgttctaaagaagacggtggtggatggtggtataatagatgtcatgcagccaatccaaacggcagatactactggggtggacagtacacctgggacatggcaaagcatggcacagatgatggtgtagtatggatgaattggaaggggtcatggtactcaatgagaagatgagtatgaagatcaggcccttcttcccacagcaatagtccccaatacgtagatttttgctcttctgtatgtgacaacatttttgtacattatgttattggaattttctttcatacattatattcctctaaaactctcaagcagacgtgagtgtgactttttgaaaaaagtataggataaattacattaaaatagcacatgattttcttttgttttcttcatttctcttgctcaccaagaagtaacaaaagtatagttttgacagagttggtgttcataatttcagttctagttgattgcgagaattttcaaataaggaagaggggtcttttatccttgtcgtaggaaaaccatgacggaaaggaaaaactgatgtttaaaagtccacttttaaaactatatttatttatgtaggatctgtcaaagaaaacttccaaaaagatttattaattaaaccagactctgttgcaataa

SEQ ID NO: 568410 - DNA, 1223 bp, Homo sapiens
  misc_feature (26)..(26): n is a, c, g, or t
  misc_feature (33)..(33): n is a, c, g, or t
tcaacgctgctcacacacatactccncacaggntgaagccacgcaggccccaccccaactgtaatggtgttcctgggaaggggatgggaacagaatggctgtaggaagggccattcccctttagtcctgcaatttaaaaatcccttccatctcctcactataaatctcattaaactacaagaaacaaaataatttgaagtttgacccagggcaacaatttacacttgatgattttttccttcctacaatttacataggaaagttctatgagctagaattagcttagctcatgtttataaagaactctgttatggatacaaagctagctaacgccatgggtggaaaatacttaagaatctgaaagattaatctggggctcagtcctatccaaatagaaacaatacttttctacaaacaagaaaacacacatcaggaaaacccaagtcttcaggttttctcctctcaagggtggagagcatgtggcactccaatgtgcgatctgctgctgacactgcttggcacatcaccctcttcacttggcctgcttcctcctttgtctcatgagaaggtgggactgcatcatctctccaggtactctcttcctatcagtctactcttcagagattaagcctcacttttggatataaagactccctagaaatgcttacttatataactgtctccacaaagagctaattcaacattaaactgcacgaatacaagcacaacgtccccaccaaagcacaggtatgttcctctatgcaaagttagacaatggagataccggactcagatcagaacattaccatgtaagagaaaaactgacatacatccagggagcaggaacttagatgtctcatctataaagagagaaaactgggcagaacaagaaaacactatttcctactattagaaaacaagtatcacaccaggaagataaagacagcttctctgcaactccaaaggcatccaaggacaggaaggggtcaggatggcagagaaggaagatcagtaatgaggggaagtaggatcagaatagcagaatggctggcaccaaaggtaaggagtgccctctaaaggaaacctcaagaagacattaggcatcaacgtggggtgagtatggcagtgggaaactcaagtattagataaaaaggaaactccagctactgcacgtgtgggatgaatggacttcagaagggcaacagcagagatagcgagacata

SEQ ID NO: 568411 - DNA, 380 bp, Homo sapiens
cgattcactctgctctccacgcaagccacagcactcagtgccgtttttctggctcatcaagagctgggtctgtagtgcttttgtcacaagagctaaatagccattttcagtaaccacacgaggcgtggcccaggggccagaaatgatcctgctgatgaccacacatgggatatgcttaacaaggctataataagctctacggctgatttgagctttaagcttactcagtgagaggtctatttcacaattcactgggctccatcaacaatcaaatgggccaaggtcaaactctgtcgccgagattgtatgctacaatgtggggctgtgtagacgttccttttcaacagccccacggaaaatcatcctcagaacaccgcgaa

SEQ ID NO: 568412 - DNA, 1021 bp, Homo sapiens
gcatttacatctcacttctacgaatactagtatatcgctcacacctcatatcctgcctactatgcctagagggactaatactatcgctgttgattatagctagctctgcataaccctgcaatcacccactccctcttaggccaatattgtgccctatggccatactagtcttgccgcctgcgaagcagcggtgggcctagccctactagtctcaatctccaacacatatggcgctagactacgtatcgataacctaaacctactccaatgctaaaactaatcgtcccaactaaattatattactaacactgacatgactttccaataaaacgacataatttgaatcaagcacaaccacccacagctaattattagcatcatcccccctactatttgttaaccaaatcaacaacaacctatttagctgttccccaagcttttcctccgagcccctaataacccccctcctgaatactaactacctggactcctaccctcacaatcatggcaagccaagcgccaattatccagtgaaacactatcacgaaaacaaactctactctctatactaatctccctacagatctccttaattatatcattcacagcacagaactaatcatatatgatatcttcttgcgaaaccaacatatattccgcacttgggataatcattcacccgattgaggaaaccaggcagaaaggctgaacgcagggccgatactcctattccacaccccaagtaggctccctgtcgcccagcaccgacacaatgaactcagaacaaccctaggtcacataaacattctacgatagcacgcagactggccggaacaccaatccggagcaccactctaaggccgttacacaagtaaagaagaaccgacggaacacaagagaccaatgacggaagcacgggacaaagtagggacagacggggagacaacagagcaggaaaaacgctcaacaggaaacacacgaacgcggaacagaagcacgggatgacaacacaccacagcgg

SEQ ID NO: 568413 - DNA, 144 bp, Homo sapiens
cacgaggcctatgttcataggttattataacaagggccctcttcctccaaatcgacatttgatcctgctaaagccaacattcgtacagttttttagtcagtccatcattattgctcagcacaggtgtaattgaagctgaacact

SEQ ID NO: 568414 - DNA, 3717 bp, Homo sapiens
gtgaggctcagtgctgtgggcttttccacctgagtgcccttggattgactgagatgccaagaggaaaatttatctgcaatgaatgtcgcacaggaatccatacctgttttgtatgtaagcagagtggggaagatgttaaaaggtgccttctacccttgtgtggaaagttttaccatgaagagtgtgtccagaagtacccacccactgttatgcagaacaagggcttccggtgctccctccacatctgtataacctgtcatgctgctaatccagccaatgtttctgcatctaaaggtcggctgatgcgctgtgtccgctgtcctgtggcataccacgccaatgacttttgcctggctgctgggtcaaagatccttgcatctaatagtatcatctgccctaatcactttacccctaggcggggctgccgaaatcatgagcatgttaatgttagctggtgctttgtgtgctcagaaggaggcagccttctgtgctgtgattcttgccctgctgcttttcatcgtgaatgcctgaacattgatatccctgaaggaaactggtattgcaacgactgtaaagcaggcaaaaagccacactacagggagattgtctgggtaaaagttggacgatacaggtggtggccagctgagatctgccatcctcgagctgttccttccaacattgataagatgagacatgatgtgggagagttcccagtcctcttttttggatctaatgactatttgtggactcaccaagcccgagtcttcccttacatggagggtgacgtgagcagcaaggataagatgggcaaaggagtggatgggacatataaaaaagctcttcaggaagctgcagcaaggtttgaggaattaaaggcccaaaaagagctaagacagctgcaggaagaccgaaagaatgacaagaagccaccaccttataaacatataaaggtaaaccgtcctattggcagggtacagatcttcactgcagacttatctgaaataccccgttgcaactgtaaagctactgatgagaacccctgtgggatagactctgaatgcatcaaccgcatgctgctctatgagtgccaccccacagtgtgtcctgccggagggcgctgtcaaaaccagtgcttttccaagcgccaatatccagaggttgaaattttccgcacattacagcggggttggggtctacggacaaaaacagatattaaaaagggtgaatttgtgaatgagtatgtgggtgagcttatagatgaagaagaatgcagagctcgaattcgctatgctcaagaacatgatatcactaatttctatatgctcaccctagacaaagaccgaatcattgatgctggtcccaaaggaaactatgctcggttcatgaatcattgctgccagcccaactgtgaaacacagaagtggtctgtgaatggagatacccgtgtaggcctttttgcactaagtgacattaaagcaggcactgaacttaccttcaactacaacctagaatgtcttgggaatggaaagactgtttgcaaatgtggagccccgaactgcagtggcttcttgggtgtaaggccaaagaatcaacccattgccacggaagaaaagtcaaagaaattcaagaagaagcaacagggaaagcgcaggacccagggtgaaatcacaaaggagcgagaagatgagtgttttagttgtggggatgctggccagctcgtctcctgcaagaaaccaggctgcccaaaagtttaccacgcagactgtctcaatctgaccaagcgaccagcagggaaatgggaatgtccgtggcatcagtgtgacatctgcgggaaggaagcagcctccttctgtgagatgtgccccagctccttttgtaagcagcatcgagaagggatgcttttcatttccaaactggatgggcgtctgtcttgtactgagcatgacccctgtgggcccaatcctctggaacctggggagatccgtgagtatgtgcctcccccagtaccgctgcctccagggccaagcactcacctggcagagcaatcaacaggaatggctgctcaggcacccaaaatgtcagataaacctcctgctgacaccaaccagatgctgtcgctctccaaaaaagctctggcagggacttgtcagaggccactgctacctgaaagacctcttgagagaactgactccaggccccagcctttagataaggtcagagacctcgctgggtcagggaccaaatcccaatccttggtttccagccagaggccactggacaggccaccagcagtggcaggaccaagaccccagctaagcgacaaaccctctccagtgaccagcccaagctcctcaccctcagtcaggtcccaaccactggaaagacctctggggacggctgacccaaggctggataaatccataggtgctgccagcccaaggccccagtcactggagaaaacctcagttcccactggcctgagacttccgccgccagacagactgctcattactagcagtcccaaaccccagacttcagacaggcctactgacaaaccccatgcctctttgtcccagagactcccacctcctgagaaagtactatcagctgtggtccagacccttgtagctaaagaaaaagcactgaggcctgtggaccagaatactcagtcaaaaaatagagctgctttggtgatggatctcatagacctaactcctcgccagaaggagcgggcagcttcacctcatcaggtcacaccacaggctgatgagaagatgccagtgttggagtcaagttcatggcctgccagcaaaggtctggggcatatgccgagagctgttgagaaaggctgtgtgtcagatcctcttcagacatctgggaaagcagcagccccttcagaggacccctggcaagctgttaaatcactcacccaggccagacttctttctcagcctcctgccaaggcctttttatatgagccaacaactcaggcctcaggaagagcttctgcaggggctgagcagaccccagggcctcttagccaatccccgggcctggtgaagcaggcgaagcagatggtcggaggccagcaactacctgcacttgccgccaagagtgggcaatcttttaggtctctcgggaaggccccagcctccctccccactgaagaaaagaagttggtaaccacagagcaaagtccctgggccctgggaaaagcctcatcacgggcagggctctggcccatagtggctggacagacactggcacagtcttgctggtctgctgggagcacacagacattggcacagacttgctggtctcttggaagagggcaagaccccaaaccagagcaaaatacacttccagctcttaaccaggctccttccagtcacaagtgtgcagaatcagaacagaagtagtaccaatcaatgtcacatgaacaaacaagctgcccccagggtaccatttggggaggggaaatcttttctttctttcccccttaaaaaaaaacacatctgccccgaacactttcccactgttattctttcctcatatcccaacactcagaactcttgtgacattagccagtgggggcttatggttgtgtgaaccatgtatgaaaatccagtgggccccaaccaaggagacagacagacttgggtctctttcccccaacttttccacatggtcatcgtgaaataaaaagtccactctgga

SEQ ID NO: 568415 - DNA, 700 bp, Homo sapiens
gggcgctggaaacccagcggcggcgcaagcggagcagtgagccccgcgcgtctcgcccgcacggctccatgtgtctggggtctgcgctggatgccgtgctggggagatggcctgtctctgcgacctgccgcgcccgcgtcccgagccgtccgggtccgcggacagcccggccaccatccatggtgctctggccctgctctcgctgcccctggtctgctgtcgccgcctgaggatgctgttgctgctgctgatgtctctgctgtcaggttggccatggcctcataggctgacgctaccgtctatttgaggcggctgtttgacagattatcaaggatgatcatcctggctcgagtagtccaacagatgctctagacccagtcgatcatccatttcgaggtgtgtccatgttctcagctggtgaaggtggatgaaggtaaaccagatcatggatgatccaaccgtgtggctcaaggcaagatctggaatgactacaagctgaacgtggaacccctctgactatgtgtggggcagagttcatgcgtgtccctgcacacgaagatctggaagccagacattgtgctgtaataacaaatgctgtcggggatttccaggtggacgacaagaccaaagtcttactcaagatacactggcggaggtgacttggcatacctccgaccatctttaaagctcgtgtaaaatc

SEQ ID NO: 568416 - DNA, 4287 bp, Homo sapiens
gtgaggctcagtgctgtgggcttttccacctgagtgcccttggattgactgagatgccaagaggaaaatttatctgcaatgaatgtcgcacaggaatccatacctgttttgtatgtaagcagagtggggaagatgttaaaaggtgccttctacccttgtgtggaaagttttaccatgaagagtgtgtccagaagtacccacccactgttatgcagaacaagggcttccggtgctccctccacatctgtataacctgtcatgctgctaatccagccaatgtttctgcatctaaaggtcggctgatgcgctgtgtccgctgtcctgtggcataccacgccaatgacttttgcctggctgctgggtcaaagatccttgcatctaatagtatcatctgccctaatcactttacccctaggcggggctgccgaaatcatgagcatgttaatgttagctggtgctttgtgtgctcagaaggaggcagccttctgtgctgtgattcttgccctgctgcttttcatcgtgaatgcctgaacattgatatccctgaaggaaactggtattgcaacgactgtaaagcaggcaaaaagccacactacagggagattgtctgggtaaaagttggacgatacaggtggtggccagctgagatctgccatcctcgagctgttccttccaacattgataagatgagacatgatgtgggagagttcccagtcctcttttttggatctaatgactatttgtggactcaccaagcccgagtcttcccttacatggagggtgacgtgagcagcaaggataagatgggcaaaggagtggatgggacatataaaaaagctcttcaggaagctgcagcaaggtttgaggaattaaaggcccaaaaagagctaagacagctgcaggaagaccgaaagaatgacaagaagccaccaccttataaacatataaaggtaaaccgtcctattggcagggtacagatcttcactgcagacttatctgaaataccccgttgcaactgtaaagctactgatgagaacccctgtgggatagactctgaatgcatcaaccgcatgctgctctatgagtgccaccccacagtgtgtcctgccggagggcgctgtcaaaaccagtgcttttccaagcgccaatatccagaggttgaaattttccgcacattacagcggggttggggtctacggacaaaaacagatattaaaaagggtgaatttgtgaatgagtatgtgggtgagcttatagatgaagaagaatgcagagctcgaattcgctatgctcaagaacatgatatcactaatttctatatgctcaccctagacaaagaccgaatcattgatgctggtcccaaaggaaactatgctcggttcatgaatcattgctgccagcccaactgtgaaacacagaagtggtctgtgaatggagatacccgtgtaggcctttttgcactaagtgacattaaagcaggcactgaacttaccttcaactacaacctagaatgtcttgggaatggaaagactgtttgcaaatgtggagccccgaactgcagtggcttcttgggtgtaaggccaaagaatcaacccattgccacggaagaaaagtcaaagaaattcaagaagaagcaacagggaaagcgcaggacccagggtgaaatcacaaaggagcgagaagatgagtgttttagttgtggggatgctggccagctcgtctcctgcaagaaaccaggctgcccaaaagtttaccacgcagactgtctcaatctgaccaagcgaccagcagggaaatgggaatgtccgtggcatcagtgtgacatctgcgggaaggaagcagcctccttctgtgagatgtgccccagctccttttgtaagcagcatcgagaagggatgcttttcatttccaaactggatgggcgtctgtcttgtactgagcatgacccctgtgggcccaatcctctggaacctggggagatccgtgagtatgtgcctcccccagtaccgctgcctccagggccaagcactcacctggcagagcaatcaacaggaatggctgctcaggcacccaaaatgtcagataaacctcctgctgacaccaaccagatgctgtcgctctccaaaaaagctctggcagggacttgtcagaggccactgctacctgaaagacctcttgagagaactgactccaggccccagcctttagataaggtcagagacctcgctgggtcagggaccaaatcccaatccttggtttccagccagaggccactggacaggccaccagcagtggcaggaccaagaccccagctaagcgacaaaccctctccagtgaccagcccaagctcctcaccctcagtcaggtcccaaccactggaaagacctctggggacggctgacccaaggctggataaatccataggtgctgccagcccaaggccccagtcactggagaaaacctcagttcccactggcctgagacttccgccgccagacagactgctcattactagcagtcccaaaccccagacttcagacaggcctactgacaaaccccatgcctctttgtcccagagactcccacctcctgagaaagtactatcagctgtggtccagacccttgtagctaaagaaaaagcactgaggcctgtggaccagaatactcagtcaaaaaatagagctgctttggtgatggatctcatagacctaactcctcgccagaaggagcgggcagcttcacctcatcaggtcacaccacaggctgatgagaagatgccagtgttggagtcaagttcatggcctgccagcaaaggtctggggcatatgccgagagctgttgagaaaggctgtgtgtcagatcctcttcagacatctgggaaagcagcagccccttcagaggacccctggcaagctgttaaatcactcacccaggccagacttctttctcagcctcctgccaaggcctttttatatgagccaacaactcaggcctcaggaagagcttctgcaggggctgagcagaccccagggcctcttagccaatccccgggcctggtgaagcaggcgaagcagatggtcggaggccagcaactacctgcacttgccgccaagagtgggcaatcttttaggtctctcgggaaggccccagcctccctccccactgaagaaaagaagttggtaaccacagagcaaagtccctgggccctgggaaaagcctcatcacgggcagggctctggcccatagtggctggacagacactggcacagtcttgctggtctgctgggagcacacagacattggcacagacttgctggtctcttggaagagggcaagaccccaaaccagagcaaaatacacttccagctcttaaccaggctccttccagtcacaagtgtgcagaatcagaacagaagtagtaccaatcaatgtcacatgaacaaacaagctgcccccagggtaccatttggggaggggaaatcttttctttctttcccccttaaaaaaaaacacatctgccccgaacactttcccactgttattctttcctcatatcccaacactcagaactcttgtgacattagccagtgggggcttatggttgtgtgaaccatgtatgaaaatccagtgggccccaaccaaggagacagacagacttgggtctctttcccccaacttttccacatggtcatcgtgaaataaaaagtccactctggaaaaaaaaaaaaaaaaaaaaaaaaaaaaaaaaaaaaaaaaaaaaaaaaaaaaaaaaaaaaaaaaaaaaaaaaaaaaaaaaaagggggggggcgacgactataatatactcttccccagggggggccgaccatatccaccacagccccccgttttttgttaaaaagggggcgcccacataagaaggaacgatctttatataagagaaagcaagtgggcccgctattttaaaaaaaaatcttttgtggaagaaaaaaatagagggtgagaattattttgatgagagcacaacaaaatcaaggggggggggggagcaaaaaatattggggggagacaacaaaattacttacttaagaaagagattaatttaaagaacccgctgttggggggaaaataaatataataaaattgagaggggctatatataatagtgaggtgaaacaaacaacatccgggataatataagaatgggaggaggaaagaaaaaatattgttgagtgaaacgagggagtagattatgatataatgaagaatattattatttacacgggggggttttttaataaaaatgtg

SEQ ID NO: 568417 - DNA, 392 bp, Homo sapiens
gggaccccgcccaaaccctatgctaagacttaccagcaaagcgaactactattttaattgatccaataacttgaccaacggaacaagttaccctagggataacagcgcaatcctattctagagtccatatcaacaatagggtttcgatgaccgtcatcaaaccctccaattaacgcggttatttggttgcttcctgtaaactccctgggtttagggtttcgatgacgtcatcaaaccctaccctgttcaactaagcactctactctcagtttactgctaaatccaccttcgacccttaagtttcataagggctatcgtaagggtttcgatgacctcatcaaaccctgaccaaaggaccacttcttctcaacatccccctagggtttcgatga

SEQ ID NO: 568418 - DNA, 1647 bp, Homo sapiens
  misc_feature (566)..(566): n is a, c, g, or t
  misc_feature (1192)..(1192): n is a, c, g, or t
  misc_feature (1257)..(1257): n is a, c, g, or t
taattggttaatggtttatttatcaagaggaactatttcttagcccacattatttcagtgtgtgttcatagtttcaggaaccacaagttcaggtgacaaactttctaggtaatttcaacctgtgaagaaaattctttatatttccaagattacttatacacctcgtgaaagaataccagcgcttccctcattcttccctcaaatattctttctcagtgacatctcgataagttctcgtggtaaaaaatctctgtggcgatattgcctttctttctctttgttatctcagcgcaccagcgaaaactttattaacaaaggcgtgtgaacaccccgagggaatattcgcccgagaaatgtgcgtaacagcgccactatatgtgatattctcgcgcaaagacccgccttgtgggcacaagatagtggcgcacggaaatttccagaagggtttgtggagcaaaaaacccttctcgcggagagcgcccatgttgggatatgatatcacggtgctgctcctccctagtgagaatacagcggtttatgttgtgctataaacacgcttctactanaccacaccagaggcgtgttccccctatagatatctctatagaaatatcgcggcgaaagagcggacggcggctctctaatagagagatatatatcccctctcgagagggggggccccccaaagagcttatagcggcgcgttatcccccgagcgctgttttctctttgtgtattaccacaagggggtgggtctcccccatatatatgatgtggaagacctcgcaatatttataacataacgcctataagagcacacacgtgggcccccgctacggctttttcacccaaagcgttctcgtgtagaaccggtgtgggcaaaacccgtgggataagccctgtggggggaaaccacccttttgtgaggtgacacgagggaacaacccccattatatcaatattcgtgagaggagggtgggttggcacccaataattgttgggcggcacccacaaatgatctataacctcttagcgaggcgacgaaaactcttttcaaagaaggacctcccatacaaagcgtgcttacacacacattattcacacagcactgtctttctacaaccacggtgggtctactcacaccgtgggtggttataaaaaccacttaatggcttggacacaataaattggnaccttggccacttggccctatgcgaccaaacaagcttacttgggcgcctcaaaacgttggggagnatcactgcccacatcatcagtgtgggcacaccaccactctcttgttttttcccccccagaatcggggagagcagtactgagaagcaataaacatcaacgccggaactagccaaccaaagacgaccgacaaagaacgatccaggcagaaagcacagagcatatcaacgcgaccgagacgagaagcatggaagagtacaacaactcccaatggtggtacagttcaatcaaacggtcaagcagcagacactccagaacaacacagacatgagcaagatagggcagcagcccaaaccagaacacatgcctaccacgacagcaatcataaacgcagacacgcagcaatactcaatcacagcaacgacaagcgaaacaggacaactaagtcgatac

SEQ ID NO: 568419 - DNA, 312 bp, Homo sapiens
  misc_feature (263)..(263): n is a, c, g, or t
gagagagagagagagaactagtctcgagtttttttttaaagagaaagagagtagaaaataataccgcccaggctggagtgcagtggcatgatctcagctcactgcaacctccacctcctggattcaagcgattctcctgcctcagcctcccaagtagctgggactacaggcacgcaccaccacgcctggctaatttttgtgtttttagtagagatgcacttttactgtgttggccaggcttggtcttgaactcctgacttcgngatccgccgcttcagctcacaaagtgctgggattacaggcatgagcacc

SEQ ID NO: 568420 - DNA, 531 bp, Homo sapiens
  misc_feature (211)..(211): n is a, c, g, or t
  misc_feature (234)..(234): n is a, c, g, or t
  misc_feature (241)..(241): n is a, c, g, or t
aggaggaacagctcaaatgaaaaggagggagctccttcagggtcaaagcagtgacagtgcccagggctctattgtgtctctcccagcttgtaaagggtgaaacagctgccttgtgtgggactgagaggcaagagttgttcctgcccttccctttgtgacttgaagaaccctgactttgtttttgcaaaggcccctgcatgggtttgtgttnatgtaggaataatgtgaggaggnggggagncccccccccccccatgtcccccatgaccctcttcccacggtgacctgggctccctccccaatcatttttcctgttgcaaaaaggtggggctgaggggtctccatttctgtttcaacttcatggggcactgagcgggaactttttccttccctattaaaattagaacctgagtataaatttactttttcaaattcttgccatgagaggttgatgagttaattaaaggagaagattcctaaaatttgagagacaaaataaatggaacccatgagacccttcccaaaaaaaaa

SEQ ID NO: 568421 - DNA, 140 bp, Homo sapiens
  misc_feature (42)..(42): n is a, c, g, or t
cctatacagcaatggagccatcgcggaagtccgtcctcccantgaggatgttgaccacaaccgggtggccgtctcgccatgcatgcatgggcctccgtgcagcacccttgaccaccctgactcctcgttctcccgtgacg

SEQ ID NO: 568422 - DNA, 775 bp, Homo sapiens
  misc_feature (13)..(13): n is a, c, g, or t
  misc_feature (67)..(67): n is a, c, g, or t
  misc_feature (81)..(81): n is a, c, g, or t
  misc_feature (83)..(83): n is a, c, g, or t
  misc_feature (85)..(85): n is a, c, g, or t
  misc_feature (90)..(90): n is a, c, g, or t
  misc_feature (100)..(100): n is a, c, g, or t
  misc_feature (104)..(104): n is a, c, g, or t
  misc_feature (110)..(111): n is a, c, g, or t
  misc_feature (113)..(113): n is a, c, g, or t
  misc_feature (116)..(116): n is a, c, g, or t
  misc_feature (126)..(126): n is a, c, g, or t
  misc_feature (131)..(131): n is a, c, g, or t
  misc_feature (134)..(134): n is a, c, g, or t
  misc_feature (136)..(136): n is a, c, g, or t
  misc_feature (138)..(138): n is a, c, g, or t
  misc_feature (143)..(143): n is a, c, g, or t
  misc_feature (146)..(146): n is a, c, g, or t
  misc_feature (152)..(152): n is a, c, g, or t
  misc_feature (180)..(180): n is a, c, g, or t
  misc_feature (186)..(186): n is a, c, g, or t
  misc_feature (207)..(207): n is a, c, g, or t
  misc_feature (225)..(225): n is a, c, g, or t
  misc_feature (232)..(232): n is a, c, g, or t
  misc_feature (237)..(237): n is a, c, g, or t
  misc_feature (241)..(241): n is a, c, g, or t
  misc_feature (244)..(244): n is a, c, g, or t
  misc_feature (250)..(251): n is a, c, g, or t
  misc_feature (253)..(253): n is a, c, g, or t
  misc_feature (265)..(265): n is a, c, g, or t
  misc_feature (277)..(277): n is a, c, g, or t
  misc_feature (279)..(279): n is a, c, g, or t
  misc_feature (283)..(283): n is a, c, g, or t
  misc_feature (287)..(287): n is a, c, g, or t
  misc_feature (291)..(291): n is a, c, g, or t
  misc_feature (300)..(301): n is a, c, g, or t
  misc_feature (311)..(311): n is a, c, g, or t
  misc_feature (317)..(317): n is a, c, g, or t
  misc_feature (319)..(319): n is a, c, g, or t
  misc_feature (325)..(325): n is a, c, g, or t
  misc_feature (328)..(328): n is a, c, g, or t
  misc_feature (342)..(342): n is a, c, g, or t
  misc_feature (347)..(348): n is a, c, g, or t
  misc_feature (351)..(351): n is a, c, g, or t
  misc_feature (354)..(354): n is a, c, g, or t
  misc_feature (357)..(357): n is a, c, g, or t
  misc_feature (359)..(359): n is a, c, g, or t
  misc_feature (361)..(362): n is a, c, g, or t
  misc_feature (373)..(373): n is a, c, g, or t
  misc_feature (382)..(382): n is a, c, g, or t
  misc_feature (395)..(395): n is a, c, g, or t
  misc_feature (412)..(412): n is a, c, g, or t
  misc_feature (429)..(429): n is a, c, g, or t
  misc_feature (434)..(434): n is a, c, g, or t
  misc_feature (439)..(439): n is a, c, g, or t
  misc_feature (454)..(454): n is a, c, g, or t
  misc_feature (458)..(458): n is a, c, g, or t
  misc_feature (462)..(462): n is a, c, g, or t
  misc_feature (465)..(465): n is a, c, g, or t
  misc_feature (469)..(469): n is a, c, g, or t
  misc_feature (520)..(520): n is a, c, g, or t
  misc_feature (523)..(523): n is a, c, g, or t
  misc_feature (525)..(525): n is a, c, g, or t
  misc_feature (552)..(552): n is a, c, g, or t
  misc_feature (560)..(560): n is a, c, g, or t
  misc_feature (590)..(590): n is a, c, g, or t
  misc_feature (593)..(594): n is a, c, g, or t
  misc_feature (601)..(601): n is a, c, g, or t
  misc_feature (619)..(619): n is a, c, g, or t
  misc_feature (655)..(655): n is a, c, g, or t
  misc_feature (668)..(668): n is a, c, g, or t
  misc_feature (682)..(682): n is a, c, g, or t
  misc_feature (685)..(685): n is a, c, g, or t
  misc_feature (688)..(688): n is a, c, g, or t
  misc_feature (691)..(691): n is a, c, g, or t
  misc_feature (698)..(698): n is a, c, g, or t
  misc_feature (702)..(702): n is a, c, g, or t
  misc_feature (706)..(706): n is a, c, g, or t
  misc_feature (709)..(709): n is a, c, g, or t
  misc_feature (742)..(742): n is a, c, g, or t
cagagggcataancctggccaaagttgcccagggagcagatttgtctgagcagggccagccccaggnagctagaagttaanananaaggntttatgggtntggnagattnnangcnactggtcccntaganagntntntctcntgnttggtnagattccactttggagaaaatgggctcntttganaggatggcctggtgagggaanacaggtactaacggtaanaggccgntgaanactnacnactggnntnagggtggagctnagctgactgganantaantccnttanaaggacctnntcctggtgcnaggctntnccactnaantgctcatggccatnaggannttnaanttntntnntctcctccatnaggcccctntttttttggcctnagccccggtcctcactntttggtggctattatgnaggantctcnaccctcttttggaanagtnttgnttnaagnaagggagattgttcttctagagggacaggaaaagaagagatgtccacatanttntntaaatataagaagaaaggaaaggtaantggtgaantaaaatataaaaagatggttgggtaatagnatnngagaagntgtaatggtgaagagtantagaagatgagaaggatgttgaattgtaaagatgtntaattataaaggnaggaatatgtaagnaantgnagntgggtgnaaantggntgnaagaggtaaagatgaatggaaggattggaaganagtgggaagtagagggagaaaagaagatgggtg

SEQ ID NO: 568423 - DNA, 526 bp, Homo sapiens
gctgcgcctactactactcacctcggaagaacaggctttttcaggtttggttcccctttaagttttaatagaaaaaaaaagttttaagtcaggtggtaccaatatatccccagaaagaatggcaatttaccaaggttttcacgtgtttggagagaaatcttacggaaagactagtgatgtccattttccagtaaatacggagcgaaaaacaatttttataccccaatctgaggtataaactggcttttggggggatcacaacggcggtaaattagacaatggtagcaacaatccaagacaacaacagaatgcctatgacagtcggccatattcgggtgagtgtctatcaaagctcatcatgatttttggtgagatcttcccggtaatgggtagctgggcttccaacaaacaggttccagttctccaatatttcctctttagttagcctctcatcctggttttggtctgattcatataccagatgcctggcctcagcgtgtgcgtgatcataatcttgagggaggat

SEQ ID NO: 568424 - DNA, 123 bp, Homo sapiens
tctctgacctggtcctgtcagccctgtatacgtccgtaagagtagtgaatgccatatcaggatctgtgtgatgtgtcaactctgcagtataatatcctagaggctgctagcgagtcccccaac

SEQ ID NO: 568425 - DNA, 363 bp, Homo sapiens
tgtaatcgggcacgccgacacgtagatttgacagctgctggcatagagcgtgcgtcagggacctgctgactggcgattactacaatgcaaggagagatgcagcatcaagcacttggccgaccccattgacgatcttcttcttgctgcgagtaagatacctggaatctcatcaactggagtcggtgatggaggcaacgagcttgggatgggtaaagtcaaggaggctgtgaggaggcacatacggcacggggatgtcatcgcctgcaacgtgcaggctgactatgacgtcattgctgatgtttctaactggggaggctatgccatggccatgcgcactctacatcctgtactcatgtgctgtcc

SEQ ID NO: 568426 - DNA, 1082 bp, Homo sapiens
  misc_feature (73)..(73): n is a, c, g, or t
  misc_feature (95)..(95): n is a, c, g, or t
  misc_feature (166)..(166): n is a, c, g, or t
  misc_feature (175)..(175): n is a, c, g, or t
  misc_feature (183)..(183): n is a, c, g, or t
  misc_feature (198)..(198): n is a, c, g, or t
gtaagtagctatagcaccgcctacttaattcttttccatatattgtgatacaaacttttgaatatggaatctnactatttgaatagaaatgtgtntgtataatatacatacatacataagcatatatgtgtgtgtgtgtgtgtatatatatatatatgcatgctgngaaacttgnctacacancataaatcacttttnaaattccaggaacggagtagtctgacacggtgattatccttaagaggctgactccgttataaacttgattatatagagtttttactcccagtagcaagggattctaacgttagattgcacttacatgattagttgttataataaaactaacgaataaaggctgcataattcaaagataaataggaatacgctagtaggtgaaataacaaccaaaatactgacactctgatgtacatacaggtatctacaggaacaagatcaggtataatacacaatatggagataacactaaacacagggactacccacgaaaaagtgacctagaaaacaatggtaccaataagatacgggatgctacactacagaaacgctaaagacacataacaaacatacacacactacatcagagtaactaaactacaaaaattaatagatataagataaagacacataagaaatacacagcgaataacaacaaacagcacgagacagaacataacaacgaacactgctcaaggcacatcaacaagagcaataaaacccctagaaccagaaaatacacatgaaacggaatatataaagacaccacacacacaaactaccacacacaaagtagacacacaacaaaagagcagacatagacatccatagaaaccaacagaaaacaacaaacacaagagtctggcatcacaacagcggtaggtaacaagtacactaacacaacaagtgaaaacgaaagcaaatcgatcatcagaattaggacagtactagcaagacaagaagaaacaggaagaaaacaacgaaacacagagtggaggacagcagaacaagacaaaataaaaacaaaaaacacacaaacaacgagtagacaccactaaaaactt

SEQ ID NO: 568427 - DNA, 300 bp, Homo sapiens
tggcacagggaaacacttaaacctttcgggggaaggtcggtaaactcccggggggtcccttcccgaggatgcctactggttttccaaagcccccgtgagtggtgtttggtttggttttttctggaaagggagtttcactctggtggcccaggcgggagtgcaagggtgcgatctcgtctcccgtgttacctctgcctccggggttcaagcgattctcctgcctcagcctcttgaatagctgaaattataggcttgcgccaccaggcccagctaatttggtatttttagtagagagggggt

SEQ ID NO: 568428 - DNA, 300 bp, Homo sapiens
cctactggagaccgaccctcgtttacggagtggcagcgcggttcctctgagtgcgaacgtctccccttctcctgcttctccagccccttcggactcctcgcccgccgcgggaacccgagaccccagggtacgccccacccctgaccccgctcgcgacatgtacaccccggctcggcggcgcctcatgcgggactccaagaggttgcaggaggatcctccagccggagtcagcgacgctccgcccgagaacaacataaaggtgcggaacgcggccattttcggacctgaagggaccccggg

SEQ ID NO: 568429 - DNA, 155 bp, Homo sapiens
tgcagctacttgtgatatgtgagtcacgttgccacaaaagcaaaagtctcgttggccttgaggatgacgcggtcgacctacagagcccgcaggcgcgtacaggattttggggtagctggtcatgacggtgcacaacggaggctcacatgtgctgt

SEQ ID NO: 568430 - DNA, 1973 bp, Homo sapiens
ggaagtcattcctagcagaggactcagatatatataggattgaagatctctcagttaagtctacatgaaaaggatggtttcttggagcttccacaaacttaaaaccatgaaacatctattattgctactattgtgtgtttttctagttaagtcccaaggtgtcaacgacaatgaggagggtttcttcagtgcccgtggtcatcgaccccttgacaagaagagagaagaggctcccagcctgaggcctgccccaccgcccatcagtggaggtggctatcgggctcgtccagccaaagcagctgccactcaaaagaaagtagaaagaaaagcccctgatgctggaggctgtcttcacgctgacccagacctgggggtgttgtgtcctacaggatgtcagttgcaagaggctttgctacaacaggaaaggccaatcagaaatagtgttgatgagttaaataacaatgtggaagctgtttcccagacctcctcttcttcctttcagtacatgtatttgctgaaagacctgtggcaaaagaggcagaagcaagtaaaagataatgaaaatgtagtcaatgagtactcctcagaactggaaaagcaccaattatatatagatgagactgtgaatagcaatatcccaactaaccttcgtgtgcttcgttcaatcctggaaaacctgagaagcaaaatacaaaagttagaatctgatgtctcagctcaaatggaatattgtcgcaccccatgcactgtcagttgcaatattcctgtggtgtctggcaaagaatgtgaggaaattatcaggaaaggaggtgaaacatctgaaatgtatctcattcaacctgacagttctgtcaaaccgtatagagtatactgtgacatgaatacagaaaatggaggatggacagtgattcagaaccgtcaagacggtagtgttgactttggcaggaaatgggatccatataaacagggatttggaaatgttgcaaccaacacagatgggaagaattactgtggcctaccaggtgaatattggcttggaaatgataaaattagccagcttaccaggatgggacccacagaacttttgatagaaatggaggactggaaaggagacaaagtaaaggctcactatggaggattcactgtacagaatgaagccaacaaataccagatctcagtgaacaaatacagaggaacagccggtaatgccctcatggatggagcatctcagctgatgggagaaaacaggaccatgaccattcacaacggcatgttcttcagcacgtatgacagagacaatgacggctcagtgttctaaagaagacggtggtggatggtggtataatagatgtcatgcagccaatccaaacggcagatactactggggtggacagtacacctgggacatggcaaagcatggcacagatgatggtgtagtatggatgaattggaaggggtcatggtactcaatgaggggtcatggtactcaatgaggaagatgagtatgaagatcaggcccttcttcccacagcaatagtccccaatacgtagatttttgctcttctgtatgtgacaacatttttgtacattatgttattggaattttctttcatacattatattcctctaaaactctcaagcagacgtgagtgtgactttttgaaaaaagtataggataaattacattaaaatagcacatgattttcttttgttttcttcatttctcttgctcaccaagaagtaacaaaagtatagttttgacagagttggtgttcataatttcagttctagttgattgcgagaattttcaaataaggaagaggggtcttttatccttgtcgtaggaaaaccatgacggaaaggaaaaactgatgtttaaaagtccacttttaaaactatatttatttatgtaggatctgtcaaagaaaacttccaaaaagatttattaattaaaccagactctgttgcaataa

SEQ ID NO: 568431 - DNA, 1593 bp, Homo sapiens
ggaagtcattcctagcagaggactcagatatatataggattgaagatctctcagttaagtctacatgaaaaggatggtttcttggagcttccacaaacttaaaaccatgaaacatctattattgctactattgtgtgtttttctagttaagtcccaaggtgtcaacgacaatgaggagggtttcttcagtgcccgtggtcatcgaccccttgacaagaagagagaagaggctcccagcctgaggcctgccccaccgcccatcagtggaggtggctatcgggctcgtccagccaaagcagctgccactcaaaagaaagtagaaagaaaagcccctgatgctggaggctgtcttcacgctgacccagacctgggggtgttgtgtcctacaggatgtcagttgcaagaggctttgctacaacaggaaaggccaatcagaaatagtgttgatgagttaaataacaatgtggaagctgtttcccagacctcctcttcttcctttcagtacatgtatttgctgaaagacctgtggcaaaagaggcagaagcaagtaaaagataatgaaaatgtagtcaatgagtactcctcagaactggaaaagcaccaattatatatagatgagactgtgaatagcaatatcccaactaaccttcgtgtgcttcgttcaatcctggaaaacctgagaagcaaaatacaaaagttagaatctgatgtctcagctcaaatggaatattgtcgcaccccatgcactgtcagttgcaatattcctgtggtgtctggcaaagaatgtgaggaaattatcaggaaaggaggtgaaacatctgaaatgtatctcattcaacctgacagttctgtcaaaccgtatagagtatactgtgacatgaatacagaaaatggaggatggacagtgattcagaaccgtcaagacggtagtgttgactttggcaggaaatgggatccatataaacagggatttggaaatgttgcaaccaacacagatgggaagaattactgtggcctaccaggtgaatattggcttggaaatgataaaattagccagcttaccaggatgggacccacagaacttttgatagaaatggaggactggaaaggagacaaagtaaaggctcactatggaggattcactgtacagaatgaagccaacaaataccagatctcagtgaacaaatacagaggaacagccggtaatgccctcatggatggagcatctcagctgatgggagaaaacaggaccatgaccattcacaacggcatgttcttcagcacgtatgacagagacaatgacggctggttaacatcagatcccagaaaacagtgttctaaagaagacggtggtggatggtggtataatagatgtcatgcagccaatccaaacggcagatactactggggtggacagtacacctgggacatggcaaagcatggcacagatgatggtgtagtatggatgaattggaacaggatatccaataacctcagggaggggccccggcccccaattgccctatatggggccgttaacaatccctggccggtgttttcaaccttctgcctggggaaaccctgggtttcccc

SEQ ID NO: 568432 - DNA, 1940 bp, Homo sapiens
  misc_feature (1273)..(1273): n is a, c, g, or t
ggaagtcattcctagcagaggactcagatatatataggattgaagatctctcagttaagtctacatgaaaaggatggtttcttggagcttccacaaacttaaaaccatgaaacatctattattgctactattgtgtgtttttctagttaagtcccaaggtgtcaacgacaatgaggagggtttcttcagtgcccgtggtcatcgaccccttgacaagaagagagaagaggctcccagcctgaggcctgccccaccgcccatcagtggaggtggctatcgggctcgtccagccaaagcagctgccactcaaaagaaagtagaaagaaaagcccctgatgctggaggctgtcttcacgctgacccagacctgggggtgttgtgtcctacaggatgtcagttgcaagaggctttgctacaacaggaaaggccaatcagaaatagtgttgatgagttaaataacaatgtggaagctgtttcccagacctcctcttcttcctttcagtacatgtatttgctgaaagacctgtggcaaaagaggcagaagcaagtaaaagataatgaaaatgtagtcaatgagtactcctcagaactggaaaagcaccaattatatatagatgagactgtgaatagcaatatcccaactaaccttcgtgtgcttcgttcaatcctggaaaacctgagaagcaaaatacaaaagttagaatctgatgtctcagctcaaatggaatattgtcgcaccccatgcactgtcagttgcaatattcctgtggtgtctggcaaagaatgtgaggaaattatcaggaaaggaggtgaaacatctgaaatgtatctcattcaacctgacagttctgtcaaaccgtatagagtatactgtgacatgaatacagaaaatggaggatggacagtgattcagaaccgtcaagacggtagtgttgactttggcaggaaatgggatccatataaacagggatttggaaatgttgcaaccaacacagatgggaagaattactgtggcctaccaggtgaatattggcttggaaatgataaaattagccagcttaccaggatgggacccacagaacttttgatagaaatggaggactggaaaggagacaaagtaaaggctcactatggaggattcactgtacagaatgaagccaacaaataccagatctcagtgaacaaatacagaggaacagccggtaatgccctcatggatggagcatctcagctgatgggagacaatgacggttgggtaacatcagatccatanacagtgttctaaagaagacggtggtggatggtggtataatagatgtcatgcagccaatccaaacggcagatactactggggtggacagtacacctgggacatggcaaagcatggcacagatgatggtgtagtatggatgaattggaaggggtcatggtactcaatgaggggtcatggtactcaatgaggaagatgagtatgaagatcaggcccttcttcccacagcaatagtccccaatacgtagatttttgctcttctgtatgtgacaacatttttgtacattatgttattggaattttctttcatacattatattcctctaaaactctcaagcagacgtgagtgtgactttttgaaaaaagtataggataaattacattaaaatagcacatgattttcttttgttttcttcatttctcttgctcaccaagaagtaacaaaagtatagttttgacagagttggtgttcataatttcagttctagttgattgcgagaattttcaaataaggaagaggggtcttttatccttgtcgtaggaaaaccatgacggaaaggaaaaactgatgtttaaaagtccacttttaaaactatatttatttatgtaggatctgtcaaagaaaacttccaaaaagatttattaattaaaccagactctgttgcaataa

SEQ ID NO: 568433 - DNA, 190 bp, Homo sapiens
cacaggacaagctgtaatacacctacttgggcggaatgatacgtaggtcaggagatcgagaccatcctggctaacaaggtgaaaccccgtctctactaaaaatacggaagattagccgggcgcggtggcgggcgcctgtagtcccagctactcaggaggctgaggcaggagaatggcgtgaacccgggaa

SEQ ID NO: 568434 - DNA, 163 bp, Homo sapiens
gaaggtgaagaaacttttgaagctgcaatgttgggcaggcagaagaagtggtcaggagaaaatttgtgatgatgagctgatcttaatcaaaatcctaaggctcgtacgtctcaatcgttatcttacgtgggcaaatgtttcatgtgtatgagatggcgcctct

SEQ ID NO: 568435 - DNA, 1890 bp, Homo sapiens
ggaagtcattcctagcagaggactcagatatatataggattgaagatctctcagttaagtctacatgaaaaggatggtttcttggagcttccacaaacttaaaaccatgaaacatctattattgctactattgtgtgtttttctagttaagtcccaaggtgtcaacgacaatgaggagggtttcttcagtgcccgtggtcatcgaccccttgacaagaagagagaagaggctcccagcctgaggcctgccccaccgcccatcagtggaggtggctatcgggctcgtccagccaaagcagctgccactcaaaagaaagtagaaagaaaagcccctgatgctggaggctgtcttcacgctgacccagacctgggggtgttgtgtcctacaggatgtcagttgcaagaggctttgctacaacaggaaaggccaatcagaaatagtgttgatgagttaaataacaatgtggaagctgtttcccagacctcctcttcttcctttcagtacatgtatttgctgaaagacctgtggcaaaagaggcagaagcaagtaaaagataatgaaaatgtagtcaatgagtactcctcagaactggaaaagcaccaattatatatagatgagactgtgaatagcaatatcccaactaaccttcgtgtgcttcgttcaatcctggaaaacctgagaagcaaaatacaaaagttagaatctgatgtctcagctcaaatggaatattgtcgcaccccatgcactgtcagttgcaatattcctgtggtgtctggcaaagaatgtgaggaaattatcaggaaaggaggtgaaacatctgaaatgtatctcattcaacctgacagttctgtcaaaccgtatagagtatactgtgacatgaatacagaaaatggaggatggacagtgattcagaaccgtcaagacggtagtgttgactttggcaggaaatgggatccatataaacagggatttggaaatgttgcaaccaacacagatgggaagaattactgtggcctaccaggtgaatattggcttggaaatgataaaattagccagcttaccaggatgggacccacagaacttttgatagaaatggaggactggaaaggagacaaagtaaaggctcactatggaggattcactgtacagaatgaagccaacaaataccagatctcagtgaacaaatacagaggaacagccggtaatgccctcatggatggagcatctcagctgatgggagaaaacaggaccatgaccattcacaacggcatgttcttcagcacgtatgacagagacaatgacggctcagtgttctaaagaagacggtggtggatggtggtataatagatgtcatgcagccaatccaaacggcagatactactggggtggacagtacacctgggacatggcaaagcatggcacagatgatggtgtagtatggatgaattggaaggggtcatggtactcaatgatgctcttctgtatgtgacaacatttttgtacattatgttattggaattttctttcatacattatattcctctaaaactctcaagcagacgtgagtgtgactttttgaaaaaagtataggataaattacattaaaatagcacatgattttcttttgttttcttcatttctcttgctcaccaagaagtaacaaaagtatagttttgacagagttggtgttcataatttcagttctagttgattgcgagaattttcaaataaggaagaggggtcttttatccttgtcgtaggaaaaccatgacggaaaggaaaaactgatgtttaaaagtccacttttaaaactatatttatttatgtaggatctgtcaaagaaaacttccaaaaagatttattaattaaaccagactctgttgcaataa

SEQ ID NO: 568436 - DNA, 262 bp, Homo sapiens
ttcttctgccagtcggaagtgtggagccctgagcttaccatagatgaggggtttatctggcgggatagataccctggggcttgttaatcatacttaactttaccatatataatctcatgaccgggttacaatatattatcttgttgctaataagaatttagaagcggggtgtaatccacgttttatctcagtgagcctccccctcgtactcagacccatgagggctttcggtgtatgtcgaagtcttggctggaccttttgc

SEQ ID NO: 568437 - DNA, 251 bp, Homo sapiens
acacacacacacacacacacacacacacacacacactacctatgagagttgtattaacgcagcaggctataaccaggtaattaattgtattgccactaatagagcttgattgagttgattatctttcaaatggcctctcggtttcataatggagacagaacagcgtagcccagactggagacagaacagcgtagcccagactggagacagaacagcgtagcccagactggagacagaacagcggtcgacgc

SEQ ID NO: 568438 - DNA, 2172 bp, Homo sapiens
  misc_feature (1981)..(1981): n is a, c, g, or t
  misc_feature (1987)..(1987): n is a, c, g, or t
ggaagtcattcctagcagaggactcagatatatataggattgaagatctctcagttaagtctacatgaaaaggatggtttcttggagcttccacaaacttaaaaccatgaaacatctattattgctactattgtgtgtttttctagttaagtcccaaggtgtcaacgacaatgaggagggtttcttcagtgcccgtggtcatcgaccccttgacaagaagagagaagaggctcccagcctgaggcctgccccaccgcccatcagtggaggtggctatcgggctcgtccagccaaagcagctgccactcaaaagaaagtagaaagaaaagcccctgatgctggaggctgtcttcacgctgacccagacctgggggtgttgtgtcctacaggatgtcagttgcaagaggctttgctacaacaggaaaggccaatcagaaatagtgttgatgagttaaataacaatgtggaagctgtttcccagacctcctcttcttcctttcagtacatgtatttgctgaaagacctgtggcaaaagaggcagaagcaagtaaaagataatgaaaatgtagtcaatgagtactcctcagaactggaaaagcaccaattatatatagatgagactgtgaatagcaatatcccaactaaccttcgtgtgcttcgttcaatcctggaaaacctgagaagcaaaatacaaaagttagaatctgatgtctcagctcaaatggaatattgtcgcaccccatgcactgtcagttgcaatattcctgtggtgtctggcaaagaatgtgaggaaattatcaggaaaggaggtgaaacatctgaaatgtatctcattcaacctgacagttctgtcaaaccgtatagagtatactgtgacatgaatacagaaaatggaggatggacagtgattcagaaccgtcaagacggtagtgttgactttggcaggaaatgggatccatataaacagggatttggaaatgttgcaaccaacacagatgggaagaattactgtggcctaccaggtgaatattggcttggaaatgataaaattagccagcttaccaggatgggacccacagaacttttgatagaaatggaggactggaaaggagacaaagtaaaggctcactatggaggattcactgtacagaatgaagccaacaaataccagatctcagtgaacaaatacagaggaacagccggtaatgccctcatggatggagcatctcagctgatgggagaaaacaggaccatgaccattcacaacggcatgttcttcagcacgtatgacagagacaatgacggctcagtgttctaaagaagacggtggtggatggtggtataatagatgtcatgcagccaatccaaacggcagatactactggggtggacagtacacctgggacatggcaaagcatggcacagatgatggtgtagtatggatgaattggaaggggtcatggtactcaatgaggggtcatggtactcaatgaggaagatgagtatgaagatcaggcccttcttcccacagcaatagtccccaatacgtagatttttgctcttctgtatgtgacaacatttttgtacattatgttattggaattttctttcatacattatattcctctaaaactctcaagcagacgtgagtgtgactttttgaaaaaagtataggataaattacattaaaatagcacatgattttcttttgttttcttcatttctcttgctcaccaagaagtaacaaaagtatagttttgacagagttggtgttcataatttcagttctagttgattgcgagaattttcaaataaggaagaggggtcttttatccttgtcgtaggaaaaccatgacggaaaggaaaaactgatgtttaaaagtccacttttaaaactatatttatttatgtaggatctgtcaaagaaaacttccaaaaagatttattaattaaaccagactctgttgcaataaaaaaaaanaaaaanaaaaaaaaaaagaaaaaaaaaaaatttgtgggggggccttgggcccttgaaaaaggttttttaaacacccattcggtttggggggggggccccaataggtttgtgcaccgtggcacaaacggggcccaaggaaaacccggggccagaacaaaggggggggattccccccaataaaaaagcccggg

SEQ ID NO: 568439 - DNA, 1840 bp, Homo sapiens
ggaagtcattcctagcagaggactcagatatatataggattgaagatctctcagttaagtctacatgaaaaggatggtttcttggagcttccacaaacttaaaaccatgaaacatctattattgctactattgtgtgtttttctagttaagtcccaaggtgtcaacgacaatgaggagggtttcttcagtgcccgtggtcatcgaccccttgacaagaagagagaagaggctcccagcctgaggcctgccccaccgcccatcagtggaggtggctatcgggctcgtccagccaaagcagctgccactcaaaagaaagtagaaagaaaagcccctgatgctggaggctgtcttcacgctgacccagacctgggggtgttgtgtcctacaggatgtcagttgcaagaggctttgctacaacaggaaaggccaatcagaaatagtgttgatgagttaaataacaatgtggaagctgtttcccagacctcctcttcttcctttcagtacatgtatttgctgaaagacctgtggcaaaagaggcagaagcaagtaaaagataatgaaaatgtagtcaatgagtactcctcagaactggaaaagcaccaattatatatagatgagactgtgaatagcaatatcccaactaaccttcgtgtgcttcgttcaatcctggaaaacctgagaagcaaaatacaaaagttagaatctgatgtctcagctcaaatggaatattgtcgcaccccatgcactgtcagttgcaatattcctgtggtgtctggcaaagaatgtgaggaaattatcaggaaaggaggtgaaacatctgaaatgtatctcattcaacctgacagttctgtcaaaccgtatagagtatactgtgacatgaatacagaaaatggaggatggacagtgattcagaaccgtcaagacggtagtgttgactttggcaggaaatgggatccatataaacagggatttggaaatgttgcaaccaacacagatgggaagaattactgtggcctaccaggtgaatattggcttggaaatgataaaattagccagcttaccaggatgggacccacagaacttttgatagaaatggaggactggaaaggagacaaagtaaaggctcactatggaggattcactgtacagaatgaagccaacaaataccagatccagtgttctaaagaagacggtggtggatggtggtataatagatgtcatgcagccaatccaaacggcagatactactggggtggacagtacacctgggacatggcaaagcatggcacagatgatggtgtagtatggatgaattggaaggggtcatggtactcaatgaggggtcatggtactcaatgaggaagatgagtatgaagatcaggcccttcttcccacagcaatagtccccaatacgtagatttttgctcttctgtatgtgacaacatttttgtacattatgttattggaattttctttcatacattatattcctctaaaactctcaagcagacgtgagtgtgactttttgaaaaaagtataggataaattacattaaaatagcacatgattttcttttgttttcttcatttctcttgctcaccaagaagtaacaaaagtatagttttgacagagttggtgttcataatttcagttctagttgattgcgagaattttcaaataaggaagaggggtcttttatccttgtcgtaggaaaaccatgacggaaaggaaaaactgatgtttaaaagtccacttttaaaactatatttatttatgtaggatctgtcaaagaaaacttccaaaaagatttattaattaaaccagactctgttgcaataa

SEQ ID NO: 568440 - DNA, 173 bp, Homo sapiens
gaggatcccctactttttcacaggtggaatgctttcatcttttccttgttcagtataaagttgggctgtgggtttgtccaaagtggcgttttaattaacttaagttatgtaccttctatgccagttttgcgtgaaagttttcatcacaaagttatagctggatttatgtcaca

SEQ ID NO: 568441 - DNA, 2279 bp, Homo sapiens
ggaagtcattcctagcagaggactcagatatatataggattgaagatctctcagttaagtctacatgaaaaggatggtttcttggagcttccacaaacttaaaaccatgaaacatctattattgctactattgtgtgtttttctagttaagtcccaaggtgtcaacgacaatgaggagggtttcttcagtgcccgtggtcatcgaccccttgacaagaagagagaagaggctcccagcctgaggcctgccccaccgcccatcagtggaggtggctatcgggctcgtccagccaaagcagctgccactcaaaagaaagtagaaagaaaagcccctgatgctggaggctgtcttcacgctgacccagacctgggggtgttgtgtcctacaggatgtcagttgcaagaggctttgctacaacaggaaaggccaatcagaaatagtgttgatgagttaaataacaatgtggaagctgtttcccagacctcctcttcttcctttcagtacatgtatttgctgaaagacctgtggcaaaagaggcagaagcaagtaaaagataatgaaaatgtagtcaatgagtactcctcagaactggaaaagcaccaattatatatagatgagactgtgaatagcaatatcccaactaaccttcgtgtgcttcgttcaatcctggaaaacctgagaagcaaaatacaaaagttagaatctgatgtctcagctcaaatggaatattgtcgcaccccatgcactgtcagttgcaatattcctgtggtgtctggcaaagaatgtgaggaaattatcaggaaaggaggtgaaacatctgaaatgtatctcattcaacctgacagttctgtcaaaccgtatagagtatactgtgacatgaatacagaaaatggaggatggacagtgattcagaaccgtcaagacggtagtgttgactttggcaggaaatgggatccatataaacagggatttggaaatgttgcaaccaacacagatgggaagaattactgtggcctaccaggtgaatattggcttggaaatgataaaattagccagcttaccaggatgggacccacagaacttttgatagaaatggaggactggaaaggagacaaagtaaaggctcactatggaggattcactgtacagaatgaagccaacaaataccagatctcagtgaacaaatacagaggaacagccggtaatgccctcatggatggagcatctcagctgatgggagaaaacaggaccatgaccattcacaacggcatgttcttcagcacgtatgacagagacaatgacggctcagtgttctaaagaagacggtggtggatggtggtataatagatgtcatgcagccaatccaaacggcagatactactggggtggacagtacacctgggacatggcaaagcatggcacagatgatggtgtagtatggatgaattggaaggggtcatggtactcaatgagaagatgagtatgaagatcaggcccttcttcccacagcaatagtccccaatacgtagatttttgctcttctgtatgtgacaacatttttgtacattatgttattggaattttctttcatacattatattcctctaaaactctcaagcagacgtgagtgtgactttttgaaaaaagtataggataaattacattaaaatagcacatgattttcttttgttttcttcatttctcttgctcaccaagaagtcgagaattttcaaataaggaagaggggtcttttatccttgtcgtaggaaaaccatgacggaaaggaaaaactgatgtttaaaagtccacttttaaaactatatttatttatgtaggatctgtcaaagaaaacttccaaaaagatttattaattaaaccagactctgttgcaataagttaatgttttcttgttttgtaatccacacattcaatgagttaggctttgcacttgtaaggaaggagaagcgttcacaacctcaaatagctaataaaccggtcttgaatatttgaagatttaaaatctgactctaggacgggcacggtggctcacgactataatcccaacactttgggaggccgaggcgggcggtcacaaggtcaggagttcaagaccagcctgaccaatatggtgaaaccccatctctactaaaaatacaaaaattagccaggcgtggtggcaggtgcctgtagtcccagctacctgtgaggtggagattgcattgagccaagatctcaacactgcactccagcctgggcaacagcgtgagactccaccttc

SEQ ID NO: 568442 - DNA, 1351 bp, Homo sapiens
  misc_feature (636)..(637): n is a, c, g, or t
ggtgacaggagccccatggcgacctgcccagccccacctcagcccatcttgacgagaatctaatggctccatgtcagccaccacggtggccccctcatgtcaattagtgggccgagccatcactctgggcagtgggcaactcgtctaaagttatagcctgctcgcaagcaagcgaacgcacggtggtgactgtacgggatggcatgagtgtctactgacgtctctagacaaggccctgaaggtgcggtgtctaaatcaggactggtgtgtggtctaccgactcatcaagggacgaatagacggttcactagcgtgtggatcatcagtccattgctccgcctggatggcgaggagctcattgtcgaggtccttgaagatgtcccgctgaccatgcacaattttgtacggaagaccttcttcgagcgctgggcgttctgttgcacgttctgccttaaggtttcatgtatccagtggcgttccgttgccaaacctgtggctacaagttccatcgcatgcattgttcctccaaggtccccacagtctgtgttgacatgagtaccaaccgccaacagttctaccacagtgtccaggatttgtccggaggctccagacagcatgaggctccctcgaaccgcnnccctgaatgagttgctaaccccccaggtcccgagcccgcgagccagttactgtgactccgtgatcacttccccttccctgcacccagtctccagatgccccacctacagtgtcactccgttccgatggtgccactctccaagcgtccatatgggtcagcatccacggcccccatggactccaacctcatccagactcactggccagagtttcagcactgatgctgccggtagtacaggaggtagtgatggaaccccccgggggagcccaagcccagtcagcgtgtcctcggggaggaagtccccagcattccaagttcaccagcagagcagcgaacgagccggaagtccttggcgatgacaagaagaccgtgaagaacctggggtacccgggtactcaggctattactgggaggtaccaccttcagatgaggtgcagctgctgaataggatcgggacgggctcgtagggaccgtgtttcgagggcgagtggcatggcagagtgtggccgtgaaacgttgctcaaggttgtccccagccccacaagttgagccaggcccaggctttcaagaatgagatgccaggtgctcaggaaagacgcgacatgtcaacatcttgcgtgtaatgcgcttcatgaccggggcctggatttgccatgcatcacacattgcggttgagggctcaaggcctctagcaatcacctgcatgttggccac

SEQ ID NO: 568443 - DNA, 2346 bp, Homo sapiens
  misc_feature (1627)..(1627): n is a, c, g, or t
  misc_feature (1631)..(1631): n is a, c, g, or t
  misc_feature (1633)..(1633): n is a, c, g, or t
  misc_feature (1635)..(1635): n is a, c, g, or t
  misc_feature (1637)..(1637): n is a, c, g, or t
  misc_feature (1639)..(1639): n is a, c, g, or t
  misc_feature (1656)..(1656): n is a, c, g, or t
  misc_feature (1660)..(1660): n is a, c, g, or t
  misc_feature (1665)..(1665): n is a, c, g, or t
  misc_feature (1674)..(1674): n is a, c, g, or t
  misc_feature (1676)..(1680): n is a, c, g, or t
  misc_feature (1682)..(1682): n is a, c, g, or t
  misc_feature (1685)..(1685): n is a, c, g, or t
  misc_feature (1689)..(1689): n is a, c, g, or t
  misc_feature (1696)..(1696): n is a, c, g, or t
  misc_feature (1701)..(1701): n is a, c, g, or t
  misc_feature (1712)..(1712): n is a, c, g, or t
  misc_feature (1722)..(1722): n is a, c, g, or t
  misc_feature (1732)..(1732): n is a, c, g, or t
ggaagtcattcctagcagaggactcagatatatataggattgaagatctctcagttaagtctacatgaaaaggatggtttcttggagcttccacaaacttaaaaccatgaaacatctattattgctactattgtgtgtttttctagttaagtcccaaggtgtcaacgacaatgaggagggtttcttcagtgcccgtggtcatcgaccccttgacaagaagagagaagaggctcccagcctgaggcctgccccaccgcccatcagtggaggtggctatcgggctcgtccagccaaagcagctgccactcaaaagaaagtagaaagaaaagcccctgatgctggaggctgtcttcacgctgacccagacctgggggtgttgtgtcctacaggatgtcagttgcaagaggctttgctacaacaggaaaggccaatcagaaatagtgttgatgagttaaataacaatgtggaagctgtttcccagacctcctcttcttcctttcagtacatgtatttgctgaaagacctgtggcaaaagaggcagaagcaagtaaaagataatgaaaatgtagtcaatgagtactcctcagaactggaaaagcaccaattatatatagatgagactgtgaatagcaatatcccaactaaccttcgtgtgcttcgttcaatcctggaaaacctgagaagcaaaatacaaaagttagaatctgatgtctcagctcaaatggaatattgtcgcaccccatgcactgtcagttgcaatattcctgtggtgtctggcaaagaatgtgaggaaattatcaggaaaggaggtgaaacatctgaaatgtatctcattcaacctgacagttctgtcaaaccgtatagagtatactgtgacatgaatacagaaaatggaggatggacagtgattcagaaccgtcaagacggtagtgttgactttggcaggaaatgggatccatataaacagggatttggaaatgttgcaaccaacacagatgggaagaattactgtggcctaccaggtgaatattggcttggaaatgataaaattagccagcttaccaggatgggacccacagaacttttgatagaaatggaggactggaaaggagacaaagtaaaggctcactatggaggattcactgtacagaatgaagccaacaaataccagatctcagtgaacaaatacagaggaacagccggtaatgccctcatggatggagcatctcagctgatgggagaaaacaggaccatgaccattcacaacggcatgttcttcagcacgtatgacagagacaatgacggctcagtgttctaaagaagacggtggtggatggtggtataatagatgtcatgcagccaatccaaacggcagatactactggggtggacagtacacctgggacatggcaaagcatggcacagatgatggtgtagtatggatgaattggaaggggtcatggtactcaatgagaagatgagtatgaagatcaggcccttcttcccacagcaatagtccccaatacgtagatttttgctcttctgtatgtgacaacatttttgtacattatgttattggaattttctttcatacattatattcctctaaaactctcaagcacccccncccngncntnantgtcccccccccccccncccntcggntcaaccccncnnnnntngcncctnatccccntctgntccccccatcnctcccgcccnccaagaagtnaacaaaagtatagttttgacagagttggtgttcataatttcagttctagttgattgcgagaattttcaaataaggaagaggggtcttttatccttgtcgtaggaaaaccatgacggaaaggaaaaactgatgtttaaaagtccacttttaaaactatatttatttatgtaggatctgtcaaagaaaacttccaaaaagatttattaattaaaccagactctgttgcaataagttaatgttttcttgttttgtaatccacacattcaatgagttaggctttgcacttgtaaggaaggagaagcgttcacaacctcaaatagctaataaaccggtcttgaatatttgaagatttaaaatctgactctaggacgggcacggtggctcacgactataatcccaacactttgggaggccgaggcgggcggtcacaaggtcaggagttcaagaccagcctgaccaatatggtgaaaccccatctctactaaaaatacaaaaattagccaggcgtggtggcaggtgcctgtagtcccagctacctgtgaggtggagattgcattgagccaagatctcaacactgcactccagcctgggcaacagcgtgagactccaccttc

SEQ ID NO: 568444 - DNA, 1711 bp, Homo sapiens
ggaagtcattcctagcagaggactcagatatatataggattgaagatctctcagttaagtctacatgaaaaggatggtttcttggagcttccacaaacttaaaaccatgaaacatctattattgctactattgtgtgtttttctagttaagtcccaaggtgtcaacgacaatgaggagggtttcttcagtgcccgtggtcatcgaccccttgacaagaagagagaagaggctcccagcctgaggcctgccccaccgcccatcagtggaggtggctatcgggctcgtccagccaaagcagctgccactcaaaagaaagtagaaagaaaagcccctgatgctggaggctgtcttcacgctgacccagacctgggggtgttgtgtcctacaggatgtcagttgcaagaggctttgctacaacaggaaaggccaatcagaaatagtgttgatgagttaaataacaatgtggaagctgtttcccagacctcctcttcttcctttcagtacatgtatttgctgaaagacctgtggcaaaagaggcagaagcaagtaaaagataatgaaaatgtagtcaatgagtactcctcagaactggaaaagcaccaattatatatagatgagactgtgaatagcaatatcccaactaaccttcgtgtgcttcgttcaatcctggaaaacctgagaagcaaaatacaaaagttagaatctgatgtctcagctcaaatggaatattgtcgcaccccatgcactgtcagttgcaatattcctgtggtgtctggcaaagaatgtgaggaaattatcaggaaaggaggtgaaacatctgaaatgtatctcattcaacctgacagttctgtcaaaccgtatagagtatactgtgacatgaatacagaaaatggaggatggacagtgattcagaaccgtcaagacggtagtgttgactttggcaggaaatgggatccatataaacagggatttggaaatgttgcaaccaacacagatgggaagaattactgtggcctaccaggtgaatattggcttggaaatgataaaattagccagcttaccaggatgggacccacagaacttttgatagaaatggaggactggaaaggagacaaagtaaaggctcactatggaggattcactgtacagaatgaagccaacaaataccagatctcagtgaacaaatacagaggaacagccggtaatgccctcatggatggagcatctcagctgatgggagaaaacaggaccatgaccattcacaacggcatgttcttcagcacgtatgacagagacaatgacggctcagtgttctaaagaagacggtggtggatggtggtataatagatgtcatgcagccaatccaaacggcagatactactggggtggacagtacacctgggacatggcaaagcatggcacagatgatggtgtagtatggatgaattggaaggggtcatggtactcaatgagaagatgagtatgaagatcaggcccttcttcccacagcaatagtccccaatacgtagatttttgctcttctgtatgtgacaacatttttgtacattatgttattggaattttctttcatacattatattcctctaaaactctcaagcagaactgagtgggacttttttgaaaagtttaggtttactttaagcacatgaatttcttttggttctttaattttctggcttaccagggttc

SEQ ID NO: 568445 - DNA, 205 bp, Homo sapiens
ctatggccctgtattaagggagagattcaggtttctatgactcaaccttgaggaagaggaatcctggtttctatgacttggctttaggggagaaagagggatgggagaaggtaagaaagaccttgtttctgaggccttccagtctttcttcagttccaggtactcagcataggggctgagtgccaaggtaagacttccccctcac

SEQ ID NO: 568446 - DNA, 1601 bp, Homo sapiens
ggaagtcattcctagcagaggactcagatatatataggattgaagatctctcagttaagtctacatgaaaaggatggtttcttggagcttccacaaacttaaaaccatgaaacatctattattgctactattgtgtgtttttctagttaagtcccaaggtgtcaacgacaatgaggagggtttcttcagtgcccgtggtcatcgaccccttgacaagaagagagaagaggctcccagcctgaggcctgccccaccgcccatcagtggaggtggctatcgggctcgtccagccaaagcagctgccactcaaaagaaagtagaaagaaaagcccctgatgctggaggctgtcttcacgctgacccagacctgggggtgttgtgtcctacaggatgtcagttgcaagaggctttgctacaacaggaaaggccaatcagaaatagtgttgatgagttaaataacaatgtggaagctgtttcccagacctcctcttcttcctttcagtacatgtatttgctgaaagacctgtggcaaaagaggcagaagcaagtaaaagataatgaaaatgtagtcaatgagtactcctcagaactggaaaagcaccaattatatatagatgagactgtgaatagcaatatcccaactaaccttcgtgtgcttcgttcaatcctggaaaacctgagaagcaaaatacaaaagttagaatctgatgtctcagctcaaatggaatattgtcgcaccccatgcactgtcagttgcaatattcctgtggtgtctggcaaagaatgtgaggaaattatcaggaaaggaggtgaaacatctgaaatgtatctcattcaacctgacagttctgtcaaaccgtatagagtatactgtgacatgaatacagaaaatggaggatggacagtgattcagaaccgtcaagacggtagtgttgactttggcaggaaatgggatccatataaacagggatttggaaatgttgcaaccaacacagatgggaagaattactgtggcctaccaggtgaatattggcttggaaatgataaaattagccagcttaccaggatgggacccacagaacttttgatagaaatggaggactggaaaggagacaaagtaaaggctcactatggaggattcactgtacagaatgaagccaacaaataccagatctcagtgaacaaatacagaggaacagccggtaatgccctcatggatggagcatctcagctgatgggagaaaacaggaccatgaccattcacaacggcatgttcttcagcacgtatgacagagacaatgacggctcagtgttctaaagaagacggtggtggatggtggtataatagatgtcatgcagccaatccaaacggcagatactactggggtggacagtacacctgggacatggcaaagcatggcacagatgatggtgtagtatggatgaattggaaggggtcatggtactcaatgaaaaaccatgacggaaaggaaaaactgatgtttaaaagtccacttttaaaactatatttatttatgtaggatctgtcaaagaaaacttccaaaaagatttattaattaaaccagactctgttgcaataa

SEQ ID NO: 568447 - DNA, 419 bp, Homo sapiens
tactcgcccactttgtctgggactcatacgctgcacttggtggcttctctgctatctcctcatttcttaaggcaaacctctaaaattatcaaaccatcttttgctggaattaaattctatagctttagatccttcctcttttgctttacagttgtcatacagtgactttgctttttctctaattgtattagcatctacaggtatgcctttttttttttttttttctttttgaaacggattgtcacccttgttcgcacaggctgaattgcagtgccacgattcttgactcattgcaaccttctgcctccgggcctcaggcatttcttctcctcagcctcccaagcagatggaactacgggcgtgcaccaccaaaaccagctaattttggtattctaagtagaggcagatttcaccatatg

SEQ ID NO: 568448 - DNA, 249 bp, Homo sapiens
  misc_feature (7)..(7): n is a, c, g, or t
agttcgnacggagaactctcatttggagtcctttcagatgttcggtttaaggtatccaaaatgcagatgtcaacctatttgtctattttgattagatgtgctctcattgtagtccttttatcctgtataatattttccctttcttccccatcttctatagaccagttttctcaaatttgagtatcattatcatcactttgtctctacaagaattttccctacgatttctgggatattcacttgatattc

SEQ ID NO: 568449 - DNA, 1493 bp, Homo sapiens
ggatgtttgctttctccaccagaagggcacattttcatctaattaggggtatcactgacgctgaagacaaagagaagggggagaaaacctagcagaccaccatgtgctatgggaacgtgtgcacgattgcatcggacacttctctggtgggagctcgccatcctgtgcctcgcggctaaatattttggctgttactttccccaatggggacaccaaagtatgcctccgaaaacaccaacctcaagccggcttcgaggtgaccactatactgggcatcgtaaggacgcttgggccctcgctcgctcgctcctgtgccagcactacagctcctccaatcggcgcactgcaaacacgcgccttgcactcgccctcgacgccacgcctgatcgcccactgacaacaacctgttgcccccacgaccgacatcgctggccagcaaccccccaaccccctcacaccaggtacattacggcgacgctggcatcacacaactcgagcaacaccgcccacgcggaacccctggcaccccaccctagacgctcacacgcgccgcgcccacaccccaagcggcacacctacacccccccaacaggcacccacccatcgctcctcggcacctaacgcccaccgccaccccaacacgacgaccccctacacacctctctgcacacacaccccccgcccgcgcaccaacaacaccccataacctgggactaagccgtccaaccacctgggcccccgaccgcagccccgtggaacccccaaacagccaccacccgcgcggccccccggccacacgctacaacaccggccaagaaccccccacacccgtaaaccacacaaccgggccacacctgcacccccacaccccccggaccaaccacaaaccaccgcgcacacctcacacggtgaacaccgcaccgcaacaccccccaccgccccggaccccacgcgccagcgcacccccaaccaacaccgcccaatcctcacaccgcgcgccaaacaccccacccacacccacacgccccaccacctcagcgccgaacacaaacctacacacaaaaaatccagccggcaacgcctcacacacatccacaacacgaggcccaccaacatctggcgaacacccaccgcgcccacacgcacacacgagcgaccaccccacaacacaaccctccaccaccacaaccgtacaacaggcggaccaccccacacgcacgctgggctgaccaaaaccacaccaacacccagcgccgcacacgcaccgaggcagcgacaccgagagagacaggaccaagaccggctcgtgaatcgcacgagccggaccacacgcactaacacaacgcagagctcagacaccaccacaacgcacttcagccaccgcacacacagacaccaaaagaccttctcctccccctggtcgctaatctaccttctcccgccccccgaccgccccacggaggaacgaaccacgcaaacagacagagagccct

SEQ ID NO: 568450 - DNA, 413 bp, Homo sapiens
gccctaccgtggagagtgcgaaggctgtacaagtctgcagcagtggagatgcaagtttgccctaaaggtctgactaggcgccgggacggtgaaggtagggtgcctgaatgcacctagatggagctggtgaatcgcgctgcaggtgaccctctctatgatccgtcctagataggtaactagcagaggagtggtggccacacatgttagagaagagttccgccgggttacgaaaggtcgagacagagtggacagtaattggatggaacggcaggcatgatagtcctatagcccggactctaagtcgcgggtctctcgagccctaagagcatcgcaggcgtgtgtcagaatagtcgaatcaaggctggggactggacgaagggatgaacgagccagcacgagacgcacagcatggg

SEQ ID NO: 568451 - DNA, 906 bp, Homo sapiens
caatatcgtcggtgtatcggttgatgttttctgtgtccatgttcgtgtgccccttttctctgttcgtctccacggaacgtcctgcgtcgcgccggtgtaacacctaggctcgttcccccgactgctggcttcattttgggacccgccaagtgttggcaacacttagagtttccgtccgctccgaatattcccggttttcgctcacccgcgcgcaaatggaccggcatcacagggtggcatgagatttgctgccctagccaagcgctgttgggctccccccccagaagggacgtggtgtccccccaccccccgggcacggacacccctgcctccacccggacaaggtgttaataacagccagaaccccccaaagcgggcctacattgggccccacgcattggctcccacagtggagggacaatatcctgggagggcatcaatcggtgatccgaggacggggacccccagcggtttttggcgccacgcaaccttccccctggggcaaagtggcccgcagcaaatcacccaacaggctatgcgccccacgaggcttcaaaatgacaaagttttttgcgcccatttttgtcaaaaaaagatcaggccccccctacttccgggatcactccccacgatactctcttccttgcggggggtagcaatactccacaccaccccggtgtgcccaaccccatctgcgtgcccctcgcttgttatttcccacaacgagccttctctgtccaagaggttatgtgtggcaccaaagcgtgatcaagaggtacttgttcgaaacacggcatcctttcctaaagcgcccggtagtccaaaatcgtcgcttggccagcccctttgtttttaaagcgtttgagggccccacaaaaaaaataacggcctcgttctatcataaca

SEQ ID NO: 568452 - DNA, 335 bp, Homo sapiens
  misc_feature (199)..(199): n is a, c, g, or t
  misc_feature (285)..(285): n is a, c, g, or t
tgagtgacttcatttagaataatggcctctggcttcttccaagttgctagtaaaaacatttttacgttgctttctgtgggtgagtaatattccatggtatatatataccacatttcctttatccattcatgggtcgataggcacttagggtggttccatatccttgtaattgtgaattgtgctgctataaacatacctntgcacatgtctttttcatataatgactggataaaagtactttaaaacaactgaatgattccaacattatttccagtggtactggtnaatgcattcaggcaggaaatttttttttactcctgggatttttaatcctg

SEQ ID NO: 568453 - DNA, 1026 bp, Homo sapiens
cagctgtgggcggatcatctgaggtcgggagtttgagaccagcatgaccaagatggacaaaccctgtctttactaaaaatacaaaactagccaggcatggtgctgcatgcctataatcccagctacttgggaggctgaggcaggagaatcgctagaacccaggaggtggaggttgctgtgagccgagatcgcaccattgcactccaggctgggcaacaaagagcaaaactgcaaaaaaaaaaaaaaaaaaattttaaaaaagagaaaggtacattctcaaaaaaaaggaaaggaaaagacaagaaaaaggaaaaaaaaaagaaaacacctttggtctttggtacaggctcaggggggcctcccagggaaaattgtccctttctctttttggtgggaattggcgcacgggggagaccgggtgcattcccgggctcggacactctcgtttattggggacggtaagtctgacctctatgaataatacttcaagccccttgatggctcccggtgccaagctccttgggccaaactttcaccttagctcgggtaaggtctggggcaacgccaaagcacgatctataaatcatccctttcagttcctgatgggtcctgggcaaaaggcgtgggcaaagttgaacccacacagttttcaagacacggctgtaaactagggcaatatcctttccttcccaggtcaataaaaagcgtggacccagcctggtaagagcgacattttcagacccccttttcgtgggggaaagaagtttcgtccttgctttttaaattcacttcaaccttcccttggggtaacccttaattcttagaggctaacaagaactccgggtttctcgacctacacgacggcacctggtggcccgctgacatagaaccggctcttggcgttggcaaaactaccacagtaacatccggccttggagcggtatcaacaaaggtaatatgtgctgtgatacaacaccatatagcagacaccagaggcgggacaccaggagtcggcggtgaaaaagt

SEQ ID NO: 568454 - DNA, 927 bp, Homo sapiens
tccggagagctgggcggtgcggagcgggcccgacaacccttgcccattctccttcgctttcctgagccctaaacacacgctgtgatgggtaactgcctggcacctgttatccctgcagacggcacagagcatccgtctcccctcgttaacacatgggttcctaaaatgcgcctgtaaacgggccttattgacgatgaaatatgtgattgctcataagtgtaacttcctcttaggatgtatcaccaaggcaatatcgagagagaagtcggccaggtaggatgaacacaggcaatgactggcacagaggggattaaaggcaacagagagaagagtccaggaaggcgcgggggagaagccttgggtggctcagcatcctcacaggggcttgcgcagatatggctcggggctgagctgggcgggagcagtatagcggtgtaggggttacaaaatcggagatgaatttcaatatacactaagaacatcaagtcactttgaaaatgtgaacacaaatcaggcggacatctgagtaacattccaggaaagttggttgtagggcaccaacatctgtccaggtcctgggaaacattctggtcaataaccccggtgaacgcaaatcatttcccccatcccggtcattacattcaatccccttgggacacgtgcttgatccgacttcggtgtcatcatgatggtcctaaaactaggggtatacccccgggttttctggggcaccaattcgtcccattatctaactgttcggaccttcacacacgggaaacaaaacaaacaatcacaacacaacactaacaacaacaaccgatcgtgacgcgcgcgcatcagcgtgcacacttcgatacagacgccggtcagaagaaaacaacacgacatgatgggggaccgtctcgtcgccccacatgagacgatact

SEQ ID NO: 568455 - DNA, 416 bp, Homo sapiens
ggaaggcgtaaagccccctggtgctataggagtcgtgacgcatgacctgagttactggctccattggagcctcatcagcgcgccgctgccgctcgagtcgcgtcctgagatccacgtctacctcactacccgcgtgactgtcggcgtcgtgccgtccttgtgactgtccgtaacgcgcacgacggcgtgcactcgggatttcctgagcgcaggctattactccccgtggtcgtatgtgcacggaccgcgtcgagtatcatcgatggcgctataagtgggtccgcgcgtgggcgcgccttcgtcccgtgctctctgctcgggctgctccttcgtcgcctcctcacattggccgtcgtgctagcagcacgtggcgaacgctgtacggtgtacccccacggacgcgttagcggaccccc

SEQ ID NO: 568456 - DNA, 152 bp, Homo sapiens
ccttggtgggagtataggagggatgggtcactaaggaaactggctgttgctctcagaagctcatgtgatggaagctgggcagtcaaacatgccaacagctgtccactctgctggccctagatggcttagttgattgctgatcttgtgcacgg

SEQ ID NO: 568457 - DNA, 126 bp, Homo sapiens
atgtcccaatttcctctgagtagcgtcggatgatcatgtatatagcagtatgctcattcatggtcgaacccatgctacctcaaattacaccttgggaacttcactatctgcgacatggttcctctg

SEQ ID NO: 568458 - DNA, 670 bp, Homo sapiens
taagtaacaccctccacttggtgaaccgggacaatacgaacccgagaccaagagccccaacagccgaaaaagacttagcggtaaggccactaatcagctactgccccgtcaaagacggaaccggaagataccctctctatggacctcatcgacccacgacagaaaaacggagagaaatacgacagaaagcggtcgacccatctaaaaataccagacaaagctccccgcccccgtcgcaaaccgcccagatacgataagagccgcggccatccagtaatcagcgcgcataacgaccggagaaactccctgaagtgatctgaagaatacgaaggtagttacgattataccacccgcacgatctgccggatcgagccagagctcagatcatagaataaaataatgaccgacaagcacgcttaataagaaacaaataaagaaaagacctaccggagggaagcatcagcgaggactaccgtaccagcgaagatctctgtcaaaaacaatccagtacccagaggagaaaaacaaaacgaccggcgaagatagaaacggggaacccccggagccccacccgagaagaacgttgagcccgaagcaccgacgagagagtacactagaaaaaaccgggggaggggaagacaaacctctcccactcaagcttttaaaaccg

SEQ ID NO: 568459 - DNA, 1922 bp, Homo sapiens
ttatttacctttttactttttaaaaaattcttgtgaagttactttgtgagttttccaggatgtgtgtaaactacacacatcagccacctaggtagttttgagttgctttgaagttcagctgttgttgacttcaaaggcagcagcttatgaaagttggagaaatagaacattttccagtccctattcaggggttggtgacctccgtggcccccagcctcgtggctttgggctttggaaggctggtgtctggtctcactgatggctacaggctggactcacccccaccatctctgtcctcaccaaccctgtccccagccccctggctcatccccagtatcctctacaaacctgctcctactcgggtccagggcaggaggctgagcactgtgggccatcctgggagcctcaggctgcacaggttgctgaccttggactgtaagggctgggtacgaaggcagaaggtggggattctcaggcaatgcagcaggcctgcgagagactctggggaggagcaacagggctctctaaattgccacctgcaagtggctgcgtcctcctaccatggggcacccaggacccagctcaggcttgcacctgggttcttccttgttgaacctgtggcaaagcaaggaggagacttggtctactccctcctgggcagcctctgctgactgccctataggtgctgggcactgtgtctgggacacagagactgtgaaaggcctcctctcccacagtggagagctgccagcagcatgaggaggccgggttcatgcagggtccttggcaggcctgagggccagtggggatcctgggggctttctggggtgtaccctcagctctgcatgctttgaaaggcccctttaaagtcaggtcctggtcagatctagaagcgggcaagtctcagctgaggctgaaacctcggcctccctgagccttgtgacttgcccagggtcggaggcccaacgccccctgaggaattctcttcctggtacggcagagaaaggtgggggccagggaatcagggtggggaaatcccagctgcctctccctgcaccctggcccatctcccccaggtcatgagccatcccccttcgactgttttcccaccataagggactatgatttacatctaccaaactctgccaccgacaaggacagtgtgggaagagggtgagccctgagtggagccaggtgagctggattcaaagcccagttccgcagcagagagcctgggagagccatctcttaaccttgggtacaccacaggccctttctgcacccacaggtctgtcttgctcatgagtgggtctcagagtttacaaatatagactgaggatcagagaggctgcatgcgtgcctgaggtcacacagctcagatccccagaaagagagcagaatggcagctcagacattccgagtcagtgcttttaaccatagtgctgcattatataccctcagcaccagccccaggcttccatcctcagtagcctgtctacatttcaagggttagttctccttcccctccatttcaaatgcccccctttcaagttccctcagggaaggccagtggtttttggggtcacctgggccagggttttctgcagctcaacccatcaggggtctaggtgatgactgggatttctagggggaaacaagggaaataaacatggctttttctgccaaaaggctctctcagccgagacttgctggcacggatattgcccctgccctgggctggctggcgtgagttgtctgcgcctccctgaaggcagacttcaggggctagctgtgatgggctagctgcggtgaggagtcccctgagccctgagtcacatcagaagcacattgctccaccccagggctcggccttgcccagggcctcaaaggcaccaaacgtatacacctgagctagaaagtgt

SEQ ID NO: 568460 - DNA, 1002 bp, Homo sapiens
cattcgcgcacgtggcgctgtctttgtgagtcggtcgggcacgtgatgaggtgttttaatgccggggggacacgctctccgtactccacagggtttgtcgccgcgttgtgaaacgaggatcatgggtggacacaatacgtgttcggccagatgtctgtggcccagaatgcgattgctcatatgtcggtggtggggaacgccctatgtagcgtcaacatgttccagatgcgtggaacctgcgtgttcgatgaaagctagcgacacgctgtatcaaatagaggtatttctcattagtgacagctgtcccagcacacgataatgttttgtgcgcgaagtggtcgcgccgccaatgcgtggtgaaatgtggctgcaaggatggctcctaccgctgtctgcgacctctattatggttagtgggccccagccacccgcgggccgctattgtggccacaacaaagggggccccaggtgtgtttgctgtagtaccccgccacaaactaataacggcggaatatattttctgagaagaatacgagaatatggcggtccactatgttattacactatcaacaatgcacgtctgctattacggttgtcccccactgagatgacccctaaataaggaagaagtaacgcgctggttatcataaagtaacgtgaggatatgctatggcctctgttctaaaaggggtgtatctaaatacaccatcattttaaaaccacatctctaatgaggcaactatgtgcaactacaccagtaataatgtagacaccccacaacaaagaggtataatctgctaaaattatttcttcactccacaaataattataggcgtgccacaaccccccggttgaaggaacaatatagtgtccccacacgttctaccagaagagaacaccacctactcctaggtcttcacccacaccgtctagattacttgccaagacgacccccctaccacccctttggtgtcccacgcaacgcgcttttaaaacaaaaca

SEQ ID NO: 568461 - DNA, 126 bp, Homo sapiens
tctagaggatccctatggacgcgcggacgactgggaatgatactgcccttgatgaccctgtacttgagtgccagccaggttttccaccacgatgtcaatgaagcagtgccacgaggccctgtgagg

SEQ ID NO: 568462 - DNA, 1055 bp, Homo sapiens
  misc_feature (648)..(648): n is a, c, g, or t
  misc_feature (873)..(873): n is a, c, g, or t
  misc_feature (911)..(912): n is a, c, g, or t
  misc_feature (952)..(952): n is a, c, g, or t
  misc_feature (1037)..(1038): n is a, c, g, or t
ccgaggcaggtggatcacctgaggtcagagttcgagaccagcctggccaacatgatgaaaccccgtctctactaaaaatacaaaaattagccgggcgtggtggcacgcgcctgtaatcccagttactagggaggctgagacaggagaattgcttgaacccaggaggtggaggttgcagtgagccccagcctgggtgacaatagcgaaactctgtctcaaaaaaaaaaaaaaaaaaaaaaaacctcgtgccgaattcggcacgaggactttggaagtccgtagtgtctcattgcagataatttttagcttagggcctggtggctaggtcggttctctcctttccagtcggagacctctgccgcaaacatgctccgccagatcatcggtcaggccaagaagcatccgagcttgatccccctctttgtatttattggaactggagctactggagcaacactgtatctcttgcgtctggcattgttcaatccagatgtttgttgggacagaaataacccagagccctggaacaaactgggtcccaatgatcaatacaagttctactcagtgaatgtggattacagcaagctgaagaaggaacgtccagatttctaaatgaaatgtttcactataacgctgctttagaatganggtcttccagaagccacatccgcgacaattttccacttaaccaggaaatatttctcctctaaatgcatgaaatcatgttggagatctctattgtaatctctattggagattacaatgattaaatcaataaaaaactgaaacttgaaaaataaaaacaccacgaagggtggccttttggagaacgcaaaaaaacagagggaactgactgggggcatggacctgagnattggcacatagggaaagggagtcttggctattaaaanntggatctgggggggcgccgggcacaaggtttttaataggnaaaaacttttgggcgggcccgattttctcgcccttttggagaaaaccccaatagggggccattccccacccgggcgcgccttttnngggggggggccttggcc

SEQ ID NO: 568463 - DNA, 185 bp, Homo sapiens
aattcttaacacggacattaacaatgcgctgcagtattacacaaaatgatatgcaataagaaatcggaaaaagggagcaaaggagagtgcaacgcatgtactgaggtctttctacgggtgcctgacagaatgcagattcagcataaaactgtagaccttaggcaccagtgtgcctttaaacgtac

SEQ ID NO: 568464 - DNA, 997 bp, Homo sapiens
  misc_feature (590)..(590): n is a, c, g, or t
  misc_feature (815)..(815): n is a, c, g, or t
  misc_feature (853)..(854): n is a, c, g, or t
  misc_feature (894)..(894): n is a, c, g, or t
  misc_feature (979)..(980): n is a, c, g, or t
ccgaggcaggtggatcacctgaggtcagagttcgagaccagcctggccaacatgatgaaaccccgtctctactaaaaatacaaaaattagccgggcgtggtggcacgcgcctgtaatcccagttactagggaggctgagacaggagaattgcttgaacccaggaggtggaggttgcagtgagccccagcctgggtgacaatagcgaaactctgtctcaaaaaaaaaaaaaaaaaaaaaaaacctcgtgccgaattcggcacgaggactttggaagtccgtagtgtctcattgcagataatttttagcttagggcctggtggctaggtcggttctctcctttccagtcggagacctctgccgcaaacatgctccgccagatcatcggtcaggccaagaagcatccgagcttgatccccctctttgtatttattggaactggagctactggagcaacactgtatctcttgcgtctggcattgttcaatccagatgtttgttggactcagtgaatgtggattacagcaagctgaagaaggaacgtccagatttctaaatgaaatgtttcactataacgctgctttagaatganggtcttccagaagccacatccgcgacaattttccacttaaccaggaaatatttctcctctaaatgcatgaaatcatgttggagatctctattgtaatctctattggagattacaatgattaaatcaataaaaaactgaaacttgaaaaataaaaacaccacgaagggtggccttttggagaacgcaaaaaaacagagggaactgactgggggcatggacctgagnattggcacatagggaaagggagtcttggctattaaaanntggatctgggggggcgccgggcacaaggtttttaataggnaaaaacttttgggcgggcccgattttctcgcccttttggagaaaaccccaatagggggccattccccacccgggcgcgccttttnngggggggggccttggcc

SEQ ID NO: 568465 - DNA, 340 bp, Homo sapiens
cccgattgacgggcagtgggtaggtggctgtagccctggctgcccctggggcatgccaggctgcccagggatgggttgtggattagagttggcatacttggcagcccgctgcttgatgaagtgcagccaagtagctggagggttggcagtgagaggatactacagcacctggttgctgctgcagggagagagctgggtagacctgagtagtccgcaaaacggttttgtaagggcttgttgagacacatgtgcctggatttgagatgggcgtgataccgtacctaggcccaagtcctgtgttgtggcagccgatgttcaaagggttgaccagtgctcgggc

SEQ ID NO: 568466 - DNA, 236 bp, Homo sapiens
  misc_feature (30)..(31): n is a, c, g, or t
  misc_feature (37)..(37): n is a, c, g, or t
  misc_feature (48)..(49): n is a, c, g, or t
  misc_feature (232)..(232): n is a, c, g, or t
cctgttgtactccaccccggcctactcgtnncatccnttcgcagccgnncgacggacttgacctttttgccgctgtggatctcatgacagcccagacccctgaacactgggtgctccgtggggttgcccttctgtgtgatgtcacgtaacatgtggggagtgttcccacccattgctttggaaaatgctcgatctaaattattgaaaacaaaaaaaacggctgcctgctggnttgt

SEQ ID NO: 568467 - DNA, 168 bp, Homo sapiens
caaccccccccccccaggttttttttttttctttccgggtccattgtacccccggtttttccccggccccgggggggtttgggcgaaaccccccgggattttttccggcccccttttggggtttggggaaaccccccccccccttttaaattttttttttggtgggga

SEQ ID NO: 568468 - DNA, 1124 bp, Homo sapiens
gggaatcaccatggctggctgggaccctgtacacgtatcctcaaaactgtgagggccttcaaggctctcatcgctgctcatgtacatgcggggctcaggtcctgcgtgctctccgacacgcatcacccaacttccagtattagggccaaattccagaccgaagcccctagaatattctccgcagaatttcactagcctggcaatggtcccgagcattttgacgggtgatgactggattctagtgatgttatgagagcaaacgcacattgccgtactattgtgcagcaaattgacgcgaggcttgcgggcggacacgttaactccccaagcaggggccaaggccaaggggccgccacacaacaggacgcgctttggtggctgtggcccactggatgcacggggtttgaacagcccatttaggccttggaaattttccgcggaatatacagtacagtgggtcccaccacgatagccccaatagtaaccctttggggacgactggattccccgacgtctaagatgcatatgagtgcgcaatatccaaattggcatacacgaagcgaagagaagagaaccacgtgtggccccaaaccattggaaagtcaactttggccacaatgatggcggcaaggcgccacacggcttgtgaacgggtgcccggtaaccacgtttgtcctttggggcggatagcacatctggcccattggcgcacatagttggacccactaatccaacctattgagccacaacagcgacaccgcgaaacgagcgggcacacactgattagtcgacgccactaggcggactcatgggtgactggaccatggaaacatacttccgagcaatggcttatgcgtaaacctatcttcttgtgggggcaccactattcgaacatcccaaattacccgaccgcgatggacatattcggcatccgcattgggagcaagaagccaccaccatctggtatcgtactacggcgatgcaggacccattcctcgttacagatttgcgaacgtctaccatagtgggtacattcttacgctgtataaggcataaggtgactccccatagtgactaccattgatctatgattccagacactggtcacactccaaatacctgac

SEQ ID NO: 568469 - DNA, 1614 bp, Homo sapiens
  misc_feature (431)..(431): n is a, c, g, or t
  misc_feature (831)..(831): n is a, c, g, or t
  misc_feature (1073)..(1073): n is a, c, g, or t
  misc_feature (1113)..(1113): n is a, c, g, or t
ggttgtccacacaagtggtgggcgtgagttgcgatcatgcctctccgtggtggcctgctgagggggacacgcggtggggggtgttgcgtccgacaaccgccgcgcgggatgttgtgggggactcaccaccttgtgggtgcctcagcccggtacatgcttgtttgcccaccggtgagtgtgttgatgttcgttgttgggggagtgcccgtccctgtggagcgcctgttgtggtagtggtgaatgttgttttttcccttgggggggccacccatttgtgtgggggccgttcccagagtggtctcagggaaagtctgtgtttttttgcttcccaagagggagttgtggtgttggttgcgtgggggcgcaatagcgcggtttgtccctttgggggtggatccccacgcccccactaattaggttggaggctcgcncgcgccccatgttgggggatatgccacatggcggtggggcgttgttgtaacactttggtcgttccacagggggtgaagtgtaatttccccccgtggggaccgccacggttcgccaacgggggcccccacattttttgtggccgggcccccgcgctgtaatttgtgcccccccccgggtatgatgttggggcagatttgggcgcacaacacacccggggcgtttctacccacagatggtggccacgttgggcgcaaagtggttttgtgccgtttgaaagctctggaaaagggacaataaagagattttgaagagtctccccccggttttctctgcgggttaaaataagccgctgtgagatagaattgcgcgcccctcttgatagatttctctgtgagacangtctctgtgggtagatatgtcggtcgcccacacttgtgctgtgacatatactggggcttctctctgtgcacacagcgccccacaatgtggtggttttgagagagagcctctgttctcccacggagtgctgaatggcccacccgtctttttggggtgtcgcactcttgtgcctctgttgttgtctgtgagaggttaagtcgagagacctcacagagctcacagttgattggctctgagtgtgngggtgtcgttgtcacttctcacatagagccccacagctgnggggagccccacaggagagaaggcgctcggctctgcgagagctcgcgccacaagggtggcacactccacgtgtctctgtccccgcgagatacagctctcacagagacagcgctgtatatatctgagatatatgttatatccctcttatatacactctggccccccccccactctgtcttcgatatccacgtgtggtgtgcgagaggaaaacggtgtctgtcacgaatactgttgtgggttcacacattggccacatttaaaaggttatagtatgtaaacagagactgggtataatgagtaacccacatgcactcgttaaacccttcacgagaaggaaaaggagaatttttttgtggacccctttggttttcttttttgcgtgtggccagttttaagttattagttttttaaatccgtactttttaatgggaaccaccttgagccccaaaatttgtccccacgaatttgtgagaccccctttaaaaagcttataatgaaaca

SEQ ID NO: 568470 - DNA, 160 bp, Homo sapiens
atacccatctactatctgtcccgttggctatgttacgcccagcattggctggggaaaatattcctagtgaatgctttaagagaagaggcagctggaagcttggcaatattccaatggcatgccctgtgctcccttggaagtggtctgtgtcatcctgccg

SEQ ID NO: 568471 - DNA, 330 bp, Homo sapiens
gtggagatgtggtgagtcagctaaatactttgacgccggtggggatagcgatgatctatggtagcggagagtgaaatatgctcgtgtgtctacgtcatatgcctactgtaaatatataggtgtagctcacacgactaaagcccttaggaagccaatatgatatcatatgcttagaccaatagctatggtatccaagagtggttcttgtattgaccaggagtagataagtgacaagtatgggagattattccgacatcctggtaggataagaatatgagacttcagggagaccgaaaaatcagaataggtgttggtatagactggggtctc

SEQ ID NO: 568472 - DNA, 1529 bp, Homo sapiens
ggaagtcattcctagcagaggactcagatatatataggattgaagatctctcagttaagtctacatgaaaaggatggtttcttggagcttccacaaacttaaaaccatgaaacatctattattgctactattgtgtgtttttctagttaagtcccaaggtgtcaacgacaatgaggagggtttcttcagtgcccgtggtcatcgaccccttgacaagaagagagaagaggctcccagcctgaggcctgccccaccgcccatcagtggaggtggctatcgggctcgtccagccaaagcagctgccactcaaaagaaagtagaaagaaaagcccctgatgctggaggctgtcttcacgctgacccagacctgggggtgttgtgtcctacaggatgtcagttgcaagaggctttgctacaacaggaaaggccaatcagaaatagtgttgatgagttaaataacaatgtggaagctgtttcccagacctcctcttcttcctttcagtacatgtatttgctgaaagacctgtggcaaaagaggcagaagcaagtaaaagataatgaaaatgtagtcaatgagtactcctcagaactggaaaagcaccaattatatatagatgagactgtgaatagcaatatcccaactaaccttcgtgtgcttcgttcaatcctggaaaacctgagaagcaaaatacaaaagttagaatctgatgtctcagctcaaatggaatattgtcgcaccccatgcactgtcagttgcaatattcctgtggtgtctggcaaagaatgtgaggaaattatcaggaaaggaggtgaaacatctgaaatgtatctcattcaacctgacagttctgtcaaaccgtatagagtatactgtgacatgaatacagaaaatggaggatggacagtgattcagaaccgtcaagacggtagtgttgactttggcaggaaatgggatccatataaacagggatttggaaatgttgcaaccaacacagatgggaagaattactgtggcctaccaggtgaatattggcttggaaatgataaaattagccagcttaccaggatgggacccacagaacttttgatagaaatggaggactggaaaggagacaaagtaaaggctcactatggaggattcactgtacagaatgaagccaacaaataccagatctcagtgaacaaatacagaggaacagccggtaatgccctcatggatggagcatctcagctgatgggagaaaacaggaccatgaccattcacaacggcatgttcttcagcacgtatgacagagacaatgacggctcagtgttctaaagaagacggtggtggatggtggtataatagatgtcatgcagccaatccaaacggcagatactactggggtggacagtacacctgggacatggcaaagcatggcacagatgatggtgtagtatggatgaattggaaggggtcatggtactcaatgagtatgaagatcaggccctttctttcccaacaaggccaaattaaggttccccaaatt

SEQ ID NO: 568473 - DNA, 911 bp, Homo sapiens
  misc_feature (668)..(668): n is a, c, g, or t
agcagatcggccaggaaagctcttcatcggtgggcttaatacggaaacgaatgagaaagctgcttgatgcaggtatttggcaaactatggagcgacatagtggaagtactcttggatgaaatgatccgtgaaagcaacaaatcaagaggattatgctttatgtctactctttgaaacgctccagtcgagacagcttaaggactgcatgacccacgaggacatgatatgtgaacaagtcaattaagaatgggaaaaagccggtcaatggctggaacaatgccacctaaaccaatcattcttgaatagatggtagacggtggaccgtcgtcctaccttccaagtaagtagaggccctctcatcgtaaggtgctttcagagggtgagagaaagaaggggagggcaacgctggagcaagtggaaatcgcaagggggtggatctcgtacaccatacgaaccgtgggggaagagtagcaaccaataggaattggacaggggtagtgcaataagttttcgccataggatagtttttgaaaccacttggatgatttcctatacgccacgtggtgcaactccaacattcctctagataaaagaatggagaggagcacaactcggagcactagaagcaaaagttgggtggggttccttcacttccccgtaaaagaagnatgtcgtagtatccctgtcacgaggatccattggtttcagcatagataaggcatggtgggatagggtggggaccgggaagaaggctccttgttaattacaggcagtgctaccagaaagactagtgatttgggaagggattccacaccctcgtaaatgtgggacacccgacatgttacctcttccggtatgaggaattgttttagttctgtctcccgaaagagactgaatagggatgttcgtac

SEQ ID NO: 568474 - DNA, 300 bp, Homo sapiens
  misc_feature (114)..(114): n is a, c, g, or t
cccttttttttttttggggggggggggttttttttccccaaaagggccccccttaaaggggggtttttgaaaaaatttgggggcgcgtttggaaaaaatttttttgggggggtncccccccccccctggaattttttttttgggggttttggggattttttttcccccccccccctttaaagggttccaaagggggtcccgggggttttggggggtgggtttcccccccccccccttttggggggggggggagggttccccccggtttttttttttacggggtttttttttttcccccca

SEQ ID NO: 568475 - DNA, 1592 bp, Homo sapiens
ggaagtcattcctagcagaggactcagatatatataggattgaagatctctcagttaagtctacatgaaaaggatggtttcttggagcttccacaaacttaaaaccatgaaacatctattattgctactattgtgtgtttttctagttaagtcccaaggtgtcaacgacaatgaggagggtttcttcagtgcccgtggtcatcgaccccttgacaagaagagagaagaggctcccagcctgaggcctgccccaccgcccatcagtggaggtggctatcgggctcgtccagccaaagcagctgccactcaaaagaaagtagaaagaaaagcccctgatgctggaggctgtcttcacgctgacccagacctgggggtgttgtgtcctacaggatgtcagttgcaagaggctttgctacaacaggaaaggccaatcagaaatagtgttgatgagttaaataacaatgtggaagctgtttcccagacctcctcttcttcctttcagtacatgtatttgctgaaagacctgtggcaaaagaggcagaagcaagtaaaagataatgaaaatgtagtcaatgagtactcctcagaactggaaaagcaccaattatatatagatgagactgtgaatagcaatatcccaactaaccttcgtgtgcttcgttcaatcctggaaaacctgagaagcaaaatacaaaagttagaatctgatgtctcagctcaaatggaatattgtcgcaccccatgcactgtcagttgcaatattcctgtggtgtctggcaaagaatgtgaggaaattatcaggaaaggaggtgaaacatctgaaatgtatctcattcaacctgacagttctgtcaaaccgtatagagtatactgtgacatgaatacagaaaatggaggatggacagtgattcagaaccgtcaagacggtagtgttgactttggcaggaaatgggatccatataaacagggatttggaaatgttgcaaccaacacagatgggaagaattactgtggcctaccaggtgaatattggcttggaaatgataaaattagccagcttaccaggatgggacccacagaacttttgatagaaatggaggacggtcaagacacacagagcatatttcactcgtccgctaccataatcatcgctatccccacacggcgtcaaagtatttagctgactcgccagactccacgggaagcgatatgaaatgaatctgctgcacgtgctcttgagcccatagcgattcatcttttcttggttgcacccgtaggtggcctgacgtggcgattgtagttagctagaactcagtcgacttagacattctgtacttacatcgacacgtactacgtggtagctcacttccactatgtcctatcgataggagctgtattggccatcataggaggcttgattcactgatttcccctatgtctcaggctagcatcctagagcaaactacgccagaatccatttcgctatcatattcatcggcgtaagatctaagctttcttcccacaaggagttttctcggctatccggaatgccccgacgttactcggactaccccgatgcatacacacatgaa

SEQ ID NO: 568476 - DNA, 128 bp, Homo sapiens
  misc_feature (101)..(101): n is a, c, g, or t
acatttccagcatgctgccgctggtctcgaaaccgccgtagtcggcgaacatgccgtgcagccagtccagcatcggctgcaggggtaccgacgctcgacanttcctaactcatgggtcatatgctggt

SEQ ID NO: 568477 - DNA, 1127 bp, Homo sapiens
ggaagtcattcctagcagaggactcagatatatataggattgaagatctctcagttaagtctacatgaaaaggatggtttcttggagcttccacaaacttaaaaccatgaaacatctattattgctactattgtgtgtttttctagttaagtcccaaggtgtcaacgacaatgaggagggtttcttcagtgcccgtggtcatcgaccccttgacaagaagagagaagaggctcccagcctgaggcctgccccaccgcccatcagtggaggtggctatcgggctcgtccagccaaagcagctgccactcaaaagaaagtagaaagaaaagcccctgatgctggaggctgtcttcacgctgacccagacctgggggtgttgtgtcctacaggatgtcagttgcaagaggctttgctacaacaggaaaggccaatcagaaatagtgttgatgagttaaataacaatgtggaagctgtttcccagacctcctcttcttcctttcagtacatgtatttgctgaaagacctgtggcaaaagaggcagaagcaagtaaaagataatgaaaatgtagtcaatgagtactcctcagaactggaaaagcaccaattatatatagatgagactgtgaatagcaatatcccaactaaccttcgtgtgcttcgttcaatcctggaaaacctgagaagcaaaatacaaaagttagaatctgatgtctcagctcaaatggaatattgtcgcaccccatgcactgtcagttgcaatattcctgtggtgtctggcaaagaatgtgaggaaattatcaggaaaggaggtgaaacatctgaaatgtatctcattcaacctgacagttctgtcaaaccgtatagagtatactgtgacatgaatacagaaaatggaggatggacagtgattcagaaccgtcaagacggtagtgttgactttggcaggaaatgggatccatataaacagggatttggaaatgttgcaaccaacacagatgggatttcaccatatttgtgaggctggtctcgagctcctgatgtagtgatccgcccgccttggcctcccaaggtgctgggattacaggcatgagccaccacacccggcctagtatttgattttcattaca

SEQ ID NO: 568478 - DNA, 1281 bp, Homo sapiens
  misc_feature (895)..(895): n is a, c, g, or t
  misc_feature (958)..(958): n is a, c, g, or t
  misc_feature (962)..(962): n is a, c, g, or t
  misc_feature (987)..(987): n is a, c, g, or t
  misc_feature (1013)..(1013): n is a, c, g, or t
  misc_feature (1040)..(1040): n is a, c, g, or t
  misc_feature (1077)..(1077): n is a, c, g, or t
  misc_feature (1092)..(1092): n is a, c, g, or t
  misc_feature (1197)..(1197): n is a, c, g, or t
  misc_feature (1231)..(1232): n is a, c, g, or t
ggaagtcattcctagcagaggactcagatatatataggattgaagatctctcagttaagtctacatgaaaaggatggtttcttggagcttccacaaacttaaaaccatgaaacatctattattgctactattgtgtgtttttctagttaagtcccaaggtgtcaacgacaatgaggagggtttcttcagtgcccgtggtcatcgaccccttgacaagaagagagaagaggctcccagcctgaggcctgccccaccgcccatcagtggaggtggctatcgggctcgtccagccaaagcagctgccactcaaaagaaagtagaaagaaaagcccctgatgctggaggctgtcttcacgctgacccagacctgggggtgttgtgtcctacaggatgtcagttgcaagaggctttgctacaacaggaaaggccaatcagaaatagtgttgatgagttaaataacaatgtggaagctgtttcccagacctcctcttcttcctttcagtacatgtatttgctgaaagacctgtggcaaaagaggcagaagcaagtaaaagataatgaaaatgtagtcaatgagtactcctcagaactggaaaagcaccaattatatatagatgagactgtgaatagcaatatcccaactaaccttcgtgtgcttcgttcaatcctggaaaacctgagaagcaaaatacaaaagttagaatctgatgtctcagctcaaatggaatattgtcgcaccccatgcactgtcagttgcaatattcctgtggtgtctggcaaagaatgtgaggaaattatcaggaaaggaggtgaaacatctgaaatgtatctcattcaacctgacagttctgtcaaaccgtatagagtatactgtgacatgaatacagaaaatggngatgacagtgatcagaacgtcaagacgagtgtgacttgcaggaatggatcattaacaggattngaantgtgcacaccagtggaagatactgngctacagtgatatgctggaatgtaantagcagctacagatggacacagacttngatgaatgagctgaaggacaataagtacttgagttcntgcgatgacacaatngttatgacattagaagcgatcctagtgcttatttggacagctctcacgttgtactaacatcggtaatcgacgtaaacgggtggaattgccacgatggaacgagangactgttgataggggttcaaaagaactaaaacannagtggaattgttttttctcaacgggtaaaattttttccaatggtgtttg

SEQ ID NO: 568479 - DNA, 93 bp, Homo sapiens
gagtcggagatctgatgatcattgccacttgcactcccaggccttgggtttgataatgatccatgatgacttccatactccataaataataat

SEQ ID NO: 568480 - DNA, 104 bp, Homo sapiens
cagcgagagacgtcaccctagaaaacaggctgcagaacatccggggtcacctatgcttgaacatctcctgcctccctaatttgccaggcctttcagtttcatgt

SEQ ID NO: 568481 - DNA, 409 bp, Homo sapiens
taacactgagaatctttggcctgagctccataaactgaacccgtgagggaggtgcctagctgggtgcaaactccttaattcctgtttgactttggcccagttagttaacctctctgagcctcagtttgcacatctgtagggtggggataaatagtacttgcttcctgtgactggagaaaagagtgatgtgataggggtaaaatgttcagcatcgtgcccgacacctggtagccacctgctacatgggagtaccatcggggcaccatgtaagcctgaaaattgatccggtgacagagccaccgaagtgttttgtcttctgttttcttttctttctttcttttttttttttaaatactagagagctgttaagaatcatcagatttccacataaaacacttgatgtttgctc

SEQ ID NO: 568482 - DNA, 453 bp, Homo sapiens
cgagccggtaccagtgttctcctacctgaactggcctcccacagtgttgggatacaggtgtgagccaccacgcctggcctgattgtatggtttttgtcattcatcttgttgatatgatgtgtcaccttgattgatttacatatgttgaaccatcctttgcatccctgggttaaatcccacttggtcatgatgaatgatctttttaatgtgttgttgaatttggtttgctagtattttgttaaggatttttgtatagtgttcatcaggaatattggcctatagttttcatttttttgatgtgtctttgtctgggtttggtatcagggtaataccagcctcatggaatgtgtttggaaatatttcctcctctactttatggaatagtttgagtagggtttagtattagttcttctttaaatgtttggtaaaatttagcagtgaagccatcaggtt

SEQ ID NO: 568483 - DNA, 179 bp, Homo sapiens
  misc_feature (82)..(82): n is a, c, g, or t
acagaggacccattcagtcaaccagacttgcctgtgcaggctgcacatcagcagaatagatctgtctgttagtgatacgtgntatcttatagacaggtacagtcgtgtagttagactatagtttgtactgtactttcttgggtggcagaggaaagaaaagtaaaacattaaaaaaaaaa

SEQ ID NO: 568484 - DNA, 110 bp, Homo sapiens
gggacttcagacactggaaaactggatgctgcagacactgaacgaggagccagttacaacagagcccggaaggtgaaccgcccaggttccccccagcttaagcaaagggc

SEQ ID NO: 568485 - DNA, 771 bp, Homo sapiens
  misc_feature (4)..(4): n is a, c, g, or t
  misc_feature (109)..(109): n is a, c, g, or t
  misc_feature (167)..(167): n is a, c, g, or t
  misc_feature (319)..(319): n is a, c, g, or t
  misc_feature (326)..(326): n is a, c, g, or t
  misc_feature (398)..(398): n is a, c, g, or t
  misc_feature (407)..(407): n is a, c, g, or t
  misc_feature (448)..(448): n is a, c, g, or t
  misc_feature (454)..(454): n is a, c, g, or t
  misc_feature (461)..(461): n is a, c, g, or t
  misc_feature (465)..(465): n is a, c, g, or t
  misc_feature (495)..(495): n is a, c, g, or t
  misc_feature (500)..(500): n is a, c, g, or t
  misc_feature (518)..(518): n is a, c, g, or t
  misc_feature (534)..(534): n is a, c, g, or t
  misc_feature (543)..(543): n is a, c, g, or t
  misc_feature (548)..(548): n is a, c, g, or t
  misc_feature (561)..(561): n is a, c, g, or t
  misc_feature (565)..(565): n is a, c, g, or t
  misc_feature (574)..(574): n is a, c, g, or t
  misc_feature (616)..(616): n is a, c, g, or t
  misc_feature (631)..(631): n is a, c, g, or t
  misc_feature (637)..(637): n is a, c, g, or t
  misc_feature (651)..(651): n is a, c, g, or t
  misc_feature (677)..(677): n is a, c, g, or t
  misc_feature (724)..(724): n is a, c, g, or t
aggnagacggggagttagtcagaatcgtaaatggactagatgaggggaaataggatgggcccttctttattacagcttgagcgcaaaaaggttgggataaacaggtgtntaaaaaagagaggaggtaaaagggaggatgggcaggggatagaggaaggtcaggggcngggttcacccatattacacagcattgtaggaagaagcagggtaaccatttgagttctcagcctggaacaggaggtgagggctcagcacctagagagaggagaattctaaggcctctttttcaactctattgtgattagatgcaaaagccctntcccttnagagaattcagaatggtctgttttaaggcaagagagcatagtgacagatctgtagccccagctcaggctgtntctccccantctcaaaggctcttctaggagaactatagaaatacagagtnccaggnctctgcncctnctccccagatccaagagagggagttgttanaaggnacaaagaccctggacgtnaaggtgaacatcagtntcgccacanaaaanaatattttgaganaggnaagaaagtncatgccccaaaagggatgccttccttcaccttgcaggtagcnggaactttgatagtngcaganaccacaatggagtngggttcacagaaatggcctgttaaanagaccctattcctagagagacagaggaaaaacctcagctgggatggnacaatcttgaatgggatgacagagggcagcgggcagatttcttccgc

SEQ ID NO: 568486 - DNA, 605 bp, Homo sapiens
ccagttatccgcacatgggttcaagcaattctcccacctcagcctcccgagtagctgggattacaggcacccgccatcatgccccgctaattttgtagaaatggggtttcaccatgttggccaggctggtcttgagcctctgacctcaggtgatctgcccgtctcgtgactcccaaagtgctgggattacaagcgtgagccactgtggctggccaggatttaagtttttggaaagctaggctcagtagattttatttaaataaatactttacgtttattttagtatcgtcagcatgaaaatgtagcagtgttgaatatgtaggctactaagattgtaaaccagtgcaatgttaataaaagtacactctacatgatatatgatatttttataattatacttttttctttaacgacagagtctctatgttgctcaggcgggtctcaaactctggggtgcaagtgattttcctgcctcggtctcccaaagtgcggggattacaggtgtgagccaccacacccagccttctaaatgcagtttataccaggctttaagaaaccactttgtcccaagcaaatgatcaggttcacatatacgttgatattat

SEQ ID NO: 568487 - DNA, 216 bp, Homo sapiens
gtatatggtctcaccgaactcttgaggcactctcataattctcatgatcatgttaactatcttatattcagcagatataaatcattgaaagttgtttgctaatcgttttttcgtatcttacagaattgataatcaaactctttaagattgaatccatccaatatttttaactgaaaaattgtaggtatatttctatggtgcccggagaaattaagg

SEQ ID NO: 568488 - DNA, 791 bp, Homo sapiens
  misc_feature (20)..(20): n is a, c, g, or t
  misc_feature (24)..(24): n is a, c, g, or t
  misc_feature (34)..(34): n is a, c, g, or t
  misc_feature (37)..(37): n is a, c, g, or t
  misc_feature (98)..(98): n is a, c, g, or t
  misc_feature (111)..(111): n is a, c, g, or t
  misc_feature (119)..(119): n is a, c, g, or t
  misc_feature (173)..(173): n is a, c, g, or t
  misc_feature (489)..(489): n is a, c, g, or t
tctcttaagtcatcgtacanaacntatctcactncanccacctttctacaagagtacatactgtggtgctagatgtcacccctcttcgaggcccttgngatcaactgaganaccatcantgaagttcctccaccttctgaatggatgccattatctgacgtgatagatcctantgggatgctgcttctttcctcacttactaaaataccctgataaggataccccaacctcacacactggccaacttgagggggcatcataacactaatcctggccccaaccattacccccacttttacctttttaccaactttttaacaattgccaacaattgccccccttccctccccattgaattaaataaacttcttgtctcatgattcctcaaattccccaaaaacacaggacctccacaactattccaaccacatcctcaccttgactccttgcatgctcatacacccctccccacctgcaacctcccaccanatcttccccctttccctccacggtaacctctcccccccccccttataagcggtacccaaacccccttcattgcccctcgctccccacttcttctgctccccttttcccccctcagcgcctcttccgttttccccaaacggcggtaccccgaagaatctttcacaaaccccccaatatgccctccctccacaccccctcttctctcttttcctagccctcccactcccacacgcaacaatcaacttctatccatcctggcccgccctctatattttatactgcccttctccctgaacctctcg

SEQ ID NO: 568489 - DNA, 195 bp, Homo sapiens
  misc_feature (183)..(183): n is a, c, g, or t
tcccgtctggacgtactagtggagtaattacgcgttgttaagtgaggtttaggtagggtgagtgtggctcatatggtggggattatacggcttttgttttttgtgaattcttcgcataatggcccatttgggctaataagccggttagcgggggcaggcctcctatagagaggagggtggatngaattcagggtg

SEQ ID NO: 568490 - DNA, 107 bp, Homo sapiens
tgcccacacactcgggaggtgtcttgagaattatcatccgtgagggtggaaggggagtgagcacacactcgggaggtgtcttgagattaccaccccgtcgggtggag

SEQ ID NO: 568491 - DNA, 169 bp, Homo sapiens
ggtgatctaagatcccaagatggtcctcagctgtagaagcagtggggctctggaaagaccatgtggtgtgagaaattaagcagctcactgagcatagatatccggtctgcttcctactatcaggctgatctaatggggttgggctgctcggcaaatggttgggtcaact

SEQ ID NO: 568492 - DNA, 105 bp, Homo sapiens
ggcaaaccgatgtccgatgctttctcctgaattggctgctttcattggaattcacggatctcgctactctgtcattgtggcagccctcggcttagacagaaggga

SEQ ID NO: 568493 - DNA, 339 bp, Homo sapiens
  misc_feature (30)..(30): n is a, c, g, or t
  misc_feature (95)..(95): n is a, c, g, or t
  misc_feature (97)..(97): n is a, c, g, or t
  misc_feature (132)..(132): n is a, c, g, or t
  misc_feature (146)..(146): n is a, c, g, or t
  misc_feature (155)..(155): n is a, c, g, or t
  misc_feature (220)..(220): n is a, c, g, or t
ggatcctaacagattgctaaataccccatnggtcaaggaataaatcaaaagggaagcttgaaagtattttgaactgaatgaaaatggaaataaancnacaaaatttttgaaattcagtcaaagcagtatttnctaggaaatttgtnctataaatnccaatattattatagaaaaggggaaagatctcacatcagtgatcttggtttctattaaaaaactnaaagacatacaaatggtcaacagacatatgaaaagacactcaatatcactaatcatcagggaaatgcagattaaaaccacaatgagatgtcaccttctacttgtcaaggtgtctattat

SEQ ID NO: 568494 - DNA, 228 bp, Homo sapiens
ctatcatcaagaggttgggtgacaccatcaccatatccatatgaacatgtacactcaggaaggccagcacaacagatcaagaagctaaatgtcaaacactaatacggcactgccgggcacttctccatccaagtcagcttccccataagaccaggtaagacaagcctaactgggcgtaatgcccatataacactacactccaaaaaaacactaccctaactactaaaa

SEQ ID NO: 568495 - DNA, 368 bp, Homo sapiens
  misc_feature (110)..(110): n is a, c, g, or t
  misc_feature (216)..(216): n is a, c, g, or t
agagtccagtttcggctctcaggagtgtgttcacctgtttctttctggcctgtgtcgagtctgcagacacagcaccaggccaggctcattcaggtacacgggcggccctntcagctccaatctggagagccgccggaccctgcagctggagtgcatatttctcaggataccatgcattagcactagtccctctgacctcctcttccctctgcaatntagggccttgcagccgaactcctgcacaggcctaaaggttttgaaattgagaaggaaaatcttctaccaataattttttttatagaatgaaaacaaaacatgaatgattgctacaatgattaaagagaggcgagaacagagccgatgaaagg

SEQ ID NO: 568496 - DNA, 239 bp, Homo sapiens
gagtggtctgtggactgggccaggtccctgtgctgtgtacagctagggacttggtgatcatgtgtcccgagaacactaccagcacatgggatgaaagggagcaacatagagctcagactgtggcttcagagagtccaagccccaatgtcttggcagcttccacatggtgttgagcctgcaatgtgcacataagtcaagaattggagtatgcagcacactccgccgcagattacagcagg

SEQ ID NO: 568497 - DNA, 885 bp, Homo sapiens
  misc_feature (1)..(1): n is a, c, g, or t
  misc_feature (218)..(218): n is a, c, g, or t
  misc_feature (222)..(223): n is a, c, g, or t
  misc_feature (377)..(377): n is a, c, g, or t
  misc_feature (397)..(397): n is a, c, g, or t
  misc_feature (406)..(406): n is a, c, g, or t
  misc_feature (456)..(456): n is a, c, g, or t
  misc_feature (472)..(472): n is a, c, g, or t
  misc_feature (485)..(485): n is a, c, g, or t
  misc_feature (487)..(495): n is a, c, g, or t
  misc_feature (524)..(524): n is a, c, g, or t
  misc_feature (538)..(538): n is a, c, g, or t
  misc_feature (582)..(582): n is a, c, g, or t
  misc_feature (624)..(624): n is a, c, g, or t
  misc_feature (628)..(628): n is a, c, g, or t
  misc_feature (786)..(786): n is a, c, g, or t
  misc_feature (880)..(880): n is a, c, g, or t
naaatgttttcataatactgaccagagggattacacagctcacaaaaactttccatataagaagcacgatgttaaaacacagcagaggccatcaaacacagtattaatgagaattttgttagcttctaatgataatcattattgtatcagaatgcaattcacactaattattagtaaaagtttacaaacattaaaaagtgcataataacatttggttntganngggctgaaaaaagacatgaaaacacaacaccagggctttacttttgtgattggtgtccacatgattgccaggggattactttctccacctgattcagcttagtgaagataagttgtcctccaaatttaaatagtatcatacagcattgtgaganatttgattccatagaacaanatatttccngtccttagtatgatcttggcttttcttttctacctttcccattgtccaanattctcataaattacnatatatatgtctntnnnnnnnnnggggggggggttctccacttgggggtganacagatttggcagnttgggttcccgtctgtgcgggcaccaaacaggctgggttcgggngatattcaccttagtgggtattttcgcatgtctctgtgatgncgcnatggagtcttgatgagtctgttagacttaatcaactcatcaacatacaatgagcaaggggaaagactgtgttttaaaaaagggtgttctatcctgtgtacaccaccacagtatggaaaactaaaatgaaaagacagcccttttaaaaatgagtggtanaaaaattcacagtaatgtacatcattttgtttttcataagcaatcagagaagggggcagtgctgagcatatatattgtacaatacaaaacagtnttaat

SEQ ID NO: 568498 - DNA, 538 bp, Homo sapiens
acacttcctctcctcccacctccgacaagatgggctatgacacaccgttgcattttgcttgtaagtttggaaatgcagatgtagtcaacgtgctttcgtcacaccatttgattgtaaaaaactcaaggaataaatatgataaaacacctgaagatgtaagtacttattacaatgcagttgctatctagagttagaaatggaaatatataaatttacagtctgtggtcacaggcacagggaagccacaaggagctctgtatgagttgtgtttgctttatgggcacatgttagaaccttggctgttgagtaagatgcactttgtgaagaagatgcatctgtagaaccaggagggaaggaactgacgcagtttgctgattttattttcctaaaactggcagtcagttgctttgaacagctcacagtcttttatcaagttccctctctgaacacatcagttgaccagagtcagagagaacagaggtggtgatggtggtggtgatgatgatggtggtggtgatgaggtgggaggagaggaagg

SEQ ID NO: 568499 - DNA, 427 bp, Homo sapiens
  misc_feature (1)..(1): n is a, c, g, or t
  misc_feature (218)..(218): n is a, c, g, or t
  misc_feature (222)..(223): n is a, c, g, or t
  misc_feature (264)..(264): n is a, c, g, or t
  misc_feature (298)..(298): n is a, c, g, or t
  misc_feature (308)..(308): n is a, c, g, or t
  misc_feature (340)..(340): n is a, c, g, or t
  misc_feature (353)..(353): n is a, c, g, or t
  misc_feature (355)..(355): n is a, c, g, or t
  misc_feature (358)..(358): n is a, c, g, or t
  misc_feature (412)..(412): n is a, c, g, or t
naaatgttttcataatactgaccagagggattacacagctcacaaaaactttccatataagaagcacgatgttaaaacacagcagaggccatcaaacacagtattaatgagaattttgttagcttctaatgataatcattattgtatcagaatgcaattcacactaattattagtaaaagtttacaaacattaaaaagtgcataataacatttggttntganngggctgaaaaaagacatgaaaacacaacaccagggctttanggggggggtggggggccacagggggggggggggngggggggggncaccggaggcagcggagggaagagaagggggncgccaaagggggngnggntcatacagcaaagggagagaggggaggccaaagaacaaaaaaggaccagaccanagaaagagcgggggg

SEQ ID NO: 568500 - DNA, 426 bp, Homo sapiens
cggtaccgatctctgtgctgggatgtgatgctgggaggttggtcagcagctcatgatatagagtaaagctgagtgccgtggtgggttaggaatgctgggcgctgtgagagccactcaggaataggcagccacgctgccgggcagaagcagagcctgcagatgctccctggaggtttcccctgctggtcctcggcatgggaggtgggccccagcagctgctagagagtgaaggagctggaccaagccccgggggaggaaggcatcacggcaagggaagggtcgcagtcacaaccacacctcgagagggagacctgtggccaaagcccgggggggcacacactacagctgttcccgtgcccactttggtcctgagagactcagggccaggggtccagaacagttcagcatcaggaatggggcggggaa

SEQ ID NO: 568501 - DNA, 1305 bp, Homo sapiens
ctacaatattgctggcagataggccccaagcatgacattcaatatagtttacatgttcctgtcaaggtcttttgttaacattaaccagctgcatgctttctggactttaagaaattgggtttctatagaaaacttttttttttttttttttttaaattgtgcaggctattcaagttttcaatagtaaaagctcaaaaagtgaagtgtttcatactctccagtgcgtgaaggagcgtgaaagcgtgccttctttacatatattttgtgcaccttttctggatagttctccccgtggtttttctcataatttcccataaaatgtgcgtggtggggtggagtgtggaccccttgcagaatagtgggggaataacccatgtggaccacagtagatatattgtgccctttgagacccgtgcaccaatgtagaccctattgtgcattacagcacaaactctattgtgccatgtagaaaacctctttgtgataaagtggatgtccggagccaacagaaatatgtggatggagctccacctattggtttaataagtctaaaagggggagaccaagtatgtggaagaaaagagctacaatattatacccaaatattataggagtagacaatattatatatcttccaaaggggtgtgataagataacttttaaatataaattttaagaaaataattaaaaggggggttacacatagtataaaagtactccgctagaaaaaatacattcgggaggtgtttggcgaatttcacaaggtgtttattgtggacaattggttgaaaaaaagagctatataaaagccaacaatagctttaccaggggaaaaactaagaaaaatatacccacctgtaagagcaaaagaggagaagagaacaaaaggacacccgaggagacacaacaggagggggcccaaaaaatactgtaaaaagcaggacgtagagacaaggagaccacaaaaggacgcatgtgataaaaccagagagattaggagaaaagacgggtgagaaaagaagaggcaacagagaaaaagagatgcaaaaaatcaccctataagaccaaaggaaaacatcataaacaagagttgttaagaaacaggaaacaagagagaaacaaaagagaagaagagcagggacgtaaagaggagagacaaaaaaaaaacagaaagccaggattaaaacaaagaaaggagggaaaaaaacggcgagaaacattaaaagtggagacaaacatgaggaacagacaaacacagtggtaataacgagacgagcccgaccgctctctattctgctccgcact

SEQ ID NO: 568502 - DNA, 185 bp, Homo sapiens
actgcatgacaaggactgagacgtatgacgcgcaccacacgcccagctagtttttttgtatttttttcttgagatgaggttttgccatgttgcgcaggctgatctcaaacttctgggctaaagcaatctgcctacctcagcctcccaaaatgctggggtaacaggtttgagccactgcccctagc

SEQ ID NO: 568503 - DNA, 774 bp, Homo sapiens
ctacaatattgctggcagataggccccaagcatgacattcaatatagtttacatgttcctgtcaaggtcttttgttaacattaaccagctgcatgctttctggactttaagaaattgggtttctatagaaaacttttttttttttttttttttttttataatgtgcgggcttttcaggtccaatattaaaaccccaaaaatgaatgttttaccccaggctgaaggagttgaaactgccttctccatatttggcactttctggtagtccccctgtttttcctaatcccctaaaattgtgtgggtggagtgaagccctgcagttggggggtaacatggaccactgattttgccctttgaccctgcacaatgacctttgcatcagccaaactctttgccatgacaactcttggtactgtgtccgtgccacagatctgtgggcccctttgttaataagtaagggggacaactttggacgacggccaattttagaccatttttggttgcaattttttcttcaaagggtgtaccgtagttttattttttttatacagtacttcaaagggggtttccctagttataactactcttagaaaaatatccgtgtgttgttggcacactaacaacgtgttttgttggagaatttttgaaacaaagcgctaaggctgcacactaggttatcccggggatgcccatagaataacgccctttgatgaccttattggcagtgaataacggtcaccagggaacacaaggggtggcctaaatactttgaag

SEQ ID NO: 568504 - DNA, 238 bp, Homo sapiens
ccatcatccacctcactgagagcttgctttcttgcgattttgattctgagaaactcaaaggagcttattgctttgaatgtgaacatttggctcctccacaaacttttcagtcatgagtttctatttctccagagttgtcacatgaggcctgggttgtttgggcttcagactgaagcaattagcagtcctggatctgcacgcatgcatctgcatagacatgtgtgcacatggtcgacgc

SEQ ID NO: 568505 - DNA, 428 bp, Homo sapiens
  misc_feature (4)..(4): n is a, c, g, or t
  misc_feature (15)..(15): n is a, c, g, or t
  misc_feature (29)..(29): n is a, c, g, or t
  misc_feature (41)..(41): n is a, c, g, or t
  misc_feature (195)..(195): n is a, c, g, or t
aatnggaatgttgtngatgggtccaggtnaggaggatattngaaataagccggaaagaattttggaaataggcacttaaattaggaattgaaaattgtccttacctaacaaacttttattttcccactgactttaattttctaaagagcaatgaaggtgatatttgaaaagtataactgacttatttttgagatntttgtattactttcacatcaaaaactctatatgccctacataagtataggcgtaaaaatgttttattgaaacaattatctgagctttctttcgcagactaccatttaaattctgttttcacaactaattttcagaaagaagagtctcccaaaactatattgacacttaagtatgctatttattgaaatttagccagacatttataaggtaacttttagtaattatcttttggt

SEQ ID NO: 568506 - DNA, 143 bp, Homo sapiens
  misc_feature (40)..(40): n is a, c, g, or t
ggtcctacatactaaactgcacctcttgcatatgtacccnctgaacttaaaattgaagaaaaaaaagaaaattagtacaacctctattgaaaactatatgagatctctcaaagaactaaaaatagagctaccattcaatccag

SEQ ID NO: 568507 - DNA, 450 bp, Homo sapiens
tccacctcagcacagaccctttacgggtgtcgcgctggcagacggtcaggtctttctcatcccacgaggccatatttcagactatcacatggggagaaaccttggacaataccccgctttcaagggcagaggtccctgcggctttccgcaatgcattgtgcccctggtttattgagactagagaatggcgatgacttttactaagtatactgctttgttaaacagatgcttgaaggcagcatgctcgttaagagtcatcaccactccctaatctcaagtacccagggacacaaacactgcggaaggccgcagggtcctctgcctaggaaaaccagagtcctttgttcacttgtttatctgctgaccttccctccactattgtcccatgaccctgccaaatccccctctgtgagaaacacccaagaattatcaataaaaaaataaattaaa

SEQ ID NO: 568508 - DNA, 149 bp, Homo sapiens
tccggcacgcgagtcctatggaaaacaagaaaagggtgggggacggctggcggcagaccatgtgtccactcaggagtgcagatccagaaagagaagggaaggggagaaggcaggtggggtttgggacgggcggtgctgggtttatccac

SEQ ID NO: 568509 - DNA, 478 bp, Homo sapiens
atgaacgcagtgctggactgtgcaacctgacgctgcggtgcatgtactttcattggcgtagctgctggtagcacaggattctctgttgatccagatgagctaataataggacgtactatcaatgtaacattgattgcagggcgcacaagtgttgattgtatatccaaagcaggtcactgactatatgaataagagattcaatttggatgcactggtgacccataccctgcattatgacatactcactgaggtatgtgacgctaatgaaccatggtatgagcatgcgaacaatgctcatattttgaggataccaggagcacttcagagtactcattgattgaatgtgaacctggctgtgtgatatattacctgaggtgatgaaccatgtaaagtcatgcgtttaaacatacattgacatataccatgtgaacatacacgagctattagtttagactactgacgctgagtatatatgttt

SEQ ID NO: 568510 - DNA, 275 bp, Homo sapiens
cgggcgccgctagaggccatgttaattgaggacgcagggagctgagatcacctcactaccctctagcgtgggcgacagcaagactctgtttcaaaaaaaaaaagcggcagagtgaacgtaggtccgaagggacctcctgtggggcgggccatctggggcacttgatgcccaacgtgaccattcccttccgggaggtctgcccaaactgctccagcccccatagcctgaggctcccggcacctcccacccagcatgtgtcacagcaaatcaatttg

SEQ ID NO: 568511 - DNA, 669 bp, Homo sapiens
  misc_feature (38)..(38): n is a, c, g, or t
  misc_feature (40)..(40): n is a, c, g, or t
  misc_feature (49)..(49): n is a, c, g, or t
  misc_feature (56)..(56): n is a, c, g, or t
  misc_feature (65)..(65): n is a, c, g, or t
  misc_feature (69)..(69): n is a, c, g, or t
  misc_feature (78)..(78): n is a, c, g, or t
  misc_feature (113)..(113): n is a, c, g, or t
  misc_feature (122)..(122): n is a, c, g, or t
  misc_feature (134)..(134): n is a, c, g, or t
  misc_feature (147)..(147): n is a, c, g, or t
  misc_feature (172)..(172): n is a, c, g, or t
  misc_feature (204)..(204): n is a, c, g, or t
  misc_feature (231)..(231): n is a, c, g, or t
  misc_feature (246)..(246): n is a, c, g, or t
  misc_feature (248)..(248): n is a, c, g, or t
  misc_feature (250)..(250): n is a, c, g, or t
  misc_feature (261)..(261): n is a, c, g, or t
  misc_feature (265)..(265): n is a, c, g, or t
  misc_feature (297)..(299): n is a, c, g, or t
  misc_feature (306)..(306): n is a, c, g, or t
  misc_feature (309)..(309): n is a, c, g, or t
  misc_feature (317)..(317): n is a, c, g, or t
  misc_feature (343)..(343): n is a, c, g, or t
  misc_feature (369)..(369): n is a, c, g, or t
  misc_feature (395)..(395): n is a, c, g, or t
  misc_feature (403)..(403): n is a, c, g, or t
  misc_feature (445)..(445): n is a, c, g, or t
  misc_feature (513)..(513): n is a, c, g, or t
  misc_feature (540)..(540): n is a, c, g, or t
  misc_feature (553)..(553): n is a, c, g, or t
  misc_feature (555)..(555): n is a, c, g, or t
  misc_feature (558)..(558): n is a, c, g, or t
  misc_feature (570)..(570): n is a, c, g, or t
  misc_feature (579)..(579): n is a, c, g, or t
  misc_feature (589)..(589): n is a, c, g, or t
  misc_feature (660)..(660): n is a, c, g, or t
tcccaaaaaaaaagtcacttttatttcttagcaaaacnanttcccccgngaggggnatttacaanaganaaaggaaanaagggggcaattcacagcgacttggagaggctggnggggcccgngggaggcccgangggggagacaganacacttcacacaattaactggaacngctttttccggtttccgacggggacgtccccngagggacttgatggggccggggccccncgtggcaagggaacncncncaaaccacccncccncctgggctggcccccggtcccccgcgggtgannncctgggngtncgggcccnggacccgggaggggggtctggcaggncccgacgcagcccggggacaggggcngggccaaggggcagggccggggcgcntgccaacnccgagggggagcgggccacacggaggggggcgccggcgcgcncgcgcgcgcgggggcgcgcgggggcgggaccgggaagggcagtcacgggcgccggagccgcccgtgcnccatgtaattctccagccccacctgcncctacaaccggcncnccnccccctcccccnccccctgcnccccccgccntggggcctcccggccgggatagtggcgcgaaggcggcaaggcgtggtggtagtggcggcggcgcaaggccnagggcggct

SEQ ID NO: 568512 - DNA, 598 bp, Homo sapiens
gcatgctgtatgtactggacacactgaggcatcttcagtatgcacctatttattggtatggcctcaggctacatagggtatgtcttcaagtccggtagactattaacttgccggaccttatacattacattctctctatccggtcaactttactttgtgtaaggcacagttcgctgcttcactgatgtgcttctcattcgacaaagtctccgtactactattttatggctctgagacgatagtcactgtcgaatatcagtgtcctatacgtactgtacctgctagaactgcgctaatcggtatatgtcaaatactgtaggaaagactctacattgcgcataacacagctgacagtctctttacttacactgactacatctgtgcatgactctcggacttatgtgaattctgacattaatgctctgataatctgagctcctagctgatgtagccagtggagactaggcgtccgctttgcacctctaacatcaagtgcgatgaacttcctataccgcacacttttcacagacgcgcactagcattttagtggtgctcagacccgtataatatacattcctagtctaggccctttaccgtg

SEQ ID NO: 568513 - DNA, 316 bp, Homo sapiens
atacatgtggtacccacgtttgtggtgggaggacggaggagcggcgatctccttgattcacagcacggggagttcctaacaccaaacacacttgatttcctgatgaaaaacaacagaagtcaacaggaaaacagattaaagatcaaaccctctcatattaaggcaacagaaaatcttttaggagggaggcaaaaacaaaaaagatcgagatctggtaacagcaggatcgtgtggccaaccacaaacagaaaaatttttttgaaaatcagcctataaggctaacctaacccagaagcctcccaccacaaacgtggga

SEQ ID NO: 568514 - DNA, 215 bp, Homo sapiens
gcaaaatcacagtcgccttacatgcgtcgtgacatggtgcttgctctgaactctcgtacaggtgtacctggcaatacaattcttctcccgaacacgaccggacttggctgctggagacggctactcgctttacgacctagcaggacctctctgacagacccacgacactccactgcttgtacgaccttccttactggtgccctgacaatgacgtt

SEQ ID NO: 568515 - DNA, 339 bp, Homo sapiens
agagtgagctgatcagataatgaaaaaggagagctcttgctctgttggaaggggtatgagtagagagcctggatctgacaacttgagacagcatgttatgaggagagaatgcaggcggctgctcagctactgctgccatttggagagcaaagttggcttgtacttccacgtggactgatggcaaggaactctgcctctgcgatcaactcttggatgaggagtgtgccaaaagcagtgataaggactcagtggtcctagcagatcacatatgaaagcaatgaaaatcagctgttagataccttttagtatcatgatatggcagtgaccttaagcatgaag

SEQ ID NO: 568516 - DNA, 1653 bp, Homo sapiens
  misc_feature (1)..(1): n is a, c, g, or t
  misc_feature (1208)..(1208): n is a, c, g, or t
  misc_feature (1305)..(1306): n is a, c, g, or t
  misc_feature (1425)..(1425): n is a, c, g, or t
  misc_feature (1495)..(1495): n is a, c, g, or t
nccctcccactgggactgctcacgctgtatgataacgctccgtaattaattaaataccgcacgtaccccccctgtgttagtggggttgtgtccgaaagacaccacaccgaatgagcgcgaatgtttttttaaagggggtgcgacaccagcagctattgaatgagtagaaaccttgctgcgtgagaggggagatatatccacccacagcaacaaaggggtttggttggcacaccaagaaagaaagagtcgacgagggcgcgtgttggtgttgtgaaacaccgcggccgcggcgcccccacgggtgaggacgctgatgtatagaccggcggttcgtcctttaaaagaggggttgtccgccgaagaaggcgctctctttgggggtttgtgccgcacgagaaaatctttcttggggcgaacccacaagaggggggggcggcgccctcccccacacccctgccccgcgagattatttgagccccacattgggggtgcctgttttgtggaaggccgccccccccgaccgggtgttctgcccagcaccacaacaggggattcctttgtggtccaacaaccaggtggtcggcgcccggtttggtggagcaccgaacacacaatgggggggggtctgaaaacagaccacaaaggcaccgcgggcccccccccggttatgagtagaggtttcctcgccccccatatgaggcggggttaatagagggccggccccccgcggcacaaaaagccagcacaacaaggggggcgcggcgctcgcagccaatagttttggacgcacgccacgacgtagcgcacccacggcgcgtttctacgaggggtactgcccactttcctcgcgggccccccttttcttgtggggcgggctgtggccccccacccgcgtttttcggcggttgtaccccacccaccgcggagaagggttttttccgcgcgccccgcggccactcgacgcgggttgtttcacagcctctctgtgagagagagaggtgctctctcgcgtgttgtgtggccacgcggcgcacattttcacacacacagagagaggggttgtgtcgccgcgggaggcacactattctgggcacaactgttctctgtgtgagagactctcgagagagagagtgcgcggggacacacacaggtgtctcacccggagaggtctccctgccacaggcgcacacacaggtgacacacccggncctgaaagagagagtttcacaccctctccacaacatctcatctcctttttctcccccagaggaagactccctctgggcgcccccacagagaagaggnngagacacacacagttcttgtctgatatagagaacatgtaaaacagtgtgcgccacacccagacgtgtgacccgggacacgcgttcataggcccgcttccgcgaacagcttcttatatanagaaagaggagaaaaagacttcgagattcatatcaccttgagagaagaagaaagaaatatttccaagacnctcttcgccttagtgtcttccgcttatgggcccgctgcaccaagccttcgggcttttctggcatacgggccaaaagagccacaggaagacccccaggaccggatgttgtaaaagaaaaaaattaagaccctcctggggaccttggaatccacatccca

SEQ ID NO: 568517 - DNA, 334 bp, Homo sapiens
ctttttttttaattataaaaataatacctgttcactagagaaaaactaacatacagaaaagcagtggctcacgcctgtaatcccagcactttgggaggccagggcgggtggatcatgaggtcaggagatctagaccatcctggctaacacggtgaagccccatctctactaaaagtacaaaaaagtggccaggcgtggtgatgggcgcctgtggtctcagctgctccagaggctgaggcgggagaatggcatgaacctgggaggcggagcttgcagtgggcggagatcgcgctgctgcactccggcctgacccacagagtgagactccatctca

SEQ ID NO: 568518 - DNA, 106 bp, Homo sapiens
ggatgatgagatagctgtagataaagtgttagggaacaggagatagctgtagataaagtgttagggaacagtgacgtgtagctgtcgataaagtgttaggggttag

SEQ ID NO: 568519 - DNA, 218 bp, Homo sapiens
accactgtcgaagcccccatcgctgggacaactagtacttgccgcagaaactcttaaaactaggcggaaatggtatcatacgcctcacactcattctccaccccctgacaaaagacatagcctaccccttcctgtactatccctatgaggcatcattataacctgctccatctgcctacgacaaacagaccttaaatcgatcattgcatactcttcaa

SEQ ID NO: 568520 - DNA, 154 bp, Homo sapiens
tctggtaagagcagactggaaatctaaacaggagttggatgacaaaagcgcaacctgtaaggcaatattccaaagcgtcatatgcttggactggtctactccacatgagagctggcgtcaggtaaacagcacattgtcgtgtggcatggttaca

SEQ ID NO: 568521 - DNA, 351 bp, Homo sapiens
ctgtgcggttcgtgcgccgcttggccactgttgccccgttcttcaacgacctgcatgggggaactgacgggacgacgactgccaaccggccacacgacccaggcagcagcacgcggggacacgctgaccagaagaaaggccgacgtgcaagcaaaccaccctccggcgcacagggcacatgtgtcccaaggcgcacgcacaccacagacggacagagcaagcacagagagggcgcacggaacacagcgagaagggcagcagcgcgcagcagcagagagcagcagcagcagcacagagagagcacgtgcgagagagacagaagtcggcacacagacacgcactgcgcgcgca

SEQ ID NO: 568522 - DNA, 179 bp, Homo sapiens
cccattaaacgctaatcgagtgcgttgtcatcttgcttctaacgcagtctgctctacttgtggcctctttgaggagacaggactccatatcttgggtgactgccccatggcacgagaggtatggaatatcattattcacccgtcctccctgcatgctttttacaactcgtctcttattg

SEQ ID NO: 568523 - DNA, 134 bp, Homo sapiens
ccacacagaacttctgagaggggctgttacgcattgcgcagattcttcagttctccagtaaatgatattgcgttcgtgcctcagttttaagcacaatgtagcagcagctcgtgtttgagttctgagggcatcat

SEQ ID NO: 568524 - DNA, 609 bp, Homo sapiens
cccagaattatcccagtatgtaaatgagtaggctataaaggtatatgctacatagggtaaaatttttggacctactgggctatatagttaaggcaaaatttttggaactgcaaattaattttgcctggactacttttgactgaagtatatgggaatattggtccttgattaaggaatcggttactagtatgtggaaaagtaggtgaggccatttaattgcattaatttagccattgcccaaaaaaaaaaataaaaatcaaataaaaaccatgtcggccgcttggcccaagcggattttagactggggcaggctaatgcatgcggccgcatttggagctaattgggccatttggccttatagggggccgaattccaattcattggccgccgtttaacaagtgcgtgattgggaaacccttggggttccccagttaaatggcttggctgaacatccccttttggcaggttgcccaattaccgaaaaggcccgaccggttggcctttcccaacagtggcccagcttaaatggcaaagggaattttgaggcgttaaaaattggtttctcgtgtaaattttgttaaacccgtcaatttttaacctggccgtggc

SEQ ID NO: 568525 - DNA, 109 bp, Homo sapiens
atgaggatccccccatgcctattaaattacatacggtaagacatacccagtcaaactatttttcagctcgaaagtttacaactaaaaagatttcaagtcttcacagagg

SEQ ID NO: 568526 - DNA, 400 bp, Homo sapiens
  misc_feature (64)..(64): n is a, c, g, or t
  misc_feature (80)..(80): n is a, c, g, or t
taattataatatgtataggtatattatatggtatgaaatagtgaaaaaagaaaaaaaaaagaancctagcttggcactanagcacaagcattgatccacctactcatggaggaaatactaaagaatgaaaatcacagatattaaatcaaaataaaaagccaagatttttatgaaaccgaacaactccttattaaataccaccaccgacgaactcccagactacacactaccaaactaaaacaataggcgagtcatttgtgtatttctctgtaattaatagaaccattaacgcaccccacattaccgcccacacccatggcgtctccgtcggagacaaatccaacgtaatacaccaatagcacccccgacatagcgagaagagccttgcactcccgcctcc

SEQ ID NO: 568527 - DNA, 333 bp, Homo sapiens
ggacgcgtgggcggacgctgtgggtcgacccacgcgtccgctgaaaaagggctctgggcatggtgactcatgcctataatcccaacactttgagaggccaacatgggagaattgcttgagcccaggagttcaagaccagcctggacaacgtacggagaccctgtctctacagaaaataagaaataattagtgggatgtggtggtacacgtctgtggtcccagctacttgggaggctgaggtgggaggattgcttgagcctgagaggttgcggctttggtgagccacaatcacaccactgtagtcccgcctgggtaacagagcgagactgtctc

SEQ ID NO: 568528 - DNA, 129 bp, Homo sapiens
cctggtatctggtgatcctatcttgtatcatctgtacaaaattagcgcttaagttccgtctgccgttccaacttttactgagctcgaccaacataaatctgtataccataagagctcctttccgatcat

SEQ ID NO: 568529 - DNA, 173 bp, Homo sapiens
gtctcacccacactcacacgcccaacacacacacttgtctagtgctaggcactcctcacaaccccggttctctcatctcccgagttagtggcagagcttgccaccagccagagcacaggccctgtgatgacacagtggaaagaatacgcctgcctgcccctgctgcagacacc

SEQ ID NO: 568530 - DNA, 1130 bp, Homo sapiens
gagaagaagtgacagtcacagcatgcacagcaacccatttgcttttctggggcagtcctggcggtttttcattaaggctgttccatgtgcaaagcccaagcaagcatgcaccaggcattgttcttgttgcaccaacaacatgtcaagtgtgcccggattacttccaggatcatccgttcttccgaagcatcctcaatgaggcacattgtggcagagcaaaaccatccagacattcattggttcctctgcaacaaccagggaagcacatatcatcatgatcccaccgtcacccattgcagaaccagcattatgtgataccattatgtcattgacctctgtcaaaacacatgtgatcctacagaagtggcgctggataatcagatagttactgctacccagagcaatatctgtgctgaagaccgtgctaccagagactgcctacacattatgaccagaaaccaaggtgctacaacagctgtggtacccacctcgttaatatgggtggagatgacgaacgaaaaatgggtggggagaagagaggtttaaaacccaggattggcgcttgcttattagcctgggagttacttataaggtccattgggttggattggcattaggtgagtatataaccttgagagaggatactacagaagagagggcatacggagaacggtttgaggataatatagacatacccacaagtgcagtgcgagaagaccaaggggcataagagaaacgcaaaaagcgggggagaagaacagagacaaacccacaacaccagggggacacccaacacagaaaaaaacaagccaggccaagagagaacacaacagaagagacgcacacaacgaaagaaaacaaaaaagagcaacagccagcagaagaactcaggcaaagacggcgcaacatggaaacgagcgcccaccagcgaaaaaacaggcgtaggagacagagagggagaaacactgcgagcggcaagtagcaacagatgacacaggaagagagtagcgaaaatgaagatcagcagggacgaaaacaacgcggcagagcaaccccagacagagcgcacaggcgcccgcacgacaacgcaggaggaagggcgcgaggacggggcggacgcaaccagcagc

SEQ ID NO: 568531 - DNA, 244 bp, Homo sapiens
cctcccccgggagggggcccccaaacttttttccccccccccttttggttttttgtgtggagggggagcagggaaatttaaactgtggtgtgaaagggtaggaaaaatcctggaggtgggggggttgttttttaaaccccccaaattatcccagtgtcccctgccccccttttccccccccccatgcccccaattttgtggggcatcccaattgtgaaaatgtccaataaatgtgtaatgggta

SEQ ID NO: 568532 - DNA, 872 bp, Homo sapiens
  misc_feature (638)..(638): n is a, c, g, or t
ccacgtggtcgtacgcataatggtcgatagttgccggtatctcctccctggctgacctgcagacgggagcgatgcgctgttccatgttcctcagggctcaggacctgacacctgtccgaggctacgtctggtgcatgcttctcgaccaggtgcgtgctatgtagagcgttcacaggctgagaggcgcgcgcgaacgtgctggggccatgcccgggctcgtctgttgttgcttgttgtggtggtgggctcgaaccttccatcacctaccccttggtatggtggcctcgggttgtgtgccaatctacgcttctctcggggtgttcatatgatgcttcgctttctccgcgtgctccaggacttactcgtatcttaccccgattccgccgttggtacctgtgtagttgccggaagctccacgagtctggcatgcgagaagaatgtggagggtcttgtgtgtgctcacggtcggacatcattccttcgcaggattgcgtgcattggtcgaatgttcgaatccttacaacaagggtgtagtgggtagaaatggggtctcgcagtaggttggaatcatcgcagaggacgtagacaggaagcttaagccatctagttgtcccgtcgattcagtacaaccgtggaantgggtcccgtagttagctctcgttcgagaaatctgtcagggcgctcgatggatgtcggcttggatgccaagttggagaaaggtcgggcgtgtgacttgtaaagcaatgagcattgctggggaaaactggtgtggcgtctgtggaatcattgaagggtgaccaaatcactgaatcgtattgaatcccattatagccattactgcaagatgaaaaattgccgcttctccccttgta

SEQ ID NO: 568533 - DNA, 956 bp, Homo sapiens
ctaatatctgtgatggtttccagcaggctcccccagagtgtacagtgcaggggtgagagtagaaattcaacctgactcctgtacattagagcttttctgagatgtagactcagcactgctcacataagagccagacaattccagccccacattacagaaccagcgtctcagtgggtggggggcattaggaagtataagagagcatcacccacaacagtgggacatcatgatgccatccaaatcaccctgtatagaaacatgtgacattcagtgtgaaccacgatcaagatgggcaacatgagaaactcgagcatgcaggatcctcaatgtggatgtgggcacacggtggaagcaaggactcttgagggacacgaagacaccgcagatgtcacgctgagagcatcacttgatactccactagaccatgcacttcatcatagtacagtgaaacacttcacaggatgcacgttacacatccatcgtgggattgtgacatcactcaaaacttcaaacacagaaatcgtcaacatgcaacgaggcagcatggcatcacgcacataacatcagcgcgtaaccaggaatggtaacctgtgagtacagacagggcgaccagggcccagaccatacggaaaggcaccacaactggggagggcactcctggaaggctcgcacgcagttgacgaccaatgacatacgtggaacacgcggagacagcagtcggggacccgaagggatggactcacgaacattaacggggccagagtgtttagagggcaaatgcgaaccaagggttcggacggatagatagtatccaccgaggtccgagtctctcggtgggagagtagctgagcagatattgggaagccagtgtgagcggggcgatggcctagcggctagacagggtacggcagcacaggagtagggaacgcagttgagataagcgcgagacgagggac

SEQ ID NO: 568534 - DNA, 305 bp, Homo sapiens
tggatcccccgtgcggatacgaaactcttccgatgtacactgcccaggccgaggtgctgccccctcctccgctggagctggagcccaggccagagccgccctgttctcgccgggagtcgaaaaacttcttcatcttgcgaatagggagcagcaaagcaaaataccgatggtttctagattttttttttttcctttttcttttggagcgtaccgggttttctccatgctgtttcttactctcctcttttgcacccctcccatttccctcgtttttctttgaaaatttctcccccctccagttcgct

SEQ ID NO: 568535 - DNA, 470 bp, Homo sapiens
  misc_feature (441)..(441): n is a, c, g, or t
  misc_feature (448)..(448): n is a, c, g, or t
attcggcacagatttatactacaaaaacaaaaagagttcagtttatgagccaccctgcctggccaggcttcactctttgatgtgacactaaagtgctgctgtgggaattggcattcacctaagatgtgagctgccagctgtgagccctgcgctatgggctgtatgtcagtggcaggtggtacgaaacaaaagaggacactggccaccagaagaggggaagcaagagtgctctagccagttcttcagggagtagagagccactgatttaaaatgcaagtagccaaaaagacagcacccttttcagtcacttttgtagaagagtgaaagtctaccttaagcagttacctgggcttcaagttgcaaactgaccttctgtcatggaagatgtgaaaagcttattttgtccttgaatataaccagtttagcatacatgggtgggcntccccantgaccggtgaatttagggtgat

SEQ ID NO: 568536 - DNA, 368 bp, Homo sapiens
  misc_feature (146)..(146): n is a, c, g, or t
  misc_feature (161)..(161): n is a, c, g, or t
  misc_feature (193)..(193): n is a, c, g, or t
  misc_feature (316)..(316): n is a, c, g, or t
ctgatgaatgttagctatgtttattataatcaggtaatgattccagaaggtcttgatgaaatatatggctaattcatgaaacttaaaataatttagaatttccttagcctatttataaaagtaagagaatattattaataattttngaatgaatattattnctctttatgttaatgaatattaagatattatncatttaatcttaaccatgaaacatttttgaaaaatgagcttggttcttatttagatctattgtggaacttaccacctaatgtatgttttctcctaaacacaccaattttttactaattatttnatgggcaggaaaccaaaataaacaggtaatcaactaaaaaaatactgtttcc

SEQ ID NO: 568537 - DNA, 135 bp, Homo sapiens
tgctccaaggtataggtgaagctgggaacttattccccttcttctctacaggtagtacaagacttcagatctctttagccactcaaattcttcttccaactttgtctgcctcattctaaaatttacacagtagac

SEQ ID NO: 568538 - DNA, 295 bp, Homo sapiens
  misc_feature (43)..(43): n is a, c, g, or t
  misc_feature (199)..(199): n is a, c, g, or t
ccccaaagaccaggttttggccttaggttttgggcctatgggngggccttcccctttacttccccccccccttttctccccccctttaagctctgttgggcggggggattttaattttcttttgtttatttccccccccctttttttcttccggcccgtttttttaagggggggggttggggttttttgtttttgtttngcctctaaaaaaacctttccccttctccccccccccccaaacccatcgggggaacaaaaagcgcccgcttttttccccatgtttttaatgtaagta

SEQ ID NO: 568539 - DNA, 114 bp, Homo sapiens
attacaccctgcttgaagctggcatttgagatgcttcagttggcacagcagcaacaagtttgctgttcaaagtaggccaagccacggtcaacccacaagccacggtcaacccac

SEQ ID NO: 568540 - DNA, 327 bp, Homo sapiens
cctgcgggccctattgctacgatccagctacgatccaacagtagatgcccaggatgcatgtgaattaacaaacgatgagacagagaagcaaagggactaaaggactatttagagccccttttccggagttcctgttatggctcagtgcttaagaacgcaactagtatccatgaggatgctggtttgatccttggcctcgctcagtgggttaaggatctggcactgccataagctgtaggttgcagatgcagctcagattcgacccctagcctgggggatcgtagcttttcagtacctgagcccacttcttgtttcggctctgcatct

SEQ ID NO: 568541 - DNA, 142 bp, Homo sapiens
aagcagtcaacgagaagcggaggtagtggcgggaataaggtatttgcgagcggtgaggaaacggaaagagagaaaaaagaaaaagggaaggaggaaaaaggaaagaaaaaaaacaggaacaaagagagaaaaaacagagaga

SEQ ID NO: 568542 - DNA, 416 bp, Homo sapiens
aggatctcaaacgacccgaagactgtgcaatgccagcctgccaacctcacctgtgaccagcttgttgacctgcggtccctgtcatcgagttctgcgagaacaaagtcttgaggctgtctgggggactggggtgcaggcgcctcaactgggaggtgccctttgtctgctggcctgctgtgtgctggtctacttctgtgtctggaagggggtcaaatccacgggaaagatcgtgtactttcactgctacattcccctacgtggtcctggtcgtgctgctggtgcggtggaagtgctgcttgccttggggccctgggatggcatcatttactatctcaagcctgataggtcaaagctgggttcccctcaggtgtggattagattgcggggacccagaatttcttttctatacgcccatt

SEQ ID NO: 568543 - DNA, 353 bp, Homo sapiens
gcttggaacagctggtgcagatggctggtggtgtgctgcccctcttgacatgtggtccagcactgaggacatgctgaagaacactaaatgcattgcgctctgctcttcccgcgacagaactttctgctacaaaagcagcatggacaagactgtctccattctgtcctcggatttcacctccagggtagtgggccttggcaccagataaaccaagcccacccctcatgtggagaaactgtccagcaactggctatcgaacaggatgactacacaccaggtccaatcaaagccattctggcatttgtgaaagggttctgaccgaggtattgtacctcctctgagtgtcactttcc

SEQ ID NO: 568544 - DNA, 233 bp, Homo sapiens
tgcctcagcctcctgagtagctgggatcacaggcacacaccactatgtctggttagtttatttttatatttattttttgtagagatggggtctccctatattcctgaggctagtctctaactcttgactcctgtgctcaagcagtcctaggcctcccaaagtgttgggattacaggcatgagccaccacacccagccagtactttgttgcttccggtggcatcgataaacacc

SEQ ID NO: 568545 - DNA, 227 bp, Homo sapiens
ccgcactcaggtgatccagccacctcagcttcccaaagtgctgggattacaggcatgagccactgcacccggctcttttgttgttgtgttagagacagggtctcactccgtttcccaggctggagtgtagtggcgtgatcatagctccctgcagccttgaactcctggtctcaagatcctcctgcgtcagccatattctcagtctttttcatttcagtcgttctact

SEQ ID NO: 568546 - DNA, 1243 bp, Homo sapiens
  misc_feature (340)..(340): n is a, c, g, or t
tgttgtgtggttgtgttgagagtggaagtgcgtttaataaatatttagaaagatatccttttatgttgttcttttctagatcatctccgagtgtagaagtatgctattaatttttattcttgtatattgtgtaggaggtcgagtcggggtgacagttgttcatgtagtggtgtcgatttaggagtagttattgtatttaaagttattagtagtgttgagagaggccagacaggtaagagaacagagcacgcaattaaaaaccagggggaagacaacaacaccgttagggaccaccctgttgagcctgtagaggggcacacacaggagggtgacacaaganacaccagcggttgtttttcccccccctccgtgtttttcccggtcttttatgtttcgaggcccgtgggggcgcatttctccaccatccggggggtttcttggaagaagggggtcgcccgcgtgcccgcgtgatccccggggggcgtcccccccctgtttttctcgcctgatcaccagagggtgccaacctgtgtggggggcagccccttggtaggacccctcttttgggactcgcgtccctcgccccctctgcctagaggggagccaagtttgctgagtattctccccccccggggttttctgtgagaagtgggctcgccttcttcccaggagcaccacggggggggacccccttcctcgacgtgctccacccggggggagggttggcaccgggtggcgcgcgaggagccccaacaacaagagggagaggaggacaccaaagagctgggggggccccccaaaaggaggctgctgaaattttgccggccaccacaagactgtgttaaacaccccaaggagatgttttctctggagaacttcaaagaggtttttgatgattggattttcttggtcgccttggagcactagatccccagggaccagaccaccctgataatgagactcccccgagacgcccgaagagcctctgagggcgggaagtacaccgcacgaaaaggagaaccttccccccgccaacacatgaggaagagagctcctgtctcgaggaaaaagaaacaacaagaggtgctccggaacaccagcaaaaaagaaggttccccaaaaaaaataataaatattccccaaaaaaacctgagaaaacaacaaaaattttggccccggggggtatttccccctttaaaaaaaaaggagattaaagggaaaaaaaaaaaacacccaaaaaaaa

SEQ ID NO: 568547 - DNA, 765 bp, Homo sapiens
  misc_feature (17)..(17): n is a, c, g, or t
  misc_feature (65)..(65): n is a, c, g, or t
  misc_feature (95)..(95): n is a, c, g, or t
  misc_feature (111)..(111): n is a, c, g, or t
  misc_feature (159)..(159): n is a, c, g, or t
  misc_feature (185)..(185): n is a, c, g, or t
  misc_feature (257)..(257): n is a, c, g, or t
  misc_feature (298)..(298): n is a, c, g, or t
  misc_feature (310)..(310): n is a, c, g, or t
  misc_feature (331)..(332): n is a, c, g, or t
  misc_feature (357)..(357): n is a, c, g, or t
  misc_feature (597)..(597): n is a, c, g, or t
  misc_feature (648)..(648): n is a, c, g, or t
gtggtgcgctcgcttcncattcagtttcagcgcgagtggtcgtggagaagtctttaggggcagangtggtgaaatgttatcttcattcttcgttnggcttggacgcttggngggaaataatttctaaagcacaaagaggtaaagaagtataatctttcngaaagatattcagtgttcaaaattcnggaatgcaatatcaatacacaatgggcattaggtggatatacacaatacgatgagagcaaattaatttattnggtactttttccattccatatcatcgggggggttgatttcntctttccttttncctccctcagcccagttgggnncggaactgtaccacccgcctccatncaggatttgttcatggcacgtttcacttcatcagaaccatctgaatagatctgctgaaataatctgtttaaagctgcatctccctccaacttttcattcttttcttcttctttgatctcaccaaccaatttatcccaatttcttgtataaggagatgatgatggatataggttctttacatctgctacgaattgttttggcgtaggcacatctccttgcccctctagcttttcccatctnacagcctctggcttttttcagtttaatttcaatctttgttgaaagtacttnaaacgtgctctgttctggtattataggatgaagaagtaccagtttcaaattgtaatcctctccagaaggaagtgtaaccaaagcagacaactctttttctgaaaattccacatttac

SEQ ID NO: 568548 - DNA, 127 bp, Homo sapiens
  misc_feature (39)..(39): n is a, c, g, or t
  misc_feature (43)..(43): n is a, c, g, or t
gctctacaggatcttacactctctatcaaaagctcggtntgtngaatgactcatggctaaaggattggggtctctccttcctataagggtcacctctagcacagaggcctgagtcatgggaaagggt

SEQ ID NO: 568549 - DNA, 806 bp, Homo sapiens
gagcggagtttatttccacccccttccctcctgtttctctctctccttctctctctctctctctctctctttttttcccgccctatctggggactgtgtaggaagagaggaagaacacgagagacagaggattgcattcatccgtatagcgttctctgaaagttatccgtaaactagcagggaccacgtcgaatgctggttgcagccctttacagaatcttgcacacaggaatattaaaacaataatgagatagacagacacatacacaacgccaagctccaccttcccgggccaggtttgtcgcctataaacgctgccctcttgaaccttatatattttcccagagagagagatgtcttatcgggggaaagcacaaatagttccacagcagtcactacagacgcaccgtgctgtggtcgcttcaggcgagtggtgttgaaccttggtacggtgaatcgggccatgcactctagcttcgtggcagggacgacttgtcctgagtggaatccatgcaggtgcgcatcttaacaaagcattgtgctggacggctcccggtgattgatgcatgcccggaggtgggccgaattccagtacgccgcggccacaacagcaccggagctagggagtagaatacccttgcgcgaggcaaatatggggactacccaaaccctcggtaacgggccagaatctggttccctatgcgggggaagttgccattcccggggtgcggaccgaattatgtctgccccggtaccatccgtgggcgttctgtttgcttgttggcgaacccccatctagcgccttc

SEQ ID NO: 568550 - DNA, 216 bp, Homo sapiens
gctcttagaaatccacattcttacacaagacagaccatattagaatctaagcccaacatgcacacttcacattaattaacgcatcagatttttccagaactcgctatcagtcaccattttcatatggggacaatgaagacaagcacacaggaggtagactatcagagtggggctgcgatcaagggcacaaactggtcattaagtcatctgacacta

SEQ ID NO: 568551 - DNA, 155 bp, Homo sapiens
actcagagtatcccgggtcgatcactgtactccagcctgatcacagagcgagactccgtctcagaaaaaaaaaaacggaacacgaaaaagttttgaccagggggtacttaccacaattaaaatactggatggtattggccctatcattctataag

SEQ ID NO: 568552 - DNA, 133 bp, Homo sapiens
cagtctgctctgatatcagatataggccattacaagtacagtactgagacgtgcagtcttcactaagctacctggagttggagacagaaaggccttttgcgttctgtacttttttcccttggatttttagggg

SEQ ID NO: 568553 - DNA, 129 bp, Homo sapiens
gtattcaatacctcttatgtaaccaaaaccatttttaattagtctttaagtacttagtagtatgcatcgatgttcgaactttgcattgagtgcttggcttgatttggcaattaattggctgaagctttt

SEQ ID NO: 568554 - DNA, 158 bp, Homo sapiens
gtgatcgtcacctatcaactcacaatgagaaattacctggccaagcgtggtgactcacgtctgtaatcccggcactttgggagggcaaggcaagagcttgagcttgagcctagacgtttgagaccagcttggtcaacacagcaagaccctgtttcttt

SEQ ID NO: 568555 - DNA, 146 bp, Homo sapiens
  misc_feature (78)..(78): n is a, c, g, or t
cgctggctaccggcactggaggctcgttgcgcgggccatgggtggaatgttctgctggcttagaccgtgatctgctgncaacttaccaagggcaggtcaagatgaccttcttggatccaggaacgctaacatagatcagtaaggaa

SEQ ID NO: 568556 - DNA, 150 bp, Homo sapiens
  misc_feature (142)..(142): n is a, c, g, or t
tccgtgaagcggcttcgcacgtggggtaaagtgtaactgagcctcttcgtgcgaattctgtcggcagcgatgttgtagatatgttgtggccactgagtttagtagctgttccacaaccaaaagctctgtggtccaatctgantgtggaca

SEQ ID NO: 568557 - DNA, 194 bp, Homo sapiens
cccccccccccccccaaaaccccccctttttccaagggtttttggggggggggccctttttttgggtttttggggaccccccctttcccgggggggggggggccccctttttttttcccccccccccccctttttcttttggggcccccccccctgggggttgggattttaaagccttgggtttttttttttta

SEQ ID NO: 568558 - DNA, 431 bp, Homo sapiens
ggctgggccgtattctagagatgaggatatcttccgcataggccagggtccgggcctggtcactccagaatcgctctctgcctgcagtatgccacaagagcagagttgcccagggagccagggtggtcactgacaccccattcccaccaaatacacacactctcccctggtgtactccttagccccttactgggtctcttctgctagcaggagctgctggatatgccatcaggactggctttccctgtgacccctttgtgagtggtgccttgcctggtaatccggagatccagatacagctctgttactgacttatggatatcttaggcaagtcactttcctgttattgggcctcataactgttcattgacttctccatctagaagactagtctgaggccagtttccaactccaattctctgactctaggt

SEQ ID NO: 568559 - DNA, 296 bp, Homo sapiens
ggccccgccgacggccagagcggcatcaccggtgtcgtgctgctggccgaatcgcatctggccgtgcacacctggcccgagttgggcgcggtgacgctggacgttctatgtctgcaactacggcggcgacaacagggacagggcccggaccctgcttgacgcgctggtccgcgtcttcgagcccgccgaagtcagccgccagcagttgctcagaggctgagccgggccgctgcctcgaccccggccgtgtaggcctcctcgaagaccgaatatgccgccaggtcgctgtgcgcgca

SEQ ID NO: 568560 - DNA, 133 bp, Homo sapiens
ggcacagtggcatgcgcctgtgatcccagctacttggaaggctgaggtgagaggatcactcgaggagatggggctgccatgagccatggtctggcacgtactccaaccgggtaacagggcaagaccctatcac

SEQ ID NO: 568561 - DNA, 539 bp, Homo sapiens
  misc_feature (82)..(82): n is a, c, g, or t
cgtgttcaacctcgaactgtgtacctcactagactgcataatcaatcaaaatttctgagtctcattatttaagtttgaaaanagccatcagcccaatcctttagggcaagatcattgtgcagatctcacaaagatccaagaatgtcgccatagtttttcgctatggaccaatagcacaacaaatactcacattttttgacattggtgaaatgtggatatcatgccttggcaaggatgcgctcccccaggcattcttgtaaaatataaaaggacatcccgttcgggagggtgatcaactaaacagtcacgtttgtcaaaccttgtttagctggaaaatgtacgtttcacaagagtgactttacatttgtgtagaacgcgcttctaaaacatggatttaaaaggtaataaatattttgaatagccaagtgttggactttgaatagctataacagtttctttgcaaatctgttaatctgcgatgaaacaggggccctccttttaaaatttaatgaataaacagttcatataaatgcagaaga

SEQ ID NO: 568562 - DNA, 160 bp, Homo sapiens
cggcaccccgccgttcgccccgctctcaggggttgaagttgtgcttgctgctgagggtaaaatgggtcgtgactttaagtactgggtcaatcgctggtgtggacggggaactggtaccattgatccaggaatgggcagtatctcggcgatttgggagtat

SEQ ID NO: 568563 - DNA, 1928 bp, Homo sapiens
  misc_feature (1087)..(1087): n is a, c, g, or t
atgctgagcagggcgtgtggtagtggtggaagctgtgggcatgaggcagcgcgcattgggactgctctgtattgcagcttgagtgacccgtgtgccaggagtgcttgtggggaggggaagtgcctgaggtagtaatctcagctggtctgcagactagggaggatccatctattgcatgaacaagaagtgtgctatcacagttacactatattgagagccacaaaaggacaggttgtaagcatgaatcccgtggtggattcaggattctcctgaaatttaggccattcatgtaaatttcgagactcagtgccgttgggatcctctacaagagatcgcattcagtagaatagtggccttccaatatcgttgggaaaccaattagtgtggagacccttagaagtgaataggacgttccttcaaacaggtcgcaaagcgcagaggtccccattggggagattgtccccaaatagatcattccggggagaatcttaaagtctgaagtcgcagcatccgtcacatcttgttacctttcttccgtagaaaaaagggttgggcaacgactggaaaattaggtcgtcccccaatacaccacgttggtccttccgtagaatagcggcgacacacatagggcggctccaagtaaccgtccgtggaacatagaagttaagagccctaaggcatccaatctcacgtacttatttggggtcgcgttgcgcaactacaattttgcgaggccatgcttgcaaccattccgatggagaggagaggccacaatgcagtacacatttttaaggggtacgcaatacagtgtttcgcaggtgagacactattaactatttaagttccacattctaataccaataaaccatttaaaccaagagaagggctgtgaggagaggagggacgattacaaagatgacgaaagacgcgaggaacaaacttccatagaggcccggagaaaacaccgaggtcggttcgctacatatacttaagtacaacatattattagaacccccgtatgttgcgcactgtacaacgagtcttatacatatacgcaaaggcagatatacccagataggcgacagtngagaaggaagattgcgggaaccactacaactccagaagttagagcacaaatgccaacatgtggatggaatgcatataaccactcgacagtagaaagtatacttaatgatcacagcgtgtagaaaatttatacaccacatttaaggcacccacgtagaaaaaccctttgtagccgagcactaaaatcaagaaatattatcgcacttgagtatatgaaacaaatagtccatcatttaaatgagacggcccacgattatccagataatatcaccaatagtcacaaagtgctgaagtacgtattacaaacccacaatgtaagggaggcccatgtatatgataacaaaaccaatgggtgtgtgtcaccacagtcacgtgacaagacgcggtttcttttcgacgaacaaaacgacgagggaaaataatacctctccataactagagagcacacagaaaatatatgcccggcatccacactacgtgagttggtagggagagaccgactacaactgtgttatcagcgagcgcagagtctaagtatagactactgcggagtgcccccgacggaggctcaatagactaagcgttggagacagagatagtaagctagctctcgctccctcacatagggaggagcgtagaaagcgacgtaagaggctcgacataacaagagtagtacggtcgaccaaacagacagacgaagaagaacgtactagagaagcagagcatagaccagctagtaataagaagaaggacgacagagaagagaaaattatgagttactagctgttttgtatcgagtagtttgttatgtatattattaggtaatgaatcggtgtgagcga

SEQ ID NO: 568564 - DNA, 2755 bp, Homo sapiens
cggacgcgtgggtgtgtttgtgttttgtatttttagtagagacagggtttcactatgttggccaggccggtctcgaactcctgacctcaggtgatccacccgcttcagtctcccaaagtgctgggattacaggcgtgagtcaccgcgcccggcccctgaagcatagttttcaatgaagagtcggcttggaaagcggtaggatttgtcccaacttcccagggcgtagtggaaggtgaaataagaccacagatttatcaacctaatccttagagacaacattcataaacatgaactgtcagttcatccaaccttctctccttttcagatgaggcctaaagagattaagtgacttgttcacttccattaatttttggtggatataggccgggtatggtggtgcacacctgtaatcccagcattttgggaggccaaggcgggcggatcacaaggtcaggagttcagtaccagcctggccaaaatagtgaaaccccgtctctaccaaaaatacaaaaaattagcaggacatagtagcaggcacctgtaatcccagctacttgggaggctgaggcgggagaattgcttgaacctaggaggcagaggttgcagtgagccgagattacaccactgcgctccagcctgggcaacagagtaagaatccatctcaaaaaaaaaaaattggtggatatagtatttccctaaagccctggagaacaggtggtatatacagtattacatagtgctatgctgtctgatattgtgtgtacagttaccttaacactctgtacttgggtaactttgataatgcagatgtagaaattggcagtggtggtaatgatgatgagaatgatcatgaaaatcatgagagagcagctacctgacatttattgagcacttactgtatgctgggcaacatgcttacacctattagctgtaacacaataattatattattgccccatttgacagatgaagaaagtgaatttagaggttaggcttgcccagtgtcacacagctggaagtggcagagttagcattctagctcacatttgcctaatttcagagcctgagttctaaattatgaggcttaccactaattattggggagggaaaggatagtatttatgatgctgagaaggaaagttcctgagtggtaccaggaatgacctggaagagtgaaaagccctaagagggattggaccatccagtgagcataggggattgtgtagatcaggtgaaaattggacctgcctcttcaacccacaagagaaagtgcagggcggagaagaaacctcaaggaacggagttgagctttgaaaggagaagttggctacaggtgctggagagggctgatggaatgtatttggggcagaggttgagatcctggccctcccatgtcacacaccctaaattgaggccacatggctgtcagtgaaaacaaacccaggtgctggtttcaataaaaggtgagactaggacacaaagaagggtagggagggcagagaacagctaaggtctgaacagctctgcgaagtaggtacatggctcccaggattatcagacacatttttcacatgggaagacagaattttcaagatgttaagtgactgttctaaatcattcagctgagactttcagtccccatatttgggatatttgatgtagagttatacaggtttggctacagaaggcatgactcaggcagagagaattagaggagccaggaagagggcagaataggcacagcctctaaaccagcaaccgtgctcacagcagcccagaagcccagggggagaacatgtgtgttcaaggtggttgcatgttcatggtaataattacactaatacccaataacagagaggttaccttgtggttatgagcctgggctctggagccagcctgcctcaagtcctacctctgcatcttctcgctatttatgttctgtcagattgttttccccctctgggccccagttgcctcttttgcaaaattagaataataattatacctcataggatgttgtaagagtttattaagcatgtagagcaggagtcagaaaccttttctattaaggactcaatagtaaatgtttttggcatttatggccatatagcgtcagtcatgactacttaactctgccataagttggtagaaaattcaggcatttaaaaaatctgtttgccataggaaatttgcagaagcccacagcaggcaaatgtctcttgatttataaatgaaattgtataaaatagtagccatagaaagtagacttctgattccaaattatcagcaaagtcatgcagaaaacaggcaactttttaaaaaatataaggttttagtctgtgtaaggtgattataagaggaatattccttctacgggtctgcttagctttctcctaaccactgcttttgatttatccagttcatcatcttttttttaaatagaaaatataatttggcggctgggcacagtggctcacacctgtagtcccagcactttggggggccgaggctggcggatcacgaggtcaggagatcgagaccatcctggctaacacggtgaaaccccatctctactaaaaacacaaaacaacaacaacaacaaaaaaatagccgggcgtggtggtgggcacctgtattcccagctactcgggaggctgaggcaggagaatggcgtgaacctgggaggcggagcttgcagtgagcagagatcgtgccacagcactccagcctgagcgactgaactagactctgtctc

SEQ ID NO: 568565 - DNA, 670 bp, Homo sapiens
  misc_feature (24)..(24): n is a, c, g, or t
  misc_feature (257)..(257): n is a, c, g, or t
  misc_feature (431)..(431): n is a, c, g, or t
actctagaggacccccacaccacntgagtcagtacgcgaatcagccgcgcccgggcaccggggtgcgtgcagccgcggtaaatctgttcggccagcgccagctcggcgcagcgttcgcaatactggccgatctggaacaacagcttggcgcggcgcttttccagccaggggttgtcggtacacaacgtagcgacctgcgccaacaccgtatccagcgcttcaccggcttcaaaggcttgctggcactggtgcaggancagaaacccgtgcacatcctcacggctgcgtaacccacgcgactcggcgcagaactcgactttttcataggtgtagatgcccagatctgccagcacgaattccgaccagtcctggtgcagattgccgaagaacatcaggcgcaggcgatcacacaactccattaccgtcaggcngtagagcgcgtcgtctacgtcggggcaccactgggcaaagctgcgcgactcggtaaattgcgcggccaaaggttcaagccatcggccttgttacccttgggttgatcgatccagggcttgaaggcgccgagcattcactcttttgcagcagcgcgaacagggtggcaacgcagcgggctttgatcctccacccatcccagctcacgcaagggccccgccgccgcatgggactcagggat

SEQ ID NO: 568566 - DNA, 153 bp, Homo sapiens
ctacttgttgttcaaagagagcggcgtgtccactagttgtgcttcagcctgggaaaaccttgattctctttgggcccccaagatctacagagggtctccctcatcctggcctcctctatccagtcccaggtgccaagcacctgtgggtccagt

SEQ ID NO: 568567 - DNA, 204 bp, Homo sapiens
attgcccattccgattgtggatcctgacacgggattgtgggggagttgagcagcagcaggaactcattctcaacatcttcttcttcaggcgctcgatggcccggctctggcctttgttgggtttctcccttctggatatcactcttgaggggagagatcttcatcttcatgtcctccagctcatggtctcggacatgggtgcag

SEQ ID NO: 568568 - DNA, 108 bp, Homo sapiens
tgtcatatgtaacatgatatataatcatttaaattactctgataaaataagacacagaagtagctgttgggtttctggcatgagccctttggattctgtgtttagcat

SEQ ID NO: 568569 - DNA, 116 bp, Homo sapiens
atagcggagccggatttaatgaagaaagcggcgagcgcgttgtcgccgcccaaccaacagggtcaatccagtacccgacgcccatcaagatggcggcggcgggcagcgtggcgacc

SEQ ID NO: 568570 - DNA, 537 bp, Homo sapiens
cggtgctggggcttcttatcctgaaggggctgcacgagggaaggcttagccatgtcgtgcttgatcagaagggggatcagcaccgcgaaagcgccaggggccattgtgccctacagtcaagctgtattagtcgacaggaccatttacatttgaggacagataggcatggacccttcaagtggacagcttgtgtcaggaggggtagcagaagaagcttaacaagctcttacatggtgtgaaattctgaaagctgcaggctgtgacttcactaacggggcgtacaaacaggatttcaagagttattttcctgctagagctgcttaccaaggtggtgctttacccacaggcagccgaattgttgaagcagtagctattcaagggccactgacaacggcatcactataagtgggcccagtgctgtgtagtctggaattgccaacattttaatttctacaattgatgcgacatcttaattaaccgtgtaattctcacacatgatgacagtgtgagcttgatgaatatatctggctatttggg

SEQ ID NO: 568571 - DNA, 236 bp, Homo sapiens
ttaggttttcttttcaaaaccgttcccggaagttttatttgttgaagtaactttcaagtggttggataccccgttattaacccacccaaccaaccattcttccctttaagtttttccgacctttggaggaccgtttcttggtccgtttcaaaattttcctttttttaatgttttaaaagtgggtttatttcaaccccttcactcccggttggtgaccgggcaaattcctgtttcca

SEQ ID NO: 568572 - DNA, 230 bp, Homo sapiens
cagacgtcggtgtacagaaatagaactctgtaagctatttattttgagacagggttgcacactgtcgcccagactagagctggagtccaatggcatgatcgtagcccaccgcattcttgaactcctgacctcaggtgatcctcccgacttggcctcccaaagggaggattacaggcatgagccactgtgcccggctgcataattatgggcactgatctataggagtggtg

SEQ ID NO: 568573 - DNA, 309 bp, Homo sapiens
tgctaaaattctctggggaaagctactgccacggaccacggtactgcgtgctcgctgctgaatgctcaggcagagctcataaggcaaccaacagagtcctgaccccacatgcctttcatgtcgcaacacagctgcgaaggaataccaggcgttgaggaccacaaattctagcgagaatatgagtcaccattaggcaattcatgtacattctttatttaccaagaccctcactaaacaagtacatcgttacaaatgcatgtacctttagatcctgcaatccacattatggaaattatcctagagataact

SEQ ID NO: 568574 - DNA, 226 bp, Homo sapiens
tgcagccgacagtgttaggctctgtcagaataatcgtttagactcatgagaaggatcaatgagacatcgatctcagacgcagtgtgattagtgcaagctcagtcatcattgtgttcccctcctaggaagtccgctggtcacaaggtgcacgtctggaggtcatcaacagagcatgttgctttgactgggtctctcgctctcttgatagagctcaagtgcatttcat

SEQ ID NO: 568575 - DNA, 310 bp, Homo sapiens
accctacctctgcaagacatcaagaaggggaagaaaaaggaccccaacgctcctaattgccaccatctgccttattcctgtatcgctctgaacatcgcccgaagattataagcgagcaccctggcctatccattggggatactgcaaagaaatggggcgaaatgtggtctgagcagccagccaaagataaacaaccatatgaacagatggcagcttagctacaggcgaaatccgaaaaggatatcgatgcatatcgtgccaagggcaagagtgaagcaagaaagaagggacctggcaggccaacacgctc

SEQ ID NO: 568576 - DNA, 446 bp, Homo sapiens
gagacttagaagggctccgctgtctggttgagttgcgcctccaactggagtcactgaaccatcacattatcaaatatgtcgactttattcattgcagataacagagggcgtagaatcaggctcgtccccaggctatgcatgtctgttcctgaggcttgttcggtgccatttaaaaatcccctgaaatagtcgggattaggaggatggacatacatcactgtcatcagcactgctgcctgtcatgcctttaggaagcctatatttttgtcaaggaagctaaagttgagtgtgattaaacaaccaattcaagtttacacagtaagtggcagatccaggatccaacctaagctggcattcgttcatgtctctgtaccactgctctgtctcagatgatgtctcctttgaggtgtagtcgacgcggccgcgaatttagtagtagtaggcgg

SEQ ID NO: 568577 - DNA, 1970 bp, Homo sapiens
  misc_feature (15)..(15): n is a, c, g, or t
  misc_feature (20)..(21): n is a, c, g, or t
  misc_feature (23)..(23): n is a, c, g, or t
tggctaagtgaggcngtggnntnaagttccgggctacagcagccgacgccgagaggcaccgtttcttcttaaaagagaaacgctgcgcgcgcgaggtgggcccctgtcttccagcagctccgggcctgctcgctaggcccgggaggcgcaggcgcaggcgcagtgggggtgagggcgcgtgggggcgcacagcctctggtgcacatggcttcctccccggcggtggacgtgtcctgcaggcggcgggagaagcggcggcagctggacgcgcgccgcagcaagtgccgcatccgcctgggcggccacatggagcagtggtgcctcctcaaggagcggctgggcttctccctgcactcgcagctcgccaagttcctgttggaccggtacacttcttcaggctgtgtcctctgtgcaggtcctgagcctttgcctccaaaaggtctgcagtatctggtgctcttgtctcatgcccacagccgagagtgcagcctggtgcccgggcttcgggggcctggcggccaagatggggggcttgtgtgggagtgctcagcaggccataccttctcctggggaccctctttgagccctacaccttcagaggcacccaagccagcctcccttccacatactactcggagaagttggtgttccgaggccacgagtgggcaggagcttgcagatttggaatctgagcatgatgagaggactcaagaggccaggttgcccaggagggtgggacccccaccagagaccttcccacctccaggagaggaagagggtgaggaagaagaggacaatgatgaggatgaagaggagatgctcagtgatgccagcttatggacctacagctcctccccagatgatagtgagcctgatgcccccagactactgccttcccctgtcacctgcacacctaaagagggggagacaccaccagcccctgcagcactctccagtcctcttgctgtgccggccttgtcagcatcctcattgagttccagagctcctccacctgcagaagtcagggtgcagccacagctcagcaggacccctcaagcggcccagcagactgaggccctggccagcactgggagtcaggcccagtctgctccaaccccggcctgggatgaggacactgcacaaattggccccaagagaattaggaaagctgccaaaagagagctgatgccttgtgacttccctggctgtggaaggatcttctccaaccggcagtatttgaatcaccacaaaaagtaccagcacatccaccagaagtctttctcctgcccagagccagcctgtgggaagtctttcaactttaagaaacacctgaaggagcacatgaagctgcacagtgacacccgggactacatctgtgagttctgcgcccggtctttccgcactagcagcaaccttgtcatccacagacgtatccacactggagaaaaacccctgcagtgtgagatatgcgggtttacctgccgccagaaggcttccctgaactggcaccagcgcaagcatgcagagacggtggctgccttgcgcttcccctgtgaattctgcggcaagcgctttgagaagccagacagtgttgcagcccaccgtagcaaaagtcacccagccctgcttctagcccctcaagagtcacccagtggtcccctagagccctgtcccagcatctctgcccctgggcctctgggatccagcgaggggtccaggccctctgcatctcctcaggctccaaccctgcttcctcagcaatgagctctcctccagctttggctttgggaagccagactccagggactgaaaaggagcaacaaggagagggtctgcttgagaaatgccagatgcttggtccccaggaactaaggcgacagagtgcagggtgggggcaagactgggctgtaggggagctggactactttagtcttcctaaaggacaaaataaacagtattttatgcaggca

SEQ ID NO: 568578 - DNA, 2889 bp, Homo sapiens
agcgggggggctctgggcagcctgggaactgccattgggattagtccgctccactcactgtcagcattaagtgggggtgcccaagacggggtggatggggggcgccctccagacctctgaccacggcctcaccgccactcgacccaactatgaagagcgcccccagctgcacgccaggacacgacctttccttcccctagaaaccagtaaaggccgctgccctattcaagatgaaatgtgtggaccgcccccagcccagttgaaatttcccgtgaaagtctctcgccccttccccacagctccacttcagtggactggagggcgcaggcctttgttctgactgcttctgtctgcctgcctcccacccgacgacactcacatggtagcgctgagcttcaacaccctgtatcatagaaggacggggtttggctccacacctgccactgctattgaaatagtttagtcttgccccagttcactgatgaggaaactgaggccctaacggcaggtggagccgggtccccgacccccgagatcggcagggcgctgaagacgtcccttccaccctccagcctctggtgcacatggcttcctccccggcggtggacgtgtcctgcaggcggcgggagaagcggcggcagctggacgcgcgccgcagcaagtgccgcatccgcctgggcggccacatggagcagtggtgcctcctcaaggagcggctgggcttctccctgcactcgcagctcgccaagttcctgttggaccggtgggcctgtcctgctgctcttttccaccctcaggtttctcactttaccaggacggcctgtgtgacttgtggcctccgagggtcctgctcccctcctcatggtctcagcgaatagcggcccttagggctggccccttacatgtgtgagtgcccagggctgagggtggctggccacctgagtcctgacctgcctcttctcctgctggcaggtacacttcttcaggctgtgtcctctgtgcaggtaggtaggggatggcagggggtgagagccagagggaagagggaccacagggtgacccagaaacaccctcctttcaaagggagccctgagtaagtttgggaagggtggggtgagttggggagcacagggtagtttgatggaggcaacctctgggtggggaagggagcaatgtctcaggatctagtgtgtctaggttctgaagaatgataaattggactggggctgaggttgccctggggtttgagggaacagggctccctgggtatggctctccagggtaagaggaggagacttcccagttcagcctgactgcttcccccacccctccaggtcctgagcctttgcctccaaaaggtctgcagtatctggtgctcttgtctcatgcccacagccgagagtgcagcctggtgcccgggcttcgggggcctggcggccaagatggggggcttgtgtgggagtgctcagcaggccataccttctcctggggaccctctttgagccctacaccttcagaggcacccaagccagcctcccttccacatactactcggagaagttggtgttccgaggccacgagtgggcaggagcttgcagatttggaatctgagcatgatgagaggactcaagaggccaggttgcccaggagggtgggacccccaccagagaccttcccacctccaggagaggaagagggtgaggaagaagaggacaatgatgaggatgaagaggagatgctcagtgatgccagcttatggacctacagctcctccccagatgatagtgagcctgatgcccccagactactgccttcccctgtcacctgcacacctaaagagggggagacaccaccagcccctgcagcactctccagtcctcttgctgtgccggccttgtcagcatcctcattgagttccagagctcctccacctgcagaagtcagggtgcagccacagctcagcaggacccctcaagcggcccagcagactgaggccctggccagcactgggagtcaggcccagtctgctccaaccccggcctgggatgaggacactgcacaaattggccccaagagaattaggaaagctgccaaaagagagctgatgccttgtgacttccctggctgtggaaggatcttctccaaccggcagtatttgaatcaccacaaaaagtaccagcacatccaccagaagtctttctcctgcccagagccagcctgtgggaagtctttcaactttaagaaacacctgaaggagcacatgaagctgcacagtgacacccgggactacatctgtgagttctgcgcccggtctttccgcactagcagcaaccttgtcatccacagacgtatccacactggagaaaaacccctgcagtgtgagatatgcgggtttacctgccgccagaaggcttccctgaactggcaccagcgcaagcatgcagagacggtggctgccttgcgcttcccctgtgaattctgcggcaagcgctttgagaagccagacagtgttgcagcccaccgtagcaaaagtcacccagccctgcttctagcccctcaagagtcacccagtggtcccctagagccctgtcccagcatctctgcccctgggcctctgggatccagcgaggggtccaggccctctgcatctcctcaggctccaaccctgcttcctcagcaatgagctctcctccagctttggctttgggaagccagactccagggactgaaaaggagcaacaaggagagggtctgcttgagaaatgccagatgcttggtccccaggaactaaggcgacagagtgcagggtgggggcaagactgggctgtaggggagctggactactttagtcttcctaaaggacaaaataaacagtattttatgcaggca

SEQ ID NO: 568579 - DNA, 1078 bp, Homo sapiens
  misc_feature (104)..(104): n is a, c, g, or t
cgacaaaatggacatctatcgtcctcacaaagccacctgctgaggagatgaccaagtttccacagcgatgacatacacttacctcctctgccagctccatccgntccagaataacatgtcgtgagtacagccataggacgaaatcgcaggaaggattcgaacgttgtggtgacggactcgtccagttgttgcgactaggaactcgtatgagctactcgtcagttagtcatacgtagcgtggcctcatgtgcgcccagctgccttgggaccaccttcacatcaccagcatctacgtacagtgcacaactcagcctgatgtaaattcgaggcatgcgaggccatggactcaatgccaaacgtaagtctccgagagacatcattggactttctgttaacagtccatgatatcggtcgttgcgtcatcctggatctgataatgcttatcaccatagggttgcggctacattgacattgcattctctcaaccatggctgcaagtgcgttgtgacagcacggaccctatctcaaactcatgtggatccgaggcttcattgcaactgggttgctactcctctctctataatagatactggggacggacgattacgtattcccctagggacatcttgcgggtaccctaagcatgtgaataatactggcgcgcttaggccacaagtggcttgatatcataggtgttaacttaaatcgcttctaccacgtgacatagatgtacggtaacggcctatgagaggccattatctccatttgccaggctacatagtcccattgggtcagatacgccatagttcgcatcctaataactgaggtcaatctagtgtagggctccataactcgcgtatctggcgagccttaggaaaaaagtcaggcataaaacaaaccatctaagggataagccctgcgcgatggcctattggctaaggactattctcagaactcgtgggtggggcttggaacagagggctggtcacccaaacttttaggtaagccggtgctggcctatatacatcttgggcccggaggggcactcctaagaatcctccagaggcgagacttggga

SEQ ID NO: 568580 - DNA, 105 bp, Homo sapiens
tgatctagaggatcccgtaagctatcgaatatctagtagctgtcctcgaagtttcctcaggatgctggcgtgtggggacccgacgcaccccgccacgcagtttta

SEQ ID NO: 568581 - DNA, 1738 bp, Homo sapiens
  misc_feature (15)..(15): n is a, c, g, or t
  misc_feature (20)..(21): n is a, c, g, or t
  misc_feature (23)..(23): n is a, c, g, or t
tggctaagtgaggcngtggnntnaagttccgggctacagcagccgacgccgagaggcaccgtttcttcttaaaagagaaacgctgcgcgcgcgagcctctggtgcacatggcttcctccccggcggtggacgtgtcctgcaggcggcgggagaagcggcggcagctggacgcgcgccgcagcaagtgccgcatccgcctgggcggccacatggagcagtggtgcctcctcaaggagcggctgggcttctccctgcactcgcagctcgccaagttcctgttggaccggtacacttcttcaggctgtgtcctctgtgcaggtcctgagcctttgcctccaaaaggtctgcagtatctggtgctcttgtctcatgcccacagccgagagtgcagcctggtgcccgggcttcgggggcctggcggccaagatggggggcttgtgtgggagtgctcagcaggccataccttctcctggggaccctctttgagccctacaccttcagaggcacccaagccagcctcccttccacatactactcggagaagttggtgttccgaggccacgagtgggcaggagcttgcagatttggaatctgagcatgatgagaggactcaagaggccaggttgcccagtagtgagcctgatgcccccagactactgccttcccctgtcacctgcacacctaaagagggggagacaccaccagcccctgcagcactctccagtcctcttgctgtgccggccttgtcagcatcctcattgagttccagagctcctccacctgcagaagtcagggtgcagccacagctcagcaggacccctcaagcggcccagcagactgaggccctggccagcactgggagtcaggcccagtctgctccaaccccggcctgggatgaggacactgcacaaattggccccaagagaattaggaaagctgccaaaagagagctgatgccttgtgacttccctggctgtggaaggatcttctccaaccggcagtatttgaatcaccacaaaaagtaccagcacatccaccagaagtctttctcctgcccagagccagcctgtgggaagtctttcaactttaagaaacacctgaaggagcacatgaagctgcacagtgacacccgggactacatctgtgagttctgcgcccggtctttccgcactagcagcaaccttgtcatccacagacgtatccacactggagaaaaacccctgcagtgtgagatatgcgggtttacctgccgccagaaggcttccctgaactggcaccagcgcaagcatgcagagacggtggctgccttgcgcttcccctgtgaattctgcggcaagcgctttgagaagccagacagtgttgcagcccaccgtagcaaaagtcacccagccctgcttctagcccctcaagagtcacccagtggtcccctagagccctgtcccagcatctctgcccctgggcctctgggatccagcgaggggtccaggccctctgcatctcctcaggctccaaccctgcttcctcagcaatgagctctcctccagctttggctttgggaagccagactccagggactgaaaaggagcaacaaggagagggtctgcttgagaaatgccagatgcttggtccccaggaactaaggcgacagagtgcagggtgggggcaagactgggctgtaggggagctggactactttagtcttcctaaaggacaaaataaacagtattttatgcaggca

SEQ ID NO: 568582 - DNA, 446 bp, Homo sapiens
agctctaccatggcgtgtccgtctcagaacagctcctttgggggtctcggtttggatatagccccactgtgcggggtctgacgcagcggagctcctagcggggtctcagttggctctccctaactagtaggaagagtcttgcttaaggagacttctccatcaggaagatttcagggagatttctcagatggagaataggaggatatgtttggaagggatactcttggagttgttggatagggatcagatttggaatccttctgtctgtctcatctttgcgggtttttgtatatgtgaaggggacctctgaagaaattgcttatggaagtccagcagacttaactcagaacccccccttatttatctggtcacatttggtgatccctaaagaaagctcaacaggcctgtcttagggtggctattcgctcttcaccttgaccagagat

SEQ ID NO: 568583 - DNA, 322 bp, Homo sapiens
tcgtcgaagaacaacggcacaaaacaaaaccctcgaggggccactcatcctgtctttactctcttttcccttctctattctttcacctagaagccctcatttgaccagtgaactcctatgccctcttgacccgcacattagcttggcgatttccttgttctgctaattcctaattctgcttcccatgtatttgtgatttcttgtttttgaccactttttatgcctggcactgtggtgcttgaaacccgatcttttccctggggaatgtttcatacgtttttattcattctatcacttcattatgccgttcttcttcgacgaa

SEQ ID NO: 568584 - DNA, 1463 bp, Homo sapiens
  misc_feature (15)..(15): n is a, c, g, or t
  misc_feature (20)..(21): n is a, c, g, or t
  misc_feature (23)..(23): n is a, c, g, or t
tggctaagtgaggcngtggnntnaagttccgggctacagcagccgacgccgagaggcaccgtttcttcttaaaagagaaacgctgcgcgcgcgaggtgggcccctgtcttccagcagctccgggcctgctcgctaggcccgggaggcgcaggcgcaggcgcagtgggggtgagggcgcgtgggggcgcacagcctctggtgcacatggcttcctccccggcggtggacgtgtcctgcaggcggcgggagaagcggcggcagctggacgcgcgccgcagcaagtgccgcatccgcctgggcggccacatggagcagtggtgcctcctcaaggagcggctgggcttctccctgcactcgcagctcgccaagttcctgttggaccggtacacttcttcaggctgtgtcctctgtgcaggtcctgagcctttgcctccaaaaggtctgcagtatctggtgctcttgtctcatgcccaagcatcctcattgagttccagagctcctccacctgcagaagtcagggtgcagccacagctcagcaggacccctcaagcggcccagcagactgaggccctggccagcactgggagtcaggcccagtctgctccaaccccggcctgggatgaggacactgcacaaattggccccaagagaattaggaaagctgccaaaagagagctgatgccttgtgacttccctggctgtggaaggatcttctccaaccggcagtatttgaatcaccacaaaaagtaccagcacatccaccagaagtctttctcctgcccagagccagcctgtgggaagtctttcaactttaagaaacacctgaaggagcacatgaagctgcacagtgacacccgggactacatctgtgagttctgcgcccggtctttccgcactagcagcaaccttgtcatccacagacgtatccacactggagaaaaacccctgcagtgtgagatatgcgggtttacctgccgccagaaggcttccctgaactggcaccagcgcaagcatgcagagacggtggctgccttgcgcttcccctgtgaattctgcggcaagcgctttgagaagccagacagtgttgcagcccaccgtagcaaaagtcacccagccctgcttctagcccctcaagagtcacccagtggtcccctagagccctgtcccagcatctctgcccctgggcctctgggatccagcgaggggtccaggccctctgcatctcctcaggctccaaccctgcttcctcagcaatgagctctcctccagctttggctttgggaagccagactccagggactgaaaaggagcaacaaggagagggtctgcttgagaaatgccagatgcttggtccccaggaactaaggcgacagagtgcagggtgggggcaagactgggctgtaggggagctggactactttagtcttcctaaaggacaaaataaacagtattttatgcaggca

SEQ ID NO: 568585 - DNA, 1301 bp, Homo sapiens
gttgtttcaagtttgagatcttttcagtttaggggctagggtcgggcaggggatggctgactgcccagaaagttaatgccatcttcctctttgttctcctttcagtagtgagcctgatgcccccagactactgccttcccctgtcacctgcacacctaaagagggggagacaccaccagcccctgcagcactctccagtcctcttgctgtgccggccttgtcagcatcctcattgagttccagagctcctccacctgcagaagtcagggtgcagccacagctcagcaggacccctcaagcggcccagcagactgaggccctggccaggtaacctgatggctgagacagaaagggcaggggcgtcctgggatgtggccctccctcgaggccctctgctccctctttgctgcccgtagcactgggagtcaggcccagtctgctccaaccccggcctgggatgaggacactgcacaaattggccccaagagaattaggaaagctgccaaaagagagctgatgccttgtgacttccctggctgtggaaggatcttctccaaccggcagtatttgaatcaccacaaaaagtaccagcacatccaccagaagtctttctcctgcccagagccagcctgtgggaagtctttcaactttaagaaacacctgaaggagcacatgaagctgcacagtgacacccgggactacatctgtgagttctgcgcccggtctttccgcactagcagcaaccttgtcatccacagacgtatccacactggagaaaaacccctgcagtgtgagatatgcgggtttacctgccgccagaaggcttccctgaactggcaccagcgcaagcatgcagagacggtggctgccttgcgcttcccctgtgaattctgcggcaagcgctttgagaagccagacagtgttgcagcccaccgtagcaaaagtcacccagccctgcttctagcccctcaagagtcacccagtggtcccctagagccctgtcccagcatctctgcccctgggcctctgggatccagcgaggggtccaggccctctgcatctcctcaggctccaaccctgcttcctcagcaatgagctctcctccagctttggctttgggaagccagactccagggactgaaaaggagcaacaaggagagggtctgcttgagaaatgccagatgcttggtccccaggaactaaggcgacagagtgcagggtgggggcaagactgggctgtaggggagctggactactttagtcttcctaaaggacaaaataaacagtattttatgcaggca

SEQ ID NO: 568586 - DNA, 1113 bp, Homo sapiens
  misc_feature (2)..(2): n is a, c, g, or t
  misc_feature (64)..(64): n is a, c, g, or t
  misc_feature (79)..(79): n is a, c, g, or t
  misc_feature (103)..(103): n is a, c, g, or t
  misc_feature (116)..(116): n is a, c, g, or t
  misc_feature (131)..(131): n is a, c, g, or t
  misc_feature (147)..(147): n is a, c, g, or t
  misc_feature (156)..(156): n is a, c, g, or t
  misc_feature (170)..(170): n is a, c, g, or t
  misc_feature (193)..(193): n is a, c, g, or t
  misc_feature (204)..(204): n is a, c, g, or t
  misc_feature (243)..(243): n is a, c, g, or t
  misc_feature (246)..(246): n is a, c, g, or t
  misc_feature (248)..(248): n is a, c, g, or t
  misc_feature (252)..(252): n is a, c, g, or t
  misc_feature (256)..(256): n is a, c, g, or t
  misc_feature (278)..(278): n is a, c, g, or t
  misc_feature (281)..(281): n is a, c, g, or t
  misc_feature (283)..(283): n is a, c, g, or t
  misc_feature (285)..(285): n is a, c, g, or t
  misc_feature (287)..(287): n is a, c, g, or t
  misc_feature (289)..(290): n is a, c, g, or t
  misc_feature (292)..(292): n is a, c, g, or t
  misc_feature (300)..(300): n is a, c, g, or t
  misc_feature (311)..(312): n is a, c, g, or t
  misc_feature (315)..(315): n is a, c, g, or t
  misc_feature (321)..(321): n is a, c, g, or t
  misc_feature (337)..(337): n is a, c, g, or t
  misc_feature (350)..(350): n is a, c, g, or t
  misc_feature (359)..(359): n is a, c, g, or t
  misc_feature (364)..(364): n is a, c, g, or t
  misc_feature (367)..(367): n is a, c, g, or t
  misc_feature (370)..(370): n is a, c, g, or t
  misc_feature (374)..(374): n is a, c, g, or t
  misc_feature (376)..(376): n is a, c, g, or t
  misc_feature (387)..(387): n is a, c, g, or t
  misc_feature (393)..(393): n is a, c, g, or t
  misc_feature (404)..(404): n is a, c, g, or t
  misc_feature (406)..(406): n is a, c, g, or t
  misc_feature (412)..(412): n is a, c, g, or t
  misc_feature (421)..(421): n is a, c, g, or t
  misc_feature (430)..(430): n is a, c, g, or t
  misc_feature (436)..(436): n is a, c, g, or t
  misc_feature (449)..(449): n is a, c, g, or t
  misc_feature (455)..(455): n is a, c, g, or t
  misc_feature (492)..(492): n is a, c, g, or t
  misc_feature (508)..(508): n is a, c, g, or t
  misc_feature (511)..(511): n is a, c, g, or t
  misc_feature (519)..(519): n is a, c, g, or t
  misc_feature (525)..(525): n is a, c, g, or t
  misc_feature (529)..(529): n is a, c, g, or t
  misc_feature (558)..(558): n is a, c, g, or t
  misc_feature (572)..(572): n is a, c, g, or t
  misc_feature (629)..(629): n is a, c, g, or t
  misc_feature (655)..(655): n is a, c, g, or t
  misc_feature (684)..(684): n is a, c, g, or t
  misc_feature (686)..(686): n is a, c, g, or t
  misc_feature (703)..(703): n is a, c, g, or t
  misc_feature (712)..(712): n is a, c, g, or t
  misc_feature (729)..(729): n is a, c, g, or t
  misc_feature (733)..(733): n is a, c, g, or t
  misc_feature (737)..(737): n is a, c, g, or t
  misc_feature (746)..(746): n is a, c, g, or t
  misc_feature (750)..(750): n is a, c, g, or t
  misc_feature (757)..(757): n is a, c, g, or t
  misc_feature (764)..(764): n is a, c, g, or t
tngcttcccctcttttgcctgccccgttagcaacttggggagttcaaggcccccaagtcttgcntccaaaccccccggnccttggggattgaaggacaacttncacaaaaatttgncccccaaaagagaantttagggaaaagcttnccaaaaaangaggagcttgaatnccttttgtgacattccccttggntttgtgggaanggattctttcttccaaacccgggcaaggtatttttgaangtnanccancaanaaaatgtacccagcaacaagcncancntnangnngntttttttntccttgccccnngangcgcangcccttgttggggaangttctttttcaanctttttaangaaancanccnttgnangggaggcacanttgaangtttgcaacangntgacanccccggggnacatacaantcttgntgaggttcttgcngccccngggtccttttcccgcaacttagcaagcaaaccctttngtcaattccaacaagnacngtattccnacaacntggnaggaaaaaaaccccccttgcaaggttgtngaggattattagcnggggttttacacttgtccggccaaggaaagggctttccccttgaaacttgggcaacncaggcgcaaagcaatagcaagaagancaggtagagcatgcactatagcagcttcncnatgtgaaattcatgcangcaaagcancatttgaaaaaccaaanagtnttgnagcccaccntagnaaaaatnacaccanccctgcttctagcccctcaagagtcacccagtggtcccctagagccctgtcccagcatctctgcccctgggcctctgggatccagcgaggggtccaggccctctgcatctcctcaggctccaaccctgcttcctcagcaatgagctctcctccagctttggctttgggaagccagactccagggactgaaaaggagcaacaaggagagggtctgcttgagaaatgccagatgcttggtccccaggaactaaggcgacagagtgcagggtgggggcaagactgggctgtaggggagctggactactttagtcttcctaaaggacaaaataaacagtattttatgcaggca

SEQ ID NO: 568587 - DNA, 2951 bp, Homo sapiens
agcgggggggctctgggcagcctgggaactgccattgggattagtccgctccactcactgtcagcattaagtgggggtgcccaagacggggtggatggggggcgccctccagacctctgaccacggcctcaccgccactcgacccaactatgaagagcgcccccagctgcacgccaggacacgacctttccttcccctagaaaccagtaaaggccgctgccctattcaagatgaaatgtgtggaccgcccccagcccagttgaaatttcccgtgaaagtctctcgccccttccccacagctccacttcagtggactggagggcgcaggcctttgttctgactgcttctgtctgcctgcctcccacccgacgacactcacatggtagcgctgagcttcaacaccctgtatcatagaaggacggggtttggctccacacctgccactgctattgaaatagtttagtcttgccccagttcactgatgaggaaactgaggccctaacggcaggtggagccgggtccccgacccccgagatcggcagggcgctgaagacgtcccttccaccctccagcctctggtgcacatggcttcctccccggcggtggacgtgtcctgcaggcggcgggagaagcggcggcagctggacgcgcgccgcagcaagtgccgcatccgcctgggcggccacatggagcagtggtgcctcctcaaggagcggctgggcttctccctgcactcgcagctcgccaagttcctgttggaccggttaggggccgggagaagggcttgggggagggtacccaggcagcagcccctagcctcctctccagggcctgtcctgctgctcttttccaccctcaggtttctcactttaccaggacggcctgtgtgacttgtggcctccgagggtcctgctcccctcctcatggtctcagcgaatagcggcccttagggctggccccttacatgtgtgagtgcccagggctgagggtggctggccacctgagtcctgacctgcctcttctcctgctggcaggtacacttcttcaggctgtgtcctctgtgcaggtaggtaggggatggcagggggtgagagccagagggaagagggaccacagggtgacccagaaacaccctcctttcaaagggagccctgagtaagtttgggaagggtggggtgagttggggagcacagggtagtttgatggaggcaacctctgggtggggaagggagcaatgtctcaggatctagtgtgtctaggttctgaagaatgataaattggactggggctgaggttgccctggggtttgagggaacagggctccctgggtatggctctccagggtaagaggaggagacttcccagttcagcctgactgcttcccccacccctccaggtcctgagcctttgcctccaaaaggtctgcagtatctggtgctcttgtctcatgcccacagccgagagtgcagcctggtgcccgggcttcgggggcctggcggccaagatggggggcttgtgtgggagtgctcagcaggccataccttctcctggggaccctctttgagccctacaccttcagaggcacccaagccagcctcccttccacatactactcggagaagttggtgttccgaggccacgagtgggcaggagcttgcagatttggaatctgagcatgatgagaggactcaagaggccaggttgcccaggagggtgggacccccaccagagaccttcccacctccaggagaggaagagggtgaggaagaagaggacaatgatgaggatgaagaggagatgctcagtgatgccagcttatggacctacagctcctccccagatgatagtgagcctgatgcccccagactactgccttcccctgtcacctgcacacctaaagagggggagacaccaccagcccctgcagcactctccagtcctcttgctgtgccggccttgtcagcatcctcattgagttccagagctcctccacctgcagaagtcagggtgcagccacagctcagcaggacccctcaagcggcccagcagactgaggccctggccagcactgggagtcaggcccagtctgctccaaccccggcctgggatgaggacactgcacaaattggccccaagagaattaggaaagctgccaaaagagagctgatgccttgtgacttccctggctgtggaaggatcttctccaaccggcagtatttgaatcaccacaaaaagtaccagcacatccaccagaagtctttctcctgcccagagccagcctgtgggaagtctttcaactttaagaaacacctgaaggagcacatgaagctgcacagtgacacccgggactacatctgtgagttctgcgcccggtctttccgcactagcagcaaccttgtcatccacagacgtatccacactggagaaaaacccctgcagtgtgagatatgcgggtttacctgccgccagaaggcttccctgaactggcaccagcgcaagcatgcagagacggtggctgccttgcgcttcccctgtgaattctgcggcaagcgctttgagaagccagacagtgttgcagcccaccgtagcaaaagtcacccagccctgcttctagcccctcaagagtcacccagtggtcccctagagccctgtcccagcatctctgcccctgggcctctgggatccagcgaggggtccaggccctctgcatctcctcaggctccaaccctgcttcctcagcaatgagctctcctccagctttggctttgggaagccagactccagggactgaaaaggagcaacaaggagagggtctgcttgagaaatgccagatgcttggtccccaggaactaaggcgacagagtgcagggtgggggcaagactgggctgtaggggagctggactactttagtcttcctaaaggacaaaataaacagtattttatgcaggca

SEQ ID NO: 568588 - DNA, 2571 bp, Homo sapiens
  misc_feature (15)..(15): n is a, c, g, or t
  misc_feature (20)..(21): n is a, c, g, or t
  misc_feature (23)..(23): n is a, c, g, or t
tggctaagtgaggcngtggnntnaagttccgggctacagcagccgacgccgagaggcaccgtttcttcttaaaagagaaacgctgcgcgcgcgaggtgggcccctgtcttccagcagctccgggcctgctcgctaggcccgggaggcgcaggcgcaggcgcagtgggggtgagggcgcgtgggggcgcacagcctctggtgcacatggcttcctccccggcggtggacgtgtcctgcaggcggcgggagaagcggcggcagctggacgcgcgccgcagcaagtgccgcatccgcctgggcggccacatggagcagtggtgcctcctcaaggagcggctgggcttctccctgcactcgcagctcgccaagttcctgttggaccggttaggggccgggagaagggcttgggggagggtacccaggcagcagcccctagcctcctctccagggcctgtcctgctgctcttttccaccctcaggtttctcactttaccaggacggcctgtgtgacttgtggcctccgagggtcctgctcccctcctcatggtctcagcgaatagcggcccttagggctggccccttacatgtgtgagtgcccagggctgagggtggctggccacctgagtcctgacctgcctcttctcctgctggcaggtacacttcttcaggctgtgtcctctgtgcaggtaggtaggggatggcagggggtgagagccagagggaagagggaccacagggtgacccagaaacaccctcctttcaaagggagccctgagtaagtttgggaagggtggggtgagttggggagcacagggtagtttgatggaggcaacctctgggtggggaagggagcaatgtctcaggatctagtgtgtctaggttctgaagaatgataaattggactggggctgaggttgccctggggtttgagggaacagggctccctgggtatggctctccagggtaagaggaggagacttcccagttcagcctgactgcttcccccacccctccaggtcctgagcctttgcctccaaaaggtctgcagtatctggtgctcttgtctcatgcccacagccgagagtgcagcctggtgcccgggcttcgggggcctggcggccaagatggggggcttgtgtgggagtgctcagcaggccataccttctcctggggaccctctttgagccctacaccttcagaggcacccaagccagcctcccttccacatactactcggagaagttggtgttccgaggccacgagtgggcaggagcttgcagatttggaatctgagcatgatgagaggactcaagaggccaggttgcccaggagggtgggacccccaccagagaccttcccacctccaggagaggaagagggtgaggaagaagaggacaatgatgaggatgaagaggagatgctcagtgatgccagcttatggacctacagctcctccccagatgatagtgagcctgatgcccccagactactgccttcccctgtcacctgcacacctaaagagggggagacaccaccagcccctgcagcactctccagtcctcttgctgtgccggccttgtcagcatcctcattgagttccagagctcctccacctgcagaagtcagggtgcagccacagctcagcaggacccctcaagcggcccagcagactgaggccctggccagcactgggagtcaggcccagtctgctccaaccccggcctgggatgaggacactgcacaaattggccccaagagaattaggaaagctgccaaaagagagctgatgccttgtgacttccctggctgtggaaggatcttctccaaccggcagtatttgaatcaccacaaaaagtaccagcacatccaccagaagtctttctcctgcccagagccagcctgtgggaagtctttcaactttaagaaacacctgaaggagcacatgaagctgcacagtgacacccgggactacatctgtgagttctgcgcccggtctttccgcactagcagcaaccttgtcatccacagacgtatccacactggagaaaaacccctgcagtgtgagatatgcgggtttacctgccgccagaaggcttccctgaactggcaccagcgcaagcatgcagagacggtggctgccttgcgcttcccctgtgaattctgcggcaagcgctttgagaagccagacagtgttgcagcccaccgtagcaaaagtcacccagccctgcttctagcccctcaagagtcacccagtggtcccctagagccctgtcccagcatctctgcccctgggcctctgggatccagcgaggggtccaggccctctgcatctcctcaggctccaaccctgcttcctcagcaatgagctctcctccagctttggctttgggaagccagactccagggactgaaaaggagcaacaaggagagggtctgcttgagaaatgccagatgcttggtccccaggaactaaggcgacagagtgcagggtgggggcaagactgggctgtaggggagctggactactttagtcttcctaaaggacaaaataaacagtattttatgcaggca

SEQ ID NO: 568589 - DNA, 281 bp, Homo sapiens
ccacttccttccccttccccaccccgtgccccctccatggagaggaacagaccccttctctgtccagtctaacccaggtcacgtacaccagtcagcaccacaacaagacagtagaaaacacggacgagaacaagagcctgatgatacatcaaaacagaacataaatactacggagcacaactaatgacacacagcaaaagaagacatagcgacagataacgacttagtgtgcaacacatcaagaaagagagagaaagaatagagaaaggacaagaataaac

SEQ ID NO: 568590 - DNA, 286 bp, Homo sapiens
cggaccatactttcaatataaacctgtaggaaaacacatgcaacatttgagggaccatctaaaactttaatttgggaagactgtgttaactcacatgcagtaatattaaaaaatgactcatatggtttagtaatagactgggcaccatagggctatttaaaaaacaattgctcctctgtggaagggaatgcctggaggctacttattttatttcttatcaggagaaagagaatcatcattcaaggatcagctcattcttttcccttaaatgggaagactaaggcat

SEQ ID NO: 568591 - DNA, 3040 bp, Homo sapiens
agcgggggggctctgggcagcctgggaactgccattgggattagtccgctccactcactgtcagcattaagtgggggtgcccaagacggggtggatggggggcgccctccagacctctgaccacggcctcaccgccactcgacccaactatgaagagcgcccccagctgcacgccaggacacgacctttccttcccctagaaaccagtaaaggccgctgccctattcaagatgaaatgtgtggaccgcccccagcccagttgaaatttcccgtgaaagtctctcgccccttccccacagctccacttcagtggactggagggcgcaggcctttgttctgactgcttctgtctgcctgcctcccacccgacgacactcacatggtagcgctgagcttcaacaccctgtatcatagaaggacggggtttggctccacacctgccactgctattgaaatagtttagtcttgccccagttcactgatgaggaaactgaggccctaacggcaggtggagccgggtccccgacccccgagatcggcagggcgctgaagacgtcccttccaccctccagcctctggtgcacatggcttcctccccggcggtggacgtgtcctgcaggcggcgggagaagcggcggcagctggacgcgcgccgcagcaagtgccgcatccgcctgggcggccacatggagcagtggtgcctcctcaaggagcggctgggcttctccctgcactcgcagctcgccaagttcctgttggaccggttaggggccgggagaagggcttgggggagggtacccaggcagcagcccctagcctcctctccagggcctgtcctgctgctcttttccaccctcaggtttctcactttaccaggacggcctgtgtgacttgtggcctccgagggtcctgctcccctcctcatggtctcagcgaatagcggcccttagggctggccccttacatgtgtgagtgcccagggctgagggtggctggccacctgagtcctgacctgcctcttctcctgctggcaggtacacttcttcaggctgtgtcctctgtgcaggtaggtaggggatggcagggggtgagagccagagggaagagggaccacagggtgacccagaaacaccctcctttcaaagggagccctgagtaagtttgggaagggtggggtgagttggggagcacagggtagtttgatggaggcaacctctgggtggggaagggagcaatgtctcaggatctagtgtgtctaggttctgaagaatgataaattggactggggctgaggttgccctggggtttgagggaacagggctccctgggtatggctctccagggtaagaggaggagacttcccagttcagcctgactgcttcccccacccctccaggtcctgagcctttgcctccaaaaggtctgcagtatctggtgctcttgtctcatgcccacagccgagagtgcagcctggtgcccgggcttcgggggcctggcggccaagatggggggcttgtgtgggagtgctcagcaggccataccttctcctggggaccctctttgagccctacaccttcagaggcacccaagccagcctcccttccacatactactcggagaagttggtgttccgaggccacgagtgggcaggagcttgcagatttggaatctgagcatgatgagaggactcaagaggccaggttgcccaggagggtgggacccccaccagagaccttcccacctccaggagaggaagagggtgaggaagaagaggacaatgatgaggatgaagaggagatgctcagtgatgccagcttatggacctacagctcctccccagatgatagtgagcctgatgcccccagactactgccttcccctgtcacctgcacacctaaagagggggagacaccaccagcccctgcagcactctccagtcctcttgctgtgccggccttgtcagcatcctcattgagttccagagctcctccacctgcagaagtcagggtgcagccacagctcagcaggacccctcaagcggcccagcagactgaggccctggccaggtaacctgatggctgagacagaaagggcaggggcgtcctgggatgtggccctccctcgaggccctctgctccctctttgctgcccgtagcactgggagtcaggcccagtctgctccaaccccggcctgggatgaggacactgcacaaattggccccaagagaattaggaaagctgccaaaagagagctgatgccttgtgacttccctggctgtggaaggatcttctccaaccggcagtatttgaatcaccacaaaaagtaccagcacatccaccagaagtctttctcctgcccagagccagcctgtgggaagtctttcaactttaagaaacacctgaaggagcacatgaagctgcacagtgacacccgggactacatctgtgagttctgcgcccggtctttccgcactagcagcaaccttgtcatccacagacgtatccacactggagaaaaacccctgcagtgtgagatatgcgggtttacctgccgccagaaggcttccctgaactggcaccagcgcaagcatgcagagacggtggctgccttgcgcttcccctgtgaattctgcggcaagcgctttgagaagccagacagtgttgcagcccaccgtagcaaaagtcacccagccctgcttctagcccctcaagagtcacccagtggtcccctagagccctgtcccagcatctctgcccctgggcctctgggatccagcgaggggtccaggccctctgcatctcctcaggctccaaccctgcttcctcagcaatgagctctcctccagctttggctttgggaagccagactccagggactgaaaaggagcaacaaggagagggtctgcttgagaaatgccagatgcttggtccccaggaactaaggcgacagagtgcagggtgggggcaagactgggctgtaggggagctggactactttagtcttcctaaaggacaaaataaacagtattttatgcaggca

SEQ ID NO: 568592 - DNA, 2875 bp, Homo sapiens
agcgggggggctctgggcagcctgggaactgccattgggattagtccgctccactcactgtcagcattaagtgggggtgcccaagacggggtggatggggggcgccctccagacctctgaccacggcctcaccgccactcgacccaactatgaagagcgcccccagctgcacgccaggacacgacctttccttcccctagaaaccagtaaaggccgctgccctattcaagatgaaatgtgtggaccgcccccagcccagttgaaatttcccgtgaaagtctctcgccccttccccacagctccacttcagtggactggagggcgcaggcctttgttctgactgcttctgtctgcctgcctcccacccgacgacactcacatggtagcgctgagcttcaacaccctgtatcatagaaggacggggtttggctccacacctgccactgctattgaaatagtttagtcttgccccagttcactgatgaggaaactgaggccctaacggcaggtggagccgggtccccgacccccgagatcggcagggcgctgaagacgtcccttccaccctccagcctctggtgcacatggcttcctccccggcggtggacgtgtcctgcaggcggcgggagaagcggcggcagctggacgcgcgccgcagcaagtgccgcatccgcctgggcggccacatggagcagtggtgcctcctcaaggagcggctgggcttctccctgcactcgcagctcgccaagttcctgttggaccggttaggggccgggagaagggcttgggggagggtacccaggcagcagcccctagcctcctctccagggcctgtcctgctgctcttttccaccctcaggtttctcactttaccaggacggcctgtgtgacttgtggcctccgagggtcctgctcccctcctcatggtctcagcgaatagcggcccttagggctggccccttacatgtgtgagtgcccagggctgagggtggctggccacctgagtcctgacctgcctcttctcctgctggcaggtacacttcttcaggctgtgtcctctgtgcaggtaggtaggggatggcagggggtgagagccagagggaagagggaccacagggtgacccagaaacaccctcctttcaaagggagccctgagtaagtttgggaagggtggggtgagttggggagcacagggtagtttgatggaggcaacctctgggtggggaagggagcaatgtctcaggatctagtgtgtctaggttctgaagaatgataaattggactggggctgaggttgccctggggtttgagggaacagggctccctgggtatggctctccagggtaagaggaggagacttcccagttcagcctgactgcttcccccacccctccaggtcctgagcctttgcctccaaaaggtctgcagtatctggtgctcttgtctcatgcccacagccgagagtgcagcctggtgcccgggcttcgggggcctggcggccaagatggggggcttgtgtgggagtgctcagcaggccataccttctcctggggaccctctttgagccctacaccttcagaggcacccaagccagcctcccttccacatactactcggagaagttggtgttccgaggccacgagtgggcaggagcttgcagatttggaatctgagcatgatgagaggactcaagaggccaggttgcccaggagggtgggacccccaccagagaccttcccacctccaggagaggaagagggtgaggaagaagaggacaatgatgaggatgaagaggagatgctcagtgatgccagcttatggacctacagctcctccccagatgatagtgagcctgatgcccccagactactgccttcccctgtcacctgcacacctaaagagggggagacaccaccagcccctgcagcactctccagtcctcttgctgtgccggccttgtcagcatcctcattgagttccagagctcctccacctgcagaagtcagggtgcagccacagctcagcaggacccctcaagcggcccagcagactgaggccctggccagaggaaagctgccaaaagagagctgatgccttgtgacttccctggctgtggaaggatcttctccaaccggcagtatttgaatcaccacaaaaagtaccagcacatccaccagaagtctttctcctgcccagagccagcctgtgggaagtctttcaactttaagaaacacctgaaggagcacatgaagctgcacagtgacacccgggactacatctgtgagttctgcgcccggtctttccgcactagcagcaaccttgtcatccacagacgtatccacactggagaaaaacccctgcagtgtgagatatgcgggtttacctgccgccagaaggcttccctgaactggcaccagcgcaagcatgcagagacggtggctgccttgcgcttcccctgtgaattctgcggcaagcgctttgagaagccagacagtgttgcagcccaccgtagcaaaagtcacccagccctgcttctagcccctcaagagtcacccagtggtcccctagagccctgtcccagcatctctgcccctgggcctctgggatccagcgaggggtccaggccctctgcatctcctcaggctccaaccctgcttcctcagcaatgagctctcctccagctttggctttgggaagccagactccagggactgaaaaggagcaacaaggagagggtctgcttgagaaatgccagatgcttggtccccaggaactaaggcgacagagtgcagggtgggggcaagactgggctgtaggggagctggactactttagtcttcctaaaggacaaaataaacagtattttatgcaggca

SEQ ID NO: 568593 - DNA, 130 bp, Homo sapiens
aagtctgggtagatatctatccacgacagatcctggaaggcagcacggtttggtggatctagattcattaggaatgtcttctggtcagccaggccaggacccgggcttgccaagagcagaggccctccca

SEQ ID NO: 568594 - DNA, 1162 bp, Homo sapiens
gcgggcgcgtcggggccgggccggggctactgtaaatggctggcggagggaggctggagcggcggcacgctcagcccagatcccccgaaactttagtgttcgaagccccacaactttcctggtgaatgctgctgcctgctcctgtgatgtgcgtgtgactgtgaatggtggaatgcctgaggctgggaatgtcttgggtggaatctgtgcagtggatgcctggggatgactcgaaccctgctgtgctgtgtgtgtgcgtgatgtcctgccagttgcctctgctgcctcctgctgtgccccctgccatctttctcatgcacccatcccctgcggcctgtgagcctggagcctggagcctggagccgtagtcagcagcctgcagcctgcagcctgcgctgcctgggcctcgcaggcatgctggctgcgtgctgagctgcaagcctggtgcccccatcctcgctgaccttcctgtggcccttgtatgctctgtggctgctaccttggctgctgtcgtgagtgcctgtgtggcccgggcagtatttcgaggaacgcatagacagtgagtgcctggtgccactgctgcatgccccttgcctggcccagggttccttgggtgcctgtggccccacgatgtaacgtagcatgctgggtgctgtggtgctggccgttgagcctggcagtgcgaaagatcggacacggcttaaccgctgagcgatgcggagcagaaaatactattcacgatctcttctcctactgcgacattgaggagcacccaaggaaggtggtggtcaacgggcgggtgctggagctgttccgggcgcgcaggtgccgaacgacgtgggtcctaccagatcatgggcagccttggtgggtgcaacaagacttggtaaatacgggagacagacagtctacatggcttgaaacttgtactgttgccaaactggtacccttaaaaatggacagttaactaccgaatgcacgtaccatgacaagatggtcgccccagaagtacgggatctgcccatgacctcattcactcaaccgaacaccgggcgacgtggataaccacaacggaggaagacacacgccgacaaaaaacacagatatgcaatcgacaccacatgacacgccagtacacgagaacccacctaagcgatccaga

SEQ ID NO: 568595 - DNA, 307 bp, Homo sapiens
gcatattgtatgctacaaaaggcagctcaagtaagctgaaatctagtattgtgcgcacaggaataagaccttctgcaacatcttaagatccacaaatgacgggatataaaactaatgtcatagcgtgagacctgcagcaacaatgacttaaccatataaatgtggaggctatcaacaaagaatgggcttgaaacattataaaaattgacaatgatttattaaatatgtttgctcaattgtaacgacttctccatcccctgtgtaatcaaggccagtgctaaaattcagatgctgttagtacctacat

SEQ ID NO: 568596 - DNA, 305 bp, Homo sapiens
gagccaccaccgctgggagctgccacctcaggagcagcggcagcacttggacccgccgggccccctcgcacccagcggctctgcaggtgccctacacccgggaggggccgagggagcctcagccgccggcgggaccgcagggatttgctggctctttctgcgctgaggggtcgcggcgcggggcggaggtcgggtgggccccgctggagccgcagggcacgcgcaggacaggctcgctgggtgtcgactctagccctctgtcagagaccttgggacccgcgcaatgtggcagtggaaggcgcagg

SEQ ID NO: 568597 - DNA, 273 bp, Homo sapiens
ctttccctttcaggggtttccaataattttccaagcaaagggatggttacataaacctttggtcaagacccgggataaaaagacggggggatagggcctagatccccaggatatgcgggggccaagagaaatgaaatattttggggataggggttcttaaagggggatacggtcccagtgaatttcccaaaagagggggcggccctaactggggttcaatcccgggataagccaggcccatttgaaggcaaataagggttttccccgccccca

SEQ ID NO: 568598 - DNA, 453 bp, Homo sapiens
atccccctgctagcgctcgggttcacacgagatgccagcagacaggcaggctagagttcctccggttttaggctctgctccgcacgcgatcccgcgcgcttttctgcgcagctggaggctgactgctcgcactgcccttttacatgtagctacgtgaaggtcatagggcgcggagacagccactagcagcaacttcggattctagcctgctctgaggcgtctgtccggagtgagcgaatcactcatggatgtgcaccagccctctcccagtgctctaagatactctatccacttgcctccgtattgcgacccccacacgggggcacgcaacggaaaaggaacaaagaccacctaagtttcccctgttcagcgagcagctaaatttggacgagctgtgcgacatgcttggcgagtgtctaaaggaactcgagtaatcccatgaccagcatgctg

SEQ ID NO: 568599 - DNA, 215 bp, Homo sapiens
gattcctaaagaattggacacagtaattaaggttttttcctcccaagtatacatgtattatctctcctgctcaaagggaacaccctcaaggttggttaaggtttaaacaatggacttgcgcctaacaacagtggtctctgtgtatctgtgtgtccccgattttaaggcaatgtgtctttatttttaaaatctatttctggtcataacagggggaa

SEQ ID NO: 568600 - DNA, 103 bp, Homo sapiens
atctattcaggggcagatgacttttgtgtgcacaagtggctcacttccatgcaagatcattcccggcctcctcaaggcaaaaaaagtattgaattggagaaaa

SEQ ID NO: 568601 - DNA, 582 bp, Homo sapiens
agcttatcttggtacgtttgtaacaattgatgagccaacattgatccattattattaactaacagtcaggattcactcttagtgtaggcactgaatgagtatgacaagtgtgtaatggcatgtatccaccatagtatcatacagattagtctcattaccctaaaaatcctcggtgtactgtatatatatccctttctgcccccaaaccgtcgcaaccactgatctttttgcttcatcgttttacctttttcagaatgtcgtatagttaaaatcacaccagatgtggccttttcagattggcttctttcacttagtatgtgcatttaaggttcctccatgtctttccatggcatgatagttcatttctttattgtgataaataatgtctcattagtgggtgtatcattgtttatgcattcatctattgaagcacatcttggttgcctgtaagctttggcaattattaataaagcctctataaacatttgtgtgcaggttttttcgtggacataagtcttcacctctggggtaaataccaaggagtgcactttctggctcgtatggtgagagcatgcttaaaga

SEQ ID NO: 568602 - DNA, 1474 bp, Homo sapiens
  misc_feature (324)..(324): n is a, c, g, or t
  misc_feature (903)..(903): n is a, c, g, or t
atagtgtgtcttcgtgctcactcgatgttagtctttctctccgttctgtgggtgttgtggtgggtggcgtgtcctcaatacgaactaggagtgcggtagatttgtccgccgcttctgtgtgttgtggtattgacatcacgtcatatgagttggtccaccacatcaggggggagtgcacctgctgtactgcttttcgtcacacacgttagtgaattggtggagtggtctgtcccctactcgtccagcatagttggtgcttacgtcgtagcatcgacctaggtgattgtgctaccgccgcagttgatgatttgcgattgttcttcnggggaggaggaagcattctctcctgggcgtctctctcctcgacacaacataagaggggggcagccttctgtgcctactcaggagaccttcttctttgctgttggctgttctctactcttgtgatatgatactcggtaattagagtgttcccttcctcatcactgcttgttttgttgtgtggttgtcacaaacaccacttacgtctgctgttaacgacaacacctgttgtgctggtgaggagaaaagtcagccaacactctgctgactggggagacacgaacacaacaacagcggtggggacgtggggtgtatgtataccacacccttggggggcccaaccacgcgtattagtatagtattggtgttgtggtgtgttgttgtactgtgctggaatgctactattgtggaggaggcttctcgtgttgttggtcacaaaatagtgagtattgttctggtattgttgtacctctcttgttgttggtgaggatgttgtgtgtgacgacacaaccccaggcctcttactactaggagtagacgacactactgatcctctctcctgtgtgtggattgtgaaaaganagagggtggtctctgtttgttgttctgctgtgctggatagttgacacacagcggagattctcactctgtgttggtggacacacttgtctgctgtgatgaataaataatgtgttgtgtggttagagagtattgtctcacactacgtgtagtgtaattgttgtgggtgtgtgacacacactatccacacagacacactcgtgtgctcaccgcaccaccccaccgcgggcttgctctctcgtgtatatagagagaccccatatatatagtgtagaatattctcgtgaagaaaatatattctgtggaggagagagtaagagagggagatatgtgacacactaaaaggttctgtttcccatcgggagagcccatctctcccgctgactcctcagaacctctgttagagacctctcgtgtgtgtgaagagttgtctctacctgtccaccacacagagtgagagacacctcaagagtgtgtgtgtgtacagtgattgtctcacagatgtgatagatgctgcacgacaccattttaaaagactgtgaatgtagttgtatatacacctcctgaaaataaa

SEQ ID NO: 568603 - DNA, 848 bp, Homo sapiens
  misc_feature (610)..(610): n is a, c, g, or t
ggaagtcagttccgcggtagaggtgacctgactctctgaggctcatttgcagctggtggaaattgtgccccgctgtgttcaatcatgtctgaacgcaatgcagagtctgttgttgacgtggtagtcagctggtctaacatggcatattcatcatgctgtacgaggatgggaaatggtatctgtcttcgggtaaatgatcatgcctataatgtctgtgtgcggtcgtgatatctaccccccagtgatgggtgtcctggacggtgtcctatggggaactgtaagactgtgcgcctttccctcgtcctgaaatgatgtcatgcgcacaccagaataacaggaaggacgtgtgcctgtcatataggacctggagtgtgtgcgcagttgcttgatgggcgtccattgccaaagaagggacaggcactggacgagacaatggatttacgtgaaaagcaacatgtgacgaattctttcaagatcccctagggtgcagcctgtacgattggaagtaccgccagggaaggtcagggtaacggttctcgtagggggtaatccagtcaataccaactgacctgagtgcttccaaagtcgagctccatccatcccccaaggnagaaccttcaggttgcttgaactcgttccggatcacgaaaccgaggctaaaggctcaaaatgtggtcttcaccccctgggtgtggactgctacatggatggtaacgacatgtcatgtatcttgcgggaaaaccattcctttcgcaatccagttcccagaatgtttaccacggccagggtgagattgtcacggaacggcaacgtgggggggcaagaaaacgccttgaagaatcaaactg

SEQ ID NO: 568604 - DNA, 422 bp, Homo sapiens
  misc_feature (2)..(2): n is a, c, g, or t
  misc_feature (17)..(17): n is a, c, g, or t
  misc_feature (45)..(45): n is a, c, g, or t
  misc_feature (180)..(181): n is a, c, g, or t
  misc_feature (183)..(183): n is a, c, g, or t
  misc_feature (303)..(303): n is a, c, g, or t
  misc_feature (324)..(324): n is a, c, g, or t
  misc_feature (398)..(398): n is a, c, g, or t
gnctgctggagctgcanccgaccgcgagcgtgccaagcgcttcanagctagcggagtgggcgtcggccccctcaggacaccaccagattcccctcttcccgcggcctcgcatgggaccccacggacagacttgcgcgcgtccaatgtgtattcctccatcatatgctgaccttggcaaanntncagagatattttcaacaaaggatttggttttgggttggtgaaactggatgtgaaaacaaagtcttgcagtggcgtggaattttcaacgtccggttcatctaatacagacacctggtaaangttactgggaccttggaagancaaatacaagtggtgtgagtatggtctgactttcacagaaaagttggaacacttgataacactctggggaacangaaatccgcaattgaagaccagat

SEQ ID NO: 568605 - DNA, 912 bp, Homo sapiens
ggctcaggattggcggacgctctcagcgtctcggcgcacggcgagcttccttcaggcctgtctagtgttcacgaacatcctgtgcaagctcagcttggagagtgatgactcttacagccccaagtgcatatgggtctgtcgaaagccaatactgattgtgatgctgagcgtcgatgctgtgaacattgaaagccgccatcaagaccaaaggtgtggattgagtgtcaccatgtgtcaacatatgaccacccgcagcaatgcactaggagataggatattgccttcgtgtaccagagaaggaccaacaacagttgaactttgcaatcagcactgaagtcagccttatctggccatctgaagacggtgatttggggcctattgaagacacctgctcagtatgacgcttctgagctaaaagctgccatgattggggctgggaaaccgagggaggcctctctcatgggatcatctgctccatggaaccaggaaggagctgcaggaaattaacagagtctacaagggaacatgtcaagactgctctggagaagggacattatgcggacacatctggtggatttcgaagctgatggttgcctgccaagggttagacgagcggacgaatggtcgggcattgagacgtgaactgaatgaccaagaagtcgggaactctatgacgcccgcacttgacacggacggactggtgttccaagcggatagttcaggacgagatgttgcccactacagaagcattgaaggtcaacagtcacgcctttaagggtggcacactcgcaaagggtacggacctgaatgcccgacgtgtagggctgaacccccgttgtggccgcgtaaacagggcgggcaaagcacacaatcagaggataatatctccagcgactacaaaagagaagcaaa

SEQ ID NO: 568606 - DNA, 372 bp, Homo sapiens
aaaccccccggccaggaggtggaaaacccccttagaccaatctttttaaaactccaggcatcctggtttaaaagcttgggggtttttaaaattcctacgtatcaagaaaaatgaagtcagaagctaccctgccatctgggccttggcagttcctatgcctactctcgaagtagcactgaattccgttccccattttcaatgtgtagcccaagggattgggaaccttgataggactaagaaagggaaaatggtcataaattaaccaggtgaattttaatttacagagaataggacttttcatccaacctgcatttcctacagatttatccaataagggtcaagtcaagctgcacacatcatgcttgctctcat

SEQ ID NO: 568607 - DNA, 283 bp, Homo sapiens
  misc_feature (194)..(194): n is a, c, g, or t
  misc_feature (229)..(229): n is a, c, g, or t
ctagaggatccttcacgctgagaacggctgtctctggtcatcctggctccacaccagtgtgtgtcaagaaggatggtccggccctgttggctcagcgctggtacagcttccttgggtcagagccagccgggataacagcctctttgtgcccaccccagtgcagagaggggccctggtccttcatccatggaganagtggtaacacaagagcaagcagaaccttctctgnaccgctcgcgccaaggccctacactttccaccctcatgggaggcccctctggca

SEQ ID NO: 568608 - DNA, 535 bp, Homo sapiens
actagtccacggttggcttgccaagtatctctcttttattttttctttggagacacagtctcactctgtcacccaggcgggagtgcagtggcgccatctcggctcacttgcaacctcggccttccaggttcaagcgattctcatgcctcagcctcctgagtagctcagattacaggagcgtgccaccatgcctgtctaattttggtatttttagggagatggaggtttcaccatgtgggccatgcgggtcttgaactctgggccttaagtgatctgcctgccttccaagtgctgggattacagatgtgagccacggtgcctggcctaaaaaaaatttatttcgattaaaagcattttttagactagtcacatatgcagtagtggaaagaggggaaagagtagaacagggagttggatctgcaactcactgcagccaaccgggaacgtagtactagtccacggttggctactagtgcagggtgggccacgagtccagggggggctactagtccagggggggctactagtccagggg

SEQ ID NO: 568609 - DNA, 163 bp, Homo sapiens
cccgggtcacattcataattgacccaaccactttgagtcagggaatatcgaggtaaagacctaatgaagtaggttgaagagacactggaaagagtaggaatggagaatgtcaattttgacattgtttgtaagaagttttgatgtaaatatcagaaaaatgggg

SEQ ID NO: 568610 - DNA, 336 bp, Homo sapiens
  misc_feature (148)..(148): n is a, c, g, or t
ttagtcccctgtttcacttatttttatttcattttttttgtagagatgaggtctctctatgttccccaggctgatctcgaactcctggcctcaagtgatccgtcctgccgttggccgtcccaaagtgttgggattacaggcatcagcncaccatgtctggactgttttactttttacatttatttttattttatttttttctctgttgccttggctggggtgcagtggcatgatcatggctcacagcatcctcaacctactgtgctcaagccatcctcctgcctcagcctcctgagtagctgggacgtacgcatgtaccaacatgcccagctaatt

SEQ ID NO: 568611 - DNA, 774 bp, Homo sapiens
tgtgtgtttcctcccacccaatagaacagcacgctctccgtatgatattttcttctggggaaggggtgtgttttaaaaacgcccgcgcggcgggtgtcccaaaaaaactttgtgtttgtggacccaaagatggtggtttttttcttagaggaaagagtccctctttacaaagatttctctcaaggtggtttaaaagagcgggttttccccttctcccccaggatatatagaaaataaaaaacacattcactgggcccaggtgtggttattggtggggggggggtcctctattaaatgtaaggggcttaaattgatgttggcccgacccccccacaaaagagaacctttcaaagataccccctccccccggtgggaaaaaaggggtttttaaaaacgagtttctttttccttacccaaaaggggggttgtgtcaaaagccttccaagctgtttttttccttttgtgggagaatgaaagcggcctttgccggtggacagttttcaaggaagaagccgtgaaaggctggtgggcccccccgggacttttctagaaaaaagttttaaaggttgttctacgtcccgctgcctatttaggaaaaaatgttttttttccgcccccgcagggtgcctttagaataaaataaagttctttttggttgtgggctgacccccttttactctttaatttaggaggcgtaattaaaaggccctgccccccggtgtgggtataataacaacattttgcctaatttctctgtgcttcaattaataaaaa

SEQ ID NO: 568612 - DNA, 1223 bp, Homo sapiens
  misc_feature (14)..(14): n is a, c, g, or t
  misc_feature (17)..(17): n is a, c, g, or t
  misc_feature (24)..(24): n is a, c, g, or t
taagctaggtgtcnccncgggtantgggatatcgtctgacgggcgtcgtgcagacccgggcttatcaggatcatagcatctgtgattcatgagtgtccccatactgatgaattggagcataccatatggaaagcaaaggcagaattatcccagctgtattatattggatcgtttaaggatgcaggtgccttcaatgacatgctctcaaacatattaacagagagctgctcagggagctgttggcgtggaactagtagaaggactacatatgatttatctcattagcatatatgtcgatatttatagattgaggacaactagggcaacaaggggtggtggtgttgctagacatggtagtagacgatagatggctgtagacactagctattgatagattgatagatcggtagattgctgctacgtgatagataggtagatagataggtgcatagttaggtagactacacaggccgacacaagccaagtggcccaacagacgaacctgacgacacagacccatggcaccaaaaattacaacgtaagacgcaatagaaagacaacttcagaacagtacaggagacataacaacagcataccagctacaaaacagccaagcaaaaagaacgagcacacaaataccagactctgggggagacatacaaaaggagaaactagcctatacgaggcaacacaaaccaccagagagaggaagcaactgacccagccgatatggcaattacaggattccgcacaacagacgaacacaaggatacaaggccccaggcgacagggacccgcacgaggcacagccgcgctaggagccggacacaagacacccgccacggaacgcacagagactcaagaaaacaagaagtaccaagagcaccaacagagatcagactagaaccaaaatgaagagtcctgaacgatgcaccagccgaacaacacaccgggagaaggtcaccacacgaattaaacgagtccaaagcacaaaacgtgacaaaagaaagatatgcggacccagacacgggagggaaaaacagagacacaaagcagcaatcacccaatgaacacgcaccagaacgacaagccacgattagagaaaatatggaggaaacaggcagtattgcacggtatctcaagaagacaggacagagtaacaccgagccgagatgggagcacgaacacgagacggatcagaagcacccgaccgacgataaacg

SEQ ID NO: 568613 - DNA, 418 bp, Homo sapiens
  misc_feature (398)..(398): n is a, c, g, or t
gccgcctactactactaaattcgcggccgcgtcgacaaaacttgttagtgggtcaggttacatttgtcagtttaagttctcagatagtcatccaattttagatttctatgtcctcctacctaagtgttttgcctatgatcatccatagttctggaagccctgaacctatgtttcatttaaactcttctttatagcctacaggcaaaaggcagctgggtcttgcacaggtaaatgcctgttgatgtcaactggagtttgaatgcccaagtgctgtggtgtccagcctcaagtcatttattataaatattttggacacatcagattcaaacccactctggtccagctgaaaagataaatagttcagactttacccagttactaaatgtcgacgcggccgngaatttagtagtagtcgacc

SEQ ID NO: 568614 - DNA, 377 bp, Homo sapiens
  misc_feature (143)..(143): n is a, c, g, or t
  misc_feature (207)..(207): n is a, c, g, or t
gaaaatatcccctttacacttacactttctccaactactccgtatcttccaaacaaatggtctcaggtagcccacttgggttgctgggacttttctggtttaaaaactggaagtctgggctgttatggtggctcacgcatgtnatcccagcaatttgggaagccaaggcgggtggatcacaaggtcaggagttcaagaccaactggncaacatggtgaaaccccgtctcttctgaaaatacaaaaagtggccaggcatggtggcacgtggctctagtcccagctactcaggaggctgaagcaggagaattacttgaactccagggagagtggcgtggcatgatcttgggtcactggaggcttcggctcctgggttga

SEQ ID NO: 568615 - DNA, 523 bp, Homo sapiens
  misc_feature (48)..(48): n is a, c, g, or t
  misc_feature (111)..(111): n is a, c, g, or t
  misc_feature (113)..(113): n is a, c, g, or t
cgcaatgtagcaccgagtggtaccggtgcgcgcctttgccaaccgtcnaggtgcaccccagcggctattacgcctggctggcgagcctcaatctgcccgagcaaagaagancnacgtctgcttggttgatcaaacacgcttggctggaaagcggaggtgtatacggctaccgcaaaattcacgatgacctgcgtgagctgggagaggaatgcggccgaaatcgagtcgggcgcttgatgctggcggcaggggctgcgttctcaaacgggctatcggcggcgtccagggttctatggtgacaagccaacagtggcctcgcccaaaccacctcgcgcggccgtccaaggtaagtgagcccgaacaaggtctgggtgacagatatcacttacatccgcacctataaagggtgagctctacctcgcggtagtgctggatctgtcctcacgccaagtaattggttggtcaatgaagccaaggatgtgcagcgacctagatatcgacgcgatgacattcagggctcaca

SEQ ID NO: 568616 - DNA, 217 bp, Homo sapiens
cagtgactagccttagcaactgaaccgtcatctacctcatcttaggcttaaacgtaaaagataggtatagtccatgtaaagcagttcaataacaataaatgaaagcgggcatactttgtatattgatttatctgagatggagtttttgctctcgtggtccaggctggagtgcaatggcgcgatctccactcaactgcggacctcccacctcccaggt

SEQ ID NO: 568617 - DNA, 900 bp, Homo sapiens
aaggatcgaacggggggaaaccacggcgcatatgggccccctctatggaccccgttgtcgggcaccaacaaatgggcgcaagaagaggcacattcccacaaggggcctcccacgtcccacaggggacgcaaggctgtctgggcggcaaacgtttaaacgaacgcgaggtcacacaaacgcccggtgtaccgccactcacgaaagactggcgcccctcttttaggacgtctcgcatctccacgttccccgggggccttcccccaacaggcatgtcctacggtccagaggggtccaaaacaggggggattacttcggatttttctgaagacgcctttgggtggtccccctcatgatgtcaaaagggcaggttgacaattaccagcggcttttattattccggcaccccatagagatgcttcctcggtacatacctgaaattcttctgaggatacccccctgtggcccacaattcgggcgagcaataatgcgacacggcgggcttttttatgtgaacaaataaacgagactctgtgaccgtattgatgttgcgataccaaccgctcgaacgtgggagtcaaaagtgcaggaaaaccccaaaactgggagaggcctgtccacacgctcttgctctttcttgatttagagaagataaaccaaacacctctgcgaactacgcatccgcgggacaatacctagtcatcaccttgcctcacgatgctccaattgcgagtgcattcattctcaggtgaaatctctccggacgattcatcctgccgtcgtggtgtgacaccgcctcactacccactaccaccgcacggattgggaccatttgttcaccgcggaccaataaaggtctctatcacaaggggttcgccgccccccatcccaaaaaaaaaaaca

SEQ ID NO: 568618 - DNA, 290 bp, Homo sapiens
gcgctgtcggcgggaagcggcgatcctgccaccgggaggtgtggaagagccgggtaggtgagcaaagtccctccgcgcggtggccgaggggcgcgcggcaccggggccggcagacgccagggacctgctgcgctctgctccggggcgggaagcgcgggtcagtctcgctctggctgcgggaggctgccgggaccgaagcgggaacggggagctgctcccgggggtggaggccggcgggtgccgcgggccgctgcgactggtgccgcgctcggccgcgggtccccgagccg

SEQ ID NO: 568619 - DNA, 705 bp, Homo sapiens
tgcccgggcgacaagcacgcaagcctgtcagtctgctataaggtcggaccgggggcggagaacggcgaggaaggggacatacaagaggaaatggagaatccggaaatggtggaccgtgctccgagaaactagatagtcatccagctgcggcatcgggagctgttcctctcccggtgagcgtggagtctctgcccgccacgcgacatacagggtgcaaggtgcaatcgttcactcgctgctcaaacgaggacgcgatgtctgcatcaaggtccgtaccatggtagctgggaggatttcttgcttcatattctctagtctacgatgccacagcagaagactcgcgtgtcttggctcgataatagggagagcattcgagatagtgaaaccggtaccaggtcggacatcagccgactagttaaaagaagcgcgaggaggatggccgagaccagtaccaggttggagacccaggtgtgggaggcgcagaagccactcacagacaaggccagatcgaccagtacctaggtggtggacccgttctagtggagcgaccttcgcacagtggccctggacttgcaagcacgctccagtccggacaggtccaagtcttgcacattgaagccgcctgcaggctgtctcgccgagacatcaaccatgtttccacgccaatggatatctctccacgaagaacatcatacgagatctccc

SEQ ID NO: 568620 - DNA, 82 bp, Homo sapiens
  misc_feature (22)..(22): n is a, c, g, or t
  misc_feature (25)..(25): n is a, c, g, or t
aacgctgcctggatggcggcangcntgcgtgaagaggctgcggaatgtgatgcgtcaggacaccaatatgctgtttgttcgc

SEQ ID NO: 568621 - DNA, 1001 bp, Homo sapiens
atccccaataaaaaagcgaaaagtactggtactgcctgtgctcaaagacgagttgaggcgtaagatgtgtcctgattcattatatacaagatcagataaggctctcattgcgctcttccgctcataaaagcctggtaccttaagctactttgtcctctcctggtgctcagaacacaggcaatcatgcttgtgaataagactacggtacgcaagtgtgcacaattgcatttgtctcgtaccatgacttaaagcgcaggatctgatcccattggtgtaaattcagtgattgactcgcccttcatcaatgcacatctctggattgtatctggatgctgttgttgtcctgtgcctaaatcgatggtagaagttcgaagtttgcccgagttgcactggttcacaccaaaggggtggtgtttaagaatctatcaagtgatctaagttgcatttttcttagagggggtcttctcgaaagagtcttaggtgtgataggtattaataaattaggtacgttagcagctcaatcgtcgtatgatacttggccggaaaaacgccatctgttcattgggcacctttctccgtctggttgattggtgttcaattttagtatgcctggtgggacggccattcatcttttgaattgtccaaatctaagtagctttcttagtgggtccacggggcctcttgactgagcctgttatatgttcacatagattgtccaatatggcgagttgacttagacgggttttccacccattgttaaccttgcccaatgagcccagaccggggtctaaagggggtcacactcggatctaccttcccttgccagttggggaatctgggctctctaacagtggacatccgcgaacgttatttgtggcctggcgcatcatataaaagggcggacagagagggtatcccctagagaagacaccacacactagtaatgagaaagtacccgcctaaatggtcacactcgtcaacctcatctctctcttcccaac

SEQ ID NO: 568622 - DNA, 298 bp, Homo sapiens
  misc_feature (2)..(2): n is a, c, g, or t
  misc_feature (43)..(43): n is a, c, g, or t
  misc_feature (115)..(115): n is a, c, g, or t
  misc_feature (194)..(194): n is a, c, g, or t
  misc_feature (272)..(272): n is a, c, g, or t
  misc_feature (291)..(291): n is a, c, g, or t
gntggggtttcccccatttttttgagcccggtgtcaaactccngacctcaagtgatctgcccaccttggcctcccaaagtgctgggattgcaggcatgaggcgctgcatcagttntgcaaaaaaaaaaaaaaaaaaaaaaaaaaaaaaaaaaaagcgtatgcattaaaaatactaagggggccaggcgcggtantcacgcctgtgatgccagcactttgggaagccgaagcggatggatcacttgaggtcaggagttctagaccagtcttgncaacatagtgaaaccccanctccgct

SEQ ID NO: 568623 - DNA, 103 bp, Homo sapiens
ggacacggggaggagaccagattgtagagcacgactaggcacggaggtcagacaggcagcccgggcccaggatgggtaagtgggcccaggggagagcttgcaa

SEQ ID NO: 568624 - DNA, 241 bp, Homo sapiens
  misc_feature (6)..(6): n is a, c, g, or t
  misc_feature (56)..(56): n is a, c, g, or t
  misc_feature (111)..(111): n is a, c, g, or t
gagganccccatcactgagagagaactgctcctggcatgtgtcacatggcattttnatagacactcccaacacttgaggcaccacaatagcaacaggaggggctacaaagntattatagagtacagaatgtactacagttagttttaaatagttatgatttaataatatgtctttacatgactggagtgtgaacggcaccatgtaaggtctgtatgtgtgtgcatagtattacatagtgtg

SEQ ID NO: 568625 - DNA, 820 bp, Homo sapiens
  misc_feature (9)..(9): n is a, c, g, or t
  misc_feature (13)..(13): n is a, c, g, or t
  misc_feature (19)..(19): n is a, c, g, or t
  misc_feature (28)..(28): n is a, c, g, or t
  misc_feature (132)..(132): n is a, c, g, or t
  misc_feature (140)..(141): n is a, c, g, or t
  misc_feature (146)..(146): n is a, c, g, or t
  misc_feature (189)..(189): n is a, c, g, or t
  misc_feature (222)..(222): n is a, c, g, or t
  misc_feature (228)..(228): n is a, c, g, or t
  misc_feature (238)..(238): n is a, c, g, or t
  misc_feature (240)..(240): n is a, c, g, or t
  misc_feature (243)..(243): n is a, c, g, or t
  misc_feature (250)..(250): n is a, c, g, or t
  misc_feature (261)..(261): n is a, c, g, or t
  misc_feature (267)..(267): n is a, c, g, or t
  misc_feature (314)..(314): n is a, c, g, or t
  misc_feature (316)..(316): n is a, c, g, or t
  misc_feature (321)..(321): n is a, c, g, or t
  misc_feature (323)..(323): n is a, c, g, or t
  misc_feature (326)..(328): n is a, c, g, or t
  misc_feature (333)..(333): n is a, c, g, or t
  misc_feature (356)..(356): n is a, c, g, or t
  misc_feature (381)..(381): n is a, c, g, or t
  misc_feature (450)..(450): n is a, c, g, or t
  misc_feature (458)..(458): n is a, c, g, or t
  misc_feature (465)..(465): n is a, c, g, or t
  misc_feature (468)..(468): n is a, c, g, or t
  misc_feature (490)..(490): n is a, c, g, or t
  misc_feature (499)..(503): n is a, c, g, or t
  misc_feature (507)..(507): n is a, c, g, or t
  misc_feature (518)..(518): n is a, c, g, or t
  misc_feature (530)..(530): n is a, c, g, or t
  misc_feature (535)..(535): n is a, c, g, or t
  misc_feature (539)..(539): n is a, c, g, or t
  misc_feature (542)..(542): n is a, c, g, or t
  misc_feature (545)..(545): n is a, c, g, or t
  misc_feature (547)..(549): n is a, c, g, or t
  misc_feature (551)..(552): n is a, c, g, or t
  misc_feature (558)..(558): n is a, c, g, or t
  misc_feature (617)..(617): n is a, c, g, or t
  misc_feature (778)..(778): n is a, c, g, or t
aaccacgcngctncctccnccacctaanccccatctcccttcatatgcacaaacacaggaacccaaagcccctcctccccacaatcctccccactcacattatgggaagaaatgtcactaaatggacttggnccctccanntagcncggaacaggtgaataaaaatatctttatgaagaattttgttgngctattatcttagggttgaatcagggccaagangggggnaggggcaagngnggnctggggntctcttagagntcagantttgtctgagaggcacagagcctatagttcacccagaaggggggttntntctangnggnnnggggntagaactggctaggctgaaagtnttttcaagagtatgtgtgggggtangggtagctataaatccattctctttcctcccccataccttccctagctcccagatagaagggcaggggnccctgaanagggaanagngtcacaattccctcaagtttcntctgtttcnnnnngggnttccagcgggnggggggtggggnatatncccnggngcngnnngnncccttnccccagctcagggcttcttctctccacctgtgagcaccagggcctgcaggatgtcaganagtgatacaattcccttgaccacatcattttcatccaccactacaagtcggtgaacctctgcttccactagcctgttgatgatggtctccagagtctcatgcaggtagcacttgagaacaccctcaaagtaatgtgatcgatgttgcaaggctttagtcanagatacatctaggttgttgtaggtcttttctgctgccagatt

SEQ ID NO: 568626 - DNA, 152 bp, Homo sapiens
gcagggcatcgtggaggtgaagagcttcctaggatgaccctccagccggtcacctcacagcctcctggatccaggctggcatgactcacatcgtcggaagtcgacaggcggatcaggtgaacaagaagaggtggtgaggcttaccatggagg

SEQ ID NO: 568627 - DNA, 244 bp, Homo sapiens
ggacatggcgagactatcacccaagggttggatgtggctgtctgagcgctgtgtcccagtacaacgaaggaccggagctgactccggcaagtggcgttgtgtgctgaagattggggaacacatcccctcaagcccttcgccatcattgtgaaaatgccaatgtatctggcccgtttattgccagtatccttgccaggcataattgggcctttgttgcccattcgttggagccttgagattccct

SEQ ID NO: 568628 - DNA, 186 bp, Homo sapiens
  misc_feature (49)..(49): n is a, c, g, or t
  misc_feature (144)..(144): n is a, c, g, or t
  misc_feature (146)..(146): n is a, c, g, or t
tcaaggtcagaagtaaaagatttttattgttctatagacacttctgaanaagacgatctaacttgagaaaattactacaatgcattttactattttcatccccagagactgactgatggcgttacagccctcctcttccaaggntnagggctgagaaccggtaagcaaatcgaatgatcagaaaaa

SEQ ID NO: 568629 - DNA, 1095 bp, Homo sapiens
gtggaagtgacatcgtctgtaaagcctgcgtggcactccctgacgcaccgtcgtgatgcccagggaagacagggcgacgggaagtccaactacttccttaagatcatccaagctcttggatgatcatccgaaactcgtctcattgtgggagcagacaatgtgggctcctcaagcagatgcagcagatccgcatgtcccttcgcgatgaaggctgtggtgctgatgggcaagaacaccgatgatgcgcaaggacatccgagggcacctggacaaacaagcccagctctggagaaactgctgcctcatatccgggggaatgtgggcttagtgttgcaccaaggaggacctcacgtgagatcagggacatgttgctggccaaagtaaggtgccagactggtgcccgtgcatggtgccattgccccatgtgaagtcactgtgccaggccagtaacactggtctcgggcccgagaagaactcctttttcacaggcttagagtatcagcactaaaatctccaggggcacattgaaatcctgagtgatgtgcaggatgatcaagactggagaccaaagtgggaagccatgagaaggcaacggactggcatgacagatgctcgaaatctacccccattctcctatgggctggtcatccagcacagggttgttcggacaaaggcagcatctacaaacctgaagtgcttgatatcacagaaggaaacatctgcatactaagcatatcctgagagggtggaccagccaaggttagccaaatgtctgtcatagcaagatgggctaaccaaaacttgtaggcatcaggtagccacaattcttatcatcaatgcggtacaaaaagcagttcctgggacttgatcctgaggacacacgcgacaaacaacaatatgcccagttggcatgaacacaagggacaagggccatacgtgggcaggatccacactagaacttggagagatgaatgccccttgtggcaggagacacaccacaagagaaccccaggtgatggtgcgagcccacaagacaaggttgaaagcaccacgacaaagacgagcaagacgaacacacgaccaggaaataggacc

SEQ ID NO: 568630 - DNA, 277 bp, Homo sapiens
  misc_feature (5)..(5): n is a, c, g, or t
  misc_feature (168)..(169): n is a, c, g, or t
  misc_feature (215)..(215): n is a, c, g, or t
cattntcttatgctttattggttaacaaagaaaccattatttgcttttgaaggcagagttattattttctaccatgaagttacttcaactcataaaaatgtattttatttacacctttgtagcaatggagcttggaaggaaatataaagcttacctacatgaacattnncatctagtattctgtggtctcacctggtcttctatgaagtttcagntcaagtgaggaaacagcaccatgctctattgtgaaaggaggcatttgccatgtgattggatc

SEQ ID NO: 568631 - DNA, 617 bp, Homo sapiens
  misc_feature (485)..(485): n is a, c, g, or t
  misc_feature (605)..(605): n is a, c, g, or t
gttaccagcatgcttgcggtaccagagcccccctctcctccccttcctcacccacgggcacgtttatctattataggcaggtatgacatgggcacctaggtcagatcttctcaactcgctcggcagaaatgactgtgattctgcggggggcggctgcgacggtcctgtcggtggacccggggctctacgtttatttatttcgttagattgagacttccacacgactccctgtagtccaggtagggcccagaaataggaaaggctaggattggataatgctgcaaatgctttttttgtgtgagaaactggagagatgtgatttctccttttgggagagaatgtcccaaaattgattaggctgagccttgggaatagtttggcaggtttaacatcccaaggctaacctaacgtagttgggcacggtcagcttgactgagacatgttttctgtgcttctaagtgttctgtcccttaggctgctatagnttcatgtttccattatggcaggtttagagaatccttaaaaagaacaattgctttgcttgcctaaaactacagtgcccccttagcctccattacttagtatctcttacagtttgctctggntctcaaataata

SEQ ID NO: 568632 - DNA, 186 bp, Homo sapiens
aggctaatataagccatatcataaatgctatgaagtgacatttaaaagcaccctgcatcactgtttatagtgtattttgctattctgccctttaatcggtgtcccttaaaacaatccccacagattactttcataaatagatttatttctcgtacgtagagggccaggttcatttatctcctattt

SEQ ID NO: 568633 - DNA, 366 bp, Homo sapiens
ttatgctacaggaataacaaacatttctcattggcaaaaatgtgttgattgtaatggttcctgttttgattaatagaatatgttttagcgtagttacaatgatttaaaattcgcagtctggaaatttaatttttgcatcaacctaatatttctatggtaaatccttgcaaacatggaaccaaggcattgggcccattccttgtgggtggggacttctttttcttggttttttaaaaaaaggccatggccgggcaaggtgggttaagcctgttattccaaccattttggaaggttaaggtgggtggatcacctgaggtcaggagttcaagaccagcctgactaacatggtaaaaccccatctctact

SEQ ID NO: 568634 - DNA, 225 bp, Homo sapiens
ggctgtctgaagatagatcgccatcatgaacgacaccgtaactatccgcactagaaagttcatgaccaccgactacttcagaggaaacaaatgggcattgatgtctctcaacccgggaaggcgacaattcctaagacaggaattcgggagaaactagccaaaatgtacaaggccacacaccgatgtcatctttgtattttgagtcagagactcatatattgtagg

SEQ ID NO: 568635 - DNA, 112 bp, Homo sapiens
gccggtaccagatgaggcagagaaccccagttctacgagctgctgatcaaagatcttgataccatactttaatctgtatcttcagtttctgaacataagtatgcaaaatctt

SEQ ID NO: 568636 - DNA, 257 bp, Homo sapiens
taaccctatcgcgtactgtttatcccaagtttatctgttatttttaattttttccccaagtttatttttctatttttttttatggaaaaatggggtaacttagcagtttcaatgttgacgacctgaagtttaaaaaacatttcaattcaaggtacttttaaaattcagttagaacagtaggctttaaaaattattagagacaagagtaccaaagcggtgtgtgtatgtgtgtgtgtatgcatgctggtggaagggag

SEQ ID NO: 568637 - DNA, 908 bp, Homo sapiens
  misc_feature (412)..(412): n is a, c, g, or t
tacatgcagaggcaatgctcgagcatgaatcggtcatgtcttgatcatgtccgagacgagagaacggagacgtcttcctactactacgggacgccactctctctatacaggatggaggaatctcaccatctccagcgctcaacacacctgacccaccgcgatgcgcatgcagcgatcacttgcagcgcgacgtcggaccggcgtcaggcacaacgtgacgtaatcagctatctcacgcatgacatcctcgatgatcctgtacgacaccacgtcgcgagctatcgatattgagctctcgacgcatatgcaacgtgcacgcaaacagctaatcaaccgatcatgacagatcgacctcacttagataatatgacgtatggacaccagacaagcatctgatatcacgacacactanagtctgacatacccgcacatcgtctcgcataagtacagcgaccgaacataccactacttcattactcaactacaccgcttgatgatcgacgtgtaagagataatgggatatccatgagtgcacgtgacacgctaggaccgtctactgtctacgagattgtagactcaggctctaatacggctgcacgccgtactgacacgaatgcatatccgaccgcgtcgatccgaattagacatcgggacagcgtctacttctatagcgaccaatgtttctacactaatatctggagttaggccagctagtgaacttccttacataagagctctctcacccgacatcaacttaacaattcgatgacacgcttacgtcgtcggcgcgggtcccaacgatacgcacgaacactaaggtagtcatcgcactacgagcatattccgacatcaacgcgtacagcctattcaccgctttatcacatgtgactaagtgaatccagtcgccc

SEQ ID NO: 568638 - DNA, 224 bp, Homo sapiens
ggggtggtcacgcctgtaatcccatctctcaggaggctaagaggcgggaggatagcttgagcccaggagttcgagacctgcctggtgcaatatatctgagacccctgttctccgagaaaacaggaacaaaataaaaaaactaaaagacacaaaaaaaaattaacggtgtaatttcccttcaaaagaaaaacaccccaaccccggtcgggtggggacgcggggat

SEQ ID NO: 568639 - DNA, 197 bp, Homo sapiens
ccactcacgatacctcaacattattatatttgagattagttcatgtcgatacatgcaggtctaagttaatatattttctttaactatctacataatatgtagggttgattgtataaacgcaccaaaatttattttacctgccaggcacagaggctcatgcctgtaatcccagtacttggggaggccaaggcaggtgg

SEQ ID NO: 568640 - DNA, 128 bp, Homo sapiens
agctgcagatgtctatcatataacaatcagtacaaggtttaaagttgaagatattttttacaaaggtaaatggttaaattttacatgacagatattttatctattggcctgttccccaaatggccatt

SEQ ID NO: 568641 - DNA, 195 bp, Homo sapiens
ccccaaagccctttggtttagaataggctttggggggttccaattggtggaaaaaagcttttaggcccgtcatgcaggtcaaaaaagctttttttgcagtagccccagttaaggggaatatgtattgtttcccaaaacaaacccaatatccagatgaaaatccgagatgttgaataaacttagcccttttgtcca

SEQ ID NO: 568642 - DNA, 342 bp, Homo sapiens
ccttggggccccccccctttttttccgggtttttttttttatttgtgggccccggggtcggggggggggcttttctttgtgttttttgccggaaaaaagcgtctttttttttttttttttttgggggggtgggaaagggggggggaaagggccttttgtctttttttttttttttttttttccccccaaggtgggttttttgcccttttttggccccccccggggttttgcccgggggagggggcgggggggggtttggtggtttttccgcccccccccccccgggtttttttctttttccgcccccccccccccctggggtttttaaggggtttttgggga

SEQ ID NO: 568643 - DNA, 160 bp, Homo sapiens
ccctcactgtacgcccaaaatataatatggatggcgagctactagtcctctgccttctctggtagagggcgacatgccgaagggtctggtgggggtttattggatgctgacgtgtcacgcctgcaagctgtctgtggcccacttgcgcgtacggagagct

SEQ ID NO: 568644 - DNA, 478 bp, Homo sapiens
tgaaattttcctaattgggccttttaaaaacatggctgggtggaacatttctgtaccctactggtttgaccagagccttagtaagtacgtgcctgaaactgaaaccatgtgcactttaatggaaggtaagctgaacctctttcttttcaaccctacatgtttcgccaaccagtgtacccgtaggtgttgggaacaatggaccacatagtccatggaacaagagtccgtggcacaagcaactggctactgacaaggttagctcgtggcatctgtcggctcttgtactggtttaagctttgccacagctggctcacttcattttatgcgccagtgggctggctgttattcttatttcttgacatttagtcaggtgaacgtcttcagatttcattatcgtatttggcagtgcacggtcaaatttctttctgttatatagtcgcaggccatgtctgcttaggattcaacatattggtgtcat

SEQ ID NO: 568645 - DNA, 411 bp, Homo sapiens
ccaaggccagcacagctggaaagaaaggagtaaagcggagaatggggctggagagggaccctaccaagccttgtgggccatgctaggcacttgtctttatttttttatccccagcctcagtaagtctatcaaaaactgctcatgcctataatctcagcacttttgagagactaaggcaggaagattgcttgagctcaggagtttgaggctgcagcgagccaagaccgtgccactgcactccagcctgggcaacagaacaagaccctgtctctgggtagggttgagtggagggagaaggccaggcacagtggctcacacctgaaatcccaagactttgggaggccaaggcaggaacatcacttgacccaggagttcaagaccagcctgggaaacatagtaactatgtttcct

SEQ ID NO: 568646 - DNA, 743 bp, Homo sapiens
atgcccctcattgacataaatattatactagcgtaaccatctcacttctaggaatacgagtatatcgctcacacctcatatcctccctaatatgccgagaaggaataatactatcgctgtcataatagcgactctcataaccctcaaagcaactccctcttagccaatatgtgcctatggccatactagtctttgccgcctgcgaagacagccggtgggcctagccctactagtctcaatctccaacacatatggcctagactaggtacataacgtaagcctactccaatgctaaaggctaatcgtcccaacaataatattactaccatgaacattgacgtttcccaataagttacacccgtgaaaaaacccgtgatcaccctgtgggtgcgtcccgggcatgcacgccagagaaggtctctaaaaaaccctgcgggtgtgcggccccggacccagagaatgctagaagccagagtggtcaggacacggacccaacgagagtaccccgggatggacagagagcgcagtgggttcaccgcgcaataaaaaagcgcgcccgtggacaacagtggtctcgcccacacatccggaggcttttgcgcgccgaattggcgtccactacgaggacgcccgggaggtgaaaacttgccgcgggaggagcagctcacctaaacatttagaccgttctacacacttaaccagattccgtccgaattcgacacggacctcagggttgcaaaaca

SEQ ID NO: 568647 - DNA, 222 bp, Homo sapiens
tacgtgatcacatatagttatgaaataggtatatcctgaatctggtactactaaactcactattttacatttgtagcacattttacttcaaaccagctagattcctccccagtatctacacatgtcgggtggctgtcacattgagtgcagccctgaggtctctgacctcaagaaagtgatggcctgaacgcgtcttttcagctggaggtgcaggacacaagt

SEQ ID NO: 568648 - DNA, 302 bp, Homo sapiens
agcagactgtctggtccctattccttatgaggggtttgttggggccccggtggagggaggggatttgggggttcagactgcggggaagcccgggtctccctcttcaacgccctcctccccctctgaccccccttccccactgggaccttctccagcttttcaccccgaaaaggaaaaaaaatgttatttttagataccttttatggataacttttgttatgaatatggctggtaacccttgtgtatgttattaaagataccaaatgttggggaaaaaaccaaaaaaccccaaaaaaaaaaaa

SEQ ID NO: 568649 - DNA, 725 bp, Homo sapiens
gccaaccgttgtgttctctgccccgcgtgttgttttccccccccccgcttttctctcgtgtgatataaccccccctctttattgccccccgctttatgcgcgcgctttgtataaacacccgcgctcccccccccccatggtattctgtttatataagcgctccccccctatatgtgagggcgcgctatatgtttgctcccccctccgcgccgagttacgcgctcgcgcgcgccccccgcttgtttcactctctgtgttgcgcgggaaagaccgcgcgccgcccgcaagtagctcttctgttttagtagcacacagcccccttttttgacgcacgggtttttcttactgcgttcgtgctcgcgcgtctccccgcgcacatatatatttcctccgcgcgaggtatttctctcgcccacacttcctcgcgcccgcgggggtctcaccaccaccaccaacatgggggtcgtctctctccccccgccccccctcttagtcggacaccatcacgctccctccattcttccgcgcgcggtgaacaccactcctctctctgttgttatacacacacgcatcatctctcccactctcttatcttcgcctctcctcctctcttccctcccccgccactcgacttctctccgccagtgcgttttcttctccttcttaatagaaaagaatagaaacaaaaccataataaaaaaaataaaaacagcccaccaatagaa

SEQ ID NO: 568650 - DNA, 290 bp, Homo sapiens
  misc_feature (1)..(1): n is a, c, g, or t
nccaaagcgtagtacccaacattgtaaggctgaggtgggcagatcattttagtccaggagtttgagacagcaggggtaactgcgtctctacaaaatttgaaagattagccaggcatggtggcacacgcatgtgagtgcagctgctggggaggctgaggcaggaggaccgcttgagcccgggatgtcaaggttgcagtgagccatgttcataccgctgcactccagcttgggcgacagagcaacacgctatcatttccccttgctgttttcttgggtactacgctttggca

SEQ ID NO: 568651 - DNA, 148 bp, Homo sapiens
ttcgaggttccccccattgactcctcggctttttggctgtcgcctcctgtgtgtctgtcccgtcttggtcccctggagcatatggtactttggaagcagagctagcaataattcctcttataagcagaggcaggacaagcagaggcag

SEQ ID NO: 568652 - DNA, 427 bp, Homo sapiens
  misc_feature (334)..(334): n is a, c, g, or t
atagcgacaccgtacccttcctctctgccggcattgaagcatcccaggtgaatgtttgccattcctggccaggtgttcccaatgtaccaccggaatattgattctggtatttgggtaacagtcctactttgtcaataacagccgttgaagttacttcaactcccaggccagctttctttcttccttttttggttgtgatcatgatcacaccaccttctgcacgctgaccatataatgccgtagctgcgggtcctttcaacacctggatatcgtctacatcatcggtattgatatcgttggcgcttacaggcgtaccatcgatcacatacaaggngtttacatcacccaaagatccggcgccgcgtaatctcactgtagcggcagaacccagtttagcgccggattccgagcgtacctggatacctga

SEQ ID NO: 568653 - DNA, 286 bp, Homo sapiens
tacacgcggctttgacgcgggacgtggcacaaattcctggcggagttcagttgcgcccatatcggacgaagctctactcccgggtactacaccacgtgccagtttgaacctggacttttgtcgtcgcgctacaaggcctgactgagcgagccctctactgaatgccacaccactgatgcctccacacttcacacatctaacatctgccctgaaccgtagtcgtgggtgtgattacagaggcgcgcgggagtctagtccggttcctagcgactaacaaactagttcc

SEQ ID NO: 568654 - DNA, 232 bp, Homo sapiens
ggtcacctgtttgagcctgctgaggtcgagaatgcagcgtgcaatatgtgacactgcacgccagcctgggagaaagaacaagactttatctcacaaaaaaaaagaaaaagaaaaagtaccccaccaatgggaaaatattggccaggtcatatttctgataaaggactagtatccagaatacataaagaactcatagcactcaaaaataaaggagcaaataacccaactctta

SEQ ID NO: 568655 - DNA, 1348 bp, Homo sapiens
ggccgcatcttctatcgcgtcgccagcgcgagccacatcgcgtcaccacacccatggcggcaaggtgaaggtcgcgagctccaacggcatttggtcgtcattggcgcgcctggtcacccagggctgcttgtcaactactaggataaagtggatattagttagcgcatcgaatgaccaccttcattgacctcaactacaatggttaacatgtaccaatatgattccacccatggcaaattccatggacaccgtacaaggctgagaaacgggaagctatgtcatcactggaaatcccagtcaccagacgataaccaggcagacgcagccacccatccaaaatcaagaagggagcgcatgcgtggccgccgcagatacgataggtggcagatccacgtggacgatctacacaaaacatgagagaacggctcgcgggacatcactacaagccaggcgggcgcagccaaaaagggcgtacactccagtactgcatgacaccaccgcatcaagcctgcactagaccaccgcacgcaaacagtaacactgggcgataggtgcaagcacacagcagcacagacgatcgaacgaagccacgcgcgtaccaacgaaaacaattacaagcacagatcggaggcgcctaacctagaccagcacacaccaacactaggcatcagagcaaccccccatggcgccacacggctccaacacccagcgcaacacaacctcaactgggagaatcccgcagcgaccaagcggaccctacaactagcaacccacaacagacaccacccacaggcgcccaagcccaccagtgcgcaaaaccccaagagaacggaagcctggcataggaccttggagaccccacctcccggagacgaaaaacctagataagagaagacagacttggccccaccggcacgcggctccaccacaacgaacacacaccagaccacacacagcaactaccagaacctaggcacgagccatagcccaaccgggcactgatggcgacgcaaacaggactcaacacaccacaggaaagcgtcgaaacacacaggagaaagagctcgcaccatgagccacatgagcgccctttccacgagggatagccacaaccgggcccacaacgatgggtcaccaaagcgagggacaagcacgaaaacgcagtaccggcgaagcagaaaccaacaccggcccaacacgactgacacgacgatcacgacgaacagacggaggaacacccgagcgacgtcgaaggggccccccacagccatgagcaaccacgcgaacgaaccccgtaacgcacacagagaagcaaaacacaccagcacagcacaaaagaaacaccaac

SEQ ID NO: 568656 - DNA, 291 bp, Homo sapiens
ctagctcggtacccttccggctctctggggaggagcttctcttttcagttcctgggtgagggcctgggattccatctgtgagatgggggtcctgtaagcaggactccatcccgctttgctgagaatttttttttttccctttttgcccaataaaaccttgctctactcaccctttagggtgtcctgtcctcatgtctaaattttcctggttgtgtgacaagaaccggattttagctgaactaaggagcaaaattctccaacgcttttgttgcccaggctgatcttgaacac

SEQ ID NO: 568657 - DNA, 547 bp, Homo sapiens
gatctgatcatcgtaggattcacacaggagagcagccctatgcatgcaacgagtgtgcgcgaaccttctagcctacagactcgtacacgtcagccagcatgagcggtacaactcataggagagaaaggccctataagtgcgggcagtgtgggaaggccttcgggtggagcatgcacctcagctcgaatacactagccgaatccacatgggggacacaagcgctatgaatgctgtgactgcggctaggccttcagtctctgctcgtccctcagcgaacattgaccgattgcaccaagctggtggataggcgccttcgaatgcaaccaatgtggcagagtctacactcagcttgggccgctcattcagaatcagaggatccacataggagagaaactctatgaatgtaaccagtgtggcacgagccttcagccagagctcccttctcatcgaacaccagaggattcacaccaaggacaagccgtatgggtgcaatgagtgtgggaaatccttcagccagtagttggagccagtagtgggtcggggatcc

SEQ ID NO: 568658 - DNA, 1386 bp, Homo sapiens
  misc_feature (1386)..(1386): n is a, c, g, or t
ggacccgctcaacatgggccgcgttcggaccaagaaccgtgaagaaggcggtccggagttcatcataagtagtaagtactacacgcgtcgctgggcaacgacttcgcacacgaacaatgctgcgtggtgcgaggagatcgccattgatccccagcaatgagctccgcagcaagatagcaggttatgtcgacagtcgatctgatgaatgcgaattgcaagagaaggcccagctagagatggtattctccagtctagaggctgccaggaggatggagcacgaggaacaggagagacaaagttaatagttaccgtagcaggtctccatgccttgtgatcaggagcagatgcgatcagacagtaagataccctgacacttaaagggaagatgcctgcaagcttgtcggacttgacggcaaggtctgtcgccaatctatcgagggtcaccgtcagccgcgtatcacgcatgtgcggcatgtgcaactgtgtccaatacaccggctcctgcggcgtgcagcactgcgattgtggacagttgtgtgtgtcctggtacgctgtctggctactcagtataacccatgatagacagtcttgcggaatcacaccagaaggacgcaagagcaccatagacaagaaccgccgtgccgcaaggggttaccacttaaaggtacctgcggagttgtcccggtcagcgaaacgcaacggaggtttatataactcggtagcaatcggggtgcacatccaatgtgagatgtgcggggcccactcgcacgactcgttggtctctgctgaactcttcgagacgatcgtgtgtccagttgaggtgtcacgcaagacacctgtgggctcaccacctaattctctgctgcatctggagagtatccgccccactgtaatttaccgccaggaaagaccgcgcccacacgtgaagaagggccattcgccatggcagacacagctcgagcacgacgtggagctagtaccaccgccgcgggcagacacctaaccatggggcatacactgccggggggtaacaacccaacctaaaaccaggaggcgaacaccagcgaagatcggcgcgaaggggcaacggcataggacagagaacgcacgacgacgggtaacaaagcgccaacatcggagcgagggagtaatggagacaacagctgaggggagcaacacaccccccgaagagagagcggcacaagagacagatacacgcgcaccaaacgagggacccaaccgcctagatataggcagacagagccagcaaacgatccagtagagacgcaagacccacagtagacatagggactaagacagaacagaacacgcacgcccacgagaagcgcaaagcgcgaacccaggcaacaagcggaaaacacaggn

SEQ ID NO: 568659 - DNA, 708 bp, Homo sapiens
ccttaaggggcatttttaaaagcccccgggcaccttatttaagggcttaaaattgaatcttttcatataaacaaggaaaaaaataaaaatactgttgttactcttttattcacccttttacttaagcttttaaccatgccataagtaagaaaatttataaagttttgaaaaaaaaaattaactgttcttattttaagaataatgactttgtttgtttacaaatctagaaatcttccaaaaatctcccaaaactaatcagtgagtttagtagtgttgcaaaatgtaagctctcaaaataagggggcttttgtatttctggaaataaacaatgagcctttggaaaattaaataagaaaccaatttcttttaaagtaacatttaaacaaattgtgggcttaaaaatagattcaacagcctggggagcctgtcttccccctgtaatctcaacccttttggaggccgaggtgggcagatcattgggtcaggagatggagtccttcatgcctaacagtttaaacccctcttttctaaatataattacaaaattatctaggcgtggtggcatgtgcctgtagtccagctcctttggaggcttaggcctgggaattgcttcacactgggaagcctaggttgcagttatgccatttcctttagctgccccctaacctggggtaaagagccagactttgttacttaaaaaacaatata

SEQ ID NO: 568660 - DNA, 131 bp, Homo sapiens
ctcccgctggggagacagacttcaggccagccgtgtatatgtgcgggttgctagttgccctttgctgggagactcccaatgactgtgcactctctgcttaaagactgtagcaggcaactggtgttctcacg

SEQ ID NO: 568661 - DNA, 346 bp, Homo sapiens
cgcgaacgcctcgtgtgcttgctgagcgggcgcactgccgctggtctggtctttcccgctaactcgtccgacggacaggagtcttctcctatctccctgtatccatgccttcctacttctgccagtctcccatgaagacacttccagcagcgcggcgtggactacttccagaacagggccctagagctcagtccgccagactgagcaaagcctcttagataaaacaagaactaccatagtagggccaacgcggtactcaggatacacctaggggggtcaccagggacttgttaaaccttcccccggtctgtatgcggaaacttcctggggcggaaggcatttgaac

SEQ ID NO: 568662 - DNA, 211 bp, Homo sapiens
ggaggcgtctagaggatcccgtgatgttatcgcccaacactcctgcacgatgactctggttctaatgcttgttcagtctcttcaaactgcattttctgccttttaagtatgctttgtaattttctgttgataggtagacctgatacactgggtaaaaggaattgcagtaaacagggctttcatcctgttttcaggtgttggggataacata

SEQ ID NO: 568663 - DNA, 517 bp, Homo sapiens
caaggagctcggcagatgtcaatgtcgctccatgcaccatccgcaagtccgacgaggtccaggtagttcgaggacactacaaaggtcagcaaattggcaaggtagtccaggtgtacagaaagaaatatgtcatctacatcgagcgggtgcagcgtgagaaggccaacggcacaactgtccacgtgggcattcacccaagcaaggtggttatcaccaggctaaaactgtacaaggatcggaaaaaaattcttgaacgcaaagccaagtctcgaccagtggaaaagagcaaggcataatatacagaacaacttattcagcaaatgcaggaataaatagaacctgttgtgcacccccggtttagccgtagcttttgaggttagggtgtgtctctttcgaacttttcgcaacgtatgccacatttcatttcctgttttgttacctgtgcctctgtacctcttctcatggcaattctaagtaatgtttttatcaatacaaatggccaatgcttcctaaaaaa

SEQ ID NO: 568664 - DNA, 104 bp, Homo sapiens
ttcgattggcgggcacttatgcaagcgtaactagtcttaacaagctttgagatgcaagggattgaaagagttcagactcgtgaccaagatgttgagtgtaggat

SEQ ID NO: 568665 - DNA, 428 bp, Homo sapiens
  misc_feature (56)..(56): n is a, c, g, or t
  misc_feature (81)..(81): n is a, c, g, or t
  misc_feature (92)..(92): n is a, c, g, or t
tggggttcatcctttcctagggagcttccaagggcccacacagcctgctccccgcnccccatggaggcgcaatgatagcanaattactggcnctgttaacctgctggagtgggaacctggagtcctggaaggtgggacttgctcagggactcactgctggccttggggagcagagaactcaggtctttgtgattccgaagtccaggttcttccacctgcaactgcagtttccagaattggtcccaccccaggaggatcagccagatgcaacgccaggagcagcatcagccacgctgtaaacaagggggaaacgccaagcgcattacagaggacgtcagccctgccatcactgggctggggaaacaatgccagccatggctggtctccgggttcacagtgataggggaaataaacccttatttgtctaa

SEQ ID NO: 568666 - DNA, 266 bp, Homo sapiens
  misc_feature (103)..(103): n is a, c, g, or t
agccttcctcgtagctttctaggagttagatacgggcctttcttgagaataagactaccaggaatagcaggttggcgggattcacttctacatttagtaagangccagttcccccggcccagattgctctggagctagttctcaatcggctgcatcttgagcatcagacacttcggtatatagcactagccggtaggaaccagcacttgagcccagtccagcacctaggttttcagactaataggcacagtatatgattttggtct

SEQ ID NO: 568667 - DNA, 520 bp, Homo sapiens
  misc_feature (56)..(56): n is a, c, g, or t
  misc_feature (81)..(81): n is a, c, g, or t
  misc_feature (92)..(92): n is a, c, g, or t
tggggttcatcctttcctagggagcttccaagggcccacacagcctgctccccgcnccccatggaggcgcaatgatagcanaattactggcnctgttaacctgctggagtgggaacctggagtcctggaaggtgggacttgctcagggactcactgctggccttggggagcagagaactcaggtctttgtgattccgaagtccaggttcttccacctgcaactgcagtttccagaattggtcccaccccaggaggatcagcctgcagtggctataacaagaccaaaggcttgaggtgcacttccacagtggagctgtcttcttggcttctgctgtgagaagattgtccccctgaatggctgccggcccttcagcctcgccccgccaagagacacatggaacagccagagcccagcctagagcctgtatcccagcctagcctgaggcagagacacccagccaagaccaactgaccttcagctaacctgcagatgcatcagggggaattaaatgattgttct

SEQ ID NO: 568668 - DNA, 467 bp, Homo sapiens
  misc_feature (5)..(5): n is a, c, g, or t
  misc_feature (37)..(37): n is a, c, g, or t
  misc_feature (46)..(46): n is a, c, g, or t
  misc_feature (105)..(105): n is a, c, g, or t
  misc_feature (255)..(255): n is a, c, g, or t
  misc_feature (328)..(328): n is a, c, g, or t
  misc_feature (330)..(330): n is a, c, g, or t
  misc_feature (398)..(398): n is a, c, g, or t
  misc_feature (439)..(439): n is a, c, g, or t
ttggnaaatactggttcctggataaaagttgttgganaattagganagaggtttaggcaggagagagaagagagatagggacagtgatgtccccaggggtctgtnaggactcaggcagctcaggctccttaaaaatgccccagaacagaccagaaaaggagttgggggcccaggctcagtgcttcacgccgtaatcccagcactttgagaggccaaggcgggaggatcacttgagccccaggaattcaagacaancctgggcagcatagtgagaccccatctttctttataaaacataaaaaagaaaattagctgggtgtggtggcananacctgtagtcccagctacttaggaggctgaggtgggaggattgcttgagaccaagaggtcaaggctanagttagctgtgatagcgccattgcactccatcctggacaanagagtgagaccctgtctcccactccaaa

SEQ ID NO: 568669 - DNA, 374 bp, Homo sapiens
  misc_feature (35)..(35): n is a, c, g, or t
  misc_feature (37)..(37): n is a, c, g, or t
  misc_feature (43)..(43): n is a, c, g, or t
  misc_feature (56)..(56): n is a, c, g, or t
  misc_feature (254)..(254): n is a, c, g, or t
ttacaggactgacgggagatgaggtgggaggatcntntgaganaggaatttgagancagtctgggcagcatagtgagaccccgtgtataaaaataaaataaaataaaaagcccctcaaacctgcaaacagtagaaatatacttttagtaaatgtttgattagtctgagtgctgattgtattgattaggtgacatgagccatggcagtagagggtcccctggacttgtgattagcatggtgggagggtgcatctngcttatgttcagggtgcagtgtgggcgattctggtcctcccacaactgccctgggtgcctctgatgcctgagccttctatcatgtgctcaccctatggccttggggtcctcagtctggga

SEQ ID NO: 568670 - DNA, 365 bp, Homo sapiens
acccttgaaaaccaattttggctaaggtgaattaagcccaaaccacaaattgagcattatattgtattgattccattcattatgaggtacctagaataggtgaattcataaggacagaaagtagaatagaggttactagggctgggggtaagggagactggggagttactgtttaatgggtgcagagtttctgtttgggatgatgaagttctggaaatagatagtggtgatgtttgcacaacattgtgaatgtacttaatgccagtgaattgtacacctaaaaaatgggtaaaatggtaaatttcattacaggtatttcaccccaataataaaataataatgccagaagctgaagagtaaaaaaa

SEQ ID NO: 568671 - DNA, 424 bp, Homo sapiens
acccgcaataaaatgagtttccccaaacccaggcgatcaacgagcaccttgcctggatctggccccagcgcagaactccatgcttcatacagccagagcaatggccacactgctgcggctacaaacacgccgatgcgccagatgggatagcgcatcagtagttcttccgcagatcgaggcctgtatataaagaagcgacctcaaccgaatagccattgaacatctgcgtctcgcgcacattcggactaaacaggccgctcggcagacggcgctcccgcgcctgggtccagcgcgggtgatcgaccgtaggattcacatccgcataaaacccatactcatcagatgcaatactctgccaggtcgttttcggctgctcactgaccagactgatacgcacgatggacttcacactcttgaagccata

SEQ ID NO: 568672 - DNA, 483 bp, Homo sapiens
gatccccccgggggcaggaattcggcccaaaaaaaaaaaatatcctactatttgtcccaacagggaggggcctggaaaaccttttattaaataaaataacccccccccaaaaaaaaaaatgttttcccttttttgtggaaaaaaaaaaaaaaaaaaagctccaaaccccaaaaaataaaacatggcgcccctggtagggaacaggaggaggaaacaaaaaaataggtcaaaggatacaaaaaaaccaatttccaaaatgaacaagtgtaaaaagttaatgtataacataagggctaaggttaaaaaaattgtattagggatttttttaactaaaaaaattttaacggcttttgtcccaaaaaatagttgtgtgaaaaaaataaaaatgtaaatttgcttccccccagtaaccctttttttatttttaagcatccccaaatcccctgttgtaaacccccaaaaaacccaataaaatgtttttta

SEQ ID NO: 568673 - DNA, 420 bp, Homo sapiens
ttcatgggaagatggtcacaagaaaggaatccagcccaagataaggactaagtctagggcacccacaaagatggcagaactagcccataaaacggcttgcgacagagtaaatagacggatgggcctgctttggcctcacctagctctggaggctatgtgctacagcagcagctgcactatacagtgagtattcggtaattacactttgctcacgggtagcaccttcggagtcctcctgccttgacccccaggtcagcttatggtggcctcacaacttcccctatgaggtaggtgaagtattattaccatcatttaacagatgggtaaaccgaggcccagggagtgcgggtgacttgcacaaattcctgggatggtggcaaggctccggtgccctccccacaccctcaagttcccccattc

SEQ ID NO: 568674 - DNA, 530 bp, Homo sapiens
tgattcggctctagtgtacagactcatgaaataatccatggtataaactagttatacaaattacataattcaaagataacatcgttattcttaagccttacatatatggtaacttgcatgtctccatacctggatttgggatgaaatacttaatgatctttccattggaattacctggaagtgaagaggtttggtagcttgtacagtgtcagatgatgagcaccactagtctaaatatggcgatacactgcattagctggtgctatttttatacggtgaagcaacagtttcgcggcacaataataaaatagttcttcgataatcatgttggtcctgatgttaatatttcatttagtacctcgtgctagtattagtgaaagtgctaacttaaacttacggaaagttactttacaaaaggaaatttaagccagagcaatgcaaagttccaagaaaatgtttactttagtcacaaatctggttcaactaaagccaagatctgtcacctttatcataatagattaagggtagat

SEQ ID NO: 568675 - DNA, 146 bp, Homo sapiens
cacagacaatgataagtgaaattgacatttgcttttcattttgaaaacatacttcatcattgttcaatcttcacctgtatgtgcccatcgatgagatggcaacaacaatcccattatctaaccacacatacaatagtcaaagtcat

SEQ ID NO: 568676 - DNA, 894 bp, Homo sapiens
ggaaggccgaggccaagaatgtgctggtgctgtcagatcctggcctgcgcggtttccgtatccttggtctgctctccagcgtgggcctggctgtgcatgcacgaggtgtccatcagagcgtggtcacctgatggcccaaggcagcgatcccagtcctgctcctgtccaaaaggtcacgtagacccgtgtgtttgcctccaagaaccccaggcaggccggggcgacgtatgtcggtggccaaggtcttgggattgaatcgccattcggttcaatccttgggagaccttcgtcgcagggaagatctcgtcttggttgtgatcccaatggattcgctccagagcccgttggcgcccgcttgtatttgcgggcccccgttgacgttcggacattgaaactggcggccccgaatttagggtacctttggttatccccgcccggggctgtttacaggaacgcttaggttttgtcgagcccctggcaatattatcggcgagcggttggggctcatttgccccaggtaaccccgatagtccgcctgctgctcgcggttcgcgattccggttgattgtactccgttggtgccctggtcgcgcgtttcaacccctaattgacgtgaactgtgtcctcccttcacgactttcgccgattgggttctctcgggaccccccgtcttggctctgtgatttccgtcggctaacggctgggtggcttccaattggaggcgcacggcattcgttcctctgcttgtgtagtgacggccttagttattcgcatgttaattccttttacttccagggttggggtgaagcgggcgcttgagaggaactccggaaatctggtgtcggctgttcgggcgtcattctattggcgctccccgatcggttgtggccccac

SEQ ID NO: 568677 - DNA, 115 bp, Homo sapiens
ataaaatagtttattttatttcagtgtttgctccttgcggttcagaagcacatctactgcctggttggaacccaaggagcaaacactgaaataaaatagtttatttttcacactc

SEQ ID NO: 568678 - DNA, 110 bp, Homo sapiens
tagggcgaatccgccttgatggatattccctgggtgccttaaacgtgtttaccactacggttgtgttgtgagtgtcctcgttcttggcagttgcgtcatgttgattaact

SEQ ID NO: 568679 - DNA, 1079 bp, Homo sapiens
ctatgtcgttttcttcgtgtctccatatttgtggcgccgctcactatttgcccctctgtgttagcttgcaacgcggggtttttcgcccattacacactggtgggcacaatccctgtggcccttgtgcttcacgggggtttatccccccttgctccctactctgtatctacctgctcttggtgtgcattttgcgaagatgctgtatgtgtttggtgcttcccctaggggggggcacaactcttcaggggggcccgggtttcattcgactatccctatctttccggtcctctgcgtaccctattcaggggacctctttgcccatggacctgccccagcagtttggagaggctgaagatttaagtgtaaatcaggcaagccaaccagtggtccaaaccagccgtctggtctccgtggataccggcgtccctacaattaccggcgtcgcccgcgtcctcctaacgctccttcacaagatggcaaagaggccaaggcaggtgaagcacccactgagaaccctgcgtccaccctacccagcacgaggcagttgctgaggtaacacccaggcgtccttcaggcgaccttgcaccatccggcaaggtggacctataagagattaatagagcccattctagagaatataagccaatatagcaaggccacaacccttataccacacaccccaatgagaaacactccacagcacatataaggtggaaaagctaacccacagaatttggaacaattggaaatgtttaactgttaattctttaagagaacacactaccaaaaggaaatgtcaacacaatttttccagcaagctgagaaccctgggaaattcctggaccggaagaccacagagagtagcctttccacgtttcagcacaccggctaggtttctattttttttcctggtttttactgttttggtgaatatatatattgaaaacacagaaatattaataccacactggggagaaccccacaccacaagaaattctgaaatatatagttaaatgcttttttttccgttttgtgttcattttggatgctggtgctaaacctccaagtgtcatgattta

SEQ ID NO: 568680 - DNA, 504 bp, Homo sapiens
ctaacacacattgagagatcacgttgaacatacttgaagctatcctgctagcctgaggattgtaggtggtgttataggtgtgtgtgtgtgtgtgtgtgtgtgtggacattttacatcttaatagtggtacatattagtgcctttctcaagggaatcttctgcgtgtctcagggtcataggagagacaaaaatatgcagggaataaatccagagtggacttgttccaccttacctttttttttattattatcggcttgtgtgtaatctttttttaagatgacaggttattaagcaagatgattgtagcacgacatctagtgctgcttattctaggcaatcacaccgttttaatcttcgcctcccttaaaatggttgcttgctaattatggtggaagatattctccatcttccaactactcattctacaacttgtgttcacaaagaaagtattctgtgaggccttacaaaaacagagcttcatgcctggcctattctctcaatagg

SEQ ID NO: 568681 - DNA, 110 bp, Homo sapiens
tgtttatggagaacaccaaagcgagacgaggaggaggaggacccgacccctctgtgatatttgcggcagagagcgaccgatgagggacaggctatattgctctgcagacg

SEQ ID NO: 568682 - DNA, 126 bp, Homo sapiens
  misc_feature (4)..(4): n is a, c, g, or t
cggnggagggcgcctgaaggctcttcacggcgcccaccatcgcctggtgctccatgcccagctcagccagcaactcggcgctgaccaggcgcgccatcagacgcctccagccgccgactgtcatct

SEQ ID NO: 568683 - DNA, 1190 bp, Homo sapiens
  misc_feature (267)..(267): n is a, c, g, or t
  misc_feature (287)..(287): n is a, c, g, or t
  misc_feature (302)..(303): n is a, c, g, or t
  misc_feature (352)..(352): n is a, c, g, or t
  misc_feature (354)..(354): n is a, c, g, or t
  misc_feature (375)..(375): n is a, c, g, or t
  misc_feature (390)..(390): n is a, c, g, or t
  misc_feature (401)..(401): n is a, c, g, or t
  misc_feature (404)..(404): n is a, c, g, or t
  misc_feature (408)..(408): n is a, c, g, or t
  misc_feature (411)..(411): n is a, c, g, or t
  misc_feature (420)..(420): n is a, c, g, or t
  misc_feature (530)..(530): n is a, c, g, or t
  misc_feature (865)..(865): n is a, c, g, or t
  misc_feature (890)..(890): n is a, c, g, or t
  misc_feature (903)..(903): n is a, c, g, or t
  misc_feature (987)..(987): n is a, c, g, or t
  misc_feature (1007)..(1007): n is a, c, g, or t
  misc_feature (1025)..(1025): n is a, c, g, or t
  misc_feature (1047)..(1047): n is a, c, g, or t
  misc_feature (1049)..(1049): n is a, c, g, or t
  misc_feature (1070)..(1070): n is a, c, g, or t
  misc_feature (1080)..(1080): n is a, c, g, or t
  misc_feature (1088)..(1088): n is a, c, g, or t
  misc_feature (1108)..(1108): n is a, c, g, or t
  misc_feature (1123)..(1123): n is a, c, g, or t
  misc_feature (1125)..(1125): n is a, c, g, or t
gtaggaacaaatctattggaaaggagagttggactgaatgttggcccacaggattgttgagctgtggcagctgccttcatgaaggcttgccaccttgggacgccccagtttactggggtgtcttgcggagtgcagaacggctttctggcagctgcctgggtttggccaggtaccctgccgtcccctcccgccggtcctagacccctagtccccgttccgtgtctccagttgctagttcatggggatggctgctgttctgagaacatnagaactgggaagagagatgnagtcacatggatttnnggtgggcattattctggactttcgtatccaagttagtcccccttattcnantgtgggattgccgttctaagnagttacctaatgccngctgctgaagngcngctnacnggaggcggnggcggccctggcaactgccccttgcattaggtcttgtgtttgatgtgttcttgtgaattgactttgtcagaacaaaatatttacgcgtttgggttcaggaatttcttttngctccccatctggctgtgaaattcaggaaacctcccgttgcctagtaatcaccccatgtaggtgtacacttgtgacaaagtgcatctgaccactaaggggcccccttggtgaccccagcacattcacagcagtgttaaaatggcctgcattttggagatgctggctggcctttcagtgcctcccaggaagacacatggcctttccctcttcagatgcctgaagggagtgctttgaggcaggtgatgtgctgggagtgtgggcggcctccctctggccccggggccctctgtggaccttggctccctccgtggacctgggcttcgtggtgagcacngcagcctccctgggcattccctccngcgccagcacccnctgcaacatatagacctaagtgctattgtattttggcttggtgtgtatgctcttcattgtgtaaaattgctgttcttttgacantttaagtgattgttttgttnactgtaagtttgaaaatnaaaattaagaaaaaaattccantnactgtgctgtggttggagacnttatttaccnagatgttnactcttcctttccccttccnttttgaggagctgtntnactcctcctccccccccgtgctttgtagtctctcctatgtcataataaagctaccttttctctga

SEQ ID NO: 568684 - DNA, 1025 bp, Homo sapiens
  misc_feature (267)..(267): n is a, c, g, or t
  misc_feature (287)..(287): n is a, c, g, or t
  misc_feature (302)..(303): n is a, c, g, or t
  misc_feature (352)..(352): n is a, c, g, or t
  misc_feature (354)..(354): n is a, c, g, or t
  misc_feature (375)..(375): n is a, c, g, or t
  misc_feature (390)..(390): n is a, c, g, or t
  misc_feature (401)..(401): n is a, c, g, or t
  misc_feature (404)..(404): n is a, c, g, or t
  misc_feature (408)..(408): n is a, c, g, or t
  misc_feature (411)..(411): n is a, c, g, or t
  misc_feature (420)..(420): n is a, c, g, or t
  misc_feature (530)..(530): n is a, c, g, or t
  misc_feature (865)..(865): n is a, c, g, or t
  misc_feature (890)..(890): n is a, c, g, or t
  misc_feature (903)..(903): n is a, c, g, or t
gtaggaacaaatctattggaaaggagagttggactgaatgttggcccacaggattgttgagctgtggcagctgccttcatgaaggcttgccaccttgggacgccccagtttactggggtgtcttgcggagtgcagaacggctttctggcagctgcctgggtttggccaggtaccctgccgtcccctcccgccggtcctagacccctagtccccgttccgtgtctccagttgctagttcatggggatggctgctgttctgagaacatnagaactgggaagagagatgnagtcacatggatttnnggtgggcattattctggactttcgtatccaagttagtcccccttattcnantgtgggattgccgttctaagnagttacctaatgccngctgctgaagngcngctnacnggaggcggnggcggccctggcaactgccccttgcattaggtcttgtgtttgatgtgttcttgtgaattgactttgtcagaacaaaatatttacgcgtttgggttcaggaatttcttttngctccccatctggctgtgaaattcaggaaacctcccgttgcctagtaatcaccccatgtaggtgtacacttgtgacaaagtgcatctgaccactaaggggcccccttggtgaccccagcacattcacagcagtgttaaaatggcctgcattttggagatgctggctggcctttcagtgcctcccaggaagacacatggcctttccctcttcagatgcctgaagggagtgctttgaggcaggtgatgtgctgggagtgtgggcggcctccctctggccccggggccctctgtggaccttggctccctccgtggacctgggcttcgtggtgagcacngcagcctccctgggcattccctccngcgccagcacccnctgcaacatatagacctaagtgctattgtattttggcttggtgtgtatgctcttccattagggcaactgctgctccttgctctgtcttaggggctaagattcattaagaactaaatgctctt

SEQ ID NO: 568685 - DNA, 111 bp, Homo sapiens
cctggcaggaggactacggacgctggaaggactcaccctatggaatcgggcctcgtaggtggggtgacaatgtcagagttgtctataaatcgggggggaggcgcgcgccga

SEQ ID NO: 568686 - DNA, 235 bp, Homo sapiens
gaggcacacacccatccacaataaagctaaaactcaactgagttgtaaaataacaccagatagacacaaaatagactacgaaagtggcatttaacatatctgaacacacaatagataagacccacactgggattagataccccactatgcttagcacctaaacctcaacagattaaatcaacaaaactgctcgccagaacgctacgagccacagcttaaaactcataggacctga

SEQ ID NO: 568687 - DNA, 897 bp, Homo sapiens
aatagttgagggctctgaagaatctgggtgactgggcatgtcgatccatatccaccattatgtgacattaaaggatcatatactgcgcagtttgaacataccatcctgtcgggtccagcatgtaggaagaagtcggtcgagtcagaggacgatgactgatattaagagctctggagatccaaagactcgaatcgtcaaacacgcttatatagttctcgagtccctcgctttggagaaccaacagtgatacccagtaattaagtatggtcgcttaccatgttaggtctgattgtataactagatgggatcggccagtgtagatactctgttagtccgatggttgtgaacagaaatgacagagaagttgggactacaaggcaaatgcggtctgagatgttatgaaacgcaacggaagaaacagcgtgttccggactttcacatgctaactgtattgtgcccctttcctgtctcagcgcatagagagtgcctcatgaaagctcgaagataacgtctcaaggaatgacttataccggttgtggttgcgagagtaccctgaggaagaggatactcttcgggcactgattgatgattgtccaatgaattcttcactgtggacatgcgtatcgaatgacgtagatccaggttctgaacgtattacctctggcgtggctctataaccttcctggagatgcagatctgtggacataactaaagacaattggcagatctgactaactggcaacgtagatcagaggggcccaagagacgggagggcgggacaagagcgttgaacgcgacacgggggacagagtggccacggagccaagaccccgacggcgggacgaacgggcgggccccacacggagagccaatgaacccaagaagccggggacccga

SEQ ID NO: 568688 - DNA, 177 bp, Homo sapiens
agcagcactcagcgaataggcaggtttgaaggatggaaaagggaagagaaccattgaagaaacagagatgtgtaactcttacataccgtaggctaaataaggaagggttagagtggggcgcggtggctcacgcctgtaagttccatgcactttgtggaggccagtggagggcaggat

SEQ ID NO: 568689 - DNA, 112 bp, Homo sapiens
ggtaatccatcggattgctaccgccaagcgtagaaagttgattcaaggagatcggcagaaacagagtatatgtattgcacacgttgcaaataaatcacaagcgcagttcacc

SEQ ID NO: 568690 - DNA, 237 bp, Homo sapiens
aacacttataattctcacaaccatcttatgaggtaggtactattagcatctttattttagagatgaaaaaaaaaggacaaagagatcataaaatttagagaggatcatacaggaagtaagcagtagaacttgggtcttaaactaaagcttactccagaggctgagtacttaaactgcggtgctacgctctctctccttgcgagagaggaaaacaggctacattctaagcaaaagcag

SEQ ID NO: 568691 - DNA, 980 bp, Homo sapiens
  misc_feature (969)..(969): n is a, c, g, or t
ttttcttgctgatattttcaatttattactgcagtagataattgctctgaaagtgcaacactaaatcactcttgtcatagcctctgctccgtttccactggcaaatacttggaaattcattcttcgagcattgtggaccacaagcttctctctgggtggaaaattattgccactgccagtatcatagggaacacacacacacacacacacacacacgaacagaaggattcaaaaagcagacactggagaggagtaggggccaatttcaaacagaaaacccaataaagggctggagaggagtaggggccaatttcaaacagaaaacccagtaaagggctggagaggagtaggggccaatttcaaacagaaaacccagcaaaggagttagaggagaacagctccaactgtgcaaagtggagaccgactctccactctccagtggcaacctcacattctggtactgtgcaaagcggagaccgactcttcactctcctcacattctggttacgttggccctggtagacctttatccctttgcctctgtaacggtgataccataatcataaccgtgccacatctcagcatatcagaggcccatggagtaaaaatagatgaaaagacctctcaagctagtttggaaaaatagagggtttagataaactgactatttaatctcctacttaaacctgttaggcagaatatctgggagaacactgggcgtaagatgctgcctaacaggcataaccccttgctctaaccagcctagggccagtatgtttttgatggaaaagacaactgtcaaatactacaacgacaaaaaggaagggaaaacatgagcagctctagaaaacgtaagattcaaaactctgaacaacaacaacaacaacaacaaaactatggacaacacacctagccaggaggcctgaccactcactcactcctaagcacactctacacatacacactganttcccacacac

SEQ ID NO: 568692 - DNA, 312 bp, Homo sapiens
tgagacagggcttcactctatctcccagactgagtgcggtggtgtggtcagagctcattgcgaccttgacctcctcggctcaggatgtccttccaccttagcctcctgagtaggtgggactacaggtgcacacaatccctggctaatttttttgtatttttgtagagacagggtttccccatgttgcccaggctggtctcgaacctctgggctcaagccatccgcttgctttggtccctcaaagtgctaggattataggcatgagcgatcatgctggcagagtctttttccttccaaagtttgttgatgggg

SEQ ID NO: 568693 - DNA, 104 bp, Homo sapiens
ccacctccaaggctatgctttgaatttttaatcgttcaacttgaggttgaagatctgatagccggttgacttcatccttacaaatttttaactgacttttaatt

SEQ ID NO: 568694 - DNA, 372 bp, Homo sapiens
  misc_feature (14)..(14): n is a, c, g, or t
  misc_feature (18)..(18): n is a, c, g, or t
  misc_feature (48)..(48): n is a, c, g, or t
  misc_feature (98)..(98): n is a, c, g, or t
  misc_feature (146)..(146): n is a, c, g, or t
  misc_feature (176)..(176): n is a, c, g, or t
  misc_feature (292)..(292): n is a, c, g, or t
  misc_feature (318)..(318): n is a, c, g, or t
ttaaaaataataantaanttgaggccggatgtagtgactcatgcctgnaattccagcactttgggaggccgaggtgggaggttcacttgagcccaggngtttgagaccggcctgggcagcttggccaaacctcgtctctataaaanattagctgggcatggtggcatatgcctgtngtcccagctactgaggatactgagatgggaagatctctggagccgaggacatcgaggatgcagtgagccatgattgtcccactgtgctcaagcctgggcaagagagcaagaccctntcgaagggaaaccacagtacaatccncataaagggttcaaggtaatgctttttcataggtaggaaccaaagtgttcttga

SEQ ID NO: 568695 - DNA, 381 bp, Homo sapiens
  misc_feature (35)..(35): n is a, c, g, or t
  misc_feature (47)..(47): n is a, c, g, or t
  misc_feature (149)..(149): n is a, c, g, or t
  misc_feature (264)..(264): n is a, c, g, or t
  misc_feature (301)..(301): n is a, c, g, or t
ggagtctcactttgttgcccaggctagagtgcganggcgtgatcttngctcaccacaacctccatctcctgggttcaagcgattctcctgcctcagcctcctgagcaggtggggttacaggtgcccgccaccgcacccagccaactttntgttctcagcagagacggggcttcgccatgttggtcaggctggtctcgaactgacctcaagtgatttgcccaccttggccacccaaagtgctgggattataggcgtgagcacttncacctggcctctaagcttaatcatttctaggcttttnatttaaagtgagaaacatgtgactctttcctttcatttgggacactttaaaaggggttattaaattgaccctaattacaa

SEQ ID NO: 568696 - DNA, 242 bp, Homo sapiens
  misc_feature (57)..(58): n is a, c, g, or t
  misc_feature (87)..(87): n is a, c, g, or t
  misc_feature (125)..(125): n is a, c, g, or t
  misc_feature (138)..(138): n is a, c, g, or t
  misc_feature (182)..(182): n is a, c, g, or t
  misc_feature (206)..(206): n is a, c, g, or t
gcccctctcgtcaccaccctcggtgcccagctaccccctcaagccccagatcccctnntcctcagaacccaggccacccagcttccnattatcccaactgcccagccctctctgaccaccacctncaggtcccctgtntctcctgcccatcaaatctctgtgcctgctgccacccagcccgnagccctccccaccctcctggcctntcagagccccactaaccagacctcacccatcagccc

SEQ ID NO: 568697 - DNA, 1027 bp, Homo sapiens
  misc_feature (355)..(355): n is a, c, g, or t
gagagatctagtagcgaccaagcgctccagtgtgttaagtggtctgtcacaagtattccactgtggagagaggtgcgatagacaaactactgcaactgcaaggccgaacacctaggatgagtattggaagagtattgtgtggaaccgactatgagaagcgtgctcctacacatcaagtaatcattactccatagaccaagctgcccactgtaaactagtgatcataagtagattgcgtaaggtaggctatctaagataaggatacgcctatctggataaggataccctcgaccctcatatgaggatatatcttatgaacaagtacatcggcaaaatagttagcaaatagcactcntgatatcattgcgacatgggacacagtaggcgagtagcgctaacgagaaaacggggggtctagctccttttttgtgaactcgcttattggactgacgcaatcgactcccggtagagatgaagcactctgtaattatatctagtaaactacactagttcacgtggtagaacactgggcccagacatcacttgggctcccaaacgtctcagtaaaaagctcactgtgcgtaaagcacaacgacgatgggcgtaagatgcatatcccatcctagcctgtagaaggatctgatggtgagatatctgtgccaagacattttggccggtgaggtccgttggaagagtcggtttgccgaggggaggcaaatggaccaacttcagtgtcagtttcgtaggtgaagacgattgacagcttggattccagtgggtgaggcattatgggttgggcaagggcgctggttgagttggtgtgccatatgcgatgtgccagtgtgagcgtagtgagactatctttaggaattggggagtaaaatgaaaatgggtaatggcagtgttttaggcaggttggtgctgggaaagcctctcaggtggatccttgcgggaaattcttataagaatattccaattggcctatcgagatttttggggctgcgcaatgaaaagggccgtgtatgaa

SEQ ID NO: 568698 - DNA, 492 bp, Homo sapiens
atgtgttgtctagacagcacaaccttccagtttctagcctttctttgtctttgagaagtctcataactctgttgaagttgtagacaggtgagtagcaatgcaaaataattcttgcctgatgaataggtgaaaatgccgcgtcactggagggacagctctcatccccggtcgaaaaggccagtaattgcctccatttgcagcatatcgtcgtatatcttccttttgtcttccagatgaatttgcccttctttgacttcacttttggattgattataacatctgcttggttccctcatgtaattaaataaaatattttaagcacccaaaaaaagaaaaaaaaagaaaaaaaaaaaaaacaaacttgtgttgggccccgccctgggcccccctggaagaaagccttttttataaacccattggcgtggggggccgggggccccgatggggaacgggaaacggtggccagaggcggttccctaaggaagaaccggg

SEQ ID NO: 568699 - DNA, 1674 bp, Homo sapiens
  misc_feature (1047)..(1047): n is a, c, g, or t
tctagctttagtaggccttcccttatacgggccccgttgttgtgtcgtagatactatcacgtttcatgtccttgtagatgtcttagatttataagacgcgtgtcttcctgttagttattagttgctctcccctctctatcacaagtggcctcgcccctcttagggggtacccggatgactgcgttctcgagaactctctctgctgcccttcttttaagaagcccttttatatacttccccccgagggagccactattatggggggggcgcgccccccccacagcacccacccgcggcgcatggggggacccaacacgcttctcccctcgctggggtgatccttatatattctctgtgggcctcgctactctcctcctcctggccacttttttccacgcaaacaagctcgtgggggcgcgcagaaaaaagcacggggggagaagttgttgggtggtggccagacgcccccgctgtcctcccccctgaggcgccctcctatatgtgtgaatccctccctttgtaaaaggggtcttttttttaagacaccagaattcttgttgccaagagagagctcctgttgtctctcctccccccttctaaagttcgccctccctgaaggacctctccggggtgacacctggggtcaacacccaatttgaagagggtttcataaaggggaaaaagttgggggtgaaacgaccgccccccctcgcttggtggtgttccccaacaccccctcccgggttgaagaaaagagatcccgcgtgaaaaaagggactcgttgtagagagacccctctcttttataggaggacccctttgggtgcccggggattaaaaccccatacggggtgtaggctcacggccccccccaaagagagggcgccccaacacaacaaagcgggcgcttctcttcttacgcccttccccctctagaagagaggtgctcaccccccccccccctctttgtgccgcccccctcttctccaggagtgtcccccccagaggccccccccgggccccactggtgtgccccacacacctctgngccgcccgcacactctcccaccttcggggtctcccgcgagagagtcttctctcgcgaggggacccctctcctccagtctctcccccctctgtgagcctcctcccagaggacaattgtgagcgcaaaccaagcggtgtctcttgccaaaaaagagagaggagagaaagagatagtctccccacgagagagagagagcctctcacactgtggagagagcccgcaccgcgcgttgtcctcccccacagaggagccccacgtctttaagagacctctcagcgccccccgggtttcccacacgccgccccaacggccgcccagaaaaaggtcaccacaaccacccgagaggggagaggagaagccgccaaaaacacacatatgggttccatccctcccaagcccagagcccaccaccagaagagagggagacccttgtgcacacaccggaacgcccgctgagccgcagagaagttatagctgagctttaacaccggagcggagttgccaagccaaccccacaccagagataaaaggcacgctgttgtcttttctccttatatgggtagggctctgaacacaaagcttcccgattaactgtaaataaaaaataatttttttttttttccagta

SEQ ID NO: 568700 - DNA, 757 bp, Homo sapiens
  misc_feature (402)..(402): n is a, c, g, or t
agattaaggaaataggggccaagaacgtccggaagcaaacggaagagcatggagaagcatattcgtggaagatgaggtcgaggtcatcggcagagccttcggatttcggagaatcccagtcatctctgtcctttcttcggcagagttggtggtgaggtgtatgaccgacagagtacaactgagagctcaaatgtgggacttcccgtagtaacgcgagtcgaaacgggctgacatccgagcaggcaagtctcgacacatgtgactgggcatacagaagtaccaacgcgaggcaggcaggctggaaggagatgtgtggagcagatgggcgaactcgcggcgcgatcctatcgactgtctcatgggtatcgagttcgactgcacgagtactttaccgaagtgccnaaggccctcaagttgagcattgggaggcgaacgaccacaggaggactgatggtgaggagctggcaggagacagggcatcaaggcagtcttcactggacaattgttatattggcactatcggccaatgcgttgggtggaggaatgcagggttgcggattgtgtaggaataacagtcatgcagtgggcacattgtccatgcactaccagtgggtaccaacggttgcgacgacagggcacggaggatgggaaacggaattagcacagcttgtgggaggacaacccaaggagttctaggtccccgggagagtaacctcggatcaattcgtccatgtgttgctcaggtaggtctgtggtg

SEQ ID NO: 568701 - DNA, 104 bp, Homo sapiens
cctgtgtcatattcattcctttttgtggttcagtaatattccattgcattgcattatcagtactttgtttttccattcaacttttagacatttgagttgttctg

SEQ ID NO: 568702 - DNA, 150 bp, Homo sapiens
tcaggacccatggaagaagagggtgccacgagagttaacagccttcagacatagatagcacactcatgggaagccccagcgacgtgcatgggtgtcgcacctcaaggggatcatcaaggtgtcctgagcccagtgttgtgggtcgagtac

SEQ ID NO: 568703 - DNA, 348 bp, Homo sapiens
gtgctcttcaacggatcgagtgatactttgatgccgggctcggatcgggggactcccttaggagatcaatcccctgtcctcctgctctttgctccatgagaaagatccacctacgaccttaggtcctcagaccaaccagcccaagaaacatctcaccaattttaaatccagtaagccgcctctttttactctcttctccaacctccctcactatccctcaaactctttctcctttcaatcttggcgccacacttcaatctctcccttctcttagtttcaattcctttcattttctggtagagacaaaggagacacgttttatctgtggacccaaaactccagcgctgg

SEQ ID NO: 568704 - DNA, 398 bp, Homo sapiens
cttattccatatctttacacaagcaatgagatgaggacgtgaggcagagccctgtgggggacggtcagggcttctggtgctaaatgccaggcaatcatgggttcccctgaggtggccagaaatgttatttgaccactcaatgctgcaactgagaaatacaggtagagttacaggaatgacaaagaaagcttcagggaactgctggcaggaggcctgatgtccacaaagcacgtgttcaaaactcaacctaacacaggttagaaaaagacaactgagatagaatcctcagccagtacattgacaaacacataaactgaggcattattacctctttataataatgcaagttgaaaatgctaacaagagcaataaacacttctgccaaaattccacaaggc

SEQ ID NO: 568705 - DNA, 174 bp, Homo sapiens
ttgatctaacaaccaaatttatttcagtcagcatttattgagaaatattacttcacactgaatcagctatatatttgtggggtcagtgaaaaatgaaaatacatatctcttgtttgaaaatgactaggattccaaggatgacaacagcagagcattaaatctagcatggtctgc

SEQ ID NO: 568706 - DNA, 108 bp, Homo sapiens
ctgtagtacaaagaaagctgggtctatgatgatgatgatgatggaaggcacagctgctattccacaaagtggtccccaggatcttggcctcgatgccggcacgaggcc

SEQ ID NO: 568707 - DNA, 744 bp, Homo sapiens
  misc_feature (358)..(358): n is a, c, g, or t
ctaacccactccaccttacttaccagacaaacttagccacaccatttattccctaaatcgaaagttataggctggatagaagatagtaaacctgggcgcatactagtatatacgtaccgctaaggagaggaactatgaaacacattataaccaagcatattatagcaaggactaacaccctataccttcatgcactaatgaattagctagaaaataactttgtgatcgagagccgacgctaagtacccccgtaaaccatgacgagctaccttaagaactagctaacaagagcacgcccgttctattgatacgctaataaatagtgtggaagatttactagcgtagaggcgacaaaccntaccgagcctggtgatagctggttgtccagagatagaaatcttagttcaaacttataaatttgacccacagaaccctctaaatccccttgtaaatttaagctgttagtccattagaggaggcagctctttggacactaggaaaaaaccttgtagagagagtaaatactatttatacacccatagctaggcctatatagcagttcaccaattaagagagcgttcaagctcaaacagcccattaccttaaaaaattcgcaatacatatatactgaactctctcgacatccaatgggaccaatcttatcaccctatagaagaactaatgttagtgataagtaacatgaaagacatgctactgcgtataagcctgtatacggagacaaag

SEQ ID NO: 568708 - DNA, 224 bp, Homo sapiens
atatcctgctctattgagaatgattgacaaaaatggtatatatctacagctatgcaacatgatgtcttgacatatgtatacactgtgcaaatgagataccacaatcaagattaatatatccaccacctcacaattatcttagtagttgttgtaagtgcaaacatataaacatctactctcttcacaaattgcaagtatataacacggttctattacctatattc

SEQ ID NO: 568709 - DNA, 149 bp, Homo sapiens
tgaaatgaagtctcagcaggtcacatatgatttatctcccagacgggacacatgagaataatgaggtgcgctattagatagcacgggagcactaggattaaaccagaacaacaggtcttacagtgacttaatagcatggagtctgatcc

SEQ ID NO: 568710 - DNA, 898 bp, Homo sapiens
  misc_feature (266)..(266): n is a, c, g, or t
cgcggacctgcagccatggcgagtcaccgcccagagcagccgcaggaaggagcgcgtcctctgcctgtgtgacgtggacgggaccctcacgccggtctcgccaggatctagtctcagactcctggatcaagtgatctttgctgcgcttggcctcgtgataagtgtagggatacgcagcatcctgagccactagttgatcccaaacatgtctaatattacaggtggtctaatgctttagtactggcattcacgatccgatgcaaganttgacgcctgatggtgtgccggcgttcctgcaagaagctaacgaagtccgagtgcagatcggggtggtgcggcggctctgacctactgtaagaggatccgctgcatgcgatgcatgggctgactgcgagggatagtacacgtcatttgaaggaacgttgtgacttcatcgtgttatgccgaagcaacgggacgcgtgcgagtgatagagcactggactgacgtggcttcatccaatgctagacctagtcgcagaacccacctggtgggaagagctgcttgcagtgacttcgatcaaactatctggcctcagactacatgggccctgcttcaggctggcccaagaaaggcgtggaacctttccatcgagcttccgagaatggcattgctgaacatctcgcccatcggccggagctgcaccctggagggagaggaatcgaggtacgtccgaaagctgggacaagaagactgagaaacgatcccgggcagaaaggatcggtggaacgcccctgaataaaccagagatttggctgggcacagggctgaagggttcatctcaaggcgcgcatgctcagctttgacgatttaccccgagggacctgagaacagcgctactggctggataacctggcca

SEQ ID NO: 568711 - DNA, 488 bp, Homo sapiens
tagaaataaatatgagtaattagtgcagaaatctttccactcagggtagatattaaggtgggggtcatacggaagaagtcttgaaagacgatttacagtagattatgataatttgggatagagacggtgccattaagagttgttaaacagcatgattcagacagctctgtatttccagtgactgcctattcctttatggtatatgtgtacccaagtgatgctctcacatttatcttaagtccctattattaatatacatttaaagtctcccgaggtatagtttggttggctatcggtccttttctggagtgatttgaagcagagttaattgtggaacctatttatagacatctttctatacttgcacaagtctgtgtataatcaattctgagaagtagaatttaaaatttagtgctttgaaaatggtcctcattttaattttttggattttaattaggtaaggttgaacatatttccttattttcatg

SEQ ID NO: 568712 - DNA, 754 bp, Homo sapiens
  misc_feature (353)..(353): n is a, c, g, or t
caccaaggcaatcagcttcctttttccctttttttgtattgttttttaacattttatatttttgctttattttattattattttattttattattattttattttttgagacggagttccactctgtcgccaggctggagtgaagtggtacaatcttggtctcactgcaatctccacctcccgggttcaagcaattctcctggctcagcctcctgagtgctgggactacaggcgcgtaccttctttagtagagactgggtttcaccatgttggccaggatggtctctatctcctgaccttgtgatctgcctgcctcagcttcccaaagtgctgagatgacaggtgtgagccantcagacccagcattatttttttgtaactttaaacttgtaaaattcttcttttccaatttttgttggagaggttcttcattggtacaggtcatagggtgcgataagatggctgaggtgacgatgggtttttagacgagcagatctggcgtctgtaccacccaaggactgggagttgcaaggtggcatgatcctcgtgaaaccgtctacctccccaggtttcaagccaattctgtgtgcctccagaccatcccaagtaacctcgggactaacaggtgccacgctacgcacacctgggctgatgtctagtcggtcacagtcagagaccggtgtttcaacccatgttgcccaggtcggtctctagaattcctgagctcaggcaataccaccgctgggcttcccga

SEQ ID NO: 568713 - DNA, 492 bp, Homo sapiens
tctacacctacctgcgctgacattaactaccattatgggaaatgcaaaagcttgtctgcgatatggtagtgtgtggttctctatttggaataccctttcacggtgatttaataactaatttaaaactactatagcaaactgcagagcaccgggaagtggcttaatgatcctgaagggacttcttctgatggtagctttcgtattatcaagtaagattctattttcagttgtgtgtaagcaagctaccggtaagtgtagaaatggaccgttcaattgctacacaccctgaaggctgacaataaaagttgacattatgcccgaagacgaatgaatcaaccatggagacagcgaaaagacaacccacagaatgggaaaaaatatttaccaatcatatattggggaagggtgtgtatctagaatacacaaaaatctcttaccaccaaatcttacacagacagaccaatttaaaaactggctaagtgtagaaattga

SEQ ID NO: 568714 - DNA, 441 bp, Homo sapiens
gtccctcacagaccgtaacactttcgcactgtaggcagtgtagagaaagaagtcttcttcatggtgtcctggtacagctgacccatgggtggcactggtggtgtggaatgacattgttgacaaagaaaaacaaggcgtcctcagctcggagatgaattcgcttccggatcacgaagtagaactgaccaactgtgagatcagaaggcaccaggtatttctttaggtccaggtctcctatccgagctctgggagccttttctactatcaccggcacccggcccgggtatttctttcggatcttctcgccctcagagcggcgctactcgaacggatgctcttctgtgtacactaacttcatcctcccgggaaccgtggtgtacagggctgggctgagggaacccagggtggccgggaccctgctagactctcacttactttttg

SEQ ID NO: 568715 - DNA, 157 bp, Homo sapiens
cactggcccgtttacggaagcattgatattgtggtagacagttgatctggctttatcgtaatttttttatctttttatggagaatggggtctcactatgttatccaagctggtctcgaactcctgcgctcaagctgtcctctcgcctctgcttccgg

SEQ ID NO: 568716 - DNA, 296 bp, Homo sapiens
  misc_feature (145)..(145): n is a, c, g, or t
  misc_feature (278)..(278): n is a, c, g, or t
  misc_feature (289)..(289): n is a, c, g, or t
ttggtgatacccaagagcaccgcttcgcacaccgcgggacggccgccttcggccagcacgcgggcgttctcttcgtcgaactccgaacggtcgatcgtttcaccgatgatgaaggtcgaatcgcccacctcgttcaccttcaccntgcggagcatctggcgaacgatcgtttcgatgtgcttatcgttaatcttcacaccctgcaggcggtacacttcctggatctgatccacgaggtaacgagcgagagtggtgataccgcgtacgcggaggatgtngtgcgggttgntcggtcc

SEQ ID NO: 568717 - DNA, 671 bp, Homo sapiens
caggccctgccgccgggccgcttgacgacgacgctcccgcgggggccccgcctgaggaggacgcggcggcggtggcggcgaggccgcgggaggccgcggaggatggaggagcggaaggaggagggcgaggccgagatccaggagcacgggcccgagcactggttctccaagtgggagcggcagtgcctggccgaggccgaacaggacgagcagctgccccccgagctgcaggaggatggctggctgtgcctgcctgctgcatgccctgatgcacaatgcagcatgaatgcttgtggcaccttctttccatgaacttcggccacctgcctgttggcccaagcttcttacaaatgacctgaagtgttgtcattgctatgccattgtgactttttcgttctcgtgtgggttcaccccttatcccatatatacggcgatggctctatccgtgtcctggttcaaacccatagttccgttgccttagaagctgaatatctaatggacaattaatattgtgtcccggggttttgggcgggccaaaggtttttaagaccgcccctatgctccaaaaatgttttttaccccccgaaagtagaacaatactcttgcagcctaggatgtagagatgtgcactctgctcttcctctctaagtcgtatgtgagtgtgttggtgg

SEQ ID NO: 568718 - DNA, 254 bp, Homo sapiens
tgatcatgctggctggtaaggggatctcgatgtgaacggacctccacaggtatgtagtctccacagcgcagagcgtccctggaacagctacccccgtgagcccaggataatgtctcctacccctgtgggcccaacctgaaggtccccagcccttcccacggaccatgctggggcccctttcctcatcttccatgtccactagtgagtctgagggctcaccatctgcagccagcatcacccttcaccagaattct

SEQ ID NO: 568719 - DNA, 102 bp, Homo sapiens
  misc_feature (36)..(36): n is a, c, g, or t
gtccgggaaaattaagaccctaaattcgaggatatnatctgtatataggaacagctgagctgttgatcaagcgttttctatgtatggtttttcaaaggagca

SEQ ID NO: 568720 - DNA, 1218 bp, Homo sapiens
  misc_feature (276)..(276): n is a, c, g, or t
aggatggggaaccctgccctctctgtcagacacctgtccttccttctacagaccatgctggacttcttgtcggatcaggaaaagaaagatgtggcccaaagcctagagaactatacgtccaagtgtcctgggaccatggagcccatcgccctccctggcggcctcaccctgccaccggtgcccttcaccaagcttcccatcgtcaggcatgtgaaactattgaaccttcctgctagcctccggccacacaaaatgaaaagcttgctgggtcagaangtgtcaaccaaaagtcctttcatctattcaccaattatcgcacacaaccgtggagaagagcggaacaagaaaatagatttccagtgggttcaaggagatgtgtgtgaagttcagctgatggtatataacccaatgccgtttgaacttcgagttgaaaacatggggctgctcaccagcggagtggagttcgagtctctccctgcggcgctttctcttccggctgaatctggtctgtacccagtgacgctcgtcggggtcccgcagacgactggaacgattactgtgaacggttaccataccacggtcttcggtgtgttcagtgactgtttgctggataacctgccgggaataaaaaccagtggctccacagtggaagtcattcccgcgttgccaagactgcagatcagcacctctctgcccagatctgcacattcattgcaaccttcttctggtgatgaaatatctactaatgtatctgtccagctttacaatggagaaagtcagcaactaatcattaaattggaaaatattggaatggaaccattggagaaactggaggtcacctcgaaagttctcaccactaaagaaaaattgtatggcgacttcttgagctggaagctagaggaaacccttgcccagttccctttgcagcctgggaaggtggccacgttcacaatcaacatcaaagtgaagctggatttctcctgccaggagaatctcctgcaggatctcagtgatgatggaatcagtgtgagtggctttcccctgtccagtccttttcggcaggtcgttcggccccgagtggagggcaaacctgtgaacccacccgagagcaacaaagcaggcgactacagccacgtgaagaccctggaagctgtcctgaatttcaaatactctggaggcccgggccacactgaaggatattacaggaatatcaccacc

SEQ ID NO: 568721 - DNA, 201 bp, Homo sapiens
gaggtgttcaacgtgcagaaaatgcgaaatgtcttgcaccagacctccctcttgttagtcagggagggccccagggctcaggggtggcattccttccgatcaacccatttcaggttaagggggaatcccttaaggagtgcctggggccccagtatatggagagggatagggctaccggaagcttccggaaattccggtaaa

SEQ ID NO: 568722 - DNA, 1226 bp, Homo sapiens
  misc_feature (276)..(276): n is a, c, g, or t
aggatggggaaccctgccctctctgtcagacacctgtccttccttctacagaccatgctggacttcttgtcggatcaggaaaagaaagatgtggcccaaagcctagagaactatacgtccaagtgtcctgggaccatggagcccatcgccctccctggcggcctcaccctgccaccggtgcccttcaccaagcttcccatcgtcaggcatgtgaaactattgaaccttcctgctagcctccggccacacaaaatgaaaagcttgctgggtcagaangtgtcaaccaaaagtcctttcatctattcaccaattatcgcacacaaccgtggagaagagcggaacaagaaaatagatttccagtgggttcaaggagatgtgtgtgaagttcagctgatggtatataacccaatgccgtttgaacttcgagttgaaaacatggggctgctcaccagcggagtggagttcgagtctctccctgcggcgctttctcttccggctgaatctggtctgtacccagtgacgctcgtcggggtcccgcagacgactggaacgattactgtgaacggttaccataccacggtcttcggtgtgttcagtgactgtttgctggataacctgccgggaataaaaaccagtggctccacagtggaagtcattcccgcgttgccaagactgcagatcagcacctctctgcccagatctgcacattcattgcaaccttcttctggtgatgaaatatctactaatgtatctgtccagctttacaatggagaaagtcagcaactaatcattaaattggaaaatattggaatggaaccattggagaaactggaggtcacctcgaaagttctcaccactaaagaaaaattgtatggcgacttcttgagctggaagctagaggaaacccttgcccagttccctttgcagcctgggaaggtggccacgttcacaatcaacatcaaagtgaagctggatttctcctgccaggagaatctcctgcaggatctcagtgatggtaagcgctttcctaattttaattagcacgtcagggtcctagatactgtgtagcaacccccatcccttgatgcctgctgtttgctgtttgtaactcacttgtcattcattaactcaagctgcctgagacatctcctgggcactttgttaacagagtgtgttactgtatgtgtctgaaagtaataaaagtactttttatctaaatgaaaaaa

SEQ ID NO: 568723 - DNA, 174 bp, Homo sapiens
gttacccaaagattgaacttcgctgacaatttcatctaatttaaatcgccacatgtgacaaccaggccagacactgcagtggtgggacttcagcaccttctagaagttgtattggagttgggagaattcaacttgacaggcggcttccatagatgggtgggcacaattatggag

SEQ ID NO: 568724 - DNA, 934 bp, Homo sapiens
tttacaaggaccttcacatatatagtctttcatttgggcccagccagccttgtgaaacaggaatgcagatgctgttatcctccccatcacgtacgaggacagtgagggtcgtggggttgagggcgggagtgtgggtgagcgccggcgggccccgggcagcttcggaactcaggtcttctgaagaggagccccgtactcttcgcactgcttcagccgtgggcgtgagacccaaagccttgccagtggagtgaagaagttccttttctattccaggttaccataccacggtcttcggtgtgttcagtgactgtttgctggataacctgccgggaataaaaaccagtggctccacagtggaagtcattcccgcgttgccaagactgcagatcagcacctctctgcccagatctgcacattcattgcaaccttcttctggtgatgaaatatctactaatgtatctgtccagctttacaatggagaaagtcagcaactaatcattaaattggaaaatattggaatggaaccattggagaaactggaggtcacctcgaaagttctcaccactaaagaaaaattgtatggcgacttcttgagctggaagctagaggaaacccttgcccagttccctttgcagcctgggaaggtggccacgttcacaatcaacatcaaagtgaagctggatttctcctgccaggagaatctcctgcaggatctcagtgatggtaagcgctttcctaattttaattagcacgtcagggtcctagatactgtgtagcaacccccatcccttgatgcctgctgtttgctgtttgtaactcacttgtcattcattaactcaagctgcctgagacatctcctgggcactttgttaacagagtgtgttactgtatgtgtctgaaagtaataaaagtactttttatctaaatgaaaaaa

SEQ ID NO: 568725 - DNA, 355 bp, Homo sapiens
  misc_feature (17)..(17): n is a, c, g, or t
aatttcaagtaaaagancagcttgtcaattgataataagatgtatcatgtaagaagatatataaatcggcggggcacagtggctcacgcctataatcccagcactttcggaggccaaggcaagaagatcgcttgagcttaagagtttcagaccagcttgggtaacattgggagaccctatctctatgaaaaatgaaaaattagccaagcttggtggtgtacacctatagtcccagttacttgaggagctgaggaggaaggattgcttgagcccagaagtttgaggtaatgagcgatattaacgccattgcactccagcctgggcaacacagtgagaccctgtctcaaaaaaaaag

SEQ ID NO: 568726 - DNA, 454 bp, Homo sapiens
aaaaataaaaataaaaagcagagagtaccttggtgagagtgaagtcctgcttcctggtgcacaggctcttgttcctaaagaggaagaaagatcacacccgagaatgtgtggaagcagcagtgcagtgtgcaaagcagggaccctcagcctgtctcctgggctccatccaagttgcttgtcttgtctgtccctcagtttcctcatctgttcagagggtactacaataatacctacctctgtaaattgctgcaatgaattacatgaggtatttcctgtcaatctccttgaacattaattggcacagtgtaaacactatctattagttcttcattctgatgtttctaaattaacacaaactaatcttatgctgtttctaaattaacacaactaatctaaatcttgatgctgcctgtcatactaataaagtatttgggcatatttcaaaaaaaaaaaa

SEQ ID NO: 568727 - DNA, 409 bp, Homo sapiens
  misc_feature (101)..(102): n is a, c, g, or t
  misc_feature (109)..(109): n is a, c, g, or t
  misc_feature (129)..(129): n is a, c, g, or t
  misc_feature (156)..(156): n is a, c, g, or t
  misc_feature (318)..(318): n is a, c, g, or t
ccacggtggagcccggcaagaccgtgaccttcacgctcggcgactggtacctcaacgacaagaagctggcggctggcgatgtcaaggatatcgtttggatnntggatgncaaggacgtgaccgctcagntcaagggcaacaagcttgaggtcaacncccccgcggctgaaggtacgatgacccttgagatcaagggcaagctggcgagcgatcccactaaggagctctcccagaagaagtccgtcacggtcaagaaggccggagcgacgcctgagcctgagaagaagagctccggcggcggctgcgacgcgggcttcngcgctctggcgctggagaaacaaaaaaattatgtaaaaatcaaataaataaaaattaaagagtaaaaagagtaaaaaaaagaatgtacata

SEQ ID NO: 568728 - DNA, 807 bp, Homo sapiens
tggtgtgatcccatttatttgaaatgtccaaaacagggaaaacctattttaaacaacagaaacacaaagtcgatcagcagttgccaggggaggaggaaaacgggaggggaaatgatggcttcacagggtgatgacagaatgttccggaacgtgacagaggtggtgcctacacaactttcgggatgtactaaatgccgctgatggtccacttccaagtgatggattttaaggtaattggaatttcatctcaattaaaaaacccaaacacgcaaattgttcccgccagttcagccccgagcagacgggcagcccgtggaggatgctgagcccacccaggtttctccccgccctttccgggactcttctctctttggcctttaatccactctgcgcagtcatggcctgtgtcatcctaccgggccgattctctctcaatattccctgtggtgaaacatcctaaaaggaagtcacattagagaaacatcacatatttcatctcataggccgtaaacaagggccatttagtgaagccaggtgtaccgaggggaagcacggatgctctgtgcccgtgttgcagggataacggtgcagtgccagggagctaccaattcacgccgtgtgtacaaggggctcaggacaggaccgaaagtgggcaaggtgcgggaccgttcacgaacacgcaaaggcacgaaatacattcgggtccgtctcgggcggcaaaagttacaaccaagggcgtaaacccgaaactcttgggacgagcaccgcataggaagattgctcgccacggaatgacccagtatgaaa

SEQ ID NO: 568729 - DNA, 1641 bp, Homo sapiens
cccggggtccatccgtcggctcctggggtccaccctacagcctccgggaggttcacccctcaaatcctggggtgcacccccacaactcccatgccccgcaagtgctgaggccccgcacattccctccgaaggaccagggaaacataccatcgccaccatccacccaaacaagagagaagcaggcatccacatcaccccgagccaaggacccagacgccaagggtggcatctatgacatttatgtcccaactggagaaggacaggcaggcatcgtcaacggtacagtgccccgccggaatcatataaacacaggcacatccaccacaaaacacaaagaacaaacacaagcagaggagcgcagcgccgagaactcatagagacagtaattccacatagcagagggcgcacccaacagggatacacaacgagatacacccccaggacaccccagagcgacacaaaagaggggcgccccccatatcaccggcgcacacacgacaatacaatagagagcaaggcgcccactggccccccgaccggccaccaccccaccacgcgtacagtcgcccgtgggccaaaccacccacctcgcacacccctctggccggcaactcccatcagcgcgcaacaccgaccaacccaaaaaaaacaaacacaagggacggcgcaggcccgcaccccacatccactcggcccgcccacacacacaaacccccaaaacacgaagccgaattaaccaccaagcgccacaaacacgcagagaaaacaaactatcaccaccacatcaaccaaccacgcgagcacaaataacccgggcgctggatcaaaaccccaccaacagcacggtgcgccaacaaaactgcgaccaacggacggagcgaccaatcgcacaaaaagcatacaggcggacaacaccccccggcgcgaccttcaggccgacccccctgcaaccacacatatagtacatccacccgaggagctaaacaagcatcaacaaatacaaccacccgacacacaacaccacacacgaccacgcacccacacacgaccaacacacgccatcacaccccaagcacagcacaaccctaccctatacaaccgcaacccgacaaagtaaccacacacaacgcagtacacccacaacatacgaagcaacacgaccaacacacacactcgtcgtgacacgacatccacgcacttcccatgcccgcgcacactagcagagacccacacacacaccccacctccacggtggacgacggcaccaaccataacacagaccgcgacggcaaccccacataacacgaacgcacccgcacacacgcacgcacaacgcactgacgagacgagacacacccacgaagcggagggacagcgcgcgagcacagacaaaggagacacaacgacacacgagggcccgcagagaacaagggaggagacgacaagagaggcacacacaagagagaggcctaccgtcgcgaggaccgagcgacaacaacaacagagcccagcgagagaagcagcgagacagagcaaggaaacagcgcgggacagagccaaggccgaggacacgacaacgagaacgaccgaagcaacgtgcgcagcagaacgaacgaagcaggacgaaggcgcgccgcgtgc

SEQ ID NO: 568730 - DNA, 324 bp, Homo sapiens
gaatatgctgtctcaagtgtcatcaatggaccaataaatagataaagaaaatgtggtaccatatacacaatggaatactatttggccataaaaagaatgaaaccctgtcatttgcagcaacatagatggaactgtgggttattatgttaagtgaaataagacaggaacagaaagacagatgccacatgttctcactaacatgtgggaaccaaaaaaacaaacaaaaacaacaaaaacctgatctcagctgagcgtggtggctcacacctgtaatcccaacactttgggagactgaggcaggtggatcttctgaggtcaggagtt

SEQ ID NO: 568731 - DNA, 987 bp, Homo sapiens
tataataaatatgatactagcatttacccatctcactgctaggaatactagtatatcgctcacgcctcatatcctccctactatgcctagaaggaataatactatcgctgtggcatctatagcgtagctgctcataaccctcatagcatccacctccctcttagccaatattgtgcctattgccatactagtctttgccgcctgcgaagcggccgttgggggcctatgccctactagtctcaatctccaaacagcatatggcctatcgactagcgtacatagatcctacacctactccgaatgctagcaacgtgagtcgtcccaacaatgtatattgactaccacgtgacatgactgtccaaggaaaacacataatgtgactcaagcaccaacgcatccacagcctaagttattagcatcatccctctactatgttttaaccaattcaacagcaagcctatttagactgtatccccacaccctttttccttctcgaaaccctcgctatacaaatcgccactcctccatagatagcgtagactagcctgcactccataccccatcactaatcatggcaatacgtcaaatgaccagctgtatcccgagtagaaccactatcacgacaaacactctcctacctcgtctatagcataaatcatccccgtatcaaaatgcgtctctatgattcatataccattgcaggagccacctagaagcgtacagtcacttgtgcaatatcgtgtctgcgggaaagccaacagtttagtccccaccttgggctaatatcccccgatgagggaaagcaccaagaacaggcctgaatcgcagggccgccttccttcctattttagaccctaggagaggttccatacccatatgcatatggcgataattacaacgacacgaaaacctaaggctctcaacatcgtactacccaacctcaggccgaaacaattaaattcctggccaccactagaggcggactcg

SEQ ID NO: 568732 - DNA, 959 bp, Homo sapiens
  misc_feature (1)..(1): n is a, c, g, or t
ngataggatgccagtagtatgctatgagcgaagcacgtaaacctctaaaaggcaggacgtcgggtgtcgatggagctacacgaggacgtaatactcggataaaacatcttctgtcaccgtggtgccagcccttgcgtatgctgcaatatcgcccgcgcgtttttttacgctagcaccctccaccgagggcccattcccaccggtactgtggcccttttctccagtataccggggttttaacccctcttgttaccgggcactgctttgaaggtcgccccaaatggctgttggaacacttgcgcgaaagagggttctccccttcttcagggggcgcacacctcgtggccagtcagaacgtgctcgcaaccacagacgcggcgcaatccttccctttccgggtaggcaagaagcccccccccgtcgttggtggggacaacccggcctcaaaacaaaacagcagggcgccctacaaactgcgggaaaaaaactggaaggccgtcccctcggccgaggttgccccccagtgcggcctcctgcccgatacaggagccccccacttgctgtggaacaggcctgtagggagccaccgaccccgaagatgtggcacgcgcgtgatacagcccacctaaaagaccggggggacaccgcgggactcaattaggctcccagaagatagggtgcgcccgtaaaacgcgcctcgtccggaaaatccgctctagccaagacaccacccccgcgcgggcggcccgcttgaactaacgcaaccagcctcggcggtcaatgtcccacaaaccacgtgggggggatatctccggggagcccaacggagggcaagcatatgtgggggcgccccttacccctggtaacaaaaccgtcggccccacaacacacacccaccaaatggacagcaggttggccccccccctcccaaaaaaaaatgttggcccccaacaataaca

SEQ ID NO: 568733 - DNA, 151 bp, Homo sapiens
acgatcgagggcgactccacggggcaaagcaaggccttgaggatcccgctaacataacttacaaacttattgggaggccgaggcgggtggatcacaaggtcaggtgttcgagacacagccttgggccttcccaatacgctggcgattatca

SEQ ID NO: 568734 - DNA, 438 bp, Homo sapiens
  misc_feature (96)..(96): n is a, c, g, or t
caggaacctaatgtttagtgaaaaatgaaaacttaaaaataaatgaataaagtactgtatgattacattccaatgtataacattcttgaccatgcngaaaattgttgaagtggacagctagttaatggtaacataatttaatgaagaactttaaaggacatgataggagtcacagaacagcaacctgggcaatattgctgtagaacaagtagtctgtaatatattaatattctggcattaataaaatgttataggcttaccagatgttactactggagaaaatgtgctaaaattataatttctgaccatttcatgctgattgtctcaaattttaccattatgtttaatgaatgtcttactatttttaatttttttctaaagccaaggtaattttaagtaacaacaccagtaatgactgtctaaaataaacatccttaa

SEQ ID NO: 568735 - DNA, 449 bp, Homo sapiens
gtcacgagcgagctctgtctcataagaaaaaatagaacaaagagaaattacttccaatgctggcaagcaattaacctgtaatttttcctgatgttggtctctctcctagtggctcacctatatttggacactgccttaaaaattggggtgtcgtggctccttggtggcgtctgtgctcctctttccctattaattgtccttaatcagggagggagccagcagcattggttggtcctcagcaatctgagtctcgggtctcccttaatccctgtgggggggcttctgcatggccattggagggtggtggtggtggcgacagtgatgtatctgtgtaggctcctgtctgtcccagctcacttaaggtgtgatggccaagtaaatgctgacccctatttacatcttgatttcacatattttacaataaattctttacatatggttccccttag

SEQ ID NO: 568736 - DNA, 398 bp, Homo sapiens
cgacgggagggcgggcacggtggctcacgcctgtaatcccagcactttggaaggcgaggcaggcggatcacgaggtcaggagatcgagaccatcctggctaacacggtgaaaccccgtctctacataaaaaattagctgggtgtggtagcacgcacccgtagttccagctacttgggaggttgaagcaggagaatcgcttgaacctgggaggtggaggttgcagtgagccgagatcatgccactgcactgggcaacagagcaaaactcgatctcaaaaaaaaaaaaaaaaaaaaaggggaaaaaaaagcggccctctccggggagagagggggggggactcccggagaggaaggccggaaaagcctgggggaaacggaaaaagccacccgggctcccg

SEQ ID NO: 568737 - DNA, 341 bp, Homo sapiens
cggatcgactccaagaagaaagcaacatgcttggaatgaccctagaaaccattctctcctttgcaacccagtagcatcaatgacaaaacctgtgcagtggacagcaagactcaagcgtttacactgatactagcatcgatgggatgattctttttctacgcatttcaggatttgttttttacttttaagttttgcagatgagaacattctttatgacagaaatcctatgcagcacatgtttggcttttgaagggaccaaggagctcaatattcctccgtgatgttaaattaaatgctaatcatgaatccgtattccattggcaaaaaaaaaaagcttgggc

SEQ ID NO: 568738 - DNA, 209 bp, Homo sapiens
gaatccaattttaattatactctctctctctctctctctctctctctctcctactaaaataggaataaaaggacatttttagaatgtaatgagattatcagaaggctgcaggaaacatcatgaaaacaggagaaaacctgccttagcaaacaagaatgcttgctgtctccattcctaatcattgttttggagcttctagctaatgcaaa

SEQ ID NO: 568739 - DNA, 503 bp, Homo sapiens
catgatgctccggctgctcagttccctcctccttgtggcgttgcctcaggctatggccactcttcctctcactcttccagcgcgcgtgtccatggtgaggatgcggtcccctacagctggcctggaggtttccctgctgtatgagaaaagtggaagcttctaccacacgtgtggtggtgtagcctcattcgcccccgatttgggttgtgactgccggctcactgtcatctccgatgggcatctgacctaccaggtggtgtatgggtgagtacaaccttgctgtgaaggagggacctgagcaggtgatccccatcaattctgaggagctgttcgtgcatccactctggaaccgtctcgtgtgtggcctgtggcaatgacatcggccctcatcatgctctcgacgcagcgcccagctgggagatgccgtccagctcgcctcatccctcccgtggtgacatccttcccaaaagaaccctgtaatcaccggtgggggcgtctatacc

SEQ ID NO: 568740 - DNA, 104 bp, Homo sapiens
tcaggatcaactgctctcctaatcactcataataatgtagtagtaggaagtctttatattttcctcatgaaatgctcttacatcagtggtcctagctactaaag

SEQ ID NO: 568741 - DNA, 986 bp, Homo sapiens
agccattagtgcaggaaaaggtcccggacagctgagcagccaaggatgtgtgacttcacccgaatacctgaccgcagagttcaagtagggctctttacagactgttttgaccgaacatggtgatggcaagatcctgtagcaagtcctagatgtgatgcgactgctgatcaagggccctgggacaggaaactccttactcaaacttactcgatggtgtctcaagggcctggtgaatccccaaaagtgatggacatgaatgtgaaggtgctggaattgtgcagcacttttcgagctccatgtcttgggttgaacagttggcccatgtaaccaggaccagggcacctagtgagcgattatagtgctgaaagactatcgacgtgtttgacaagtaaggaaatgggcaaccgtcatgggtgctggaaatccgggaatgaacgttggtctacacttgtgctgagaagatgaccagaggaataaatgtagagatgttgggtgtgcagtggccatgagagacttgcaaagtggttgtatcaacgtatgtagagggtaaggaaggtgaatctgtgcttttctccagagaaagtaggtagtttgtgctgcaggtgtagtatagtgtaagtgggctgttctctactacctgaaacgtagaggctccagaaaataagccagggaggcaagagtgcagggggcccagtcccaagccgagctgcaggaagtgggcagggtcagggccgaatacacggaggagaaggaaggggggagaattgatgaaagtgctggtacagcgcatcacaaagtgtagcacgggaaggtcgtcccgaagtgcagaacccgcagccagagttaggctgtcggcacataaaggtgccgcgcgcgggtgaaggaaaacgtggagtgacaccggaagagacgaacacacacaacgaaaaaccaggggtgtgcaccagcagcagcgtaaacaggaccgagaagcagaaaagaagcca

SEQ ID NO: 568742 - DNA, 480 bp, Homo sapiens
tttaaactttatcttgccatcgatttacaacactactatagcacataccctagtatctattcattgggggtttaatgtgaatttcagagatttaattttaatctggtgacatatcgagcgaaaataaggagtaatgtatacctccacatgtcctttctttttgtcttctcttaaattcacaatatccagtaggagtggttattcaatttcttcgtggttttaatcatcaaatgaagttagagaagtatactaatcccagcaactatgactcatctaggcatgttaagaccataaagtaattcaggaaactattttcctgatttttaaataacttttagtcgtatgtaacatctatccttctgttttagacatgcatttcacatatagttgaattctagattctaagataattcattttgggtaatacttcagagtactggatctagaatcaggcttcctgaatttaaactcaggctcccc

SEQ ID NO: 568743 - DNA, 798 bp, Homo sapiens
  misc_feature (746)..(746): n is a, c, g, or t
gtgtctttgccaggtactctcgcctccgccagtggaacaccctctatctgtgtgggacagatgagatatggtacagacaacagagaccaaggactctggaggagaggactaaccccccaggagatctgcgacaagtaccacgatcatccatgctgacatctaccgctggcttctaacattctcgttcgactattctcggtcgcaccaccgagtccacagcagaccaaaatcgcccaggacatctaccagcagtagctgaaacgaggttgtgtgctgcaagatactgtggagcagctgcgatgtgagcactgtgctcgcttcctggcgtgaccgcttcgatggagggcgatgtgtcccttctgtggctatgaggagcgctcggggtgaccagtgtgacaagtgtgtgcaacgctcagtcaatgctgtcgagcttaagaagcctcacatgtatacagtctggcgatcatgcacctgttggtgcagttcgagccaggagctgtattctggacctgacataacgctggagaagcgactgtgaggcagtggtcgcgtgcactgacatgacatggcaaatgattcggaaacctcacatgggacagtttataagctcgtgctggggatccgagcagtggtctccatcgccaacgctcgtggtacacccgagaccaccatatctggagaaatctcgtgcaccgcgtaaagagtgacgaagaaagaggtgtacgcatgtactcgtacagaatgancacgatgggctaacaggaatatctcggcaaatacacaaaacacggatcaagc

SEQ ID NO: 568744 - DNA, 1637 bp, Homo sapiens
tggggcacaaaccctgaccatgaccccccacagtgctgctgccacctgctgctgctgctgctagctctgctgctcgctgccagcccagtgaggctgccttgtgctgctggtgcccgagtgcttgctgtgtgcaatggtgtgatgcatgtgctgggtttgtccagtggtgtgcttgctgttggatgtgagtgagtgattgtgtgtgtgtgtctgcctagcctgatgtggcttgctgctgtgaaggcttgagtggcttgtctaccagtgatgtgtgcatgtgtgtgccatgtgatgttgctgtgcgtgtactcagcaccgccgtaaacacttgctgcccccgagtgcactatgcatgattggccctagtacctgcgccgaatgtgactgcactgcatgtgcgccgtatatagctgtgtggctgtcttggtttagctgtctgggacactgatgttgccttgcatagcaccatataccctgggtcaccctggcgtggctagccattgcattggttgtgcgaaggaggcgcagacataccctaacagggcaagatggtaacacaccccccagaggaccaagtggtcgatcacgttggcctctggcgcgcgagcgagggcagttgttagcacaacgcctgctcagtcagtaccgcagaaatcaacgtcactgttgacaatctcgcaaggtgggcgaacgcccattacttaagcacaagtctggcacatccgttcaccgccaagggcgcgcaagagattccttatggcctggcgggttggctaccccgaaacagagacacccacgccctatggacagaagctttggcgggcgccccccccaatgttggcccctggggtacacaggaaccacaatcatccgtattgggcaaccctatatccaagggctatcgcatgtttggcaacatgcgcgaagcacgccatttccgccaatagcaagcgttatggacgcgagggctaccataacggcgcatgggcatcggttggtgagcgacctgttaccatacacgaagctccacagcgtttcccatgcaacgccgaggttttgggccggcgccgagagagtttatatgggttttcgaacaccgccaagctcttcgcgcatacgcggcctcctgtacgtaaacagcgccctggaggcacaacgaggcatgggtgggtcctgtggttcttggcctccgcaggcagtttaacacgagctgcacccgcatatggttgggggtcgcagcaacccgcgtcggcgactctagacacgggctgtccacccccgatttagagcattgtagggagtttgcggaaatgagatggtggcgaacatcctgggtgcaactttatggaggtagccactatatcgtggatcgccccccactttgtcaccaccaagcggtgggagaacagataccccaaaaggaaaacatcgtagacacgaaacagctggtggacccagatgggccgctcccccataccccactttgtaatccctccccaaagcgtgtagtgtgtgcaatgggtactatagcgcacaggtgcgcgacgtaacaacatgcgcgactaggtaggagagtgtaggagcattacagcactcgtagtaggtgtcgcaatcgtcactctcgagtcgtccctcgt

SEQ ID NO: 568745 - DNA, 560 bp, Homo sapiens
  misc_feature (299)..(299): n is a, c, g, or t
  misc_feature (303)..(303): n is a, c, g, or t
  misc_feature (359)..(359): n is a, c, g, or t
gagatgagcgtctcatgctgttgggagagacagagtgccgcactctcagtctcggtaatcttggagagactctatggtgagtgctgacatacttgaaatggtgtgtggggcgggtctcgcctggtgaccccagctgtgagctcacgttgacgtattgaacaagtcctatgtagtgggcatggaactttacaattaggaccattgtccgatatgtggtggtggactggaagaggaggggccaggggcagctggtccttggtctgtggcttcaaggaaggttctttgcggatcatccgganatgnaattggaatccacgagcatgccagcattgacttaccaggcattcaaggattatggncactgcggtctgaccctaaatcgtgagactgatgacactttggtgctctcttttgtgggccagacaagagttctcatgttaaatggagaggaggtagaagaaaccgaactgatgggtttcgtggatgatcagcagactttcttctgtggcaacgtggctcatcagcagcttatccagatcactccagcaggttgcacaggg

SEQ ID NO: 568746 - DNA, 286 bp, Homo sapiens
gagcaagttgggaacagaatcatttgagcctatagaagagtcaagcctcaggaccttggaagtttggtgtctggggaagagtgtggggcatggaatagggaagggattcctatggacacggctcgggtgcacccagttctcacatgtgcagtcatgccgttctctgatgcatacggccattgcagatgtgaggggccttgccttcctcgggagggagtcaacatgcccaagtcatttgcacctttacctctcagatggatgctcccaggggttagggactggggta

SEQ ID NO: 568747 - DNA, 289 bp, Homo sapiens
gcacacacgtggacatctgcacacactcatacatacatgcacacatgcacactcacatacacatctgcacacatgcatacacacgtgcacatctgcacacacatgcggacatgcatgcaattactgtggccttgtactcctgtggtggctgatgaagccatggatccatggaagtattaagattagggtgaggcctccatgtggcaggttgtctggtgtggagccaaggagatactgagtacctgacctcaattcacttatcccttggtccaagtcacttagtgcaccc

SEQ ID NO: 568748 - DNA, 257 bp, Homo sapiens
atccggtgggcgagtggggcgtgaagccagttctctctgggcacttcaggcttcatgtctattgtaatggaacccacttgtgttgtttcctttcttcttctgcccgcctcgctgcatgcatgcggtgaggtgtcatcaatagcagtgagacaagtacaggctgctgagagctggacaagggtcaccaacgtcgtgcccagcaaagctcagtaaggctaaatgatctattatccctcaatacctgccaccccgtaatg

SEQ ID NO: 568749 - DNA, 543 bp, Homo sapiens
  misc_feature (60)..(60): n is a, c, g, or t
  misc_feature (309)..(309): n is a, c, g, or t
  misc_feature (313)..(313): n is a, c, g, or t
  misc_feature (383)..(384): n is a, c, g, or t
  misc_feature (416)..(416): n is a, c, g, or t
  misc_feature (418)..(418): n is a, c, g, or t
  misc_feature (438)..(438): n is a, c, g, or t
  misc_feature (440)..(440): n is a, c, g, or t
  misc_feature (442)..(442): n is a, c, g, or t
  misc_feature (480)..(480): n is a, c, g, or t
  misc_feature (482)..(482): n is a, c, g, or t
  misc_feature (484)..(484): n is a, c, g, or t
  misc_feature (535)..(535): n is a, c, g, or t
attcatagtgtcttgaaggcagtaaaacttgagggtgtgaagttgaggaaaacatgtggntaaactggacactgtgaatgtaggcgtgagacttcaaaccccggccttgaaagtacttgccacacaccagacaggcataagcattgatgtgtgagagggagatagaacacagtttctcaaagtcaaagtccagcacactcctgttaatggtgtccaggtacgggcagtggcggcttctccggtcctcagaatccactcggccattctttgctcgcacctcccgctcaggctccgagtcctcatcgaccntctntcccgcttcacccgcacaaacgggacaacagaagccggggcctcgcgcgcgctcgccggctcgaactccnnttcacgcgcacagggctgccccgggagctcgncnctcaggtcccgctcccgatncntnttcccttgacgcgaccggagctgccccgcgactcagancntncttcccgcgagtggaaccgcgagactcccgcttagaccggccggacatctnccactacc

SEQ ID NO: 568750 - DNA, 366 bp, Homo sapiens
  misc_feature (13)..(14): n is a, c, g, or t
  misc_feature (48)..(48): n is a, c, g, or t
  misc_feature (83)..(83): n is a, c, g, or t
  misc_feature (317)..(317): n is a, c, g, or t
  misc_feature (366)..(366): n is a, c, g, or t
ccgggtcgcgccnncccaagatggcgtggtccgcgtcggtgcgcggcntagggcagcgggtgctggcctgcagccgggagctncatggcgcctggcacacctgcacacctccactggtctgcgccaagaatcgggcggcgcgagtcccgttggccaaggggaacaagccggtgagctacgaggaggcgcacgccccgcactacatcgcacaccgaaaaggcctggctgtcgctgcacacaggtaacctggatggagaagatcatgctgcagagagaaccctggaggatgttttccttcgaaagtttatgatgggcanctttcccggctgcctggctgaccagattgttctgaagcgccgggccaan

SEQ ID NO: 568751 - DNA, 778 bp, Homo sapiens
cacggtggtctcaacacctgtaatcccagcactttggagtgctgaggcgagttgggatcactaaggtcagatcgagaccatccgtgggctaacatgcggaacccccgtctctactaaaaatctaacaaaaattagccgggtgtaggtggcgggcgctgtagtcccagctacttgggaagctgagcgcagcgacgaatggcatgaaaccctggagggcaggagctttgcagtgaggctgcagattggggccactgcaactccagcctgtgccgaacagaagacaagactctgtctcaaaaaaaatttctaaaggaacaaaacaaaacaaacaaaaaagattaagactttagcggccagtaacggtgggcctcatgccgtgtaattcccagccacttttggcagcccacgggaggtcagatcacctgaaggtcagggagttcagggaccagcctaggccaacagtggttgaaaaccccgggtttctaaccaaaagattccaaaaaaatttagccgggcatgagtggggtgcgaagccatggcaacactccaggaaggttctgaggcgcagcgacgaatccgttgaacttcgggcacacgggagcgttgcagtggaccccaagaatggcaccagtaaattcccagcttgggcaccaggagggaaacttcgttctcaaaaaaaatatgatcgacagacacagacaaagattttggggcatgccactcgaggaagttctaaacacaatctttgggggcgggcccaaaagtaagtaagtgtttc

SEQ ID NO: 568752 - DNA, 137 bp, Homo sapiens
tacgtagggttgtctcctgtaaatagcagagttgtctacaacttctgaattagcatggcagaagcacctcctcctccattgcaagatactggcaagaccgtattctccttgcttccccaacggtgaccggcgacttc

SEQ ID NO: 568753 - DNA, 1470 bp, Homo sapiens
  misc_feature (1112)..(1112): n is a, c, g, or t
gggggtgttgtggtcgttctcgctccggttgtggggtccgctcgttggtggtgtgtgtggtgccgccgatatgttgttcctcgttgttgggtgtgtgtggtcctgcagttgctgtgcgtgcgtggttgtgtggtggtggtggatggtgtggtgttttatcaacgtctttttgtgttgtgggtcgtgctcgtgtcgatgttgtgtaatgtggtgctgcttgtgtgttgtgtgctcctctctactagttattggggggggtggtgtagtgaggtggacgggctggtaggcgagtagttttggtggtgtagctatcgcatcgggagtgttgatgaccgccgcctctttgttgtatagtagtgggaggagagtgtcattatagggggtggtataatataaacaatatgttgccccatcatacaccaagagtgtgttgctaccacctggtggaagaatattttttcgtcgtggggaggaacaccaccaccatagtattatgttcgttagtataggggggaccaccagtgagtagtagtggtggtggtgtgtttttgtgggggggtgttgttggtaggggagtggtggttgaagaagaggaagagaagaagatagtaatattaaagagtggttgttttttttgtgcttctagcaggtgttgtagtgatgctgctgggtggtggagaaataatggtgttcaacggatagttgtgggtggttgttatattacgtgtagtaataatggggagtattatactccacgcttttagtgggggagaggatatatagaatattgttttggttttgatgagacggcgcaatagttgtggtccttcacatcacgcctctgctactatatagtggcgctgcaggagtagtactgtactacaagtgtagtagaacagcggcagaccactcgtgtgtgtgatgatatatatattttattgtgtcactccccacatattttataatatgttaaattatatatattgttaacatataaagagagaataatatataatatatgtgtgtgtgtagagagactatgtgtatttatatatgtgtgatatgtgttgttataacgacgtagagagtaagcatatagtggacactctctnccctgtatagcgtgtggtgagagatatatcatttgtgagcatatatatatatataataggtgcacatacaccgctgtgtgtgtgacgacagcacatcatgtttgttactacacgcccgctctctacagcgtgtaacaccttatagagggcgactctctgagagagtatttctgagaactataaaaatttggacggacacagagttggagtgcacggtgggtgagagaaaatagttactctttctctgggagttttgtataaaggcacaaaatacactttttttccccttggcgacatacctccccgagttttgtgtccccatcctttatttgtaaaaaaaaaagtgggtatggttata

SEQ ID NO: 568754 - DNA, 966 bp, Homo sapiens
acgacagtgaaatctagagtaaaaccaagctgcgccaaggtgtcctgcaggctgtaatgcagtttaatcagagtgccattttttttttgggtccaaatgatttacattatgggaatgtgcccaattttttaaatagtgcaacttaaaactgttttaccacaacgttaacaaaaacaaccaaacaacaaaacaaaacaaacaaacaaaatcacaaacacacacaaacatcacacaacatacagtaacacaaccacacacagacaaaatagcacaacaacaaaacacgaacacacatacaaaacaacacgaacgacaagaaacaacaccaacataccagcaaggaccgcactcgctacacgacgaacagagctacgagaagaaacaacaaacatcgatggttggtgagagaagtcaaactagatagtggagagaggacgacaaccccacgagcgaaggataaatgtaggtaggacaggaagacatggtctgcgtgagacatcatgcgatcaggagcgctgctagcaacacagagagaagtagaacaacgacgcgcggggacacagaaaagtgcgtgtaggccgacaaagaaagcagcccgtgaaagagaagagagaagaagaagagagcggagaagtgacaagacagtgcgcagagcaaaaaacaaggaaagcaagacagaacgtaacgcccacgcgacacgatagaagaaacagcacagagcgccagcgacgaagaacaaacagcgcgacccacacgacgccgcacccgtacgaccaagcgaaccgccgaagcagccagcacacagcaacaaacgccgacaccagcaggtcacgaccacaccagcacacgacacaatccgagatctccgccagcgaccacgtgcacataagactactgcacggagcgacgcgaccaacaccgaagacacgctacgatcgaacgcatcgacccacgctccccgtcagc

SEQ ID NO: 568755 - DNA, 492 bp, Homo sapiens
  misc_feature (1)..(1): n is a, c, g, or t
  misc_feature (72)..(73): n is a, c, g, or t
  misc_feature (75)..(75): n is a, c, g, or t
  misc_feature (77)..(77): n is a, c, g, or t
  misc_feature (79)..(79): n is a, c, g, or t
  misc_feature (83)..(83): n is a, c, g, or t
  misc_feature (95)..(95): n is a, c, g, or t
  misc_feature (99)..(100): n is a, c, g, or t
  misc_feature (106)..(107): n is a, c, g, or t
  misc_feature (112)..(112): n is a, c, g, or t
  misc_feature (116)..(117): n is a, c, g, or t
  misc_feature (157)..(157): n is a, c, g, or t
  misc_feature (164)..(164): n is a, c, g, or t
  misc_feature (186)..(186): n is a, c, g, or t
  misc_feature (239)..(240): n is a, c, g, or t
  misc_feature (257)..(258): n is a, c, g, or t
  misc_feature (264)..(264): n is a, c, g, or t
  misc_feature (306)..(306): n is a, c, g, or t
  misc_feature (412)..(412): n is a, c, g, or t
  misc_feature (421)..(421): n is a, c, g, or t
  misc_feature (457)..(457): n is a, c, g, or t
ntcgtaccttccgcagtcccccaaggaaggtcacatcatccaccccaaaagtaagggcagctggccccattnntngnanaggnaggggttggggnatgnngaggtnnagggngtgnnattgaactgggacaaagggaacagataaggaacgttaggngttaggngatcccatacactgtgggatcnagaaagggctgggctttccttcctgagttgggggatttggggacagggtcttnntggtcaggggccaaacnntagcanggccggcagcaggctcagcagcagcccggcacccagcagggngacgcttgcccgcagcccgccatcggccgcactgaaattgcacagaaagctctggcagcagctgatgcccatggaagccacaccaacattgacgccttctgggatngggcaggcnggggaacaggtcttgctcaggctgtggccaaatgtnacgagattcccaatgccggcactagcagacacagt

SEQ ID NO: 568756 - DNA, 977 bp, Homo sapiens
agcggcttggcccctctgtagggaaagagggtccgccatgttccccggcggcgccgcgcttggctctggtagccgccggcgaagatgaggagactgtaagaggggccaagccgcctgtcgagaaagtacagtagcctcggacggactgtgtgcgctgcatgccactaaacaccgtactccctgtactgctcgctaccgaccggtttgtggccggccgggcccacccgagcggaggggaagcacacaacagacgcccaatacatgggctgctataacaacaagcaccgctggagaaaatagaaaagaagagaaaaatatattcaaaagcagaaaaataaagagaaataaacattagagagcaaaaatagaaaaagaaataaaagagaaaatcaaaaataaataaacaagaaagaaaggaaaaaaaagataagattaaaaaaaagaaaaaaaaaaaaaaaaaaaaaagtgacaaaaagaaagaaaaaaaaaaagaaaaagagaggacacaacaatacacaacagagaacaaaaaaaaaaagagtaacaacaagcaaaacataagaggaaaaagccatgaacagacagaacaagagaaaaaagagatacacaggagacacaacaaccacaagcagaacagagaaacacaacgaaaaagaaaaaagaaagcaaacaacaaaaacaaaacacaaaagaacaccacaaacaagcagagaagacagacaacaacaaatgaacagaaacagaaaaaacgcaaaaaagcacaaagaagatgagggacaaagaaacaacgtataaccaaagattaagaaagaaaacgagaggcaaaaaaaacgccacagaaagcaccacacacaaccgagaggaaacaacacgatggggggacagataaacaacaaaaaagagacgtggggaagcacatagaagcaagcaggcagagaaaacgaacaccaacaaacagacgtcgacaaaaacacata

SEQ ID NO: 568757 - DNA, 776 bp, Homo sapiens
cacagaactgcagtcttgttcttcccttggatcatgacaaataagtctcacacagtgccgtaatacttgtagattctttatgtaatctttgtaatcttaataagggcattatgagaagacgactccatgtttttttaactaccttcaacacacacttgggactgtaaccaactgaactgtcacactgtacggaactggtgcgtttccgttcttaacgcgaactaacgcatgttggggacacagactgactgaacacatgtactacctgaacagttactacaccttccataggcaaatgggacttactgtcttgcaagcactacgtcctcatgcttaataaactgactgaaatcgtagaaattacacctaggaactgagctaggccaaattgccactttcgtctagagagttctcggaggctactacctgacggggacagagccttaacaactacttccaaacagtatttcggacattgaccgacttggtaactagtgaacgaacatcaaagttgggtactttcaatgtgccaagtttggcgtgaactaggttcggtttgcctctttcataacaatgtaaacacaatggtgtaagttcaacttaaattctgggtggataaggagcaggactgattactatgtcttgcccttcgcccttagtctattttcagaaccaaataacagacacatgtgtcatgtgtgaactgtatctgccatttccagcacatcttctatgaacactgtattccactgccttgcttttacccttctttccct

SEQ ID NO: 568758 - DNA, 149 bp, Homo sapiens
caaacacacgttgcacacgcaagcacccaccatgacaacacgcatgcacagcacacatgaacacagcacacacacaaacacacaacacaacatacccccacaggcgtgaccgctccgcttactgagctccgttactgaccgcttactga

SEQ ID NO: 568759 - DNA, 614 bp, Homo sapiens
gcacgagcagcaacatatgtctaggcctcctctgtgccagccctgtgggaaagcagagcccccaccatggcccctggctccttcctagggcctagctgccatcagcctgatgtgcagcagcctttgcagcggtgctgacaccagtttacaaggccctgagaggggtccctgcccttcgggaggttacaaggcaggaatccattaacagaatcagttaacaatgatttctccttttaacactccagacaggtgggcaagtctcctttctccacccagtggaggcctttagaaaccactaggcattctccatctatgaaaaataaaacccagattctagctgtaaacagttttaggtagtgcccattctttttccccccacatcaaacgagtaaagtgcatcgttgtaacaaggtttgagggccatctcatgcacgttggaaacccacatttatgaagcacaaaaggatcaggcggtgcccattctattcagaggaacctagattcagactaattgtatggacgaaaacctgttcctttggctcctgcctttccttcctttcattcaaagcctacagatctcttctcagaggagatttagttacaaatgaaaggca

SEQ ID NO: 568760 - DNA, 361 bp, Homo sapiens
atctttctagaaatagaacatgcattcactgtagatgtatggatatgtcactgagtactgtattcagtccattggtttatgtgtactgcttatatgccagaatcatgctgtattggttactataactctttagtctaattagacgtctgcatactgtgattcttccagtttagaccttactgctatagtatagtattagggaattctggacactttagtagtaccgtgtaagtataaggattgtcttaactatttctgtgagaagtgtcattgggataaaagatagggattgcattgaatctaatagattgcttaggatagtatggacagtaaaacaatattgattcttccagtccatgaa

SEQ ID NO: 568761 - DNA, 397 bp, Homo sapiens
ttatttaatgccactatgctctccaaaatatctactacactatcacttctcataaacatgcaccaagccggctgtggtggctcacccctataatcccagcacttggggaggccgaggcgggtggatcacctaaaggtcaggagttccagaccagcctggccaacatggtaaaaccccaactctacaattagccgggtgtggtggcacaagcctgtagtcccaggtacttgggaggctgagacaggagaactgcttgaacccgggaggcggaggctgcagtaagccacgatcacaccactacactccagcgtgggttgaacagaacaactctgtctcaaaaacaaaacaaaaaagcaaaaatatagaccaggtgagtctcattttggcatactgttgc

SEQ ID NO: 568762 - DNA, 259 bp, Homo sapiens
tagaggatccccctcgcggtctcataggatatctacaacttgcaggctgacaactctgctgatgtctggctgtacatcagaataaaaaaatcgaatggactatgccctgaacatgctcttacaaagatgtaactagaaagacttatcgaatggaccctatagggactcctacttttccacgtgtgagatcgtacagggaagcctaaaagaatgatctagcagtactgtagacagaagcatggactatgtggctggtacg

SEQ ID NO: 568763 - DNA, 289 bp, Homo sapiens
gggcctttactgagcaagcaccttccacctccttgggtgaaaccaggagagattgcttgtttcacttgtacaatgcaggaacggtggcatggggtggcgcgaaacttgcgagttcgcgaaggtggctaatctttgattctatgtttcttgatcctcctggccactccagtacctgtggtgatgtgcaggtagagcactactgtatagacaatccttggtgtcccatctacacccagtcttgtggggatccatctaggagttcgagcctggctaggcgggtcatagcgtt

SEQ ID NO: 568764 - DNA, 436 bp, Homo sapiens
cgcttatattgtacaatgttaaacttcaattcctgtaacctggttagtattaatgtcagtgactaaaaaacttagagttagttttagggcactttttattttgagagcatgaagtgtggaatgtgtcactacgattgttgataaagctgaggccacttgcaacctgattttttaaatgaaatagataaagtctttttgaataatatagtatccactgctatttgcctgattatgtaatgtcaaaagtttaaccatcttccaagtacaaaaacatcctggattccattgaggctcttcaacagcattcatgatgcacttcttctggtttggggcacgtctaccccagtacagcaatgtcgctacaactagcccaataaaactctacttcaaatctaaaaaaacacaacaacaaaacaaaaaaaacacaacacaaaac

SEQ ID NO: 568765 - DNA, 122 bp, Homo sapiens
cccccccaagtggaatcctagtcatctttctatactagctactttcattgtttgctttctagaaaacagcattacattccaatgataacttggatctgcatttagaacaagaaccattattt

SEQ ID NO: 568766 - DNA, 449 bp, Homo sapiens
  misc_feature (444)..(449): n is a, c, g, or t
acttaataaaatcaggatacagattcttttcagtcaaacatgttcattcaccaagatagacaatatcttagttcatagaacaaattcgacaagtttgtaataattgaagtcatacaaaggatattctaaccataatggaaacaaattaaaaatcactaacaagaaaaaaagaaaacaagaaaacctgaaaaattaacccactactaaatgatctgtgtcaaagaggaaactgtaagagaaataaaagctatatcaaaatgaatttaaatgaaaatatattaaaatttgtgggatactgcaaaagcattgttgaaagggaaatgtatgctttaagtcctaataataggaaaaaaagcaaggtttcaaatcaatgattgcagctcctgctctactgtaagaaactaaaaaaggactccagcctggacatcacagtgagactctgtnnnnnn

SEQ ID NO: 568767 - DNA, 301 bp, Homo sapiens
  misc_feature (164)..(164): n is a, c, g, or t
  misc_feature (195)..(195): n is a, c, g, or t
  misc_feature (284)..(284): n is a, c, g, or t
gtgcgcggtgattctagaggatcccggactggagatgtctgatgtgaagcgaaggagtgcagttaggcctctccctttatgaaggacaccacagcacaactaaaactcacaaaggctgatcattatgctctattccatcttattttattttagatgatgggggntctcattctgtcacccagtgctgtagtacangtggcataatgcatggcttctgctacagccctgtgaactcctgtggctcacagccgatccttcccacctcagactatctccagtccggngtaccgacgctcgaaat

SEQ ID NO: 568768 - DNA, 294 bp, Homo sapiens
tgttccctttgtctctactaaaaatacaaaattagccaggcatggtggtgcatgcctgtaatcccagctactggggaggcagcggcacaagaattgcttgaacccgggaggcggaggttgctgtgagccaagattgggccaccgcactccagcctggatgacagagtaagaatctgtctcaaagaaaaaatatatgtgtatatatatagtattaccacccaaggagattattacacagaccactaaaaacaaaaagaaaaacaaaagacaaccataggtaaccgttgaggccat

SEQ ID NO: 568769 - DNA, 490 bp, Homo sapiens
tactatggattagttactgagggagaagggaaagctcataataaatgtaaaaggaagaattacacaatcatttgacgatcgcagaaatgactgattcaggcacggatcatcaatggatgttaaaactagagagtatagccaggcacagtggcatgtgcctgtagtcccagctactcacgaggctgaggtgggaggactgcttgagcccaggggttcaaggccagcttaggcaacatagtgagacccccgtcacttaaaaaataaaaacactaaggccgggcgcagaggctcaggcctgtaatcccagcacttggggaggctgaggcgggcggatcacaaggtcaggagattgagaccatcccagctaacacggtgaaaccccgtctctactaaaaatacaaacaacaatttagccgggcgtggagatgggcgcctgtagtccaagctactcgggaggctgaggcaggagattggcgtgaacccaggtgtt

SEQ ID NO: 568770 - DNA, 389 bp, Homo sapiens
  misc_feature (221)..(222): n is a, c, g, or t
  misc_feature (236)..(236): n is a, c, g, or t
  misc_feature (240)..(240): n is a, c, g, or t
  misc_feature (331)..(331): n is a, c, g, or t
  misc_feature (358)..(358): n is a, c, g, or t
cgaacgatgaaaggaatcgggagcgttgccatttcctgttgggccatgcatgggatcctgcacgagaacgatgaaacagggcatgcctgtgacagctcgctgtggtgtttgtttgtaggtcctgataggaatctgcagcattctatcctctacccagctaccagtggcaggaagctttgatgaaattctcatgggtagtcatctctctccagctgacagcnnaaaaaagggtgcancccngttgattggaaggatggggatagtgtgatggtccttccaaccatccctgaagaagaagccaaaaaacttttcccgaaaggagtcttcaccnaagagctcccatctggcagaaatactncgctacacaccccagcctaagtctctaacga

SEQ ID NO: 568771 - DNA, 122 bp, Homo sapiens
ctgcctccagttctttctctgcccttgcccatctctctttcccctcaggcaagatagacgatggatggagtcagactgaaaggacaggcatcttgatctccagcaggcatggcgggccagtg

SEQ ID NO: 568772 - DNA, 350 bp, Homo sapiens
ggtactcctcccatgtcagttccagccctacctaacgccccacagacctttgctttctggcctctcatttgagtatctccagtccgtctcagaccgaaagtgtggagatcaagtattctgtctattacacagctcgggaggccaaaaagagtttgagcaacttgcctttagtacctccgcgttccagagtctgaaacagaagccaggtttcctgatttctggcctgaggataaccttattctctgcctttagacgcaagactgctgcctcttcgtcacctttctgagaagagccatcacatttccatcccctcctctcttctctgtacatctcgttcacttcacttgtaa

SEQ ID NO: 568773 - DNA, 210 bp, Homo sapiens
atgggcgatctcatgcaggatccccccgtaaatgtagatactgtgtttcatatatctatatttttaaaaattggtttaacgtccacagttcctggtttagtaactcccatagccctttgtgttagtctgtcttgagactgggtaatttgtaaagaaaagtggctttattgcgtgctcatgagttctgcacgtgcctatagagctaagcat

SEQ ID NO: 568774 - DNA, 389 bp, Homo sapiens
  misc_feature (358)..(358): n is a, c, g, or t
ctgtagtcccagctactcgagaggctgatgcaggagaattgcttgaacctgggaagcagaagttgcagtgggccgatgttgcaccaccgcactccagcctgggtgacagagtgagactacatctctggatttacaccaacgaattattttattatgcccaataagcttaacacattcaatgtccactcatgtgcctacgagccagctgagaaagcattaaatgtgaagtcattatactgaggcatctgggccctgaattacaagattccttccctcctccagaaatgacgagcacttataatcatgcactgagtgcttctatacttctgtgcaatcaactcataacaagtgtccctgntcattttgatgcgttgggctggattgcactt

SEQ ID NO: 568775 - DNA, 900 bp, Homo sapiens
ccttaaaagtccattttctccccccttaaaagagtttggtccacaacccccacccaactgttcgacgcgaccttacaaaacccgtgaacattttcagtcccccccgtgtcagcccccacatatgtgggcccccaccagattttgacgtaaccaccacgaccttgcgtaagacgagaacacagctctgaatataaagagctgcgcgtataaaagtttttgaaaaccaagcaatagtaccaacaccgtgacgtctttaaagacgacttctcacgggggaaccccacagctctctctggtttaataaaattaattagaccgcgccacatttcccacatatcctcccgtatcaatatagtgcgttcacacatatcttgcggaacccctcttgcaaaagattgtagcaacctaccatagagagggtattctgaaaactaaaagtcatgctaatatgtctatataaaacagccccttgattcactccattgtctctctctcatcttgaaaactgtcgacgccttacccccctacactttatattttttgaccacccctcttctactttatctgcaaacaaattgaaagacctccgacaatcattcaagagtatagaattacttagttgaggaatttcccattgagattttctctgtacaatgtgacaaagacttcttatagaacatatattggttgcaactctggcgaatttcaatagaatttctggcatgaaaaaaccaaccgccatgttgtgtaaaatgggaagcccaagcttttctctccaacaacccccggttcttaataagcataatgagtcgtgtggtgctattcttttctaataaacccccccccctcccttttttggtaaatacaaaacccccaaccccaaatatcccgccacaaaaa

SEQ ID NO: 568776 - DNA, 691 bp, Homo sapiens
  misc_feature (688)..(688): n is a, c, g, or t
ggcacgagcggtaacataggcgcgggcggcgtgtccttgggctagagcgcgggacgtctgtcttcgagtccgaacgttcgtggtgttgaccagcccggaacgaattaaaaatgggtgatgttgaaaaaggcaagaagatttttgttcagaagtgtgcccagtgccacactgtggaaaagggaggcaagcataagactggaccaaatctccacggtctgttcgggcggaagacaggccaggctgctggattctcttacacagatgccaacaagaacaaaggcatcacctggggagaggataccctgatggagtatttggagaatcccaaaaagtacatccctggaacaaaaatgatcttcgctggaattaagaagaagggagaaagggcagacctaatagcttatcttaaaaaggctactaatgagtaattccactgccttatttattacaaaacaaatgtctcatggcttttaatgtacaccataatttaattcacacaccaaattcagatcatgaatggctagcaatgtttttgttggacagtcctgatttaagtaaaactgacttgtcataaagtgggtacggtctttattaaagcacagttccagttgtatacatgctaccacggctctccctttctccaagataagattggacttaattagccatggtttactttccataatanggg

SEQ ID NO: 568777 - DNA, 1036 bp, Homo sapiens
  misc_feature (5)..(5): n is a, c, g, or t
  misc_feature (49)..(49): n is a, c, g, or t
tggtngcatttacaccggtacttaagcgcggaccgggtgtccttggacntgagagagtggggacgtccggcttcggagcgggagtgttcgttgtgccagcgactaaaaagagaattaaatatgggtgatgttgagaaaggcaagaagatttttattatgaagtgttcccagtgccacaccgttgaaaagggaggcaagcacaagactgggccaaatctccatggtctctttgggcggaagacaggtcaggcccctggatactcttacacagccgccaataagaacaaaggcatcatctggggagaggatacactgatggagtatttggagaatcccaagaagtacatccctggaacaaaaatgatctttgtcggcattaagaagaaggaagaaagggcagacttaatagcttatctcaaaaaagctactaatgagtaataattggccactgccttatttattacaaaacagaaatgtctcatgacttttttatgtgtaccatcctttaatagatctcatacaccagaattcagatcatgaatgactgacagaatattttgttgggcagtcctgatttaaaactaagactggcttgtggttaaatgaatatgttcagtttttgaattttaatagtaactccaattcagtaaatggtatcactgtttaccccttttaaagatatgattagacttcgttagtaatgttcaacttttcacaaagatggtgagtgccatcttaaaacttactggagattggtttatatttagatttatataactggttatgtgaatatatttaaatactggggaaattgcttcactgtcttagaaccaagcaagattcacctgtgttttgtgttcatgttcatttgcctcttaaaggcaagggttgaagataaataaggtagcaatgtctatagttttggccttaactatgccaatctaattataattccctgtatttaaaatggtttcttttacttattgaaaggcattttagtgtggtttatgtgtaatattaaagattattcaacacc

SEQ ID NO: 568778 - DNA, 982 bp, Homo sapiens
  misc_feature (5)..(5): n is a, c, g, or t
  misc_feature (49)..(49): n is a, c, g, or t
tggtngcatttacaccggtacttaagcgcggaccgggtgtccttggacntgagagagtggggacgtccggcttcggagcgggagtgttcgttgtgccagcgactaaaaagagaattaaatatgggtgatgttgagaaaggcaagaagaaattaaaaagagggataactgggatgacgatgatgatgaaaaaaaagaggaagcagaagtaaaaccagaggtaaaaatttcagaaaagaaaaaaaatagcagagaagataaaagagaaagaacggcaccagaagaaaaggcaagaagacatcacaaggagggatacctgggatgacgatgatgatgaccaaaaaagaggagcagatgtaaaacccagagcttaacaatttcagaaacgacacaaattcgcagcagaagacccacagccgacccgaccggcaccacgacgcaccggcccagcaagaccctccccacacagagggactcactggatgccgatgactgatgaccccaccccgaggccgcccgaagtaacaaccccgaggtacacatttcagaacacgacaacccacttcgcggagaagcatacacgacgaccagacacggaacccgcaaccaacgcccccgacgcaccttcaaccgcacgcctccctgggcactgacgacggctgcccggcccacccacgcacgcgacgcaggcaggcaaacaccccgaggtagacacctccctggaaaccaaacaacaatccgccgcggcagataacagagacactaaccgacacacagaccgggcccgaggacccaacacagcaggcatcacgggcagctcgcgcgaccaaacgaaggctaccccagtaaccagaggcacctccaacaccccccgtcgccatacaccacacgccacccacagcgccccacaccaggacacgccgcgcagacacacgaccccgaccacggacccaccagcggcaacacaaacgccgcgcacagcgc

SEQ ID NO: 568779 - DNA, 778 bp, Homo sapiens
gaaacaggcatgcgcgagaatggaggccgctcgtgccgatctatgggagcatcggttgacgggcctgtacgacgtggctaggctttcaagttggggacttcgtgctgaagagcgggctttcctcccccatctacagtcgatctgcggggctatcgcgtctcgagcgcgtcttctgagtcaggaactaagcgtcttgtagaaggacactattagtccaggagaaacctgtgtaatcattgaagatgttgtcaccaggggatctagtgtgtggaaactgtggaggttcttcagaaggagggcttgaaggtcaggtgatgccgaatagtgctgttggacaggagagcggggaggcaaggaccaagttgcaggcgcacgggatccgactccactcagtgtgtacattgtccgaaatgctggagattctcgagcagcctgcatagcaaagtcgatgctgagacagtttgggagagtgaagaggttattcaggagaagtgtctttgtggcagcgaatcataatggttctcccctttctatacaggaatgcgcccaaagaactcaggttcggtgcacgtgcagtagtctggccaggatccagccagtttgcctcgaagcttctcaggcttatgcgggcggaaagggaccaagtgtgtgtctatcctgtggatgtttcactggccacgagagcttgtggctgcttaaggcagatgctttagcgacctagttattcgggttgctgaagacttccgtgtagatgattggagtggtttacctcgatggg

SEQ ID NO: 568780 - DNA, 511 bp, Homo sapiens
agccaagtgttttaataaagtgattatcacttgtcagaaccaggcacagtggctcacacctgtaatcccagcactttgggggctgacgtgggaggatcacttgagcccaggaggtcgaggctgcagtgaactatgattgtgccactgcgctctaccctgggcaacaaagcaagaccctttctcaaagacaaagaacagtgaattgtccaattaaaaaatgggcagggggctgggtgtggtcgctcacacctgtaatcccagaactttgggaggccgaggcgggtggattacaaggtcaagagatcaagaccatcctggctaacacggtgaaaccccatctctactaaaaatacaaaaagtagccgggcgtggtgatgggcgcctgtagtcccagctactcaggaggctgaggccggagaatggcgtgaacccgggaggcggagcttgcagtgagccgagatcgtgccactgcactccagcctgggcaacagacagtgcgagactccatctc

SEQ ID NO: 568781 - DNA, 1304 bp, Homo sapiens
  misc_feature (5)..(5): n is a, c, g, or t
  misc_feature (49)..(49): n is a, c, g, or t
tggtngcatttacaccggtacttaagcgcggaccgggtgtccttggacntgagagagtggggacgtccggcttcggagcgggagtgttcgttgtgccagcgactaaaaagagaattaaatatgggtgatgttgagaaaggcaagaagatttttattatgaagtgttcccagtgccacaccgttgaaaagggaggcaagcacaagactgggccaaatctccatggtctctttgggcggaagacaggtcaggcccctggatactcttacacagccgccaataagaacaaaggcatcatctggggagaggatacactgatggagtatttggagaatcccaagaagtacatccctggaacaaaaatgatctttgtcggcattaagaagaaggaagaaagggcagacttaatagcttatctcaaaaaagctactaatgagtaataattggccactgccttatttattacaaaacagaaatgtctcatgacttttttatgtgtaccatcctttaatagatctcatacaccagaattcagatcatgaatgactgacagaatattttgttgggcagtcctgatttaaaactaagactggcttgtggttaaatgaatatgttcagtttttgaattttaatagtaactccaattcagtaaatggtatcactgtttaccccttttaaagatatgattagacttcgttagtaatgttcaacttttcacaaagatggtgagtgccatcttaaaacttactggagattggtttatatttagatttatataactggttatgtgaatatatttaaatactggggaaattgcttcactgtcttagaaccaagcaagattcacctgtgttttgtgttcatgttcatttgcctcttaaaggcaagggttgaagataaataaggtagcaatgtctatagttttggccttaactatgccaatctaattataattccctgtatttaaaatggtttcttttacttattgaaaggcattttagtgtggtttatgtgtaatattaaagattattcaacacctctcacatcttacagatctataaggtcacatgcttttaaaatagtagcaagttaaacttcactcttgaattctttacaatctaagtcaaactaagttataatttaggattgtctttaaacagccattcagaaacaaaactgtagaactgtgtatttgattgggaatggtgcttttgccaacttaaaaggattaaagtaacggagatatacacaaattttaaaattatgtgtgatcacaagactaaagataattaaaaagaaaaccaca

SEQ ID NO: 568782 - DNA, 1821 bp, Homo sapiens
  misc_feature (5)..(5): n is a, c, g, or t
  misc_feature (49)..(49): n is a, c, g, or t
tggtngcatttacaccggtacttaagcgcggaccgggtgtccttggacntgagagagtggggacgtccggcttcggagcgggagtgttcgttgtgccagcgactaaaaagagaattaaatatgggtgatgttgagaaaggcaagaagatttttattatgaagtgttcccagtgccacaccgttgaaaagggaggcaagcacaagactgggccaaatctccatggtctctttgggcggaagacaggtcaggcccctggatactcttacacagccgccaataagaacaaaggcatcatctggggagaggatacactgatggagtatttggagaatcccaagaagtacatccctggaacaaaaatgatctttgtcggcattaagaagaaggaagaaagggcagacttaatagcttatctcaaaaaagctactaatgagtaataattggccactgccttatttattacaaaacagaaatgtctcatgacttttttatgtgtaccatcctttaatagatctcatacaccagaattcagatcatgaatgactgacagaatattttgttgggcagtcctgatttaaaactaagactggcttgtggttaaatgaatatgttcagtttttgaattttaatagtaactccaattcagtaaatggtatcactgtttaccccttttaaagatatgattagacttcgttagtaatgttcaacttttcacaaagatggtgagtgccatcttaaaacttactggagattggtttatatttagatttatataactggttatgtgaatatatttaaatactggggaaattgcttcactgtcttagaaccaagcaagattcacctgtgttttgtgttcatgttcatttgcctcttaaaggcaagggttgaagataaataaggtagcaatgtctatagttttggccttaactatgccaatctaattataattccctgtatttaaaatggtttcttttacttattgaaaggcattttagtgtggtttatgtgtaatattaaagattattcaacacctctcacatcttacagatctataaggtcacatgcttttaaaatagtagcaagttaaacttcactcttgaattctttacaatctaagtcaaactaagttataatttaggattgtctttaaacagccattcagaaacaaaactgtagaactgtgtatttgattgggaatggtgcttttgccaacttaaaaggattaaagtaacggagatatacacaaattttaaaattatgtgtgatcacaagactaaagataattaaaaagaaaaccacaaaaaaaaaaaaaaacacaacaccaccccaccaaacaaagcgggggggcaccaccatcaaagagtacccccacgcaaggcggccccacactaaacggaaataccccacacattactcgtcggaaccaacgggagatcaccaaaaagaggaacgcccaaacaccaaaagcagaagcacagtgtgagcagcgcaggttacaacacacgcgtccgccgacacgcggaccaaaaccgtgcacacacgaggaaaaccacggcgcaccaggaaacccccataccaccgcgcgaccgaggagcgacaacaacaccggcggcacaaaacacccacacagacacacaccactaacaagagcccactcaatgccaaaaacccatacaacaacccccaccaccgcgaatacaaccagcgtctcacccgcaccccgcgcaagaggacactgccaccgcgtagaaaaactcggcgaccacgccgcgatctacctgacgaccaccctatagtccagggcaagccccaccacc

SEQ ID NO: 568783 - DNA, 439 bp, Homo sapiens
gcactggacaaggccctctgggctcttctgagtcgaagtgttatgtctcgccttttttcgtgggtgggtaagactgatgctgctgtctgggacgtgacttccccacatatccccaacagatcattacatccactgtcagtcacttcttgtcgtctaccaattcccttccccccacttaccactcaagttatgaaaacagtgagtcatcgtttgatcgtctgtgatcccaatttgcctaagactatacactgtccggaatatggatcctgtcacaagaggcttcacaaagtaaagggaccatgtgtgtttctaggttgttgtgcttttcaacagtctgtctcatttcaactattgtaacaatgaccgtttcttttagtttcttgataaccttgttgtctactttgtttcctgattaccttgttgtctacttcgttgcctg

SEQ ID NO: 568784 - DNA, 1385 bp, Homo sapiens
  misc_feature (5)..(5): n is a, c, g, or t
  misc_feature (49)..(49): n is a, c, g, or t
  misc_feature (1154)..(1154): n is a, c, g, or t
  misc_feature (1166)..(1166): n is a, c, g, or t
  misc_feature (1178)..(1178): n is a, c, g, or t
  misc_feature (1181)..(1181): n is a, c, g, or t
tggtngcatttacaccggtacttaagcgcggaccgggtgtccttggacntgagagagtggggacgtccggcttcggagcgggagtgttcgttgtgccagcgactaaaaagagaattaaatatgggtgatgttgagaaaggcaagaagatttttattatgaagtgttcccagtgccacaccgttgaaaagggaggcaagcacaagactgggccaaatctccatggtctctttgggcggaagacaggtcaggcccctggatactcttacacagccgccaataagaacaaaggcatcatctggggagaggatacactgatggagtatttggagaatcccaagaagtacatccctggaacaaaaatgatctttgtcggcattaagaagaaggaagaaagggcagacttaatagcttatctcaaaaaagctactaatgagtaataattggccactgccttatttattacaaaacagaaatgtctcatgacttttttatgtgtaccatcctttaatagatctcatacaccagaattcagatcatgaatgactgacagaatattttgttgggcagtcctgatttaaaactaagactggcttgtggttaaatgaatatgttcagtttttgaattttaatagtaactccaattcagtaaatggtatcactgtttaccccttttaaagatatgattagacttcgttagtaatgttcaacttttcacaaagatggtgagtgccatcttaaaacttactggagattggtttatatttagatttatataactggttatgtgaatatatttaaatactggggaaattgcttcactgtcttagaaccaagcaagattcacctgtgttttgtgttcatgttcatttgcctcttaaaggcaagggttgaagataaataaggtagcaatgtctatagttttggccttaactatgccaatctaattataattccctgtatttaaaatggtttcttttacttattgaaaggcattttagtgtggtttatgtgtaatattaaagattattcaacacctctcacatcttacagatctataaggtcacatgcttttaaaatagtagcaagttaaacttcactcttgaattctttacaatctaagtcaaactaagttataatttaggattgtctttanacagttctacanttttgtttctgnatngctgtttaaagaccatcctaaattataacttagtttgacttaggattgtctttaacagccattcagaaacaaaactgtagaactgtgtatttgattgggaatggtgcttttgccaacttaaaaggattaaagtaacggagatatacacaaattttaaaattatgtgtgatcacaagactaaagataattaaaaagaaaaccaca

SEQ ID NO: 568785 - DNA, 1319 bp, Homo sapiens
  misc_feature (239)..(239): n is a, c, g, or t
gaagcatagcatatgagcgatgctgctggggttgcgcgcgcccaggtgtgctaagtgaccatggtctatagacatgtaactctagtatgagtcctgtgtcatgactaggtcgctgtgagattctcacttccaatgaaagatagattgcccggtggcacaccgatgcggtacatggagacggcatcgcagatgaatgggcgtgaagagtcattcactgggctctattgagagcaggagangatccagagtcagaggcctccgtgagttactcttatagacagggccggcctgaataagaacaaaggcatcatctggggagaggatacactgatggagtatttggagaatcccaagaagtacatccctggaacaaaaatgatctttgtcggcattaagaagaaggaagaaagggcagacttaatagcttatctcaaaaaagctactaatgagtaataattggccactgccttatttattacaaaacagaaatgtctcatgacttttttatgtgtaccatcctttaatagatctcatacaccagaattcagatcatgaatgactgacagaatattttgttgggcagtcctgatttaaaactaagactggcttgtggttaaatgaatatgttcagtttttgaattttaatagtaactccaattcagtaaatggtatcactgtttaccccttttaaagatatgattagacttcgttagtaatgttcaacttttcacaaagatggtgagtgccatcttaaaacttactggagattggtttatatttagatttatataactggttatgtgaatatatttaaatactggggaaattgcttcactgtcttagaaccaagcaagattcacctgtgttttgtgttcatgttcatttgcctcttaaaggcaagggttgaagataaataaggtagcaatgtctatagttttggccttaactatgccaatctaattataattccctgtatttaaaatggtttcttttacttattgaaaggcattttagtgtggtttatgtgtaatattaaagattattcaacacctctcacatcttacagatctataaggtcacatgcttttaaaatagtagcaagttaaacttcactcttgaattctttacaatctaagtcaaactaagttataatttaggattgtctttaaacagccattcagaaacaaaactgtagaactgtgtatttgattgggaatggtgcttttgccaacttaaaaggattaaagtaacggagatatacacaaattttaaaattatgtgtgatcacaagactaaagataattaaaaagaaaaccaca

SEQ ID NO: 568786 - DNA, 1386 bp, Homo sapiens
  misc_feature (5)..(5): n is a, c, g, or t
  misc_feature (49)..(49): n is a, c, g, or t
  misc_feature (209)..(209): n is a, c, g, or t
tggtngcatttacaccggtacttaagcgcggaccgggtgtccttggacntgagagagtggggacgtccggcttcggagcgggagtgttcgttgtgccagcgactaaaaagagaattaaatatgggtgatgttgagaaaaggaataggaagagattctctcattcatgaacgttgttcactcacgatgccaatcacgcgtgtgaataagngggacggcagatgcactagatgacttggaggcataaatctcgcgatggtcgtcgtgttagggcaagataggacaggagtcacggcgcccgtgggatagctcgttacagcagctcggcatactaagaacaagagaggctactcagtcctgggggagagggatacgacgtagatggatgtactgtggcagcaatcccagaggaagctacatcgcctgtgatactaaaaatgaatactttgtagtgtcggcattaagaagaaggaagaaagggcagacttaatagcttatctcaaaaaagctactaatgagtaataattggccactgccttatttattacaaaacagaaatgtctcatgacttttttatgtgtaccatcctttaatagatctcatacaccagaattcagatcatgaatgactgacagaatattttgttgggcagtcctgatttaaaactaagactggcttgtggttaaatgaatatgttcagtttttgaattttaatagtaactccaattcagtaaatggtatcactgtttaccccttttaaagatatgattagacttcgttagtaatgttcaacttttcacaaagatggtgagtgccatcttaaaacttactggagattggtttatatttagatttatataactggttatgtgaatatatttaaatactggggaaattgcttcactgtcttagaaccaagcaagattcacctgtgttttgtgttcatgttcatttgcctcttaaaggcaagggttgaagataaataaggtagcaatgtctatagttttggccttaactatgccaatctaattataattccctgtatttaaaatggtttcttttacttattgaaaggcattttagtgtggtttatgtgtaatattaaagattattcaacacctctcacatcttacagatctataaggtcacatgcttttaaaatagtagcaagttaaacttcactcttgaattctttacaatctaagtcaaactaagttataatttaggattgtctttaaacagccattcagaaacaaaactgtagaactgtgtatttgattgggaatggtgcttttgccaacttaaaaggattaaagtaacggagatatacacaaattttaaaattatgtgtgatcacaagactaaagataattaaaaagaaaaccaca

SEQ ID NO: 568787 - DNA, 1456 bp, Homo sapiens
  misc_feature (911)..(911): n is a, c, g, or t
  misc_feature (1003)..(1003): n is a, c, g, or t
tgtttgttagccccccccggcgtgttgatttgctaggcaccccttcgttcggggagcttgggtggtaggttgttccctcctccccccgtgtgggtgggaccgggtgcgcccccccctcgtgtgtttgctttctgacagatgaggtgggcgccgtgttcgcgcacgacacgcagtcatggttcagttcgcatgtctctccctgctctactatactccgcacaccacagtgttggttgtggtgggttcgcctcacatactgggtgtgcgggattttttctttccgtccttctcccccctcgggtggttaactactacgcggcctttgttttatttttttcctctcctcgttggggggtgtgcccccacatgagtccactgtgaggtgctctcccttgtgtcgtgccgctactacgatactatcatctgtggcggtgcttacttaataaggtgggctcctcctttcatgctcccctacatatacatgggggggttagtctgtgagcgcaccacacgcagaagctagcattgttgtctctcgcctccctcactattaggtaccccctccccccccacaaagaggggaggggtttgaagaggcccaacaaagaggcggggtgtgccctccccaccagtggttgtagtcacaacagcagcgtgtgtcttttttgtgggatagcagttttgggtggctacttttttttctggttaggagacacacctcggtggggaagatttctctgtatttcctcttctctctcgagcgggtgctcttatacacacaactgtggttgtgtaacacaaataggtttgttctgatgtttctcccccccgcggagaggacacctctctacagcggcgttctcttctatagagaccactttttgtgctcgcctcaagcgcgcccacggggnggtgttatacacacccggccccctctcgcgtgggggtgcacctctccctcgggggtttcaccagggggccatctctcggttggcgggttctnttttcgcgcgagaagtatagagctcaccaccccgcacagagagtgtctgaccacacagcgtgggattagactccccctcgtcccacacacagcccacgcacctctcttgaacttgttctcttgttttgcttccacagagaggtgggagacagctgggccctcctccactgtgtttttccagacctttataccagaggagtgtgaactttcccttctggttctccacggggcctcccctctttgtgggccccctctacagtgcccacccctagaccctctcgctctccactgggtgccctctccagggaggggggacccccctctgtaatatggggggtacacaataaaggaggtttctcccccccttgtggggtggggggaaaatgggggccccccgcggttttggtgaaaatctcctccaagccaataaaaacaaaattttttttttccaga

SEQ ID NO: 568788 - DNA, 971 bp, Homo sapiens
agaaaattacggtggtggcgtccgacaaggaacttcagtagaactcacgattgtcgaagactccacggaagatgactccaaccgttgattcatgaacattaacaaatacatcgcattacaacattttgtacatgagaaaagtcaaatgtactcaagagaattaccagtgatagactttcacaaatgtctaacgagatttccccaaattggatgatattcatccgttctatgctgattggatgaatattctctacgaaccagaggtatcattgacaccgttggtgctctgtgggcaaataaactattgccaacaaattctagtgggacacatgttgctcagaagattactgtgcgactgatgaagtatggcgactctctctaccgttgccaacagaatgaagcgtgcggccctgggacggatgtgcacagtgatcaagaggcagaagcagagtttggactatctggagcaagtgcgtcgacgccattttatcccgtttgcaaaccattgatccgaataccaggaccctggtttggtgtgggtacccagatgtgggaagtccagcttcatcaaccaaggtgacgagagcagacgtggatgtgcacgccctatgcgttcacaactcaagtctctgttagttgggcacatggattataagtatctacgttggccaggtttgtcgacactcctgggattctggacaccctctggaggatacgacacaccatcgagatgcaggcatgatgccctggggcaactacgtgctgcggtctgcattgtgatggatttgcctgaccagtgtgggcattggtgcgggagcataaactctccgaaatcagaccgctttattcacaggcgtcaaatttgtcccaggtgagtgagagaacgcatagatagagatcaaatatacacttgggaagagtcgacaaaccccgcggaggtcacaaagatgaccggccatctcccagagaag

SEQ ID NO: 568789 - DNA, 1294 bp, Homo sapiens
ggcacgagcggtaacataggcgcgggcggcgtgtccttgggctagagcgcgggacgtctgtcttcgagtccgaacgttcgtggtgttgaccagcccggaacgaattaaaaatgggtgatgttgaaaaaggcaagaagatttttgttcagaagtgtgcccagtgccacactgtggaaaagggaggcaagcataagactggaccaaatctccacggtctgttcgggcggaagacaggccaggctgctggattctcttacacagatgccaacaagaacaaaggcatcacctggggagaggataccctgatggagtatttggagaatcccaaaaagtacatccctggaacaaaaatgatctttgtcggcattaagaagaaggaagaaagggcagacttaatagcttatctcaaaaaagctactaatgagtaataattggccactgccttatttattacaaaacagaaatgtctcatgacttttttatgtgtaccatcctttaatagatctcatacaccagaattcagatcatgaatgactgacagaatattttgttgggcagtcctgatttaaaactaagactggcttgtggttaaatgaatatgttcagtttttgaattttaatagtaactccaattcagtaaatggtatcactgtttaccccttttaaagatatgattagacttcgttagtaatgttcaacttttcacaaagatggtgagtgccatcttaaaacttactggagattggtttatatttagatttatataactggttatgtgaatatatttaaatactggggaaattgcttcactgtcttagaaccaagcaagattcacctgtgttttgtgttcatgttcatttgcctcttaaaggcaagggttgaagataaataaggtagcaatgtctatagttttggccttaactatgccaatctaattataattccctgtatttaaaatggtttcttttacttattgaaaggcattttagtgtggtttatgtgtaatattaaagattattcaacacctctcacatcttacagatctataaggtcacatgcttttaaaatagtagcaagttaaacttcactcttgaattctttacaatctaagtcaaactaagttataatttaggattgtctttaaacagccattcagaaacaaaactgtagaactgtgtatttgattgggaatggtgcttttgccaacttaaaaggattaaagtaacggagatatacacaaattttaaaattatgtgtgatcacaagactaaagataattaaaaagaaaaccaca

SEQ ID NO: 568790 - DNA, 2130 bp, Homo sapiens
  misc_feature (5)..(5): n is a, c, g, or t
  misc_feature (49)..(49): n is a, c, g, or t
tggtngcatttacaccggtacttaagcgcggaccgggtgtccttggacntgagagagtggggacgtccggcttcggagcgggagtgttcgttgtgccagcgactaaaaagagaattaaatatgggtgatgttgagaaaggcaagaagatttttattatgaagtgttcccagtgccacaccgttgaaaagggaggcaagcacaagactgggccaaatctccatggtctctttgggcggaagacaggtcaggcccctggatactcttacacagccgccaataagaacaaaggcatcatctggggagaggatacactgatggagtatttggagaatcccaagaagtacatccctggaacaaaaatgatctttgtcggcattaagaagaaggaagaaagggcagacttaatagcttatctcaaaaaagctactaatgagtaataattggccactgccttatttattacaaaacagaaatgtctcatgacttttttatgtgtaccatcctttaatagatctcatacaccacccagcaattccagcatccatgcaatgcactgcaccagcaatcatattagtatgggccagtccatgcatttcaacacactcacagcactgcgctatgtcggttacaaatgcaatcatcgttccagatatttatagacattattaaagtcagtcaactccaaaatatcccagtcaacatagagtcatccactcgtattacacccccgtatattcaacaagcattatccgcatatcacgcactcatctgtatccagtccaaatcggtattccaaacgtatttaccaccacacagcatccggtaggaggtagcccaatcgtctcaaaccactttcacctgggacagcattctcgggtatcatacatcatctctcaagcattcacatcattcacacctagggatatcacattagatgtcacactaattatatatgcaacaattcaaccataggagaggacacaaatatggactatcccaacattgagtctaataaaaaaaccaaacggccaagccatatcaagccgttacgtctatgcggaagtatagataaaccaatggttaccatatatggacgcctcctatacaaagagagggccaaggggatatgcaagacattccgacattaccacagtgggtacacgacaacaccatgattcctccttcacgacttatcgggaagccatactacatctaacattgccccacagacattcgcttcaaacgttataaattaacagtttacccccgtggaatcacctttatcacacgactggtgatctacccataagaagaccgtagacacttgggacaacaggcgacccgttctaaacagcctggtagcgcttcaacattgtctgcttcaccttcctttaagcccagggccatttcacattgttccacaacgaaagcctgtccattcaacgaaattctcattcctgccccgaggacatcgaataaatcaaggaagttcgaaccattggcacgcatattgtaaacagagacatatgaggataggcaagagggtgaacaacgccttatcacgagtctctatggggagagctcgacttaatagccacgatacttatagggagaacaccacgccgtcaagagattagtcctctcacgatgaacagaggcaactatggcaactatcaacaaagcaaggacgcgagctgtagcgaaaataccaacaaaagactgtgttagcccaccatgggtggcaactatatgaaactatggggagcacatagctgtcagcgcctaatgggcaccacagctaaacagggagaatacaacatgacacagggcgatataaaacaccaagttgataatagactaatttgtgaatcacacgcagcaacaaactaattatataacagaaaagcaagcaaaatataaaagaacacgagggggagtcaacaataaaacagtgagaccaagacaatgaagcaagacttaaaaaaaagaaaaaaataaatcgaataaaaacaaagcagaaacaacatgtaagaagaatggcagaaagaacacaagttgcgagagaagcaagcccacaaacatctacgactcgtacgtacttaatccttgcctccatcgactgtagtatg

SEQ ID NO: 568791 - DNA, 225 bp, Homo sapiens
ctaaagtccaaaaaaaaattgaagcccgctttaggacccattccttgattgttcttttttttcatttttccttttagcaattttttcagattcattttttttgacttaccattttgttaagggaatttaaagacccagacaaaatttacattaaatgatcttgaggttttaggggggcttaaaattttttttctttttggtaacctaccgtaatttatttctttc

SEQ ID NO: 568792 - DNA, 172 bp, Homo sapiens
tatcccctgtcagtcgatagccggcggtagagagtgtatatgatcagcccgctccccaataacagctgagactcacctgtagttgtaaaaaactccagttgacacaaaatagactacgtaagagtggctttaacatatctgaacacacgatagctaagacccaaactgggat

SEQ ID NO: 568793 - DNA, 1013 bp, Homo sapiens
cttcaagcccagcgagcatgtgaaacccagggccccaggaagacctgacagttcacaccaatgtctccgtacactctgactgctgacctggagcaacccgtatccccctgacaattacctgtataatcatctcacctatgcagtcaacatttggagtgaaaacgacccggcagatttcagaagtctataactgtgacctacctagaacccttccctccgtcatcgcagccgagcacccgtgaagatcgagggatttcctactagggacacgggtgagggcctgggctcagtgctataacaacacactggagtgagtggagccccagcaccaaggtggcacaactcctacagggagcccttcgaacagcaccctcctgctgggcgtcagacgttacctgcatagtcatcctggtccgatctgccatgttgtgcatatgtcagaagtcaccaagattacgaacagcaatggtgggatcagattcccaacccagcccggagaccgcctcgatggctataataatccaggatgctcaggggtcacagtgggagaagcggtcccgaggcccgaggaaccagccaagtgcccgacactggcaagaagtggcccttaagcaagctcatagaccatgaaactggcagcacaagactgaaaaagggatgaagatccacacaaagggatgcaaagagatgccaataccagggcatcagccagaacccagcacattgctagcccaaggggcaacacacagcaacgaacaagactcaggccaaagaagacacaagcaaaaaggacagataaagaacgatagagacacagaagcagtgtaaagcagagagaagacacacgacacaaaggacgccgcggagaccaaagcgagacagacgacataaacaagaagaagaaaggacaaaggccgacaagacaacgaacgacaaagagaaaggaacagagaagaccagaaagagaaaaaacaaaaaagacaaaaacacaccgaataagaagacaacacaag

SEQ ID NO: 568794 - DNA, 921 bp, Homo sapiens
atttatcaggtattcatcatgtgagctggtcatggattataagaatgatttttataaagtttaggagtacacacaaaataacttctagatgtgtttccaaaatttgtgtattatattttatttagaacattctatttcttctttccattgtagaatcctatataagcctacttttctttagttagtattcttttgtcttgttataggtgacataagtaaatttatttattgagctagttcaggtaagaactagaaagacttcataagtcatgaaaatgtttttatatatagatgtagcaaacaaacatgacattgcttatggtgtaacagatgctccataatgagccatatgtatttctgctggtgttagtttgtaactaacttcaagtcagagatggaaaatattaatagtgaagaactaacattgattttttatgtggagagaacattttttttcaggctgcaaagctgaatcttgctgttttttttttaatttcctaattatcttcagtttgtttatcttatgtgtcttcagtgtattcaacacagtccttctttttctgtgttattgccacagttttctcactgttgtcttcatgccatgtcattcacatggtactttgtagctttgatgagaaagttggtattcttctaatgggctggaaaatggcttattactaagaaggttgcttatccatattaaccttcgcattcgttcagaaaacaggcgctttacggtccccggcggagagttaaatcccctggtgtcccccgtcttttaagggacaccttttaaaccttcttaaggggcacatttattctgaaaacttcccaattttgaacaggcgggcgaaatattcccatttaccacattggacaccttagggaaccgcgcaacgcgctcacaatcttctgagaacc

SEQ ID NO: 568795 - DNA, 111 bp, Homo sapiens
gcggccgcctactactactactgctcgaattcaagcttctaacgatgtacggggacatgacaaataattatgaagaaaatatcctgaaagttgtactgcaccagcaaatcc

SEQ ID NO: 568796 - DNA, 160 bp, Homo sapiens
tgcttcattatcgctctagaggagccctggttttgaaatttgattatcccaaatcaactcaccactcttgctcagcctatataccgccatcttcagcaaaccctgatgaaggctacaaagtaagcgcaagtacccacgtaaagacgttaggtctacctgg

SEQ ID NO: 568797 - DNA, 1274 bp, Homo sapiens
  misc_feature (1274)..(1274): n is a, c, g, or t
tgagctcaagactcgaggccaatgactacttcaaagccaaggactactgagcaactgccatcaatgttctacagccatggccatcgagctgaaccccagcaatgccatctactatgtgcaacctgcagccatggcctacctgcgcactgagtgctcatggctactgctgctggagagactgccactgcgtggccatctgagcttggacaagaagtacatcaatggtgttattacctgcctggtgcttgccagacaacatggcactgggcaagttcctggtgcctgcgctgaagagactacgatgactggtggtcaaggtgaagccccatgacaaggatgccaaaatgcacataccaggagtgcaacaagatcgtgaagcagaaggcctattgagcgggccatcgcgggctgacgagcacaagcgctccgcggtggactccgctggacatcgagagcatgaccattgaggatgagtacagctggacccaagcttgcacgacggcaaatgtgaccaatcagtttcatcgcagtgagctcatgcacttggtacaagggacccagaacgaaactagcacctggaaagtgtgccataccaggatactgggtaccaggtcacaaggcggtccgtctcccaagcatgagcacgcatcgtggaaaccaagctcaaagcagacagacgcaccgattcacacgatgtgggggaacagaccatgggcgcagaccctatgcaccttaactcaaccatatccgagctccaacgggattaacctcggaagacacaacgccacatctccttcaatggtgaattatgttgcaccgaaggccatcccggtaaacgtacacctcacccttgttcgcgttcacacctcctgtacacgaatccaagctcccaccaccgtgcgagctgagccacgacaacacgacacacgagaaccgcaacaacagcgtccagggggagcggagcgtacaggcaacagcgaccgagagcgacagagacgaaagggccggaagacgggggaacagcaagcgacacggggaggccaaggaacaaccaggagaagtagagtacctcgacacgcggcggtccagtacagcggttacccctggacagcacaggcaagagcgcaggcagacagaagaccaggagatgggtcggagaaggtagcaagaaggacgcaccggagcggcagggagcggagcgagagaatagaaacgaagcagaggagtcgtcccgcaccgctgcgaccgcactcgacaacgggacgcacgcagan

SEQ ID NO: 568798 - DNA, 105 bp, Homo sapiens
tgctgggattacaggcatgagccaccccatgcccagctggaattttttaacttaaaaaaaaaaagtttcagggttggtccttacccattatgtgcccagttaggt

SEQ ID NO: 568799 - DNA, 619 bp, Homo sapiens
gaagaaagaagggtaaaaagaaggatcagattggaaaaggaacccagacagccctgccaaagccataccaaagacactcaaaagacagccaataaaattctgttcaatcaaaaacaaaaaaaaaataaaaaaaacaaacaaacaaaacaaaaacaacaatagaacgaaaagacaaagaaacaacacaaaaaaaagaaaaaaagaaaaaaacaacaaacaagagagaccagagcgggtggcgcgcggccgcaggggcacggggaccaaagggagcccacagaagccaccctcggggtgggagcgcggcgggggcgcccgacaagcaaagaaggtagtcagagaatctgctcaacaccacattgacataatatcccgacacggagaagacagagaccgacgcacagctaaatatcagagggtagtttatcttcgagagcacgattaaaagagcagggccgtgagggggggaaatcactaacgactggcgcgggtgaatcacacgaacgaggcaacggagattgatagaatagatacccacggcggacggcgaatcacacgagggagtggctgacgaatgcaacatgtacaaaattaagtaacccccgccgtgtagtagagc

SEQ ID NO: 568800 - DNA, 289 bp, Homo sapiens
gttgttgtttcggttgaacgcttggacctgacggcgtgcgggtgtggcttctccaacgaggccagaggtggtggagcgggcaggtgcgagtgttgttccagttgagcctgagctgctgggcaaggtcgttgattcctcaccgaggtctgcggttgtgagtgtggcgggtaaccctgtttgggtggaggctagggctgccggggaaggctagtagattcttcggtaagtgcccgaaagtggtgctgtcctcagtgaacagtgttgtgtgagttgagactggacggctgta

SEQ ID NO: 568801 - DNA, 420 bp, Homo sapiens
tcgttggttagtgaccggtgttgggctcgggctaaaccaacgaaatatgcagacagatagctaacagtatagggttctcagggtactataaactactagccgtctgaggaggattaggtagatacccaaacctagtcccgtccagagacataagcggggaccgtggttatcctgcgattggctccatgctgccctaggacattcgtagcagaccgtgctctaggcctccttaatcttgcaagttacacctgctcaagaggaataacctactcaaaggttgaagtcggacccgtcaattcatagttaacatgctgtatacctactctcaggaggccgcacgtgctagctacatgtgggcccttaacgcccatatgagtgacgatattcttaactcaaggccgacgaaaatcttcgacgagt

SEQ ID NO: 568802 - DNA, 408 bp, Homo sapiens
gcgtcgacccaccacctattaagagatgagacttccatgacaggtgggctgattacacaattgattgattggctttgggttgccttgcaatgatatgaatggtagaagcaatgcactgtcttctccctgactatctccctccttttgggaacccaagattcgagtatatgatagcacacttaattttggcgatctgcctgttgcttcactgtgcctgcttattaagccctaaagatgcatgcattcctgagcctgttcatccacaaggctccaccctgtagccagtagtccaattaagaaactagaattaggaaatcttacatacactaaatcttcagactgtctgtctgtctctctctctgtctctctctctctctctatatatatatatagtgtgtaatgtctata

SEQ ID NO: 568803 - DNA, 645 bp, Homo sapiens
gccgtggagtgaactgctgccgccgagccaccatcatgcctgggcactatacaggaatggcttctgtgctgcgtggtcaccaacctgattcgaccagttatttgacgacgaatcgtgaccccttcgcaggtgctgaagtgcagcagagaacaatgaaaaaatgaatgcctggcgtggtggctggcgtttggggtgccctgtggtgccaagatgctgcagctcatgtgcctgcggcccagaccaactccaacgctggcatgtgcaaacatgcctgctgcaatggagtcccagaaatgacctgcaagaaccctgctatgccccccagctgttgggctgtggttgacacgacagaggagcacgcagccggccccgtggctgcttacagaacagacagcgccataccgactgcgttcggaagcaagacctgatacaacaaactttccagcgcgttgacggcgcaacacttcactcctgatacgcagacgaccccagcaaacagggcggacacacgcctctgctgaacccctgcaccgcacttccgaccaacagccccactctgcaacccaccaagcggttgccacggccggtgcgaacattccacagtctgataacaacccgcaccatcggacctgcactcatcggagg

SEQ ID NO: 568804 - DNA, 328 bp, Homo sapiens
cacctggatcatgctcagaagactctatatatggatgtgatgttggaaaccaccccctcctctctatgggtgaggtgtgtgatcggcaacacctctggactcttacagttggtgccgggggtgtaaccatgtgggccatggggaggtcagaggtgctgtgtccaagggagtggcaggtgtgtaagatgatagaggatcccggccagattaagtttgatcccaagagtccagcccagatccggataattcgaggtccgtttgatgatgatttgtcaggccttccagcggtgcccacagattataaatagaaagtgaggttttagagcaa

SEQ ID NO: 568805 - DNA, 298 bp, Homo sapiens
agaggaggtgcggggttgggggtcccgctcaccggcaggtagtaggtcccgtccaggggccctgcctcagagacccagggtagctgggggctgccgagggcctgcgggcccggggacggtggcagagagaggctgggtataggcccataggcgggcgggtagaggccgagccccagggccagaggggtgtagacgcggtggggcggcccgggagacgagggcggcagcaacacctccacgtactgcccactctcagggtcgaagagcacccgcagccgaggctgccgcggcgcctcca

SEQ ID NO: 568806 - DNA, 489 bp, Homo sapiens
atcttgtaaagcccgggatcccaaagccctttcggcgccccgccaaagggtcccttgcagagtcctaaagaagaccccccttaaaactcttggatttctgtttaggcttaacccctttgcaaaggccctgggccgggaccccctttttttcccggcccggaattcccagctccgggttggttaggcagctttttccccaccggcccttccaacccatttcattttgaaggcggcggtttccggccaaaagccttttgttggttaaaaaggaaaaaaggcttctttttgttttttaaaaccaaaaaagccttttgttgggaaaaaggcccccgcttcccaaaaacccgcccctttaaaaaagccttccgagaagaaacctttttccaaggggaaaaagccttttgcttttatttttttttttttttttttccttaaggtccatttttttttggccgcttttttttttttaaagccttttttttccggcca

SEQ ID NO: 568807 - DNA, 213 bp, Homo sapiens
ccctttgttttttttttttccccttttttttcccaggtttgccccccttttcccccccccggggcggggaaaacccctttttttttttccccccccaggggggggacttcaagggccccgtttggttcccccccgttgaaagcccccccgggccccccccaactccgggccttttggggtttccctttgcccccgaacccccggggggtttta

SEQ ID NO: 568808 - DNA, 1346 bp, Homo sapiens
gcgacgctccaacgtttcgccatagggcgcctcccagcccgtactccccgactccagtttagaacctaattcccaattcccggaccgggcccagaccctgggctcttactgtccgcttttgctgggacctgtaccacaagatgggcgtcttctgccttgaggccgatgggggatcgggccggaaagctgcgagatcgccatgaggattttttttccgctgacagacatctatgagaccagacatctgcgagaggacccacattggcaagtgcccagtcacgcgatgacacaaagcaaagggagcaacagagactatgggagacaaaggagaggaggaaaggcccccataggtgaggacacgagcccccagacaccccggtatccacggtaacggagcgcccaggaccatcgaacagggattgacaccggaaagggccacgatctacggccgggcaaaccacccgggtgaggaaagagtagtccacgccaccagcaacacggcagggaacaacacaaacccgaagcacacaaggaggggggcacacaccccgcgcgagacaaccgtagggacagcaacaaacgaccacacacgcgaccaccaggagattatcgtgccagacagcacagtaattcccacgaagaagagagaaaacaaacacgatatagcccaggaaaacacccaacgcgctcagggaggaaaaccacacaaccacacacgccacagggaggagccgacctacacagagacaacaccgcgagtgaaagaattgggtgagcaccacgcccaccaacgcgggaaattagacgtagacacgagcgcccacccgatataaccgatacagcggcggagacagcaccaaacggcgccgacactggggacacaaaaggtacacccaacataatatggacaggagagagaccacaacagacgaagtggaccaaccacacaccaggaggaacacgacgaacaaaccacacgcacacgcaagagaatatagcgcaccccacagacacaagagacgactggatccgaaccaacacgaggaaacaaagacagaagagcagaagaagacaaacagcgaggccaaacaaaagcaaggggaggcacgaatattagaaatcgcccgcccggacggcgacaggcgagaggagagcaacaccgacaacacacgacacaacaaacgcaacacgccaacaacaccaggagcgagaagcagatcaaccagaccatctctgacgcgaatcgataccgaacacgattgacccacacaacacaaccgaggggagcacgccgacagtcagacaaaacgaaatatggcgaagagcacgaccggagcagaacacat

SEQ ID NO: 568809 - DNA, 863 bp, Homo sapiens
  misc_feature (10)..(10): n is a, c, g, or t
  misc_feature (90)..(90): n is a, c, g, or t
  misc_feature (289)..(289): n is a, c, g, or t
  misc_feature (302)..(302): n is a, c, g, or t
  misc_feature (310)..(311): n is a, c, g, or t
  misc_feature (318)..(318): n is a, c, g, or t
  misc_feature (332)..(332): n is a, c, g, or t
  misc_feature (338)..(338): n is a, c, g, or t
  misc_feature (346)..(346): n is a, c, g, or t
  misc_feature (351)..(351): n is a, c, g, or t
  misc_feature (364)..(364): n is a, c, g, or t
  misc_feature (366)..(366): n is a, c, g, or t
  misc_feature (375)..(375): n is a, c, g, or t
  misc_feature (382)..(382): n is a, c, g, or t
  misc_feature (385)..(385): n is a, c, g, or t
  misc_feature (408)..(408): n is a, c, g, or t
  misc_feature (413)..(413): n is a, c, g, or t
  misc_feature (418)..(419): n is a, c, g, or t
  misc_feature (427)..(427): n is a, c, g, or t
  misc_feature (431)..(431): n is a, c, g, or t
  misc_feature (434)..(434): n is a, c, g, or t
  misc_feature (436)..(436): n is a, c, g, or t
  misc_feature (442)..(442): n is a, c, g, or t
  misc_feature (446)..(446): n is a, c, g, or t
  misc_feature (450)..(450): n is a, c, g, or t
  misc_feature (462)..(462): n is a, c, g, or t
  misc_feature (488)..(488): n is a, c, g, or t
  misc_feature (494)..(494): n is a, c, g, or t
  misc_feature (497)..(497): n is a, c, g, or t
  misc_feature (513)..(513): n is a, c, g, or t
  misc_feature (526)..(527): n is a, c, g, or t
  misc_feature (570)..(570): n is a, c, g, or t
  misc_feature (594)..(594): n is a, c, g, or t
  misc_feature (605)..(605): n is a, c, g, or t
  misc_feature (630)..(630): n is a, c, g, or t
  misc_feature (636)..(636): n is a, c, g, or t
  misc_feature (658)..(658): n is a, c, g, or t
  misc_feature (662)..(662): n is a, c, g, or t
  misc_feature (690)..(690): n is a, c, g, or t
  misc_feature (695)..(695): n is a, c, g, or t
  misc_feature (757)..(757): n is a, c, g, or t
  misc_feature (781)..(781): n is a, c, g, or t
ccgagatctncacgggctagatgctcgtcggggcggagcgagtgagcggcgctaggccgcgagccccgccgcccttcctccagcgcctcngaccccgcagaagcgctcgcctccctagcccgcaaaaacatatcgatttttctcgctgtggcaacggggacgtcctgatagatcctctgctccaataggcaactccggccttccctgccctgacctggaacctctgggagggctgcagagtaagtgccgcctctgcgctcccaccaacccaccacccctctcaactagntccctctgttccnacaggtcnnacacttngcgctccatgcttncgggtnccgagagncctgncctcccccaggcncnccacctctnctggttnctntgtgctttcaccttaaacctctnccaancagannctcccgtncagnaananaacctntcancaancacctcaaattngccatgctggctggtggaagagtttntggtancanaagagtgctctccatnctctaatttccgnnctaaaactacccctgagtgtggtcccacaggatatgtagaaanaatcacatgcagctcatctaaganaaatgagttcnaaagctgccgctcagctttgatggnacaacncttattttggaagttcgaaggngctntcgtgtgtgtggccctgatcttcgcttntcttntcatcattcgtcagcgacaattggacagaaaggctctggaaaaggtccggaagcaaatcgantccatatagctacattccaccctngtatcctgggtcttagagaccctatctcagacagtgaaagtgaaatggactgatctgcactcttgtatctctgagcatttgg

SEQ ID NO: 568810 - DNA, 1216 bp, Homo sapiens
tgccaagatgcttgacccaagtccgagccatgatgtactcttggggagctgaagtctgagaagagaacgtcctcagcccatggtggcaggtgtgcgtccatagcctaccatatcgtatgagacagcggcttttcttgacaggagggatccagaccacacctccatcgagtacttttttgtgtgtcaagtggacatgtttaagaaaggacagaaaaatgcaagagaaagaaacaaacgataaaacagggggaggcgcgctcaaaaagattgttgcccactgtaggggccgctgaggctccgagcatacgcacggtacctatctcatgggttcccagaggaggggcccacgaagaagcgaagcgagcgacttataagtcacaccgccaagaggcggacggcacccgaggcggcaataacaaagcgacaaaagcgaccgcggagcatagacagcgaggacagcacgaagggggcacacctcaggggcgaaaagaggcacgaccaatagcctcaacgggagcgggagagtgggcaccatagcagatagtgcgagcgccaaacaggcacactcgctagaacaggaaccgatgacttatgaggacgggcactgcttcacgcgaggaacaagaaattatcaaaagaggaagtggtcgtcaccaaggggtgcgtactaaccgctggcgtgtcctccgaacaacatcaacgaacgggcgagcgcacaatgtaagccacatcgacagcggaccctgagaaagagagataagatgggggcaattaaaccggggggaagtgagtgtcgccacgcattcccacggcgacgacgactagctcatgacgacaacacacaccgacgagacaaacgccaaaagaggagacacaaaaaaaaccacccgggctcccaccaggggaatacacgccggagtgctgggaacgagaacccaagtacgtgtggacgacacgcaagatcgcaaaaggaggacccgccgtatggccatgcccgggaggcagccaatcgaacctgttaggcagagttccgcgagcggggccaaaataaccaacatacgagtgccttgaaacggaagctacagagtgggtcccgccaagtgattccagacacccgacacaaaaaggccggacaacaccggcgacgtgcggaggggaccaggcccagtgaacccagagaaccagagcaaggcgaacgacaccgctaccagcgacc

SEQ ID NO: 568811 - DNA, 488 bp, Homo sapiens
actagaaagaagctttttgagaaactcttttgtgatgtgtgcattcatgtcacagagttaagcctttcttttgaatgatcagtttggagtcactgtttctggaaaatctgcaaagtgatgttaagtagggcaaaaaggcctatggtgaacatggaaatatattcacataaaaactgtaaagaagcgttatgtgaaactgctttctaatatgtgcgttcttctcacagagttcaatcctttttttgatggaagtgttcagaatccaagtttttacagagtctgtgagagatattttggtgtgcattgaggaatatggtggaaaaagacatatcttcagaatagaaccagactgaagatttctgaggaactcttttttgatttgtgcattcatctcacagtgttaaacctttcttttgatagagcagtttgtaaaaactgtttttgtaaaatagccaaagagctatttggtagtaatagaagactatggt

SEQ ID NO: 568812 - DNA, 346 bp, Homo sapiens
tggggcccccccggggcaaaattccaaattttccccttgccgggggggggggtttgggaccccccccccccccaccttttttggggggggggccccctttcccccccccgggggttgtttttaataagggggtccctccccccccccctttttttttttttgggggcccccggggccgggccaaaaccccgggggggggggccccccttgggttcccctccctgggggaattttcccggggcccccgggggggggccctttcccccccggggggttttttttaggtttcctgggggggggttttttccgttgtgttggatcgggtttaggcgcccctttgggccca

SEQ ID NO: 568813 - DNA, 95 bp, Homo sapiens
ttttgggtttttttttgtttgtttgttcgtttttgagacggagtctcgcactttcatccaggctagactgcctagttctagatcgcgagcggccg

SEQ ID NO: 568814 - DNA, 277 bp, Homo sapiens
ctttgtggggtctttgctcagtatgtcaagggaacccaggaccagatgcataaagtgatagaacaatctaattgtatcacaaatgtataaaacaaccacagcgatggggtggatgaaattgttgtggacctaagtaattttggaaatagagtctataaaattaaaggcaaaagaaactgtatataagtactgcactctagttgaaaagttgtttcctgtgggatatgggttaacaattatgatactgctgtacaggtatgctgggactgaacaaata

SEQ ID NO: 568815 - DNA, 537 bp, Homo sapiens
gaaatagtaagctgaacttagtggtgagatttcagaacagacttctgtgaagtaagagatgtaaccatgcatctaaaatcggatggccgtgtaactgctcgggcatagaaatggtgggagaacctgtcctgggtacctggcatttcacatgagcccagggatatgtctttgccaaggcacacaagtgtccgtggacttggacaggtgccaagggtttttgtctctgttcctatgtgggaggctggctgtgatttacattaatttctgtatttcaaacgaagatgtctgcagatctccattttgatgttacagcctcattgcccaggcagtgggcagtggccagacaccctttctgactagccactgcattgggcttctgtgattcaaagtagtgtatatatttatttacttctctgactgtggccaacagccaaatgccattttatgttccttgtattcagtccattaccaaagaggtgtttgcactttgtaatgatacctttcagttcaaataaaaggaccacatcgttaagtgga

SEQ ID NO: 568816 - DNA, 118 bp, Homo sapiens
tatgcgaacctaccgctcttcatgacgtacactgtgcttcgggcgtcttatcacttgcttcctcacgttgaattttataagcttcgagagccatatttctcccacacccctcctaaca

SEQ ID NO: 568817 - DNA, 253 bp, Homo sapiens
cctcctcctcctggtggagcagttggataaaagtcagaggctgagtctgttccaacgatggctgcagcatgccacaatggacacatagcacaccagcagtgaagctgaacagaaggctggagtgtgccactgtgtgacaatggacgtggatctctgtcagtgccagtgtaatgcttcttgctcgtgccatgtgacactggaaatgggacacatgaatggtgccacatgatacatgaacagcagtgtcttgtgc

SEQ ID NO: 568818 - DNA, 400 bp, Homo sapiens
  misc_feature (5)..(5): n is a, c, g, or t
  misc_feature (47)..(47): n is a, c, g, or t
  misc_feature (60)..(60): n is a, c, g, or t
ccacngaaatttgtgagaaaagtccctaaggcagagctgagcttagncttcagatgcctncccaaatgccctaattagaaaagatgaaagagctcaaatcagtgacctcagctcccaccttaagaaactagaaatagagcaaattaaagtaagcgaaagaaaggactcccggcactttgggaggtcgaggtgggtggaccacctgaggtcaggagttcaagaccagcctggccaacatggtgaaacctcgtctctactagaaatacaaaatgagctgggcatggtggtgcatacctgtagtcccagctacttgggaaactgaggcaagcagtcacttgaacccaggaggcggaggtttcagtgagcaaagttcacgccactgcactccaacctgggcaat

SEQ ID NO: 568819 - DNA, 178 bp, Homo sapiens
  misc_feature (56)..(56): n is a, c, g, or t
agccagagcagaatggcgatgggattcccagccggacggggtgttctcatcaccanacagctgtagatttcatcaccgacagtggacagggggtctaagacagaacatggcttgagaagaggcgggacgtgggtcaatgtggtgtggagctccttccttgcgatgacttgcaacctgt

SEQ ID NO: 568820 - DNA, 910 bp, Homo sapiens
tgctaaacagagattttcttctcggcaacccattgttcccggcatctagttctgagctcgaaatttggagccaagccacttgcgttatcaagagttagtcaaaacacctttttctggttgtgaggagcagcgattgtgcttcccacagtgtggtgagctagggcccactccccgctttttttgccgtccctccctttcgttgggtcccagtcgaattcttgcctcgcccgcgttaaaaatcaccaagaggggtgccgaaagccctctccccgaggtgagtctcccccccgccgcctcgtgggggacgacctctcttctgaaaatattcggcgcaatccctccccctaactggagtgccgcgaaccccttggtgggcgccgcgcaagatcctcggggccaccgacgccggccatccactagaaaccgcggggtagcgcccccccacaggcgccacaattccagtggaggcccaaacaagttctgcggcccggtaaccgccccgctcttcagaaggacgctaaggttactggagcacacactactatgagagcgcgcccaccactaggggaggaaacacactctacaagaccctcgcctcggccaaaagacgccacagataggggaagatgtttttcaaaaactagagaacatttttatgactgtgggacggttgcggtcccaacccgataaactccggcccctttgtggaaagcgcgacacggggggaacctacgaagtgccagagaactggcacccccccggctaaacaccagcggaaaaaccccacgttctatggctataaggaagaaccgcaagaaaagatacacgtcgagtggaaacaagcgccacccgacactacccccccggggcaacaagccaaatccgtttccaaaccaaaaccgacaaaaca

SEQ ID NO: 568821 - DNA, 110 bp, Homo sapiens
agtcgagtagccatccactcaccgggtacatgacacgacgaccgaccgacacgatgtcacgtccagaacctacgatgccagttaaacgagcccagctagatcacggactg

SEQ ID NO: 568822 - DNA, 100 bp, Homo sapiens
tcgccatcttggatccgcgggacaagaaaattcaatgcgagggagacgtggtgggcggtccttcctgtgacaacgacccttgaagtgacaagttctattt

SEQ ID NO: 568823 - DNA, 551 bp, Homo sapiens
ccgatgtaataaatatatatctagcataaaccatctcagtctagaaatataagaatagtgtcaaactaacatatctactctatgctaaaggagactacacgtacatagtaggcatgagacagttatacgcatacttcgtcagtaggcactcacacacaccattccctctatatggccaaacaaattgtgcctacattgcatacgtagtcttatgcctgcatgacacagaggaggatggagtactaagcccattactaagtctcagatctcaaacaagaatagtgggtccatacgaacggaaggataacactaatacagccgtaagcgctaactccgacgaggctaaaagagaaagtagtccgctcccaaagcagatagaatattacaccgaacaccagctagaacataggacagttccacaaccgaacaccccgcacgtacacttatagagtccgagccaaaacgcagagcaacaagagacatcaagttagtaagacaactctgtcccacataagtactttttaaagacacaagatcacacagacacaagc

SEQ ID NO: 568824 - DNA, 903 bp, Homo sapiens
  misc_feature (903)..(903): n is a, c, g, or t
tctggagccctgagatacagaagctgattgcaatggcacaatgcagtgaagtgctgtgagtgctcaatgagcctgcactgatgtgcggagctgctgcagtcggatgagctgggcctcgcagctggctgccctgcgccagtgcctgatggatgcttgctgtggatgcagcttgtgatgctgtgtgatgaagtgatgtgctgctgtgtgccatgcatgtgatgctgctgaactgtgctctgtgcagctgtgttccatgcagcaccctggatgcatgtgatgcatgttggtgcgctgcatgcatgcaactggcagctgtgctgtacagtgatgtgtgtggcttgatgtgacgatgtggatgctggcttgtgtgccatggcatgtgcatgccatgtgcatgctgtgtgctgtgatgcttggacatgatgcttgatgtgcaatgcaggcttgtgatgtgatgatgcaagctcctagcacattgaaccctgatgcccctagaggtggctcgatggttttgagcgaatggggcatgtgggaggtgatgccagtgattgctgcctgtggcaaccaagaatttgggaggccttgaaattaacccttgaaatggcaggcaatgctagggatggcttgggatggatgttgcaatggtgctgggttgtgcggaggtggcccttgagccctgccaaccccaacttgaaacgtgatgtggacgtggctggtagtgccttagctttgaaaactcttgtgtgacacccaatgtgagccttgcatgtggcgaaaccgaaagagtaccgtggaaaaatgtggccctgggtggaccaaatgggaatggaattttgaagcgttgggttcaattttccacactgggctttggattggccccggaacaattgaggatgccttggn

SEQ ID NO: 568825 - DNA, 124 bp, Homo sapiens
gggttatcttgaggatcccagtcgccgatgatgtatcacatgcctcgtctacccatggaacctgagcctgacgtagaaggagtcagacgtgtgacatgaggaagagtctgagaagagaagacac

SEQ ID NO: 568826 - DNA, 342 bp, Homo sapiens
  misc_feature (2)..(2): n is a, c, g, or t
cngctcatcaggtaggtgacttcaataactagcggatatagggagatagtgttgagtcccggtatgtgagcaaaaaacccattctagaaagcatagccctggggccatctgtcctattaattctgttggggaatgcttagtaggaaaaacaaacaatagaactgaatatcatgggtctatgtgatctagctgcctctgagaaatagctggctctatttcctcaattacccttttggctgcaggagttaaatacctgggagagtctagggctgtatcgccctttaggatagaaaacaggtttggtaacttatcagtagttatgccctgatgggagcaagagcg

SEQ ID NO: 568827 - DNA, 156 bp, Homo sapiens
tgtctcgatctccttgacctcgtgatccgcccgcctcggcctcccaaggtacggggattatagggtgtgagccagggcgcccggcctctcataattttcttatttattctccatataccatctgaatactaatgtatttattggtttatttctgaa

SEQ ID NO: 568828 - DNA, 133 bp, Homo sapiens
tctgtaggaagctgtccataataaggcagggtgcagcaaaactaaaacatatgttcgtgtagctttcctagtctgacaacgcaatactgttgagacacagtccaatataatgacaacattggctggctagatc

SEQ ID NO: 568829 - DNA, 108 bp, Homo sapiens
ccgtgtacccttactggatgggtgtcttcggcttcctgagttctgggtccggagaggtgagtggcaactgggtggctgctggaccaggtggcagtgctctgacctggg

SEQ ID NO: 568830 - DNA, 156 bp, Homo sapiens
cgcacaggtgaggagcaggtagtcctagaacccgaatcgttcccagagacgtatgtgagaccaagcactgaaaacagtcgccatcgctctgacccggtcagtaacagtcagaaaattgggagtgacacgcagttctagcacttgggaggtcagctc

SEQ ID NO: 568831 - DNA, 362 bp, Homo sapiens
  misc_feature (265)..(266): n is a, c, g, or t
  misc_feature (343)..(343): n is a, c, g, or t
  misc_feature (347)..(347): n is a, c, g, or t
gtaatacgttaaaagcaggtgtacggtcaatcgggatatgcaccagcgtcgtgagagtatggcgaagttgcattgcagtctctgccatgatgctacacccttcatcttctcaattacatcccaaatgggtcatgcgggatggaaaacacattggggatgacgatgtctgggaccatccaccaaaccgaaaatttgggaaaacccgcattgggatgtaattgagagtatggccgtggaagtctgcagcttgcatggtcttcgtggnnccccaattgatgctacacccttttcatcttctcagaggagaacttcggccgttaaggaatacttggtgagactgttnctanaaaaaggggccctga

SEQ ID NO: 568832 - DNA, 326 bp, Homo sapiens
catcgtcattttattatacataatatatttgaggtggggtcttgctatgttgcccagactagagtgcaatggtgtgatcacagctcactggagagctcaagcaatcctccctcctcagcctcctgggtagctgggattataggcatgcatcaccatgcccggctaattttttttaaatttatttttagtagaaacagaggtctcgctgtgttgctcatgatggtttcaaactcctggcctcaggtgatcctcccaccttggcctcccaaagtgctgggattacagactgtgctcagctgctgttggtttgcttttgtttttgtttg

SEQ ID NO: 568833 - DNA, 151 bp, Homo sapiens
gtgactctagagatcccttttggtgtcatagtatcctatgggaaaggacttaaaattggcctagagttctcactttaaccagaatcaggttcattgagagtcaacgtattttctcttttataaaataaatatatggtatggaatatgacac

SEQ ID NO: 568834 - DNA, 178 bp, Homo sapiens
ctgggcccatttaagaaccagcctgaccaatgtggtgaaaccctgtctctactaaaagtacaaaaattagctgggcatagtggcacatgcctgtagtcccagctactcgggaggctgatgaacaaggcactctacgctggtagaagcagggtgagatgtaaagtgattgttccccgct

SEQ ID NO: 568835 - DNA, 388 bp, Homo sapiens
cataggattacttgagcccaggagttttagaccagcttgggcaacgtggtaaaaccccatgtttacaaaaattaactgggtgtggtagcgcccgactgtgatcccagctacttgggaggctgatgcaggaggatcgcttgagctcgggaagttgaggctgcaatgagcagtatttgtgcccctgccctccagctcgggtgacaaagcaagaccctgtctcaaacaaaaacaaaaacaattttgggcctgtgaatagatattaagctggagttttcattcctttttttttgagacaaagtttcattctcgttgcccaggctggaggttgcagtgagccgagatcgcccccctgccctccagcctgggggctgagcaagactctgtctca

SEQ ID NO: 568836 - DNA, 693 bp, Homo sapiens
  misc_feature (546)..(546): n is a, c, g, or t
cccccattaggaatcacaggtttgctacttcacatcctcatgtcttcacttcatggttaccttagtgaagccttcttcatccatcttatttaaaattgcaaaccacttcctcacaacctgtcccccttcctgtctactcctatccctctttttgtctgcttttttttcaaacatgtatcactatctaacatactaaattattttacttatcatatttaatcaaatctaaaacaaaaccaattttaagatgcataattagcttatataccactaaggcaagaaaagccgtgccaatttaactaggacatgaatgactaggcatttctacatttaaacatctttgaaattagaagacatgttggaatcagtgaagtgtgttattaaattactgtctgcctccccaactagaatgcaagcctataaaggcagatatttttatcagtttgtttgaggacattttgaacactgcctggcactcatggtaagtactcagtaagtgtggtttgaataaatgaatgaatgactgaataaaagtgccaaagtgcnaagaagggcaaataatattaagattatacctagaaatgcaagaataaaattacagaacatccaggataaagagaacataaaagtttccagacaagctgactactcacaaaggactgaccgtcagattgacagctgacttcccacgag

SEQ ID NO: 568837 - DNA, 204 bp, Homo sapiens
  misc_feature (15)..(15): n is a, c, g, or t
tcaggatcttactanccctaatcgcactaaccctaatccttaaagtataataataaaaaaaaaaaaaagaaaagattggcataaattgctaagggatgctcacgggagtatgagatcatttttggggggattggaggagagaggggtaggagtaaagataatcatgaagaagatggcattgagttgcagttgggtttggaacaa

SEQ ID NO: 568838 - DNA, 627 bp, Homo sapiens
  misc_feature (480)..(480): n is a, c, g, or t
cttataacgcatcgtcatcatcacattgatagtgtcaaccaattcatacaaactcgttccgatctagttaatcctatccctctttttgtctgcttttttttcaaacatgtatcactatctaacatactaaattattttacttatcatatttaatcaaatctaaaacaaaaccaattttaagatgcataattagcttatataccactaaggcaagaaaagccgtgccaatttaactaggacatgaatgactaggcatttctacatttaaacatctttgaaattagaagacatgttggaatcagtgaagtgtgttattaaattactgtctgcctccccaactagaatgcaagcctataaaggcagatatttttatcagtttgtttgaggacattttgaacactgcctggcactcatggtaagtactcagtaagtgtggtttgaataaatgaatgaatgactgaataaaagtgccaaagtgcnaagaagggcaaataatattaagattatacctagaaatgcaagaataaaattacagaacatccaggataaagagaacataaaagtttccagacaagctgactactcacaaaggactgaccgtcagattgacagctgacttcccacgag

SEQ ID NO: 568839 - DNA, 100 bp, Homo sapiens
cggcttagaagatgttgtcagatgaacatctgcatttggtctctcgctggggttgatggccatcacgttgccgtcaatgacggcatggcgcccctggtgg

SEQ ID NO: 568840 - DNA, 215 bp, Homo sapiens
gttcgacagtcagccgcatcttcttttgcgtcgccagccgagccacatcgctcagacacacattggggaaggttgaggttccgagatcacaccggttttggtcgatattggcgcgcctgtgcacaccaggctctctcttttactctctgtgtaagagtgagatatttgttccccatccatgacccccttacattagcactccatctaacatgggt

SEQ ID NO: 568841 - DNA, 232 bp, Homo sapiens
gtcggtaatattctggtatacaacatgaaataaataacccctccctaaccatagaaactatagatgatactggccaggcgcggtggctcatgcctgtaatcccagttactcgggaggctgaggcacccgaagggcagaggtggcagtaagctgagatcacgacatggcactccagccggggcaacaagcagcagcatcagcctcccacacacaaacagcaaaacaagcaatc

SEQ ID NO: 568842 - DNA, 121 bp, Homo sapiens
tcaatcgacggttctcaccttacatgttttagaaaaaggtctcatccttgcacgcacgctttgttctatgcagagtacagtactggcttcaagcaaatatataaaggttctgtgcactggc

SEQ ID NO: 568843 - DNA, 227 bp, Homo sapiens
gtgtgctttagctagtaccccattcacaagtctctgaaagcggtgcctcgttcttctgggaagggaaattgcggctttaaggagaacggcaggttctcccatgggcaggtggtctctcgggataagctgcgcccctttccaggacccagacctgagctccctggcaggccgggttctgcggtgtctggccaagcaccaggatggcctcgggcacgcagcaggcattc

SEQ ID NO: 568844 - DNA, 304 bp, Homo sapiens
ttgctgtggtgtctagaggtcccatctcaggcagagacgactggcgattcctttgacgttgacaatcgagtagtactcccgattgaatgacctcattcgtataatatttcacatcacaagacgtcttgcaatcatgagctgtccccacatgaggcttaaacacagatgcaattcccggtacgtctaaaccaaaccacttacaacgttatgcgatcggggagtatgactacggtctaaatgctctgaaatctgtggagcaaaccgacagtttcatagccacaatcgtctccttggccgtgacgat

SEQ ID NO: 568845 - DNA, 734 bp, Homo sapiens
cctgctttttgagagaccctttggcacctgaaaccccagggtttgtctccatgtggatttcctggccgagtggagtggaagggtcccaatcccagaagacacctgagccgtctttaagaaagctctcttagactgtcataggtgccgactcccgtgaccctggaggataagtacctggattgggcttatcgaagtggtggctaccaaaaggcccgagctgtgtttaaaagtttaccaggagacccgacccattttccagtgactttttcccggaaaatgattccagtttgaaaaggagccagaatccctgccatatggcgacataagagaatattatgagagagctttgagagaatttggatcccccagattctgatctttggatggattatatgaaagaagagattgagaccaccccccctggtagacctgagaacctgtggacagatctactggcgagcgatgaaaatgttgccacgggagagtcagcacgaggcactttgtagctaaaacactgctatgcatcacgactggccctttatgaagatgaagaataacccgtcacgctttgtgaaatagtattgccagccagccccgctgggccaatttgtattgagtccatctgtaatttgctccgtgatggcagaccagatggctgtctggttttgagacaccctttaattttatgttaacttgttaaatctttttaaaaatttaaaaatttttatgattga

SEQ ID NO: 568846 - DNA, 406 bp, Homo sapiens
tagggctgtgtggtctggatttccattagaaagcctctttaaaaatacagtgttgtaaaatgttgccaggttacagacttacagggtgtttcatggtgacaccaagagttcaaatgctgcaacccatgacaagtcagcatcattagggcatcctcgtgtgcccagagacatctcatcaaaattgcaccacgtcaaaggagcttcctcaccatcaccggtggcaggtggcattccttattcagtatgcaaatgcattatttgcaaacagctactgcatggaaccacagaccaagacgtaggattccagaacaaatggacgacagagcattaacaagattgggagtgcctgtgcacttccactggaggcctggccagagaagtaataacatcgtcaaactaataaata

SEQ ID NO: 568847 - DNA, 904 bp, Homo sapiens
  misc_feature (9)..(9): n is a, c, g, or t
  misc_feature (65)..(65): n is a, c, g, or t
  misc_feature (82)..(82): n is a, c, g, or t
  misc_feature (86)..(86): n is a, c, g, or t
  misc_feature (102)..(102): n is a, c, g, or t
  misc_feature (118)..(119): n is a, c, g, or t
  misc_feature (126)..(126): n is a, c, g, or t
  misc_feature (142)..(142): n is a, c, g, or t
  misc_feature (145)..(145): n is a, c, g, or t
  misc_feature (157)..(157): n is a, c, g, or t
  misc_feature (171)..(171): n is a, c, g, or t
  misc_feature (175)..(175): n is a, c, g, or t
  misc_feature (189)..(189): n is a, c, g, or t
  misc_feature (192)..(192): n is a, c, g, or t
  misc_feature (198)..(198): n is a, c, g, or t
  misc_feature (200)..(200): n is a, c, g, or t
  misc_feature (205)..(205): n is a, c, g, or t
  misc_feature (212)..(212): n is a, c, g, or t
  misc_feature (218)..(218): n is a, c, g, or t
  misc_feature (224)..(224): n is a, c, g, or t
  misc_feature (228)..(228): n is a, c, g, or t
  misc_feature (251)..(251): n is a, c, g, or t
  misc_feature (262)..(262): n is a, c, g, or t
  misc_feature (286)..(286): n is a, c, g, or t
  misc_feature (505)..(505): n is a, c, g, or t
  misc_feature (542)..(542): n is a, c, g, or t
  misc_feature (549)..(549): n is a, c, g, or t
  misc_feature (556)..(556): n is a, c, g, or t
  misc_feature (558)..(558): n is a, c, g, or t
  misc_feature (560)..(560): n is a, c, g, or t
  misc_feature (580)..(580): n is a, c, g, or t
  misc_feature (588)..(588): n is a, c, g, or t
  misc_feature (596)..(596): n is a, c, g, or t
  misc_feature (598)..(598): n is a, c, g, or t
  misc_feature (603)..(603): n is a, c, g, or t
  misc_feature (607)..(607): n is a, c, g, or t
  misc_feature (615)..(615): n is a, c, g, or t
  misc_feature (638)..(638): n is a, c, g, or t
  misc_feature (640)..(641): n is a, c, g, or t
  misc_feature (659)..(659): n is a, c, g, or t
  misc_feature (662)..(662): n is a, c, g, or t
  misc_feature (664)..(664): n is a, c, g, or t
  misc_feature (674)..(674): n is a, c, g, or t
  misc_feature (693)..(693): n is a, c, g, or t
  misc_feature (697)..(697): n is a, c, g, or t
  misc_feature (700)..(700): n is a, c, g, or t
  misc_feature (702)..(703): n is a, c, g, or t
  misc_feature (746)..(746): n is a, c, g, or t
  misc_feature (770)..(770): n is a, c, g, or t
  misc_feature (772)..(773): n is a, c, g, or t
  misc_feature (791)..(791): n is a, c, g, or t
  misc_feature (864)..(864): n is a, c, g, or t
cgtgggtcnggggggtggggcgttccaagggtcggcgcattttccagtggggggttgtgggggcnttatccttttgattatntggnccagtggcgttgggtntttttcttctttgtcnngggtttngtgggggggtcggccngtnctttttctcggngtctctgtgggggnggcnattgagggggcgcnggngggggncnggggnggggggngggggntggggngggnggggggggggggggtgccgggcngggggcggggnggcgggcggggcgggcgtggggcncgcgaggggtgggggggaggggggggggggggggcgtggggccggggggcgggggcggcccagggaggggccgggggggcgcggccggggggggagggtccgcgaagcgagggcaaggcggggggggcgccggggcggggggggggggggggggggggggggcggggggggggcggggccggggggggcgggcgggggggcggggggacggcgggggcngcgcgggtcgggccgcgggtggcgcggggatagggtnatgtttnatttatngngnaaatgggaagaatgagtatnatgttttnaatgggtngnttttnaatnggaatganagggaggatatgaaaatttaganannaaatgtaggtgtagttcngantnttaggttcanaggtgaaggataacaaatnattnttntnnatggggtttaagttgttgatggtgatgtaaggaatgggaagantagggaggagattatgggtgtatngnnaaatgaggatggaaatanatgggttaagtatttaaaattaatagggtaatgaaattttatttgtggaaaaatatagatagggggaatgttngttttggaatgatgaaaatggtgagtattggggaggtatg

SEQ ID NO: 568848 - DNA, 883 bp, Homo sapiens
  misc_feature (540)..(540): n is a, c, g, or t
gattccaagctggctctgagtccgtctccagctctctcctgcaccatgcgtggtttcctctcccagttccactttagttttttcccactctttcatctacaattttcaattttttaaaatttatttatcgatttttttttttttggagaaaagttcacactattcacccaggcgggtcttgaactcgtagcctcaagcaatcttctagcctcagcttcccaaagttctggggattacaagcatgagccaccgcacggggcttcccattttcatatagacactgtgcttacacacttaattaagattggtcttctcagaccagatgtgggggctcatgcctataatcccagcacttggggaggccgaggcgggcggatcatctgaggtcaggagttcgagaccagttgggccactgtggtgaaaccccgtctctactaaaaatacaaaatattagccaagcgtggtgggcatgcacctgtaatcccagctactcaggaggctgagtcaggagaatcatttgaatgcgggagtcagaggttngcagtgatctgagttcgccccacgcactccagcctggatgacaacgttgagactctgtctcaaagagaatacaagtacctaagcagcaagccagacaaaacaacatgtgttggcgcccgccacgcgcgccactgaagagaagtttgtgtaaaacctcttggttgaggcgcacgcgggcccatcatgcgactctgcaacatgcgcggcagaccgtgggaccaaaagaaacacccgggcggcacaacaatggcgcgagatcccccgcaatagaaaaacgccggggagaacgagcgcgttcgtacgacaacccacaagagggctgcagagcgcacacggaagccat

SEQ ID NO: 568849 - DNA, 925 bp, Homo sapiens
gatggtataatacgcctcacactcattctcaacccccgtgacgaagcacatagcctaccccttccttgtactatcccttatgaggcataattataacaagctccatctgcctacgaggaaagagacgctagaaatcgctcattgcatacctcttcaagtcagaccacatagcccgtcgtagtggcagccattctcatccaataccccctgaagcttcaccggcgcagtactattctcgataatcgcccagggacttacatcctcagttactattctgcctagctatgtcaaagctacgaacgcgttcacgagtccgcattcaataatcctctctcaagggacttcaaagctctgtatccctactaataggcttttctgattgactatgctagcgaaagcctcgcataacctcgtccttagcccaccactattaacctactgggagaagtctctgagctagtaaccgcgttactcctgatcaagtatcactctccatacttacaggactcaaacatactagtcaacagaacctatacgtccctctacatgatttatccagaaaaacaaatggggctcacttcacaccaccaacattaacaaccataaaaaccctcattcaacaacgagaaaaacaccctcatgttcatacacctatcccccatatctcctacatatcactcaaccacgacatcattaccgagtaacctcttaacaaacacaaaaaacaaaaaaaaaaaaaagcaacaaaacaaaaagaaaaaaaacaaaaaagagtggggcggcagaggacgagaagaacgggataaacacaaaaagtagcccggcgccaagaaaagaagaaacacagaagaagaggaccaggagaaagggaaaccaaaagtggagagaacaacaaaaaaagggcgagaaacaggtagagacaacg

SEQ ID NO: 568850 - DNA, 186 bp, Homo sapiens
cacaccacctgagtcagagacgccatcaccggcgctggcgaaaacctggggatggggccacagacgctgactctaatgagtctcccaggtcctaaaacacatgtgacgacgacgagggccctgaccggatgcagtgcatgccatcttgaggactcatacctaagtggggcaggctggcgctgacaa

SEQ ID NO: 568851 - DNA, 430 bp, Homo sapiens
atataggtgcaaccagtctatttcttaattgagaggattcttcagaggcatgtagcttgcttgatctatcctttggatgtttgccacatgaaggacagaagatcttctgagcctgtattgcaaaatgagtgcgcacggtatactaatcataaatatgatcatcagctataaacgacatgggtcttggatcttgttgtagagagatactgcaaaggtcaccatctatgattatcgagaaatgagaagtacatgcgaatgcttttaaacatattcatgacaacgtgacaatcacgttataggatctagagatattcctgacgtcaatatgtggatcttaagccacaggtagtggtgtcataattagttaagcacccagagtatttgattcctgctttgtccatatatgtatggtatactgtactgggggtgg

SEQ ID NO: 568852 - DNA, 291 bp, Homo sapiens
agtgcgaacagattcatgtattggagaggttacacgtcaggtccctcatcctgatcttctacattaacagtaactgttgctgtgctcatagctgatttcgggagataaactctctggaaaatggatctccattaactacaccaatttgcaagatcatctgttgcatttcttcataattcaaaggcttaactacacaaagaactccttcattggttttggcatctgttacaattttaaaattgccattttcattgccctttaaaatggtataattagctctccagttagcag

SEQ ID NO: 568853 - DNA, 130 bp, Homo sapiens
gacgtgtgtgcctcagctctgagctcagtgatctgcccgccttgattccaaagtgctgggattacagacatgagactctgccagttttctattttcatagtgaaaaaaattctaatgtcaaaccacgaca

SEQ ID NO: 568854 - DNA, 291 bp, Homo sapiens
  misc_feature (39)..(39): n is a, c, g, or t
  misc_feature (147)..(147): n is a, c, g, or t
gattccacagtgagtagttataaagaatagttactacanataaacgctggctaaatagaagtgcattttgtgaagcactatgggtggtatatgttttgccacatactcttgttaccttgaggaagataacgcatgcgtacaaattcnggcattcatatttcaagttgctagctgagtatcaaatgtgttttaagaaatgtgtacagctatgaaacaacttgaaacatattcattgaatgaaacaatgttcttaggaaaaaaatcagctattttccatgcacattatgtaca

SEQ ID NO: 568855 - DNA, 787 bp, Homo sapiens
  misc_feature (769)..(769): n is a, c, g, or t
aagctcctagtatcagaagaagctgatacatagtgtcatgtgctcacgtggatgcccaagtctaccaactttggggagctgcagggtctttttgggaggtcgggaggaagggcagatgacttttgcttattttggggttttcaagcattggaaccaaaggccaaataataaacagcctttagctttttaaagtaaaagttcatctttactttgtcagagtacatcttgtattggtagacctgatgtaaagaacaagtgtcttaatgactacatttactgcacatttataatggttacatctgctttttgtctttagaaattaaaaagagaaaatctcgagaaaagcccacctttgaatacgtggctgaagataacagccaagaattggtctttcctaaaaatgcaacagataatgctgctagattgttattcttcgtgttgcacttttttgttcgattggcatttttaaaatcggtatttaaacctgaagacattgtcatcgttttacttaatttaacaaagtgtgacacacgtaacctgctctcgtacatcatgaccttaacaatgttaatgctgtaagtgataagttcactgtcgtctgtatactaaatttacttggtgtttctaacttaaaagtaagactgcagattatcccccaccagccttagtccaggggtgtggctctgtccgggtgcagtatgcagtcatgtggaaccttgctttctagtcctgggaaaaaaaaaccgagtgataactaaccatccttctnggctttcaatcacactta

SEQ ID NO: 568856 - DNA, 1693 bp, Homo sapiens
  misc_feature (73)..(73): n is a, c, g, or t
  misc_feature (449)..(449): n is a, c, g, or t
  misc_feature (490)..(490): n is a, c, g, or t
  misc_feature (684)..(684): n is a, c, g, or t
ttcatctttgtttcttttcctcgcgtcatatctcctgtttttctttcttctgctgctgctttctcgtctcgtnttctatctcttccttgtcttcttttcgtctgttctgcttgctttcttagtgtgtgtttctgtgctacttcttgtcttctcgtcttgttgtctgttttctgcttacttgttgttccgtctctgtatactttctgttcattctcgctttcttctcgtgtactgtgttctcttatcgttctgtttcctgttgtctctttgtttttcctgctctcgtttgctgacgcttaagacgactaccatcactgacatgacgctgtatcatagtacgctgtccgtcgagtgtatgaggaggagggagaggaggggggaaggaggagccgcgcgcagtgcatttctctcccctgctgttagtctgtgtatgaggttgagtcgtcgtnctgttatcgatcagcatagcggctgcttgcggccctacttntgtatttggcattgtgctggggtctgtctccgtctgcttgttgtgtggtgggacctggacttgcctcgtcggttggtaggtggctcgtagttagcgcatcgagttgtagtattgatcggggtcttgtgtgttgccgtctcgtctccccgcccacactatgtttgtgtagtgtcttccttgctgcctggccttanttgtttgttgttggtgctccctcctgctctcgggggggttgtctatctattgtgggggcgccctcgctgggatatatagatgcgggggtgctcttctgtgatcgagcggctcctctcttcccctagatggtggcgcgaccctcttttggaggggctgtcttttgtgcagacgaatgttggaagagcccctgggttgagcacgaaggaagtggtgggtgttgctccttttggaggtgtcgtggggtatgagtgggttccctccgccccgtcgtaaaatatccctccttttgtgttgggggacataggcgcacgcccgctgtgggtcccgcctccatggggggcgcatctatgtgggcagcggccaccacccaatgggtgtgcgctgtttgcgcagcaccaggccatgttgttgccatgtcgggaagagcgtggttgttgcgcgccacgtgtgttcaggggacaaaacccagcgaggccatgtgtaagtcctgcgcaacagggtacagattgcccctcactggtgatagggtgtgttatgtcctcgcgctccacgaggacgcgcccatcaattagaagtttatagggagtgtgtgtagcgaggtgctccgcccccgctactgttgtttggttgtaccacatgggggtgcgcccactcacaatggtaccactctccgctcgctctcctctcgcactcctttcccatgcggcctttccactctgtattcctgcaccatagcactctgtgccgccactcctttggtgtgcttcgattgtgtgagtctctctctgtcaccgtgccctcactctccctggtgtgaaatcgcgggagatcgcgccttcttcccacactcagcgcgattgcgcacttcttgcagagtcggacttatcgtggtgcttcgaggaccgccacttttcgcatagcgtgcttatgtagcccccgaggagtagaattggttattcatgacgaaaaaagtgtcgggcttctgtttcatcaatagaacagaaaaat

SEQ ID NO: 568857 - DNA, 167 bp, Homo sapiens
agtcagcgtcgagaaatcggcgaagtcgtcctcgccgaaattgcggcgaactcaccaccgcagttctatataggccaaataactcgctttctcaggctgtaggcctgcgaggccgacgacagcaacgcggcagctgctgcaaatagtgctcttcaaagaatgctttg

SEQ ID NO: 568858 - DNA, 341 bp, Homo sapiens
gatgtagagaaacgccccagtcacaaggttataaactgccccaaacatgagttgacttttaaccgccatggtgtgggtcacgtataacttctgcatccaccatgattcttccatggactgctttgccaaatcaaagctttgcagcaggcaatccatacagttgtgactagatgcagggaatgacacctaacagtggaatgggcactggcaggcagagggcacgaagcagtcctttaagaaacagtagctgtggcacagaggccagtgctacagtacagatggcgtccaagaaccgcacacatgcagctcgatgtcacagtatggggaacatctgacatcac

SEQ ID NO: 568859 - DNA, 1353 bp, Homo sapiens
  misc_feature (87)..(87): n is a, c, g, or t
  misc_feature (305)..(305): n is a, c, g, or t
  misc_feature (1353)..(1353): n is a, c, g, or t
cgtgggcctacggcgcggccaaggtgggtggttccttcgagctgcggcgcttcctgacgcagccgtaggtggtggcgcgcgccgctntgcgttggtactacgcccttgatcgatggttctccatggcactctataaggtgaggtgctagcagcgaaatgacccacgcagatctagagcaggatgtacgtagcgttgttcaacgcgcgaagcgagcgatgtcgctgccagctaatggcgagtagccaatcggaggttgctggccattccgtggcctcggactttacttcgtatggtgagtcggacngcggtcatttcacccgcagatcaagccaacgggccactgaccggccatagtaacttggtacatatgggtgaccctgacttctatctcagctcatctggaaccttatccgtactagggtgttgttggggttatctagcgtatctctacagcgaatcctagttgtgagcagttctaccgaaactcctcgagaggaacggtgctgagtgtgggggccagactgtctgctgtaccgggcgacgccgatcacgcttacaggcgtatctgtatatccagtgcattctccatgggcgtgtgcttggcgctccctggacctactcagctgctacagaggctggctgtggcacgacattacagtaccaggacattacgtttgatcccaggtccgtgatccgcgaaacacgtgcggtaacgctcgtccttaccccaggtgcactctgtggagcaaaatagatcaagcagccagcccttgcatcccagaagcgcggataaccatcgagggggctaacccagcctgcccccctgtggtacttggaggctggaaggtcagcggtgggaccggggggacacacgagaagggccctccccttttgccctgggacgtttgccctttgagcccttctggtgacttggctggccctctatttttgaccttgtttcactcctgttgcggttggcgccgaggcataagaggccgccagtagacatgcgcggggggctggacaagaggcagcacccccaagaggccacgtgtcgccagtaggaggtaaaaaacacggggacataccccaaagggcacccattgagcaggacgagtcagcgaaaggtatgacccagcatctatgagcactcaatcaccgcagtagtgaacaacacgaggggcccgcgacaatcagagctagatttccaccggaggaggaggagacgcagattttgacgctacgagggatcatcgtcctacgtgagcgtatcgatgcaacggccgtagaatgtagtcgatagcatgatgattacgtctcctgctacttatttgcgtttatcgatctcatan

SEQ ID NO: 568860 - DNA, 657 bp, Homo sapiens
  misc_feature (22)..(22): n is a, c, g, or t
  misc_feature (350)..(352): n is a, c, g, or t
  misc_feature (492)..(492): n is a, c, g, or t
gagtgggtagccttatttcctntttttttttttacttcgtttatttcagggggtggggtttcggccgaatgcccccaaagggagggtggcatacggttaaaaattggggaaaaaaaattttaaaccccggggggggagccttttccaaatttttgggggggcttttggaattttaaaattgggggggggcccttttttttaaaaaaaattggtggttgggggggggggcaaaattttgtccggaaccccttttctctccctttttttggtgaaaaaaaaattatcacgcggcgggccgtctctttttttataaaaacataggaaagaggaggggggtgtgggggggggcnnnaaaaaacccccggggggggggggggtgtgttgttttttttctcaaaaaaaaaaaaaaaaacacccccccctctcttcttttataaaaaaagaaaaaaagaggggggcccgcgttcctttttcttttttttaaaagaaaanctttccgccgccccttttttttttttttttttgaaaggggtttttttttttttttaaaaccgcccgcccaaaaataaaccccttcgctcccccgcccggaaaaatatttttatggggggagggagggggtggtgtgttcaccacaaggggggcgggcggacctct

SEQ ID NO: 568861 - DNA, 135 bp, Homo sapiens
acgctctctctgtggggtaagggtgataggtatacctgacgactggtaaggggtgcacgatcggtcgccaaggagggagtagaggtatctatatacttgtgggctaccggtggggggctacaacgaggacggacg

SEQ ID NO: 568862 - DNA, 1079 bp, Homo sapiens
  misc_feature (19)..(19): n is a, c, g, or t
  misc_feature (39)..(48): n is a, c, g, or t
  misc_feature (51)..(51): n is a, c, g, or t
  misc_feature (55)..(55): n is a, c, g, or t
  misc_feature (59)..(59): n is a, c, g, or t
  misc_feature (74)..(75): n is a, c, g, or t
  misc_feature (82)..(82): n is a, c, g, or t
  misc_feature (103)..(103): n is a, c, g, or t
  misc_feature (106)..(106): n is a, c, g, or t
  misc_feature (109)..(109): n is a, c, g, or t
  misc_feature (139)..(139): n is a, c, g, or t
  misc_feature (160)..(160): n is a, c, g, or t
  misc_feature (187)..(189): n is a, c, g, or t
  misc_feature (191)..(194): n is a, c, g, or t
  misc_feature (196)..(196): n is a, c, g, or t
  misc_feature (209)..(209): n is a, c, g, or t
  misc_feature (215)..(215): n is a, c, g, or t
  misc_feature (225)..(225): n is a, c, g, or t
  misc_feature (238)..(239): n is a, c, g, or t
  misc_feature (250)..(250): n is a, c, g, or t
  misc_feature (257)..(257): n is a, c, g, or t
  misc_feature (260)..(260): n is a, c, g, or t
  misc_feature (273)..(273): n is a, c, g, or t
  misc_feature (293)..(293): n is a, c, g, or t
  misc_feature (300)..(300): n is a, c, g, or t
  misc_feature (317)..(317): n is a, c, g, or t
  misc_feature (320)..(321): n is a, c, g, or t
  misc_feature (350)..(350): n is a, c, g, or t
  misc_feature (357)..(357): n is a, c, g, or t
  misc_feature (372)..(372): n is a, c, g, or t
  misc_feature (377)..(377): n is a, c, g, or t
  misc_feature (408)..(408): n is a, c, g, or t
  misc_feature (410)..(410): n is a, c, g, or t
  misc_feature (427)..(427): n is a, c, g, or t
  misc_feature (434)..(434): n is a, c, g, or t
  misc_feature (438)..(438): n is a, c, g, or t
  misc_feature (444)..(444): n is a, c, g, or t
  misc_feature (447)..(447): n is a, c, g, or t
  misc_feature (465)..(465): n is a, c, g, or t
  misc_feature (474)..(474): n is a, c, g, or t
  misc_feature (477)..(477): n is a, c, g, or t
  misc_feature (483)..(483): n is a, c, g, or t
  misc_feature (488)..(488): n is a, c, g, or t
  misc_feature (491)..(492): n is a, c, g, or t
  misc_feature (495)..(495): n is a, c, g, or t
  misc_feature (500)..(500): n is a, c, g, or t
  misc_feature (510)..(510): n is a, c, g, or t
  misc_feature (520)..(520): n is a, c, g, or t
  misc_feature (527)..(527): n is a, c, g, or t
  misc_feature (551)..(551): n is a, c, g, or t
  misc_feature (559)..(559): n is a, c, g, or t
  misc_feature (596)..(597): n is a, c, g, or t
  misc_feature (603)..(603): n is a, c, g, or t
  misc_feature (607)..(607): n is a, c, g, or t
  misc_feature (611)..(611): n is a, c, g, or t
  misc_feature (642)..(642): n is a, c, g, or t
  misc_feature (658)..(658): n is a, c, g, or t
  misc_feature (799)..(799): n is a, c, g, or t
  misc_feature (841)..(841): n is a, c, g, or t
  misc_feature (1055)..(1055): n is a, c, g, or t
cgccgaggctgccgccggnagtcgccaccgccgcgcccnnnnnnnnnngcncgcncgcngcacccggccccgcnngcccccnccgccgccgccgcccgccccngcnacnacgcagcggccacccgcccacaccagctcnatttggcggccctcgctcgcntcgcgccggcagtattgggcctacacnnncnnnncncccgcaagcagcnaaaaanttgaccacgnaacgagcccaacnnccccgaacgcngcccgcngcncgcaatggatgcnggtgtgactaaaagtggacnaaatgtnactataaccattcggcntcnnatgcacggaaaggaagtaggaagcatcantgggaanaaaggggagtaggtnaaaangatccgcgaggagagtagcgcgcggataaanancacggaggggaatagtncggaganaatnatcacnctnaccggccccaccaatgcnatcattaangcnttcgcnataancannganaagcnggaggaaganatcaacagcnccatgancaacagtaccgcggccagcaggcncacaaaanaccctgaggctggtggtgccggccacccagtgcggcnncctgantggnaaangcgggtgtaagaacaaagagatccgcgagantacgggggcgcaggtncaggtggcgggggatatgctgcccaactccaccgagcgggccatcaccatcgctggcgtgccgcagtctgtcaccgagtgtgtcaagcagatttgcctggtcatgctggagacgctctcccagtctccgcaagggagagtnatgaccattccgtaccagcccatgccggccagctccccagtnatctgcgcgggcggccaagatcggtgcagcgacgctgggggctacccccatgccacccatgacctggagggaccacctctagatgcctactcgattcaaggacaacacaccatttctccgctcgatctggccaagctgaaccaggtggcaagacaacagtttcactttgccatgatgcacggcgggaccggattcgccggaattgacttcagcnctccagaggtgaaaggctatttgg

SEQ ID NO: 568863 - DNA, 456 bp, Homo sapiens
cacgaggtataatggcgttgctgccgataaccaaggcagcctacggcagggcatgccggaagtaacgcctgtggagatacgagcagcggttgcgcactcggcccaggaacccaccgaagcgactcattccggctcgatgtcggggtgagcgccgtaggaatcccccgactttaggcgggggaggatgtcaacgcgttggtgacgtacagccgctcgcgcggccagccgagcgcctccagggcgcgcgcgagcaactgcccggccgggccgacgaaggggcggccttgccggtcctcctggtcgcccggttgctcgcccaccagcatcagcggcgcgtgcaggtcgccctcgccccagaccgtctgcgtcgcatggaagcccagcgggcactcccggcagccggcagcctgtgcgcgcagcgcctgccagcgggcctcggggtccgtcagggtgtcg

SEQ ID NO: 568864 - DNA, 118 bp, Homo sapiens
tgaggttgagagtgactctagacgatccctgagcggacattttacatttgcatcaggcactgacggaggtatttccacatagaaacagatgctctaactaaacgaaggacttgtgacc

SEQ ID NO: 568865 - DNA, 161 bp, Homo sapiens
caggaaaccgctatgactgaatcgactgaatggatggccagtcgtactagcctggcctgggtaatggactggcagcttcatcactaaaatgactcctttcactggaatccacatgttatgcagcccacactgaccacagagcaactgaataggtcagcatt

SEQ ID NO: 568866 - DNA, 501 bp, Homo sapiens
cgaatagacgcgtccctgcatgagtctgaggcttggtcattaaaagtgatatggccgggcgcggtggctcacaccagtgatcccagtactttgtgaggccgaggtgggcagatcgcttgaggttaggagttcgagatcagcctggccaacagagtgaaactttgtctctaataaaaatacaaaaattggccggatgtggtggcacacgcctgtaatcccggctacctcggaggctgaggcacgagaatcgcttgggctgggaggcggaggttgcagtgagccgagattgcaccactgctctccagcctgggcgacagagtgagtgagactctgtctcaaataaaaacagggtgatatggcctctccttggatctctcttggaacacactcaggggaccccctcatgaactgcaggaaagacttctggtttccctgaagccaccatgctgaattgaccacacacgcaggagagcgacgcccgaggagaccgcttcaaaatcg

SEQ ID NO: 568867 - DNA, 213 bp, Homo sapiens
  misc_feature (42)..(42): n is a, c, g, or t
gcccccgaaagacaaagactaaagaagaggaaacaaacggangcctgccaggactgcatataaacctttcttatttgagctaggctgaacagacgtgacctagaagaaactgaacaaaagagaagggggtgggggctagttttcaagtgggaacctgatagtgaaaagcacagatggagaaaatgcttcagaaaaactgttggatgctttcct

SEQ ID NO: 568868 - DNA, 471 bp, Homo sapiens
  misc_feature (17)..(17): n is a, c, g, or t
  misc_feature (60)..(61): n is a, c, g, or t
  misc_feature (190)..(190): n is a, c, g, or t
  misc_feature (350)..(350): n is a, c, g, or t
ccgagacgtattacttntcaggaaggtattcaagattgcccttgtgcttgcctgttttgnnatcgcgtcgggcctggtgctcggaaaatggctgatcgcgcttgtgttcggagtcgattatgaacaaagctacattgtctttgtgatgttcatgctcgccctgcggtggcgataccgtctatcctactgngatacccattcttgggcgccatgggaaacgcgtctgcagccaatcgaagcgtgcttttcgccggctccgtgcagctcgtaacactcggagtgctctggatctatggatggacatcggcgcttgctgtagtggtcgccgtcctcatcgccgagataaggcnctcgcgtggcgcgtccggtatgcactcccctacttcaaactcaccacataacagcggatctagcatgaaagaggtaaagaacgtcgcggttatcctcgcaggcggcaaagggacccgtagc

SEQ ID NO: 568869 - DNA, 155 bp, Homo sapiens
tgtaaatctcagcactttgggaggcaaggcgggcatcaccgaggtcggagtcgagaccagactgatggagcagaatggaaagcccagaaataatgccacacacgctacgaccatctgattttttttttattcctggagagggagcgagactctgg

SEQ ID NO: 568870 - DNA, 319 bp, Homo sapiens
gcggccgcctactactactactaaattcgcggccgcgtcgactggggattctgagtgtggactaccaaatatgacatatacactgctagggatggaacccaggagcccgtgtgccatgctagaggagacctcttccttggtggccacaccccagccctggacgcagtgctttccagataatcaactccttgttgatcttggactcaatcactgccagtacccaacacctgctggaactcttggtcttcaaggtactggctgatcgcgcacagtccagtgacttcctgttatactatacctccttcagtccatgccgtcg

SEQ ID NO: 568871 - DNA, 436 bp, Homo sapiens
taccaccccatgtctacagctatcaaacgcctgggaccattcaataattatggctagtagattcaatcactagagtacgtatacgatggttctagtcaaatcacaaaccattactgccttcttcctccgagtgagaccccgagggagatatgaaagaatatacagacaaagaggatgaattaagagccttcaacacacatctgaaacgagtcctggggaagagacatggaaggaatagtaaagaatctctgaagagatcattacttatatttgcatctaattaaaaatgtgagtccttaccataaatactgagtaccaaaccggacatatcatagtcttttctggccgggcttggtggctcacgcctgtaatccctactttttgggcggctgaggctgggtggatcacttgatgtccggagtttgcgaccagcctg

SEQ ID NO: 568872 - DNA, 113 bp, Homo sapiens
tcgctttacatcggcactcgctattcatcggcaccattagctctagaggtccatgcatacttaatattatacttgaattcaactacgggtgccgatgtagcgaggtgccgatg

SEQ ID NO: 568873 - DNA, 165 bp, Homo sapiens
tgtgatgactcttgcgttcccgttcaggcggcagtggttcagccctgcggcgcaacgtctcattgccgcggctgtcagaaggccggactttcgcgctgtctgacttcatcgtggacccctgggatgcagagttatggtggcatctccttagcggtggaaggcccc

SEQ ID NO: 568874 - DNA, 1704 bp, Homo sapiens
  misc_feature (669)..(669): n is a, c, g, or t
  misc_feature (815)..(815): n is a, c, g, or t
  misc_feature (1040)..(1040): n is a, c, g, or t
  misc_feature (1301)..(1301): n is a, c, g, or t
gtcgttcgtggtatgcgtgcgtctgtccttgctttgtcgcgtcggttgcgcgtcgtccgcgtctgctgctcgcgttgctggtgatgctgtagttgtgcctcgtgcgcggacatccacccgggtgtgtcccttgatcgacggccgggctgatctccgtccgcgtctttatttaattgcccgcgggcgtgatatctctttcttccacccgaggagccgtgttgccccctttgcccccttttttttggggcagccccctctgtcgggccacacgcggtgtgtgcacccaaaacggcacgcggtgtgggtgtccccggtcgtccgtggagtttctccccgggggtgaattttgctgttcgagtccccaccggcgcgtcgctcgggtgtttaaaaagtgttgtaaatgggggatcttctgcggcccatacttttgtttcccccgcgcccgtgttttgtccccgacgaggatactggtgcactgcctttgtgtggcctgttctccccccttttttgtatggtggagggcctccccccgctcttgcgcccccagaggtgcgggacaaacacaacagtggtgtatctacccgtcgctccccgccccggcgtgttaatcccgcctctagtgacctccgggttgtccacaacaggggggttcagtggccaactatgaanttccagcacgtgtgggtggtcccccctcttctaatatttatatggggggacaccccctgtcttatatgtaaaaatggggcgctccccacacaccccaaagcgggttgttcaacacgctggtgttcttttcgttaacacttgctgtntggaaccgcaccacgcggtgtggaaaattgtggagaccccttgttgccccccgcctgtagtaagatagggctcgccgcgccacattatataccaccccacgcgcatcattagagcgccgtgggtaggaaggagccccccctcatttgggggaagccttttcttatatagtgtatatgtataatgcgccacacacacgtttatgcctctctacacacacagctccncacacacggggtttcctatagagactttcctcgcacacacccttgcgcacgtttgtaagaaaaatttccggcgctctgtgggggcgaaaccttctcggtggccacgagagacccacacactcttcgcgaggccccgggacacacacgtctataagagacttctacaccacgctttcaacaaggcgcgaactatcctatatatctccacactgtgagatccgcacactataacttgtagacccacctcgcggacacacacgnttatccctcatcgggagatataacacggcgcacaatcctatattttctaagagaggtctcacatatatcacaccacaataagggggtttatacgagacctcgagatgtgttggagatacacgcgagacactctcccacatgtgtcgcacacccgcctatttataaaagggtttgtttgtgtttctcaacgagtttaaagtctctaacgtgagtttgaggttctcgacccggaggtaaatcccggtctggtttttattttacttctcaaattctcctccccgtatcgaaaaggacaccaagaagaaaatataaggcctatcttctcccaaagcggcctttccccgtaaatgatatcatttccactttgtattataccccccccccccccagaaccggggtttta

SEQ ID NO: 568875 - DNA, 843 bp, Homo sapiens
  misc_feature (39)..(39): n is a, c, g, or t
  misc_feature (149)..(149): n is a, c, g, or t
  misc_feature (152)..(152): n is a, c, g, or t
  misc_feature (179)..(180): n is a, c, g, or t
  misc_feature (182)..(183): n is a, c, g, or t
  misc_feature (217)..(217): n is a, c, g, or t
  misc_feature (273)..(273): n is a, c, g, or t
  misc_feature (290)..(290): n is a, c, g, or t
  misc_feature (335)..(335): n is a, c, g, or t
  misc_feature (342)..(342): n is a, c, g, or t
  misc_feature (345)..(346): n is a, c, g, or t
  misc_feature (348)..(348): n is a, c, g, or t
  misc_feature (360)..(363): n is a, c, g, or t
  misc_feature (366)..(366): n is a, c, g, or t
  misc_feature (369)..(369): n is a, c, g, or t
  misc_feature (374)..(375): n is a, c, g, or t
  misc_feature (384)..(385): n is a, c, g, or t
  misc_feature (391)..(391): n is a, c, g, or t
  misc_feature (393)..(393): n is a, c, g, or t
  misc_feature (396)..(396): n is a, c, g, or t
  misc_feature (399)..(400): n is a, c, g, or t
  misc_feature (407)..(407): n is a, c, g, or t
  misc_feature (426)..(426): n is a, c, g, or t
  misc_feature (440)..(440): n is a, c, g, or t
  misc_feature (461)..(461): n is a, c, g, or t
  misc_feature (466)..(467): n is a, c, g, or t
  misc_feature (476)..(477): n is a, c, g, or t
  misc_feature (507)..(507): n is a, c, g, or t
  misc_feature (512)..(513): n is a, c, g, or t
  misc_feature (525)..(525): n is a, c, g, or t
  misc_feature (544)..(544): n is a, c, g, or t
  misc_feature (546)..(546): n is a, c, g, or t
  misc_feature (551)..(551): n is a, c, g, or t
  misc_feature (553)..(553): n is a, c, g, or t
  misc_feature (558)..(558): n is a, c, g, or t
  misc_feature (566)..(567): n is a, c, g, or t
  misc_feature (575)..(575): n is a, c, g, or t
  misc_feature (577)..(577): n is a, c, g, or t
  misc_feature (828)..(828): n is a, c, g, or t
tttacatgggggaattttattttatttttttaccttttnaaaagtttttggcactacaaggttctgtaaagaatagaagtgacaatttaaaacacatgaaattctttcctaacttttaagaacaatatataaagtctgaagcaaccaangtntgaatacagctaatagaaaataaaganngnnattttttaaattctctctttatacaattcatcanggttaaacaaaacataaaattcccttaaaaatagggtaataaaatagatgaaattngtatcactcaatttggngatactagtaaaaactatagttcatatttatatacaaataatacngtctgtnaanncngtcttagaattnnnntangcnatctnnacgtgttannattttnantcnggnnctgattngtttagctttccattaaangtcactttttctgntgaatgtactgacattgaggnacggnnccccttganncagcagattggctgttgctgtgcatcggtngaccnnctgaaagaaaanggactgcattactccgacncntttcntnttggngggtgggnncaacgctntntaaccgacgggtggcacatctgtcttgagtatagaaaggtttgttgggctggaatcgggcatttccctgatgcatgaagttttgatgcaaaccataaggccacgaagctgggacaagggggaaatggggacgcggtgcatgttcccaaggaattggaggagtcagtcctcgaaagcctggctctgaattccccactgcaccactgtttaccagggaatttggagccacagtacggggccagtgtccatcgngggacgtgttagggg

SEQ ID NO: 568876 - DNA, 404 bp, Homo sapiens
tgatgttggagtgggccctggtgggaggtgttcgggtcgtgggagcagatccctcatgaatggcttgggccatcctcttggtgatgagggaacactcactctgagtgttcacaagatctggtggtttaaacgtgtgtggcacctctccccacccccactctttcttgttcctgcttttgccatgggactcgcatgatccctttgccttctgccaggactaaaagctccctggagcctcctcagaagctgagcagtgttggcgccatgcttctggtacagcctgcagaaccatgagccaattcaacctcctttctttataaattacccagcctcaggtatttctttatggcaagacaagaacagcctaatacaccaggggtttgcaggtaacccgggcccctgtc

SEQ ID NO: 568877 - DNA, 126 bp, Homo sapiens
ttcagaattttggaaaaatgtccctgaagtgattgaaagagtgcctggcatgcaaggataagaggttctttccataacatttcctaaacccctcataaacgtttgttgcccttggtttagaaattg

SEQ ID NO: 568878 - DNA, 456 bp, Homo sapiens
ctacggaaatactttcttttcggtctaggtcgcttccacgttggctatgcctagaacacagtctccctcatctccaaacaatttctcccgactttctttcttttttgagatggagtcttgctctgtcgcccacgctggagtgcagtggcctgatcttggctccctgcaacgtctacctcttgtgttcaattgattctcctgtctcagcctcccaagtagctgggattatggcacatgccagcacgcccagctaatttttatatttttagtagagacggggtttcacccatgttggccaggctggtctcaaactcctcacctcaagtgatctagccaccttggcctcccaaagtgctgggattacaggcatgagccaccgcgcccagccaggaagggaggtctattttagatataatggtccaggaagaacttactgagaaggtgaaatttagtaaa

SEQ ID NO: 568879 - DNA, 442 bp, Homo sapiens
  misc_feature (14)..(14): n is a, c, g, or t
  misc_feature (19)..(19): n is a, c, g, or t
  misc_feature (53)..(53): n is a, c, g, or t
  misc_feature (131)..(131): n is a, c, g, or t
  misc_feature (344)..(344): n is a, c, g, or t
  misc_feature (393)..(393): n is a, c, g, or t
  misc_feature (438)..(438): n is a, c, g, or t
  misc_feature (440)..(440): n is a, c, g, or t
cctaactcaacggnataanccccttgccccctgcccctttcttttttacgcanagcccaacccgggtaatctccgtttcccatctctgcaaacctcccccggtgcccagattgagcctagaaagggggcanaggagggggcccagattgagcctagaaagggggcaggcaacagttgtcacgcctgtaatcccagcactttgggaagccgaggcgggcagatcacgaggtcaggagttcaagaccagcctggccaatgaagtgaagccccatctctataaaaataaaaaattagccgggcgtggtggcacgcgcctgtagtcccagctacatgggaggctgaancaggcgactcgcttgaacccaggagacggaggttgcagtgagccgagancacgccactgcactccagcctgggtgacacagtgagactctgatntnta

SEQ ID NO: 568880 - DNA, 332 bp, Homo sapiens
gcagatctatgtatcaacgagaaatataggactggggctactctctgggagtccgaggtgagcggatcacttgaggccaggagtttgagaccagcctggccaacgtgacaaaaccccgtctctactacaaatgcaaaaattatccgggcatggtggcacatgcctgtaatcccagctactggggaggctgaggcaagagaatcacttgaacccaggaggcggaggttgcagtgagccaagatcgtgccactgcactctagcctaggtgacagagtgagactcaggtctcaaaacagaaacagacatagaaaaaatctttgctgaatcgaaca

SEQ ID NO: 568881 - DNA, 456 bp, Homo sapiens
tgatggtgcgctgtgatgaatgtggcacagtcatgcttccctgtgtgtggcctggtgtcattgttggtgactcgctgtgtgtgctgtgggtgcactggcctgtgcatttcactgcattgcttgccaccccagatccaccttgtctccactttcacatgcctccagagtcttgtgtgctcttcccttcttgtcctcctgatgtggggcttgccattctcatcgtttgtccagtgtgatgtgttgcatccaggtgagtctgtgcttaacgcttaggactgacatgccctgtcccccatccccctttacctacgcggtatccttggttcccctatatgaactggtggggtcctttggcgttccttggagggccctttggctggttttcccccttatcgtgtttgggccgtccgggtggcccatttcccaaggtcttttggcgcttttgtgggggttctg

SEQ ID NO: 568882 - DNA, 170 bp, Homo sapiens
tactaatggtaaccagtcaaataaaaggacatcagtggatacctgacttctcagtgatccttattctagctacaatgtcaaatgataactcctgaatcactgtgtgcatcacttctgtgtggatcctacatagagatctgacactgcatgtgcatgcaatgcttgtgcac

SEQ ID NO: 568883 - DNA, 1191 bp, Homo sapiens
  misc_feature (276)..(276): n is a, c, g, or t
  misc_feature (713)..(713): n is a, c, g, or t
tggaaacagagtctccatttgtcccccaggtggagtgtaggggtgcaactcttgggctcactgtgcaaccttctgtgttcccccatggtttcaaggaagattctccgttgccgaagacctcccatagtagcgtgggattatatgcatgcccataccaggttccaacataattttggggaatttaaagataacagacgggggtttcaccagtgtttgcgccacggcatgggcttgtcagaacctccttgacccctcaaggggtgactccttctccanccttgttggcactcatcaaaaggtggttgagcaattataccgaggtgcttagaagcacaaggtgcgtgccacaaagcctgtttaatttattcataagacaagaccagggggctcttaagcatcggttgtgtagcccacaagtgcgtggaggacgccaaccactagtgtggactgtggccctccaacagttgaagatggccttgtctagtaaaacatcctctgtgtggcctactcaaaaagcccgatttcaagtattccacaaatcttttataagacccgctcctatgttgaaaattttaggctgtaagggactccttaaccagggtgtgtgtcattgtaggccacagacacagatgtgtcccagtttgggagacgaaaactcgttagttagaaaaacacgttattatggagtataacaaaaaacgacgaccagaggnagaaccacgactgtgtgcgcaacacggaagatatatagcaccacaagagttcattggggtaccaatcaaaaaagcgtcccgtgggtgcagcaatcaagagggtgtgaacatccctgtttttaccacaagcaaattgtggggatatatcccacaaaagaaggtttccacggcgggaattatataaccagcgggttgttgttgaaacaccaaccaaaaaggggcgatgtgggcccaatataaaatttagctgcatttatcaacaaagaaaaagggggcatgcaggctaatataactgatgtcgccgttgtaacaagtccagttttttggcaccagcagacgtcacgttgtggttatcatgggggtacaacatacccaacaggttgattatcgagaaagtagtatgccaaaggtcggcaaatgttgagacgacgagagcagaaccaaatatgtgtagtatatgatcagatgaaatcaatcg

SEQ ID NO: 568884 - DNA, 203 bp, Homo sapiens
cttatcataccaagctcagccagattccatgacctactgcgccagttaagcacattatgaccagaagcatgacacaccagaggacatctgtgtttgctcttctttctaatttgctgcgcttataccgtggcccactgttgttcagcattgctttggtttcatggcctgcataaaccacaatgcccacaacagcctctgtgttt

SEQ ID NO: 568885 - DNA, 141 bp, Homo sapiens
tgggtaggagatctgtgacttcttggtgatgacagggctgggaatagggtcattctgatttcaagtgaggagcaggctgtgtgtactgtttagagaatgtggcacctacctgtcttcagctcttggtacttggccttatcg

SEQ ID NO: 568886 - DNA, 127 bp, Homo sapiens
aaaatgagaggcagagggtggatgtaggaggtgtagttcttccccgagagcaactagcccaaccgagaaaaggttttaggtcctgggtaagaaggagggcctcagtcccactctcttaccacctacc

SEQ ID NO: 568887 - DNA, 497 bp, Homo sapiens
cagagaagggattgaggagccctgggcttcctgtctctgggagcatcagcctggggttgctgtggccacagaagccgtccagcctcatctgggcaccaacgtggccttccccagcaggtctcagcactacaggtctgtggcccatgtccactcttaggccatccaggggcaagatagtcagagcaggactgattttgcccagggacatctgaggagccaacaggccagatcagggacaaatggtgtgcccgaggctgtgctgctggtagagggtgtgggcagatggggcccctttccctcaaatgcctgccataccaggaagggaaatggaaatggcctcttttcttaaataaatgcatggtgtaggccaggcgcagtggctcatgcctgtacgcccagcactttgggaggctaaggcaggtggatcacttgaggtcaggagttcgagaccagcccagccaacatggtgaaaccttgtccctatcaaaaaatgcaaa

SEQ ID NO: 568888 - DNA, 1718 bp, Homo sapiens
  misc_feature (98)..(98): n is a, c, g, or t
  misc_feature (181)..(181): n is a, c, g, or t
  misc_feature (227)..(227): n is a, c, g, or t
  misc_feature (570)..(570): n is a, c, g, or t
  misc_feature (1381)..(1381): n is a, c, g, or t
ctcgatcgtcgttacgggtatcgcgggttgcagtcgcacatggaccactcaatgtgcgcgggggcctgaagactgcagggcaaggagcacagaagccntgagtgcgcaagtctcccaggattcatcatctgaccctggggatggctagcttcgcgtagaacagagacgctgacagcgttcncctgaacacgtgaggcaataaccatgcactgtacaccacacttgtncggtatggcgtgctgtacagtcacgcagcaccaaggcacgagtactccggaagtcagtcataattggactcagaggaaacattttccacctcgaagttgcgaacgatggctgcagagcatacacttaatcacctggctaagaatctcgaaatacacaaaatcacactctataggggggcaaatacctgggcacacaacacgattttacccgcgtggggggttgcaatcacaaggaccgccgtctacacatcgcttgaaatttgcatgacccagctcccaattgtaggtcaagacccaaattccagagggagtctctcacgcaatgccgtccggaaattgaagnctcgcgacagtcaaagcggaatcacaggtccccgcggccacggtggggcctgcccatggccacccggccagtcatctaccacagaagtgtgtgccagcattgggcacccaatatctggcaatgtccaacacgattcgccttaattcggttgagattccggtaggagcgaatcttcaaccgcaacacggggggagagcgccacaccttcacaagggggttccccggtgatcgctaatcaggtgaggtacagtgaacacgtttcccacaagaatcttacggcgttccacgcggtcggtttatcagttagcacacgggggcttcgaaatccacgtaaccatggagaggggcgcggtcaggttttgcaccggaatagaagggcggtgcccggtagaacccacccccggatatagacactcggaattacttcacgtctttccaacatccttatgagcgtcaatccattgtagcgcccaacttaccctccaattccccggagggaaaacaagcggggttatgaacttacacttcccattggtttggccatacccaaattaggattgccagaggaaggcctaggagccaccaccaaaagaggggtggacgttggaagcccacgatgagacaagacaatacgccacccgtgggaaagggcccaaaggggggccaatggggcacacgtgggacaccaaggacaaccggaaagcccgataatcacgttgcgcaggaccatggaaatccaggcaacgcatcacccaaggaccccaccttcagcgattgcatgggggggggcgcaaaaggcagaacgccccanttcccctgtaacgcgttgggactagataagcactggaggcacaaagcgtatgccgaatcccgccgctgccgattcgccacaaagaatcaatggtcagcagtaaaaagagcacacccattacgggcccgtacgggggacacacgagacaagcaagcagaaagagagcacacagagggccacagaaataacaaccacaacacagcgaagacaagaagagttcagaaaacaaacagggagtaggcaagtaacagcacagaaacacaaacacagggaagcgaagagaagtaatacaaccacagcaacgagtttcaaacaagaggaagcacagcaagtacag

SEQ ID NO: 568889 - DNA, 217 bp, Homo sapiens
atcagagaaagggctgcacggccagcgcccaggcagtagtgtataggaattcttagtcctcgcctaaaacctgctccctttcaccctaatccagtctccacctgcccctcccccagaaaaaccaaattccaaatggctgagacagtaagacggctactaatctcgccttcctctaaatctctacaggacgacagaccatactgtattctacggctcc

SEQ ID NO: 568890 - DNA, 159 bp, Homo sapiens
gaagtgagagcagatctaggagaaccgagccaagaggtgatgctgtgcaagtgaaaggtaactcaagctaaagccagaagggagcccatacagcgcaacctgtctgtcagagattgcagtataccgtctccatgtatccagaagccatctacacaagag

SEQ ID NO: 568891 - DNA, 386 bp, Homo sapiens
tctgttggggaacatatggctgaatggggaatagttcgaatggaaaaattagaaatcggtcattaggaaagagttaggttactttagtgaaatcgcatcttcctgtgaaccaacatcatatttctcttatagtagcagatttagtggagggtttgctgcccgagactaccgacaaagtaccggtgccaacacttccagcttcagcatcagtcgcgcaagaagcagccgcagtggcggaggtggccccggtagcagcagaggatttggtggaggtagtgttaatctgtaacttcatagctttgggacgggtttatattccttttagtcatctttttcaaagcctaattaaacaatttaagttcaccactatagaaacttgatggcaa

SEQ ID NO: 568892 - DNA, 224 bp, Homo sapiens
ggggacttgaattgtgggagtagccgagacatgtggaataagtggttagctatggaatgtgtataaaagttttgggagaaggaaacatgggggcagcctcctctctcctttcggtccctggcaacctcatagatcttcatatctagaaggaaatctatgatagattttactgttgatttgttgatttctaccttgggaatacagaaggagtagcccattgtggt

SEQ ID NO: 568893 - DNA, 179 bp, Homo sapiens
ctggtccatactagtactctttgctgtcacagacaggaaaatatcatcataagaaaactacaggccgggcatggtagctcatgcctgtaatccaagcactttgggaggccgaggcaggcagatcacttgaggtcaggagttcgagaccagcctggccaagatggtgaaaccctgtctct

SEQ ID NO: 568894 - DNA, 909 bp, Homo sapiens
ttctttgctgtgatattgttctgttttgggctggggttgtgttgaccagtccgtttgtcatggtgtctgcgcgtttgtggtccatgtttaactattgggtcgtcgcgaatccggttgcttcacgtattctttggtcgccccctgccggggtcggccgttttccgggtcctggcgctcctggatttttcccgaccagttgcgcatgccttggcggtgggtgcttctgctgtccctggtcactggtggtggtccctccttccatgtgttgcggacgccccccctgggggtcatggttgctcccgcctctccgggatatatgccgtggttcatggctgtggcgtctggccgcgtatgtgtctcttggggccaatatccactacgcgggcgtcttatcttcgggtgcgggttgcctgtaggggtttatatctgagtgtacataatctattcgtatgtgcagtgtagtcgcttctcgttaggcagtctccatttcgggaccccctcgggtgtgcggtgattttgccgtacattccctattggggggggcgttttttttcgtggatcacggctcggccgctgtcgcgtgttttggccgtatgttcctgcagccggtgcacccccttcacgtggttggcaaaggtcggtgttcccgcttgtattccttgtcatggccgcttgctttcttctgatacgctttgcaatggatcccactgcttggcggtacaccctctctgttgtctggcacgctccgtcgcacaacgaggggggtctgtcgtcggaccaccaccttattttttgcaggagcgtcggctccgtctcttccccgcgggttgtatggccagccccgggcgaggctccaccctacggggaatataacagacgaagcccccgtcagtaaccgaacaaatcgca

SEQ ID NO: 568895 - DNA, 193 bp, Homo sapiens
ccggacccggaaatggtagctgtactggggcgtccctccaggccgttactcatactacaggatatatactattactcccaggtatcagcagaagattgcgtagctctcaaatgtgtgttcctgctttactaatggatattttaaattcatgcaacaagcaccttgtaggtgcctgctgtatccctacattaca

SEQ ID NO: 568896 - DNA, 148 bp, Homo sapiens
ggttggccccatgggtggtggggtgtgaaaagcctgcaataccccaagaccccagagggcagtccttaggaagcccttaccccccctgggaacccctccgttttttccctttactttcatcctaggaataaagcatttccccgccaga

SEQ ID NO: 568897 - DNA, 226 bp, Homo sapiens
  misc_feature (92)..(92): n is a, c, g, or t
  misc_feature (194)..(194): n is a, c, g, or t
tgtgcgttccagcacagaggacgtaagtgatctaattcctcagtaaatattttattaaattaaaatagggggactttgctgcattaacaaanacttcttaaatgtgcttgttttgttgccgagcttttaacttttttttttgtttgtttgttttttgcactgtatcaaagaggagccattgaggaatactgttnctcctatcccagaaggagcggcacatgcgttg

SEQ ID NO: 568898 - DNA, 456 bp, Homo sapiens
tgttgtgtgtgtgtgtgtgtgtgtgtctgtgtgtgtagggactgggttcaccatgtcgcccaggtgtgtgcatgtgtgtgtgtgtgtgtgtgtgtagggactgggtcacaccgtgttgcccaggtgtgtgtgtgtgtgtatagagactgggtttcgccatgtcgcccagggtggttcccaactcctgagctcaagtaatccatctgtctcagtgtctccaagtgtagagattatgggtgtaagccccgtgcccagacagtggtgcactacaaatcttcaaaggaccagcatatctggagggtgatgcagaaataccccagagtatctctaagcaggactccaggtctctgctgcatccctagtgtgtccagtctgtgatatgctcaagaatactaatatcagtgtgtcacagctaacgtgacgctcatctaatcaggaaaatcttggggtggagag

SEQ ID NO: 568899 - DNA, 1078 bp, Homo sapiens
ccacgcgtacgcccacgcgatcggtacccatctatagtacactgtgtcccctggtcacgcagagcagcctgaggcacaatgcctatgtcgcggctgtggcggtttgaccatgaatgctgggaacgtggctgaatgagcggtctgggtcttgtgcaccaggaatggcagccagctgactgtggacatacattgcccccacagttggggtactgggtggccgtcatgtcccctccacatcccaggtcccgtagtaacacaggacattaccacgtatcacacggtgtaacttataggcccattttcaggcaggcaatggctatacataacttatatgtgtttatgctgtagtctacctatttcatcattcattgccaggcaggcaagtagcttgcaacacctccgatcagcaccacagcaaaactgcagcatcccatgccaggacctggagagttccaacaatgagaccagctaccacgtccactgtcacaccattacacttgcatgttaatcacgccagagcgtacagcaattccctgtgaccctgaaatgtccgatcacacatgccacatggccagatcccagacggccacccagagcatcgacaggaactggactgatgtgtgatgatcaaatcatgtgaaaactgattgtcctcccgaggcaggcgacaagtggtgcccccttgctacaacgccccacatagcttccactgcctacttcgctaacaagctgacctttcacccaagagacacatataaggcatcccctgtggatgtggacggctaccatcatccatggccactggtcaaagatggactaacactggcacagatcctcctttttgacacacccgtacaccaccccaccgatgggggcacgccgtgggggccaaacagcacgaaaacgcaataacgcatcgactgggcaggcccaacacacccacacaaaccggtcaagcaccgcccactcaaaggaggacagacgcacccaggagccaccaccatcccaccagcgccaacgtgaccgacacacaaagagaccataactaccacgacacggcaccaccaaccagacccaa

SEQ ID NO: 568900 - DNA, 101 bp, Homo sapiens
  misc_feature (8)..(8): n is a, c, g, or t
acggtctnaccacttttagttggactgtattcttactgttgagtttaagagtctctgtgtataccaatacaggtcttagttgacaggtgattttgtgatat

SEQ ID NO: 568901 - DNA, 520 bp, Homo sapiens
gctggagtcggagttgtaacgctccactgactgatagagcgacctgtgtcctgtaaccatttgcgcccggagtggcccgcgggccgacgccgtactggaggttgacggcctcgggtggcgccgcgctgctcctgcttgcttcaattccctgtgattgtgcctgtctgttgccagtgatgccatcacaccgtgaaatagaccgttgccttttgggtttcccttccagcaaaactaagaaaaaaaccataaaaagccctttgctttgacaatcgaaagtttggcccctttgaaaatggaagaaaccccggattttttaattattccccctttgggagtttagcctattaacatgggagggtttggcgccaaaaatccaaccggttaaagcaaagagcgtttgtacttggagctaaccccaggttagcaacgcggtctttgccaacctggcgttacccgtttccgtaaaattggacgacttctttgtccaaaacacgggccccttttggtgccccgcgggaaa

SEQ ID NO: 568902 - DNA, 793 bp, Homo sapiens
  misc_feature (7)..(7): n is a, c, g, or t
  misc_feature (23)..(23): n is a, c, g, or t
  misc_feature (175)..(175): n is a, c, g, or t
  misc_feature (184)..(184): n is a, c, g, or t
  misc_feature (199)..(199): n is a, c, g, or t
  misc_feature (202)..(202): n is a, c, g, or t
  misc_feature (307)..(307): n is a, c, g, or t
  misc_feature (319)..(319): n is a, c, g, or t
  misc_feature (396)..(396): n is a, c, g, or t
  misc_feature (402)..(402): n is a, c, g, or t
  misc_feature (409)..(409): n is a, c, g, or t
  misc_feature (448)..(448): n is a, c, g, or t
  misc_feature (475)..(475): n is a, c, g, or t
  misc_feature (481)..(481): n is a, c, g, or t
  misc_feature (485)..(485): n is a, c, g, or t
  misc_feature (496)..(496): n is a, c, g, or t
  misc_feature (502)..(502): n is a, c, g, or t
  misc_feature (521)..(521): n is a, c, g, or t
  misc_feature (527)..(527): n is a, c, g, or t
  misc_feature (532)..(532): n is a, c, g, or t
  misc_feature (534)..(534): n is a, c, g, or t
  misc_feature (545)..(545): n is a, c, g, or t
  misc_feature (554)..(554): n is a, c, g, or t
  misc_feature (561)..(561): n is a, c, g, or t
  misc_feature (569)..(569): n is a, c, g, or t
  misc_feature (607)..(611): n is a, c, g, or t
  misc_feature (638)..(638): n is a, c, g, or t
  misc_feature (727)..(727): n is a, c, g, or t
  misc_feature (735)..(735): n is a, c, g, or t
  misc_feature (776)..(776): n is a, c, g, or t
gttcgcnatgcgtcccggggcgncagggccactctggcctctgccctggggggccctggcttgggccgtgggcttcgtgagctccatgggctcggggaaccccgcgcccggtggtgtttgctggctccagcagggccaggaggccacctgcagcctggtgctccagactgatgtnacccgggcngagtgctgtgcctcnggnaacattgacaccgcctggtccaacctcacccacccggggaacaagatcaacctcctcggcttcttgggccttgtccactgccttccctgcaaagattcgtgcganggcgtggagtgnggcccgggcaaggcgtgccgcatgctggggggccgcccgcgctgcgagtgcgcgcccgactgctcggggctcccggngcggtngcaggtntgcggctcagacggcgccacctaccgcgacgagtgcganctgcgcgccgcggctgccgcggccacncggacntgancgtaatgtacnggggcngctgcgcaagttctgtgancacgtngtgtncncgcggccacantcgtgcgtngtggacnagacgggnagcgccactgcgtgtgtgtcgagcggcgccctgccctnnnnnctccagccccggccaggagctttgcgncaacaacaacgtcacctacatctcctcgtgccacatgcgccaggccacctgcttcctgggccgctccatcggcgtgcgccacgcgggcngctgcgcnggcacccctgaggagccgccaggtgggtgagtctgcagaanaggaagagaacttcgtg

SEQ ID NO: 568903 - DNA, 773 bp, Homo sapiens
  misc_feature (492)..(492): n is a, c, g, or t
  misc_feature (607)..(607): n is a, c, g, or t
  misc_feature (625)..(625): n is a, c, g, or t
  misc_feature (640)..(640): n is a, c, g, or t
  misc_feature (644)..(644): n is a, c, g, or t
  misc_feature (657)..(657): n is a, c, g, or t
  misc_feature (659)..(660): n is a, c, g, or t
  misc_feature (668)..(668): n is a, c, g, or t
  misc_feature (721)..(721): n is a, c, g, or t
ctacacatccgtcatggttgatggagaactttattcggggacgtcgtataatttttttgggaagtgaacccatcatctcccgaaattcttcccacagtcctctgaggacagaatatgcaatcccttggccgaacgagcctagtttcgtgtttgctgacgtgatccgaaaaagcccagacagccccgacggcgaggatgacagggtctacttcttcttcacggaggtgtctgtggagtatgagtttgtgttcagggtgctgatcccacggatagcaagagtgtgcaagggggaccagggcggcctgaggaccttgcagaagaaatggacctccttcctgaaagcccgactcatctgctcccggccagacagcggcttggtcttcaatgtgctgcgggatgtcttcgtgctcaggtccccgggcctgaaggtgcctgtgttctatgcactcttcaccccacagctgaacaacgtggggctgtcggcagtgtgcncctacaacctgtccacagccgaggaggtcttctcccacgggaagtacatgcagagcaccacagtggagcagtcccacaccaagtgggtgcgctataatggcccggtacccaaccncggcctggagctgcatcnacagcgaggcacggnccgncaactacaccagntnnttgaattngccagtccagaccctgctgctgtcttcaaagaaggtcctgcagacattcgctntgtctgcgagaagaatgggcgagctctggagacctgtgtccctgtacagacc

SEQ ID NO: 568904 - DNA, 251 bp, Homo sapiens
cgtgcgaccttttacatccgtgaaacatgctccttcacctctgtctgtgtaccccctcgcttctctccatctctcagtcccatcttgatgcgctgtgggagtttcacacacgatcgcgggtctttgtccatctagcgttggacgcgttctgcacggttgactgtggcctatatgctgagagtataacctgcaaagctgactttctgcaaccaagcatgtatcctgggtcaggcccagaaggtccaggtatg

SEQ ID NO: 568905 - DNA, 347 bp, Homo sapiens
aggcatttctgacgtcaaagagtgtgcgcgtcaaaatgctcactaaccgactgagcgctcataggctattggagacacacgtcaccatggggacattctttctgtgacgggtattgcaaggtagagacactctctactggcacacagactaaagcaccaaacgacagtcaacctttaatgcgagcagcaggagttccgcctattaaggatctctcagttatacacgcctgatggcttcactccaagaacccatatgtttacacggcacacctggccaatgaggctgggattaactgtgcaagccttcgtgtccctctcacgggacgctgatttttatggaggggggc

SEQ ID NO: 568906 - DNA, 191 bp, Homo sapiens
ccaaccataactgacgtacggtggctggcgtcaaagtattctttctccttgtccagctggcttccaactggctgtctttacactctggcagatatagctgttggcgcaacagatatggtcacgtacagacagccgagcgctgtacttgatgccacacagagtgcactctggaacgggtcgcgttataccct

SEQ ID NO: 568907 - DNA, 1298 bp, Homo sapiens
  misc_feature (56)..(56): n is a, c, g, or t
  misc_feature (63)..(63): n is a, c, g, or t
aatctttccagactttggcgacattatcaaagatgtatcttttctgcacccgtttnatccagnttttcagctcctcagtagtgacaaagccatccccatcattgtcgattcgatcaacaatcttccctagcctctccttgctctcgtccggggtgagctcgtcgaagttcttggagtcctccttgcccaggaaggcctcgtggtcgtactggaagctctggttgtcctcagggggccgcttgcccagctccgagtcgggccgcaccacggctctttgcgcaccgtgggcttggcccgcagaacccgcgcgccagcaccagcgccagcagcagcccagggctaaccccagcggccaccgcgcgccatcgtcccgaggagagggcggccgggagggagacctgagcgagcgacaacagcggcagctcgggaatgggggctcggagcgcggcggccaagttttatgttatgtatattttacaagtaaaaaaattttttcacctcagcctgaactgaacactagctgacagacgttttgatttctttgaccatcacggaatcgtggccaagcgcggtggctcacatctgtaatcccaacactttgggaggtcaagatgggcggattgcttgaatccaggtgtttgagatcagcctgggcaacatgacaaaaccctgtttctagtaaaaatacaaaaattaaccaggctcaagccatgaccatgcaccattgcactccagcctaggcgacagagcaggaccctgtctcaaaaaaaaaaaacaaaaaaaaaaaaaaacgagaaaaaactttctacaagggtggaaaagggaaacaaatattttttcagatgaaaaaaaggggggaacagcgtgtttaaacaagggggggggccaaaaaaatgagtgaccaagccagagtataaggctagcaacaagacctattaaaacagcggctaccaccaagaggggtagagaccacaggagagaacaacacgaggggtcaccgcaacaatcacacaacagaccagtgtgggagacaaccacacggagcgttacaagccccggcagtcagaagaaaagacgaccccgccacgagtagtgacacaacgaagaagtggacaacactcactcagggcggtgacacccgaccaacgaaagaaatagtagtacacggcgtggtcgatatttgtcgcccccacaacgatctggtgcgaggtattcagagacggagacgaagatcagcacgcggggatgacaagagaccaacatgggcggcgtcacaaccaagggttgtgacaacacgc

SEQ ID NO: 568908 - DNA, 544 bp, Homo sapiens
  misc_feature (8)..(8): n is a, c, g, or t
  misc_feature (11)..(11): n is a, c, g, or t
  misc_feature (13)..(13): n is a, c, g, or t
  misc_feature (29)..(29): n is a, c, g, or t
  misc_feature (36)..(36): n is a, c, g, or t
  misc_feature (38)..(38): n is a, c, g, or t
  misc_feature (40)..(40): n is a, c, g, or t
  misc_feature (42)..(42): n is a, c, g, or t
  misc_feature (50)..(50): n is a, c, g, or t
  misc_feature (56)..(56): n is a, c, g, or t
  misc_feature (58)..(58): n is a, c, g, or t
  misc_feature (63)..(63): n is a, c, g, or t
  misc_feature (74)..(74): n is a, c, g, or t
  misc_feature (89)..(89): n is a, c, g, or t
  misc_feature (99)..(99): n is a, c, g, or t
  misc_feature (101)..(101): n is a, c, g, or t
  misc_feature (103)..(103): n is a, c, g, or t
  misc_feature (105)..(105): n is a, c, g, or t
  misc_feature (107)..(107): n is a, c, g, or t
  misc_feature (155)..(155): n is a, c, g, or t
  misc_feature (157)..(157): n is a, c, g, or t
  misc_feature (172)..(172): n is a, c, g, or t
  misc_feature (215)..(215): n is a, c, g, or t
  misc_feature (219)..(219): n is a, c, g, or t
  misc_feature (238)..(238): n is a, c, g, or t
  misc_feature (252)..(252): n is a, c, g, or t
  misc_feature (255)..(255): n is a, c, g, or t
  misc_feature (264)..(264): n is a, c, g, or t
  misc_feature (268)..(268): n is a, c, g, or t
  misc_feature (274)..(274): n is a, c, g, or t
  misc_feature (306)..(306): n is a, c, g, or t
  misc_feature (308)..(308): n is a, c, g, or t
  misc_feature (336)..(336): n is a, c, g, or t
  misc_feature (366)..(366): n is a, c, g, or t
  misc_feature (369)..(369): n is a, c, g, or t
  misc_feature (389)..(389): n is a, c, g, or t
  misc_feature (398)..(398): n is a, c, g, or t
  misc_feature (409)..(409): n is a, c, g, or t
  misc_feature (411)..(411): n is a, c, g, or t
  misc_feature (417)..(417): n is a, c, g, or t
  misc_feature (537)..(537): n is a, c, g, or t
tgggcatnaananttctttattttaccanaaggganangnantggggcantacaananccaanccccaaaccanaaatgcagcatccanatgcaggaanancnananaggctggggcagggccagggtggggagctgggaccactggacattcanancacccctgccaaaangcttgggtcctgggctcttctgcctccattggagcaaggaganaaangattgggttgcttccccanggctggaaccccancantctggccangaanaaaaanggcacaagggctctggggtctggccaggctanancactcgattctgtacagggttggcacanccttttccaccaaaagggcccaacacccanganaattcagccctagcaggaanaaggtctanacacttttctntncccaanagggctaaaccctcatctcaaaaaacttaacaaaattgggaccaaaccgcaccgccccagcaggaacatgcccatgaagaggccttccctgagcacaagcaggggcctcctaaggcagtnggaaact

SEQ ID NO: 568909 - DNA, 193 bp, Homo sapiens
ttcgagatgggcacctcggatagcagttcccccccaaacataattagtacatcttttttttaaaccctgggcatacatcattcacattggaggatccaaggccaggaaacacaggtttgggaagactatttaagccagtacaaccgagcttggggggggcacgagtggccagggcagaaatcccagcattggg

SEQ ID NO: 568910 - DNA, 295 bp, Homo sapiens
tggttttccccttttgggttttaggacatccatgccaggtgaggggcctgggtccctgttacaagtcaggagccctgtagggagacccctccttttggcaaaggacctgaatgctgcgccaaacagatttttgtaaaattttatattagtttttaatgtcagtggggactcggtttctgggggtgcaaccagcctggggcttttgtaaaaatttttgggggactcccttaaatgttgtttcctttttgcccccttttcctttttgtaatttaagggcctttaacatttttgcaga

SEQ ID NO: 568911 - DNA, 146 bp, Homo sapiens
tcgcggcggcctcatgaggccacagcccctcatttacataaatattatactagcatttaccatctcacttctaggaatactaggagtatcgctcacacctcatgaggccacgcctcatgaggccaccgcatgaggtcatgaggcca

SEQ ID NO: 568912 - DNA, 170 bp, Homo sapiens
cacgaggggtatggtgacacccagacaccctgcaagtatcacgctccaggtgtgggctgattcctccagcctcttgcacggattgccggattcgtgggaccaaacaacctttcctgagtttacacgtcacttgcacaagcagtgggggtggtcacacgattgtgaggcca

SEQ ID NO: 568913 - DNA, 393 bp, Homo sapiens
  misc_feature (312)..(312): n is a, c, g, or t
gtgatgggttaataggtgcagaaaaccaccatggcacacgttacctatgtaagaaacctgcacatcctgcacatgtaccccagaagttaaaataaaaattaaaaaaaaattcaaacattatttgcccttttcactgtgttgacgtgtacactcatgataaaaagtaatgaagggtaagtctgttggtggcttagcatgaatcatggcagtggtcccgaaccgtattagttgccatagaattctgcatttccatacagccacagttaaaaacaacaaacaaaaagttttacttaataatgcccttgatgcatnagtaaaaatggggtaattttattaaatcttgataactcagtagccctgttaataccccatgtaataaaatgggaaatatac

SEQ ID NO: 568914 - DNA, 161 bp, Homo sapiens
ccgtcttcgcacggtgcattcaagtccagcagttggcagggtcatacaggcccccgacgctcctcttactggccagcagcagtcagcactccccggctctcctcacggctttaggctgcgaaccttcagcagcagtattggacttctctgctggatacctt

SEQ ID NO: 568915 - DNA, 112 bp, Homo sapiens
gagatcgtgccattgcactccagcctgggtaacaagaacgaaactctgtctcagaaaaaaagaaaaaaagtcagactactgcaggagctcccgtgggttctgcgaattaggg

SEQ ID NO: 568916 - DNA, 119 bp, Homo sapiens
tacgatcgagctcggtaccgaacgggtgatgtggttgaagaagctgggttgtgccagggtgtcatatgtccttctcgtggaacactgtgctggtgctgtgtcaccctagtgcgtgagct

SEQ ID NO: 568917 - DNA, 158 bp, Homo sapiens
ctggccgtatgaactggttagaaggcaaagataaaaggtttctttttgattcctgttttggtctatgaagtagctgttattttttggggccggttcgagtgtatgtgtgaaacaaggtggtccaagcaataaacaggaattttatttggcgagcgata

SEQ ID NO: 568918 - DNA, 427 bp, Homo sapiens
agcggctctttcccttcggtgtgccactgaagatcctggtgtcgccatgggccgccgccccgcccgttgttaccggtattgtaagaacaagccgtacccaaagtctcgcttctgccgaggtgtccctgatgccaagattcgcatttttgacctggggcggaaaaaggcaaaagtggatgagtttccgctttgtggccacatggtgtcagatgaatatgagcagctgtcctctgaagccctggaggctgcccgaatttgtgccaataagtacatggtaaaaagttgtggcaaagatggcttccatatccgggtgcggctccaccccttccacgtcatccgcatcaacaagatgttgtcctgtgctggggctgacttgaaaaggcttccacaaggcattgcggaaggtggccctttgggcccccagggc

SEQ ID NO: 568919 - DNA, 227 bp, Homo sapiens
acgagaggatcacccatatacgcacaggggaaattgaagtggatgcataacagtgccaaaatagtgtgccactagaaatggtgtaaaggctgtctattacttatttttaacaagaaaagtttataccatgtattaggagaggcaggttacaaacactacaagtctggagtacagaaggaaagaggacaacagaaaacacaccaatccccagtatttaaaaaaaaaca

SEQ ID NO: 568920 - DNA, 430 bp, Homo sapiens
agcggctctttcccttcggtgtgccactgaagatcctggtgtcgccatgggccgccgccccgcccgttgttaccggtattgtaagaacaagccgtacccaaagtctcgcttctgccgaggtgtccctgatgccaagattcgcatttttgacctggggcggaaaaaggcaaaagtggatgagtttccgctttgtggccacatggtgtcagatgaatatgagcagctgtcctctgaagccctggaggctgcccgaatttgtgccaataagtacatggtaaaaagttgtggcaaagatggcttccatatccgggtgcggctccaccccttccacgtcatccgcatcaacaagatgttgtcctgtgctggggctgacgctcaacaggatacgaggtgctttgaagccaggcactttgcagggtcttaagcaatt

SEQ ID NO: 568921 - DNA, 401 bp, Homo sapiens
  misc_feature (89)..(89): n is a, c, g, or t
  misc_feature (153)..(154): n is a, c, g, or t
  misc_feature (157)..(157): n is a, c, g, or t
  misc_feature (168)..(168): n is a, c, g, or t
  misc_feature (173)..(173): n is a, c, g, or t
  misc_feature (180)..(180): n is a, c, g, or t
  misc_feature (193)..(193): n is a, c, g, or t
  misc_feature (199)..(199): n is a, c, g, or t
  misc_feature (202)..(202): n is a, c, g, or t
  misc_feature (205)..(205): n is a, c, g, or t
  misc_feature (215)..(215): n is a, c, g, or t
  misc_feature (236)..(236): n is a, c, g, or t
  misc_feature (248)..(248): n is a, c, g, or t
  misc_feature (256)..(256): n is a, c, g, or t
  misc_feature (259)..(259): n is a, c, g, or t
  misc_feature (285)..(285): n is a, c, g, or t
  misc_feature (287)..(287): n is a, c, g, or t
  misc_feature (298)..(298): n is a, c, g, or t
  misc_feature (310)..(310): n is a, c, g, or t
  misc_feature (321)..(321): n is a, c, g, or t
  misc_feature (324)..(324): n is a, c, g, or t
  misc_feature (335)..(335): n is a, c, g, or t
tcaacgtgctgacaagcgctcgaaaatagcgcatgcgcatgtgtattggatatcgcctcggggacagtagccatggaattcacatcggncacattatcatgtccatccgcaccaagctgcgcaacataggatcctgttatacatgactcatgnnccnggccgtgtacncgttncctggtngccagaagatccncatctncancangtgtggcttnaccgaaatccaatgctcactnaactagaagacnttctgccngantcgcgcgtcatccctgatagctgtgnantcgactacatnccccgtcgtcantactaggaccntcntggcgccctgnactcatgagggcttccaatgtgctgcccccctcttaatactcaccaataaattctacttcctgtcc

SEQ ID NO: 568922 - DNA, 173 bp, Homo sapiens
gcaatttatgagggcatcatttttcagaaaacagctcttaccctgcatctggtgacgatatgaaaccactccagcccacgtcgctgcttctaaaacaataacagtctgtatgataggttcccaccctgaacggcctgtcccagatgacagtgtcttttatcgctggagatgtg

SEQ ID NO: 568923 - DNA, 267 bp, Homo sapiens
  misc_feature (3)..(3): n is a, c, g, or t
  misc_feature (27)..(27): n is a, c, g, or t
  misc_feature (34)..(34): n is a, c, g, or t
  misc_feature (40)..(40): n is a, c, g, or t
  misc_feature (48)..(48): n is a, c, g, or t
  misc_feature (63)..(63): n is a, c, g, or t
  misc_feature (84)..(85): n is a, c, g, or t
  misc_feature (119)..(119): n is a, c, g, or t
  misc_feature (123)..(123): n is a, c, g, or t
cangtttccaagtttttccttggcccnccccagnagagantcccaccntcctccaaagaaagnggggggcttccacccaagttnnaatggctggatggaatttggaaggacatggtggnctgnaaagcgggctcatcccagatggctgtggggtcaagtacatccccagtcgtggccctctggacaagtggcgggccctgcactcatgagggcttccaatgtgctgcccccctcttaatactcaccaataaattctacttcctgtcc

SEQ ID NO: 568924 - DNA, 196 bp, Homo sapiens
ctcttggcgtggcacattgtggggctctttgcgtggctcattgcgtggctctttgggcggctctatcaggctggctcgttgtggggctcattgtgcggctaattaagcgtggactcgtggcgggccctgcactcatgagggcttccaatgtgctgcccccctcttaatactcaccaataaattctacttcctgtcc

SEQ ID NO: 568925 - DNA, 758 bp, Homo sapiens
  misc_feature (22)..(22): n is a, c, g, or t
tcatgctggtacggcccggtanttcagtatgtgaccggcgcctcgcgtggtgtgtgatgtccgcgacactagccgttgtggggggtattgtaagaacaagccgtacccaaagtctcgcttctgccgaggtgtccctgatgccaagattcgcatttttgacctggggcggaaaaaggcaaaagtggatgagtttccgctttgtggccacatggtgtcagatgaatatgagcagctgtcctctgaagccctggaggctgcccgaatttgtgccaataagtacatggtaaaaagttgtggcaaagatggcttccatatccgggtgcggctccaccccttccacgtcatccgcatcaacaagatgttgtcctgtgctggggctgacaggctccaaacaggcatgcgaggtgcctttggaaagccccagggcactgtggccagggttcacattggccaagttatcatgtccatccgcaccaagctgcagaacaaggagcatgtgattgaggccctgcgcagggccaagttcaagtttcctggccgccagaagatccacatctcaaagaagtggggcttcaccaagttcaatgctgatgaatttgaagacatggtggctgaaaagcggctcatcccagatggctgtggggtcaagtacatccccagtcgtggccctctggacaagtggcgggccctgcactcatgagggcttccaatgtgctgcccccctcttaatactcaccaataaattctacttcctgtcc

SEQ ID NO: 568926 - DNA, 776 bp, Homo sapiens
agcggctctttcccttcggtgtgccactgaagatcctggtgtcgccatgggccgccgccccgcccgttgttaccggtattgtaagaacaagccgtacccaaagtctcgcttctgccgaggtgtccctgatgccaagattcgcatttttgacctggggcggaaaaaggcaaaagtggatgagtttccgctttgtggccacatggtgtcagatgaatatgagcagctgtcctctgaagccctggaggctgcccgaatttgtgccaataagtacatggtaaaaagttgtggcaaagatggcttccatatccgggtgcggctccaccccttccacgtcatccgcatcaacaagatgttgtcctgtgctggggctgacaggctccaaacaggcatgcgaggtgcctttggaaagccccagggcactgtggccagggttcacattggccaagttatcatgtccatccgcaccaagctgcagaacaaggagcatgtgattgaggccctgcgcagggccaagttcaagtttcctggccgccagaagatccacatctcaaagaagtggggcttcaccaagttcaatgctgatgaatttgaagacatggtggctgaaaagcggctcatcccagatggctgtggggtcaagtacatccccagtcgtggccctctggacaagtggcgggccctgcactcatgagggcttccaatgtgctgcccccctcttaatactcaccaataaattctacttcctgtccaaaaaaaaaaaggggacctctagagtc

SEQ ID NO: 568927 - DNA, 186 bp, Homo sapiens
ctgggcggggaaagcattcagggggagactccatggaagcatcctcagctttgtctccctatgggaactttccctgcacaggttggtgcggttaggctggaaccagttcccccatgggtaaacttgacccttcaagccccctcgggcggaaaactcccactcttcctcgatgggcctctagaattg

SEQ ID NO: 568928 - DNA, 783 bp, Homo sapiens
agcggctctttcccttcggtgtgccactgaagatcctggtgtcgccatgggccgccgccccgcccgttgttaccggtattgtaagaacaagccgtacccaaagtctcgcttctgccgaggtgtccctgatgccaagattcgcatttttgacctggggcggaaaaaggcaaaagtggatgagtttccgctttgtggccacatggtgtcagatgaatatgagcagctgtcctctgaagccctggaggctgcccgaatttgtgccaataagtacatggtaaaaagttgtggcaaagatggcttccatatccgggtgcggctccaccccttccacgtcatccgcatcaacaagatgttgtcctgtgctggggctgacaggctccaaacaggcatgcgaggtgcctttggaaagccccagggcactgtggccagggttcacattggccaagttatcatgtccatccgcaccaagctgcagaacaaggagcatgtgattgaggccctgcgcagggccaagttcaagtttcctggccgccagaagatccacatctcaaagaagtggggcttcaccaagttcaatgctgatgaatttgaagacatggtggctgaaaagcggctcatcccagatggctgtggggtcaagtacatccccagtcgtggccctctggacaagtggcgggccctgcactcatgagggcttccaatgtgctgcccccctcttaatactcaccaataaattctacttcctgtccgcaccttaaggggggatcctctataatcgccgag

SEQ ID NO: 568929 - DNA, 386 bp, Homo sapiens
tgtgtccgtgtggagggctgcagagcctgcagggtgacctggttccccaaaggccaacagcattggcctggccaaaccaggtgacattagatttggtgaacaacgtactatggaagccacatcagtattgggcccccaggtctgatgtgggttttgcatctgcccttggtgatatgctatgaggcattcgcgcccttttctttaagtcatattgagcctgtcatttctctttcacaaaggcggtgtatttgggtgttgatggagtatgtttccttttcaaagtaaagttgtttcaacaccagcggaaacccatggagtttgtcctttgtaaaaactttcaagtcagtgtcccgatatcctgatcacaaatccggttagcactcccc

SEQ ID NO: 568930 - DNA, 1196 bp, Homo sapiens
  misc_feature (1196)..(1196): n is a, c, g, or t
agcggctctttcccttcggtgtgccactgaagatcctggtgtcgccatgggccgccgccccgcccgttgttaccggtattgtaagaacaagccgtacccaaagtctcgcttctgccgaggtgtccctgatgccaagattcgcatttttgacctggggcggaaaaaggcaaaagtggatgagtttccgctttgtggccacatggtgtcagatgaatatgagcagctgtcctctgaagccctggaggctgcccgaatttgtgccaataagtacatggtaaaaagttgtggcaaagatggcttccatatccgggtgcggctccaccccttccacgtcatccgcatcaacaagatgttgtcctgtgctggggctgacaggctccaaacaggcatgcgaggtgcctttggaaagccccagggcactgtggccagggttcacattggccaagttatcatgtccatccgcaccaagctgcagaacaaggagcatgtgattgaggccctgcgcagggccaagttcaagtttcctggccgccagaagatccacatctcaaagaagtggggcttcaccaagttcaatgctgatgaatttgaagacatggtggctgaaaagcggctcatcccagatggctgtggggtcaagtacatccccagtcgtggccctctggacaagtggcgggccctgcactcatgagggcttccaatgtgctgcccccctcttaatactcaccaataaattctacttcctgtccaaagaaaaaaaaaaaaaaaaaaaaaaaaacaacgtgggtgggcgcgcgccccgggccccggcgaaaaaagccttccagagaacccaccgcgcggtgaggcggcgcgcgcgggacccccgagaggcggcaacagtggaaaccgtgggcccaaagcggtgttcccacagaggagagacccctgggcggcaagagagacaatagagcgcgcgcgggagcatctcccacacccaaaaatataaaaaaaaacgcccccgaggcgggaacaaccccgagagagacggttcgcgtgaacaaaaattcctccgagaagggtgcagcgtcttcgagaggggactcaatacatagagggaatacttattatcaaacgagggagagtaccccaaaggaggaaagacctctcaaaaaatatcaaacaatatatacaccccgaactctgtggtgggaccn

SEQ ID NO: 568931 - DNA, 139 bp, Homo sapiens
ccaagcaatatggggtgtgtgtgtgtatatatacacatatgttaatatatgagtggcgtgtgtgtgtgtgaagtgtgtgggtgtgggtatcgtgtatgttagtttatgtgcatgtgtgaacatgaatgtatgagtggcg

SEQ ID NO: 568932 - DNA, 777 bp, Homo sapiens
agcggctctttcccttcggtgtgccactgaagatcctggtgtcgccatgggccgccgccccgcccgttgttaccggtattgtaagaacaagccgtacccaaagtctcgcttctgccgaggtgtccctgatgccaagattcgcatttttgacctggggcggaaaaaggcaaaagtggatgagtttccgctttgtggccacatggtgtcagatgaatatgagcagctgtcctctgaagccctggaggctgcccgaatttgtgccaataagtacatggtaaaaagttgtggcaaagatggcttccatatccgggtgcggctccaccccttccacgtcatccgcatcaacaagatgttgtcctgtgctggggctgacaggctccaaacaggcatgcgaggtgcctttggaaagccccagggcactgtggccagggttcacattggccaagttatcatgtccatccgcaccaagctgcagaacaaggagcatgtgattgaggccctgcgcagggccaagttcaagtttcctggccgccagaagatccacatctcaaagaagtggggcttcaccaagttcaatgctgatgaatttgaagacatggtggctgaaaagcggctcatcccagatggctgtggggtcaagtacatccccagtcgtggccctctggacaagtggcgggccctgcactcatgagggcttccaatgtgctgcccccctcttaatactcaccaataaattctacttcctgtccaaaaagaagaaaagtcgacgcggccgcg

SEQ ID NO: 568933 - DNA, 351 bp, Homo sapiens
atggatgaggctggcacctgagcagtccagcgaggaacttggtattagttgagcaatttggctaggatgatattatgcagcacgagttcctagagtctgtgggatagctgccatgaagtaacctgaaggaggtgctggctggtaggggttgattacagggttgggaacagctcgtacacttgccattctctgcatatactggttagtggggagagcctggcgctcttctatgcgctgagctaaagctacatacaatggcttttgtggccacaattctaccgttcatttctgtaactgctttagtggcttcttctggggaggagaaacatacaaaaccaaaccctttgctgc

SEQ ID NO: 568934 - DNA, 545 bp, Homo sapiens
ggccgcctgagaggaatgatgcggagaacatggtcatctctgcctcttgaggaatgtgtttgtctgaccagtgataaccagctctctcagcaggatgtggccagaaagaacacaccagccctcgtcctgttatagctagagggtctggattcacagagcaggagcattgccatctacgacacacactgccatcttggaaccattacaccatcttggacacacaccagccatcttgtataagcaccaccaccttggacacacaacatcttgaacacacatggccatcttggagaagcaaccaccatcttgcacacacactgccatcttggataagcaccaccatcttggacacacaacatcttagacacacacggccatgttgaataagcaccaccatcttgaacaacacaccgccatctggaaaaaacacaccatcttggacacacaccatacttggacacaaacggacatcttggaatagcaccaccatcttggagaaacaccatcttggacacaagcgtcatctggctagggtaccgagctcg

SEQ ID NO: 568935 - DNA, 115 bp, Homo sapiens
aggatcgccgtcacatgcagatcctccactcacatgccactgatcgcatcttggaacaactgcccaaggaatttgagatggagctcatacaggcaattccctttcagatccatgg

SEQ ID NO: 568936 - DNA, 188 bp, Homo sapiens
tcatctttctcacaaataattgcagaatagcagacagacgtcatgacgggctcaaactaacgtgttggatactatctgctgctcactcagtgttggcctctatccagtctgaacacccgcatggttacttgctgcccttccttcagcatgcttctccatgctgcctgtacatgctccatcggactggg

SEQ ID NO: 568937 - DNA, 350 bp, Homo sapiens
tcgctaggcacagagtggatcttatctcaactagtaatatatgtaataactaggtcgcagagttctgacgccgtgagtatgtcatgcctgggggcaccgagggcatggtgtgctttgttcatgagtgttccacagcacctttcagagttggtatggtgcctgttccatggaataaaagctgaagcctagagttggtctgtcattgcctctgacagtagcgttgataaacgaattactacaccaccgtccctgcagctccctaagaccttgcacaggtggtcagaggtgcctgggggaggttagcttccaggcgtgagaagagtacaccctggagtacaacctgccggtgg

SEQ ID NO: 568938 - DNA, 173 bp, Homo sapiens
cgtacacatagtgtacgaatccatttatatgaaacgtccagagcaggcagattcatagacagcaagtagattagtggttgctagaggctagaggaaggagggcggagggagagactgctaaagctgggtttctatttggaccgatgaaaatattccagaattagatagtggcc

SEQ ID NO: 568939 - DNA, 259 bp, Homo sapiens
tggtcgtagctggaccggtgatcaatgatgagaggtcatcatggagaaacccttggggggtgaaagaggtgggggaggcggcagggaggtctcctgagggatggcggtgtgggtcccgcctggtcccgcccggctgcaaagacgtggggtgtgtgttgagtgccagacggggctggcttgattcaggcgtgcctttacatgttatcagccgtgggtctgaccacggccatgccatgacctaatagctaacctcaatttc

SEQ ID NO: 568940 - DNA, 203 bp, Homo sapiens
  misc_feature (200)..(200): n is a, c, g, or t
atcctcgggcatctggactgtattagggctgagcaagaaatggggaaagaagataaagatattaaagataaatgtcaggacttgatggctaatgctttgggagagaagctagtagtgagacagagactggagacgcactatgaaaatgaaaggcatgcacagaatgtaagacattaacaacaatttaaccaacaaatggncca

SEQ ID NO: 568941 - DNA, 417 bp, Homo sapiens
tctaattgtggtgtctttcaagtataacagcaaaagatgctgccttccagccatagtcttagaatcactgaacctaggctgacgggcattgcctcctagtaggtataccagcctgtcaatagccactggatgacagcagccccacagtcttgtgtgtaatcatcgtgccttctggccgtgtggcagttatccatgcacagttccataagagcgtcatgggttgcctccttgagagaagccttaccttctgagacaacctgttcactgtatggcagggcccgaccatgacaaatgcttagttcacacgcctctggtacatgacattggttgacagcagtaagatggagagtgacatacttgtctcgcatggcagcagccagtgaacggatgccaggacaaactacagatacagtccgg

SEQ ID NO: 568942 - DNA, 1122 bp, Homo sapiens
gaaagaggacctgatgaccagctgcagagagcagctacggttgtcaggagttcgagaccagcctggccaatatggggaaaccctgcctctactgaaaatacaaaaattagctgggtgtggtggcaggcgcctgtaatcccagctactcgggaggctgaggcgtgagaattgagaatcccttgaaccctggaggtggaggttgcagtgagccgagatgggccactgcactccagcctgggtgaaagagcgagactcagtctcggaaaaaaaaaaaaaaaaaaaatttagagaggacttacctttttgtgccgtagagggggacaagattccccgttgcgggggaattacccttctcacgggggacctcctctctggaggttgggtttaaaccctctcaggtaaaaaggctccctttggggtccttggttacaccccacattggatctgggagacctctacatttctttcccggggatgcgcgggaccaagagaacccccagggcaagggtggccaccaaacacacgggaaggtctcttcctgctcagcgaacaagtgttggacctcgtgcaaaaaggctccccggttaaacagaaaggtttgttaacaggttaccccccaagtttttttctccccaaaattctctgtgaacagaattgggtgtttctcccaggggggggggggggggacattgttgttcagggaaacctcaagccaaaggcgcggaaatttccacaacaccttttccagctttttttgcggagcaaaacagttttggccacctttttctcctttagaaacgtgggctcttgagggcgcttttgaagcgcctgtggaattcgcagcataaaactttaaaagagcggggacgtttcccgagattgtgtgccctcccattcaggggggggaaggggacaagttattaattcctctaccatattcacaggcttaacaagattgcgaaatcttgtgcttgccaacgagaattttggtcctcccctcctccctttattcttccctcggggaacagaagatgtgccaatttttcttccaacaattctttaaacaggcacgagttgaggctccactttggcccacgctgtatggaactcttaacattttcg

SEQ ID NO: 568943 - DNA, 170 bp, Homo sapiens
atctcgacaggtacaggagttactagagtcactatccggcaaatctacgaatatctcttagtcatcacaacaaccagatgtctaccagagccctgcttcagatacttacatagttagaggggaagccccgatcgaagatttatcccagacaagcacaacatagcagactg

SEQ ID NO: 568944 - DNA, 458 bp, Homo sapiens
tcactcaaacctggaaggtggaggttgcagtcagctgagatcacgccactgcactccagcctggacgacagagtaaggctccgtctcaaaaaaaaaaaaaaagaaaaagaaaaggagttaaatcttggcttttttttaacgtgcaagagcatcctttacatcagtgcatgtgggaagttttatccaagttagcagttccccgtgggatttataaaaattccccgaggcattttgtctgtggtgtggtgcccttttttggggtggttgttttttcacgttcccttccccttccccttttctcctataaacaagaggaggctttaccttgggaatgtccggtggaaagtcttaagaagcgggatgggtgtaatttggcctggctttcccttttagttggaacagcgttaactctgggaagaggtcagtggcctttttctgggtggtgatttatgcaagtg

SEQ ID NO: 568945 - DNA, 102 bp, Homo sapiens
gtgaggctgccagcatgtgcgatgagacgtgcacctaccttatgcaggttgccaggctctgaactgacccatggatggaccgtgagggcatccgagaatagc

SEQ ID NO: 568946 - DNA, 1225 bp, Homo sapiens
gtgacgagaagtgtatttatggcagtcaatttcagagatctgccgatgccggacatgtcgtcattctccgcatttctttgctgcctttctccctgtgatgcaactgtgacaatagctcaccagcatcaccacccccacaagcagccacactgcaagcattccatcacggccagctggccagcatcattcatccatcagttgcttgcaggtcattccgacagtggcattcactgtctgcatcataggttcaacatgcacaggttgctagcgtgtcaaattggcatgtagcggtcatccacactccatggtaccaactgcatcccacagtcgcaccaagggcacacagccaccacaacaatctcagcttggcgcagccatgttagagcactttctgcacagcttggtttcaacacaaatgaacacgctcgggctcttactcaacttccatgtatccagggacggctgtcggggaccccactggaccaggtggcacatcggcttccttgaatgcaacaccccctttcctggccgcttacataaaacacttcacttatagcgtacggacatccacgcatttgacacacggggacttacacaggacacaaccctggacacggtccactggactacttcagtgtacaaccttgtggaccacacacgggtgtacacacacccctttttactacttgtcgagctacacctaacgcatacttttaactttgtactaagcattggggctattgataattatatgatgttaccaatgtgcgcatgcacacattcgacttatgggctggaacattcaaggttgtgcagtattcagcatttaaggattaaataattggcaaatatatccatgtggagttacaagtatatcacttagtagggcagttttatcaaaggcagaaatgaatgcgccatcgtgacacaatctttgcccacaatctggacaacaagcatatctgtacggtacacccaacagctgtgggttctgaccacattctgtgggacgcggtgagtcactatggggctgtccaccttcaaccacatatctcacccactcaccgccaacgtcacacagcgtggggcatcacactatcacggtactacagtctagacacttatctactgtcttgtcgtgtgtcccccacactttacgtcaatatacttaaccagcacttagcggaccgtgccactgattctaccacaaccccgacagtcctat

SEQ ID NO: 568947 - DNA, 1505 bp, Homo sapiens
catggtgttgttggtgttgcggagtggaagatactatcttgcggctgttgtgtgttgttgttcatctcccggtgctggattcttgtgttttgtttcgttcagtccctcttctcccgttttggtgttgtgtggtcgtggtcagcatcctctgttgctgttcggtgttgcgcatgcgatgatgtgcgtcgggcggggtggaggtggggggtaggtgtccgtcccgccattcccatcgtgtggttgtttgtgcgtcacggccgcgagttttgtgttttttttatgcattcttagtggcgtaactggttgtgtgctgtccgtctctctccgtgttttgtgctgttggtattacgttcacgtgtggttggtttcgaagcctatgtgggtgtgagtatcattgcgtcattctttcagctgcattgctagttgctttttttgtgtgtgatgtggtgtgtaggtgtgtcgccctgtggtggttgttctcttgttgtcccgtggggcggagggttgtgtttttttttgttgtgtgttttgttgtcttggggttcggaggtttggggggtggggtggttgcctctggttggtcgatgtcgtgttgtgttctccccttgttttggtggtgtggttggtctgtcgttgtggcatgcgcgctagtgtgtgggtgggtggtcgataaattcatctggttagggagtgggatgtatacgtagtgatttttttgttctctgcgcggtgaggggggatggtgtgtcgtgacttagtacatggtgggctcggctgctccccacaacacgcgattcgggtgtgttttgtgacatcttatgttagtgtggttgtctagtagttgcttgcatgttgctgtcttcacgatctctctgcgtcgcgcgctcgcgcggcccgcgctgcgtggcggcgccctccctgcgctaggcggcgcgcgccgcactcgcgcggttgggttgtgttctctcacacgcgcattgtattgtgtgtgtcctctctcgctcggcgtactttttgtgtgtgtgctcctctcttctgtgtttcggtgtgttgtgctcacctcgcctcggcgcgcgggggcacgccttctcgcgcgcgggggcgctctcctctcttgtctatgtttgtcgtgctctcgccgctcgcgagaggagacgtcttcgcgcgcggcgcgcgcggtcgtaccttcctccttctctctctacgcgcggggtccctcgccccccagcagcgacaccatttgtgtattctctcgccgcgcggtgggtctgctcgccgccgtgcctcttccccgcccgcggggaggtgcggctctcccctccttttgtgtgtggctgcgcctcttcgcccctctcccgctgcgcccgcgcgggagcactctccccgcgcgctcctcccccccccgcgcgctccgcctcccctcccctcctctcttgtgtgggggggggccgccccccccccccccccctccttttttttatgagattattttttcttcccctcca

SEQ ID NO: 568948 - DNA, 803 bp, Homo sapiens
  misc_feature (2)..(2): n is a, c, g, or t
  misc_feature (68)..(68): n is a, c, g, or t
  misc_feature (88)..(89): n is a, c, g, or t
  misc_feature (91)..(91): n is a, c, g, or t
  misc_feature (97)..(97): n is a, c, g, or t
  misc_feature (114)..(115): n is a, c, g, or t
  misc_feature (117)..(117): n is a, c, g, or t
  misc_feature (123)..(128): n is a, c, g, or t
  misc_feature (148)..(148): n is a, c, g, or t
  misc_feature (170)..(170): n is a, c, g, or t
  misc_feature (190)..(190): n is a, c, g, or t
  misc_feature (208)..(208): n is a, c, g, or t
  misc_feature (272)..(272): n is a, c, g, or t
  misc_feature (303)..(303): n is a, c, g, or t
  misc_feature (326)..(326): n is a, c, g, or t
  misc_feature (368)..(368): n is a, c, g, or t
  misc_feature (505)..(505): n is a, c, g, or t
  misc_feature (507)..(507): n is a, c, g, or t
  misc_feature (573)..(573): n is a, c, g, or t
  misc_feature (575)..(575): n is a, c, g, or t
  misc_feature (588)..(588): n is a, c, g, or t
  misc_feature (727)..(727): n is a, c, g, or t
  misc_feature (737)..(737): n is a, c, g, or t
  misc_feature (742)..(742): n is a, c, g, or t
  misc_feature (768)..(768): n is a, c, g, or t
cngcaaacgggatgggtaattggtattcctctccttcttcctcaccctctccttcaacagagtccgcnccagcctcctcgtggtgcgnngngggggnggggggtatcttcacgnntntctgtnnnnnnaccttcctccatcccctcanccacgtaccagtgaacaaaggnacgcttgggatacatcaggncaaacttgtggtccaggngagcccaggcctcagcaatggctgtggtgttgctcagcatgcacacagctctctgtaccttggncaggtctccaccaggcaccacagtggggggntggtagttgatgccaaccttgangccagtggggcaccaatccacaaactggatgctgcgcttggntttgatggtgcgcaatggcagcattggcatctttgggaaccacgtcaccacggtacaacaggcagcaagccatgtatttaccatggcgagggtcacatttcaccatctggttggctggctcaaagcaagcattggtnanctctgctacagaaagctgttcatggtaggctttctcagcagagatgacaggggcatatgtggccananggaagtggatgcnggggtagggcaccaggttggtctggaattctgtcaggtcaacattcaggcctccatcaaatctcagggaagcagtgatggaggacacaatctggctaataaggcggttaaggttagtgtaggttgggcgctcgatatcnaggtttctangacanatgtcatagatggcctcattgtctancatgaaggcacaatcagagtgctccagggtggtgt

SEQ ID NO: 568949 - DNA, 606 bp, Homo sapiens
ctgtttagaaccgggtttgccgacacaacgcaggagtggagaaagctaccattaacagccaaaatgggaaagggaccgactcatatcaacatggccatcgttggacacagggattcggtcatgtacactattactggccatttgagctataaatgctgtgtcatcgacaaaggaactattgagaaattggataacgaggctgctgaaatgggaaagggctacttcaagtatgccagggtcttggataaactgaaagctgagcgtgaacgaggaatcaccattgatatgtccttgaggaaatttgagaccagcaagtactatgtgactatcattgatgccctaggactacagagactttatcaaaaacatgattacaggtacatatcaggctgactgtgctgtactgattgttgctgcagagagtggtgaatttgaagctggtatctccaagaatgggcggacccgatagcatgccctattggctaacacactgtgtgtgaaacaactaattgacggtgttaacaaaatggattccactgagccaccctacagccagaggagcattgatgaaattgtaaccgaagtcagcacttacattaaggtaaa

SEQ ID NO: 568950 - DNA, 400 bp, Homo sapiens
caacgagctcggccccattatacggaaagtcacaagcttattgtcatctggcagcaagcatggggaagggactgaagcagggttcacattggccaagttatcatgtccatccgcaccaagctgcagaacaaggagcatgtgattgaggccctgcgcagggccaagttcaagtttcctggccgccagaagatccacatctcaaagaagtggggcttcaccaagttcaatgctgatgaatttgaagacatggtggctgaaaagcggctcatcccagatggctgtggggtcaagtacatccccagtcgtggccctctggacaagtggcgggccctgcactcatgagggcttccaatgtgctgcccccctcttaatactcaccaataaattctacttcctgtcc

SEQ ID NO: 568951 - DNA, 399 bp, Homo sapiens
atagaggatccccccttgaagtgttgacaggtccaaaaggcatcgaggtgctttgaaagccccaggacattgtggccagagttcacattggccaagttatcatgtccatccgcaccaagctgcagaacaaggagcatgtgattgaggccctgcgcagggccaagttcaagtttcctggccgccagaagatccacatctcaaagaagtggggcttcaccaagttcaatgctgatgaatttgaagacatggtggctgaaaagcggctcatcccagatggctgtggggtcaagtacatccccagtcgtggccctctggacaagtggcgggccctgcactcatgagggcttccaatgtgctgcccccctcttaatactcaccaataaattctacttcctgtcc

SEQ ID NO: 568952 - DNA, 540 bp, Homo sapiens
aatatatatatatcttttccacataaaaaaaaaaaataaaaaaaaaaaaaaaaaaaaaacaaaaaaaaaaaaaaaaaaaaaaaagaggggggggctaaaaatctcccccggggggccccttccctccccccccttttttttaaaagggggccccctatagggggttttttaaaaacacgacggggcgctgtttaccaaacgtccggcgtgggggaaaaaacaccggccaggcctgccgggaacctctgttggtggaggaggagcccccactttcttctggggggggggccacactatgttgtggcgcaacaaccaccctcctcgaacaagaaatattatagccaccctcctagcaggggagacaatcaatcaaaacattttccaacgtgttgcttataggtgggttgaccaccaccgaggcgcgtatctttctatcggctggcgcgataaaaaaactatgtgtctcgctgagtggacttattatgattgataagaaaattatttatttagcccgcggggatcgttgatttaattataagt

SEQ ID NO: 568953 - DNA, 969 bp, Homo sapiens
  misc_feature (339)..(339): n is a, c, g, or t
  misc_feature (342)..(343): n is a, c, g, or t
cggcttgcagaaggataagcagagcatggacggtggccccagtgacctaagccactatgggctactagaaaagcaaggctggcaaagtgacatttccagcggtcaactcaggaccccttccctgcagatacaatcgagagcagtgagtaagtcatagcaagctcttccccacaggtataggggaaacactggtgatgggagtagctcttcttgctcttagctgcatgacaaccatcgtgccagccaggtagctgaagcctggcagaggacgcccagtggcgccttttcagtaggttcttgggaatgctccgcagccaacttaagccgactgagttcctntcnncatggggaccagtgtgcgatggctgcacacagcagcttccttggtagtgtacgcagcctgttggttgtatgggttgctctaagggaccttggagacaggcctttcaggtggatgttcatgtttctgaccttgcactaccccaatgtaggctccaaacaggcatgcgaggtgcctttggaaagccccatcctagggcaacatgatggcgcagggttcacattggccaagttatcatgtccatccgcaccaagctgcagaacaaggagcatgtgattgaggccctgcgcagggccaagttcaagtttcctggccgccagacaggtatcgtagtgcgtgcagcacgccgcgttctccgcaccatattgcctccaggctctccgtgatctcagttctgtatgccaatggctccgtgtagatccacatctcaaagaagtggggcttcaccaagttcaatgctgatgaatttgaagacatggtggctgaaaagcggctcatcccagatggctgtggggtcaagtacatccccagtcgtggccctctggacaagtggcgggccctgcactcatgagggcttccaatgtgctgcccccctcttaatactcaccaataaattctacttcctgtcc

SEQ ID NO: 568954 - DNA, 339 bp, Homo sapiens
  misc_feature (110)..(110): n is a, c, g, or t
  misc_feature (177)..(177): n is a, c, g, or t
  misc_feature (222)..(222): n is a, c, g, or t
  misc_feature (262)..(262): n is a, c, g, or t
  misc_feature (325)..(326): n is a, c, g, or t
ccccccgccaccatcacccacgtaccctaggtaggagctgtttaagaggatgcacctgggccgggcgcggtggctcatgcctgtaatcccagcactttgggaggccgaancgggcggatcacaaggtcaggagatcgagaccatcctggctaacacggtgataccccgtctctactnaaaatacaaaaaattagccgggcatggtggcaggcgtctgtactnacagctactcgggaggctgaggcaggagaatggcgtgaanccgcgaggcggagcttgcagtgagccgagatctcaccactgcactccagcctgggcgacaganncgaactccgtctc

SEQ ID NO: 568955 - DNA, 200 bp, Homo sapiens
  misc_feature (30)..(30): n is a, c, g, or t
  misc_feature (35)..(35): n is a, c, g, or t
  misc_feature (56)..(56): n is a, c, g, or t
  misc_feature (119)..(119): n is a, c, g, or t
  misc_feature (163)..(163): n is a, c, g, or t
ggaggttctggatgaaggctgaacacaggnttgtnaatgtcggtctgtactgaggncctcagggacttgaggtggcatttttaagcatggggtgcaggtgcctttctggatttggatgnggctatggaaagaacacagaagccaaggtcatgtgcatgaaatnaggagtttgagttaagtcacctcgggggattttttcc

SEQ ID NO: 568956 - DNA, 119 bp, Homo sapiens
actggccggcgctttagattgggaaaccactttcaaccttaatttaaattaaatggtttgaggttccgggggagaaccgactttcaaccgaaacttaaagcaattgttttaagttaccc

SEQ ID NO: 568957 - DNA, 222 bp, Homo sapiens
  misc_feature (6)..(6): n is a, c, g, or t
  misc_feature (37)..(37): n is a, c, g, or t
  misc_feature (46)..(46): n is a, c, g, or t
  misc_feature (49)..(49): n is a, c, g, or t
  misc_feature (73)..(73): n is a, c, g, or t
  misc_feature (116)..(116): n is a, c, g, or t
  misc_feature (160)..(160): n is a, c, g, or t
  misc_feature (169)..(169): n is a, c, g, or t
aggggnggttaaaccgcgtctccagtatatccaatgntattaatantcnaagtctcattcgtaatctcaaaanaataaatagtattcatattgccaatgaaacctcgatcggtggntcacctgttattccacattatcataaacagttaggtccatactngttttagtngttgacaatggtgtttacgtcagtcgacgtgcgatatcggtgcgcaagttagc

SEQ ID NO: 568958 - DNA, 156 bp, Homo sapiens
tattgtgatgcagactgctgcacagtgaccaactaggccacccaatgagcacttacactatcgtactccaaaagacacaggtatgttttgctaataaataatcagtgggaacagggtattcctctgtgtcaactcccccatacctcatcccctttc

SEQ ID NO: 568959 - DNA, 178 bp, Homo sapiens
ggggctagatataatggtaatacaaaaaacaattaaagtcatgtggttttggaagcaaagcaaacatttttggaaatgttttggaaatatggacacaaccacaaattcaagacattttttaaaaagcaacaagccagcttacaaagctttgaccaataaaacccaaaggcctcctctg

SEQ ID NO: 568960 - DNA, 341 bp, Homo sapiens
  misc_feature (5)..(5): n is a, c, g, or t
  misc_feature (18)..(18): n is a, c, g, or t
  misc_feature (24)..(24): n is a, c, g, or t
  misc_feature (29)..(29): n is a, c, g, or t
  misc_feature (36)..(36): n is a, c, g, or t
  misc_feature (42)..(43): n is a, c, g, or t
  misc_feature (56)..(56): n is a, c, g, or t
  misc_feature (62)..(62): n is a, c, g, or t
  misc_feature (77)..(77): n is a, c, g, or t
  misc_feature (97)..(98): n is a, c, g, or t
  misc_feature (101)..(101): n is a, c, g, or t
  misc_feature (137)..(137): n is a, c, g, or t
  misc_feature (197)..(197): n is a, c, g, or t
  misc_feature (264)..(264): n is a, c, g, or t
  misc_feature (278)..(278): n is a, c, g, or t
  misc_feature (283)..(283): n is a, c, g, or t
aatanatttataaatcanacgatntctcnatacgcncatagnnacatatggaattntgaganaaataaagcatgctntctctaggaatatttatacnnctntgtctctctcccttaatatatgcctctagctgctcntggcaatgatgaagtgttatgtatgcattaatgttttgcagccccaaaaggtgttcacantttttcctatataagatctgtggagtgtgtgtttcaaagagagaactacagaaatgttaaagcaggnaaaacctgaatgtnatgtncacattttcatcccacatggacaatgtatgtgttttaataaatggaattttcagattc

SEQ ID NO: 568961 - DNA, 847 bp, Homo sapiens
ggcccgcctacgcgggacccaaccgcgggaccggacgtgcactcctccagtagcggtgcacgtcgtgccaatggcccgtatgaggaggtgagcgtgtccggcttcgaggagttccaccgggccgtgaacagcacaagtgctgaacccagtcgtacgagaggggtctgaagcacattagtgaaggatgtgtgtcatctagttgccaagtaaggaagaaaagccttatgggaaagatccaaatagtgactttcagaaaaaacttgtgaaaggtaacagcaggtgcttacattacttagtgtagtggaaacacctcaaaaaagtggtagaatcgtggaggtgtcttcaggccaaactctgggggaaacagtgtgtggttctctgaaggattaaggaatcttgaggaatggcaaatccagtgtcctgtgatggtccgtgattgggttctaggtatcaataaactgtatactgtgcttggggaattccaatgtaggcaataagtgttgacaaccaccacacaaacccacaaacaaccgaacaacacacttgtgtgggcgggcgggggcacggcgcccctggagaaaaaacgtttcttacagagcaccactcgggctgtggcggcccggggggcccccagtgagggtatcgcggcacaccgtgggggccaaacgcggggtccaaaagaaaatcctcgggccatagaacctggggtgggggttttctcacccaataaaaaaaacggcgcgggcgacacaccgggcgggttctgcgacacaactcccagcgggcggtgtcggcaggccacgccgggtctcaacaccggaggccaagcaggtcggtagtagcatga

SEQ ID NO: 568962 - DNA, 428 bp, Homo sapiens
gaatgagaaggagatggtactcgctactgttacaacaccagttggtggtgacagtaacgggcgtacccgcggtggtttaacttcgcaaaatgccttgatcttatcctactgaagatgtgcctcgcaagctgttgagccacggcatgaaaccctgcagtcagcacgtgtgataactgcgagccagcatgacccccgggaccattctgatcatcctcactgcacgccacaggggctcagagggtggttgtcctgtaagcagctggctagtggcgttattacttgtgacctggacctctggtccgtcactcgagttcctctacctagcaatacaccagcaaattcgtccttgccacttcaaccaaaatcgatctccgcgatgttaaactccctgaacatcttactgatgcttaccctcaggagggtaccga

SEQ ID NO: 568963 - DNA, 269 bp, Homo sapiens
  misc_feature (32)..(32): n is a, c, g, or t
  misc_feature (39)..(39): n is a, c, g, or t
  misc_feature (41)..(41): n is a, c, g, or t
  misc_feature (48)..(49): n is a, c, g, or t
  misc_feature (51)..(52): n is a, c, g, or t
  misc_feature (55)..(55): n is a, c, g, or t
  misc_feature (57)..(57): n is a, c, g, or t
  misc_feature (69)..(69): n is a, c, g, or t
  misc_feature (87)..(88): n is a, c, g, or t
  misc_feature (158)..(158): n is a, c, g, or t
gacgggcagattacagcatttcagaagtctangctaacngnactaggnntnnttntnacatcattaganataacgagtacacttttnnagattctgcaaagctagtcaaaatgaagatgctgtgccttctgaacatatactacaaacacacatactanaaaacaatatatttatctttacaaaaattacagccagcatagaaagaaggatgttaatgatgaagattgcaacacatatttttagtacatatgtgttgcagtgtgcttccg

SEQ ID NO: 568964 - DNA, 322 bp, Homo sapiens
atcgagctcgccacccgctcttcactgcagcctgagcgacgccttataagatcttataagcggcactctgaaaataggtcccagtagccctcaggataacattgcagcagcattctcaccagcaccacttgcgaagccttcactgttaatgtgtgacatgggttcttgcttcgatggacacaattcccattgaccaagtactcagagtatcactgtggtgctggaaaccctgtcaagccctttactgcaccgtttcattaaatcctcacaagaaccctggtgtaagcgctgatattactgcttccatttccgaagagaaggc

SEQ ID NO: 568965 - DNA, 648 bp, Homo sapiens
  misc_feature (4)..(4): n is a, c, g, or t
  misc_feature (6)..(6): n is a, c, g, or t
  misc_feature (11)..(11): n is a, c, g, or t
  misc_feature (13)..(13): n is a, c, g, or t
  misc_feature (49)..(50): n is a, c, g, or t
  misc_feature (52)..(52): n is a, c, g, or t
  misc_feature (54)..(54): n is a, c, g, or t
  misc_feature (62)..(62): n is a, c, g, or t
  misc_feature (71)..(71): n is a, c, g, or t
  misc_feature (81)..(81): n is a, c, g, or t
  misc_feature (87)..(87): n is a, c, g, or t
  misc_feature (119)..(119): n is a, c, g, or t
  misc_feature (147)..(147): n is a, c, g, or t
  misc_feature (158)..(158): n is a, c, g, or t
  misc_feature (166)..(167): n is a, c, g, or t
  misc_feature (174)..(174): n is a, c, g, or t
  misc_feature (180)..(180): n is a, c, g, or t
  misc_feature (185)..(185): n is a, c, g, or t
  misc_feature (198)..(198): n is a, c, g, or t
  misc_feature (204)..(204): n is a, c, g, or t
  misc_feature (207)..(208): n is a, c, g, or t
  misc_feature (211)..(211): n is a, c, g, or t
  misc_feature (213)..(213): n is a, c, g, or t
  misc_feature (221)..(221): n is a, c, g, or t
  misc_feature (224)..(224): n is a, c, g, or t
  misc_feature (228)..(228): n is a, c, g, or t
  misc_feature (230)..(231): n is a, c, g, or t
  misc_feature (233)..(233): n is a, c, g, or t
  misc_feature (238)..(238): n is a, c, g, or t
  misc_feature (259)..(259): n is a, c, g, or t
  misc_feature (269)..(270): n is a, c, g, or t
  misc_feature (282)..(282): n is a, c, g, or t
  misc_feature (284)..(284): n is a, c, g, or t
  misc_feature (286)..(286): n is a, c, g, or t
  misc_feature (291)..(291): n is a, c, g, or t
  misc_feature (309)..(309): n is a, c, g, or t
  misc_feature (317)..(317): n is a, c, g, or t
  misc_feature (321)..(321): n is a, c, g, or t
  misc_feature (326)..(326): n is a, c, g, or t
  misc_feature (353)..(353): n is a, c, g, or t
  misc_feature (368)..(368): n is a, c, g, or t
  misc_feature (379)..(379): n is a, c, g, or t
  misc_feature (390)..(390): n is a, c, g, or t
  misc_feature (397)..(397): n is a, c, g, or t
  misc_feature (401)..(401): n is a, c, g, or t
  misc_feature (442)..(442): n is a, c, g, or t
  misc_feature (461)..(461): n is a, c, g, or t
  misc_feature (503)..(503): n is a, c, g, or t
  misc_feature (537)..(537): n is a, c, g, or t
  misc_feature (635)..(635): n is a, c, g, or t
taangnaaaananttcattttatttcttaaatgcctgaatatttaaaannananaaattttnatccattanataatttatnaccaantgtactttcaaattaattaaaaaaattagganactctaatttaaccacttctgaaaaaangaatggctgancaaaaaanntcaaaanacaaanaaaancccaaaattttancaaaancannaanancatttaancangaanannantattnaactttaaaaaccaaacttanagttttaaannaaaaacccaaantnantcaanaaaactttaccccaaaanaaagccanaaanggaanaaaggttttaattcaaaattttattanagtccacgtaaaaanaaaattttcangagggttacangatgganagcnagcaaaaaaaaaatgctagcacagggtggtaactgccaacnaagcatgccctgaaccaanaaactacttcagtaagtccttgattattgccagcttttctanaatgttcaggttcccaaaggtcactgaattttanaattatctccaaacaattttcttcatggtcatttaagctttgtctaaacagctgggtgtgttgccaagcgacatcaccatctcctctgcttaattctncaaaaaaaaaaaa

SEQ ID NO: 568966 - DNA, 148 bp, Homo sapiens
atggcagagtctacacgtgatctgacggacatatatggtacaagtattcaactagcttattagaatactccctaaatgcagtagattaataaaaaaaatcaaatctacaagtgggttcagtattatgtacgaattggtgaacaagaaa

SEQ ID NO: 568967 - DNA, 405 bp, Homo sapiens
  misc_feature (405)..(405): n is a, c, g, or t
agcaatatacttgctagagctatcggcgcgcctatctatgttgtataccacactatctatgctagatctatctatgctttatactatctatttcgaacattgacttaccatatctttatcatgagacaagactcattcttacactgcactgtaccagcactcgtatcatgggtcgcgacagcctatagtctgagcccagaagtacgcttcggatgacctcatacgagacgcatgaatgtgtacactgacctcctagagcgagctggatatatcatagcacagatagacctagaaggaactcaatgctctgatcaggctgagcgtcgaactcaagctacgcactgatcggagcactgatagcaggagcccatacactctcatatggtcacactagccatcagtctn

SEQ ID NO: 568968 - DNA, 585 bp, Homo sapiens
  misc_feature (2)..(2): n is a, c, g, or t
  misc_feature (9)..(9): n is a, c, g, or t
  misc_feature (15)..(15): n is a, c, g, or t
  misc_feature (103)..(103): n is a, c, g, or t
  misc_feature (112)..(112): n is a, c, g, or t
  misc_feature (145)..(145): n is a, c, g, or t
  misc_feature (156)..(156): n is a, c, g, or t
  misc_feature (173)..(173): n is a, c, g, or t
  misc_feature (183)..(183): n is a, c, g, or t
  misc_feature (314)..(314): n is a, c, g, or t
  misc_feature (347)..(347): n is a, c, g, or t
  misc_feature (406)..(406): n is a, c, g, or t
  misc_feature (439)..(439): n is a, c, g, or t
  misc_feature (455)..(455): n is a, c, g, or t
  misc_feature (488)..(488): n is a, c, g, or t
  misc_feature (538)..(538): n is a, c, g, or t
  misc_feature (553)..(553): n is a, c, g, or t
  misc_feature (572)..(572): n is a, c, g, or t
  misc_feature (582)..(582): n is a, c, g, or t
gnagaatcncaccgncccctccttatccccctccaaaaataagccattgcacacagacaggcagcatggctagcatacgaaaatctacaactccatgcatggntcggacatnacaagtagtagaacaagatgtgcccgaggaagnagacagggccnaagagaaaggaatcggnacaccacagnctgacgtggccaaggacagctgggcagcagaacttgaaaactcttccaaagaaaacgaagtgatagaggtgaaatctatgggggaaagccagtccaaaaaactccaaggtggttatgagtgcaaatactgnccctactccacacaaaacctgaacgagttcacngagcatgtcgacatgcaacattccaacgtgaattcttaaaccccttttacgtgtgtgcngaatgtaactttttacaaccaaaaagttccganttccctattccgaccnacaaattccaagtttccattcccgggggaaggncaacttttaaagcttgaaagttaattaaaccgccattaattcaaacctgnctttggaaacaagtncattcgaaaaccacccaanccttgtcgtngtt

SEQ ID NO: 568969 - DNA, 366 bp, Homo sapiens
  misc_feature (258)..(258): n is a, c, g, or t
tttttaaaaactacttcagtgattttgatttatattctttttgatagttcagaagtgtattgttaaaaaacataagcatggccgggcacagtggctcacgcctgtggtcccggctctttgggaggccaaggcgggtgaatcgcctgaggttgggagtttgagaccggcctggccgacatggggaaaccctgtctctaccagaaatacaaaattggccgggcatgatggagcatccctgtagtcctagctgcttgcaanggagggggggaggcttgcttgcacccgttaggcggaggttgcagtgagccgaggtcgtgccattgcactccagcctgggcaataagagcaaaactccgtctcggaaaa

SEQ ID NO: 568970 - DNA, 989 bp, Homo sapiens
gctagcttttctcttctgtaaaccccacacgccttctgggcacaatgaagtgggtaacctttattttcccttactttattctctttagactcggtttattccatgtgtgtgtttcgtcgagatgcagacaattagtgaggtttgatcatactggttattaaagatttgggagaatgacacaatttcaaatgccttggtgtgtgattgcctttgtctcaagataattttctagactaagttagttccatttttgaaggatcgatgtaaaatgtaagtcgatacttgaagtaatctgaacttttgcaaagaatacaagtgatgtttgctagtatgtaggtcaagtcgttggaaaattgtgagctaaatatccacgtgtcaataccccgtatattttggtagacgttagttactgtcacttagttttgcatacttctttcgtagaaactctattggatgaaactcgtattgtactgtctgtggcaagatacaagaaagcccgtgtacgtaggaaaatgaactgctttctttgttaaccatcagatagggatgaccaaattgcgcaaaacgcttcctcccgatttgggttgaaggaaccaaggagggatttgactgctgatggtggtcgactggacttatgcctatgccaactatatgccacagagaggaccattttctgtgatggagaagagataactattataattgctaaaagtttgctcaggcaaaggatacgaatctcctataagcttattaatgcccgcggaagctcgcttattcttttgctaaaaggtataaaggctgctttctacatgaatggttgctcaagcgtgcttgataataggccttgcttgcccttgtttggcaaaagggctcgattgcagctttcgggcgattgaagggaaaggctttcggtctggcaaaagagatagacttccaggtgtggcaaggtcctcccaaaaattttgggaagaaaacgaagccttttcaaa

SEQ ID NO: 568971 - DNA, 108 bp, Homo sapiens
gggagtgttagtctgtttagttgatcagtttatggcatgttaaatataaccattgccatatgttaacaacgattttccattaaataatgcttttgataaaaaaacttt

SEQ ID NO: 568972 - DNA, 267 bp, Homo sapiens
catgtcagccgtgagatgtagggggtggctgcgtgcaacacagggccgagatggacatggtggcctggtgtgtggagctggcctcagtggatgcagcacattaacagccaccggggcatccataactccatcggcgactatcgctgggagctggaccaaaatcaaagccgacctgtgcgagaaatctgcgatctaccagttggaggaggagtatgaaaacctgctgaaagcgtcctttgagaggatggatcacctgcgaacctatga

SEQ ID NO: 568973 - DNA, 871 bp, Homo sapiens
aggtccgagaacatgtgggagccgcttagtgtggccctcgggagtcagcctgtaacacagtaggcattcggaacacgggcgaaaaaaaaagggtggcccaaaaaccaacacgggcggggaacccccccccaccaagcactggtatacagccggccactattatccgaagccggggcgccccaacgaaatgctcgaggtcctggagcaaacaaaaggcggttcgtgccctagttgacaccctggcgtccctccccgcctctaaaacaaaggacttaggaaaaccaccggttgggcccagaaagcggaaatggacagcccaccgggagcgatacaagaaccgaacttttcctgggccatcacatgcgcgtgagggcccaaggaggccgtacattcgctgggaccaccccctagtcccgcaaagtttctttccacagacacgtcatcccatccatggttatccccagcaagggggtctgtggatactacctagtaacgtcgcaactagcctgtcataaatgttttgggcgacaacccctccgccacatttgtgatgcttgattctacccacaatgagcttcaggtgcggacttatcatctgttaatttggaccacacaaaaatcgcgatccatggatacctataaatgaagaatcagctgctgtgcccccaccatatgagatcaagcgagggtatcccgcttaaaaacagagcagagcggcgcacctcctcttcaagatattggttcgtacagacatcggtgacactagagacagccaaaatgtaaacgaggggcaatggccctcaagaacacggcgacttcggactatttacgggggggcctcccaacaaaaacgaaaaaaaaacaaacatac

SEQ ID NO: 568974 - DNA, 687 bp, Homo sapiens
caggactctcccatgaggggcatatgtcacgctaaaacccactgctgtttgtctcttagtcatttctttacccaagctgtgttaagattttttccctactgcgctgagaatgaaactaagtcctttttgatgagccctaaatcctgtggctttgtttttccacaatcccataaactagataagaacggtattggcacagaatatattttaaacatttgtatgaaaaatgggacccacacgttctcacgtgcttctggtgttgaggcaacagtgatggctggcggagatggagatttgacagctttgaagaagattctgcgtaagccccttagcacggcgctcccctcttcttcccagacgtgacactcgacggcggctctgaactgggctcgttccttcgtcatgttacccccggctgtggtctagagggacgcacctgatagaaatacaatgtcaagccctgagtgtgaggcacgaatgccaatttacactttttagccgccaccgttccaagaaggtaaaagaaaacaagtggaatgaaccttgataatgtattgtcatattacctcataaacccttaatttactttcaagggaatccatattaaattatttaaaacccattttataataatggttaaattaacaaccctaattaccattttttgcgatggcttgtgggggtggt

SEQ ID NO: 568975 - DNA, 1002 bp, Homo sapiens
ggtgagctgtgcccctgctccatgcagctgtctggacggcttccaatctgagagctctgtgttcatttctaccttgtgctgatttaatttacaacctggggcaaatctcctgagctcatttccttgtctattaaatacaaggtgtctgagacgtctcccatggatttgagaaggctgttgggaaaactacagagcaaacttctttactctgcctacagcaagctctgcaggatggatttcagtgttcagcgtccctggacatctgcctctaaaacaaatctgcaccacaacagaggtggcatcagtcaacacaaagggctcagaaaggttggggtgaaactctccactcctgctttcataccatttgaagttcagaccagtgagatttccatcagttgggagttgaagatgccacaaggacaagaactgaggatggtttgctcagagctgatttttagacaccattttccagggatccctggtgacagaggagcatttttttgtggttgagttctgaattaaaaagtgtcgtactataaagaaaaaacacaaaaacaaaaaaaaacgaccgccgggggccacctatatgtccggggggcggaaaaaaggagggttatgtgaacgggccacgtggcccactacgagtggtttccgggaccccagcttctcttggtaccacaaggctggcaaactctgcgcggggtccccccccataataggggggaggcccggtattaaaactttcggaattaaagcaccgggtttaacccccgggctctagaaaacgcggcgggagcaacaaacggggggagagcacgagcaggcgcagcaggaggcgggcgggcaggaccggcagcggacgtgagaaggcggacgtcataccgatggtgatgccagcccacacgacgacgggatgcgacgacgccgtccagagcaggagcgtcagacagagacacaccgccgccaccggcggcgaccaacgactagacgaaccgacacgcg

SEQ ID NO: 568976 - DNA, 918 bp, Homo sapiens
tggaaaggaatatggtccctttttgcaatgctactgtgtacacacacacacacacacacacacacacacacacagtgtgtgttagatctaaaatacacacacccacgcacacattcgtgtagtgtttagtggtgacctaactactatacacactatgcacacacactatactatatccattcatgtcattcattcagagtggtgttcccagtgtcgtgtgttgtcacgtgtcttatgcagtttcccattttcccatgtgaattatgcgtggaggggcaatcgttttctaaccagattgtctttctcagaacaaagcatcgtgggaatgacggaagatgttcggaaagagggagacggcaagggaagagagagctttaaatggaagagggttaatttcctaagaggaatgggggcgtgaagtgacatagagtgttgataccctccaaatctttgcaggtgggtagtggaacacgtgtttgtatcactcgtgggcggggtatatatctatatatccaaaaaaacacaatatccatccatcaatatatacatggtgggggatgagcaggtcaatagttgggaagaagggagtggcacatttattttctcaattatactcttaagtgggtgtccagttatcacacaaacagagaggacaccgtgggcaaacctgtggtgtacgcttttatatgaagggtttataatatagaaatattaacaaattctggcagttactaaagggaggatctccggaatatttagctgaatttctcagatttaactgatggttggttaagggaacagttaaaagaaatatggggataaaatatatattatggggtggagcggatccggaataaggatacaaaaatagcgtgggaaatgcaaagtgggtgaataacatttggtctgagaaaatgc

SEQ ID NO: 568977 - DNA, 972 bp, Homo sapiens
gctcttccactgccatcggaggcgggagagcgttgtggtgctagtgctctaagccatccagtgctatcctcgtcgtgcaggacaaacgctctcgccggtgcatgatgagcggatgatccttcgtggaaacctcgagggacagaagggggggtaacctagaatggatagtagctccggagttcgcggagaattgatcttgctccggatctcgaagattaagagcattcgatcatgtggaagagtagaccctagggatagagaaacaaattatgagaattgtcggacagaggtgtttagtgtaggggttcatcaccaattgatgtaaagtgatgaggattatctgcgtcaagatggggacagtttgccctctctaggctcctcgtggatgggaaccacatgcagcctctgggatcttcacaaatgggcaacgcatcgacagaaggcgatcggtgggggccaatacctatgggctgttgcatgagtgtgggccttgtcctttctgatcacctcgggagccttgcctcgaggatctcgagatgaacatgattcacatgctattggaatacccctggattgttgtgcgagatattactgtccagtgatgaggacggcacgccaacatgtgggtgggctgtagtcccgcttctcgccgcaacaaggtagtgacccataataatttagtcctccgggtggctagggacaagctgggcggggcagggaaaccgggcttacctaggaagcgtgatacccaaccgaattggggcacgagggcgtttgaaaccagctgaagagccttccaagaaagatcgccgtggcccggggccggcgggcagccctgactgggctccggaggccgaccttaccacagaaggggggaccaaggccgggtagcccagggtggggcgtgcaccccaacagttccaacacacttctccacccccccagacgaccacccccacagtaggtccgccc

SEQ ID NO: 568978 - DNA, 205 bp, Homo sapiens
acttctgcaccaccagaaattaaattgatggtggtgcagaagttagaagtataaagcgttgaggaagtataaagcgttgagaacgtataaagcgttgaggaagtatcaagcgtttagaagtatagagcgttcagacgtataacgcgttcaggaagtataacgcgttgaggaagtataaagcgttgagagtctttgaagtagatta

SEQ ID NO: 568979 - DNA, 101 bp, Homo sapiens
ggggtttttccctttttttgggggaagggacccaagtttgcctttcccccccccacccggggtggggggggttaaacaaaaaaaacggtttccccttttga

SEQ ID NO: 568980 - DNA, 918 bp, Homo sapiens
caaccttaggtctctcgacgaggaatctgccctcagacagccaggacttgggtcaacatggattagaagaggattgtatgttataaaagaggatttctcccaccttgacaccagcgcatgtagtgagcatatttctatgtaccatggtgcatatgattaatcttgggacaaagaatctatagaaattttgaacacatctgaaaaagaagcttaagtttgtatcagtccttttcttgttgctcatgaattcttaaaggattatgctttgaagtgctgtcatctatcttatggtgcttgagaatacctgcattgtgtggtatcatgttcagccaacatcattatgagaattaagttagattcccatgagccgataaaatggctttaaagaatatatatatagtttctgaaaacgtagcttgagaagcaaatggcaggtaatatgtcatacctacattaagactctgacttggatggtgaatcataatgatatgccccttttcttataagaacaaaaaagaacaatagtgaacgccagggactttgtaaagtgggggtcttggacttatctcacagggtggagtgtacctatatagctatgacttggatgtgctgcgagcaagcgacgcgtttgcctaccagtatgactgcgtaactaaacccgaattaggtccaattgcctcgtggcgccgaacacctcatagtagaccctgcccggatttgggtttccagggtctattattaagcgaatttccgtaaaatagaaagggggccctcaaaatcccgggccgacctcagacactctgcaggcccatgacataaaaaggcgcgtcaagacggaagaggactgtcacaccgcgcatgcccacaaccgccaattatgtacttccgcaaacgacacgggtaccaatcatcacgaac

SEQ ID NO: 568981 - DNA, 311 bp, Homo sapiens
  misc_feature (184)..(184): n is a, c, g, or t
  misc_feature (242)..(242): n is a, c, g, or t
  misc_feature (276)..(276): n is a, c, g, or t
cagggaagcagctcgtctgagtttcgttctcagagagagaataaaatagacagtggagcttttccaaatcacaaataaagccatcagcagtgctcctttcctgctgttccagccactgtggacatttgccatcctacattttcttctggtgtcctctggagtggctgtgctgctagagcctggngaactgctaggagctgcccagtgttatggagaggcggccgaagtggaatataagcccnctttcggcgcattgcggtacatgtgtgtcgtacncatttaatgtggcctcatcgtggactagtagaatt

SEQ ID NO: 568982 - DNA, 108 bp, Homo sapiens
ctgatgacacccgggcgaggaaggcgtaacggggcgatgaggtggagtccaggatgaggttcagcgcacctcggacatcttcggggctgacatccggagtctcggggt

SEQ ID NO: 568983 - DNA, 372 bp, Homo sapiens
acccttttggcccttgccgaaggggggtccgaactggtttggggcttcacattcgaatacgcggcgggccccttggccctatttttcatagcggaatacccaaactttttttataataaacacctcccccactccattcttcctgggaacaacatagggggcactttcccctgaactctacccaacatatttggtcaccagggccctacttctaacctcccggtttttaggaattggaacggcataccccggattcgggtagggccaattcatacccctcctatgaaaaaacttcctacccctccccctggcattacttatatgatagggctccatacccattccaatttccgggattccccctcaacccta

SEQ ID NO: 568984 - DNA, 1203 bp, Homo sapiens
  misc_feature (1203)..(1203): n is a, c, g, or t
ggagagagagagaactagtctcgaggttttctatgtctctatggcagttcccaaccattttatacagagtcccagtgtcaaaactctggtggaaaacagggtggggtcgggggatgacttccaactcaggaggtgtccagggtctcgcctttgatttcgttgaaaaggaacggcgtcctgggtactcccttcatgtcctggcgtgagagcggaggactcgtccaggaagagtgatgtaagacccgcttgatgtcatccacctgcacattcttgtgaccctttgggtgtattccgggacaacacacaagtctgggaagctttgtagatagacgctggagatggggctataagcagcagtgaccagttctccagcccagatagcggtgtacagaacccgtgtagagtgtccctcactacattctcacaaattctatcatttcacgtcgcaacccgagattgccgaagagactctgcatacagggatccttacctcgccatgataaggggagtggttggaaaacagatataagcagacccgagtcacagcagagtcataagtggggagaatgcccgaagaaaggggcctcatagagaacgcttggatgtgcccccccggaaattacagcggatgctagtgacaccacagggaatagtgatggcccaagtgaacatcacggaaacagagacgcccgaaatggatacaaattcttacacaggggtccccccagggtatgtacgaaaaaagcggacaacaaaggcattcatgaggagtgagtccaagaccatgtgtttgaggaacccctcgatgcaggaatttagaacagacagggaaaactcaccaaaggagggaaattaaaaatcatcaccaagacatatttgccccaattcacattcagcagacccacaatattacatgacacacagctttatggggccaacttgagcgacaacatgaaaaaccaagggagaacagtatcagggagaactttgaatcttccccacaagagaaggtataccaccccgtttaataaaggtagtcgcccatagagaagcgacccccatagggttagtaagcaagaacagttacgtaactaacagatgtaagcaaccactacagttgaaaagagggacaacgaggtgcgtgtggtggccaaccacaaccgcatccatggggcgaggtaatccatgggtgagaacaccccn

SEQ ID NO: 568985 - DNA, 411 bp, Homo sapiens
tcaaggccgaatctgctctccctcagattctggtctgtagggagaggccgtgatgagtgatgggagccttggtagggggaggactagggggcagaggggatttcctctggcaaaaggaagagtcagcccggcatctgccctacgccctttcccactgccgaccacccctccgaccctgcatcactgggctgcgggtgcatcttatcccattttacagctgggaaaagtgagacccagacgctccatctcagcttccccatgtggtgctgtgctctgtggtggccaagactgccatgttgccatgctgtgatgcagcaagaaagtcctcaccagatgcagccccttgatcttggacttcccagcctccagaactgtgagccaaataaacttctattgtttatcaattaaaaa

SEQ ID NO: 568986 - DNA, 700 bp, Homo sapiens
  misc_feature (490)..(490): n is a, c, g, or t
  misc_feature (634)..(634): n is a, c, g, or t
actgacctaatataatgccagcgttggtaaccattgacatagttaagaatcgcagtacttagaatttgtatttacaactagaagtgttaaaacaacattcctcatatagaaataatttaggcatatttgtatatgtgttattggtcagaatgatttatttacataacccatttctgctgttcagcagtataacaattgaataacaatttcattaaaatgtttacatatttaatcacaaaacagtttaatcattttatgatgttgctactactccataatttcaaaataattaaaactaatatgaagtggccacatggccacatggtcctagagacatatagttaataccttgtgttaaatataaatgcaccaagtaaatccgatataatatgcattcataataaatgtaggtgaacccacaaggctgatagaactcagaaataaactcaacatacaataatactgcttgagccagaaatacctgaagttnttatatttccaatttatatgtagtagatgcttaaagtggaaaatagtcgtatgatgacttattaagcaatgaagttagcacagtttctatttggacagaaaaatctgacttatatttcttttctctctctacgtctgatagctngtgtgaattttatcttgctttgcatcactggcataagctgtcgcattatcagcagaaacgttattt

SEQ ID NO: 568987 - DNA, 236 bp, Homo sapiens
cagatttcttcagtccaatgtccttcagaatgagcattagcaggggcttgaggaaggatctccggttccccttggcaaactctctgggacaggctgagctgctggctcaggtttgccaagaactcgatagacggagcgcttggtctgtgttcgttcgatgtattctcatctttgtccatcgagaatatggtctgatctagagtcaacgattgcagcgttcgaaaggcacgcaaaag

SEQ ID NO: 568988 - DNA, 197 bp, Homo sapiens
tctgggtctagggtgttcctgagaactaggggaaatcagtgaatgaagccacctatgatggcaatacagctcctagttgataggacatagctgtgaagtgagctacaacgttgtacgtgtcgttgtagatacgattgtctgagtgatgagatttgctatatacaactgccagtcatggcctcctcaccggtcaacta

SEQ ID NO: 568989 - DNA, 386 bp, Homo sapiens
agtgatagttggtagttgttagacaccccaccttcagcttgtactctaaagctttatctcgttataaatattcactgtatttaggggaagtatgtcctgttgctcaaaggattctcaaacctgccatccccaggaaaatcatgtattagtattgctaaataatggtctgtatcttctttgtattgaaggtggctagatgtttgctgtgaacattaataggagaattatattcttaaagtttacaccccctattagccttaagccatttaaattgataaactgagagagactaatagattttgctctcaggtataaaatccattatcttatcatattcctgagctccccccgactccgactgaatttgctgcagggtaccgagctcg

SEQ ID NO: 568990 - DNA, 797 bp, Homo sapiens
  misc_feature (230)..(230): n is a, c, g, or t
ggggaattggtgatgaggcgtgaggtaaatcatgcgcaccttgtgctcacggcataagcgctcgatctggtcggtgcggcaaccttcatcatcaatgtcgaccgtgaccaacttcgccccgagcttgcggaaaatttcccatgccggtgggtagctcagacgttccaccaggaccacgtcgccgggcttgagcagcaggctggcgctcaggaacagggacatctgggtgncctgggtcaggcagatattttcggcagtgaccgtcagcccacggttgttgcgcagcatttcggccagggcgcagcgcaagtgatagccggtgccttcgctgccgtagcgcacggtattggaggcaaagctgttgcgcagtgcatggcgatagtaacggtgcagaactgcctggggcagcaggcggtggtcgctggtgccgttgtcgaaaaacagcgcatcgcgccgatgctgtagagcgaccacttgggcattatgggtgaaatagggtaccagcggttgctccagtaacggcggcgcgaatgacggttgcgtaacgctgggcaggtgtttgagtgtcagctttacattgacgaaggtgccacggcgcggctcgctggtcagccagcccttggtcatggcttcttcgtaggccaggatcaccgtcttgcggttgacgtcgagcaagtgtgccatttcccgcgtgcccggcagtaacgtcccgggcggcaggcggccttcgaggatggcattgaccaagccttcggcgatcttgcggtaagtcgcctggcgtgcaccttcttcaagcg

SEQ ID NO: 568991 - DNA, 318 bp, Homo sapiens
gtcgcaatagctaaaacctccgggcagcatgtctgaaacacccgatatggctgagatcgagaaatccgataagtcgacacactgaagcaagacagagacgcaagagaaaaatccactgccttccaaagaaacgattgaccaggagaagcaagcaggcgaatcgtaatgaggcgtgcgccgccaatatgcactgtacattccacaagcattgccttcttattatacttcttttagctgtttaactttgtcaagatgcaaagcggttaggctcaagtttaaatgactgtgctgcccctttcacatcaaagaaccacgacg

SEQ ID NO: 568992 - DNA, 172 bp, Homo sapiens
gaatcaggtatataaatctattagtagccatgataaccttgatagttcttaggtggcctcaaagccgtcgagctgggggagcaactacagcatcgtgacgctgcacttacactagtacccctaccagaaccccacctccagccgcgagggagccgactggaggtcgatttcg

SEQ ID NO: 568993 - DNA, 687 bp, Homo sapiens
  misc_feature (1)..(1): n is a, c, g, or t
  misc_feature (109)..(109): n is a, c, g, or t
  misc_feature (121)..(121): n is a, c, g, or t
  misc_feature (131)..(131): n is a, c, g, or t
  misc_feature (138)..(138): n is a, c, g, or t
  misc_feature (153)..(153): n is a, c, g, or t
  misc_feature (177)..(177): n is a, c, g, or t
  misc_feature (182)..(182): n is a, c, g, or t
  misc_feature (190)..(190): n is a, c, g, or t
  misc_feature (197)..(197): n is a, c, g, or t
  misc_feature (204)..(204): n is a, c, g, or t
  misc_feature (247)..(247): n is a, c, g, or t
  misc_feature (254)..(254): n is a, c, g, or t
  misc_feature (260)..(260): n is a, c, g, or t
  misc_feature (340)..(340): n is a, c, g, or t
  misc_feature (380)..(380): n is a, c, g, or t
  misc_feature (408)..(408): n is a, c, g, or t
  misc_feature (452)..(452): n is a, c, g, or t
  misc_feature (463)..(463): n is a, c, g, or t
  misc_feature (546)..(546): n is a, c, g, or t
  misc_feature (617)..(617): n is a, c, g, or t
  misc_feature (624)..(624): n is a, c, g, or t
  misc_feature (627)..(627): n is a, c, g, or t
  misc_feature (666)..(666): n is a, c, g, or t
nggggggctcggcctcttttggtaagccaaagggacaggtttttaaaaacctaggcctcttcctagagttcccttaattttctgggccggatctttttttcttcctggnttgggccctgcnagggggtgcncggcttntcgggtgtttgtgtncttgtgggctctggtttttttgtnctggncttttggntgggtgnggttttntcctccggcgggggcgttttggggggtgtgctgggcgtggggngctgctncctggnccccttctctcttcgcgcggtgttccttcatccggccatgggggcgcggctgggtggtccagggggcggtgccggttgtnggctgtcgtgtgcctgcctatgtgtgtgtgttctatgggnactcaggccttagaatggtttcaaagtngtggctttcaaaattactgtttgcctcttcaaacttcacacctnagggaaatggnaacatgcagagcagggacacagaaggggcattagctggcgtggggtaggggcaagagctaattgtgaaggaagaaggcctganatcacgttgccatgtcggagaacagctgttctcgctgccctgcctctttgcgcgcatgttaggcagctccnggctccngcngcttgagtttctcttgggagtccccggagctggcttcgnccccagttaatgcggttctgg

SEQ ID NO: 568994 - DNA, 940 bp, Homo sapiens
ggctgagccagctactccgtccatttcactctccggcgctcgttctcacggctgtactcccgttccgctgcccgccctgccgccatgacggaactggtcatctacttcgctcaagcgacttcttggctcggtgaagtagctgtctgctcgtcacgccgatcgtcgcagagactggccgtggttcctgattcgatgcgggtcacagctgctgccttgctggtccagcacgccaggaagcacgactcgccgtcgactaagtagtacaagggcatcgtgcgactgcattgtccgcattccccgatgagcagggcgtgctgtccttctggaggtgctatccttgccagacttctttcgctagcttccccatctcacagccctcaacttcgtccttcaccggatatgtcctaggcatgatcttcgctgccggggcgtggatcgaagcatcgacttcagttctgtgccggtacctttgctgggtaatgctggcctccggcggtgcggccggcgcgatctccctctgcttcgtgtaccctgcctggactttcgccagagacccgcctggctagcggatcgtgggaaagtcaggcacgagagcgcgagttccggaggcctgggagactgcctggtgaagatcaccaagtccgacggcatccggggcctgtaccagggcttcagtgtctccgtgcaggcattccatcatctaccgggcgggctacttcggcgttgtacagatacgggcaagggcatgctccccgaaccccaagaacacgcacatcgtggtgaagctggatgatcgcgcagacccgtgaccgcccgtggcccggcgttggtgtcctaacccttcgacacggtgcggcggggctgatgaattccgtcccggggcgcaaggagctgactcctgttcacgggccccgtcgcttgttgggggagatcttcgagt

SEQ ID NO: 568995 - DNA, 191 bp, Homo sapiens
cggcacgaggaagaaaagaaaaaagaaagcattctgaaaactgagaggggcagggctggagaaggagcaagttgtggggcgccaggcttcccgcacgcagcctgtggtggatgtgggaaggagatcaacttttcctccctttgggacagacgttgtgtggaaactaaaaagaacatgcggcacgttaatca

SEQ ID NO: 568996 - DNA, 492 bp, Homo sapiens
  misc_feature (76)..(76): n is a, c, g, or t
  misc_feature (101)..(101): n is a, c, g, or t
  misc_feature (113)..(113): n is a, c, g, or t
  misc_feature (117)..(117): n is a, c, g, or t
  misc_feature (152)..(152): n is a, c, g, or t
  misc_feature (161)..(161): n is a, c, g, or t
  misc_feature (167)..(167): n is a, c, g, or t
  misc_feature (185)..(185): n is a, c, g, or t
  misc_feature (222)..(222): n is a, c, g, or t
  misc_feature (232)..(232): n is a, c, g, or t
  misc_feature (240)..(240): n is a, c, g, or t
  misc_feature (248)..(248): n is a, c, g, or t
  misc_feature (257)..(257): n is a, c, g, or t
  misc_feature (281)..(281): n is a, c, g, or t
  misc_feature (284)..(284): n is a, c, g, or t
  misc_feature (291)..(291): n is a, c, g, or t
  misc_feature (314)..(315): n is a, c, g, or t
  misc_feature (325)..(326): n is a, c, g, or t
  misc_feature (331)..(331): n is a, c, g, or t
  misc_feature (334)..(335): n is a, c, g, or t
  misc_feature (340)..(342): n is a, c, g, or t
  misc_feature (344)..(345): n is a, c, g, or t
  misc_feature (360)..(360): n is a, c, g, or t
  misc_feature (386)..(387): n is a, c, g, or t
  misc_feature (399)..(399): n is a, c, g, or t
  misc_feature (402)..(402): n is a, c, g, or t
  misc_feature (409)..(409): n is a, c, g, or t
  misc_feature (418)..(418): n is a, c, g, or t
  misc_feature (424)..(425): n is a, c, g, or t
  misc_feature (428)..(428): n is a, c, g, or t
gaagtgatctagaggatcccagactcggcacccgttcattccatttcatacattcagattgattctattcaattcncttacactccattatattccaatcnattctggttgtntccnttccattccattccatttcactccattccattgcnctcgggttnattccnttccattccattccattncattccattccattccattccggatgattccattccnttgcattccnttccattncattcccntgcactcgngttgattccattccattccattcnttncattccnttccattccattccattccattnnattacattcnnttccnttnnactcnnntnnattccattccattgnattccattccattccattccattccnntccattccattncantccgttnattccattncattcnntcnattccattccattccattccattccattccattccattccattgtacctcggccgcgaccacgc

SEQ ID NO: 568997 - DNA, 309 bp, Homo sapiens
ttaggcttgggaaattttttttttggctttcccccagataaacttttggctaatccaatagggaaagaacctgtttttttaaagctttttttgggttaaaaccgggattagagatcggcctttatcaggggtccctttttttttttgacccttattttgggggaaggaccccccgagggggtcccgtcatgtcgggtttgtttgggggggaagggacccgccagggggttgaaagtttttttttaaagatgaaaagcttgtgaacccctgtaaaacatgcgggttttgaaaaacctttgttaaaactta

SEQ ID NO: 568998 - DNA, 1617 bp, Homo sapiens
  misc_feature (727)..(727): n is a, c, g, or t
  misc_feature (836)..(836): n is a, c, g, or t
  misc_feature (1179)..(1179): n is a, c, g, or t
  misc_feature (1276)..(1276): n is a, c, g, or t
tctacacgggcgactctttgtggtggggccccccccacttcctttgtttttggtggtcgctttcgtcgccccgcccgtcaatgtctgccgttgttgtgatctgtgcgggtcttcttccggcgcccgcgctgtttattttcttattgttgggcagggtttctttttttcgcaagattgtgtgggccccggacgcaccagatgacccgccgacaagtgaggaaatatgttgggggggggcgtgtgcctttctgttttggtgtccaccacagaatctgctttcgggggggcaccccccacactgtttggttggtagatcacttgttggtaggaaccccccgcccctctcttgtggtggacattatttattgtaagagcgcttttttggtgggggtggaacaaccgcccccgcccccccagtagggtgctccctgcacgctcttctcctctattgtgtgccctcccccccccccacggtgagtggtgggataatattgttggtgcctttgcttcgttcttttatataagaggggtctcccctcctcctcctccccgtcgtggggtgcgcctcctagaggtgctctttcatcacacggcgagttggttttttctctccacgcggggcagctcttttctctctttcttttgggggtggccctcttggggctccctcccccgcgccaccccctctctatttgagagaggcccgcggcgagtcttttttttcccncctcgtcgcacacttctcgtctctgagtagagagagagtaggcccctcttcggggggacaccgcgcccatcgcggcgttgtttgtcggcgagcagtcttcttttcctcncgctcgggaggagagagttgtacacactctggtagaccctctcactctgtgagtgtttgtgtgagagcctctttgaagtgtgagccttctctatagcgcgatgatatagtagtgtgagagtttctgttgtgagagagcgccgcccccccccacacacagcaggagggcgtctctcacagacgcccactctctttgtctctctttctctctctgggggagcgcccccactgcggtgatgtattttctcgcgcaccacacgctggagagaggcgacgcatctctgtctcgtcgtacgacacactctcgcagagtgtgagtctctctctcccccacgctgcgcggngcctctctgtgatacacccccacagcagagtagtgtttagtgtctctctctgtgtgtgtggtgtcgtctctctgtggagaacacacctcgccacgcnccccggtgagacacttttgtgcgcgctctctccaaagagaacaccacatctgtgtaatatattcttatatgtgaatatttgtggtacacccgcggtgagaattgaggctccgtatattctgtgttcaccacaaaatatatttttagagagagaacacatcttggcgcgttctggaaccacattttcttcttcttgacctgctgcgcttgaaatgttctttggaggcctgttttttatatgtaatggggtttttttataatgtgagatccccttccaatttgagaatattataatggcgtttttccccgtaaaaaataaaatattttgggccaacccccaca

SEQ ID NO: 568999 - DNA, 240 bp, Homo sapiens
ggttgaaacagcactcggcatctttatatgttatgactttgttttgtgtttgaatgttcagtaacatctttgggatggtggtggaagtaaaacagatgtcagcaaaagataggttggagagaaaaaagtacatgggtgtgtggagatgggagtctaaactgacggccaggataatgagtaggttccctgtgaatgtgaccacgtagatggacaggaacagcccaaataggagtgctgttt

SEQ ID NO: 569000 - DNA, 579 bp, Homo sapiens
  misc_feature (63)..(63): n is a, c, g, or t
  misc_feature (92)..(92): n is a, c, g, or t
  misc_feature (99)..(99): n is a, c, g, or t
tgcccctcactttacataaactattatactagcatttaccatcctcacttctaggaatactangctatatcgctcacgacctcaatgttccnttccccntaacttaattggccttagcacacgcgcaactaaattacctaatcgcttgatgtccagttcacttaggtcattaccattccttccaattaaaaccactcctttccaaaatcgaatcacccacaaacctttcccccacatttccatttttttaaggtcccccaaaaattttaaccttacgtgcgtttagggacccccatttaaatttctggggccccccaaaattttaaagcccgttttaaaggcattccccttttcttatcgggccgcccatggtctccccttgtcggccccggagaacacataggcaccataaagaggccagagagggcggtatactaggagaggtgaagaggcacacacccaccccttcttcaaaatagtgagcacaccctcaccacacaccactctcttttataaaccccccctgttgtttcttaaaacgcgcgacgtctttcccctatgttcttcaccagaaataag

SEQ ID NO: 569001 - DNA, 303 bp, Homo sapiens
  misc_feature (46)..(46): n is a, c, g, or t
tttcctgtgattttcgaaactaaacccccgtgtgtcctgtagtgtncaggtttacatttcttacccttggagtctgtgtggggaatttccagcccttttatgcctgtgtgatcccaccccacccccatagttgtataaaggtcatagtgaagaagctcgcgcaagtctgccccatccagatcctggggcggggtccttaagtgctctctcaaaaacaacccccgaatgtttttatagtagtttaattgcatttttttgtaatgcccgtattatgtaaaaaataaagtattttaaaaatatggc

SEQ ID NO: 569002 - DNA, 275 bp, Homo sapiens
  misc_feature (39)..(39): n is a, c, g, or t
  misc_feature (43)..(43): n is a, c, g, or t
  misc_feature (192)..(192): n is a, c, g, or t
  misc_feature (202)..(202): n is a, c, g, or t
cagaagttcaagagcagcctggccaacatggtgaaactntgtntgaaacccaacaaaaattagctgggcatggtggctcacacctgtgatcccggctactcgggaggctgaggcaggagaatcgtttgagcctgggaggtggagattgcggtgggctgagatctgactactgcatcctagcctgggcgacanagcgagtctncatctcaaacaaacaaaaaatttagctgggcatgggtggcatgtgtctgtggtcccccggctaagtttggaaa

SEQ ID NO: 569003 - DNA, 145 bp, Homo sapiens
actaaaagagaccaacaacctaaaacaatctcgtgtatatacatatacagactcacatcaaaacttcagcagcaactgcaaaaccacaaaactacggtatgatacacgaaacaaataatgaaacatcaactcaaactacaccact

SEQ ID NO: 569004 - DNA, 178 bp, Homo sapiens
atcttatggcaagaggtaaaggcctgaggggtgtcaatccatatgaatggcaaggtcatagaagaggctaggtgacggggacatgaaactagaagctaggagctccacgcaaactagacaccctaagcctctagccaggctagggagtagggagcataggggcagggaccatgaagtg

SEQ ID NO: 569005 - DNA, 405 bp, Homo sapiens
atgctaaatttactctgcctgtgctctataaaaaaaaaaagtatagatgacaatacatctatttacagcatagtttactgagtattttaagccaactgttgagacctgcaaaatattactattggccagatgtagtgattcccacctgtagtcacagcactttgggaggcccaggtgggaggactgcctgacccaagagttcaagaccagcctgggcaacacagcaagaactcctctctacaaaacatttaaaaattagccaggcatggtggcacacacctgcagtcccagccactttggaagctgaagcaggaagacaacctgcactcatgagttcgaggttacagtgagctgtgattgcatgactactccagcctgggcgacagaacaagagactgtctccaa

SEQ ID NO: 569006 - DNA, 144 bp, Homo sapiens
ctcggtaccgacgacagtgtgactccaccaggtagcacgcagtgacaaatggaggagacatagccaccagcttccaggccatccaggtccccgggtcgccttgggatccggaccggtacaggccattcagggctgccacatccc

SEQ ID NO: 569007 - DNA, 952 bp, Homo sapiens
  misc_feature (345)..(345): n is a, c, g, or t
ggcaattaccttaatccagctacaggattgcagtggatttgaagttgatctttaacacctttaaggactgttctcgtccccatttacccctgcttctagggtgtcatgcttcatggtttcagcctaaacatagggcttatcaggattccctctctctcttctgacaacagatgccccttagggaaaagctgctcaaaacacctggctcatctttggttcccttcttctgaattttggccctgtaactcttcactaccttgttaactttctgatgtcttcatgcaatttttttttagttgtccagcttttctagttgtcctcaggagggttgatccactattaacnaattttctcaactttgttttccaatcttgtttagcttttcataaatagtaatactatgtttttaattccaagaccttttctgttttctaggttttttttcccgtgcgtgcgtgtgagtatgtgtatgggtgttttagaaaaataggatcctattcttgttaaacacaatattttatctttctgagaatatcaatatgtgttgctattgtgtaatttttttgtctctagtttcttaaagttacttttttcagtttattttggtaccttctatgtcaagttgcctgcttattgttggtgagttggtcatattgaagagtacagaataagaagcagttgagcctgggcgtggtggctcatgcctgtaatcttagcactttgggaggccgaggcggatggatcactttaggtcaggagttcgagaccagcctggccaacatggtgaaagcccatctctactaaaaatatatttttattagccgggcatggtggtgggtgcctgtagtcccagctacttgggaggctgaggcaggagaatagcttgagctcaggaggaggaggttgcagtgagctgagattgcacttgggcaacaagagtgactctgtctcg

SEQ ID NO: 569008 - DNA, 221 bp, Homo sapiens
  misc_feature (176)..(176): n is a, c, g, or t
  misc_feature (195)..(195): n is a, c, g, or t
tgatctagaggatccctgggctcagtgatcctcccgctcagccctgcagtagctgggacataggtgtgcgccatcatgccagctaattttgtattcgttgtagagacggggtttcgccatgctggccaggctggtcttgaactcctgggtgcaaagctgtctgcccactctcccanaagctgcttgggcgttacntgggcacttgagcccacgtgcaccct

SEQ ID NO: 569009 - DNA, 459 bp, Homo sapiens
agttgaccaagactaatactgaaggtggcataagttatcaagccattctacaagagataacttacataaccagaatgtctagtaaggctcgcagctgtcacagataggcagggcactctgggatatgacctttctgtccaggtgattcacagactagacctttcttatcctcctcctagagttatgacttgggactctagtgttaagatgatgagcccgtgcatcaggtccttctgcactttggtggaagtctcccagggtaggtttcctatttgaaacagtggaatcatgtttccagtgataaagtttaatgacctcatcctttataatttataactctatctgccattggtgtagtctaaaatgggtaaaaatggcatgaatgtggctaatgtggttctcaaaattgggtcagattggcccacaatagctccggctctgtctaacggactcaatccc

SEQ ID NO: 569010 - DNA, 659 bp, Homo sapiens
  misc_feature (655)..(655): n is a, c, g, or t
ctggactctgtttatagccatcttcctgacctgctgtagaacatagggatactgcattctggaaattactcaatttagtggcagggtggttttttaattttcttctgtttctgattttgtgttggggtgtgtgtgtgtgtttgtgtgtgtgtgtgtgtgtgtgtgtgtgtgtgttaaacagagaatatggccagtgcttgagttctttctccttctctctctctcttttttttaaaataactcttgtgggaagtgggtttataagcctttgccaggtgtaactgttgtgaaatacccaccaataaagttttataagttccatattttctccattgggccttcttatgtattttcaagattattcgtgtgcactttaaatttacttaacttaccataagtgcggtgtgactttttcccacacagtggattgtgaggctcttaacttcttaaaagtataggggcatcttgtgaactcctataagcagtctatatgtctcttaacattcacacctactttttaaacaacatatattattactatttttattagggggggccttttataaattttcttagagattaagaaaatttaagaccccatttgtgttactgttgtgcaatcaacttgggaggtatcttctaaatatgtctgtgnatag

SEQ ID NO: 569011 - DNA, 924 bp, Homo sapiens
  misc_feature (5)..(6): n is a, c, g, or t
  misc_feature (11)..(11): n is a, c, g, or t
  misc_feature (17)..(17): n is a, c, g, or t
  misc_feature (20)..(20): n is a, c, g, or t
  misc_feature (30)..(30): n is a, c, g, or t
  misc_feature (39)..(39): n is a, c, g, or t
  misc_feature (41)..(42): n is a, c, g, or t
  misc_feature (47)..(47): n is a, c, g, or t
  misc_feature (50)..(50): n is a, c, g, or t
  misc_feature (56)..(56): n is a, c, g, or t
  misc_feature (60)..(60): n is a, c, g, or t
  misc_feature (63)..(63): n is a, c, g, or t
  misc_feature (65)..(65): n is a, c, g, or t
  misc_feature (71)..(71): n is a, c, g, or t
  misc_feature (75)..(75): n is a, c, g, or t
  misc_feature (77)..(83): n is a, c, g, or t
  misc_feature (89)..(89): n is a, c, g, or t
  misc_feature (120)..(120): n is a, c, g, or t
  misc_feature (136)..(136): n is a, c, g, or t
  misc_feature (149)..(149): n is a, c, g, or t
  misc_feature (173)..(173): n is a, c, g, or t
  misc_feature (192)..(192): n is a, c, g, or t
  misc_feature (202)..(203): n is a, c, g, or t
  misc_feature (216)..(216): n is a, c, g, or t
  misc_feature (233)..(233): n is a, c, g, or t
  misc_feature (447)..(447): n is a, c, g, or t
  misc_feature (452)..(452): n is a, c, g, or t
  misc_feature (742)..(742): n is a, c, g, or t
  misc_feature (745)..(745): n is a, c, g, or t
  misc_feature (838)..(838): n is a, c, g, or t
  misc_feature (840)..(840): n is a, c, g, or t
  misc_feature (843)..(843): n is a, c, g, or t
  misc_feature (901)..(901): n is a, c, g, or t
cgccnnctccncccccntcnggtgtttgtngtggggctncnnactcnccnatcccnccgnaancnccaggncaanannnnnnngggagngagtacactatattcaagtggtgctcatcgngactcaggcgtggcanagcaactgctgtngcttcaccgcaacgagttcaactngagagcaagagaccatcgncgtgagttcnncacccgcagcatncaggtggacggcaagancatcaaggcgcagatctgggacaccgctggccaggagcgctaccgcgccatcacctccgcgtactaccgtggtgcagtaggcgccctgctggtgtacgatatcgccaagcacctaacctataaaaacatagagcactggctaaaggaactacaggaccacgcaaacagcaacatcgtcatcatactggtgggcaacaagaataacctgcgccanctgcnggctgtaccactgacgaggcccgcgccttcacaaaaagaacaacttgtccttcatcgagacctcagccttggattccactaacgtagaggaagcattcaagaacatcctcacagagatctaccgcatcgtgtcacagaaacagatcgcagaccgcgctgcccacgacgagtccccggggaacaacgtggtggacatcagcgtgccgcccaccacggacggacagaagcccaacaagctgcagttctgccagaacctgttacccctgcgcctccacccagcgtgcgttcanttnctccgcccgcccccgccacggtatcctctggcccctccctgctgttcctctgtggccggctcgttccagccctcccagtgagctctgcacggncnggncggggcccaggaaggacaggagccagttctacccgttctgcccggggaaagctagaancccggtttgctgcaccatgaaat

SEQ ID NO: 569012 - DNA, 607 bp, Homo sapiens
  misc_feature (603)..(603): n is a, c, g, or t
ctggactctgtttatagccatcttcctgacctgctgtagaacatagggatactgcattctggaaattactcaatttagtggcagggtggttttttaattttcttctgtttctgattttgtgttggggagagaatatggccagtgcttgagttctttctccttctctctctctcttttttttaaaataactcttgtgggaagtgggtttataagcctttgccaggtgtaactgttgtgaaatacccaccaataaagttttataagttccatattttctccattgggccttcttatgtattttcaagattattcgtgtgcactttaaatttacttaacttaccataagtgcggtgtgactttttcccacacagtggattgtgaggctcttaacttcttaaaagtataggggcatcttgtgaactcctataagcagtctatatgtctcttaacattcacacctactttttaaacaacatatattattactatttttattagggggggccttttataaattttcttagagattaagaaaatttaagaccccatttgtgttactgttgtgcaatcaacttgggaggtatcttctaaatatgtctgtgnatag

SEQ ID NO: 569013 - DNA, 450 bp, Homo sapiens
tgtggtcgatctctagcaggactcccctacctaatgctgtttagtgttcactgcagttgggtcaaaattagtatcacgagttagtcttctgtgggtattagggagggattatggtgcctccctcccacccctactggtcttccttgttgtcacacgcctttattatctactcctgaacaggagctaggagatgagtgaacacgcctcttaacgtagcaccataatgcttgcggccaagaaaacctgcccccttgtttcttggtcgtgttttcccaatatcttttatacttcagtttccctgggtgggaataatgccacacctgggttgatgcccgaggcttggatctctgatgcctcaattccatctctatgggcatgcctgtctagcttcctatgggcgctgtcagcttcacgctccgctggtcacccatggtttcgttctttcgccac

SEQ ID NO: 569014 - DNA, 276 bp, Homo sapiens
atgagaacgccagctagaactgatcgcgggtgtgatgctgtgacttcaaattatactggctcaagttagcccgtcatacaaacactaaaatatcgacaaatgcatcctacgccgggtgcagtggctcacaccagcactatgggaggccaacgcaggcggatcacccgaggctgggagctcaagaccagcctgaccaacatggagaataataataagccgagatcgcaccattgtactccagcctgggcagcgagagtgaaactccatctcaaaaag

SEQ ID NO: 569015 - DNA, 428 bp, Homo sapiens
tctagcaggatcttatcggctgcctttttttttgtcaccatgccggccgggaagaggcgctcctcacttcctagatgggatggcggccgggcagagacgctcctcactttccagactgcgcagccaggcagaggggctccttatgtcccagacgatgggcggccaggcagagacgctcctcacttcccagacggggtggcggccatgcagaggctgcaatctcggcactttgggaggccaaggcaggcggctgggaggtggaggttgtagcgggccgagatcacaccactgcactccagcctgggcaccattgagcactgagtgaaccagactccgtcttgcaatcccggcacctcaggaggccgaggctggctgatcactcgcggttaggagctggagaccagcccggccaacacagcgaaagcccg

SEQ ID NO: 569016 - DNA, 905 bp, Homo sapiens
gacagatggcagttttgtggcggtgacaccacaaaactattttagcgggccccagagggccctgtgtgaagaaattattcatgcccgcctggtgtgacagaccgacatgttcgccaaaactgtgggttgttcatctggccgccaattacctcctggggccacgagcacgaacaactcattttgggggccaaaggggcccccccccacatggttggagaaacgagtttccttttccccccaaagagtgtcttgtacagggtcgcacacaccagacgggtagatttcttggcggaggttcgcgccccttatgaggtgtgcttaggttggtgagcttccccgccctagtaatcttggctgggacagtgttggtaaaacaagggagcggccacacccgcgcggttcctcagaacaaaaaaactcgcctattgagtgtaccccacacaaagtttgtgacagtatctaacggggttgtctcgattactgagcacgcttggtggtaacacctcgctctctgtcgtagtcatgtgccgccccacgcgcgcctccttttatttcttacaaacaagtagtacacagctgtgcgcctctctttcgggttcttctgctccgacggagtccacaattaggtcggcgacctcactattctcatgtgactccactccgccgtacctctattctcgacatctctgtctaggtcagaaaagtctctagggtcgactctcgcgcgcgattagccgttctctttgcccggcctcccaccctcttgcgataccacctggcgtcaggacatgtgtgcccaaccgacacggtggtccagcccacccggagcagagtgcagtccccatgtactccgcttgatctctgtattcttgaaaaaaaatgtgaaagatcccgcaaacatgaca

SEQ ID NO: 569017 - DNA, 326 bp, Homo sapiens
  misc_feature (100)..(100): n is a, c, g, or t
gatcatgggagtgttaccggtggagggtgtccaggtttttgacattttgaacaaagaatgggacaaaaagcccaaagaaagccaaaaaagaatgaagcanccaaaggagagagtgattgaaaatgaaagccccctccacagggtgggagcagccccggcaggggctcagggcgcggttacacaatgtcccggggtttaaatatcctctagaggcttcccatcggttacttggtgtgagccccatgtaaatgaagaggctgaagtggagttacaaagttatttacttggtgtacacactatgcaaataaaaagggtgtttcctgtca

SEQ ID NO: 569018 - DNA, 223 bp, Homo sapiens
atagggtcctcttgaagttactatttatgttttcaccttattctaatgcctttttatttgattctcagcattataaatttaacctctaaaaatttaaatattcatgaactgaattagtgcccaaaatatccacggtggatacttatagaaaatcatgagacgttttaagttgtattgtatgagtatgctcacacacacacacacacacacacacacactacat

SEQ ID NO: 569019 - DNA, 235 bp, Homo sapiens
acctgggatagtattgaactctatgttttttctcatacctatgtataagtctaatttatataataggtgcaggaactaatagaacagttatgacaatgtagtaaaggttacatgaatgtggtctctctttttcaaaatatctgattgtactgtactcacccttcttgtgatgatgtgagatgataaactgccttcctgatgaggtaaggtgaatgacagcattgtgatatagcct

SEQ ID NO: 569020 - DNA, 144 bp, Homo sapiens
actgctatcacctgattcatatccttttagctgatatgctaaagagcttcccaaggtttttcaagtcatggcatacacaagaaatgatatctgtacatacacgggtaaaaaattgcaagagattgctctcagctggatcagcta

SEQ ID NO: 569021 - DNA, 256 bp, Homo sapiens
agaggatcccttatcgtgttgcctttgggagactgaagcaagaggatcgattgagcccaggagtttaagaccagcctggacaacacagtgagaccccatctccaaaaaaattttaaaaattagccaggcatgctggtgcatgcccacatacccagctacttgggaatttgaggattgcttgagcccaggaggtcgaggctgcagtgaactatgatcacactactccagctagggcaacagagtgagaccctgtctc

SEQ ID NO: 569022 - DNA, 92 bp, Homo sapiens
gaaccacccactacagggccaacaacccccacaccccgccgcgcacaactacatatacccgagcaattaactcaaccacacctcaccaccac

SEQ ID NO: 569023 - DNA, 267 bp, Homo sapiens
  misc_feature (116)..(116): n is a, c, g, or t
  misc_feature (160)..(160): n is a, c, g, or t
  misc_feature (175)..(175): n is a, c, g, or t
  misc_feature (211)..(211): n is a, c, g, or t
  misc_feature (222)..(222): n is a, c, g, or t
  misc_feature (250)..(250): n is a, c, g, or t
  misc_feature (263)..(263): n is a, c, g, or t
aaacttcaaaacagctacaacgggaaaaagagagttttgtcccacagtcagcaggccactaggttattaacttccagttcaccttggatttttgctaaaatgaaggactctgcagntctacacttctcctgttactgcttgtggcctctggataaagccngcaccaccaacccgnccgggactcaggcattatctatggattatgggaacngataattttgnaggaatccatatttggccaggattatgngggataaataccnggga

SEQ ID NO: 569024 - DNA, 157 bp, Homo sapiens
ctagacatggctccatacaggcatcgaggtgtatttgtgaaagccccaggacactgtggccagttttcacattggctaagttatcatgtccctccgcaccaagctgcagaacaaggagcatgtcattgatgccctgcgcatggccgcagtcaagggc

SEQ ID NO: 569025 - DNA, 532 bp, Homo sapiens
catagctgactcttgaggatacaccttatgctcctgacaccaccagatccacagcagaaagcatccttcctcgaggaccatcagctttgaataaatgcttgttccagagcccatgaatgccagcggggacccctcctttcctggggtaaaggttctcagatgctgcatcttctaaattgagcctccggtcatactagttttgtgcttggaaccttgcttcaagaagatccctaagctgtagaacattttaacgttgatgccacaacgcagattgatgccttgtagatggagcttgcagatggagccccgtgacctctcacctacccacctgtttgcctgccttcttgtgcgtttctcggagaagttcttagcctgatgaaataacttggggcgttgaagagctgtttaattttaaatgccttagactgtggatatattagaggaagcagattgtcaaattaagggtgtcattgtgttgtgctaaacgctgggaaggtacaagttgctcattcctaaatctgtgtttgagaaa

SEQ ID NO: 569026 - DNA, 485 bp, Homo sapiens
  misc_feature (335)..(335): n is a, c, g, or t
  misc_feature (345)..(345): n is a, c, g, or t
catgtgctgacgtcactaagatcaatacagcaaactctgaaagatggacagagagacaggagatggtcctttataatgcagtgtgatctgtgctgcaatagagttttggaagctagaagttcaaaacgaggtgttggcagcaccatgctctctctgaagatgctaggaagaatctgctccatgcctttccattcgcttctggggtttcctgcaagccctgacattccttggcttgtagatgcatcaccccagtttccgcccccccccccccccccccaaaaaaaaatttttttcccccccaaaaaattttccccaaaaaaccaaatttggggggncccccctccntctctgtgtgtgcctctgcgttccctctattcttcttctaaggacaccgacaccagtcatagtggattaagtgtccactcctaaccaattacatctgcaacaaccctatttccaaataaagtcacattctaagattcaaa

SEQ ID NO: 569027 - DNA, 398 bp, Homo sapiens
gagggtacactctcgctactggatcctattgtttgtaactgagctatttcctaacaagaagccttcagcggaaataatggatcctagttatgtcaaagaaaacaaggagacagaatggcaacttcacagtcttcaagtaaatagaatccctgatataaatggaaattaacatgtaattttgggggcaataaaaacaacaacaaaaacctgtgacaactctgtcctactcctttaaaaatgagctttgactctgtagtctcttaaggcacaaaacctgatagacggcatttaactggtggcctgcacctctgatttggattttaaaaaacaactattgacatttaaataaaaataaaccattttgttagagctggagatcctaggatacagtagggaga

SEQ ID NO: 569028 - DNA, 289 bp, Homo sapiens
  misc_feature (56)..(56): n is a, c, g, or t
  misc_feature (84)..(84): n is a, c, g, or t
gtgggaaatgtagcggggagagggggagaaagagaagttgttgaagggtacaaatnacgtggttatagaaggaataagacctantgtacatagatcatagttggcaattgcctactgtatatttcaaaatggctagaagagaagaatcggaacggttctagcataaagcaaaaacaaatatttaaggcgatagatattccaagtaggctgatttgattttcacaattatatgaatgcattaaactatcacatgtaccctgaaactatgtacatctattatgcatcagtg

SEQ ID NO: 569029 - DNA, 1126 bp, Homo sapiens
  misc_feature (313)..(313): n is a, c, g, or t
  misc_feature (565)..(565): n is a, c, g, or t
  misc_feature (575)..(575): n is a, c, g, or t
cttacactattcctcatcacccaactaagaatattgaaagcagcaaactaccacttaccttccctcaccaaagccccataaaggataatataaattactatagcgaaaacccgtgagaaacctaacacatgcagacgaacacatctagttcgacgtttcattcattggcccccagcaagtccgtaggcctacccgcacgacagctcactgatcagttcgtagtttgccccctcgtatttgactccctcacacgtcctaatattatcatcagtcaacgagacctgatcttaagttactcgacactctaacgaantgagcataatccgagaactaacgctccaaatacgttagatgagtagcgcaggtacactagatcgatcattaaaggagcagaacgctgatactcatgtatagcttagtacttcctatgaaatcactgtatatgtattggtcgctactaagcgtaagcgctctctcgaggatctccgttactctcacctcagttgtgacagccaacgcaaccgcaacagtgatcctattaggaacctgtgagcctcatggaccnattcacaccnttgatgcagtgcgggtcgacccagtgtgcattcatcagggcctcttcgctctcgtcaaggcacttatagaaatgcctctttagacccgagctctccttacacactagagggcagcacactacagcccacttgagtcccctatacgtacgttattgatcggaaaccatttcagcgctactcgattcaagccaattgagcccctggccggtactgcctaaccggctaacattactgcaggccacctacttcatgcacctaattgggaagcgccagccctaggcaatattcatccattaagccttcccctctagcacttaatcaatcttcaacagaattctaattttaactgaggtattcctagaaaatccggatggtccacccttaaatccaaaggcctacggtttttccgcaacttgcttaggtaaaggcgcccttatcaggctggcgaaggaaacgcgcctttaaaaaaaacacaaaacagcacagggcaaggccagcacacacaactcggacgcagcgagacatccataaccaccaacaagcgagggcag

SEQ ID NO: 569030 - DNA, 599 bp, Homo sapiens
ctagttctacttcctgtccacctaaaaaaaaaaaaaaaaaaaaaaaaaaaaaaaaaaaaaaaaaaaaaaaaaaaaaaaaaaaaaaaaaaaaaaaaaaaaaaaaaaaaaaaaaaaaaaaaaaaaaggggggggggcgccaaaatttcccccgggggggcccctccccccccccttttttttgaaggaggggccgctataatgaggacatggtttttatattaatacgaacgaggaggggcgggcgtgttataataaaaatagtaggggggtgagaaaacacgatggtactaggtggtgattatttttggatgagaagcgaccacactatctatgcggtgggggggggggaagaaataaataggtggggaacaatatcctaactctgtcatgagaatatatatatataagatccgttctagggcgaataataatatatacatttagtagtaggattagtactattaggtggtgaatgaaaaacacagacgcgataatatatttgtgtggagcggtgaagaaaaaatattgtggtgaaacaagtgagtgattgtgttgttgttgaaagatatttttttatccagaggggaagtgattaataa

SEQ ID NO: 569031 - DNA, 120 bp, Homo sapiens
ttttcacacgggatgcataccaacacaacactcactccaaattcatctttcattgcagcatgccatgttgccattgcaggcagtccacttgcacctatagtggagcactttttcaaaatg

SEQ ID NO: 569032 - DNA, 183 bp, Homo sapiens
acaaaccaaaaaacaaacaaggcatttactcttggccctttcagtacaggcgagtgttctattgcatcacagtgctagtgatgcagtaacagatccaagggcatattattaaatatgtttttgtccactgcgatttagttgaaaatacatatacagacatatattatggctatcagaccagca

SEQ ID NO: 569033 - DNA, 599 bp, Homo sapiens
  misc_feature (25)..(25): n is a, c, g, or t
  misc_feature (62)..(62): n is a, c, g, or t
  misc_feature (110)..(110): n is a, c, g, or t
  misc_feature (112)..(112): n is a, c, g, or t
  misc_feature (114)..(114): n is a, c, g, or t
  misc_feature (118)..(118): n is a, c, g, or t
  misc_feature (124)..(124): n is a, c, g, or t
  misc_feature (128)..(128): n is a, c, g, or t
  misc_feature (143)..(143): n is a, c, g, or t
  misc_feature (168)..(168): n is a, c, g, or t
  misc_feature (209)..(209): n is a, c, g, or t
  misc_feature (256)..(257): n is a, c, g, or t
  misc_feature (259)..(259): n is a, c, g, or t
  misc_feature (275)..(275): n is a, c, g, or t
  misc_feature (277)..(277): n is a, c, g, or t
  misc_feature (284)..(284): n is a, c, g, or t
  misc_feature (290)..(290): n is a, c, g, or t
  misc_feature (292)..(292): n is a, c, g, or t
  misc_feature (296)..(296): n is a, c, g, or t
  misc_feature (304)..(304): n is a, c, g, or t
  misc_feature (307)..(308): n is a, c, g, or t
  misc_feature (314)..(314): n is a, c, g, or t
  misc_feature (372)..(372): n is a, c, g, or t
  misc_feature (594)..(594): n is a, c, g, or t
ctcaattcagccacagtcccaagtnccccaaccttcctgattgcatctctattttaaataanccagcctggacatcaaggacaatgatctaggaggcgggtcaaggaganancnaggnaaagtnagancagacttggggcttncaggctatgcccggtgacagctganctcttcagaaatgcgtcacattcagcgttcacttccttcgnttcctccactacctatgacatagcgggggaaagatacaaccatgggnnangggtccctcctcgctncnctcctcncagctntncttnattttcanatnnggagangtttgttagggaccggcacagggacagccagagccggcaccctccggcccaccgtggnacccctgatgatcgcggggtggggtaggagtgagggtgggggtcggggtgaggtagtgctgttgggagggcactgtgaatgatggaaacgtcccttctcagcctgggtcgtgcctaacctgggtctcaaatcccactctgccttcaccctggagtacactccagcgaaccgagggcccagccaacgcgcgggaaggggccacggagaagagccggcaaaacncccac

SEQ ID NO: 569034 - DNA, 373 bp, Homo sapiens
tccccttttttggggggggggggccccccccccaaaattattttgggggggccgggggctttttttagggggggggggcccccccggggggggggccccccggtttaattttccccggaaattttgggggggggggccggcccctttaaaccccggggtttttttcccccccaaaaaacccatttttttggggggggggggggggggaaaggggccccccccaaaattttaaaccctttgggggggggggggccccaaaaggggggggggccccaaaaaacccccccccccccccccctttttgggggccggggtttttttcccccccccccccccctttttttttaaaaaaaaggggggggggggggggtta

SEQ ID NO: 569035 - DNA, 513 bp, Homo sapiens
accatgacctgccaatttttggttttgaaaccgaagaataattaggaaaatgatgattattcctattacatgattataatttaaaatagttttgttgaatggatacgggtgctgaaataatgcattctgggtatcaaatggatgcttggagtggatggatagattggatacctggtccctccaaatctcatgttgaaatctgattcctggtgttggtggtggagcctactgggagtcttggggtcatgtgcctcttggtgccatcctcttgtcccctcgggaaggagtgagttcttgctctgttagtttttgccagagctgatgttgaaacgagcctggcacctcccgcactcctctcttccttcctctcttgccatctgatgccagctccccttccccttctgccatgagtggaagctccctgagggcctcaccagaagcagatgctggcgccatgtttcttgtacagcctgcagaaccttgagccaaataaacctcttttcttcataaaaa

SEQ ID NO: 569036 - DNA, 436 bp, Homo sapiens
acgcgcacgcggttcaacagttcttgagcctcagctccccagtagctgggattacaggcacctgcaacacacccggctaatatttggtttttttttccggtagagacagggtttcacctattggccaggctggtctgaaactcctgacctcaggtgatccacccgcctcgacctcccaaattgctgggattacaggtgtgagccaccatgcctggccttattttaatttttggagacaaggtctcgcttggtcaccgaggctggagtgtagtgccataatgataggccactgatggattgaactcgtggactaaagggatcctcctgcctcagcctcctgagtagctgggactacaggcatgtacagtcacaccacactaatttttggaattttggtagagtcagggtctcaccatgttgcccaggccagttttga

SEQ ID NO: 569037 - DNA, 372 bp, Homo sapiens
aggatccccgtagtatagtgcactcaggaaagggaagcatgtgtgtgttgaatagtgaacccgtatctggagtgcttctttcacagtcagggaaggaagagggaagaggcagctgtgagagagtgatgaggttgagggaggtggggtatctcgctgctctgaccttaggtagagtcctccacagaagcatcaaagtggactggcacatatgggctcccttcacaggccacaatgatgtgtctctccttcgggctggtccggtatgcacagttggggtacctggagccgtttgtcaggcggcagtctgtgatgtgcatgctggagttgctcttgtagcagttgccctgcccgttcttgcaggtgaccttttcc

SEQ ID NO: 569038 - DNA, 364 bp, Homo sapiens
agcggccggccgggcaatgacactgaaaatgattaaaatgatacattttatattatggatttttaaatcacattttaaatgtatactaaaaactgaacaacaacaaaacaatccagttagaaatgggtaaaagacaggctgggcgtggtggctcatgcctgtaatctcagcactttgggaggccgaggtgggcagatcacctgaggtcaggagtttgagaccagcgtgaccaatatggtgaaaccccatttctactaacaaacaaacaaattagccgggtgtggtggtgcatgcctgtaatcccagctacttggaaggctgaggcaggataatcacttgaaccctggaggcagaggttgcagtg

SEQ ID NO: 569039 - DNA, 268 bp, Homo sapiens
tgatacccgctatgatatggatgaaacttgaactcattatagtaagtaggagaagccagtcccaaaagcccccagattgtttcattttatggacaactgatcctcaatttcatttcattataatgctgacaagattaaaaaaaaaaaaacaactcccagcgggggcccctgcctgtgtggagtttgtgtgttctccctgtgtttgggtgggctctttcctggtactctggtttcctttcacccaataaaaatgggcatgttcccttca

SEQ ID NO: 569040 - DNA, 968 bp, Homo sapiens
atgggtttgcagggatgcatttgccttaacgagtgcctctggtatcccgctaaagccggaccaaagcgtggcccagagtgcaggccagcctctcagcctgcggcccggggaggcagggcagcgcgggcgcgggctgggggtggcgcggggcggcgctcaggcatttcggtgccaggcgcagcagtgcggcggcatttgctccaagcaggcagcagcgcaggcggatttgctcccaagcaggcagcagcgtggggcgccgtgctgggcctcgccagggcacggcatcctctcgcggcggtcccctctgactccctgcccgagcaggcatcagtccttggccagcagcgggccccaggcctcgcagggccagcccctcgttccgcggtggcctttgcatcatcgcagtgtccgcaggcgcaggtccagcggtcaggcgcgccagctcacccacgcgctgcaacgcccctaacgcaggtcgacccagagccggccgcgcgcgtcagcattccgcgggcgcacagccgcgccagggcgctcgcagcctcagcgcgacaccgacccggcgatccaccctgagactcaccattggcgctgcgacctacacgataatacacacgcacctgccaccttacacacactccagaacaactgatacccgaaccgaccttaatcaaaaacacccacacacatcacgagaacagacaaccacgcttactctcctcggcactaccccccctcgcctcactcaacaacctcggaattaaaatcaataacctacacctccccacccactctaccctactcttcctcgcacccattctcacaacctgacgcagcacaatctcaacgcgcacaatcgtaaacaggcacctgtactgcgacacactttcacaaaaaccgaactacacaatgcaccctccacacacgcactgacccgccccgcccatgccaccataacgcgacagcac

SEQ ID NO: 569041 - DNA, 186 bp, Homo sapiens
  misc_feature (16)..(16): n is a, c, g, or t
  misc_feature (28)..(29): n is a, c, g, or t
  misc_feature (34)..(34): n is a, c, g, or t
ggaacagaaggtattntcattttcctgnncaganacccccccaactcctctgtttcagagtctatcgacctcaacaggaggaaacacaacagtcaacctagagctgctccgcatctccctgctgctcatccaagtcgtggcttggagcccgtgcagttcctcaggagtgtcttcgcccgcctggtg

SEQ ID NO: 569042 - DNA, 167 bp, Homo sapiens
  misc_feature (7)..(7): n is a, c, g, or t
  misc_feature (87)..(87): n is a, c, g, or t
  misc_feature (157)..(157): n is a, c, g, or t
tttttanttgttctgttagctgatgtcagtgaaactagccagttacgaggctggcccttggctggggacctccccaactccctggtngttcagcctggtgacctctgctcttccccggacccccgggcctttggcattatgctgatggggggctgcnggcagtgaag

SEQ ID NO: 569043 - DNA, 399 bp, Homo sapiens
cgtcgacacgagagcgcgaggatgatcatcatccccatctggcttagcatggagatgacaaaaccagcctggcgatggtgagcgaaatcgtagaacacccagggcaacaatatcgcgatgccgagcagcgcgagccaaacgataacagaccgtcgcctcatgtgtcgcgcgtgccgagcaggccacgcgggcggaagaacaggatcaacaccatcatcagcaacggcagcagcgcgccaatacgtgccacgggcacggtcaggatctcaccaagtaggtcgtcgttgcggggcacgatgccgatcggccgcaacaaatcggcgatcgacgcatcgatcacgacggaaaacgtcacaaccatccccattatgaccgagggtcgacgcggccgcgaattta

SEQ ID NO: 569044 - DNA, 290 bp, Homo sapiens
tctcttgtcgagatcattgtgctctaaagtttttttttttaaaatatagatctttatttttgataataaaaaaaattagtagttctagtctatatttgggggctcccactgggaaacataatttgatttaacggaaagaaccaccctctttaattagtgggagggggggacatttacttttaattcagtttcaccccctgcccaaggccctaagcctgtcatccagctgaccccataccataaagcataacggaggctttgtagccaacccaggccctatcattgagtaa

SEQ ID NO: 569045 - DNA, 1159 bp, Homo sapiens
  misc_feature (851)..(851): n is a, c, g, or t
agcggacggccctcaatgacacaccatggtgccccagagtgcaggtttgctacacagcagcgacgacgcaggcggcggccccagcggacgtcgcaacgtgccgtccctgaccgagcagcggccaccgaccaatgacccccgatgaagcctatcgccaccagccgcggcaggagaaccttagggtccaataacatgccatcttcgcgattcgactaaagctacagtcaagcaactatcggcgggtgcgactggcggctggctgggacagacggctggtgcgcggaagcgatgggcgttgttgtacagtcaaccgcaccgagggaccccgctatcctgacgcacgggacaggggggcctgcgctcagaccccccttcaaagagattgggcgtgctatgcaagtccggatgcggctcgtgctgtatcaagaacctccatcactgtcagctgccaagtggcctctggcagagggaaggtgacggtttctccggtacgaggccgctcgaggaaaggtgttacggaagcagacgttcagaagcgcccaatgagttggggcccgataaaggacacatgggtccccccgagttgagcgcatataacccgtaaaccactgagacattaggaaacggaagtatctccgagttccccagaattccttgctggataaaggaaagagaataggttcgatggacgcatagagctgcacgttcacataaccttttcccgggttccttacggggccgacggctggttaaacgccagatggcccttgccaggatcgccaccatgggcaagatacccaccgatacgggaaccaatttgaaaaggaacgggtccgagaaaacgggagcanttcaccccctgagccgattgtcaagtttcgaagcgcaaggacatacggtccaagggacggcgaagggcctccttccccggagggttataccaaagcgccagattcccttcacctgtgaattaaaccgggatacagcaaagagggaaacgcagagcggggtcccatttgtcgtagtgtggaaaccattacctttcgaaggtttcgcgcatccctgggaagagaacgcggaattggaaaagggccgattcttttccacccgaagaatgcttggcagttgtatatgaggcccgagaaccggaaattccgtc

SEQ ID NO: 569046 - DNA, 327 bp, Homo sapiens
  misc_feature (304)..(304): n is a, c, g, or t
gttctcattctatacgcatgcgagaaaacgacagaaaagggttgctgtgggggccattcaccagtttaggaggtggcgcaaaaatgacatgtgaataatgaccaagaagccggccctccaagagtgcagggaaaaataacaggggcatcccaacaagagggaaaagctggcatgaggctcttctgcagaggccattgaggcaagtgcaagaacaaataggatcaaagcctgtatggagtgaggcccagtgaggcagcacgcagcacctcatgggtcactccaagtgtgagggcaggccctggcncactgcttttcttaagttttgga

SEQ ID NO: 569047 - DNA, 1141 bp, Homo sapiens
  misc_feature (860)..(860): n is a, c, g, or t
tatacccttacatcctccttcgagacccggtcggtagtcgtctgccccagcccgcctgggggctgcatgctgccctgagccgcggccctcgagacgggaccgagagcatcatgggcagctactgtcccgctgctccgtcctccgtgctgcttctgctgctgctcctggcgccgggccgagcagccctgcgtgggccgagctcaccttcgagactgccggacaaccgccaagcatgtgtcttccacgaggcaggtggagcatgggcgtgaagttctccctggtattaccaggtcatcactggaggccactacgactgtcgactgcatatgtagaggacccccaggggaacagcatctacagagaaacgaagcaagcagttccgacagcttcacgtaccgggctgacagtcacagggcgtttatcagctctcgcttcagctaatgcagttttccaccttctctcacaagaccgtctactttgactttcaacgtggcgccgatgagcctcccattctcccagaccatgggcgaacagggtcacagtctctcacccagtatggacgtcacgcctgcgtgaccatccatgacggctctgacaacggtgattgactcccagaccgcattatccggctgcgggacggcccacgaacctgggcccgagcggcaacaccttaatacacagagctctcttactggctctgcttggtgagcacgatttgcgcttgtcgatggtcagcttcagccaagtgctactgtttgaaaaagcttcttcacacgaactacaccgacccattcaagcaggtcacttctccactctattaatcccgggcaatgcttgcatctaagagccctatttggccncaagcgctctgaagactgcttaatccatatggttcaattgttaggtagcatcatgaggtcaccgttaccccaactcgtttgatgcgctaactagcactctgacatagataacggcactaggcatcatatcaacaatgattatatactgacccacttcgactcatgacttcgctcagtgcccatcccttccacaacgcgcctccctgactacaaaatctgcaccgctcagactacatacaatttctaagcatcacatcatcatcgtgccgactgtacctctg

SEQ ID NO: 569048 - DNA, 318 bp, Homo sapiens
aaggtcaggcgttcaagaccatgctggccaacatggtgaaaccctgtctctagtaaaaatacacaaaaaattagcctggtgcggtggtgcacacctgtagtcccaggtacttgggaggctgaagcacgagaatcacttgaacccaggaggcggaggttgcagtgagccaagattgcatcactgcattgcagcccaagcaacagagactctgtctcaaagaaaaaacacttcgttgtgccaagccagactattatttaagccatctggtacttaaggaacatgttagataggtcacacttcatctctgtgataaataat

SEQ ID NO: 569049 - DNA, 583 bp, Homo sapiens
gggggtatgcccaggttgaagtgcaatggacaatctcagttcactattacctccgtctccagagttcaagcgattctcctgcctcagcctcccaagaagctgggatacaggcatgtgccagctaagctttgtgtattgtatttatttatttcatttttttgagacagagtttcactcttgtcgcccaggctggagtgcaacagtacgatctcggttcactgcaaactctgcctcccgggttgaagcgattctcctgtctcagcctcctgagtagctaggaccacaggtgcacgctaccatgccttgttaatttttgtattcttagtgcagacagggtttcgccatgttgcctaggctggtcttgaattcctgagctcaagccatccacttagcttggacttccaaagtgctggttttacaggtgttagccaccacaccttgccttacttttccccttttatttgctttgctatgaccgacttctgttaagttcaattctccacttcgtgcctttgccaataatagctgaacctgatttgagggacatagatagccttcttgactgatcttactttcagttcat

SEQ ID NO: 569050 - DNA, 117 bp, Homo sapiens
acgctcactcggccactcactacgctgttacttgatggtatccaagaagaaatggttggtgatggacaaattcagcactgcttccccaaaggtgggtggtttttcaaaagtttcagg

SEQ ID NO: 569051 - DNA, 509 bp, Homo sapiens
aaaagtatttacttgtgagttcaaatttatgaatttctagcatttgcttcaaaataatccagaaggtagggaaaaatgtaataaaagagatgaaggtcagcctccctagttagcctgggaccacaggcgcaggccatgatgccttggctaatttttggtatgtttagtagagataggggtttcaccatgtttgcccaggctgatctcgaactcctgacctcacgttgacccaccttgcctcagcctcccaaagtgtgtgggattacaggcctgttataagtttggatgttgaaagcacaaataagtcttggtgcttagagagaactggtctctacaaaaacaagaaaaaaaattcagccaggcacagcagcttgtgccccttagttgccagctactgaggaggctgaggcaggaagatcaccggagcccaggagttggaggttacagtgagctgtgatcactgcactccagcctggggtaacagagcaagaccctttctccaaaaaaaa

SEQ ID NO: 569052 - DNA, 1265 bp, Homo sapiens
  misc_feature (87)..(87): n is a, c, g, or t
tctttccccacaggctgagctggttgcccacaggggcccccgccccatctcagggagtgtccacccagccctgagcccgtcgtgagnggtcagagatggcgctgacccccgagtccccgagcagcttccctgggctggccgccactggcagctctgtgccggagccgcctggcggccccaacgcaaccctcaacagctcctgggccagcccgaccgagcccagctccctggaggacctggtggccacgggcaccattgggactctgctgtcggccatgggcgtggtgggcgtggtgggcaacgcctacacgctggtggtcacctgccgctccctgcgtgcggtggcctccatgtacgtctacgtggtcaacctggcgctggccgacctgctgtacctgctcagcatccccttcatcgtggccacctacgtcaccaaggagtggcacttcggggacgtgggctgccgcgtgctcttcggcctggacttcctgaccatgcacgccagcatcttcacgctgaccgtcatgagcagcgagcgctacgctgcggtgctgcggccgctggacaccgtgcagcgccccaagggctaccgcaagctgctggcgctgggcacctggctgctggcgctgctgctgacgctgcccgtgatgctggccatgcggctggtgcgccggggtcccaagagcctgtgcctgcccgcctggggcccgcgcgcccaccgcgcctacctgacgctgctcttcgccaccagcatcgcggggcccgggctgctcatcgggctgctctacgcgcgcctggcccgcgcctaccgccgctcgcagcgcgcctccttcaagcgggcccggcggccgggggcgcgcgcgctgcgcctggtgctgggcatcgtgctgctcttctgggcctgcttcctgcccttctggctgtggcagctgctcgcccagtaccaccaggccccgctggcgccgcggacggcgcgcatcgtcaactacctgaccacctgcctcacctacggcaacagctgcgccaaccccttcctctacacgctgctcaccaggaactaccgcgaccacctgcgcggccgcgtgcggggcccgggcagcgggggaggccgggggcccgttccctccctgcagccccgcgcccgcttccagcgctgttcgggccgctccctgtcttcctgcagcccacagcccactgacagcctcgtgctggccccagcggccccggcccgacctgcgcccgagggtcccagggccccggcgtga

SEQ ID NO: 569053 - DNA, 450 bp, Homo sapiens
tctttatcggtgagcaacttttccctctgtcacttttgaaatcagaaactccaagactccaaagtataaataaaatgaatctaatttttatatagtatgtatattcgagacggagcctccctttgtcgcctaggctggagtgcactggcgcaatcttggctcactgcaacctccaccttccaggttcaagcgattctcctgcctcatcctccgaatagctgggactacaggcatccatctctactaaaaatacaaaaattaggcaggcattgtggtgggtgcctgtaatcccagctacctgggaggctgaggcaggagaatggcttgaacctgggaggtagaggttgcagtgagccgagattgcgccactggactgcagcctgggcaacagagcaagactccgtctcagaaaacaaaaaacaaaaacacccccaccccaccaaaaaaaaa

SEQ ID NO: 569054 - DNA, 105 bp, Homo sapiens
  misc_feature (94)..(94): n is a, c, g, or t
cagagatcccctagcggctacctgctggcagatgcctgctgcagcctgacacatggcttttatcacacatgagagccactgtgcctagctgggnttcctcatctt

SEQ ID NO: 569055 - DNA, 716 bp, Homo sapiens
ttttcccctataaaaaggaaaccggtcgcggattaattgtacacctatataaagggaggcgtggtataataaaggcaggggggagccttatacggggctgcgctgttttaattgtttctcggccaaaaggactgtgggcacgccctcaggtagatctttggtttctgttcccaaaaccacgccgtaggttctcgaaaagcctctccaccaaaaaagtgatgccgtgggtcaggcacacaacttgtgatagcctgcacaccaggtaatctttttccttaggtctgcaccgagtaactcattccccaaactctcgccgaaattgtatttccaagacgtcagtatgtttgaataagacataaatcctagcatgcgtaacacagcgccgcagtgttttccttcatggtacacctgtgtgtgtctaaagcatccagaccctggtgtgtagtgtctcttgtctacacccagtgtattggaggcggtttgctttatttaagtttatacatatggcatgactccctcaaacatgtgatgtgcattataagcacagctgtgagctcatgtaatactctggctaagatggtggtaaattcaaaaacctgcttttctctggactctcatctcccccaaagccatgttgttcagggtaccttccagtgtagctgtaacttgtgaggtcaatttcggtaatattgaactattgagaaaagatcccgtct

SEQ ID NO: 569056 - DNA, 261 bp, Homo sapiens
gtacctctggataacactgagctttgagacagacactgagctgtggagacagacactgagcttgtggagaccagacactgagcttgtggagaccagacactgagcttgtggagaccagacactgagcttgtggagaccagacactgagcttgtggagagcagacactgagctagtggagagcagacactgagcttgtggagaccagacactagagcttgtggagagcagacactgagcttgtggggtaatcgtactaagat

SEQ ID NO: 569057 - DNA, 239 bp, Homo sapiens
  misc_feature (172)..(172): n is a, c, g, or t
cgctagagatctggctcagtgatctcgcagtgcaggcaaggaacacaggggtgaggggggaggttcaggaagatcgaggagcaggagtgggaagggtcttgaacagctgagacagaggcagggagatttaaaggggctgatctactccagtcagcgggccagtgtcaggaancaaccctcagaagtttcttctgcttccttaacctccatcccatccctcttcatcctgtagggctcta

SEQ ID NO: 569058 - DNA, 454 bp, Homo sapiens
acctctgacgagttccaaactaaataactggccaggtgcggtggctcacgcctgtaatcccagcactttgggaggccaaggcgggtagatcacccaaggtcaggagttcgagaccagcttggccaacatagtgtaactccatctctaataaaaatacaaaattagttgggcgtggtggcgcacacctacagtcccagctaatcgggaggctgaggcaggacaatcacttgaacccgggaggcggaggttgcagtgagccgagattgtgccattgcactacagcctggacaacaggagcaaaactccatctcacaaaaaaatgtataaactaaccatctatatgctacactgataaacctgtcacccgtcctgaatccacacatcacaagctgaccaacccccatctcactggcacacccctgcctcacccagtctccacccaccgctctgcgct

SEQ ID NO: 569059 - DNA, 370 bp, Homo sapiens
ctgggggccagcatggacgctggcccaattttgagagggtcagccttgctgagcctatgtttgcagcactttttgggaggcctggtcaccacagtcaccttcattgggatgatgcgctgcagccagttggcccccagggccctgcaggccacacactacagccttttggccacgctggagctgttggggaagctgctgttgggcactttggccggaggcctggctgatgggttggggccacatccctgttttttgttcctgttcatcctttttgcctttcccgttttgtacctggacctagcacccagcccctttttttgagttgagtggttggagtggtcaataaagccacatgtgcctgtggcccaga

SEQ ID NO: 569060 - DNA, 202 bp, Homo sapiens
tttacatatttgctacacctcatgccccagagccatccttaatactttgagtgtatgattttacccttatgtgcagaagaattcgagacaataaagtctcctggtttagatactgtgctatttttacttctatttatgccatgtgagattacagtactctctctataaggtatcgtaactgcttaatctccgagctggcgtt

SEQ ID NO: 569061 - DNA, 676 bp, Homo sapiens
attttggttttatttttgaacattttcctaatgatttggagagaaaactatttacaaaaattccacatcatcagtgatacaatttcttgctgtcaccaattttttataatagcagagctggcctgttctacgaaggccatatttctttaagttatctttcagggtaacatggcacatcaactataaagttggatgtcaaacctttaatatgtttctcagtgttctctaattttttggaatttctgtacgactttacacctggaaaacaacagatttgtaaaatcaccggaacaatcgtgtgcttcatttcataggtagtggttcattacggtattacatccccattttaaaaacaaaaacataataatggttacaacacgtggagtcttactaacatacatattacactcaacagtatattcttaaaagtacttgtgaccgtaaaatctttcttgtgcattttccaatactttgtcaaactgggaacctcaggaacatattttcactatgacacacggaaaatctgaccatatcgccctttttgataatgtccattcacttaactgaattccttaatgggggcctcatcacataagtttaactatgcacagcatccttaggaaacacgtttactctgcaaaccacttttaaaaaccataattgcctacttgattcc

SEQ ID NO: 569062 - DNA, 159 bp, Homo sapiens
ccccccaggggcttaaagatgtgctctgcttttttccaccttcggagtgtcactgctttttaggtcagtcccccccgcctcttttcaactttttccctatagggaacttactccgcgtcctgcccccccctcctaaataaataaaggaatcggcgaaca

SEQ ID NO: 569063 - DNA, 336 bp, Homo sapiens
  misc_feature (212)..(212): n is a, c, g, or t
  misc_feature (219)..(219): n is a, c, g, or t
  misc_feature (226)..(226): n is a, c, g, or t
  misc_feature (298)..(298): n is a, c, g, or t
gcttcttcacgtcgacgttcatgaacaccttcttcgtcacctgcacgtccacgccgaactgcagtgcggggccgaagctgctcttgttgatcgacacgccctgcccgccgacgttgagcccgttgttgtagaagtacgtgtagttcaacccggcgccgacgtacgggcgcaccttgcccgcatggttgaagtgatactgcagcagcagcgtncggcggncagacgnccacgccgccgaggattgccgaggcttcgacgtcatctggtgccgcgacgtgccgaggatcagcttcgacgncaaggtagtcgcggatcatgtacgtgaagttcgagttt

SEQ ID NO: 569064 - DNA, 526 bp, Homo sapiens
  misc_feature (497)..(497): n is a, c, g, or t
gtgtctccaactacagtctattactgcatggatcattctagcctccccttgcttattgtaaccttctactccaactgtgagaaacctgtctcctactatctgccatccattttactaattgtttattaattatataaatatatagtggcttcaaaattgtaaacctgtgcccctgtggaaaacaactttatcaactggagtagagtgctatgtacagttcctttgcctttggtcttacagactccactcatttccaaatttacctatgtcagtaccttattcccccatccctttcagtgagatgtttcatacatttgtgatacattaaaattcttttctcacattctgcatttggggactgctatgtaaatggtacttttacatttcaagttctaatgttcattactagtatataggaaagcaactgactttgtatattaatcttgtatgctgggacttgcaccaggcattgtcagttcttggcagccagtcaacgncagaataaagacaggtttatttcttccct

SEQ ID NO: 569065 - DNA, 143 bp, Homo sapiens
cctaattcgtgaaacttctgagcaacagccaacctgcctctatatgaatctgcagcctgtcctgcgccatatcctggaagctggaaggcaaacgaagagaagaagcagtacctgggaatcttacattcagtgacaaccgtgga

SEQ ID NO: 569066 - DNA, 188 bp, Homo sapiens
ccctttgagtgaggggctgcggctcctccctggggcagtgtggcctgctttttggttttccactggagttcacagctccctccttggctgaggtcaagggagccacgtgtgcagtgttttgtgtgaagtgtgcggggtacagaccctttttcctctgtaatattcaggaaataaacctctttgctgta

SEQ ID NO: 569067 - DNA, 173 bp, Homo sapiens
gctcggtacgcatttcgctgtcgctgggacacagtcatgtgcctcagcccggctaatttttgtattttcagtggtgacaggctttcgccatgttggccaggctggtcttgaactcttgacctcaggtgatcctcctgccctggtcccccaaagtgctgggattacaggcatga

SEQ ID NO: 569068 - DNA, 114 bp, Homo sapiens
tgttctaatgcagaactgaggatatagcactgaggaagacatgagcctcatgagctaggggcagtatgccacactgtataataaaatgtataattgttagatggtgttaagcat

SEQ ID NO: 569069 - DNA, 757 bp, Homo sapiens
  misc_feature (563)..(563): n is a, c, g, or t
  misc_feature (708)..(708): n is a, c, g, or t
gggagcctcgtagggctggagagcggcgaagacaggcagctgctcggggacgttgcagcaggacatcaccaggagggcgaaactggccactgggaggggggccccggtgtacattgctgcagcagggaggtctgcacggggctcggtactgctggggcgccggtcccgacgaggcacgtgcgggccccagggatctggttgctgtaggagtggtgccacaagtggacattggttgacgcgtgtgtgtccctctaggcgcttctaggccgcctgaggggcgtggctttgggctggaaccagggtaccagagaatctcgagggagacagtcaccagtgggcaattggaggtgggaagaacccagggactggagggccggaagggctgtggctgtgtgggccggggcagttggaccttagaaggccatcttgcagggacgtgggaaggcggcattggtggtgccagaggcaaggaggcttggaaagcgagagccagccaattccgcgcgccgaggaacgccattgcggtggtattgtgagccgtggggatcctttgcatggatagnttgccaggtgggatacctaaccggggctggtgtcccttgcgcctgttggcacgtggccgctactgtcaagtcggctgagcgatagttcgagtggatggacgcgtacagggttcggttatacaccgcgatgcgttgttaaccggcnacggaaacggtgcccaaggaggtactctaccgaagacctatgggagatt

SEQ ID NO: 569070 - DNA, 100 bp, Homo sapiens
agtcagtcctggccaggtcagctcatccaggactcggcgcaagccgttgatgtctagcctcaacgccctggcgcagggccagctcattctcatacttgag

SEQ ID NO: 569071 - DNA, 139 bp, Homo sapiens
gacgactgactgcgcggtaagcttcgcgggtttggactagaatggctgttactacgagggctatgtggctgattgaagagtatgcatgagcgattttcggtctgtttgtcgtaggcagattgagcttgttccgatcgta

SEQ ID NO: 569072 - DNA, 863 bp, Homo sapiens
  misc_feature (46)..(46): n is a, c, g, or t
  misc_feature (82)..(83): n is a, c, g, or t
  misc_feature (91)..(91): n is a, c, g, or t
  misc_feature (111)..(111): n is a, c, g, or t
  misc_feature (115)..(115): n is a, c, g, or t
  misc_feature (118)..(118): n is a, c, g, or t
  misc_feature (134)..(134): n is a, c, g, or t
  misc_feature (138)..(138): n is a, c, g, or t
  misc_feature (155)..(155): n is a, c, g, or t
  misc_feature (166)..(166): n is a, c, g, or t
  misc_feature (185)..(185): n is a, c, g, or t
  misc_feature (226)..(226): n is a, c, g, or t
  misc_feature (256)..(256): n is a, c, g, or t
  misc_feature (263)..(263): n is a, c, g, or t
  misc_feature (284)..(284): n is a, c, g, or t
  misc_feature (286)..(287): n is a, c, g, or t
  misc_feature (292)..(292): n is a, c, g, or t
  misc_feature (337)..(337): n is a, c, g, or t
  misc_feature (356)..(356): n is a, c, g, or t
  misc_feature (393)..(393): n is a, c, g, or t
  misc_feature (414)..(414): n is a, c, g, or t
  misc_feature (418)..(418): n is a, c, g, or t
  misc_feature (425)..(425): n is a, c, g, or t
  misc_feature (456)..(456): n is a, c, g, or t
  misc_feature (490)..(490): n is a, c, g, or t
  misc_feature (519)..(519): n is a, c, g, or t
  misc_feature (547)..(547): n is a, c, g, or t
  misc_feature (712)..(712): n is a, c, g, or t
  misc_feature (725)..(725): n is a, c, g, or t
  misc_feature (727)..(727): n is a, c, g, or t
  misc_feature (752)..(752): n is a, c, g, or t
  misc_feature (857)..(857): n is a, c, g, or t
atggactggcattgtcccagatatagccgttggtacaaagcggggntctgatgagcttttctctacttgtgtcactaacggnncgtttatnatgagcagcaactcggcttntgcngcnaacggaaatgacagcnagangttcaaaggtgacagcngaagtgcaggngtcccctctagagtgatcnacatccggaagctccccatcgacgtcacggagggggaagtnatttccctggggctgccctttgggaaggtnaccaacntcctgatgttgaaggggaaanannaggtnttcatcgagatgaacacggaggaggctgctaacaccatggtgaantactacacctcggtgaccnctgtgctgcgcggccagcccatttacatccagttttntaactataaggagctgaagantganagctctnccaaccaggcgcgggctcaggtggccctgcnggcggtgaactcggtccagttggggaatctggtnttggctgcttcggcggcggccgtggacgnagggatggcgatggttgggtagagtttngtgctcaggatcatcgtggagaacctcttctaccctgtgaccctggatgtgctgcaccagattttctccaagttcggcacagtgttgaagatcatcaccttcaccaagaacaaccagttccaggccctgctgcagtatgcggaccccgtgagcgcccagcacgcnaagcttttttttnangggcagaacatctacaacgcctgcngcacgctgcgcatcgacttttccaagctcaccagcctcaacgtcaagtacaacaatgacaagagccgtgactacacacgcccagacctgccttccggggacagcnagccct

SEQ ID NO: 569073 - DNA, 426 bp, Homo sapiens
  misc_feature (47)..(47): n is a, c, g, or t
  misc_feature (57)..(57): n is a, c, g, or t
  misc_feature (159)..(159): n is a, c, g, or t
tgattctcatccgctctggccccaagcactatttcttccttttccanttaggccccnacaagcctgtagcctttctcactccatccccacccaaagtggtcagaccttgtttagttatttataaaactgtatggacctccctcacttttttcctatcantgctttcctactttccttttatctcactttagtccaggggccaagaatttcccttctaccctctatttttttgtgtttgtaagttacaaagtcaggaaaagttttggctggacccctttcctgctgggtggatccagtggtccaggactggggtttgggcccaggttttagggaaaaggttgcaaagcccttcccccctctttgaatagtgggtatgtgttggtttattgattctgtaaataagtaaaatgccaatatgaatcctca

SEQ ID NO: 569074 - DNA, 911 bp, Homo sapiens
tgtacacaagcaatcgaccggtatgttgatagcacagggagtgtatggttccctgtaaacactaagttagctgtttgcatttaaggacctgtggtttaaccctttggatcactaccagccagttatcaggcaccagagctgtagcagcgtatatcctttttattgacatcatggatcagtgtcatttcgattccatctcattcaccaaaatattcgatgaatgtaatggtcactctgtcacccaggtccctatgccaagcatctgggggtacatcaggttagtggctaaagtagaacaatagcgatttgttcattaggagcttagcagtccaggaggcattgtacgattcaggataatgacaacaatcaaatataaataggcaatgatgtcactaggtgtgaatgaagggagagtgcggagtaggccaaatgaggtaatgtgtagaccatggaggatcacaaagcaatatatatctatgtgctgtaactggtaccgtaagagggtagtatattagtcactacaatgtaactaatttcacatgattgaaaatttaatgtaagttgagattacaaaaaggccagttcctcaattaattaagcaaccgttgtcaagtgcttgatgaagacagtgcatgattatgtggttggcgctattggaataggtcagaagtagaatcttttcatcatcacaggacatgtgcgtattggacagtgctcttgctagaatctatgcatagactacccgaggacttttcaaagtcatgcatgtgcagtcaagggaagaggtcgtatttggagcagggtgttgaaaagtcccttaagaagagaaagaccagaaaagttgccgtggaatggcccaactgaatcaaaggatattgccccatttagattgttgaggaaaacagaggcgc

SEQ ID NO: 569075 - DNA, 324 bp, Homo sapiens
gctaactagtaacggaagggtccccgaggttggggagagccccacgttgagaacatataatgcaacacacttattgtactgaagccactgttaccaaacagctgatcacaaacaacctgtgtgtaatatttttcccctaaaacgtagcacccttcagcaggaccctataaaactttcctccagcccttgcctctttgcaggtagccccttctctgctgagctgcccactgcaacatattttcacaatttctctaataaatctgcccttctttacctacaactatcttggtaaatggctttaccacctgcaaaactgaccctagg

SEQ ID NO: 569076 - DNA, 1659 bp, Homo sapiens
  misc_feature (1213)..(1213): n is a, c, g, or t
  misc_feature (1363)..(1363): n is a, c, g, or t
caagtgaggaactagctgcagagtggatgagtgaccaccatccaggctgagactgaaaggaggcgaagcttggaaattacacggaattctttcccctgctagcaaccatgtgcctcccatccgtgactgtggagtttgggatgttggaagtggggctggaacaaagcgttctgcctagggaggagcgtaagcaggagcggcaagtcacgaaagacaaacggaaggagaaagaagaagcgagagagaaaaaagaaaagacaaaaagaagcagcgaaccgagcgcgcgacgagcaagcggggaggagagagagaccgggggagcggcgagcgagggaggagggcggcagcagacgagagggccggaggggcggacacgcggagaggggagagaggggaggacaggaggagggcggggacgggggggagaaggcagagacgagggcgcagagcggagggaacacgagaagcagccgcacggagagcacgggagagagcagaggaggagacaagagagagagacagaggaagcgaccagacccagagacagacagaaggagcacagagagcacgacgaaagagcagggcaggcagcgaagggtacgaaggcgacagaacgaggaagcagggagacacggggagagaggcgaacggagactgacgagcaaggagagacagaaacaggaccagaaagagacacgcgcgaagaagaagacgagagacgggagaaccggcaggcgaggcgacgcgacagacagccgagagacgagcggcagcaagggagcaggagcagaggcgagatggacagaagagagaagaaggaagagacgagagagtacggggagcagcacggggcacgggagcagaggaagacgcagcaggggagacaagccagcgaagcagaagcgagagagaaggagaacagagcaagcgagaagcgaggagaccgagcagagatggagacgagcgacagaagcagcgcagacgagcacgaggagccacaggcaagaggcagcagagaggaggtgacgcgtgagggtgctagagcagcgcacgacgaacagaagcgagaagcgaacatgagaaggagacagcgatagagagcagcaggagaagagcagagatgcgagggtacgaaagcgagagagaccgcgacgacgaatcgcagggacaaggagaagcgaaaggcagaggaagggagcgacgagacgaaagngtgaggaacgaagacagcagcgaatgggcagagacacgagagcggagaagagaagagcgcgatagagacgaggacgaggagagagagaggagagacgagaggagtacgggagcgcgagaacaggacagaacagcagaacagggaggaggngcgagcaagaggacaggcgaagcagcgaagaagagaggagcggaagagaagagaagaagcagagacggcagaggacgagcgactcagacgcaccagacgagcaacgagcgaaaggagagggagagcgaagctagacacgaggagagagacagcaggagcaggagaagaagcgagcagacgaagcggagagaagagaggggaagcagacctagaacgcgtcggagagaggagacggagacgcggaggaagcaggggccgcaggaggacgaagcaagagacgaaggaaaggaagagag

SEQ ID NO: 569077 - DNA, 1363 bp, Homo sapiens
  misc_feature (442)..(442): n is a, c, g, or t
  misc_feature (723)..(723): n is a, c, g, or t
  misc_feature (771)..(771): n is a, c, g, or t
tgcagtggctctcacctgtaatcctagtactttgggaggctgaggcgggcgatcacctgcggtcaggagtttgaggtcagcctggccaagatggtgaaacccatctctaccaaaaatacaaaaattagctgggtgtggtggcacgtacctgtaatcccagctactggggaagctgagggaggagaatcacttgaacccaggaggcagaggttacagtgagccaagatcgcacaactgaattccagcctgggtggcaagagcgaaaactccaactcaaaaacaacaacaaaaaaagtatagtatgctttcatttatttggggaggctaaggtcagttagaaatgtgaaacaacagaggtatgagagagaaatgcattttgtgtgtatatcaaagtctaggaaaatgcaaaacaaatgttccaccatcattaagatggagtggnggatgcaacgaaggaggaagtattttctctatatattttgctgatatatttgctgatatatttggctgataagggatgccaaaatatgaccattctggtttagaagataatattggtaatgaaccaaatttaggtgatatgatatatccttacaggtaaaatattgaagtttactttcctggaagaacaatggatttgaatgtaaagagcacttgcccttggagaaaagaggttcttcttcttccttgcctatcttggccttgaaggaaaggacttaatcntcacaccggttcttaaatcccttatgcggattacgaaagggcttatcngtttcaggtggtaagaatatggaacctaatgatgctttggctggttttccttatggaatcaaacccattcccaagggatacatgacacctcttggtgaaacccggaatcattacaccccaaacatccaatttttgcgcaaacctcggaagaatttgaaactgtgcaactgggtcaaataaaagggctccacttgtgaagaataaccaattctggtcaccaaatatctatccccgtgaaaataaaggtgtggaatatgttcgcaaacatgcccatatttttctcatacaagttcctagtaagaaggctcatccctctctaaatatgtccacggagaattcttgtggtctaagatatacctcaatcatggtgtcgtaatcctttcacgtatatgtgcgacttatttattgggggtaaaataactctttactctaaaagctcttatttctcctcctcgttcctttcgtctcttcgctctcaactctctggttagctctataccttacatctttgtactccctgttacacagttcctttaacatcttctagtctctagccctctctcgtatctgatgctccgcgtctcgtgctccc

SEQ ID NO: 569078 - DNA, 317 bp, Homo sapiens
agtgagatcgctaaaaaaaaaaaaaaaaaaaaaaaaaagagaatggctaatccctaaaaggggttaagtaactttactttgatattggatgacaatgatgtaagcttttttccctctgcacaattaaaatattttattttgacttttcacaaaaaaaaaccccaaacagttaccctgtcatagcctcggtgaaccccctgatttgaattcgtgtaccttaaattcttctcaatcactttattcgggtaaatgcccttctgattgtgaggataggggtttcgccccagaaagaaaccatcggccgtgttgccacgaga

SEQ ID NO: 569079 - DNA, 852 bp, Homo sapiens
tcggatcggtgaccagcgcgtcggtcacgtgggggtgtctgtggggactcccattaaagcagagcggcatgctgctcggaagtcgtgagtcgagtcttcccgggtctaatccatgccgggttggaggctgctgacgcaggtcggcgcccaggtgactgtgatcgactcgagggacggactgggctgctgccctgggcccggggaacagaacgagacatctggcttttcgttagaggtcattcatggaaagatgtggtacatggtggtgatgagcatctttctgaacgaacaatgtcccattcattaagcagttggtctctgatgaagactaaagcccaattagcacagtaaactgtgtcctctgaaaggatgaaccatggcctataacatccttgggaaccaggttcctttagagttggtcttatttgccttgaagctgggccatgatgcctttatggaccaaaggatggtcacaacgcatgtggtcaccattactacagggtacaaggactgtccatgtccttagccaatactagcgtcacacagcgcacacacacctgtcaactggccaccacactggccacaccgcttgtcctgtcgcagcagggcacaagaaccttgtagtccacggtatttcgcggctaagaggcgtagcattcccatacttcggaacatatttaccccgtgggacgccttgggagtatgccccggccggacaagccagaacgaaggttaacacacgtctttttacttattacaccccgaattaattgcgctgccagacttaagcgcagtgccacctcccgtcgttctactgccttggtccacttatcggaggcagggcacggtccg

SEQ ID NO: 569080 - DNA, 1630 bp, Homo sapiens
cccacgcgttcgggcacggtgcttctgggaccagtgccttagtgagactgaccaggtgtaggaggtgataccagagagtgtggcatgaaggccaatgtcacctgagaatgcccgtatggcccatgctgacgtgctgcacgcgtttggacttcagagtgaggatggggataggccatctgaatgatgtcatagaccgagaggatgggcacgaccgtgtgtacggtgtcaagttgtgcggttacattgttttggcctggtccactgtctgaccgtgacgtgacttagatgtgtagcccctgtcatatgtacaagacaagccacagtagtggaccatggatgcactgggaaaatccagacgagagtgccaaataggaaaatgtcgcctgtcgagggtgatactacgaactcaacattcgtactaccgtgcgatatcaaggcgacagacatctcagatacatgactagacggagaaaaaagcagcttaagcaaaatagccattcccacgtccataatataacatcaaccagaaagacgcggtggtgcacacgacgatcatttgacatcacaaggatcaaccccctaagaggacatgagaacattgaacatttatgggtgtggccatagaccactagtgggcaggtaccaccataggaaaatcccatgcgtggcgcatcccacaagcggttacaacagttggaaataacacataaattgccgcatacaagacccatcccccgagaagattaagcatcgggagtaatactacaaaggcgacgctacagcaaacccaaaaacagtagacccaccggaggatatgagatacacggaaagtacaaacaaacgacaacgaacagaaaacgggagacaactaaggcgcacagatgatcatgaagcaccaaacgcgaacatggagacactctgcacacatcacggtgcaacacccaacaaagggacggaaaaccccaacacaagacaccatacaagaaccatcacccaacaagaggtagccacagggcaaaataaccccaacgcggcaagtagcagcacccaccactggagcagccatgggagcgcacaagcccaaaaacagaaagacacaagcgatgaaatacccaagactgaacaatgtgacaacgcaacacaaccgggggagcaataataggaagcaccacacagaccacacaaacacaagcagagacaaaacgatcaaagaccccccaaacaactaccaccaacacaacagaagaaaaccaagcagcggtagccaaacaacacaagaacaggtagcaagaaacaccatagtgacgcccagaccagaccactcccggagcaccaagccagggccataaacccggttagatgaactcacatcaatgcaacgcaaagggacacccaacaacaaaaacaggacaccacaaatggagacgagcccaccggacggaaagatacgtataagagagaaagatcagtcacaaatgacgagatagaacgaagaacaacgagaacaagcggcgaacacagccgcgcagagagagcgaagaacgacagaacaacattcgccacacagaaagagcgactagaaggaacacacagacagcaggaccaccgtacactcctcatgcacaaggca

SEQ ID NO: 569081 - DNA, 287 bp, Homo sapiens
  misc_feature (74)..(74): n is a, c, g, or t
  misc_feature (139)..(139): n is a, c, g, or t
  misc_feature (175)..(175): n is a, c, g, or t
  misc_feature (265)..(265): n is a, c, g, or t
gtctctgacggactccccggggtcggggactcacgaacggactctccgtttggtgggtcacgacgacttctggntgtcgtgtctgggtgacggtcccaacacccactgcacgacgacctttaccttccggttctggggnacgacacacgacactctgacacacacgctctcctgncagcaaccacctttctacgactgccaaactacacactcaccacggaccgtgcagcctttactggacactgaccaccggagtacccgacgnctcgacacttcgtacctcactg

SEQ ID NO: 569082 - DNA, 344 bp, Homo sapiens
aatccaaagaaacaggaagattattagttgccagagactggagggagagagagaatgggaaactgaggctaactgggctgcagtggatctcttgttggggctgatgaaatgttcttaaactagcacagatggtcaagacgctgcacaacgctatgcatatacaataaaccacagaactgtacattttaaaaaggagaattttataatatgtaagttatagcttataatgattacatgtaaaaaaaattccaacgaggaaaacgctctaccattgcacatttctttctaagaaaagaagtagttcctttctcactcactatttaaataatacttttacttgaaga

SEQ ID NO: 569083 - DNA, 882 bp, Homo sapiens
ccacgcgtcgcgcggggcctgggccatgcggcagttaaggcccgcggtgacagcatgggtgaacggggagcgggtgcagaggaggccttgaggcatgttttcgtgcggaagggtgaggcgcgtggggctggcgggtcagattcccgggttcaggccggggctctgactcgcggttgtgtgttcccccgaccccgcagcgcggggtgtcctgtcctcgccatgaggccgcatactaggcgccaggtgtccagcaaaggtgttcattcttgcgagactacagctaggtggggacatcgcttgacagttctcgagatccaaggttccctgcggagcgtggatgaaccggattgatagggcagcagtttgaagaaacagttcgaactctaaataacctttatgcagaagcacgcagaagcttggcggccagtcatatctcgaaggttgtttggcttgtttaagcagctatataccatcttcctatgcatggaaactcattatgagaaggttctgacagaaagtctccaaatacattcaagaccgagaatgagaacgcatctattgctccagaagggctcgtcctgacagagcctatttgagcgaggactgcagagttattcgaaattgaccatttcatgaagacagaggcatgagcagtggaagataaagcgaagaattacagatcccacttccagccgggcccctcatgtatccactggccgaacgcagagttgtccgtacctcctctccgagagcatcattccttttctatctgctgccagagccacggtgccatttactcgaaggaactcagttttctaaaattccacacctggagttgaccttctagatcgctcagaatccacttgtgtctcaaattgtgta

SEQ ID NO: 569084 - DNA, 696 bp, Homo sapiens
gcacatctgtaatcctagctacttggcaggctgaggtgagaagatcattggagtttaggaattggaggctgcagtgagccatgagtatgccactgcactccagcctgggggacagagcaagaccctgcctcaaaaaaaaaaaaaaaatcggccaggtgctgggattacagggtgtgagccaccgcgtccagccagctttataatttttttaaagctgtcttggtgtcaaaatgatagttcatgctcctcttgttaaaacctgcaggccgagcacagggggctcatgcctgtaatcccagcttttggggagaccaaggcggatggatcaccctgaggtcaggagctcaggaccagcctggctaacatgggtgagacctcatctccatcttaaaatacaaaatttggccggccgcggcggctcatgcctgtaatccccagcatcttggggaggcctaaggcgggtgggatcacgaggtcaggaaatcgagaccattcctgggctaacacgggtgaaaccccgtctcttttaaaaattagaaaaaattaggcgggcgtggtgggtgagcgcctgtggtcccagctactcgagaagcctgaggcaggagaatatggcttggacctgaaagggggagcttgcggtgagctgagaatggtgccactgcactctaacctggcgacggagtgagacaccgtctc

SEQ ID NO: 569085 - DNA, 250 bp, Homo sapiens
tgaggtcgggacgaggttccccccaagagaggatgctgtcctcataaacggatgtacatgaaccattgagcgacatgtgagggtactacccagaaggaagtggtgccctcccgtcctcgccaaaaactcgggcatagttggcacgccgtcccaaacttcaggcctccacaacctacagaaatcactgtctgctgtgtcagccaccagtctctggctttcctcacgactcccgggtgactatttttgccat

SEQ ID NO: 569086 - DNA, 311 bp, Homo sapiens
ggtcggtacccggtaggctatcaaattcatgttggttttcctcaaatcgtgtaaaacaaaaagaaaaacccacaaactggccatctactatttctccaggactgggccagtctggccctcaaagagcttcagaacaagattcatgattttaacgcctgcaaaaagagaaacctacaagcacccggaaattcggccctagcgtctccccattattaaatctcccttttacaccttcagttacgaaacacctcccccatttattatttagaaaaattaaattacaaagggtttaccattaacgttaaggttct

SEQ ID NO: 569087 - DNA, 113 bp, Homo sapiens
ggatttgctggtccagcccaactaggcttaatagggacatgttcatacacctatctcccattctcctcctatccctcaaccccgacatcattaccgggttttcctcgtaaaaa

SEQ ID NO: 569088 - DNA, 640 bp, Homo sapiens
  misc_feature (390)..(390): n is a, c, g, or t
gtctgtcattgatgggcatttaggttgattccatgtcttgctattatgaatggtgctgcaatgaacattcgtgtgcatgtgtctttatggtagaatgatttatattcgcctgggcatatactcagtaatgggattgctgggtcgaatggtagttctgcttttagctctttgcggaatcactatactgctttccacaatggttgaactaatttacactcccaccaacagtgcacaagtgttcccctttctctgcaacctcaccagcctctgttattttttgattttttactaatagccattgtgactgatgtgagatagtatatcattgtggtttcaatttgcatttccctaatggtcagtgatattgagcttcttttccatatgcatgtnggcaacatgtatgtcttttttggaaaatggatggcctgtccttgcccactttttaatcagggtcgtttttctcttgtaaatttaacgttccttttaaatgttggatatggacctctgtcagatacatagtttgcaattattttctccctttctttcttttttaattaaatgagtaaacatgaacacattcttattgttaccaaattggttaggataattactgtctggatggcatgtgttgacgagatcg

SEQ ID NO: 569089 - DNA, 409 bp, Homo sapiens
tttatgcttccggcacgaggttttttttgagacaggtgagacagggtctctgtcgcccaggctggagtgcagtggcacgatcgatcagtgctccctgcagcctccgcctccctggctcgggtgatcctcctgcttcaaccccctcttcccccaccaccactacagtagctcggactacaggtgtgcgccattacgcccgactaattttttgtatttttagtagagaccagattttgccacattgcccaggctggtctccaactactagacccaagcgatctgcccacctcggcctcccaaagtgctggaattgcaggtgtgagccacctcgcccagccagtacttaaaaaaaaattttttttaaccataagtaatgcattcattaaaatacctccaagctgttgcaaaa

SEQ ID NO: 569090 - DNA, 575 bp, Homo sapiens
  misc_feature (8)..(8): n is a, c, g, or t
  misc_feature (11)..(11): n is a, c, g, or t
  misc_feature (13)..(13): n is a, c, g, or t
  misc_feature (15)..(15): n is a, c, g, or t
  misc_feature (377)..(377): n is a, c, g, or t
cctgcacnagntncngtatctataagcttgatctttgatggcttgttggtggtcgttgactttttttttggtgtgtgatgctcaccctcacggcggtttgatctttgtccatttcttgttttttcttcttcttttttcacataacaaacaaaccagggagaaaaacttttttaggttttttgtttatatcgcgtttttttttgtttctaaggatgtctgacgaagaacagtccgctattgtctgtgacaacggctctggcatggtgaaggccggcttctccggcgatgatgcgccgcgccatgtgtttccatccattgttggccgaccaaagaacgagcaagcgatgatgggaagcgccagcaagaagcttttggtnggcgacgaggctcaagcaaagcgtggcgtgctttcgctcaagtatcctatcgaacacggtatcgtcaccaactgggatgacatggagaagatctggcatcacaccttctacaatgagctgcgcgtcaacccggagttcccacagcgtcctactaacagaagcccttatgaaccccaggcaaaatcgtgagaagatgac

SEQ ID NO: 569091 - DNA, 237 bp, Homo sapiens
  misc_feature (8)..(8): n is a, c, g, or t
  misc_feature (11)..(11): n is a, c, g, or t
  misc_feature (13)..(13): n is a, c, g, or t
  misc_feature (15)..(15): n is a, c, g, or t
  misc_feature (174)..(174): n is a, c, g, or t
cctgcacnagntncngtatctataagcttgatctttgatggcttgttggtggtcgttgactttttttttggtgtgtgatgctcaccctcacggtgggttggttcttaatccctctcgtggttcttttaattcttttttcacataacaaacaaaccagggagaaaattggttaanggttttttggttaatatacgcgttttttttattttgggtgggtttctaaaaggagttgtgttt

SEQ ID NO: 569092 - DNA, 502 bp, Homo sapiens
  misc_feature (42)..(42): n is a, c, g, or t
  misc_feature (304)..(304): n is a, c, g, or t
ggttttgtagaacttcatgtcttccccaccgatgtccatggngagtgccctcttcttgtttacccacataacaaacaaaccagggagaaaaacttttttaggttttttgtttatatcgcgtttttttttgtttctaaggatgtctgacgaagaacagtccgctattgtctgtgacaacggctctggcatggtgaaggccggcttctccggcgatgatgcgccgcgccatgtgtttccatccattgttggccgaccaaagaacgagcaagcgatgatgggaagcgccagcaagaagcttttggtnggcgacgaggctcaagcaaagcgtggcgtgctttcgctcaagtatcctatcgaacacggtatcgtcaccaactgggatgacatggagaagatctggcatcacaccttctacaatgagctgcgcgtcaacccggagttcccacagcgtcctactaacagaagcccttatgaaccccaggcaaaatcgtgagaagatgac

SEQ ID NO: 569093 - DNA, 737 bp, Homo sapiens
agcggagaagcctgaggagccggatagggtgctggctgccgcgtcgtccgagtgtgtttatggaccatgtgctgctatgtatgcctgaacaagtacttgacatgcacatttggggagagctttgccatataaatgctctggctggattaagcgcctaattaggatggttatgtcaatcaagttggagtacgcatgcaatcagtgtacttttggtctaggaagccatatggttcgtctcgaaggtatccgtagaggcaaaattggtactaattggtctctgcattcagtgtccaatgagtacagtcttcagattaactagccatgcaacagaatggagtcccagccacccaggagaggatgcagttggcgtctgttatgctgactgtttggatgggtagccaaacgaagaaggagagtgtatcagcaagactaaggaccacgaggtcagatcaggaggccagcccttcaggatgacctttcttttctttcgacgaaggcccctaagcagagcagatttccttaccatgactgggtctacaatgaagaggctcagcctgaagatcccagcgcgggccaaatgaggaagccactgcaggaatgattgtgcgctctcgaaaaaatgaacttgctgcttctcagagactcagattgccagaattgttgacccagcaggagcatgcaaaattctcactgcaggttgacttagattctagcacatttggtaccagtacaacaaa

SEQ ID NO: 569094 - DNA, 175 bp, Homo sapiens
aagtacgggattgttcgtctgaggcccaacttcctagctctttgcgaccccgactggagccgggtcaactgctcggtctatgtgcagctggagaaggtgtgcagggcaaaccctgctgatgtcaccgaggcacaggtgtctttctactcgggacactcttcctttgggatgaact

SEQ ID NO: 569095 - DNA, 992 bp, Homo sapiens
aattattaatgaggtcgtacttggttttaatttcggtactgtggggtggcatccgatgaacgctgtacggctgacgcttcgtttcatgctgcatgccctggtcctggccatggctggcccccgcccgtctcccgcgatctccgtttcggtctcgtgctccggctttttacgccccgcagaagaatgttcggccctgtggtggccccaaagcccaaatgtgaatcccttcctggccctggggacgagcgagcctcccccgtgcaccctgtgggcccatgctgctgcacagattgggcctgggtgggcgagattccccctgcgcccctggaaggactttcccctgcctccagctccccttgctggggatgggcgacgattgcaagaggcgctgctcgtgggagggtgccttcccgcccgtcccccttcctccggagtccgaggaatccatttcccccgcgttcgccctcgtggtaagcgaggaagatacttccgctttccccccgtgctgccgtcccttccgtgatgatgagtgaaggtggggggccatgagtggcaccacacaataaacgggacacacaacaaacaacaagacacccatggagacacaaagtgttgacgacagattaatattgaaatttatggacagaacatcgtaagtaccgtccttacaccaatcacatatgcatgggaaagtaaacgaatatggtctccaaaagcaaaatgtgattcacttttcataaaaaagtcccgagagtgttattattaattcataggaagaaaagttggttggcgccacaaccaataaggaacacaacaatccgatttacagggtttcccgagatgttacgagtagtaccaaaaaagctaatgacaaggccagggtggaagcaacaaagaaaacacaccgtttacaatcgtaataggaaaattaccacattaaccaggaatcctcagtactttatgaccaaatgataacacaggagaacgagacc

SEQ ID NO: 569096 - DNA, 497 bp, Homo sapiens
  misc_feature (20)..(20): n is a, c, g, or t
  misc_feature (73)..(73): n is a, c, g, or t
  misc_feature (83)..(83): n is a, c, g, or t
  misc_feature (88)..(88): n is a, c, g, or t
  misc_feature (90)..(90): n is a, c, g, or t
  misc_feature (120)..(121): n is a, c, g, or t
  misc_feature (282)..(282): n is a, c, g, or t
  misc_feature (325)..(325): n is a, c, g, or t
  misc_feature (330)..(330): n is a, c, g, or t
  misc_feature (334)..(334): n is a, c, g, or t
  misc_feature (337)..(337): n is a, c, g, or t
  misc_feature (343)..(343): n is a, c, g, or t
  misc_feature (372)..(372): n is a, c, g, or t
  misc_feature (374)..(374): n is a, c, g, or t
  misc_feature (377)..(377): n is a, c, g, or t
  misc_feature (424)..(424): n is a, c, g, or t
  misc_feature (489)..(489): n is a, c, g, or t
tcattccatcaaaagaactnaaactagagaattaagcccactttatgaagagcgaattcacggcagcttgaancaatcgaaantgganangtgttcagcactttaaaagggtcaacattnngcttctacccagattggtctcaggtctgtcttctcatccatccctttctaaagccaaagcacatttgtagcacataatccaggagaagcagaagtaaatgctatgactggtggtatttcttggcctggtttttgtagtttttaggcagtaagtagattatnagcgaacaaatgtgaaggttcatgtggagtcataatacctgtnatctnggtnttntttttntcaagctcagagacaacaaagccttccangncantaggcaatggtgggtttctagcaccatagactgtctactgacctcantttttcttttggaatggagttagacatggggagcttcaaaaagaacagacctagcaattcatttnagtggaag

SEQ ID NO: 569097 - DNA, 526 bp, Homo sapiens
aggccagaatgagcatatctagcagcctctacttatctaactatggtacgctgctccatcacatcaatacgccgccgtatagtgctgcacgacacgtggagtaacaagacgctgaatcttgggtgcttgggtcctaggtttcttaccttctttagtataagggctttcttacaacatactggcggacatcatcttcttaatagagattgaaaagtttgcggatgctgctaactcttttggggcccatgcggtgaggcactgtagtatcagtcagtccaggaatatccttctctcctttttttacaataaccaagttgagaacgctcagatttgcatccacaatgcaaccatgaagctgatgttctctttcagacccaaatattcgacttgatgcttgaccctgctttcctcccagtctctgggctatcttggtttcgtttggctagatccagcgaatgtagtggggcgtacatatcatcagggtgctcacaagctcatagctgtgtcctgatatttcgcttccggc

SEQ ID NO: 569098 - DNA, 393 bp, Homo sapiens
  misc_feature (150)..(150): n is a, c, g, or t
  misc_feature (233)..(233): n is a, c, g, or t
  misc_feature (237)..(237): n is a, c, g, or t
  misc_feature (252)..(252): n is a, c, g, or t
agaagctaaagagaaaaacagagaaacttggtacttgtcttgggccttagacacaaatcaggaagaacgagacaagggtaaaacagtagaagtgggtcgtgcctattttgaaaccgaaaagaagcatttcacaattctagatgcccctgncacaagagttttgtcccaaatatgattggtggtgcctctcaagctgatttggcctgtcctggtaatctcagccaggaaaaggngagnttttaaactgggggntttttaaaaaaggagggccagaccaagaggaacattgcaattgttgggcaaagacagcaggtgtaaaacaccctaattgtgctaattaataagatggatgatccaacagtaaattggagcaatgagagatatgaagaatgt

SEQ ID NO: 569099 - DNA, 420 bp, Homo sapiens
tggtgtgcaatggcatgctcttggctcacggcaacctctgcctcccaggttcaagtgattgtcctgtctcagcctcccgaatagctgggattacaggcgcccaccaccatgcccagctaatttatgtatttttaatagagacaggctttcaccatgttggccaagctggtcttgaactcctgacctcaagtgatccgaccgcctcagcctttcaaagtgctgggattacagacatgagccaccttgcccagcccctagcatatttttaaaaattattttaaatttttgtggggtcatatgtagggtatatatttatggattacatgaaataatttggaactataaatttttcggataacagtataattgcaatcctttcttaaatcatatttatggtgtttacatgtagaactcgtacca

SEQ ID NO: 569100 - DNA, 386 bp, Homo sapiens
  misc_feature (57)..(57): n is a, c, g, or t
  misc_feature (112)..(112): n is a, c, g, or t
  misc_feature (182)..(182): n is a, c, g, or t
  misc_feature (184)..(185): n is a, c, g, or t
  misc_feature (204)..(204): n is a, c, g, or t
ccagttacaacagctctggtatatcagcagtagggtcatcttcatcaatacccagancaagtttgatcatcctgtagatcctgttagcatgtgtctaggggatcttccaganctgaagccagaagacatggagcgcagtttcataaacgcaagatgaccagatccttcacagacttgtcgtncnntatcagcctctgccttatngccttaaggtctcaataattggcctggtcagggttaatctccagtgtgttactatatgcttgccatgtaacccattgtctgagtttgtctctataaggcttgagctatcatgatactctccatgtaagcttgtcacatccaatatgtgctagtgacaaataacagcaaggagatgtcaccaa

SEQ ID NO: 569101 - DNA, 670 bp, Homo sapiens
catgcttcttattcttatacaagaaacatttgcctatccaaaggctacaatattttctcctatattttcttctagaagtttgataaccttagccttatatttagttctatgacccattttaagtcaacttttctgtatgacgtgagataagagttgagattcaattttccccccaaattgatatcccatttttaccacactatcggttgaaaacaccatttcccctgttggcaccttaactgaaaaaaataaattgaccatacataagtggatctaattctagatgctttattgttgtattagtttacatttctctacttatatctacaataattatgtgattgctccatgtttatattaagtctttcaataaattatatccttcagctttttgttcttttccaaaattgtttgagctattctatggcacaaaggtcatattttatataaatttcagcttgccaacttctaaaagaaaacaagcctgctaggtttgcacagaatacataactcaattggggaagaaatgccatttaatgatattgaattttccgattcataaatccagtatatatctccattttccttcaacattatgttatagtttttggtgtacatgtttgcacatatttcattaaaatttcactgaatatatttcataaaaaaaaaa

SEQ ID NO: 569102 - DNA, 969 bp, Homo sapiens
ataaacaagagaggtgccatgccccctgtctcctggtgccagactggtaccccagctcctccaggacctgccactagtgaatgccggatggaacttgggattgaccccaccaacaagtgaacgcttggtcaggctgctacacgggaaggaatgggggcaatggtggaactcctccatgcattcaaccgtgcagcgtccgtgtgagctgagttgagccccaagagaatactgtctgccggatacatagtaagttggccagtgtctagttggcgtctatgatccgttagaagaaggaaccgttttggactagccagaattcctacccgtgggaaagtgtgagggattcctgccaatagttagatctaagcctgctgtacgtactcgtagggagtatgctggaggcggagggcaagggagcggtggtatcacaacaagtcagtttctgtgtggtatatcgttgaagtcagttctgtgtggtgcatccctgaagtctctaagtgtgactgtatgagggcctggggcaaaccatgccaacggtggatccagttagagcccactttatctgatcattccgggtcgcttgcttggcccacctgtgtcaaatgagtgcccgggacccacgagacgggactttgaatctgtccgcccaggtcgaacgggaagggccacgaccgcggaacaggaacactcggccccgggtacaggcgcgacaaggcgtgagctggaacaacgacgccggataaccacggtcggcgccccacaggcgcgcatcaacggtgagcaccgggccaacccagtgggacttatctaaccccgagcccaaagtgcgaataccggacacacacccaagacttgccgtagcacacccagggaataagcagccaagcagcagacaggctgaaccaaacctgtgtagaacgacaactcaggtcaacagtagccattgggcaaaccgagtaactacaaaga

SEQ ID NO: 569103 - DNA, 361 bp, Homo sapiens
cagcgaaggcggctgcatcagggtcggttctgcaacgctgtatcgcgtcgccggcagggaggcataacgcctctctgatcttcctgcatggctcaggtggatttcataacatacgagactgttaaatacaactctggaaacatcctcccctcggttaccccagtattgcccaagtggaggtgtcgccctacccaaatattgccgaatgagtggctgccccgtccccagccccggctgtagatgcacgggcagcgccacctgcccccagcctcccccgttagtcttcctctttctatcggccgggcactggtacagcaccctcgcttagtggccttgtgtcccgccgctcagccagccctcc

SEQ ID NO: 569104 - DNA, 785 bp, Homo sapiens
ggaagagccggggcctgtggctgacatggagcagccctgctgctgaggccgcgccctccccgccctgatgtgggggcccaccgaggatgagcaagctgcccaggaagctgacccgagacttggagcgcagtgctgcctgtccggggcctcccgtgtggctcctctactgtcccgacagccagagcctctcctcgcacctcgcttccgactcgcctgagaagctgaagggccttctcgtgatgtccgccgcaccgttctgtctcttcgtcaccttcgacctgctcttcatcttccctgcgtctggatcatcgaactgagataccaacacaggccactccgtacacaacttgcgacctaggcagatcatccaagtcacgaactttaaaacttccttcttcgacatctttgtccgtggccttcttccgcttctctggactgctcctaggctatgccgtcgctgcacctccgcgcacgtggtcgggtcgattgccggtcacgacgctggtgtccagtgcattcctcattgtcacggtcatcctctctgaggctgctctatgcaagagggggcgagttcggcgtacctgctcccccgatcgtctcttttgtcctcgcctggtgggagaccgtggttccttgacttcaaaggtcctaccccagtgaaggctgaagatggagccgatggtatcttgccgcccaggttgctgttgcccgtggacccctgctgttctccggtgctctgtccgagggacagttctattcacccccagaatcctttgcagggtctg

SEQ ID NO: 569105 - DNA, 633 bp, Homo sapiens
  misc_feature (595)..(595): n is a, c, g, or t
gcggtggctcacgcctgtaatgccagcactttgggaggctgaggcgggcggatcatgaggtcaggagatcgagaccatcctggctaacctggtgaaaccccctctctactaaaaacacaaaaaaaaaaattaaccgggcgtggtggcaggtgcctgtagtcccagctactcgggaggctgaggcaggagaatggcgtgaacccaggaggcggagcttgtagtgagccaagatcacgccactgcactccagcctgggtgacagagcgagactccgtctcaaaaaaattaaaaaaaaattttttttttaaatgacagcacctatcctggtggtgacgagaattttgccatcctctaagcagacttcagtgaggtgcactgtcccgaatgatgatacacctgcagaggagacgcagcacgcagagtggaaagtgtgtgtgttcctggggccacccctattcactcacagtggttaacctgcactaacaagcactgccaggtagaaacacttcctagtctacatgtggactgtagcctgcacagacctagggggactgaccaaaggggggcgaatgaaggaataaaagataagatacanaagagtgtatttgtgcttaagcacaccccctggcgcag

SEQ ID NO: 569106 - DNA, 994 bp, Homo sapiens
gcaggcgggtggagcgagagcagagtacggggaatgcgtactacacgttcagatgtacactgactgtgatacctcgtatataatgaccttgcagccatgtgtactccaagcatgccatgtgaggtacaaatatactaatgtagtatatctcacagcacgactcagcatctaggaatctcaacctgaatccttctattgactggacattccatggcagagccttggcacctggtatagcccaaacagacgtgtctttggttattttcacatgcatgcgtcacttcacttgccactcgggtgcaatgtgagttcaatccaatgtgttgaaggctgtgatagtgtaaccggaaagacgtagtgggcgtgaaatagtcctaatatttatgttttggtatacagtgctgcatctatttgcggaccaaattaattgaaggagtaattatactaggagctcgtcgtgtacgagcttcgtcagtgtgttggcctttatagatatagactggaatatctccagtcctagatggaatactgagtggcacagagagtgtaaatttgtcactaggcaagtggagtagcactcattttgcctgtcttgtatcggtttaacgaagagtgctagactgattactcctccctggacatgtcctcctgtacggctataaaaggctggtacatatttggcgatcctcgttgcggcatagattctgtaggacgattgatttcgtcagtccggtcagggaatgaaccgcagattctggtgtatgcacatgagcgctgactgctgtaagtgctctggtccatgtggggccaccaacattcgtagggtccaaacaggggtccccgtccccgggaagattggcataacaccacaagggcttgttgacgcagggggtgagcgggtgttccaaggtccaacgaggcaccggtgtcttttggagcgctgccggtccattacacacgggggcggcacaggcacagggcgtgaacgcagaag

SEQ ID NO: 569107 - DNA, 233 bp, Homo sapiens
ggtgttctggagtctcgcgctgtatccaggctgacgtgactgacgtagctctctgctcactgctagctctgcctcccgggttcactgccattctcctgcctcaaactcccaagtagctgggactacaggcacctgcaacactacccagctaattttttcgtatttttagtagagacggggtttcaccgtgttagccaggatggtgtcgatctcctggcctcgtgatctgccca

SEQ ID NO: 569108 - DNA, 158 bp, Homo sapiens
cacgaggcggcacgaggcgatacgctgacgccctcctatggcaccgcggtcggcgcctcgggcgatcgtcccgcggcgctgtcggagctggtgggcatcctgctcagcggcggcgtgcagccgtataccgagaccgtgcgctggctcgacttcgccgt

SEQ ID NO: 569109 - DNA, 118 bp, Homo sapiens
gtcgcggctgcaggtgttggtgggagcggctccagcgggcatgccgggagtgtactgtgtgcagctgacccaaggacggacacatctagcgtttgtcctttagagagtgacttatgac

SEQ ID NO: 569110 - DNA, 198 bp, Homo sapiens
gaaaaaatcccactgcattgacgaagtggataatgatgatatgcctgctgacttgccttcattactctgtctgatgtttgttgaatgtaaggatgtgtgcacaaataactatgctgatgtcaaagagatgtctgccttgggcattgttgtactagttatgaagtaagtgcctaagtaatggacatccatgagtatact

SEQ ID NO: 569111 - DNA, 622 bp, Homo sapiens
ttttgtggggtaaaaagggggaaatcttttaattaacgagttaccgggaaaggtttaatactcaaggggataaataaggtggtcctttctaatggaaactactttttggggtcaccacattatgggccacagcaaatggcgtagggctgggaggtgggcaccacttgtcaacgaggttagtaatccaagtgccaatctacatataatgggtaaagccggcacacacaaaagaaagagataaaacacctctagagttagaaaaatagaattttatacaactctcaggttttacacgagaattaatctccaagagaagaatatcagtggggtttatgtgttaatctctttgtgtgaacaaattatatcacgttcatctataacacaacactataaaaaaaacggggctaagagccgtggattataattctcaactattgagacaagagatataatattaatggcaaacaattagtgtagacacaccaaaaaccacctatcttgagagtgccagtggggtcaccacttaatcacgggtggaagcagagtttatcatatgagaggtaatggaactatggccacataatatttatcacacttgaggaattggcagaatggctgcgta

SEQ ID NO: 569112 - DNA, 177 bp, Homo sapiens
gtcgctggccgagaacaccgccgctccgggcctggcgccgtacaacgcctcgaaggccgccgtggagcacttcgcgaacgcgatgcgcctcgaggtcggctaccgcggcgtcgacgtcggctcggcgcacatgtcctggatcgacaccgcgatggtccgcgacaccaagtccgacct

SEQ ID NO: 569113 - DNA, 1021 bp, Homo sapiens
cggtggcgggccgggggctccctgtgcgggggtccgccgaatggggggttgggtgcgcgtgccgggggccctctcggtccggctgttctcgatcgcggttcgcgggtccaccctgggtcccgtcaaccgtcgcgcgcgggcgccggagatcggttcgttgtggctccggggacgggccgagggacgctcgtgtcgcggggggcagatggcgcgtgcgaaggtcaagaaggtctccgcgcaaggagtgcgtcgtcgtggccaacgtggacgcgggggacacgcaacaaggacccacgccatcggaagcagccgggcttcgaggtgcctgcaggggcacagtcgtgaaccagtccgaggccagagagagagcagcgcgggctaggacgcccatggtagttgggagtgtgcgcacgacgcgcgtcaacagtgtggcagcggcaaggcttggcgtgagctgaacgggaaacgagttgactcgcgcgttcgtgggtgagagaggctggaagagtggcccgtagaagttgctgtgaagtgctggtgactgctgctcattgggtgatatcggttcctggcaatgcccatgtgtgttgagagcttctcagagctatgccagcctttgggtcgctttgcgtgttcagtgatcatgagagcagacagttgcggtgggtgtcatcgaagcagtggacgagaagggctgctggagctggcaaggtcaccaagtctggcccgagataagctcagaacggctaaatgaatattatcccgaatacctgccaccccactcttaatcagtggtggaagaacggtctgcagaactgtttgtttcatatctggtccatttaagattctagtagtaaatagactggttaatgataagcaatgcatcgtaaaaccttcagaaggaaaggagaatgtatttgtggatccatctttggttttcttttttgcgtgtggacagttttaaagttagttagtttatttataatgcagtacttaattaagtgaaacatctgcccaaaaa

SEQ ID NO: 569114 - DNA, 425 bp, Homo sapiens
  misc_feature (349)..(349): n is a, c, g, or t
tgaaacagagtcttgctctgtcacccaggctggagtgcagtggcatgatctcgattcagtgcagtcttgacctcccaggttcatgtgatcctcttacctcagcctcctgagtagctggggctacaggcgtgcatcaccatgcctagctaatttttgtattttttgtagagacggggtttcaccatgctgcccaggctggattgggcttgttgaaatgttgaaaatacggtcatggacccttgtgatgatttggggctgggagctgtgcctgtcaattcatgacctgggccagcagactcgcattatggacaaagtcccttcttcccacacaaaggaagacatacaccgnatagtccaatttcaattcagctcctgatgggaatctgaacggccgtgggacacttcccaagtgggtctggcctttc

SEQ ID NO: 569115 - DNA, 731 bp, Homo sapiens
gggactcgcgtcgctggctgggagacgtgaagctctcgatggctcctcccgctgcgtggtctggtgctcgccctcgctctcctcgccctccgccccggccccggcccctggcccgccatggagaagactgatgctgatccagaatggccaatgctggcctgatgcatggcctgagctgctactgacgacatggccacctgcatgaatggcagtgacctgagcagggcgcctgagctgtccaacgaggagcgcaacctgctctcctgtggcctacaagaacgtggtctgggggcctgaggtcctgcctggtgagtgtgtcatctctagccatcagagcagaagacctgacaaactccgacaatgaatgtttgcaagctgattaatgtgactatcattgggagaaagttgtgagtcctgagctgagatccatctgcaccatggtgattggaattgtatggataaatatataatagcacaatgcaactaatccagagagtaagtgtcttctatctgaaaatggaagggtgattacttccggtacttgctgaagtagagtgtggtgatgatcgaaaaaaagatagataattcccaaggagcttaccaagaggatttgatataagcaagaaagatatgcaaccagaaaccaaatcagatggggctgacataacttactggaatataaatgagaattataacagagtgcttgagtggaaaaggttgagagattgtga

SEQ ID NO: 569116 - DNA, 872 bp, Homo sapiens
  misc_feature (294)..(294): n is a, c, g, or t
aggaaaagggcgaagagtcgagcaagagctgtgcgcgtcaagtagcgcagtgcagaaccgtcccctggacctgctacacaagatggagtcatagagctccaagcagactatgctggctctcatgtatccatggatgctgccctaggttctgcaggactactatatttcaggatccagcgtacacggggggcgttagacgataggcccgcatcaagcatgcaaggcgtttggacatctgaaacgcttcgacagtccatccccaaggtgcatgccatccctggtggtctgcagacnacgatttctggactacacgtcatttcaattctggcgcaaggatattgtcccagcctacttcacacaggcagtgcggaccataagagaacaaactgtgatgagtgaatcggtgaaaggggtgaactgaggccttgtagaccatgcctccttgactggttcctcacatgacagtgtggcattatgcagcatgaccgttctgggcatcgttgattggtaaaacctaggacaacgctgacatgtcagaacgcggagaaggaccccatcatactccgtgaagatcaagtgccattgaagcagcatggcggatgaaggggggaaagcctcttcatgaacagcctcaagggcctcatccactggggtcgaagctcatgagacactgttagtactacgaccccagtcaatccgatcggagacatctatctataactgagaaactcctcagactcctttctctcatgatcaattgctctcacagagaacaaggttgtcaagaagcccaggctaggttcttggcagacggtgcttcctccaccagcagtgcacctaaacagatttaccacagcagcaatggcgggttc

SEQ ID NO: 569117 - DNA, 779 bp, Homo sapiens
caacctccactttcggggttcaagcaattctcctgcctcagcctcccgagtagctggggttacaggcgtgtgccatcacacctagcaaatttttgtatttttagtagagacggggtttcaccatgttggccaggatggtctcgatctcttgaccttgtgatccgcccgccttggcctcccaaagtgctgggattacaggtgtgagccaccgcgcctggcctgaaagtcattttggaaccaggatgtatcaaatgatatagagagtaggaaggagaaaagcaacaagaggtttgatttaaattacaaagttgggttcttattagaatatcctgagcacaaccctgtagggagggagtggggaaggcagcagtgagagcagtagaaaggaagtgcccccctcacttccttcatgtcccctaagcttcaaggaagcatcaaatatccaccttctctttgaacaagataagcctcagatgaataaaatacctaaaagcatctgatatataagccactgtatctttttccctgccgatttaagtttgatttctttaatcaataacaggaaaacatacccagtgctttggaaaaagttcttttggcttctttgtcacttcaggaggatttctgggctgacagcagagcacacagtctgagctgggaagccaagctcctctggctactctgaggccaggtgctgcttcacgacagggggaatcttttcaaagtttgcaaaaccaagtaaacagggttgaagcactgaggggtggccactcctcagg

SEQ ID NO: 569118 - DNA, 194 bp, Homo sapiens
tcctccaatgtctgtcttctcttttgtatggggatgcagcttgcaattagaaggtggttccattatcaattcctgggggtataaaccttattaatataaatttggcgagctagaattaatgaggagagctttgagcagaccgacatcagctcactgttaaggaaaccattgttgagaactagagccgtccgtag

SEQ ID NO: 569119 - DNA, 220 bp, Homo sapiens
cggagtatgacaggctccagcttgaacgatatggggaggtcagcacggcgctcacgtgtcgacggaactggtacagggtaggcatgcaccgcaggggtgatacacgtcgtaccaggtttcagcttaacgtatatttgggaggtcagcacggggctcacgtgtcgacggaactggtccagagtaggcatgcaccgcagtggtgaatacacgtcgacctgca

SEQ ID NO: 569120 - DNA, 511 bp, Homo sapiens
  misc_feature (77)..(77): n is a, c, g, or t
  misc_feature (132)..(132): n is a, c, g, or t
  misc_feature (176)..(176): n is a, c, g, or t
  misc_feature (277)..(277): n is a, c, g, or t
  misc_feature (307)..(307): n is a, c, g, or t
  misc_feature (346)..(346): n is a, c, g, or t
  misc_feature (406)..(406): n is a, c, g, or t
  misc_feature (488)..(488): n is a, c, g, or t
ctgctcagctctgatagtgatcagtgctgcacaaccagcaatttctgtatttagtagagatgggtctcaccatgtgncagctgtctcaactcctgaccctcatgatcgtccgctcgcctcaaaaagtgctgngattacaggcatgagccaccgggcccagcccataactgcctgtntagaaaattaacttggctacttcattcaacctcaggggacaagaactacaaagagatcagtagagcttaaaccccattaatggagtctctctgaatctatnctggttgggggatggaaggagtgtctgatncaaagtaataatttaaaagacaccttaacaagagagatnactgaaagagaggaagaaatggatcccaggagccctgtgagatgggaaaaggctactatncacttatctctgaaatgctacacaacactgagaaggacctgggtttcctatgtgggcctggtggctgggtagggatgtaggnaggtatagataagcctgaaattg

SEQ ID NO: 569121 - DNA, 489 bp, Homo sapiens
  misc_feature (75)..(75): n is a, c, g, or t
  misc_feature (232)..(232): n is a, c, g, or t
  misc_feature (235)..(235): n is a, c, g, or t
caaggaggtggcccccccttccgggggggcctcatccgggccaagctctccatggccccgtgggccaaagggtantgggggaacaagatcggcaagccccacactgtccccttgcaaggtgacaggccgctgcgggtgtgtgttggtacgcctcatccctgcacccaggggcaatggcattgtttccgcccctgtgcctaaaaagctgctcatgatgggtggtattgatgantgntacccctcagcccgggggtgcactgcccccctgggcaattttgccaaggccccctttgatgccatttttaaaacctacagctccctgcccccccccctttggaaggagactgtattccccaagtttccccatcaggagttccttgacccccttgtcaagaccccccccaaagtttccgggcaggggactcaggcccccgctgggggtcccacatagggtttttatccaaaaaaaataaagtgaattaagggtga

SEQ ID NO: 569122 - DNA, 254 bp, Homo sapiens
tgagcggtacctcggaacgtgtatcagataagggaattcgtactcacgcaatacaaggaatgaataatggattcacacaagggatgaatctcacaaataattatgctgaaagcaagatgccagacaaaaaaagagtatgtggtatgctttacagtggatgagtttgaacgagatttgccgtctacaggtgtattcaagtcaagaaaattcgggcccgtggagtatttatagctaagagatagtactaaagagac

SEQ ID NO: 569123 - DNA, 467 bp, Homo sapiens
aacctcacagataatgcatatactatgaaaccgtgtgtgatgaactcctacagtactcacctcggtgtctcggatggccattagaaatggaatgaactggacctggtcctagccatcagtgaactcattgtctagtaaaatataaactataatcaattgtgtgacgataagtagcacaagttagggttaacatcaacaagtgtaagtaagttgggtagtacaggtaacacgatgcaggcagaatcgacatcatcagcgaatgttaagggtcaagaaggcacagggcaggtctcaaaaccggagaaggggcttgggttgtaagttgataagcaaaggaccaggtccctcagcatagcattggatgacgatcaaaggatggctttcagatcacaactacatttcactacagacgttcggacgattcagattactcaagacttgtcctcgtgccgaattcctgcagcccg

SEQ ID NO: 569124 - DNA, 409 bp, Homo sapiens
  misc_feature (247)..(247): n is a, c, g, or t
atgctcaggaaatcgatgagatgaaccaaaaactgcaacgcctgcagctggcattggtcaacagaaagggcccaattcttctccacgacaatgcccgaccgcatgttgcacaacccacacttcaaaagttgaatgaattgggctatgaagttttgcctcatccaccgtattcacctgacctcttgccaaccaactaccacgtctttaagcatctcaacaactttttgcagggaaaacgcttccacanccagcaggatgcagaaaatgctttccaagagttcgtcgaatcccaaagcacggatttttacgttacccggctcaagcaacttttttttcgttggcaaaagtttcctgaatgaaattgatcctatatttggataataaaaatgcgatggacctaaaaaaaaaa

SEQ ID NO: 569125 - DNA, 139 bp, Homo sapiens
tttctgggctccgtaaacagtggctgggacggcaggtggcgcagcttcctttcttcagaaccttcatctgctttggtctccgaggttcttctggcgggtcagcttttcctcccttatacatgtcttcttccagctcaat

SEQ ID NO: 569126 - DNA, 184 bp, Homo sapiens
ctcagtagtattggtaccacaaacctttgtaaacaatttaaaagttggaagaaaactgtgggcaatttatttcagatgctctgaccggaccgggagactgtcatttccacagtttctagtcccactaattttaggttttttttttttttgaaaggaattgtgcgcttagggctctcaggggttc

SEQ ID NO: 569127 - DNA, 172 bp, Homo sapiens
ggctatacctgtacgcctctctctgctgcgacacggtaaccacgacgacttgacactgagcactgtccgtgacactggacacttttgttggcctcagcacttatcctggtgccctcgtgtggtggccacagctgctcggaacgcctgtaccacttcatggaacagctttggc

SEQ ID NO: 569128 - DNA, 167 bp, Homo sapiens
tatacgaatatccttcagtagtcgcacctatttcgtaagcctctacagataaactacgatatatcttgtagcatgagaaaatatactgtcatcctaagactctagtccaccaaggggatagagtgcatatctctatccactggggaaatggacggtgatacagaaca

SEQ ID NO: 569129 - DNA, 299 bp, Homo sapiens
gtcgatctagaggccaccgatagtttggacgactcacaaacatagcatgggaaacgacttgctcacatgacttcgacttatctcccactgggtcccatcccacaacaagtgggaaatcacaatgagatttgggtggggacacagccaacccatatcatcagtgcttgataactgtgcttcattgcttttcctattatctcataacattctactctctgtcttcaatatctggattttatctatctctccatacttggctagtgtactaatttggaaatgtagaatatttgatcaatgtg

SEQ ID NO: 569130 - DNA, 924 bp, Homo sapiens
taaccttactaattatactacttgttaggattttcacattctggcttaatcattttcattcctaaagaaaaatatctggcctaaacctcagttattacatgtaattgatgaggtattttttccttttttctttttttttttttttttggaaaacaagtctggctcttattccgcccaaggctgggatgtggcaggggccgcatattctaaggctcaattggcaacttctggcctcccataggcttaacgtggatcctctcaacctcaagcctctccaagtaacatataagctggacaactcaccaatgggtggtcgcccctaaggcctccaataaattttggtaataacattttcttggtcaagaagacgggtgtgttttcggccattggtcgggccaggtcggtgtctttgaactccggggactcaaggcaacctaacccaggtgttggcctcccaaatgtggctggggatcacaagacacgagccacctcactttagccggattcgaagattttaacaaaatattttctctgggacttcgcatcctctttcaatggaggggccattggtcccgttgaaatactgggaacaatttttctgggtggtgttgttgacaactcttgtttaactagcttctgttgaacaagtgggcgattaagccagtttgggtcttatggttgtaaacccaacactgggcctatttcactggtttaaaatctctagcctcccactgttgttttcttcaactcacactctactcgttccctaatggtcccatttttctctttcccggaaccttatggcatttggcttcacataaattttaacgggggcgtttggtccatccgggagttaacttaacggcattataaacttcggcggatgcgtcggcgcaaatacaaaagttaccactcaaggttaaa

SEQ ID NO: 569131 - DNA, 371 bp, Homo sapiens
gtgaacacaatttgtaaatctcttaaccatgggagttaagtctcagcgttctggcgatacacgtggttgaaacttctgtatacaaatacatattttacatttactagctattaattatgtggtaaattagagtacagcactctctttatctgtggaaacttcagactcttccctattactctaatttcacagagacattattaaatataactgggcttacacatttgttaagctatactgacacttaatacacatcttggaggcttgattcacctttctatccttcctcttgtgcaacacttttctgattttgtgattcgaggtctgtttatctacctgaggctccattgagaccgtatatacgtgacctt

SEQ ID NO: 569132 - DNA, 1125 bp, Homo sapiens
  misc_feature (451)..(451): n is a, c, g, or t
gctgcagaggggtccatacggcgttgtcctggattcccgtcgtaccttaaagggaaattgtcacaatgtccgggagcccttgatgtcctgcgaatgaacggaggaggcatgtccttcaacgttcctttgcgaaccaggagacccacgttaggtggcaccaatcttgactatccagaatgtgaagcagtaacatcgtaatagaggatggaaatagtgattgtgcactctatactcatagagatcatcaagacggacctggagaggaacgcttactgctggcgagcatcgctgcaattggtatgccattggaacatgcctggttgattgtcagatgttatatcgcgtcgctagggaatacttggctcgagagaggcttgtgcatgtcaagtttgctgctgtgcctacttggcagcctacttcaccaattttgctggtcctgcctgtgacatcnctgggaatctttctacgtagaccaagatcctaggcagtgctttccgcggagcctacggtgctttcttgtgggttactgacccctagggtctgaccaccagactctcacggaggcagtcttaaatgttaacctaccataccattgcgcgtgttgtaacacagcattctccgtctgacgctatgtggacattgccatcccatgcaacaacaagggagctcactcagtgggtttgatgtggtggatgctggctcggcaagttctgggcatgcgtggcaccatttcccgtgaacacccatgggaggtcatgccttgatctgtaactactacagagatcctgagaagattgcaaacgaagagcaggtgctgctgagaaggccgtgaccaaggagaatttccaggtgaatggactggtaccgctcctgagatcactggtatcagactaaatttgcgcattgtctgaagtatacagggtggccccgagccgattacagaaaccccattggaatggagaggcacacttgcccaggaactggtcgcaacaccacggtccgcacagagtggtgagccacccaagagggtaaccggggcgaaggaaaaacacgaacacaggcgggagacacattacgaaaaaaacgggaacgacgggaagacaagcgacgaggacaaccaccagg

SEQ ID NO: 569133 - DNA, 235 bp, Homo sapiens
gcaaggatgctgttactgcagtggttctactgcttgctgttcaccagagagagcagttttatgatatcatcattcatgccacacaaccctctctcctaatatataagtttgacaaaaggcagagcacttagggaactagcattcatcatgcttgtttgcacaaacctgatttatgtttacctatcctcttacctcccctgcccctctgttctctagataccagtaggaagctcca

SEQ ID NO: 569134 - DNA, 526 bp, Homo sapiens
  misc_feature (32)..(32): n is a, c, g, or t
  misc_feature (252)..(252): n is a, c, g, or t
tcacgagcttccacaaattctgctgttctatntgggtatttgacaatggactttgtaatgtatgacagtgcatatggaacaatacaatgttcatgtggggtatggggaaagagaattctcagcaaatgaattggaattataatataaagcagtatagcattaggatttgaatataaaatcatataaagccatataacactggatataggtggttaagaagtggataaaaaaatttcatggctgagtgcggtnagtaacgcctgtaatcccagcactttgggaggctgaggcgggtggatcacctgaggtcgggaatttgagaccagcctgaccaacatggagaaacatcatccctactaaaaatacaaaattagctggacatggtagcgcatgcttgtaatcccagctacttgggaggctgaggcaggagaatcgcttgaagccgtgaggtggaggttatggtgagctgagatcgcgccattgcactccagactgggcaacaagagcgaaactatgtctcaaaaga

SEQ ID NO: 569135 - DNA, 925 bp, Homo sapiens
  misc_feature (20)..(20): n is a, c, g, or t
  misc_feature (74)..(74): n is a, c, g, or t
  misc_feature (98)..(98): n is a, c, g, or t
gtgggttatgtgtggggagnggcctagcaccgaccaacggagggggttttcgagcacatttgcccactgcatgnctgtgtaaaagacccaacctgaanctactgcatgatgcaaagtctctgccagaagcaagatggaggtactctggtgacagctagtaccatgttccaaaggccatacttcgagcctgcagcatgtcaggggaagacatcagatgatggtagccacatgagcccagcgctgtcatcctgcaaaaaaagtaacatctgttttgacatctccagtggtagagactttaaatcagcttccacattgcttatctgctggctaatcagaatggatgcagtattcttaccaactcattgacagggaaaaaacacaagatatgcagagaaataggggaaactaagactgatatgatgaattcaaatgaaaaatgtaatggcactttgcatatattatatctaaactctcattgcatgtacaatgagataatttgattttacttcctaactgagccgcgagcggatctcgcgcttactcttacctgatgggtacctttgcttgcacttaaatgtaataccacatttcagcctcactagaaattaatttttgagctcgaaggcctctagcaggacccctctgctgaccgttcgctttggaggaggggcgactcgcaccacaccgcgatcgctaatccagctaacgacacccccttatcattgtatcaaagccctgtaatacaatctcagcgggccgcagatcttcaactaccgccggtttcgcgcccttgtcacccacaaccgtacctttgtgtacgagacgtgtctgtaatatagataagcaaccccctcgatagtttcgatataacgacacaatgtttctctaaataccacacccccgcctccgacccagatccgaacag

SEQ ID NO: 569136 - DNA, 253 bp, Homo sapiens
aattacaccacgactgcgcgttaattaggtgcctagtaggtcgctcgcagtaaatgtagcggttcggcgtacggccacgggctattggttgaatgagtaggctgatggtttcgatcactcctagtatggggataaggggtgtaggtatgccttgtggtaagaagtgggctaggccatttttaatcttagagcgaaacgcctataatcactgcgcccgctcaataaggggacgcgccatcgtgcgctacggaga

SEQ ID NO: 569137 - DNA, 1033 bp, Homo sapiens
catctcacgggtgtccgtgaaattcgcgaccgtataagaagaatacagctcgagacgcctcactcctccaggtttcaccggccccctgctgacaatcaatccaggctgtcggaaaatggcatctcttgccttcgcagattgattgatacgaacaaaaaacggcgagagtaagtcttaccctcgacacatagtcaccaaaagcgtagtcccgtgattcccacctaaaacgcgactgaggtatactcgaggacgatcaggaatggctggaatgcgtcccagttgactcgttgccagtccttctcgggtactcctaagagtcaaagctgtcatctggatcgtgcatttgcgccgtacctctgtccgtggacgcatgcggcaactattcccgagatgctactctctctgacctctggacttacctcgtagtatatatcacttcgggtggtttcattcccttcccttgttcaggcgaatataataggcgctcagtccgttactaatcacgcgacgaattgttcactctcccgtttgagggggtaataatcatatcttggcgtgtgacctacagagagatcagatgattgaagggcatacttcgtactgagggacgggacccttattctgcgatctgagggaggttactttacaactagtgttgacaatccccctgacgaattgttaaccgttctgtgaacaaggcccgtcataatttggagccctaattgaattctgctccattctggctgtccggcacgaactatatcgcaggattcttccccttcgtggattcatcctttggcctgtttgcaattgggtggcctggatttcggtccctggtcttaggggctgaacatgtcccaagtctggcgccgcattatttaccctaagggccgaccacgggggtttgatgccagggccgcccaaaggcggcaggagcgcgcgaccctacttccacatgcggcactctctccgggggactgtgagaacctcatctactcgcgcgtgtgggttgttgtggtgtcgctctgggggt

SEQ ID NO: 569138 - DNA, 943 bp, Homo sapiens
gggagcgtgtggtgtacctgacgggcgcacggggccgccgggcccacctggcatggcagtggtgacgctggtgcgaggagcgacccatatggacacctgcacctggacgctgcgccacctgacatggagcagcacggcgaccgactttgactggttcttcctggattgcctgagagcacgctacaccgaggcgcacggactggcacagcctaactggacaccgtcagacctggcctccggcgccacctgtacctgggccggccccaggacttcatcggcggagagcccacccccgagcgctactgccacggaggctttggggtgctgctgtccgcgcatgctgctgcaacaaactagagcccccacctggaaggcttgcctgcacacagacaatcgtacagtgctgcgcccatgaccgagtggcttgggtctgcatgcacttctcagaatgccaccgagtggatgtggacgtagaaccttggtgaacacagaggagggggtggcacgtaataagccatctaggacgctgaggccctaggcgagaagccagtagcaagaagggggacacctacatttagccgaaagatagacactaaaagaacaaaaacaatgaaaagagaacgcaagagcagagatgagcaagagtgacacaaacgagataacggcacgagacatgaaacagggaacacaggaaaccaaggagactacaagagatacagggacagaaccagaaaacccagacccacagacgacgaagatagggaacgagaaatgatagacagaagagtatacacaaacgacaaccagaggcaccgacagaagatgacgcaagacacatcacgaggaacaaaaacaagagaaaaacaccgaacaaccaagggccacgacgacggcaccagagaaaaaaagaaaacacaaccgcaagagaaaacaagaagaaacc

SEQ ID NO: 569139 - DNA, 143 bp, Homo sapiens
tactgccaagttgcgttgtgtgctgaagattggggaacacactccctacagcctcgccatcatggaaaatgccaatgtatctggccctgtatatagccactatcttgccatgcagaatggccattgttgcccatctgtggagc

SEQ ID NO: 569140 - DNA, 331 bp, Homo sapiens
  misc_feature (72)..(72): n is a, c, g, or t
  misc_feature (85)..(85): n is a, c, g, or t
  misc_feature (130)..(130): n is a, c, g, or t
  misc_feature (145)..(145): n is a, c, g, or t
  misc_feature (147)..(147): n is a, c, g, or t
  misc_feature (211)..(211): n is a, c, g, or t
  misc_feature (237)..(237): n is a, c, g, or t
  misc_feature (323)..(323): n is a, c, g, or t
ccaacctccaggggccgggggggttttcaggccaatggcccctgtccgggctgttatggccccaaggcaggnggagccccagggnccccccaaatggggtttcccccaggcttttccccgggggtttcanggagtttttccccancnctggtcggagtttgcaggaactggccttgttttccttagcccgtcccccccaacagtattaggngaggatggatgcgggggctgtccctnccgggaagtccctgtttaagtttcagtgggttgtttccccctgtgggaaaaaaaatgaaaactttttccctgcctttaaaagtttngactgtga

SEQ ID NO: 569141 - DNA, 479 bp, Homo sapiens
accgcgccggacccaacagggatttccccatttctgtttgctgcctgaaatagtatgaggaagccaaggagagtccttgccgggtgagtttcaggatgaggaaatgacacgaggaagacgtgggtttgggttagtggctgctggcgttttggcccttggtgtttctggagcctccagggatctaggggagcctgggctgcgtgcatgtcgataagcagagctgttcttggggagaaggagggaggtctcgggagtgtagcaccatgccaaccagccctgcgcgaagacagagtgagccacgcccggatggcagggcatgtttctgttttggtgtctcactttcctcccagcgtgacttatttggggattcctcagggcctactggaatgtgactgcccactgcccagctgcctcgggtacaagtcctggccctatgtcccagctgtcaggggctcagggaatcctacccagccacctgt

SEQ ID NO: 569142 - DNA, 151 bp, Homo sapiens
gaggcagaggcacaaggaagggcaggctggcccaggcctcagctctgaagtgattggctgatgccagcctttggctttgggtgaggcctgtccgggcctgtcttgctgtggcctggggcagggttgggggtgcctccaatccctgctctgg

SEQ ID NO: 569143 - DNA, 760 bp, Homo sapiens
gcaagatgccgaacaggacagaaggccaagggaaacgaacgtggttccggccccagctgtcgtgaacaagctcgagtgctagacagtggtgaatccgcctgttttgagaacaaggcctacagaattttggcgagttggatcaggacagtccagtcccaaatagagacctcagccgctttgtgaaatggacccggtatatcaggttgcatcggcagagagccatcctctataagcggtttaaagtgcctcctgtcgattaacctagttcaccgcagagtcctggtaccgcgcaagacagctactcagctgctttaatgctgtgcccactaagtacatgaccatgatgacaatagcaagagaagaatgcagagaactgtctgtgcccgtggccgacgacacgaacggctgtatgggcaaataggggactgtcctcaactgaaagatatcacctgtccttcgatgcatgcgagttacatcacctgatcactcgatccctatggtggcatgaagcgaatgagaagtctcaagcgtggtggtgattgcacacgatggggatcccagtcgatctggattgtcttcttgcctgtcctgtgtcgtacaattgggggatcccttactgccttatcatcggagaaggcaacggactgggacgtctaagtccacaggccagaccttgaccactgttgcctttctcacaggtgacactcgggaagacaaaggcgctttcggcgtaatgctggtggaaagctatcaggaccac

SEQ ID NO: 569144 - DNA, 357 bp, Homo sapiens
  misc_feature (76)..(76): n is a, c, g, or t
  misc_feature (317)..(317): n is a, c, g, or t
  misc_feature (320)..(320): n is a, c, g, or t
  misc_feature (347)..(347): n is a, c, g, or t
agagtagtagggttgaaggttagtgggaaacttttatgtgtgtgggtagggagattaatttgtcaggttcagaggntttctgttgggtggtagtaggcgatgaggttggcctgttcaggatgtgtcagaatgttcctgtaaattccatgatacttggaaatgaatttgtattctattaagtgacacatatataactttgacaaataagtagttatcatcatatgtatgtttgaactgttttacatgctatctgcaatgtttggtacatttagtggattccttgccattactctggcctctagtctcagagctaagcntantagactgtggaccactttgactactgngtaaggcagt

SEQ ID NO: 569145 - DNA, 187 bp, Homo sapiens
ttcttcatagaaaggcacatgggagaagaccaggtggagatgtcaaggtacaccgaggcacgaggacttccacgatggaccaggctgaccaccgctgaaggtgcctatgatgaacgcgtttaggcatgtttaacatccagacactgtaagaagctgtccagcatgggtgctgcatgatgaaatacct

SEQ ID NO: 569146 - DNA, 217 bp, Homo sapiens
gggcccggttttttagccccgcttgggccccataggggggccccctttctccaaatattaaaatatttacccccctttggggacggggggggggggtcccccctcctcgggggacttacgtgaggggtttcccttagcccgggggggggggattccagtgagctgtgtttgggcccctgttcccccgcctggggggcaaagtggggccctgtttcca

SEQ ID NO: 569147 - DNA, 192 bp, Homo sapiens
tatggtctgtagggacagtcagtcaggatgacacttcggcatcatctcttccctctaccatggtattgtgctcccttttttacgtttggtttaggaaatgaaagacgcctagatttaaaggctccgtgtcaattctctagcatactgcgtatgctcacactgacgctgggacctagtgaatgagctatactg

SEQ ID NO: 569148 - DNA, 206 bp, Homo sapiens
tagtacaagctacgagtcaaaccaataccatcagcactacttactggctaatagaaaacttcagcgtggactctggtggacatggtggagatatgtatttataccaccttttgagctgtacccacaagcaagatcacataggacactgcaggaaacagacccttgagccagctttgctccagaaacagtgccctatgggaaaagaa

SEQ ID NO: 569149 - DNA, 647 bp, Homo sapiens
ggccgggcgcggtggctcacgcctgtaatcccagctctcagggaggctaagaggcgggaggatagcttgagcccaggagttcgagacctgcctgggcaatatagcgagaccccgttctccagaaaaaggaaaaaaaaaacaaaagacaaaaaaaaaataagcgtaactttccctcaaagcaacgacccccccccaattcggactgtgccaaattctccggttggccccgggatattaatagaaaattattggtattgaattaattggaaaaataaaacacaccttcggttggcatttggaaaaaaaaaaaaaaaccaggaaaaaaaaaaaaaaacaaagaacaacaaacaacaaactggtggcggcgcgccgccctgaaaaaagcttttctatacaaccactccgggtgggggcggcgcgcggcgccccacgataggatatagcgcaaccgggggcctatgacgggtggtcccaagaggacaaccgggggcagcggacactacgcgcgggggttctcccccaaatataaaaagacgccgggggggacccacgagcgggtttggaaccaacctccgagggggggcccggagagaccaaacggggacctcataacaagggggaccaagaagagggccccagataccagt

SEQ ID NO: 569150 - DNA, 215 bp, Homo sapiens
catggaggacgccgaaacggtggccgacaagatccgcgacgtgctggcgcggccggtgacgatggacggccatgacctcacggtcggcgccagcatatgcatcgcccgctggccggaaaacggcgacagcgcgaaggatctgctgctgatcgccgacgccgcgatgtacgcggccacgcggcggcgctgagggtagcccgctcagcgcgcggtca

SEQ ID NO: 569151 - DNA, 632 bp, Homo sapiens
gacctcctgtaatgtcgcaaggtggccggtactgatcttacgtcatcccagtctaataggtttggagattaaaccctttctcaacttgtgctgtttatatagcccagcgttcccgtccataaggcttcattgtgactttgaaccaaccttatcttcccacatacccgggactattggacaattattttacatggggaaaattatttgggataattaagccggaacttttcctgaagattgccatttatactgtatggcttctttttcactagtttcattctaggtttttagaagatgaagatataagataaatttggttcgtttaattgtgaaggcgcctgggaattacatggacataccacccttgttaaggcacagtttctgtaagcttacacttgctatttgtaaagtttgccttcacagcctttcagatgctgttggacttcatgtcccccacctagcttggtgagggctgtaactgtttcccagtacttgtaccttggaagttctgaatgttgtaaccatatttatgtatttagagttcctcatgttgcacgggtttaagaatttgacccaccacaggtcatgtgacttttctgtactgttaaacttcattgtaattaaatgagaga

SEQ ID NO: 569152 - DNA, 184 bp, Homo sapiens
acgctcggtaccgctggagtggcatatactctacccaagcccacatccagccaggtcccagtcctgctgggatgcaggtacctacaaagcactggactgtgtgaaaggatctcagtctttagaggaaatggaagaaagctggaaatcgtatttgcatagaattgagagttatatgccactccag

SEQ ID NO: 569153 - DNA, 391 bp, Homo sapiens
  misc_feature (234)..(234): n is a, c, g, or t
gaaaagatatatattgcatgtggtgtgtgattttgtatctgtcaggataatcatagttcaatttctattattattataccaatatcatttagttttctttttaattctgagggtattaatcagggtctttctatcacgtgagacacaaaacaaatccaaactgtgtaacagaaaaaggaattcattgaccacaaggactgagaagctcccagacttaacttgcttaggcttcanctatatgtacagtttcaagtggcatcctgtaactctctctctactctactcccccaacatcagctccatgtttacctccatgaacttcagacttaaacagcatcactggctcctgaccaggatttcagctccacaaacttcaaactagagcaccagc

SEQ ID NO: 569154 - DNA, 419 bp, Homo sapiens
ccgatatcttacaggatcccctcaagcatcactccccgctattccgcactatcctccctctctctgttaccagccaattaacccccccaggcccctgacttaatatctttcgaacacttagtcctacggatctttgtgttatgttctgtagtaatgctcttctctcggatacctgcatagactacccttcctcactatcttcagatctttgttcaacatgtcctgtgaggtcttctctgctcacctctatgttaaattgtattgactgattccacatttttttccctataatgtgatgcacactccactttgcattcagcccgctctcccattcttcacagctctggttcgttgatttcctgagggacgattcggccaccttcgttggttctgcagcttcatcagttttttcagcatgt

SEQ ID NO: 569155 - DNA, 175 bp, Homo sapiens
agcccatgtacaagtacattgtgattgaacccactcgcattggcgacgagacagtccgctggatcaccgtgtggcataatgcctgcacaagactggccgtgctggctgtggcacctgcctgcctcttcaacccgctttgcgctgctccttgggattcttccctactacattttcc

SEQ ID NO: 569156 - DNA, 314 bp, Homo sapiens
ccccccgccccctggggggcccccccccttggggggggggggggttttttcccccccccccgccggggggcggtttccccccaaaaaaaacccccccccctttttttttttggttttttgtcaccccccgggggggggggggtttattttttttggggccccccccaacaaggggttttttgggggggggggccccctttccgccttccaacccccgttggggacccccgggtttgggtacttggtttccggtttttttttccccccccccccccgggtttttggggttttggaaaaattttttttccctttta

SEQ ID NO: 569157 - DNA, 1052 bp, Homo sapiens
cagtctggggcaactgggcttcccaaacactcctacgtggttggacctctggcttttcatccttgttcgatagtggtggtgtattctcattatgtgtattttatgtgccatgacttgtatcgcatgatatctcaaattcaacgcacagttggttcttgacgtgaattctgaacaatgggctacaaacttcttgaatcaaacgaagacaggactctcaatagacagaagtttcacatctccaagggaccccgttccgtattcattttacacttgagttcactaattttgccaagaactctacttaactcgggtaggatttcacccattcctagctaagttcttcacccttacacccctttggtctcgtgtcctcacacaactttcaagacatctgatgggctttacaagggtgctgaatatcacacagcattttgtaccttcaacaggtcttagtagtatagcattacacgacactatagtacctggtctctttaactgtgtccaagagttgattccagggttaaactaactgatgcacaggtccactcgcgctgcatctacactacccgggccacggcttacagtgcaattccaacaaacgtcacattaatccaaacacggcagggcacacagatacccgacgacagaagcgggcaacacacaagaaattacctgaacgcaatctcggcgtcacgcacaaccatggctacgcgcaccccagaagaccacaaatcacacacagggaaccacggagagccacactggatcactcgcacccacggactccgcgatcaatcgagagaggggagccgaaccaacgagatcatatcaaacggacctcgaaggacacacacggcacagagtacaattgttccaccagatactttggaaacagcctcaagcacatttgcattggcacacttcttaaccatgggggaattcttcacccccgtatattagaccctttttcaaacttcattgagccctcaccatatacagaaggcattatcgcggaccaaaacgcacgttaatagagaccacgtatacctacg

SEQ ID NO: 569158 - DNA, 388 bp, Homo sapiens
cgagctggccgcccgggcaggcacccgatacttattttttctgctcctctccctcctcccacccttcaatctcaaagaggccccagtatctggtgttcccttctttgtgttcatgagttctcattatttagctccctcagtgagaacatgtggtatttggttttctattcctgcgctattttgctaaggataatggcctccagctccatccatgttcctacaaaagacattatcttgttcttttttatggctacatagtattccatggtgtatatataccacattttctttatacagtcgatcactaatgagtgtttaggttgattccatgcctttgctctcgtgaatagtgcagaaatgaacatatgcatttatattacctgacact

SEQ ID NO: 569159 - DNA, 143 bp, Homo sapiens
cacagtcatggcaacatttaagtaccccccagcaggcaatgcacctgtcacttcaacatttttgccattgtaaacaccagggcacgcagcagtcaatggacaccacagtctcatccactccatcaaccttttggaaacattgc

SEQ ID NO: 569160 - DNA, 802 bp, Homo sapiens
gagcagacaggaagcccctgtctagcccccgagaggcctgcctcagccctcgaaccagagcctgcaggcctcccctcagtgcttagccccacccatggttctccctgaccccacgagtcgcctgagctgctcacttgggagggggtccgggaaacggggccggaggggaggagaggggacttagtgcggcattaaatggttgaagtgccatggcacatgccctgtgtggcccgacatgccctggccacccggctgggcagcctggctgaatggccctcaaatgggtggacactgtggtggcttcaatgtgacaaatggaaaggtccccacgccagaacccaacatctgcacagcatacatcggagtgagctgactgaagcgcggctgctgagcaccaaggatccacacacactcaccgggccccatagcatgaggaaccttaagggatgcacaccgcggagatactcacaaaccgatctcgatcgctggccgaagggagaaacaactacaaccgcctaaccggaagcaggcaatagagtccacacacagggacacattaccctatgagaagacccacgacccttaacagaacaacgacgcaaagacgctccacaactggacaaccacgggacacagacccttgagcacgaccttgcgccagacaacaagaggaggacaactggcccccatcaagcacgaccataactggcgcatgaacttgaccctgcatggaggaaaagctagagtgcatgagccttgggaggccctgcaagcaactgacaatggagacaagatgatggcg

SEQ ID NO: 569161 - DNA, 147 bp, Homo sapiens
  misc_feature (14)..(14): n is a, c, g, or t
  misc_feature (46)..(46): n is a, c, g, or t
tcgcgtcaggcggnttcaccactgtgcctggataacaaccgcagcnggcagtgcgtgaggccacggtgaggcctgtcagctgatgctctgctacctatcaggactcctggttccttgccttctgcagctgtcctcctaagatctagg

SEQ ID NO: 569162 - DNA, 101 bp, Homo sapiens
  misc_feature (94)..(94): n is a, c, g, or t
gatcttcaagtgaacatctcttgccctgattgaaggctttgccacatgctggaaggccccctcccaggaagatgggggtcattaaaggaaactnaacattg

SEQ ID NO: 569163 - DNA, 434 bp, Homo sapiens
cgctgccccgcaagacggggtcaggcacctcctcccatctcctccatgttcccctcctgcaccacatccttgtgtccctctgcccccggtggcctattcatggcgtctcactcgccctgcaggacctgctaccgtttcccctgtgccgggcgccggcgtgctttgcagtcaggtagtgctcagggttgctacttaagtgcggaagttgctggttgacccgttgacaagctccactcttatgtgcatattaggttccaaacgctgggcttgtaggaagatccgggtgaggtgggcccgcgcttcagatattgtctcggaacctttcccccagcgtctggcctatgtctcgccagtcgcccctccggtggagggactgggacgaggttccaagtcctctgctcttgccgcgggcttgccgggtaccgcagctcgtc

SEQ ID NO: 569164 - DNA, 476 bp, Homo sapiens
  misc_feature (408)..(408): n is a, c, g, or t
caatcgtaggtcagaaaggaaatatatgcagttacaaatagacatgtcatttgcgccttcattctagactttttttttgagacggagtctccccggtcccccaggcaggagtgcagtagctctatctcggctcgacggcaacctccgcctcccgggtcatagctgtgctcgggcctcagcctcccaagtagctgggatcacaggcggccgccaccacgcccgggtaaatttaggtatttttagtagagacacggtttcaccatgtaggccacgctggtctcaaactcctgacctcaggtgatccacacgccttggcttcccaaagcgctgggattacaggcgtgagccaccacacctggctgatttcatttccttggggaagatacccagtagtgggttggctggatngaatggtagttctgcttttcgttctttaaggagtttccatactgttttccatagtggttgtactaatt

SEQ ID NO: 569165 - DNA, 702 bp, Homo sapiens
atgttcccccaaaaaagaatttggttttgtgcaacaatggaaatatttttgtgaattgggcttccagatttttaatttttatgccaaagaaaatattgggcccaacccattttttttatgatggatcacttaaaaaggtgatcccgcctctggggtaaaaggtcttttttcttcttttacagtgttcaatatgatttaataagaatagaacggtaatctatgacctaggggtttatgttgaataattagcagttgagaatggaggaattacttcaaagacatgctttccgttgttttcttgactgatctctcaaaccaatatgacggtgtcttttcaatcttcgacttttggctaataaaataagtggattttgttgtttaagatccagaaaaacttagcccgtaaatattttgctcaaaaagcatatagaggtattttaaagatccgttgatattctgtacatggaagactcatcctgattttaggtatcccacatgaataaagcctttgtatctttaaagaaaaaaaaaaagatctcgagactagagcggccatgcctggcccaaaatctgcaggtatttccactaacactcgcatgctgctaacgcgtgggtctcatgccctaagaagagttgaagtgcatgggatccatcatttcattatgtagccacaaaggttgacatccgatcaacacaagtgtt

SEQ ID NO: 569166 - DNA, 462 bp, Homo sapiens
gcggataatgcacatgccagtgcttgggagtacttttatcttttttttgcacaggctctctctgtgtcacccaggctggagtgcagtggcgcaatctcacctcactgcaacctccgcctctagggttcaagtgattctcccacttcagcctctcaagtagctgggattacagatgtgcgccaccgtggcataactaattttttgtatttttagtagagacggggtcttgctatgttggccaggctggtcttgaactcctggcctcaagtgattcacctgcgttagcctcccaaagtgctgggattacaggcatgagccagctcgcctggccaatcactgatctttttactgtctccatagttttgatgttaccagactggcattattgcatgtagccttttcagattgactttttttcacttagtaaagtgcagggcttcattatttcaaaaatgttgtgct

SEQ ID NO: 569167 - DNA, 363 bp, Homo sapiens
  misc_feature (48)..(48): n is a, c, g, or t
  misc_feature (360)..(360): n is a, c, g, or t
tgcgctccggcgaagtccgccgcgtgcacatcgactgccgcgccaccntcggtgaagtgagcaacgaagagcacagcctgcgccagtacggcaaggccggcgcgatccgctggaagggcatccgcccgaccgttcgtggcgttgccatgaacccggtggatcacccgcacggtggtggcgaaggccgcaccggcgagggccaggtccctgtgtcgccgtggaacaccctgacgaagggctaccgcactcgcaacaacaagcgcacgcagacgttcatcgtctcgcgtcgcaagaagtaagggctaggccatgactcgttcgctgaagaagggccccttcgttgaccaccacctgatggcnaag

SEQ ID NO: 569168 - DNA, 859 bp, Homo sapiens
  misc_feature (335)..(335): n is a, c, g, or t
  misc_feature (520)..(521): n is a, c, g, or t
  misc_feature (528)..(529): n is a, c, g, or t
  misc_feature (532)..(533): n is a, c, g, or t
  misc_feature (539)..(539): n is a, c, g, or t
  misc_feature (543)..(544): n is a, c, g, or t
  misc_feature (564)..(564): n is a, c, g, or t
gagtcgggaaaatggctgcgagtacctccatggtcccggtggctgtgacggcggcagtggcgcctgtcctgtccataaacagcgatttctcagatttgcgggaaattaaaaagcaactgctgcttattgcgggccttacccgggagcggggcctactacacagtagcaaatggtcggcggagttggctttctctctccctgcattgcctctggccgagctgcaaccgcctccggctattacagaggaagatgcccaggatatggatgcctataccctggccaaggcctactttgacgttaaagagtatgatcgggcagcacatttcctgcatggntgcaatagcaggaaagcctattttctgtatatgttattccagatatctggttgagggcatttaaaaattgtcatctgcctttagtggaaacatccatatttagaaccagtggaaaagttaatctttaaatagcttagcagtgggccattgaatgaatgtacttaatacatagcatataaaacagnnttcatanntanngttacnaggnnggtagagaagaaaatatctnaggatgactaaacagacacgtaacaactgatgcatatgtctgacagtaataacaggacttcatgcatgtgaattaaaattaaggggtacaacataagttaacacgcctggaatgacaataaaatatatagcaatacgtcaccatgaaaatgcaatttgattgataaatgcaggggaataaaaggattacctggatcaggccaggcacataacacaaaatagaagggatggagacaacacacatcaatataaacagtggagttcgaaattaagtacacgtgataaaaggaaccgta

SEQ ID NO: 569169 - DNA, 819 bp, Homo sapiens
acacagagccgagcgccagtaccgtcatttcatgtccacctcagagaatagcattccttaacgaacaccacggccaagtagacattgctcgtactcccatcggaaggcagcactggattcctggtcgggtggataccagtggtcttcagtctgatcgatgcaccgatgagaactctccttattgctgtgaagaggcagacaatgcatggctgactctactctgttaccaagtggctttacctagtgacacgtcccccggtctaggatcgaactgtataacacacgggagctctccaggacactcacccagcggacgctcgtgggggaaacctacctaaaccggacagagctccaaaagaagctagccaaccgacttggggctgcactgcggaacccccaccaacggtgacacctcgagctagtaacggcggctgggacacgacacagccagacgacgagaacttcgcagacagaaatcacgacatacactttttccaagaggcgcctcaggctacccctccaggtgggtaggacccgacccctgatcaactcccctgaaccgaatatacccagctagtaaactacgcaaattcctttccttaccctttcgcttacagaaccaagcacccttggtactttcactttctcagccatcaacaaccactcacaattgagccttatccacatctttcatgtccacaagacaccacaaccaccacacacaaacaccacacaaacaacccaacacacaccacaaccacccacacacaccacaaacacaagaaccccccacaccacaacacccaccacaccaacccc

SEQ ID NO: 569170 - DNA, 125 bp, Homo sapiens
catggcaagagcctctgagccagtgcagattcttcagtcccccagccctgcctaaacagtgcatgccagcaccttctgggcccaccccacgctgcctcccaatgcacttgaatcctgcaatgcac

SEQ ID NO: 569171 - DNA, 598 bp, Homo sapiens
  misc_feature (335)..(335): n is a, c, g, or t
  misc_feature (398)..(398): n is a, c, g, or t
  misc_feature (403)..(403): n is a, c, g, or t
  misc_feature (442)..(442): n is a, c, g, or t
  misc_feature (456)..(457): n is a, c, g, or t
  misc_feature (496)..(496): n is a, c, g, or t
  misc_feature (509)..(509): n is a, c, g, or t
  misc_feature (577)..(577): n is a, c, g, or t
gagtcgggaaaatggctgcgagtacctccatggtcccggtggctgtgacggcggcagtggcgcctgtcctgtccataaacagcgatttctcagatttgcgggaaattaaaaagcaactgctgcttattgcgggccttacccgggagcggggcctactacacagtagcaaatggtcggcggagttggctttctctctccctgcattgcctctggccgagctgcaaccgcctccggctattacagaggaagatgcccaggatatggatgcctataccctggccaaggcctactttgacgttaaagagtatgatcgggcagcacatttcctgcatggntgcaatagcaggaaagcctattttctgtatatgttattccagatatctgtctggggaaaaaanacggngggcgatgaaacagttgattgcttaggccccctgggaancggacaagtgaaanntggggcgcttggggggttgtgggtggggctcagcaaaanacaccaagctcgngaacttgatgggtttgggctttctctgtctggtgtggtgcttcgaaaactgggcttggttaacgaggnaattgatgtgtttgtggaagc

SEQ ID NO: 569172 - DNA, 434 bp, Homo sapiens
tgggtccgtccaagggcactttccagtacacttaccaggttacgactggtctcctctatataaagtgcgtaggggttataagtcaaagtgtccttggaagtatactggaggagggtgaggggcgggtgtgtacgcgctacagggcccgtgttccaactaagcactctactctcagttaacggtgcgtaaactcccacctattcagacccttataagttccaataaggggctatactcgagaatagagttaccggtggggataagaacatatgtgtcgcccatatttcgtgtgcgcacctctcaggtgggcatacactcgtgtgaccctaaagggtgtcttaaccggtgggggtaactgaggggcgtatacttgtggtgacgctcttaaataacaggggtatggggtgagaaagatgggggggtaataatcaggg

SEQ ID NO: 569173 - DNA, 1091 bp, Homo sapiens
ggggagtacgacattgcgcgctgagctgtcgggcgctgctgctgtgtgggccgccgtctgcggcctttgctgcgtgtgcgcctggcgctggctggccgtgcctgggaggaaaaccaattcttgtgtcctcggaggaccacagcccagttgggccccagtgcgaaacccagcctggatgcttgcagtcgcatggacgactgttcagcactgcagacctgctgaggacaattgaggaacccctgcactcgattatcacgcagcacatgagatgctgtgcagtggttcccactataccaagacatgagttccaggcctgagacacaagaagcttttggacattgtatgcccgggtccctgtactcagcaaaaagacggtgtctgaataccgggacgctgatctccaatgccagcgatgccttggaacaaacttgcgtcaccacaatgctggtgtctgacggccaagcacgtgccagaacagtggacgattcacttgcaggacgcaatgcccgagaaacggcaccatcaccattccaggatactggtatcgggatgaccacagggaacgagctggtgtccaacctggggacggattgcccagatcggggtcacacggccttcctggatgctctgcactacccaggctgagggccagcaagcacgatcatcggcccagcacattggcagtgggtatctctactcagcctttccccattgcgttggcttgacaagcagggtggcagcgttctaattgccgcgcatcggcgcaggacgccggtcggcaagacctggggttacccacgttgccattccaggcatggatcgctggaaggactgtaacggcagagtcccgcctgaaaacgcgacatcgggggaaggtatacgacacccgtgcggaagcagcgcacagcacgagttcaatcacccagccgtgcaccagttccgacctgtgcacagtgcggacgtttgcccaagccgtagtggaccccggtgctgcccgacgactggtgtgcatacagcaagctaacacggccacgcttgcgtcacaggtatacgccatagaacgctttgcaatgatagcgacgaatgaacgc

SEQ ID NO: 569174 - DNA, 1029 bp, Homo sapiens
ggcatggaagcgcagctgtgcgtggtgtacgggcaatgtgtgatgtgttggtgaaacaactctcttcaatatccattgtcgtttgtcgcacatgtggatttggggtctgccttgactgtggaccggctcaatgataaaagcctgggcacgcatcgagacagaagacatgggtgatgaagaagttgctcctggttgatgtgtgcaaggggactagtccctactgaatcagagaatctctatgcccgacacaatattattcctgcgctacagctcttctacaattattcgtgccgtacgatggtacatgctgaccggggcaagtggtggaatttaatcgctagctgcccttgtatcagtcgactgaaccaatctgtttgtgagcacctgcacgtctatccaagtgtggcatgtcgcctaggcttcgctagctatgaagccctagtgcctcttctggaaacggaaactacctctctctaggggtggcaggaggcaccgaggcactcggtatatcatagtccagagcccggacctatgttcccaaatgccgagagcgcggacatcagatctgtagagcctctgaaaactgacagttcggcatcatattagcaatagttgaacttgaaaggccatcaggcctccttgccctgtgggcggccccacccctcctccgcacctgactcgcttggcagatttggaactgggagagggtataggaagaaaccacagacatgcagggccccgaagacggaacgcacaaagaacgcgtacatgacaggcattggcatgggaccatccaagctccaggcaagggacgcgccggacccacaggttcaaacggaagtgcggtggcccccgtgtccgagagaccagaggggtagtctgaaccctatcacggggagaaatgttaacacccgagaaggagatcacgggtttctatctcgaggagcgagagcacgacgcaaggacacacagcaggggagataaacaacacacaacacaggaagtccacaagagaacgaagggacacat

SEQ ID NO: 569175 - DNA, 115 bp, Homo sapiens
gatggatggatggatggatggatggataaatggatggatggatggatgaagggtggttggatgggtggatgcatccatgaagaggggcctctttgtccctagggaattcccccct

SEQ ID NO: 569176 - DNA, 448 bp, Homo sapiens
ggaggttgaggctacagtgagctgtgattgcaccactgcactccagcctgagtgatggggcaagaccctgtctcaatttaaaaagaaaaagaggccgggcactggtggctcacacctgtaatcccagcactttggtgtaggctgagagtgggttggatcaccatgaggttgaaggaagtttccggaggcaccaagccccttgggccaaacaatagttgaaacaccgtctctactaacaaatacaaaacaattagccatggctgctgggttgagcatgggaagcactgtaaatcacacagacataacataccagagtgaatggccttgaatggggacacattgggaatggaaaaaatttcaaagggtgttttgggaaaaagcagcgccgggaggggaagggggcacaggaaaagggtttggacaaggttgaaggcaaggaatgaatttg

SEQ ID NO: 569177 - DNA, 810 bp, Homo sapiens
ggcccctcggacggccacgagactcggacatctttccaggaacagcgtgaggaggacagaagcatccaacaggactgctcgaagcccaccctgcgaacactgctgctaccatgcccaagagaaaggcacacaaggagatgctagaggtgataaagcacaggtgcacaggatgagccacagaggagatcagctcggtgtgtctgttaagaccagctcctccaaaaccagagcccaggcctaaaagaggcctctgcaaagaagggagagaagcttccccaagggggagacacggggggaaagcagatgctggaaaggatggaaacaacccttgaaaaaaccgagatgcctctacactccagttcccagaaggcggaggggcactggggaatgccagtgtgacaatgtacattttgagagctctgtactttatagtgactctactgtttgaaatactatttttttaaatcaaggttttataaaagtgtaggaattgtgggtttttaagtaatgtgtgtagcacacaggacacttcccttgtgtctttggcgaacagggcacgtaccactaataggggtgtatctcagacaactgacttgaacataagggaaaactaggatttcctggtcgggttgtggcacgattggtcttgattccctggattccccaggagagatttctgacattaacgtggtcagccacattggacggaagccttacaggggggaacccaacacttggtgttctctttccggatggcacagtatatgggtccttaacggagagttgtgtggctggacctaaacggtggtg

SEQ ID NO: 569178 - DNA, 142 bp, Homo sapiens
tcattacatacaaatagcaagaaaatagctgggcaatgttgtgggtgctctgtaatcccagctgcttaggaggctgaagcaggagaatcccttgaacccgggaggtggaggttgcggtgagctgtgattgtgccattgcact

SEQ ID NO: 569179 - DNA, 170 bp, Homo sapiens
cggggagtgccgagagaatggcatcacgctgcggacgatgcgggacttgggaaagaagaagtgaggctccggtggggcaggctgaagggcaggtagtggtatgtatcctggggctcccgggtgaagaatctgtcctggaagagctcgtctatgatgctggacgcgcggct

SEQ ID NO: 569180 - DNA, 316 bp, Homo sapiens
  misc_feature (30)..(30): n is a, c, g, or t
  misc_feature (32)..(32): n is a, c, g, or t
agccactgcgccccaccccatttcggtgtnanctcagctcacttcaacctacccctcccaagttcaagtgattctcctacctcagcctcttgagtagctgggattacaggggtctgccaccacgctgggtgattttcctatttttagttgacactgcatttcaccaggttggccaggctggtgttgaactcctgacctcagctgatccacccgtctcggggtcccaaagtgttgggattacaggtgtgagccaccacaccaggcccatattttcttttagacatgcaggcaatgttggtgggtttgtctgttaaga

SEQ ID NO: 569181 - DNA, 232 bp, Homo sapiens
tgttacctgatccccaagcgcgtttgatgctggcgcggatggtcggccacattacctacctgtccgacgactccatgggcgagaaatacggccgtggcctcaagagcgagaagctcaactacgacttccacagcgtctaaattcccaggtggaaaagctaccctgcgttaccaggggcgacggagttctcgcgggcgtattcgacgccaaataaccttaccttgcttgatga

SEQ ID NO: 569182 - DNA, 440 bp, Homo sapiens
gggcctctgagctgctcagctgggtctcctgtcctagagggaaggtggcccagagtctttggtggagcggaatctgtagatgaggttaagggactccagttgccaaggttgatctgaaacaggcagggagctaagctcatcagaacaccaacagattcatgttctcgtcttagctttcatctattctggtctcaatggcttcgggaaacacacatatacacatacaccatgcccttgagaccagaacagattcatgttctcgtcttagctttcatctattctggtctcaatggcttcgggaaacacacatatacacatacaccatgcccttgaactcaaagcaaactacgctctcagggaaatacaaatatcacgttctcatagtcttctataaatagctaagctatactttacagctataagaatcgcgagcggccgct

SEQ ID NO: 569183 - DNA, 138 bp, Homo sapiens
ttcgaagctgacatcatgggaaaagtaccgtaaatgaatggtatcggataaacaataacgggagttcgaggtaatcccgtttaacaaaaaagtaacaaaatttcagtcgtggatttagagggaccggttttttttttt

SEQ ID NO: 569184 - DNA, 106 bp, Homo sapiens
gggaaaacaacactggggggttcctcagccatttccttgacccttctcctcctcaagcctctgctcttgactgtcacaaacctctttttacctccgtattgttctt

SEQ ID NO: 569185 - DNA, 203 bp, Homo sapiens
  misc_feature (138)..(138): n is a, c, g, or t
  misc_feature (174)..(174): n is a, c, g, or t
atctagaggatcccgttactgtggtgtaccgtcagttcagccactgttgaggctccaccaccagagatgtggctggcagcaagaaggaaccagctacctcccctctgccctccaatctgccagcagcgccccccatgngcagaaaggaaaaccagctagggtgggaacgtgagngaaggtgtttgcagacttcagcaccctgt

SEQ ID NO: 569186 - DNA, 102 bp, Homo sapiens
tcggcacgggatttgggagtgtgtacgggggggctgtaacactcggggggggtgcgatgaatagcgaggtgcgatgaatagcgaggtgccgatgaatagcga

SEQ ID NO: 569187 - DNA, 141 bp, Homo sapiens
cagagggaggcggcactggtctcgacgtggggcggccagcgatgaggccgccagtttcaattacaaacaggtagtttgactcatcagatgaggagcctattgaggatgacagactccaattcatatatcatggctatcttt

SEQ ID NO: 569188 - DNA, 910 bp, Homo sapiens
ccacgcgtcggacccacgcgtcgcggacgcgtgggtcgacccacgcgtccgccggctccagctccgccgccagctccagccttgctccccctcccaaagtccccgtccccggagcggagggacctagggtccctctccgtccccccagcccagtacgcgtcagaccaggggcctcgggtgggcattgcccccgcatagaacttgacttccctcccacgctcagcgcctgtctcagtgttcccctagctcatgacatctctttcccgattcctggagaagacctactacccaaacttcaatcgacacatcactcattgcatacttgttcaaaaactcataggaagttcgccgcatcagttgacccgagaacttctcagggacagacgccacgtgtcctgttttgcatgtgagtgtatcacctgtcccgatattctggaacctcattcgagcaaactacattctcaactctacacacacgtgtgtatagaaggtggttctacaatagaccatgcatgccgttccacacacggtctgggtagatattatagcaagttcacacagctaacttacgatgggaaccatgacacgtatcagagtgggagtcctggtcgtgacaccaaagcattttctgacgtttccgggtgtcaatcatgaattcaaccccttcatggagcatccatcagggaacttatctcccatgagtaccctgggagtacaagtgacccatcattgtccgcacgtgtccaggtgaagaagaaccgtcgaagagaatacaacaacaggccacaacatgaaagcacaagagagttaacgacacgcaacaatcataaaccggagatatggagcaacatataagaggggctcaacgaacaacaatagcacatggggaaggctggcaaaagtctccggc

SEQ ID NO: 569189 - DNA, 904 bp, Homo sapiens
  misc_feature (303)..(305): n is a, c, g, or t
  misc_feature (332)..(332): n is a, c, g, or t
  misc_feature (335)..(335): n is a, c, g, or t
  misc_feature (346)..(346): n is a, c, g, or t
  misc_feature (350)..(350): n is a, c, g, or t
  misc_feature (361)..(361): n is a, c, g, or t
  misc_feature (373)..(373): n is a, c, g, or t
  misc_feature (378)..(378): n is a, c, g, or t
  misc_feature (392)..(392): n is a, c, g, or t
  misc_feature (493)..(493): n is a, c, g, or t
ctaacatgccctacttggaaagatctaagatctgaatcttatcctttgccatcttctgttaccatatggtgtgaatgcaagtttaattaccatggagatgttttacaaacttttgatgtggtcaagttcagttttagaacaagggagtctgttccagatcagggccagaactgtgcccagtgcccaaaggagacaactaactaaagtagtgagatagattctaagggcacacatttatccaagtcttgccatatttcaagcaaagaggtgcccaggcctgaggtactcacataaatgcttgtnnngctggtgatttaaccagtgcttggaanaantcttgcttggntatntctgcatcatntcttaaggctgncttcntctctgagtacgtngccctctgtgctatcaatcatcttatcatcaattattagacaaatcccactggcctacagctcttgcttctgcagcacccactctagtctcctacggtagngatgaatcacgttgctggtaccaaccagggacgcgcagctacccacccccaacatcaactgcccaacacgaggacccaggaaccgttctgttataccctacaggaccggcacaacacacgtacggccgcgcaaacgcgacacacggcggcagcagcgcctcccaccccacacccggaacaaccggccatttcaaaatgacaaagggcctgaagccacaagccacaacaccgcagcgcgcccaccacacactgcagcacccaacaaaccaccggtcagagacacccaaaccaacacaaaccaaacgcacagcgcgaccgaacagaggacaaaccgcaaacaccacacaacgcacaacaagaagaagcaacgacgcacaaacacaacacgccaccgaaccccacacacacgag

SEQ ID NO: 569190 - DNA, 385 bp, Homo sapiens
gcacgagattagctcttagtaagattacacatgcaagcatccccattccagtaagttcaccttctaattcaccaggatcaaaagggacaagcatcaagcacgcagcattccagttcaaaacgtttagcctagccacacctcacggaaacagcagtaattacctttagcataacgaaagtttaactaagttatcactaccccagggttggtcatttcgtgccaccaaccggggtcacacgtttacccaagtcatagaaccggcgtaagagtttttagatcacccctcccattaagttaaactcacctgagttgtaaaactccagttgacaaaaatagcttcgaaggtggctttacatttttaccaaaaattgctagcccacctgga

SEQ ID NO: 569191 - DNA, 109 bp, Homo sapiens
acctgtgttgaaaatgggaagtgtcttgcatgtagaaagccgtatcctgaggacccagccgttcataacccagtgtcccaggcagtcttgcaaaggtttccgggtgaga

SEQ ID NO: 569192 - DNA, 230 bp, Homo sapiens
gtcaagtctatcccttcttacgtgggaatgttggggcatccgggtgcacaatctgtgcaagcagggcactgtgtccagaagggccccaagcttggtttaatgctcttatgttgccattttcaaattctttttcttttttcttttcttttttttttttttttggagacagagtttggctcttgtggcccagggttgagtaccattggtgtgatcacagctcattgtgggga

SEQ ID NO: 569193 - DNA, 119 bp, Homo sapiens
caggagggagggcgtgggtggaacagccaccttttcgggtcggcccagctctggcacgggagcctggttccccatctcgatgagctgctctttctccaggcgggaggctgatgattttt

SEQ ID NO: 569194 - DNA, 155 bp, Homo sapiens
ttgctacactaggtcagagcattgtgctaagtacgtacttacatatattttcctatttaaagaagtgtatggagtggcttaatgggcattatgtgatttgatgggttacaactcatcaaattgtaagcatttgccacaaatgaatcgaattcatc

SEQ ID NO: 569195 - DNA, 731 bp, Homo sapiens
  misc_feature (75)..(75): n is a, c, g, or t
  misc_feature (91)..(91): n is a, c, g, or t
  misc_feature (103)..(103): n is a, c, g, or t
  misc_feature (200)..(200): n is a, c, g, or t
  misc_feature (350)..(350): n is a, c, g, or t
  misc_feature (570)..(570): n is a, c, g, or t
tcactgagctcaccaacacagccaggaaaagaacagaagtgtgagaaggctacattcctgagaccctgagaaaangtacctgcataagacngagatgaaattncctactctagttatgattgaaatcccaaaaagaaaagaggaaaaaataatggagcaaaagaaatatatttcaaaataactgccaaaaatattctaanagaagtgacagaaaatcaaacttcagatataggaaactcagagaatgtcaaatagaacaaaaagaaataagaattccgtcttgaaaaatctttaaaaaatcaagtctaaattttatatcttgctccaaatatatagagatataaataggntatcatcaagatatggagaaagccatatcatggaaacactaaaataaggctgtggaaggactacattgatattagacacaacagagttcggaacaagaaatagtatcagagatgagagataatagataatagaataatcaattctcaagaagatgtaaacatcctactaattagggtatgcagctaacaacagagcctccaaatacgtgaggtaaaacangaaagaaatcaaaggtgaactagaaaaatccaaaattatatttgcagacttcaacacttttgtcttagtaatggaaagactaggcacaaactcagtaatcatgtggaagataagaacaacagtatcaccaacaagacatccaatcttcaatggcagatact

SEQ ID NO: 569196 - DNA, 216 bp, Homo sapiens
caaagtgggggattacagtgcgtagccgcgtgccagcaaggcgggtcttgctgtgtttcccagactagactggtcttgaattccaggctcaagagatctcccacctcagcctcccacagtgctgggattacaggcgtgagccgccacacccagcctattcaaaatttttttttcttagagacagggtctttgttgcccaggctgggcttgcagtgg

SEQ ID NO: 569197 - DNA, 221 bp, Homo sapiens
  misc_feature (214)..(214): n is a, c, g, or t
caaaagcggcgcaacgccagatccttaatccactgagcaaggccagggatcgaacccgccacctcatggctcctagtcggattcattaaccactgtgccacaacgggaactcctgttttgtctctttagggccgggccgtacccatggcacatggaagttcctgggctaggggtcgaatcagagcaatgccagaccccgcttttgtgttccggngatcctc

SEQ ID NO: 569198 - DNA, 616 bp, Homo sapiens
tagccattactgtctgtttcttgtaactcaggttaggtttggtctctcttgctccactgcaaaaaaaaaaaaaaaaaaaaaaaaaaaaaaaagccggacaaaaggatgcaaatgaggaggacacgacaccgtcaccaccccgaaatcgcgggggttgaggaggagagaggaaattgtctttctttccccctggagaggggcgaaacaaaggctatctcttccatgggggcaccaatttaaaggtccccccaaactgaggggggcgctcaccatctgcggacaggtcgccctctcaacgaatacacttaacccgtaccttttccacccccgcgggggggtggacaggcaggggccaacaatctttccgggcggggccagggcacagggtcatactcccataatcttcaacaggggacacattgggggggcgggccatatctaggcacacgagagcgggcggccacgggtttaaccccgtgtggattggggtggtccccgggcactctggacgaaacccaacatcgggggggcgcacgttctcaccaatactcgtgtaccactttcaagcggccccattaagcacttgacgctggtcccccaaaacaaaaaataacca

SEQ ID NO: 569199 - DNA, 260 bp, Homo sapiens
  misc_feature (58)..(58): n is a, c, g, or t
  misc_feature (87)..(87): n is a, c, g, or t
  misc_feature (109)..(109): n is a, c, g, or t
  misc_feature (152)..(152): n is a, c, g, or t
  misc_feature (194)..(194): n is a, c, g, or t
  misc_feature (222)..(222): n is a, c, g, or t
  misc_feature (251)..(251): n is a, c, g, or t
gggcactgccatgcgtggtcacgtcttgatgccttcaggggctcagtagctatcaaanaggcctggagggcctgggcaggcttgacnatgcctgaccgagtcggtgganagtttgcgttttacacccagcgatgcttggggatggcaaaaanatggatggataatgagtacaactgcaaacagcactgtacacntgtggtgagccaagaggctgggacggangttaggccaatgttgctgctgactcatanacccacagc

SEQ ID NO: 569200 - DNA, 737 bp, Homo sapiens
acctgttgatcccacattctacctaccagtattcttaagagtcttccagatacctggagtccatcaggtttatatacggaagccttaggggagaagagcagcctgggcctggacgcagagaggccttggacctgtcagagaactccctcgagttctcgggaacccccgggacccgtcacctctctggcccactttccccggcctcctattctcagcccgagttttcttggtgtgaccctccggagttctacaagtgtgccaccacacacggaagggttctcttttctgttcagggcggcccccttcacgggaagcaccccgctcacccctcacggcaatttcggactggaggggcccccagaaggtcagccacttactcttaaacgagttgtttcggagtcatattgagtctcgttccgcttgttcctcttgtggtcccttccctgtagtggacttgagatccattttgagttctaatttgtaacgtgtttctttgcgtgaggcaccccgccactgtctgttgcgttttcctcggcacgcgtgtagggcttcacgcttcctgggttttcacccctcctcgccggccctcttggggtcctgagggcccatgggtccctttcacctttttctgcatgatggtccgataactgatttgttttggcattcacttcccgattaattttccctgtttgaagtaattgcaaatgtgctttaccgaataaaacatttgaatttta

SEQ ID NO: 569201 - DNA, 385 bp, Homo sapiens
aggagcgtatagggatggcgcgttgtcagggcaggcgggctgataggtggagtcagtgggtatgtggtagagtgagacgcatgtatatagcagagatatatccgtttacaagccaagtcactttctcatatacagcatgttaggaagcatgatttgtttttctatcatctattcctccaagcatgtttaattgaagaaagtattaatatctctttagataagctggtatggacctaattgggtttatgatgtgtcagagctaattcatgttcagggtgagcgtggtacctaccaacaaatttccgggtggggtatgcaaatggttattttctttttactgttgttaaatgggactttctgttaatgaaaagcactattcccaaga

SEQ ID NO: 569202 - DNA, 786 bp, Homo sapiens
  misc_feature (138)..(138): n is a, c, g, or t
  misc_feature (147)..(147): n is a, c, g, or t
tttcgcgtctgccagcctggctggcagtcctgtctgtccatcccgccgcgccggggcagtctagtgctggagcgggggctcaggcggcggcggcctcgacgcgagtgagtgtcgtggttggggtgctggacccagagntagcctacncgctctgccgtgcctgtggcctctagtttcacatctgcacatgggggtgacatccctgccctgctgctgccaggagcgctgtgagtcttcaggcgtggatcagcctgggggaagcataggcgcttcacaggcctggcttcacatgcgggagggagacgcatctgagaggagttctccatcatcccctgctttgtcttcgtggagtcggtgctgctggcttgtgatctgcttgcttacgctgagtccggacccttccctgtgccacccaggattcttctgctatgacagtacctacgccaagccctacccaggcctgaggctgccagccgagtgcctcctgctcttgtctacgcactggtcactgccgggccaccctcacgatcctgctgggagagctggcgcgtgccctttttccctgcaccaccttcagccgtcccagtcatcggggagagcaccatcgtgtctggggcctgctgccgcttcagccccccagtgcgggaggctgtcaagcttcctgggggtctactcccttcgggcctcttcaccacgaccatcttcggcaacgcggggcaggtggtgaccggaatcccagcccactttcttgtccgtttgcgcccaattacggcctggtgcttccac

SEQ ID NO: 569203 - DNA, 122 bp, Homo sapiens
gggtttttggggctttaaaaaaaaggtttttccggcggccctttttggggggggtttgaaggcctttttaaaaaaccaattttttggggttttgggggggggcccggaaagggcccctttta

SEQ ID NO: 569204 - DNA, 1031 bp, Homo sapiens
agcggagaaaccggttggccgcgcaggattggacggactccctatccgcaaaccgcgcactcgtgccgtgccgcgccgatttgatttgtatccattgtctagcaacactgctcacttaacgacttatctgggatccaggaccctagtgcgagctgctacactgatactcttgagtgaagaacggagagctctaatttatgcgtatgtccttgtcgggatgtgaccaatagctagacttctggtgttgccgccgaactgatgcttctgatgtgactgactggtctgttcttcatggaaactctcgagtagagtctatgagcgagcgactgaccgaagtgacggtctgcatggtcccctcgagcatgattgtccgcagggtagtacgatcaatgtaggtccttcgctcaagattgaacgttcttctcatattcctggtgcataggctatgggtgcggcgctgcgcaatctgagcatccgtcgcttccaaggctgcagtggcatacacgcatggcgattgtgttcatatagctcacgcatctagagattccgctaaattatcaacttgtggcccgagattatggaagtttatagtatcaaagtagcctgcttgcgcttgaactatgtactacaatgccaccctaattcggaactcgttatctgtttgacgatccgctgtgctagagcaaagaatgcgcaacaattcgatgaggactatgggaaagcaacgggtggtcccaaccttttgggtcgcacttgatgacttggaagggcgttgcaagcccagctttcggtcacggcttggtcgtaatctcgagtaaccctggatgtgacaagtagcccagcgaaaacagtggtatgcccttgcgttcggagatggcgttacgaacctcttgggttgcagacgccccggggagaaacctttgttccatccagaggcccatacattcaatgcttcttgggaagtgccagcgttgaatgtgaacctaaggggaacctgcctgggttcctttaagggggaaagtgcgaacaag

SEQ ID NO: 569205 - DNA, 136 bp, Homo sapiens
tgatccctttatgaacctggtgatagatgaatgtgtggagattggactagtggacaacagaacaatattggaatggtggtaatacgagggaatatgtattattatgttagaagccttggtgtagatactgtaggtg

SEQ ID NO: 569206 - DNA, 91 bp, Homo sapiens
taatgcagggatgaagtagttttaattgactcgagttgtcttttagaaacactagaaacatatctgcgaaaacacaggttttgcactgatt

SEQ ID NO: 569207 - DNA, 160 bp, Homo sapiens
agagtagcaatctgtcacctcccttacccaacacataatactacacttaccttctatgtcaattgttttcatcacatttcccaaactgatcgcatatctatgtgactcacattgaatatagacgagaggggcccatcacgtacgccaagttatcaatact

SEQ ID NO: 569208 - DNA, 100 bp, Homo sapiens
cgatcttgacatttcatataagtattaaggcctatctaaatccagtcacagatctgtcgagtgagcacccctaagcggcttgctactactcccaaggcac

SEQ ID NO: 569209 - DNA, 718 bp, Homo sapiens
gcagctgaccgaagtgtctaaggaaagagagcgaggggagcaggagaggcgagcgggctgaacgcaggaaaggttgaaacaagagagagagctggtgttaacgtgagctgagccagggtcctgtgccgtggagctgatggaacgcgtgcatgataggatgttttgtgaggtgatacacctgctcccaggagttgcaacgacatgcagtagagacagaccacgagggtccgtgtggcccgttgctgtgaggatgtctagtgcccacttagtggacttgtttctcagtggcaggcaaatcttccagactgcaacacaggcagaccctccaggagcttcagtgcttctgcaagtatctacagcggtggagcggaagctgtcacatgcccgcaatgaaactgaggcgccaaatgcgtggctttccctgctgcgccctgctgctgtggacgtgatgcgaccggctgagggcagctggcgcccagcgtcagatgtgccccattgctgaaggagaacctggccaggggcctcctggacctgggccatgcagggcagattgggcatctcctgcaccagtgttaaggcggctcagaaacaagacagctcaccagatgacggttcagcacttctaccagcagctgctgagtgatgtggcatgggcgtctctggactgccatcctcgtggatgagcacctcctgggaggcaggagcatgtgttaggaac

SEQ ID NO: 569210 - DNA, 140 bp, Homo sapiens
cacgaggggattgtgagaatgggagagtccatgattacatatgcagaggttgatcggcaggtgatcccaatcattgtgaagtgcctggatggaatactaaaagcagccgaatcaattgatcagaaaaatgattcacagct

SEQ ID NO: 569211 - DNA, 695 bp, Homo sapiens
catcggcatgccaacttcgctgagcagattggctgtgtaggagttgcaccagcgtgcccgggagtacatactacctgcattaatgaatcggcactgcccggaacacaactacaaccatacatctagcaacgccacacaactagatacacactattacaatcacaacaacaccaacaacccaatatccccccacaccatataccaccaactatataaaccacttacacaccaactacaaatacaacacacacaatcactcacacacaacacacacacctagacagcaccttagacaaaccatacaagtcactactttcttatccctaactatacactcaaacccacacgacacaataacacgccacacgcctgctaatatcaatatctaatatatcaactctacacacccatcaacacccaatacataaattgcactcaacaaccacccctcaccacacaacaccgacatacagccaaccacacgagcacacaaaaccaaaaacactcacaaccaccacccacacccacaccacaccatcacacatcaccccacacacctcacctaccaaactcccaacccccgcccactccacactatcataaccccaccacccaccaacattacccacccccactaactacaatccaacactccataaatactacaatccccacaatcatcataccccacacac

SEQ ID NO: 569212 - DNA, 142 bp, Homo sapiens
gttatagaggatcccccctgaagctgctgacgttaaagtagaatattggtgagtattaagaggggggcagcacattggaagcctcatgagtgcagggccgccaattgtccagagggcacgatgtggggatgtacttgacccc

SEQ ID NO: 569213 - DNA, 322 bp, Homo sapiens
cgacttagtagatcccccagatattttctatgagaaacataactggccacctatttcttaatatcaaaatgggtaagtccgtgccttcctcttcctcctgattatatacaacatatctcctttcaagactatgatttccatcatgcttattccttcacaaatctaaaccttgaggtgatatgaaggaaaccaacatcaagaaaagaaaactcaattcacaaatgaagaaaactggcaggtatacaatacacccccagagcatctcaatatccctggcacagtacaattcaatgtactgctacagcccatagaaaatattctg

SEQ ID NO: 569214 - DNA, 236 bp, Homo sapiens
tcaggtgtgagacggttcgtcaccgcggtgtgtgtgagcaataccgggtgattagtgtcaaggtgcaagccagtcgaatcggttgatctatcgcccattttatacagacagtggtacagcagttatacagcgaatcgatagctcggggtgatgcacgaagtatggcgcgtgaaccttgcagttggcggtcgggctgatcggttatggtacactatagatgatctctgattcatcag

SEQ ID NO: 569215 - DNA, 314 bp, Homo sapiens
gtaaaaaggatcttattctgttgcccaggctagggcgcagtggcacaatctcagctcattgcagcctcaatattccaggctccaggccaaacaatcctcccaccctctgcctcccaagtaaaggcgctcgccaccacacctggctaatttttctattttttgtagagatgtggtctcactatattacccaggagttcaaggctgcagtgagctatgattgtgcttatgaatagccactgcactccagtctgggcaatagtgagtcggtcaacccccctttccccctccgccccatacctcttcaaatgtttaaa

SEQ ID NO: 569216 - DNA, 388 bp, Homo sapiens
aaccggcttcatttactaccgagtagctgggaccataggcattaacacatgccagccaatttttgcacccctagtagagatgaggttcaccgtattggccaggctgttcccaaactcctgacctcaagtgatccacccaccgtccttcatcatacctacctcagctatttcacttgtaaagtggactcatgatacctgctcctgggaacttgttttcctcactccaaagcaaaactggaaatatgctttgtaaatttttttagtaaaaagtgtgtttatataaagcactgaggacgctctaatttttttttttttttttttttttggaaaaggagtctaactctgtggcccaggtggaagtgcagtccccggggaggatatgatgaag

SEQ ID NO: 569217 - DNA, 162 bp, Homo sapiens
  misc_feature (14)..(14): n is a, c, g, or t
gcattttttagtanagatgggggtttctccttgttggtcaggctggtctcgaactcccgacctcaggtgatccacctgcctcggcctcccaaagtgttgggattacaggcataagctgatgtttgtaaagcgctttgtaaataaacgtgctctctgaatgcc

SEQ ID NO: 569218 - DNA, 161 bp, Homo sapiens
tttcctcttgtgtcaaattgggaaaacactacctacccatccgtctgctgcgaggtgtcgaagggattatgctggaaagctggctcacacagagaaggtgggcattaagaggtcatacctcagtttctctactctctcacaagtaaaatctgagtagacag

SEQ ID NO: 569219 - DNA, 118 bp, Homo sapiens
gtaaaaaggcaaagcccctgataggccggggactcgtgtcagtgagcgtcttcgtggagccgggctgagactcaatggggcaaaccacactcctgtcatatcctgcccatcaaactgc

SEQ ID NO: 569220 - DNA, 241 bp, Homo sapiens
tccaatgaggcttgggacttgggacttttgagttaatgccagaatgagttaagatttggggggcctattggaaaggcatgattgtagttggcaatgtgagaaggacatgagatttggagaggccagaggtggaatggtatagttcagatatttgacccagcccaaatctctggtggaatggtaatccccaatgctggaggtggggccttccttgtatgatgtgtttggaacagattgcagt

SEQ ID NO: 569221 - DNA, 942 bp, Homo sapiens
aggacccgttcgccatgggccgtgttgatccgtggacagagtgaagggcgccgggtctgtgttccagcgcgcacgtgaagcaccgtaaaggcgcctgcgccgccatgaactaccgcctgtggattgcgctgagacggcacggtacatcaagggcatcgtcaaggacatcatccacgatccgggccgcgtgcgcccctcgccaaggtggtcttccgggatccgtatcggtttagaaagcggacggagctgtacattgccgccgagggctttcacacgggccacttctgtgtattgcggctagagaggcccatgctccaacattggcaatgtgctccctgtgggcaccatgcctgataggtacaactcgtgtgctgctggaaggagaagcctggtagaccgtgggaagctggtccggtgcatcagggaattatgccagccgttatctcccagaacctgagaccaagaagacccgtgtgaactctgccctccgagttccaagaaggttatctcctcagcaatagagctgtgcttggtgtggtggctggaacgtggccgacttgacaatacccatcttgaacgtggcgtggcgtgaccataattataccgcaatgaggaactggtggccactaagtacggggtgtggcatgaatcttgtggagcatccttttggatggtggtaaccaccaggacattggaagccgccacatcgtagaaatgcccctgtggccgcacgtgggtttcattgtgccgcgactgacgtctcgggagcaacggggggcaaagactcggctcggctcaaaagttggttgccaacaccaaggggggtcaattcctcgggccagttcgcccgtctggagggccagggctaaaaggcggcacgggggacccggttgggacctggaggcccaaggaagagggcggggtaaaacacaaaataccaca

SEQ ID NO: 569222 - DNA, 168 bp, Homo sapiens
gactctagagtctcccccttaaacgtgttatcctgtaccatctactgtggaggctgagacaggataagtcacttgaactatgggaggtggaggctgtactgagctgagactgcaccactgcacttgcactccagcctgggccagacaaagcaagactctatctcaaag

SEQ ID NO: 569223 - DNA, 665 bp, Homo sapiens
ctcacttacatccgcaagcgatctgtgtccacgcaaaggttcacaaacagacaacaggagtcagcagctccaaacccggttacccctgaaaccccctcatggggattcaacaacaaaacgggcacgggtgggagaccagcaaacaccagccgtgtaatggagaatctcacacaagaggccgttgccttccagacacgtatacagaccccctcaccccaagattcgggagacccgctgtgttacaagcacccctctaggcaggaagtccaaaacgagccacccacgcgccataaaaatgggagcacccgtcctcacgcggcacgaccacacactggggcctccctgacaccacggtatggccaacgggctcatattgcgcccacacattacagaaggtatatcaatagagagcccaggtatgctacttgccctgggcaacacgtgattgaaagaatgatggcaaagataattccgtcgaagcaagtccccccctcagatgggtcaccagaagcgtgttcttggtccccacagaaccgttacagaaaacacacaggggggttaaagtgcgccttcatcaaagctgcctcgtcaaacagtgctagttgtcttccaactctcttcagccccccaaaaaaaaaaacaccaaaaaaacttttaacataaca

SEQ ID NO: 569224 - DNA, 328 bp, Homo sapiens
agatggcggaggtgcaggtcctaggtgcttaaaaagtcgaggccatctactaggcccgcctggcgcattaagtggctaaaaaggaactgctgggccgaaggtgggtggtcgaacgctgtaaggaataaaatttcttggaatttcaaaaaaaacagttaagaacctggctttcctccaaggcggtaaaaccacccttccaggccctaccacttcgggcccagccgaatttttggagaccatgcaggaatattccaaaaaaaagaggaagccttttgacctatagatttagaatcaccgtatgaaaaaaagggatgatgtcatctccaaa

SEQ ID NO: 569225 - DNA, 160 bp, Homo sapiens
cttatcttcccacaggcagctgctcttgggtatagacgcaggtcacgagtggcatcacaacaaaccccagtacagtccagcccggccacagccggcctccttgtgtttctgtagtcttccctgctgctggccacatccttaaccctcctggtgcctctgg

SEQ ID NO: 569226 - DNA, 340 bp, Homo sapiens
gctggattacagatgcataccactatagctagtctttaatttatttttctttttagagatggggtctttctatattgtccaggatggtcttgaacgccaggcctcaagtgattctcctactgcagtcacccaaaagtgctgggattacaggtgtaagccctgcctgacctacagccatgttctttactattgggtaaatggttaaaaaaaaaaccacactacagtccaaagtagagcacagaacagtttatgaatgctgacatttatccagtttatattggtggagcacagtgtttttaatgaattcccattcaagtaaagcacaagaactagccttaat

SEQ ID NO: 569227 - DNA, 536 bp, Homo sapiens
  misc_feature (14)..(14): n is a, c, g, or t
  misc_feature (39)..(39): n is a, c, g, or t
  misc_feature (65)..(65): n is a, c, g, or t
acttccaccagacntccagttaggatcctgctgttaaanggaaactaccaagagaaggacatccnccccaaaaccccatctgtcgtcaccatcatcaaaggccaaaggtagatgaaccccaaagatggggagaaaccagagcagaaaaactgaaaattctaaaaatcagagcacctcttctcctccaaaggaatgcagctccctgctagcaatggaacaaagctggacggagaatgactttgacgagctgacagaagtaggcttcagatgatcgctaataacaaacttctctgagctaaaggatgaggttcaaacccatcgcaaagaagctaaaaaccttgaaaaaagattagatgagtggctaactagaataaacagcatagagaagaccttaaatgacctgatggagctgaaaccatggcacaagaactacgtcacacatgcacaagcttcagtagccgatttgatcaagtggaagaaagggtatcagtgattcaagatcaaatgaatgaaatgaagcaagaagagaagtttag

SEQ ID NO: 569228 - DNA, 187 bp, Homo sapiens
atgtaaaaaaacttttttaaaattcctttgatcaccttcccagattttctccaattggaagtttgctctttttcctttttgaaaattagtaatgaaattgtcatggggaaggtaacttgaagaattacgtaaaattcttaattccttcggccagggtacaagtggctttccccctgctactcccagc

SEQ ID NO: 569229 - DNA, 235 bp, Homo sapiens
ccacctcagccttccgagtagctagtactacaggcgcatgctaccatacccagctaattttggtatttttagtagagacagggtttcgccatgttggccaggctggtcttgaactcctgaactcaggtgatctgcctgcctcggcctcccaaaatgctgggattacaggcgtgagccagcacacccggtgggttgtctttttatagttgagttgtaagcatgctttttaatattc

SEQ ID NO: 569230 - DNA, 152 bp, Homo sapiens
gcagcgtcatgtggagtgtctccagacttgacattgaggtgggagtgggagagtagtagagtgagatggtcggcaaagtgagaaatgatcaggtcatgaggcagactgtgagtgcgcccattgagatgcctagtgatataggcactgacgta

SEQ ID NO: 569231 - DNA, 697 bp, Homo sapiens
ggctgcttagtgtgtatgtgtggcgaaagtaatattgcgcggctgattcgcaattgcacgactatggcgacccatacgagtatccagctggggcactgtgccttgcggcaaaacctcttccgtttgcggaatccacatgaagatgtcttgagtgctgctgccatgatccctttgacgaggtggctcaagaagctacagggaactccgaggtccttcataactggcttctctttcaaacagcacaagctctcctctaaccctcccctctcccttcccttctggtcagtcgtcatagagactaccgtatttgctaggacaagagtcctcagtcactgtgcaatatgccccctggatcccaggagggtctgcaggaaacactgggctatcagaacctacctgatgccctgagtggcgcttagggaaccatctctcctggctctccttgggatgatggcatggctagtcaggctctgcagtgtcttccttggactgcaatggcagagttgacccatgatcgtgcacagactactagctgattcctcgtaagcgcgacgacgagttacactcagaagccacatctttggtcactgataagtattctccacatggtgctcatgagccaccttgtggagaaaggttgctgtctagctcagtacaatccaagataagacgtacaacttgtgcaatattatactgg

SEQ ID NO: 569232 - DNA, 326 bp, Homo sapiens
ctccctgtccaccagccacaccatggctaatttgttgtattttatagttagatgttggaggtttcacccatgttggtccagtgctggtctaggaactccgtgacctcaggatgatccacactgccttggctctcacacaagtgcgtgggattacaaggtgtgagccacatgctcccgtgccttagttttttgacgtggcgaagaactctagttgttcagagctggagccactagatgtcatagcctgcagtgtttgtgctgaagttcgggatggatgcagagaagccgtcgttaaccagtttctcttgtctctcatggcctgcgag

SEQ ID NO: 569233 - DNA, 856 bp, Homo sapiens
cgatgcgatactggataggtggagctggtgccaatcggacgaaggagtacggccatgtggaggatgttgtggtctggcttctccatggcctcgacacgtcctaacttgtgggccagctctggttcccggctctgggctaacctgctccatggctaccctgaaccagatgcaccgctggggcccccaagcggcgctcggaagctggccccacggaaggcctggccgagctaagggtgtggtcctgtgcacgtttacccgcaagccgaaaagcccaactcagcaatcgcaagtgctgtcgagtgcggctcagcactggacgcgaggcgtctgcttcatccctggggagggccacaccctgcaggagcagcagattgtccttgtggagggcgggccgcaccaggacctgccaggcgtcaagctcaccgttgtgcgttgcatgtacgactgtgtgccacgtccagaagaagtacggctgggggcacaggtgggctggggcgcccttaagaacatgaaccttccgctcctggcttgcaacaagggtcctccggatctggcctttgcgcctctagaggcagccactcatggattcaagtcctgctccgctcttccatcaggaccactattaggcataggagtctgggggtgcaagggtgccctctgttcaacacccttggctccatgtgtttagaggtggtgcctaaggaccctttctgctggacaaggacacttgtacttgcctctgctggaaggcgtttactaaaacacgacccttgcgcttgtgatgtagaaacaacaaacgaaacagcaaaaagagcaaacaaccacacaacacgcgaccttagggcgaggaaaaaca

SEQ ID NO: 569234 - DNA, 760 bp, Homo sapiens
tacacgctctaattcacttaattttcttgtataaaaaccctatgttgtagccacagctggagcctgagtccgctgcacggaaactcgggggtgggtgtcttgacgaggtggtgtcagtgaactcctgatagggagactggtgttgaatacagtgtctccttccagatggtcgggggtcaggtagctgtagtgtctataaaaagtgcatcaaatggggtgccttgtgcgaatgttgcccatgggtgggcagagacagccccgggctgatgtgtgatacgacatgatcattcagaataaccaagccatcattggagcagtttactatatggcaacatgtgttgctgtgaagacagatttgccatgtgccccttgggttggcagggattagaggcgtgtaccaagacaacagaagccagaaagctggccttgtcacacttgacaaagtggggaaacaagatggtatgggcgatgctattgcacagatcttcattgtgtacacaccccaacaaggataagagccattcgtgtgggtgaccatggggggaggacccatatgttgcagaagaactcctctttgggcgcccaagagggaactgaagtgtgcccaccaaagcggagaaatatggtgacagtgttgggaccaaacccatccctttgtgtagatagtcacatttttaacaaaacccccaaaagaaaccctgacacagttgtggccccatctttgggatgaggactccccgtgaaactcagtcgaacaaaa

SEQ ID NO: 569235 - DNA, 218 bp, Homo sapiens
gagtagtggctgcacacgcgagcctccatacacacacacacacacacacagtatctgggggtggggcaagaggcaccacgtgccaaagggtaaaagtgtcagccaatggtgagtctggcagggccaagaggatatgcgaattttaattatcagcaacaagttgctgaatgtaatttttaaaagacagcatatcctagtatgggtcctcggcgtgtgca

SEQ ID NO: 569236 - DNA, 230 bp, Homo sapiens
ggcttgtctttcacatcattgtcaccaccgttgaaacacaccacccaccacctcactgtgctcacatccacagtttggtctccataaacattcaggaagtgttgatggatgtcattgggtgctattttttccatgtggaggaatgcagtgacacacctttgcttcatatgcacttctgtgtcaggtaccgttctgtcagactggccctccgttgccatacgcgccaggcg

SEQ ID NO: 569237 - DNA, 941 bp, Homo sapiens
tttgcaaacgtggtgccttcctctctttaatgtgcgcttttcacaacagggggtcgctttcttttatgggccctcgacctgttttttcgccacggtggccctacgtgccttccattggcgagcccgcatttggtcgtgttagaagcccctccggcaggtcacaacaggtgtgttagcgcccgcctggacaccttctctttggggataccgaagcggcctttttttgggggtacctctcccccctaatccccggcggtttttaacaaaaaaagaatttgtgtgtccacaccactttggtacgccccacccctctcgtccccacaaatggttctcccctcctttaaagtctttgtgaagaaaaatccgcttgagtgggcagaatcggtcttctcggtgtttgactgggaaaacctttttctcccgcgcggtctaattcccggcctcccctcccctgggtgtcttataaattggacagacgggccctccacagaagattctctcccctttcgggagtatgtctttaagaacgaagttgttgacctcttctctcgctggggatttaaccaagtcggtctgtaggtaggtcaccaccccggagagctataagtccactccccaagagaactgcgttaccttagaacaaacaacttcttacatacgagtaagaattttttatcccaccattgtacttctcatatctggctctcattccatcacatttacacacagtgtctatcttcactacatagcaacaaattgttctacaccaccatatgtatattgttgccaccacgttatcccccacacacattgtgaattgtctactctcccttcctagcaagaccatcccaagcatcgtacaacatcgaaattaaaaacatattgtaaatgatttgccatttcaaaaccaaaaaaaaatcttgggattcttcccacaaaac

SEQ ID NO: 569238 - DNA, 201 bp, Homo sapiens
cccctagtccagctcatccacctgtcggacttgctcctttagaagggatttgaacagcccctcatcgaagtctgccgccaagtaaatacgctcctcacgttggccttggcgactacccagatcagcgatcaccaaccatgaatgcttcatcagcacatcgctttcggtaaacatggctgcacggccatttgcgagacggta

SEQ ID NO: 569239 - DNA, 313 bp, Homo sapiens
ggattgggccacttgggatcaagagttggggatattgggaagttgcctgtggggagcacggggtgagggtgctggcgtcacctctgaggggtaggttcgttatgcttgtcgcgggcgcgcttgatcatgcgagagcggtcgattcgaatgtatggacgtgagatcttcatcccagtcagggagactcggctgaagatgtcatgatctctagccacccaagccccagtactcattgactgagccatagtttctcagaaactgagccttactcaggccggacacacctccaaagtagccagcatggcgatgccgg

SEQ ID NO: 569240 - DNA, 286 bp, Homo sapiens
atctgcaacatgccaggcacagcagccaccaggaatgaagcagtggctgggtgcagtggctcatgcctatagtcccagcattttgggaggctgaggcaggtggatctcttgtgcccgggagtttgagaccagccggtacaacatggcgaaaccccatctctacaaaaaatacaaaagttagccaggcgtgtgggatctcatatgtagaaaacaatcattattattttgctggagaggaatcgagcagtggatatgacataggccacgacacactctgaggtgaagc

SEQ ID NO: 569241 - DNA, 888 bp, Homo sapiens
  misc_feature (395)..(396): n is a, c, g, or t
  misc_feature (464)..(464): n is a, c, g, or t
atgacccaccaatcacatgcctatcatatagtaaaacccatgcccatgcccccgtaacaggggtcctctcaggccctcctaatgactccgccctagccatgtgatttcacttccactccataacgctcctcatactaggcctactaaccaacacactaaccatataccacatggatgtgccgcgatgtaacacttagaaatgcacataccaaggccaccaatacctactgtccaaaaaggccttcgatacgggataatcctatttataacctcagaaagtttattcttcgcaggattgatctgagccttgttaccaagtcaaggcgatagcctgctacccaccctaaattagcgagtgggcacttggacccacaaccagggcgatcacccgcgtnnttaatatcctcctagtaagttccgcatgtctcgtaagactacagttcgcaggctcaatttttaaaccntttccccaggggggcgcaaaattttttcccacaaaaaggggggggggaaacaccctggtggccgggtgtacattaatcaagcggttttttttcccgaataattatacccacaccgttttttgttttgcgcccccaattaaagaagatcgcgccccactccctcccctaccatttttttttgtcggggaggacaaaaaaaacatataagtggggggtgtcggtcccctcagcagatgagtgtagtattttatatccccccaacccgtcataaacaacaatcagcggtctcgtcggtctcccccggccgtcacataatacttacagatatcagtccgcgtcctatcttcgtttatatacaaacagcacacgtcaccgcgtcatggagagtgcacggcacgatctagagtttttctattttatacag

SEQ ID NO: 569242 - DNA, 1194 bp, Homo sapiens
gggctcccttgaggggaataaagtgggcgggtgttctacgggcgcggtgttgagagctctcccggggctgttggacccgcctttgtttgttaatgggggggggagtattgaggtggggtgccttggagggggggcgcggcgcggtgcccctgttcgcgggaggcttttgttggttgtctatttcgcgggaacctttttcttcctcggcatttgttgccgtttgttgggtgttaattgggaggaaggggggcctggctggaggatgtatgcctgtgggcccctgtgggccggtttttgccccagggaggggcggggggtttaggtgccccccccccccttaggggcccggtaagtgcccacttgtgtgaggccgtttttgtcgcggagcggccctcctgtgaggggtctagtctcgccccctggccgccctctttcgtttgtgaaactcacagtggggcactcgaaaatgtcccccctgtgccccgaggcttattggagccgcgaaggttcccgaaagcccacgagccacgcgtggaaaaggagagaattgagacacccctcggcttttttgggcactctcgagactggttttgcgacacacggggggacccaaagtgaatatatggagaagccaccacgccacagtttcactatgagaaacccctctgagatttgggcccaaaataagccacaccacagaatattttctctctgtgccacaacaccacacattgggttaagaaatgagttttgaaagagtttgagtgaccacatctcgtataagccctggagagaaatcttgtaaagagaatgaaagaccactttgagagagaaacactaatgtacgccaagagatcccaccttctggtgagattaaagtataaatggagatgttctcgcgtgaatggcgttctaccacggttatatttatattgttaccacatccctctttccacagagacacctcgtaagaatgctaatataatataaaaatatgcgctcggttggtgaaccacatagtttcacacttgttccaaagctgtgtaatcgctgggggttaactatttcacaactgcttttgtaattcacttgtaatacaaagagaattctgtttaaacacaccccttattctttcttcttcggggttaagaaaacgtttattgtaacccgtaattataatgctgccttaattga

SEQ ID NO: 569243 - DNA, 476 bp, Homo sapiens
  misc_feature (66)..(66): n is a, c, g, or t
  misc_feature (94)..(94): n is a, c, g, or t
  misc_feature (413)..(413): n is a, c, g, or t
  misc_feature (422)..(422): n is a, c, g, or t
  misc_feature (464)..(464): n is a, c, g, or t
  misc_feature (473)..(473): n is a, c, g, or t
taaaaaagccaagttaggccaaggcgtggcgactcccgcctgtaatcccagcatcttgggagggcngaggtgggaggactgattgagctttagnagtttgagaccagcctggacaacacagtgagactcctgtctctacaaaataattcaaaaattagccaggtgtcacgctgcatacctgtggtcccagctactcaggaggctgtgctgagagaaccacttgagcccgggaggtagaggctgctgtgagtagtaacggcgccactgtacttcagcatgggcccacggagaggctgccttttgtttttgagatggggtcttgctctgtatctttttttttttttttgagacggagtctccctctgttgcccaggagagtgcagtggtgcgatctcggctcactgtaagtccgnctgccaagntcacgctattctcctgcctcagcctcccaagtagctgagacnacaggcggncgc

SEQ ID NO: 569244 - DNA, 388 bp, Homo sapiens
  misc_feature (164)..(164): n is a, c, g, or t
cattggggattaggtttccaaacacaaagaaacttcggaggacacatttcaagccgtagcattcttccttgactccccaaaatccatgtccttctcatgtctaaaatagattaattccatcccaatagccccaaagtcttgactcgttccagcaccaactcaanaattccaaagtccagagtcccatttgaatcagacaggagagactccaggtgcaattcatcctgaggcaaatttctctccagatgttagcctatgaaaatagcaaattactttcttccaaaatacaatggtgggacaggcataggatagacattcccattccaaaagggagaaataagcaagaagaaaggggtaactggtcccaagtaagtccaaaatccaacag

SEQ ID NO: 569245 - DNA, 496 bp, Homo sapiens
ggagatgctcgcagctctagaagcgagtcatgtcgtaccaaaatcagcatatggcttgtatggaaacacaggcaacatctgatagcgaagagggcattaagattggacttaaccaaaatggcctgacaacgaaaaagtcatttcatcattctgctgggccactgtagtcttcagaaatcaactgtgatacaaagcaggaaataactgttaaaattttagcaactcctaaaaggctggaaggtgggtttaacagtttattaggatttatcagctgtcattttaaaaacagtcgatttaaaccatgtagaaataagtatgcaaaaagtctgcaaaacaaaacatactttaaacatgtttaagtagatagattatctgaaattctggatttttcagtcacttcattgttatgctatggcagccaagtaatccttaacttcagtaggagtaagcctcctaaatccagcttcattgcagactccaacttctatgttatcct

SEQ ID NO: 569246 - DNA, 1190 bp, Homo sapiens
actcttgttcttctttttgttgatgtgtggagaaagcaagggaaaggaaggaagaaaaagaggggcgagacgaagtagggtcgtcagtggagtttgttagcaatagtgtgtggtgttagtagtcattccttgtctatgttgtgtagagtgtatttgtgctcggtgttaacaaaggcgggttctacagggtaatcccccacttcgccgtttttgtggcagaaagctcctgtggatgactgcccccccgttgtgttaaaaatggtcgcggcccctcccttctggcgcgcccgcgcgggaaaaagagggttctcggggataaatcctcgtgccccctcgtgtgtcctcgtaatgggggtgataaaaaggccgtcggtcccctggcttcttgagggaaggaaaatgggattaaatgtgggcacaggccctttggttcttgtgccaccatggtccacaaggacccccttctggcgtcacactggcgccacagagggagccccctttgtggtttggaagggaaatttttaggccgcccaacgtatctccccaattgagggaacaacacctttttcttgtgggcccacgtgccccataattttttggggagccacactctgtgattaaagggagccggcctgtggttccctcgggggtaaagctccacaggtattcggccttgtccctcgaaggagacttcacctccggaacccttctactgagcctgcacaatttctactcacctgtgagaatggttccacgcgagccttggagaccacacctgtaaggagagaaatgccctctctgcccacggtggtcactcctcttgttggagaacccacccaatatgcacggctccacatttttgtgaggttttgtggttctttctcgagggccacgggaagcttgcctctttcgccgtgagatccacgaatggcacgggtggactatacgacgtcaataacaccactggcggaaaaactggagtcctcggcacgcgaaggaggaaccccagaacgcctcggtttcgagagagtactttttcctcgggagagggggcctttccacgcaagtgggccaaaccttcacatcacgggcacagattttcaaatgaacattttttgccctcaccctagctgcctgcacctgccctttcagggagatgggggtcctttaagggaactggacccttggaa

SEQ ID NO: 569247 - DNA, 405 bp, Homo sapiens
ggggtcaggaggagcccttcctccaggttttccttctttcctcctcagcagagaaactggagaaaggccattaatttcagtgcagtcgatttgagtgctgaaatatttccagaatcaatggtggtgctggggtgtgtccaaaaaaaaacatttttaatagtggagttggtttgtttttaataacatcacaaaaatgcagtgcccttggggaagggaccagccccttggcctgccactttccaggtgtcctttatcactttgacgggactctttggtctgcagaaaatgctctgtcttggcatgcttctagactgtaagatttgggttttgttttgtattttatgttttgctgcatcttatatttccctaaacctttattttttgttgaaattttaaaaaaaaaaa

SEQ ID NO: 569248 - DNA, 351 bp, Homo sapiens
tgtttgcgactgctgcgcgaacggactgactggctgtgatgagactgaacgaagacgatagatctattatgttctgacgcatgacagccttcaaccatggacatctgaggctcctcgtcagcctgggcgtaactctgcagggtctagacacgccgcaagagattcctcacagtcctgagaggcgccctcatgctcactgctttcttcttgagtcaaagactgcactgcctgtacagattccagacccagctcactatgaggaacctcttcctcctcttttaattcgattaactcttccttagtgtgggagtcttcttcgtggtcgtactcagacccagccatctgctctga

SEQ ID NO: 569249 - DNA, 210 bp, Homo sapiens
gggagcgggctttgtctgttggtctcctggactgaagagagggagatagaggccaagactaagattctcaaaatggtttattaccagaactctttgtctgggcaagtcaagaaccatttccaaacaaggacatggggggaaggcttcctaaggggaggcttcctctcccaaaggaggtcaaccccagaggacgttgagcaaacgttctcc

SEQ ID NO: 569250 - DNA, 274 bp, Homo sapiens
tgggggcgagcggtgtgaggacaaaaaaaaaaagccctttccaatgtttcccctcgccaaaaccccgaatgaatttggcattaaacggttttttaaaggtttgggtggacaagtccggggaaagccttataaaaaggaaaatggctgaatgcgggggtgccaaaccctgagggcatattggaaacccggggggccttcaaaaaatatcgaggtttttccccatttccatgttttgccttctacactggagagaccaaccgccgggattttgaaa

SEQ ID NO: 569251 - DNA, 745 bp, Homo sapiens
  misc_feature (581)..(581): n is a, c, g, or t
ggcgaaattgccaactcacacaccgaggccccccccctattgtatggggtgctttaaaacaaagacacagtggtttcgtactctatctgtcgtgttgtacaagcctatacccacccaactctcgcgctctcacaccagtggtctctattttctatcgcacagagcttccctccccctgttttctacttcgccaaaaagaagagcagttctattaaagtttcaagctgttgtctcttctgcaactacaaagatataatgaacccctattctttggtcacccagaaattggttgtggctctccccccgatgcgaggatctacgcctcacccaccgtgtgttgttcgccaacgaagggagatcactcctttaaactgccccctctgggaggcagaagacactccattatattttcacaggatttctccgtatctgtccacccaacagactcggagttcttgcttcgcaccgaaaatttcttggccttctctcgcggagctgactatgtgcgcgccccctcttttttcatgtgcgccctctctcttggctcgttaaaatacttctttcttcctcttctataacanggcaccctctctgagaaattctcttttcccacacattagtatagtaattctgaaaatgttccacttcttgcgaaaaggggataaacactctattctttctatcatcaaagcccccggaatttctaacatctcgtgcctcccgcaaccgcccaatcattaaacaa

SEQ ID NO: 569252 - DNA, 383 bp, Homo sapiens
  misc_feature (14)..(14): n is a, c, g, or t
  misc_feature (117)..(117): n is a, c, g, or t
  misc_feature (139)..(139): n is a, c, g, or t
  misc_feature (167)..(168): n is a, c, g, or t
  misc_feature (178)..(178): n is a, c, g, or t
  misc_feature (183)..(183): n is a, c, g, or t
  misc_feature (225)..(225): n is a, c, g, or t
  misc_feature (232)..(233): n is a, c, g, or t
  misc_feature (248)..(249): n is a, c, g, or t
  misc_feature (251)..(252): n is a, c, g, or t
  misc_feature (254)..(254): n is a, c, g, or t
tcatcttcagaccntcatccccagatttctcgggtgggggcttgtagatgttttcttttctggcgggctttccggttcctcattcttcttctttgggagaaggagtcttttcctttnatgcctttaaggctgtggggcnacccatctttccctttgcctttaactgnncttggcgtcnctgangccttaggtctgggtttgggatttttcttttcttttctttanggtttgnncttcttaaccattcnntnngnttttttttttcgaactgccatagtcactatcgtcatcatcttccattaggaaatcttcatcgctgccggaatctttctcctggaatggtgcctcatcctccccttctgtcgtcttctcgcaaacgtata

SEQ ID NO: 569253 - DNA, 893 bp, Homo sapiens
  misc_feature (14)..(14): n is a, c, g, or t
  misc_feature (117)..(117): n is a, c, g, or t
  misc_feature (139)..(139): n is a, c, g, or t
  misc_feature (167)..(168): n is a, c, g, or t
  misc_feature (178)..(178): n is a, c, g, or t
  misc_feature (183)..(183): n is a, c, g, or t
  misc_feature (225)..(225): n is a, c, g, or t
  misc_feature (232)..(233): n is a, c, g, or t
  misc_feature (248)..(249): n is a, c, g, or t
  misc_feature (251)..(252): n is a, c, g, or t
  misc_feature (254)..(254): n is a, c, g, or t
  misc_feature (383)..(383): n is a, c, g, or t
  misc_feature (425)..(425): n is a, c, g, or t
  misc_feature (484)..(484): n is a, c, g, or t
  misc_feature (569)..(569): n is a, c, g, or t
  misc_feature (577)..(577): n is a, c, g, or t
  misc_feature (587)..(587): n is a, c, g, or t
  misc_feature (592)..(592): n is a, c, g, or t
  misc_feature (599)..(600): n is a, c, g, or t
  misc_feature (603)..(603): n is a, c, g, or t
  misc_feature (619)..(619): n is a, c, g, or t
  misc_feature (632)..(632): n is a, c, g, or t
  misc_feature (635)..(635): n is a, c, g, or t
  misc_feature (677)..(677): n is a, c, g, or t
tcatcttcagaccntcatccccagatttctcgggtgggggcttgtagatgttttcttttctggcgggctttccggttcctcattcttcttctttgggagaaggagtcttttcctttnatgcctttaaggctgtggggcnacccatctttccctttgcctttaactgnncttggcgtcnctgangccttaggtctgggtttgggatttttcttttcttttctttanggtttgnncttcttaaccattcnntnngnttttttttttcgaactgccatagtcactatcgtcatcatcttccattaggaaatcttcatcgctgccggaatctttctcctggaatggtgcctcatcctccccttcttgttcttcctcactgcccactnttccatgagcatctctctctgtttagaagctgctttagatgncgcctgccgttgttggcgcacatttttatgatcttctttttcatcttcactatcctctnctgagtgagaatcatccttcttggtcttcacatctttgtcttctgagtcctcactatcttcctgtgaattctttccagatcgctnttattttntgcttctcgnggagntgatcgnnttntcttagtgggagggcncgaatctcttccntantcttcatctgcatcatcagattcctgaaactgtgagtaatcnacaaccttcctatttctgacaggccgcgacatgttcgctgtcgaaacaggaccgagtcgagaagccaaagaccaggaccccccccaccccgcgcgctcggcgccccaccccccccgaacttcagccgatgggaccgctgctgccgaaccccgagctgctggcttctcaaactccgctgctctttggttcagggctcctggaacagacgagcccccc

SEQ ID NO: 569254 - DNA, 94 bp, Homo sapiens
cactggcgtggaaagactgggacacaaatgaagggcccccctcggaacccgcagcccagcaaggccgctgaaaactaggactcggaggaggaac

SEQ ID NO: 569255 - DNA, 106 bp, Homo sapiens
gggcgtgtggatatgcagagaaaacgtggaaggtgaagggttagctaacagacaccacaccagaggaattaaaagaccacttgatggagatgagctgcttccaaac

SEQ ID NO: 569256 - DNA, 473 bp, Homo sapiens
catagaggatccccctccataatgtgtgccaggctagagtgcagtggcatgatctcagcccagtgtaacctccacctcccaggtgcaagtgattctcctacctcagccacccaagtatcagggattacaggtgtgcaccaccacgcccagctaatttttttatttttagtagcgatggggtttcatcatgttggccaggctggtcttgaatgcctgacctcaagtgatccacccgcgttggcctcccaaagtgctgggattacaggtgtgagtcaccacgcccagccataaataactattttgagttatactagtactactactaccactaaggcatagtttctgagagtgtgacaaatacatctagaagcttaagggttttttctttaaaccaactagagagttcatcagtctttcttttcatgtctttccaatctaggaagaaccaaggtactttttttgtaggcaaagga

SEQ ID NO: 569257 - DNA, 1046 bp, Homo sapiens
cccgggaggggtggcgggagcggtactggaaatactctgtcctctgtcgccgggaactggcgaggtagttcctatcgaggtggagagacctggaatggccacactatcaaggtgaagttcaaagcttatgaaactggatgatgattcagcatcatagaaggagtaagcgaccaagtactctgtggcagctcgtggctcagtttcgctatctgattgctaccctggatatctgcacttttcagaaatgtacatcaaacaccattcacccagcaaaaccaggagctagcacagggtactatcgagaacagcttcccacagaacaggatgcaactgctgccacatcgacagaagctactacactgacatgtactgcacccatactgcctgcaccaagcctccttcccggtggagaccaactgtggacatctacacacgtcggtaaccttactcctaccagctatacagagtgaagatgatcagactcaggatgtacctgagactgcctcacggatctcaatgtatactaaacggagcataccacagggaccaccccagaactctactcatgcgcgagcaactcacggcacctaccccaccctcctgagcagcatgcaacccaggccacacacgacgaccacacgagcgagactcaactgcgaccgctaccccgccatcaccgctatcctccctctcgaccccacatgccgcagcattctcaacatactactataatcacctactagaattcagacaccctgaaagcccatgcacaggaaccttctagggaataccttaccaatcataccaactcgacactcacgagcaataggaccacttcactgacgatatctcaaagacgtggctctccgccgccagctcgaatcagcacaaacagggcccagctcgcaacgcggaacacaggcagcccacgcccgtcccatacactaggaaacatagcagaaccgagcgaagccaacccccacaacgaggaacaggacacgactacaaccactgcaaaccaccagtcagatgacaacaccacctca

SEQ ID NO: 569258 - DNA, 671 bp, Homo sapiens
taagataaaaattttgttttatttgaatttttacaataatcattgtaggcagaccccctgaaactattgctacggaataaaagatgaaatgctcctgattattgtgaatacaaagttgcatgcaggattgtgtaaagacaatgccaggttggactgccagaatgagccaacagcgtgtgatgtgcttccccctgcagagagcctatgaccagacatgcagtcagggaggtttcacataaccaagattcctatgccagaaatgcagattttcatagctctgggaatggaatgcaacccttgtggagagcctataaatggacgcatgtgggggcacctgtccatatggataagatagggctgtaaatgccctcatcttgccacagctcttctagccctctttacggttaaggcatactcccttctgagaatttctggtctaactgattgtctagcttcacctcctgtttctatggattgtttgtaaccagcttttgctgcaactgttactgctgattaatatcttgctaatcataggttatggaaagactgtgtttctgttttaaggctctgctagaaattactgatgcacacactatattggaaattcttatctctgtatactggacttctgcatacagatgtatggttaagaattacttcatccccatgtg

SEQ ID NO: 569259 - DNA, 336 bp, Homo sapiens
ggctcggcacctgaacattcgtgtccagcattgaagacgaacgcaactgaatgacgaatcagatgatggccatttctaaataaggaatttcctcccaatgtcatggatatgagggtggttatatgattaacgggttgatattaataagatgtggctatgtcttccgatgtgtcaagaatcctcacctcctttcataacgcatctcccaacaattaattctcgacctatattacaatttatgagtgtgataaatattatcaactttggtaatcaactcgaagattgtctttagctgcctcgcctttgcgtgtgacgtcacacatgcccacgacagcc

SEQ ID NO: 569260 - DNA, 294 bp, Homo sapiens
ttttttttaaagcatctctggaaaagtttctcgtaaagcctcagctcttagagccaggccaacaacctttgatatgcaaatgcaggccattagaaaatgggtccacccaaacatggagattgcctcagccttcttgccctttccccacaagttcctggcaacatggcctcccccacatatccccacgtgtgtagaacatcatagcgcccctgcatttgcatattaaaaggccagggtgggagggtcagctttttcacgggctacgcgaatgatttgttgagtcaaaccaatccc

SEQ ID NO: 569261 - DNA, 374 bp, Homo sapiens
gttgtggctatataatccattccccacccaaatacatcattttaatatgcacatcacaggcaggcagcactggtcacgaaatggagccccagcagcatgcagtccccactgtggtgaacatggatggctgacctagccaccagacctcggccatcttggctatccagcaagatggatacccagcaagaggcctggcaccatgagtgccaagtgtctactgtgtcatgctgcttgtacctcgggaagccaaccatccaggcagcagtggtggccccgtatcctgcttctgtccacaccactcatactcctcaaagcggttgaggtactcatgctcaatgtccgcaggaatcatcctcagcacatgcagggagtat

SEQ ID NO: 569262 - DNA, 515 bp, Homo sapiens
gccctagacgagaagctgctcaacattcatcgacctgcagtccctgcatggctactacgagctacccttcctcatcctgttgagaccaaccagacctggcctgggcgcgtgccgtgcggcaggacacgtgctccattgtggccatctaactgaacatcacgaagaagttgaaccccttattctggtccttaacagcttggcctttgaactgaaccaaggttttgctgtgccaaagccattagttggggtgttgtgttttgcgttaaactcgttgttttaccgaaacaagagcttcccccgttatggcttggttctcaaaagcttaacacaggaaacacgggctttcccgtttcgcaccaggggggtgtgcggatcacctgggactgcgcccaggccaccttcatctcctacgacaagatggtcatctccctcaagggcggcgagatctacgtgctgaccctcatcaccgacggcatgcgcagtgtccgcgcgttccactttgacaaggcggcccc

SEQ ID NO: 569263 - DNA, 198 bp, Homo sapiens
gattaaggattcaacggagctgaggaagagtataggacagcagaaggttggagagagcgggagtgagggcagctgcacctaggacaggtaaccgggggatttgagtagagaagcggctgggaaggacctgaagcgcaccaagggcctgctgggagtatgccagctcatgctggacgacgtgaagaacagtgctccgag

SEQ ID NO: 569264 - DNA, 664 bp, Homo sapiens
ataataggtaaagctcatgctgatatagtacatgtgcctgctcgaccttccagagtgctcaacaaatcatttcccaaccaaaaatgggccttaaaggaagatctttcaggaatagctgaaatgttcaagaccccagtgaaggagcaaccgcagttgacaagcacatgtcacatcgctatttcaaattcagagaatttgcttggaaaacagtttcaaggaactgattcaggagaagaacctctgctccccacctcagagagttttggaggaaatgtgttcttcagtgcacagaatgcagcaaaacagccatgtgataaatgctctgcaagccctcccttaagacggcagtgtattagagaaaatggaaacgtagcaaaaacgcccaggaacacctacaaaatgacttctgtggagacaaaaacttcagatcctgagacagagccttcaggaccagtatccttctgcaaacaggtcaggaaggtaggcagagttcaggaatattcagaaggggcgtgtgcaaagtaagggtgaagcaacgaaaacagtaattgttgagtgcatctgtgaaaagaggtcaggaggccactttatttcttcaaaggagagaaggagagattaaggaaataggaagcccttttgagacagataaggaagatagtgcatt

SEQ ID NO: 569265 - DNA, 407 bp, Homo sapiens
  misc_feature (1)..(1): n is a, c, g, or t
  misc_feature (95)..(95): n is a, c, g, or t
  misc_feature (296)..(296): n is a, c, g, or t
  misc_feature (330)..(330): n is a, c, g, or t
ntattcctttttattgctaagtagtagtccatggtatggatggaccacggtttgtttaatcccatccgaggacctttttaaaatacttgtgcccnagatgcagtggctcactcctgtaatcccggcacttggtgaggtcaaggcgggaggattgcttgaccccaggaattcgagaccatactgggcaacatggcaaaaccctgtctctacccaaaatacaaaaattagctgggcgtggtggtgcacacctgtagtcccagctacttgggagactgagatcagaggatggtttgagnctgggaggcagaggttgcagtaagctgagattgngccactgcactccagcctgggcaacagagccaggccttgtctcaacaatcaatcaatcgatcgtgtgttcctgatat

SEQ ID NO: 569266 - DNA, 283 bp, Homo sapiens
ggccgctgttgcacaatataagctctcagaaggcgggtctccatccagggctgtgtttttttcacattgagagacagaaaaaggatatgctaagagaagcaaattgctttaactgagggatgtcatgattcattcattcgactgtcatccagactttactggacacctccgtgcatgaagtgtgtctttagggaacgtactgcctacaacacacattttgtggcattgtgaagaagggaaaataatttcttggaaagggaggccttggcctctggttgtgatc

SEQ ID NO: 569267 - DNA, 643 bp, Homo sapiens
gcaaccttatgcggcgcgctcgaggatggtgcgccccattctgattcttgctcttactagcatatggagttgccgaactctctggagagagggagcgcaagggtcgtgtcactcgccacttgctcctcttctcagctgggctgatgcaatccaaaccgtggcctgaggccaggtcatgggcctgacacggcatgatgctgtgtcctagatacaggaggccacgcacgtccaacaatgtgagcacttgagaaatctggaagtccatatcatcatacaattcatctgtgccatacagcgcatggtaccgtgagcacaaccatcgtagtatttgaggcgtgctgcactcatagcggaacagatgggatcgagtgtgcgtgcctgctcagttgcgatcacgacactgcatagcatggtattttcctgtacaacacaccatagagaggctcggggtggacgagccatctggccgaagggttactggaggtagtgactacagcaggtgctagtgtcacatgtgtcagtggagtggcagttgtactcgttctgtaggaactaacgatcgcggctagtcctcgtgaacgaccccgacacctacaagcctgatctttcaggctccaggccaagaataaaacctctatctcca

SEQ ID NO: 569268 - DNA, 242 bp, Homo sapiens
ccatgtgcctggcatggtctacattggggcaaagggaaacaccgctgcacagactgcccagatactttctttcaataaaagtggcaggtggtggagacatccaccagggcttccagatctcttactcaccgaacagtgaacaacgactggcacgcagatacttgcttaaggatggccaacaggctactttggggaaacagtcttgtgatttcctctcaatcttatagagattcctgccaaaa

SEQ ID NO: 569269 - DNA, 355 bp, Homo sapiens
gccccatcccacaggagatcagatattatgagcttagcaacatttggttacacatattcaaaacttttcagtcaggtcgggcgcggtggctcacgcctgtaatcccatcaccctgggaggccgaggagggtggatcacgaggccaggagttcaagaccagcctaacaaacatggtgaaaccccatctctactaaaaatacaaaaactagccgagcgtagtgacgggtgcccgtaatcccagctactcaggaggctgagacaggagaatcacctggaccccagaggcagaggttgcagtgagctgagatcacgccattgtactccagcctgggcaacaagagcaaaactccgtctc

SEQ ID NO: 569270 - DNA, 852 bp, Homo sapiens
  misc_feature (611)..(611): n is a, c, g, or t
tttttgttaccatccattctagatacagtattgtcaactatatctcctatatgctagaatgataatatatcgctgtcatatagttatctcataaacctcaaaaccaatccctcttagccaatattgtgcctattggcatactagtctttgccgcctgcgaagcagcggtgggcctagccctactagtctcaatctccaacacatatggcctagactacgtacataacctaaacctactccaatgctaaaactaatcgtcccaacaattatattactaccactgacatgactttccaaaaaacacataatttgaatcaacaaacacccacagctaattattagcatcatccctctactattttttaaaccaaatcaacaacaactatttaggctgttccccaacttttcctccgacccctaaaaccccctcctaatactaactactgatcctaccctcacaattcatggcaagcaagccatttatcagtgaacatatcacgaaaaaaatctacctctctatactaatcttccctacaaattccttaatataacattcacggcagcagactcatcatattgaaatcttattcgaaaccaattatcccacttgntatcatcaccgatgaggaccagcagacggccgacgcggactattctatttacactataggtccctcctatcacgcatgattatccaaacccaggtccaagattaaactcacacggcagagtaatccggccacatcttgacactcaacctttgcagccttggcctgcatcaaaaaaaaacgggcgcgatactggggcgagagagagagtcacacgctcatcctcccacaccacgccctcgcc

SEQ ID NO: 569271 - DNA, 1419 bp, Homo sapiens
  misc_feature (28)..(28): n is a, c, g, or t
  misc_feature (81)..(81): n is a, c, g, or t
  misc_feature (84)..(84): n is a, c, g, or t
  misc_feature (89)..(89): n is a, c, g, or t
  misc_feature (98)..(98): n is a, c, g, or t
  misc_feature (326)..(326): n is a, c, g, or t
  misc_feature (344)..(344): n is a, c, g, or t
  misc_feature (354)..(354): n is a, c, g, or t
  misc_feature (423)..(423): n is a, c, g, or t
  misc_feature (905)..(905): n is a, c, g, or t
  misc_feature (915)..(915): n is a, c, g, or t
  misc_feature (1419)..(1419): n is a, c, g, or t
ttcccttgccccacgtgtgtggtgtttntgtgtctgtgcctggccaagggagtgcccaacactgggcttgccacagccccnagnagagnaatttgggncctaggaaccgagggcacacgggactctagcctcatccccaggacccccttggctcagagtgtggtgctagaaactgtccccacccagccccagtactgccacctttacacctacccctgcaagtccccagagggctgcccacgatagaagctgccaagcagggagaacctgtgccaactgtggagtggggaggttgggcctggaccctcaacccctgcaaccttccntagccccctcgaatagantgagcaggtncaggctgtggcccttacctcacccgcagttctcgcccagtgctgcagccggctcacctctctccgcttnttgcacatcactggcctgtgtgtgctgcttgctcctgttctgttcgcttgctcccgttccgttcggcttttgctttgcgttagggtgaagaccctagcgtccagctcccctcatacgctatattttgacactaaaaaagaaggtttctaaattgtaggagcaggatggaaatactttgctgcccttgccatcttttaggattgggcccccaggagactgaggtcttcctgggccctcattgctgcttatcgtaccccccatcacctgcacatgggacagaccgggctggagggtgaccttggctgtgtacgtcccagcaaaagagctctggcccgcatctcgctgtgccctgaagggggatgaagggcgatgcctcgcccgaggctttgggctgctgcactgcatgctgggactgctcctactctctgtcccacccctcacccagctgtggtccggctttgggagagtggtgaattgcgctngcccgaactncggagcgggagcaggggtaggggaccggggttacgggcttggaataaaaccctttaattaccccaggcggagttgggacgcaaaaaaaaaaaaacacatcacaaactcataacacacacactgtgtgtcggcgccggagtctggcgagccctttggagaaacaccgttttctgaacacaccaactgtggatggcagccgcggggggcacccaagtagtagtacagtgcgaacatggtggcacaaaaagcggttagtccacaaagagaaacacccgggggcacaagcaacacaggagggcaggggaatttctccaccccaaataaaaaaaaaaaacgcgcacgggggggggacacaccagaggaggcggtgtcttgaacaaaaactccccagagagggaggggcccggagggggcgaaaacaagggggggcccatacaagaaggggagctcgtccaagggagagcgcccaggaataaaatccgcggacgacagggaggggggggn

SEQ ID NO: 569272 - DNA, 267 bp, Homo sapiens
gacgtattatccttcaagcccgatgacggaaacagtagttatgtccagtctaagccagatatccagtacgcgccacgttcggagcaggagcctacaacattggagagaatcatctctaagccaaatgtcctatctgactcagtgagaagttcacacgcgcccaggaattacattgaagatggagaaagtgatggctttttaagatgcctctctcttaactctgggtggattttaactacaactcttgtcctctcggtggtggtatag

SEQ ID NO: 569273 - DNA, 152 bp, Homo sapiens
caaaatgtgtgagcttctgtaaattgtaaagcactatagggttgctttttattttaaagaaatgctcggattagaggtgtgagccagaggttgcagtgagccaagatgcaccattgcactccagcctgggcaaccattcaagactctgtctc

SEQ ID NO: 569274 - DNA, 361 bp, Homo sapiens
gttggtagagccctcagaaccatttaagagactctttatttttctctttctcccttttttttttttaaaagttttatttttacgtagaagctttgggacaacagctctggttctccttccccatttccactgtatatttttaaaggaattcccttcagggattccctgtccccaacaggaatttttaaaccaaaacaccccaactgggcagttttttttgggggggacagacggccggccggacctttgagcacatagggtcctgcccaccttaccagttcttcaagccttgccgggcacatgcccgggggacgcctgccctgcccagggggcctcctggcccgccctcacctctgataga

SEQ ID NO: 569275 - DNA, 225 bp, Homo sapiens
acgcgtgatactcgtagcaccgtgacatcgagatgaccacagtatcccgtgtataaccatttatatgtgagggacttgtaactttcaagaactttggtctaacaatctgcttggtaacgacttaaatatagaagcataagatgtaattcctattacgagccaaaagccagatgaatgacataaaaattattcagtgaaaattgctatattgtacattttcagagg

SEQ ID NO: 569276 - DNA, 1342 bp, Homo sapiens
tagatcgcgagtggactgccctattattattttttttttttaaatgcacatgatccaggatgagatttaaaaacacagagagacgacacacaaagacaacagaccagtggcacgagcaacaaagacgatcacgaagcaccgggcacagacacaaacaaacaacaacggaaaccaacagaagaaaaaacaaccaaaaacaacacagacagaggaagcaacacaaaagacggcaaatacaccacgagaaaaaatcaaataagaagagtgagacccaaagaaacaaaagacacagcgagagagaagagaaagaatacaagcacgacaaaagaccgaaataaaaacacagacacgtataaacgaatcacacagagacaacaggacagaaaaaaaagaggacaaaaagataaaagaagaaaacagacagacagggagcaagaaaagataagagaggaaagaaacaggaaaaacagagacaaaagaaaaagacacagcaaagcaagaaaaaagaaaagaaaaagcagaaaaaaaggaagagaaaaaaagcagaagagaaaaaaagaaaggacgaagaacaagaaaaagaaagacaagaaaggaggagaaaggaaaaaaagaaagagaagaaaacagaagagagcagaagacaaagaaacgagaaaacgaaaaaaaagaaagaacagaacgaaaagacagagaaacagagaagaaaaagaaaaggcccgagagcaaacgcgacagcaccgaaggcgaagcagaacgaagagagagagaaaagacaaggaaggaacacacaagagagaacaagagaagaagcaaggacgaggagagagagcaagcgagacgcgaagacgaagagaaggaaggcaagagcgagaaggcaagaggggacggaaaacaccaacaggagcagccaggaaagaaacaaagagaaaaagaaggaggaagagaacaagtaaggggcgagaggcagagagcaagaagacaagcaagacgaggagacgagagagaagaacagagaacagagagagaaaaaaagaaaagaaggaaagaaaaaggaaggagaagaacgcggagggaacaaagaacaaaagaaaaacaaaaaaaggagaagagagagcaagacgagagagaagggaaaacgaaaaggggacagaagcgacaaaggcaaggagacacagacaagcgcagagaagagggagaagagcaaaacagaggagggcgagaagaaaaggaggtaaaaagaagaagcgcgggcaacgggggcagaagaagaaagcgagcagagcgggaagaagagaaaaagagaaaaaagaggagagaaggaggacaaggtccagacggc

SEQ ID NO: 569277 - DNA, 450 bp, Homo sapiens
ccatcccaatccatctacatgtatgcacacttatttggaaagcaggtttgaggtaaaaacaaagaccttcactatattttgctttgacagaaggaaagaggaagagtttctattaaaatctatcatatgaatagtgtgacttaagtcctgtttcaggagataaaaatagctttctggactggttaaagtcccccagaaacaatacagttaatttaatttatttttttgagacagagtctccctctgtcgcccgggctggagtacaggggtgcgatctcagctcactgcaacctctgcttcccaggttcaagtgattctcatgccccagctcctggggaggctgaggtgggaggattgcttgacctcaggagtttgagcttgcaatgagctttcatggcttcactgcactccagcctgggcaacagagggagaccttgtctctaaaaacac

SEQ ID NO: 569278 - DNA, 431 bp, Homo sapiens
  misc_feature (193)..(193): n is a, c, g, or t
  misc_feature (195)..(195): n is a, c, g, or t
  misc_feature (198)..(198): n is a, c, g, or t
  misc_feature (207)..(207): n is a, c, g, or t
  misc_feature (235)..(235): n is a, c, g, or t
  misc_feature (244)..(244): n is a, c, g, or t
  misc_feature (251)..(251): n is a, c, g, or t
  misc_feature (277)..(277): n is a, c, g, or t
  misc_feature (280)..(281): n is a, c, g, or t
  misc_feature (303)..(303): n is a, c, g, or t
  misc_feature (318)..(318): n is a, c, g, or t
  misc_feature (320)..(320): n is a, c, g, or t
  misc_feature (325)..(325): n is a, c, g, or t
  misc_feature (327)..(327): n is a, c, g, or t
ggttctttccagtttgtttttggctccccaagcatcatctcacgaggagaactttacacctagcacagcttggtgccaagagatgtcctaaggacattggccacctgggtccactccagcgacagacccctgacaagagcaggtctctggaggctgagttgcatggggcctagtaacacaagccagttagctntnatnctacttcgncctggggctcccaggccttggcaacttngctgcactngcaaagnagaagggtagtttgagtgtacacagnttnntcagaagtttaggggtctgttntcatctcatggcatntnacagntnactgacacgactctctattagagcactgtgtttagagagcacctctttctctctctgttcgtaagcagggcaaaatggagaattaccagtcagctctttggtat

SEQ ID NO: 569279 - DNA, 128 bp, Homo sapiens
ccaattaggtgcatgagtaggtggcctgcagtaatgttagcggttaggcgtacggccagtgctattggtatgaatagacgtaggctgcatggtttcaggtcaataactcagtcatggggatacagggg

SEQ ID NO: 569280 - DNA, 118 bp, Homo sapiens
aacgcatctgaccaatatttatttattttttacagtcagcgtcctgccatatcgcccaagttggagtgtagtggcatgatcacagttcactgcagcctcggcgacagggcgagactcc

SEQ ID NO: 569281 - DNA, 372 bp, Homo sapiens
attcacatgctcaagatcttcttgtggctgggcacggcgacccccctgtaatcccaccactttgggaggccgaggcaggtggatcacgaggtcaggagattgagaccatcctggctaacacggtgaaaccccgtctctgctaaaaatacaaaaatcagccgagcgacttggcaggcacctgtagtcccaggtactcaggagttttgagacgggagaatggcgtgaacccggaaggcggagcttgaagtgagccgagattgcgccgcttcagtccagcctggacgacagagtgagactctgtctctaaaattttttttaatgtacagttgagtagtatttaatacattcacattgttgtgtacccagtttccg

SEQ ID NO: 569282 - DNA, 827 bp, Homo sapiens
tagtttttgaaaaagagtgaaaaattggaatcttggacatatttagagtcatgtaagacctcgtgcactattgtcgctgcccgtgaacaaattcgccccttcgaaatgggtaaacccccgtttcaacggggtttaccggtcttataatgtccgtccttgcatcttgtgaatctggcgcttttttgacgccgtcatagactttgtcctgagacagcccgcatggttcctggcgcccttggcttcctatgaatcaatacagcggctccaacattttatggcctctgtgagaatacagcccccgttgatctcctccgccccaatattcgtgccaggtattggggctcaccccacaagttgtcaaacaaagacattcttgtggcttttcggtaacaccccttactcgggtgcaaaacaccgcgttcttatttacatcaaaaaggaaaaagcgcccatttatacgaccgcgagtcgatcttacgcgcaccgttgtttctccctggagacccgccttattattattacaaaagggatttatacaagtgatcccctcaactgctccgctctgtgttttactattgcaagcaccccagctatcgattacatatcttggagttgagcttatactaaaaaaaacattaggtgggtggcacacggaagtgcacaaacacaaggatgtgagtggtttaaatatagaagcagtttggttttcttagaacatgaaaatgagaccccattatctgaccatcgtagaaatgtttgggagcacacagcaaacaggacagatactattttcctcagtataaaaacccccttttcccccacataaa

SEQ ID NO: 569283 - DNA, 1371 bp, Homo sapiens
  misc_feature (1073)..(1073): n is a, c, g, or t
gggagaagcgtgagcagtattgatgtggagatcgactctctgtcctcactggctggcatgacatgaccaagaatgatcctattcaataggcccgggctgtcatctggatatgtgcccccgaccagtggagcagctcgcatgtcagttgcccaagtcgcagtaccaagcctgcagccgggggcacagtcacccctggcctccttggcacagtccccttcgcaggctcccagcctctgccccaggttccggctccgggctcagtagccagagacagtgccactgttcatgctcccagtgcccagcttcctagagctctcaggtcccaactccatgtccagtcccaggacgccagcctgtgtgctttggctagcacccagccccgagggggccccaggcactcatctccggttccagcccctaagtttactccagtgactcctaagtttactcctgtggcttccaagttcatgtccttaggagaccccgaggtggatcgtgggatctacgaaccgaaatcaatagaatgggggcaccccgaagctctttctgctggcacaggctcccctcaatctcccagtttcacctatgcccagcagagggagaagccccgagtgcaggagaagcagcaccccgtgcccccaccggctcagaaccaaaaccaggtgcgctcccctggggccccagggcccctgactctgaaggaggtggaggagctggagcagctgacccagcagctaatgcaggacatggagcatcctcagaggcagaatgtggctgtcaacgaactctgcggccgatgccatcaacccctggcccgggcgcagccagccgtccgcgctctagggcagctgttccacatcgcctgcttcacctgccaccagtgtgcgcagcagctccagggccagcagttctacagtctggagggggcgccgtactgcgagggctgttacactgacaccctggagaagtgtaacacctgcggggagcccatcactgaccgcatgctgagggccacgggccagggctatcacccgcactgcttcacctgtgtggtctgcgcccgccccctgggnggcacctccttcatcgctggaccaggccacccggccccactgctctccccgactaccacccgccgtccgccccgacgctgctccgtctgctctgcccccctcatgcctgagcctgccccccctccccctgcgcccccgcgccgccccggcacccccccctccccctgccccgtacccccctctgcggccctgccccccccccctccccctcgcggccgcctccccctgcctgctaccccatgccccgcccccctgccccgccccccctccccacgcccccccccccccccccctccgc

SEQ ID NO: 569284 - DNA, 213 bp, Homo sapiens
  misc_feature (15)..(15): n is a, c, g, or t
  misc_feature (73)..(73): n is a, c, g, or t
cgggagcgacatctnggatgtgacttcttctccgcattatctgcgactctcttcttcatctctgcagtcatgngtcacgtagctgtcccgcgcagtttttacacactcttggccggtctctcgttgggttgatagcaggaagcgcgactctcgggcagaaggcagcacgatgcactgcagcagggccgggatgaagatgatgctcagcagcag

SEQ ID NO: 569285 - DNA, 535 bp, Homo sapiens
  misc_feature (237)..(237): n is a, c, g, or t
caccatgcaaccaacggggtggtgcacctcatcaataaggtcatctccaccatcaccaacaacatccagcagttctacagtctggagggggcgccgtactgcgagggctgttacactgacaccctggagaagtgtaacacctgcggggagcccatcactgaccgcatgctgagggccacgggccagggctatcacccgcactgcttcacctgtgtggtctgcgcccgccccctgggnggcacctccttcatcgctggaccaggccacccggccccactgctctccccgactaccacccgccgtccgccccgacgctgctccgtctgctctgcccccctcatgcctgagcctgccccccctccccctgcgcccccgcgccgccccggcacccccccctccccctgccccgtacccccctctgcggccctgccccccccccctccccctcgcggccgcctccccctgcctgctaccccatgccccgcccccctgccccgccccccctccccacgcccccccccccccccccctccgc

SEQ ID NO: 569286 - DNA, 388 bp, Homo sapiens
  misc_feature (45)..(45): n is a, c, g, or t
  misc_feature (49)..(49): n is a, c, g, or t
  misc_feature (184)..(184): n is a, c, g, or t
  misc_feature (357)..(357): n is a, c, g, or t
  misc_feature (384)..(384): n is a, c, g, or t
tgagattgagtcttgctctgtcgcccaggttggagtgcagtggcngatnctcagctcactgcaacctcctcctcccaggttcaagcaattctcctgcctcagtctcccaagtagctgacactacagttgtgtgccaccacacctggggtaattttttgtgtttttagtaggagactggggtttnaccgtgttaggccagaatgggtcttctatcttctggactttatggatccacccgactccacctcccgggggtgctgaggattacagggagtgaggccactgtgccgggggctgttttttgtttctttaaacaaaaagttataggagattctatggagtatttgtaccgatctnaaatcacattgagtatataatcattgngcgg

SEQ ID NO: 569287 - DNA, 422 bp, Homo sapiens
gtaaacaggccccgtgaatgggttgaactgtgtgatgatgaaatatacggcatgggggatttgtatgcgagatatacggggggggcgaaagaaatgcggggtgagttggcaggggagaaagaagaagttgtgtaagacatttgcgggtgacttgccaaggtattaaaactacgagattattagggatacttacgtgcagagggttacgctgataaaataaggggcacagaaattaggaggggtatgaagcggcggggtggcaatatacttagtaaaggggaaggcatgactaccggctccacctatgtcttacatgatttgctagtatcccgcctacgccacccgccgatctaacgctttgccgcaataccctacagcactctagacttcgatcccacattctgtaggcaatcctgatggag

SEQ ID NO: 569288 - DNA, 881 bp, Homo sapiens
  misc_feature (583)..(583): n is a, c, g, or t
ctcggggttggcgggggtagggggacgagggagaagctttaagggtcaagcctgagcatctgggacacgagctgggagctaagcctcatcggaagaagccgggtaggctggcctgggaaggttcttggaggcagcagccctctagagtgtgaggaaaatgttgggattgcaggtgcgctcccctggggccccagggcccctgactctgaaggaggtggaggagctggagcagctgacccagcagctaatgcaggacatggagcatcctcagaggcagaatgtggctgtcaacgaactctgcggccgatgccatcaacccctggcccgggcgcagccagccgtccgcgctctagggcagctgttccacatcgcctgcttcacctgccaccagtgtgcgcagcagctccagggccagcagttctacagtctggagggggcgccgtactgcgagggctgttacactgacaccctggagaagtgtaacacctgcggggagcccatcactgaccgcatgctgagggccacgggccagggctatcacccgcactgcttcacctgtgtggtctgcgcccgccccctgggnggcacctccttcatcgctggaccaggccacccggccccactgctctccccgactaccacccgccgtccgccccgacgctgctccgtctgctctgcccccctcatgcctgagcctgccccccctccccctgcgcccccgcgccgccccggcacccccccctccccctgccccgtacccccctctgcggccctgccccccccccctccccctcgcggccgcctccccctgcctgctaccccatgccccgcccccctgccccgccccccctccccacgcccccccccccccccccctccgc

SEQ ID NO: 569289 - DNA, 1801 bp, Homo sapiens
  misc_feature (1230)..(1230): n is a, c, g, or t
  misc_feature (1276)..(1276): n is a, c, g, or t
  misc_feature (1296)..(1296): n is a, c, g, or t
  misc_feature (1436)..(1437): n is a, c, g, or t
  misc_feature (1444)..(1445): n is a, c, g, or t
  misc_feature (1481)..(1481): n is a, c, g, or t
  misc_feature (1485)..(1485): n is a, c, g, or t
  misc_feature (1505)..(1505): n is a, c, g, or t
  misc_feature (1533)..(1533): n is a, c, g, or t
  misc_feature (1536)..(1536): n is a, c, g, or t
  misc_feature (1548)..(1548): n is a, c, g, or t
  misc_feature (1573)..(1573): n is a, c, g, or t
  misc_feature (1714)..(1714): n is a, c, g, or t
  misc_feature (1724)..(1724): n is a, c, g, or t
  misc_feature (1755)..(1755): n is a, c, g, or t
  misc_feature (1801)..(1801): n is a, c, g, or t
gggagaagcgtgagcagtattgatgtggagatcgactctctgtcctcactggctggcatgacatgaccaagaatgatcctattcaataggcccgggctgtcatctggatatgtgcccccgaccagtggagcagctcgcatgtcagttgcccaagtcgcagtaccaagcctgcagccgggggcacagtcacccctggcctccttggcacagtccccttcgcaggctcccagcctctgccccaggttccggctccgggctcagtagccagagacagtgccactgttcatgctcccagtgcccagcttcctagagctctcaggtcccaactccatgtccagtcccaggacgccagcctgtgtgctttggctagcacccagccccgagggggccccaggcactcatctccggttccagcccctaagtttactccagtgactcctaagtttactcctgtggcttccaagttcatgtccttaggagaccccgaggtggatcgtgggatctacgaaccgaaatcaatagaatgggggcaccccgaagctctttctgctggcacaggctcccctcaatctcccagtttcacctatgcccagcagagggagaagccccgagtgcaggagaagcagcaccccgtgcccccaccggctcagaaccaaaaccaggtgcgctcccctggggccccagggcccctgactctgaaggaggtggaggagctggagcagctgacccagcagctaatgcaggacatggagcatcctcagaggcagaatgtggctgtcaacgaactctgcggccgatgccatcaacccctggcccgggcgcagccagccgtccgcgctctagggcagctgttccacatcgcctgcttcacctgccaccagtgtgcgcagcagctccagggccagcgagttctacatgtctgtgatggggtgcgcctgtactgctcagggcgtgttacgactgtgagatcggcgctgtgcgtgggcatgtgcgtgggcgtgtcgctggtgcaggtctgggccactgcgaagtcttgcatgtggtggtgccgtgttccactgtccacaccgtcctacctgtacgtgcctcctctagggacatcgcctggcagaaatgctgtaagcaacactggcggtgagaggccgcagtacagctgaaccgtcgaatgcctagaacggcagccacctgggtccaacgggcacttaattcgacgcgcaggcgagcttgtcnattcgaactcatgatgttagtgatcttagcaggcctcggcaacccnctatggaatgagtgcagccntcgcgtatcaatacgtaggtagccagggcgcaaactcgggtgcacacacttggtgttccgcacgatcgtaaaccacgaaggctagatagcagcacgcgcgaagtgtagcatcgcgatacttggctactggatgccgcatnnctatgcnnctgagtccgtagtgccggaggattgaagcacgtggntgcngcagtctgggtacggcctcntgagaaaccaagaaaacgtatcgcgacnatngcacaggtgctntatcacaggttgttgacgagaactngccgagagagagcaccacatggtccgaattggacgagcagcattgacgaactgcgcatgactatcgccgccttgtgacagtgttccacggatggctactgatacgcgaaaagatagccaccacgttggcttagtacgcccncaagaaaccntgaaggttgagtgtgactagtgacccgtcantacaggaacccgaagctcacaattgcctccgatatgttggactcgn

SEQ ID NO: 569290 - DNA, 194 bp, Homo sapiens
atgcctttccccggttcccccccatttttttttaaggggggggggggcccggttaaattttaaaaaaaaaaggtgggattaaatttttccggggttggggggggaaaccaaaccagggcctggttttaaaaccacccccaaggaaacccttttgaaaggggggttaaattggtttaaaaaaaaacttggtttga

SEQ ID NO: 569291 - DNA, 1007 bp, Homo sapiens
gcttcttcaagaagggagatgtggtcattgtgctgaccggatggcgccctggctccggcttcaccaacaccatgcgtgttgttcctgtgccgtgatggaccccagagcccctcctccagcccctgtcccaccccttcccccagccatccattaggccagcaagcttgtagaactcactctgggctgtaacgtggcactggtaggttgggacaccaggaagaagatcaacgcctcactgaaacatggctgtgtttgcagcctgctctagatgggacagcccagagacctggactgaccatcatgtggagccccacccaatcaagggaagaaggaggaatgctggacatggaggccccggagccagatggcaagagggtgacagcaattcctttcctgtgtgtactctgatccagttactgataaggaaaaaatggaatgacccgagaggactcccaaaacctggacttggggtcaagaacacagccagcgaagagttaggggcctcagggcactgggctgttgatacaatagaagcacgacctctggacactgggccacttaattgctttctctagcttcatctaggacatcgtccaggtaagacactgtacccacagctcacacatcagcagtcgatgcaagcaaaacagtccagctacaaactacacatttaacgcctactacatgagacctcaggcgtgtagaataatagctaacactgttggtcaataacaaaggttaagcaagaaccaaatacggtacagacataacaaacatgggcatatgaggatctattcgagggcaactaagaaacacggaatattataagtgggccttatgaagtactatgagacgggcgatgaaatacagtgtataacgcccggattaaagatcatcgagggcatcgacctacaatatatgcagaacatcagtaaggtcaacagcggcgatgaatatcattggtatagctcaccaaaccacagcattgaagaacaatgaacgacgac

SEQ ID NO: 569292 - DNA, 185 bp, Homo sapiens
agcccccccttttttgaaccccatttttcagggggcaggggggcccactcctgtaacccagctacccagggggttggggcaggaaaaaagctttaccctgggaggggggggttccagtaagttaaaagggcatccctgccctactttttgtcacccggggggacaaaaggcccaattttgtccca

SEQ ID NO: 569293 - DNA, 510 bp, Homo sapiens
  misc_feature (67)..(67): n is a, c, g, or t
  misc_feature (78)..(78): n is a, c, g, or t
  misc_feature (197)..(197): n is a, c, g, or t
  misc_feature (200)..(200): n is a, c, g, or t
  misc_feature (232)..(232): n is a, c, g, or t
  misc_feature (269)..(269): n is a, c, g, or t
  misc_feature (293)..(293): n is a, c, g, or t
  misc_feature (329)..(329): n is a, c, g, or t
  misc_feature (356)..(356): n is a, c, g, or t
  misc_feature (375)..(375): n is a, c, g, or t
  misc_feature (381)..(381): n is a, c, g, or t
  misc_feature (413)..(413): n is a, c, g, or t
  misc_feature (458)..(458): n is a, c, g, or t
  misc_feature (482)..(482): n is a, c, g, or t
ggaccggcgctgagcctgccgcggctaaccggtccgatctggacgaacgcgaggcttcttgcgagangaaattcgcgntgaacgggatcgtgcacgatgtggacgtgctgggcgcgggcatccggctggtgaccctgctggtggatcgggacgggctgtacaagatgaaccgcctgtacctcacccccgacggcttnttnttccgagtccacatgttagccctggacttctncagctgcaataagccgtgtccagagtttaaacctggnattgaaactgacctggaatgacgntgcatatgtactttataccaccgttttgttaacgtnggttgccacagcccggggtttagggtngcccaagcctttttttttngggagncgattggggaaacaattgacatgaaatggggnttttagacgacaggcaggcaggtatattgttgatggggccacatnttacccttaagagacgggcagttncctacagttttgttccaggtgctgagaa

SEQ ID NO: 569294 - DNA, 500 bp, Homo sapiens
  misc_feature (428)..(428): n is a, c, g, or t
caggctctctacctaagagtccagactctcattatctgggggagcactggagagtgggagttctggcgcatcacacagggatagttaataacggaactttacacatgttctcttttttaattccttacaaccggcttatgtgggaataggccttttcttcattttacagttaagtctcagggggagtaacagactggcctgagatcacagatctaaaggatccagctgggggccagagcccaggcctgggctgacttcagagtctagtgggactcttcccacccaggatgtaacccgggtcgtcgacatcctcctgagtacacccacgggcctgagaagagcggaggggtctcacaatttagtcacctacaccaatttctagccacttacatttttcacctatcctttctggccaaccaagcacaganacattcactcccccagcaggtagtgaggagcagaggacggaaaagagggggtgccctctcggcacagcctcc

SEQ ID NO: 569295 - DNA, 754 bp, Homo sapiens
cttgccagttaagcatgttttatatcagaggaccaaatttttaagaagagaatttgtacatttcttgagcttccccatgtgaagcttgggttcagtactatcctattactatccatcttcataatgagtgaagcaaactgaaagggaattcataatcttttttcttatctgaacagaaaaactaatgaaaatcaacaataaatctttattttaattttcattcaacagctgaaaaaccatgtctgttgaccacattggaccattgcctagttaaaatccataaaattccctataaaccaatgaaaagaaacttgtctggcaataatctccaacattctaaattctaatttttagttacaaagaaaaggatagaatgaggcttttcaaggaattctcgctcatcccttcaattatttggcaggtaaaacagttctagaattcagcttcctttatggtttattactattaaatagatactttcatataaatggaaacacttttccttataacattaatttcatactccttatattaaggaatatagcaccatattcttgatactccctatgtgtaactttttcctgatgaatgtgatattttcaattaattgactatctgctggtgttgtgccaatagaattgtgatatcttgcgatgtgctatgcataggtgaatatataatatctatatatttctttctttcccaattaattacctttgtggattgttttatattccacactttgtttggccgc

SEQ ID NO: 569296 - DNA, 111 bp, Homo sapiens
gctgcggacacggccgtgtattactgtgccagggatagaccgacgtactatggttcggggacttctaaagtctcttcccataagtgggacttcgatctctggggccatggc

SEQ ID NO: 569297 - DNA, 436 bp, Homo sapiens
  misc_feature (81)..(81): n is a, c, g, or t
  misc_feature (259)..(259): n is a, c, g, or t
aggcttgtaccaggagaaacactaaagaggagggaagcggacaagcctatcacactggcagcaccagttagtaagggtagncagcacacattgttgattcgaacgtgaattgtcttgcagagcaatttaacaatagctaataaagctgggcgtggtggctcacacctgtaatcccagcactttgggaggccaaggtgggtggatcgtttgagcccaggagttcaagaccagcctgggcaacatggcaaaaccccgcctntactaaaagtacaaaaattagctgggtgtggtagcacacgcctgtagtcccagctacttgtggggctgaggcaggaggatcacctgagccttggaaggttgaggctgcagtaagccatgatcgggccacagcactcctgcctgggtgacacagtaaaaccttgtctcaaaaaaaaaa

SEQ ID NO: 569298 - DNA, 415 bp, Homo sapiens
cagatgatgcacataactgctgaaatgagtatctagagaatcttatatacatatctacaacactctggcccaaggcaggcacggtggcgtcaggcccataatcccagcataatcggaggctgaggcggacaggtcacttgaggccaagagcttgagatcagccatggccaacacggtgaaattccacctctactaaaaaatacaaaaaattagccaggtgtggtggtgcatgcgcatatgctccagccacccaggaggcgtgaggcagtagaatcacctgatacccaggaggtagaggctgcagtgagccaagagtcacgccactgcactcctgccgggcaacagagtgagactctgtctccgggggatcaaatcaaaacaaactgaaagcataactgccccgaaaccgttctaa

SEQ ID NO: 569299 - DNA, 116 bp, Homo sapiens
ccccgcgggtagggaaagccctcgccaattttcaggtccatataaggatgcgggtcccctttttaaaaacaaaaaaaggttttaaaaaattttgccccaatcccccgggggcccca

SEQ ID NO: 569300 - DNA, 280 bp, Homo sapiens
gctgctctagaggaccccgctaattacgcagtaaactattagagctcatcagtgaattccagcaaagtggcagtactcaaaattaatacgcagtaatctcttgcattcctatacatcaatgacaaaagatcagaaaaaagaattagggaaacaattccatttaccattacatcaaaaacaataaaatacctaagaataaatctacctaaggagggaaaagacctgtactctgaaaactgtaagacacttaagaaatcaaagatgacacagacatatggaa

SEQ ID NO: 569301 - DNA, 435 bp, Homo sapiens
  misc_feature (13)..(13): n is a, c, g, or t
tatgagcgttctngaggatccccggaggcagacggcaacagagaacttccctgagacggggtaatttataaagcaaagaggtttaattgactcacagttccacatggctggggaggcctcaggaaacttacagttgtggcggaaggctaaggaggcatgtcttacatggcagcaggcaagagagagcatgtgaaaaaggaactgtcgaatgcttataaaactgtcagatctgggtgtgaactctctcactattacaagacagcatgggaggaaccaccctcatgatccaatcacctcccaccaagtccttccttcgacacatggggattatggggattacaatttgagatgagattgggttggggacacagagtcaaactatatcaaagaaagtgatgcaacaggtaatatattacctgttgcagtgtgcttccg

SEQ ID NO: 569302 - DNA, 1293 bp, Homo sapiens
tgttggtgatcccccctcttgtttttggtagtgtctcgctcctgtggggggtgggtgctgtggtgtttcgccgcttcggaggtggggtctcactcgtgccttggccccccattgtgttttagtgtgtgatatgacagtcgtgggggcccctggtgtgagagttgtcagtgtcgttttgctgatggggtgtgcacgtgtttctgtgcagcggggggccggggtgcactgtttgggcgcctccccatgtgggctccatatgggggaaatttagggcctcttttctcgtgaaaaagattaaggacaccttgaaatgttaaaatgccttgtgtgaatatgtctataggggaaagggctcctttttgggggttacctgttctgaggtaaatatattgaaggcgccgaaatgtgtcaggggtaatatagggccttgtggagttataaggtggattatggaaaataatgtgtgttttaagggtataaaggggaaaggtgtagaaaatgaaggtggggaaaaggcgatcttgtagggaattgagagcctttttattgtgtatagaaatgcccgggaatatgtttcccaagaattgtttagaaaattaaagagggggtaaaaggtgtggattttaatgttggttgaacccacgcggtaaagagactattgtggcgcacactgtaaatgaagagcactgttattatagggtaattgcaaaccgtgtaaaaccgatgtcacccccgcgtgtaacgtccaaagggggggtatagagcttataatataacaggggtatgcccgcgatgaggcgtatattttagggtaaacactagattgagaaatagaacatgtttttatggagatttttcttgtttggccccgacgagagcgtgttataatgtggcacgaatataggttaaagatttggtgtcccactatgggttaaatagggttagctcccctttgtgtgtgaatatatgttaagtgtgttgtttctttatatttttgtttggtgggggaacacataaatatatggggtaataataagtgttaaggcgcaattctgggcatatatttggaaaacacggcactacccataaggtgaataaattgaacctgccattgacatccacgggtgaaattatggtgaggccacttacttgtgaaccacatttattcttttgaacacaacacaacttccatttaaggccacttttaggttatttttaagaggccacccattaaagttgctattgactgcatggttatttttgtgggtattaaaatttaaaaataaagttaaa

SEQ ID NO: 569303 - DNA, 940 bp, Homo sapiens
  misc_feature (41)..(41): n is a, c, g, or t
  misc_feature (62)..(62): n is a, c, g, or t
  misc_feature (80)..(80): n is a, c, g, or t
  misc_feature (82)..(83): n is a, c, g, or t
  misc_feature (98)..(98): n is a, c, g, or t
  misc_feature (147)..(147): n is a, c, g, or t
  misc_feature (631)..(631): n is a, c, g, or t
  misc_feature (924)..(924): n is a, c, g, or t
ctggaaagagataaattattagatttatatagtctccaatnttgcttgagctagggtgagtnatagatcctgtctctttngnntcagtgagctacggngcaagtctccggcccgtgcgctctgctcccatgtcttccctcttaaatntccacacactcataacacctccttcctttaccttatccccagacctagtgccaggattctttcctcccacctcctagattattctgaatgccaagtgccacgcaatccgggatgcccagattctggagaagcagcagatacaaaaggaattggatgaagaggagaggcggttggatcacatgatggaaatagaccggcgggaatccctccaaaggcaggaggatcgggaaaggaaaaggagggaggagagagtacggtaggtaaaggtgggcttttgccatttcccccataagccctttctgagtatcttcaggtccacgtagcctaagcaaagagggaagaagtgagacgcagttgtgaggcaccaatatctctcgtccctgacagaatgatgcagggaatcatacaacctgcaagcttatttccaaggttgtaataggcgtgtctctgtatactctaattcagtgtcctttcttggtgcctnctgtcatccactctacatcttcccccagcatctataaagtctttataagcagacccaaggaaggaacactctgcctcattaggcagctcggatctttatgttgactgaactcaaacccgctctctgggccactctatctgctcctgctaaatctctcctgtcacacgaagcattcaagtaccctatccgaatatgagcttaacattgctgcttggctgctgcctttgccttgtctactcccattctgccagcctttactcatgccaaagctttatttagatgcttccaagttnccgataactctggggt

SEQ ID NO: 569304 - DNA, 364 bp, Homo sapiens
  misc_feature (15)..(15): n is a, c, g, or t
  misc_feature (25)..(25): n is a, c, g, or t
  misc_feature (94)..(94): n is a, c, g, or t
  misc_feature (123)..(123): n is a, c, g, or t
  misc_feature (176)..(176): n is a, c, g, or t
  misc_feature (190)..(191): n is a, c, g, or t
  misc_feature (203)..(203): n is a, c, g, or t
  misc_feature (320)..(320): n is a, c, g, or t
  misc_feature (347)..(347): n is a, c, g, or t
atattcacacatatntacacatacnttcgtacacctacagacacatataggcgcatgcctgcacacatacatgtacattcacacacatatatgncaggcctcatgagcccaagcgaagccatnatatgccctgagacctgcacatatacatccagatggcctgaagtaaccgaaanatcacgaaagaagnnaaaatggcttgntcctgccttaagcgatgactttaccttgagaaattccctctcctggctcatcctggctcaatgagcaccttgtgtcacctgccccctgccagccagagaacaaccccctttgattgnttttccactatgtaccctcctatcggncccgcccgttctccctg

SEQ ID NO: 569305 - DNA, 847 bp, Homo sapiens
  misc_feature (1)..(1): n is a, c, g, or t
  misc_feature (84)..(84): n is a, c, g, or t
ngtgcgatgatatccaggacgcacccaggtgtgtgtaacggcgtccaaaacgacccgccgttgagaaagtaccccacacgtttntgtaaggttagtcttacgcgaaaatctgtcatggaataagtgttactgcctcgagcggtagtggacctcccgcgcaatgtccgctgtgtgaaaagtctttcgacggaacacttgggtgtggtactccgctcccacgcgctccttcgcgacacgcgctaaaagaaactttgctgtttgctgtcgccgccggtcgagacagcagaatgggtcatcacacagtggcaggggtcacacacccccgcgtctgtgggggtctctcgctgccccccagcccctcgcgtctctctctcgtctcttgtggggggcgcctcctcgttccgccccctctctcattaccggtgagctgtttttgggtagccccaccaaaatggggcccgcacacttgttgcggagaagagtgttctctcaccgccggaggtcgcacgtggggaggctctcaatttatgtggctcacccaccgcactctcgatgtttgcgccgcccttaagcacgccctcgcgcttgaagagctgtcgcaaatgtgtgttcagcaacgcgcactatcatgagtggcgcccccctctgtggctcaacacttctgcgcaccaacaagtttgccaacacgtgggaaaattcaactagcaccgtttgtgcagactacgccgaagcaccgcacccacgtttcttgtctcgcacccacctcgtgttcgccccctctccgccgcgttgtcttcactcgttttcttcgccccctttattagcttgaaagatcctcttgcgaaca

SEQ ID NO: 569306 - DNA, 1446 bp, Homo sapiens
  misc_feature (191)..(191): n is a, c, g, or t
  misc_feature (266)..(266): n is a, c, g, or t
cattatgaatcacactattagaatccttacaattatagaacaactagttgaagatggaaaacaagtgtctacatatcctccaccaggctgcgattgtactgtatgatacactatatactcatgaactgacaaccattatatcttgaatgatggaccgagacagaccttggatactttattatgtctttatntcttatctcatgcgtatgtctgtgaatcccatgctaccacatttattttgatgacgctgaacttgacatacacangcaactattccgtgactctatcctagttagttatcaataaaagttacttgagatgcttgtaagacgtaattacaataagttcgcgtttccgtgtttaccacttgaacgtggtatatactacaggttggatcgaaagtctatcatcgcgagtcattagttatggccccaaagactaaggggtttgaagaagcactaaataccattccagaaagccaggtaatttcatactagcgataactcaggctaatattttctactaatattgcgaatacagttggttatacacacccaacctttgttgcgccgctacaacaaaagtgtggcttccattggccaaccggtatcttccttgtccctagcttaactttctccgcacggacagggaagcttttctcccacttaatggactgggggtaaccccgaacctagttttattgtagggcttcctttgttaagtctcgctttatgggtcattttcctatgcccctctaattgtggtgttctcccaaaacacggacagcttcttataaggccccaccctccaagagttgtgggccccctacgcgacttttttttttatgacgcggtgttgacatccctaatcccaaaactccttgggaacagttttgcgcttgcgcctaaacgacgccaccagcggcttcatattacactttaagcaccttgggggaatgcccttttttagacactctttccacaacaggttaattagttttgctccggcactcgcaattattccatgaacgtcagggtttagacccaattttctcgacaccttctttccgaagtggacacccgtaagctgggcgtggacgcaccctttcccttaactagtaaccccgggtacctccgcgggattaacactagcaacgggcaacgcagctcttcattcacaaggcagaaaccagttcccttgttggctcccaacacacttttgtccacccctcccaaacaacaggtgcttaccctttccccaattgccaggcaacacacttcccaacgtgcggcaattctctacaaacgcccagtttacactcccccaaagatttgacgagccttcgcactccaacttttggcacaggacccaaacaccgtgttcacccacaccaagctccactgacaacggcgcactactcggggacaatgtggcgacaaccagtgc

SEQ ID NO: 569307 - DNA, 233 bp, Homo sapiens
aggtatcaacattctatctctacttccatgcactcagctatactaggataccacatactagtgatatcatgtggtattctttctgtgcctgagctaataacactataatacaagatcctccaaccatcacattatctatgtctgttccaacatgacacggatttcttacctttagtaacggctaaatcagtattcccattgtattataccatacccatattcatctttcattt

SEQ ID NO: 569308 - DNA, 147 bp, Homo sapiens
gtactaaggaagcctggttggcactctcgctgagggctgtgtatcaggactgtccaccggcgtctgcgtgtgaagcgggtatcaaactggctcacgtcctcctctgaggcgtcgttacggagggttaccgacgctcgaatttcgtaa

SEQ ID NO: 569309 - DNA, 292 bp, Homo sapiens
tggaatttcacaaggcttttaggaacccttttttttggggtaaaccaggctgaggaggagggaacttttttaaaaacagggtctggccccaccaaaggggttttttttaaatgggccccggccctacctattaattggagggggccaacctaaaaaaataccccaggggggttgggtttcagggacatggggggggaaccaaaacaaaatttggcggacggccagtcaaggggaccaggggggattttttaagggttggaggcctttggaggaaaaccccacggtttaaaaa

SEQ ID NO: 569310 - DNA, 1025 bp, Homo sapiens
tctcttccttgacaccctagcaaagatgctttgtggagtgcaaacctttcataaatatactttccaggctgggtgcagtggctcaagcttgtaatcccagcactttgggaggccaaggcgggtggatcacttgcggtcgggagttcgagaccagcctggccaacatagtgaaatcccgtctctaccaaaaaatacaaaaaaaaaaaaacaaaaaaatattcagccagtgtgtgtgggtgggtgggtgtccccgggtattccccagtctaactccaggaggtctggaggtggggagaattggtttggaccctggggcaggcaaagtgttggccgtagaaccggagaatcaccccattggtactcccagttgggagggcgacagaattggagacccggttctcaaaaaaaacacaaaggtggtggttgtggtgtggttcttattatacgtgctatatcatttcatgtcttcaccaatcccacaccacaagcttttcctaataaacagccgtgggtatataccccgcccttgtacggtatcctgctgctggggattacagcccccatatatattggcgggtataagtagaaccacagaataaagacatctcgggcgaaaagcacactctgagaatccgggcgtgactattcaatcacaaacgggtacgacaactggcggtgaagtgttgtctacaccctagccccaaatataaaagcggttcaagcaagacaacagcggagaacgaagacagtcaggcgacagggggaactgctctaaaacccgcgagcgcgtacccagcggcgggccccggtgcgactaaagacgagcgtggtcgccggttacacgagataagtatcgcaacgcgggggcgccagaacgcgcgcacaccaccgctggggccgaaacgagtgggctacaacacgcctcggcacgagtcacggtcacacagcacgccatggcccgaaccacgacagcatctacccaccaccgtggtcgccagaagcaagcaaacgcaacacctcaacgg

SEQ ID NO: 569311 - DNA, 210 bp, Homo sapiens
gcacgtctgacgaattcacgcaatatctcatgggtactccattacacatgtattgccacgatttagtcaccctgactgattactctgatgactctggtcgagaagaaccaacctcttgcaggaccagcagaggaagcattcctcctccagaggagttgagagtcgggaacacaatgacggtaatgctggcaacccaaccaggaagtcatg

SEQ ID NO: 569312 - DNA, 1202 bp, Homo sapiens
gcttcatagggacagccggccctgtgtgcactactacgcctcggtattctccatgcccttccccagtccaggtcgtggcacctacggctatggggctgatgctatgcacgtcatgggaagggatgaggaccgatagccggagtctaacgacccgtgggggcagcgtgaccctcgaggagaggcatccgcagcatttatgagactgcctagctgaaggagaattgcgccggtctgaacgtgaagaaaatgcgagggataaatgatgttagggggacgcgttttcggagagtatgtcctcatggatgaggaacgtcggacacaaggcttccggacagataggcaagagggagtctagtgcaaggacaatcgagcttgcatcccaacacaagccttcatcgcacatcgctatgcggctacctttcggacaccaccatgagcgtgagcgtcactagggacaaggacttcatacatgtcacatgcatctgccgaaagatccgtgacattgctcgcagttgacaaggctcagatagcagtgccagtaaggcgtccgatcgcagtaggtactctccttctgagagttctagacagtgggtgctacgtcctgaggagctaggaattcaacgagagagcagaaggcatgccaatgcgatggcgctggggccccatggcccgtgaggacgggacactgatgctgcacctgcagcgcctggagacacgctgagtgtgtgtgccgaggagccggagcacagtcagctcttcaccaccttgggccgcatggcctggagttcaaccgactggcatccaagtgcacaaaatgaagcagggcactccattctgcagaacctgtgtgagccagtcggaaggagagaacgaggtctgaaggccacgtgggatcagggggcggaacacggggggatcaaggatgccgaaaggctgcgggctggaccacttggcgcacaagaaaagtagaagccaagcgaaccaccaagggtacctaagcagagcagagcacgaaactggagcgcaggcaaaacacacagagtaaaacacaacgtacagcgaggcggaaagcccaacagtgcaagaaccgcaaacagctagaacacaacaccaacaatgtaagaaagagcacaacgcccaaacatcacaaccggcacaacgaaacaaagagcacggaagacgcacccgaaagaagagcaaca

SEQ ID NO: 569313 - DNA, 402 bp, Homo sapiens
  misc_feature (7)..(7): n is a, c, g, or t
  misc_feature (146)..(146): n is a, c, g, or t
  misc_feature (290)..(290): n is a, c, g, or t
  misc_feature (357)..(357): n is a, c, g, or t
  misc_feature (378)..(378): n is a, c, g, or t
gacgttnaggtgggaggttcgtttgagcaacatagtgagaccccgtctctacacaaaaacaaaaaaaataaaaaattatctgagcatagtggagcatggctatggtccaagctacgtgggaggctgaggtgggaggattgcttgcntccaggagttcaaggctgcagtaagcagtaatggtgctacttcgcttcagcctgggcgacagagcaagaccctgtctcgaaaaaataaataaagtaaataaagttgagaattttgtattttggtacagaaggtctatgcctttnaaatgctccatttggacacgcttagggcaggacgctctgaaactgggaagcctggggccctgtacantcttggctgtcccctgtacantctcctaactctagagggctggtt

SEQ ID NO: 569314 - DNA, 455 bp, Homo sapiens
ctggacatggacacgctatggcagcaaataagccaacggagtaggacatgcccatagagctccgcggtggggacaaggaagagtcacagcgaaaggtacacagatcacatatggtgaagcaactatagcagaactttagatgccatctggacagctaagagtgacttactagtacgatgcaggcagatggatctctttggacttgagagaagccaaaccttctggaaggaggatctccaaaatcaaagccagaggttgactagtaggctgtagccacatcaacacaatgcccgttgctgcacacctttccatctgcacattttagttccaggaagaaccattcccttatgttcatcatcgttggaatagaacatcttgcaaggattattttgtccaggtgaattatcttagcagtataaccaggcacatattacatcttctggtgcacatggaat

SEQ ID NO: 569315 - DNA, 905 bp, Homo sapiens
tctcatatttgaatgcagtacaaatggagacgggttcgagaatgggaaatgcagtcgtaccagaacaatatgattatgtaggcagagtcctaaaaccaggagaagaaccatcagagtatacagtatggaggtaagatagccacaggcatcacgaatataagcaggattgaacttcgtaaacaaatcaaagtcaggggccttcagaactgcaagtcttactccctttacacagactgtccggcagtcttggggttgattcagctgctgcgaaaaacattcagcagatgtgtacaagatgaatctcaatctcactatgaggatgtgctggtaactgagacattattgtatgctgccacaaggtcagttgtcgcagtagtggtagatgtctagtggggcttcatcatcctggaaaagaaggagacgggatactaaaagagcaagagagtcacaatattgactttcttatccttgcatttggccttcgtccttcttctttctctttctctctttttacgatatattgaagacgaccaagatatgtgtttgctcactcaagtgtacagatctcctcaagaaaggtccatggtactcctgtgtcacatagtgggtgattataaaacatgggtgaggaggcgacctgatccagggcggtgggggtaccttgattgagtgtccggctactgaaacattaactgtgattgccacatttctatggtgccagcaaagaaatcttattacgaacttggaatctaggcacgaataggggtccagccacagtgcacgacgattgaaccattgtcctcttctctacaaagaaaaaaggcataaacaaccatgggactcaagaaacaacgagagaagacacacacggagaaatagaatcaatccaacttaccatcgtgtat

SEQ ID NO: 569316 - DNA, 1357 bp, Homo sapiens
cgtctttcatttggatgtggtgagtggtgagggtgggaggggggtggggagactacgacgcgtctcttggtggtcgcgtggttgatgcatatacatccaacatgccgggtgtgtttttgttttcactaggtggaggtgttggtgtactgttgtggtggtcctcctcatcccactactagcagcctgtatgattatttatccaacctaccaggagatgtgtgttttatgtccgtcactggcaagggcaatctcttgttctgagtgagtaagactgatcttttggggcttggattgtattagttttagcgagcatgagtagatcgccgcgagaggcgatttttatttcgtcggtgtgcgggggggggggccaaccaccaaccaccttttcgttgtctggttcttctgcgtgcgactgcgaccgcatcatttatcatagtatgatataagcagaagtatgtgtgagtgtcgacaaccatgcagaaggtataattatgcggttttgtgtgtcgccgtcgtccacatcaggaggaggggcagcagcagcgcgtgctgagtaagagtggcgccgcgcctgcggtggttgttcatacagcagcgttggtctcatctgcgcagcagagagcagtgtagtagagagtggtgttgtgctcagcggcgctgctgcggacacgacatacacactactgctcttctcttctgcgctaataagtgtatcgcccgtcgaagagatgatatatatatcatctctatagtagtaggtgtagactctcatctcatctcttctcgtcgtgggttgttgagagaggagagagcatcatcctcgtggtagagcatctcacacactcgtcgtctcgagcagcgcttatagtagagggcacacacgcgcgctcgtattccacgcgcgtcgtgtgatgagagagtgtgtgagagacacacagcgcggggggtgtgcgcgacgagagcggagagagagacgccacgcgtgtgtgtgtgatagcgcgcgagagagagatatgtgccctcacctaacatatatatatatgtgagcacacacgcgcgcgccccaccagcgcgggtggtgagagagatatggacggccactctctgtagagacacagcactctctcccgcgcgcgggccccgcgcgcgctgctcgcgcgagcgggggcgatcttttttgtgtggggggcgctttttagtgtggggagagacacacacatatgttatacaaaaggaggggcggggcggcgggggtgtgtgggaccacccccccccccccccctccctcgcctctttgtggtcttttatccccgtgagcaaaaggggcgcccccccttaatattttttgtgtgggaga

SEQ ID NO: 569317 - DNA, 335 bp, Homo sapiens
aaaaaaaaaaggtgtcgatggggaagccagaccccttgcgggattccgggacttacgaccaaaaggaggagccgctggagcgggacttcgaccgcttcattggagccactgccaacttcaaccgcttcaccctgtggggtttggagaccatccctggcccggatgccaaagtgggtggggccttaacttggcccacccttgcggcagcgattcacgcacaggggcccgaggattgagaaccagagcttgaaattcaaagctgcgatcccttcccagcagtaaaccagctttttggaaccgattccatccccccaataaaggagcttttcccagca

SEQ ID NO: 569318 - DNA, 378 bp, Homo sapiens
  misc_feature (304)..(305): n is a, c, g, or t
  misc_feature (347)..(347): n is a, c, g, or t
  misc_feature (358)..(358): n is a, c, g, or t
gggtcgtgtcctgtgtcgtggtctgtgtcgtggttctaactcccctgtaaatttaactgttagtccaaagtggaacagctctttggacactaggaaaaaaccttgtagagagagtaaaaaatttaacacccatagtaggcctaaaagcagccaccaattaagaaagcgttcaagctcagacacccacgatacctaaaaaatcccaagacatatacactgaactcctacacacccacattggaccaactctatcaccgctatagacagaactaactgttacgtatacagtacacagtgaaaacannttctcctcctgcataagccttgcgtcagaattaaaaacacgntgaactgacanattaacacgcccacatatct

SEQ ID NO: 569319 - DNA, 389 bp, Homo sapiens
gtagcagtgtaacaggtaaggctggaccgagtacagctcccacctctatataggaggagctaggagtcacctgcttcttctcagtggaagctacagcagagctggaggagggaaagacttcagtgagggtaaccaaagaacagtgtggaccgatctgagggagcccacagctgcaccggaacaaacacacccacatggactttctggacctgcagaacagaccgcagggtgtaccagaatgccaacccctacaacgcagcccctcagaggatcagccggcgccaggtgggagctagcaagcctcctcttctcccctgagccctgtatgaaccctctgctgtggcccccaggcacagaacccagtgtggagagctaggctcctcccttcc

SEQ ID NO: 569320 - DNA, 1197 bp, Homo sapiens
agcgggaagtaagagccgagggccggcggtgtgtgccggccatgtagggagcagcaggtcccgcggcggctgcctgtgttgccgtggcgcgcgagccacctgccagcatgcagcggcagggacgaggagcgaccgccatggtcgcgccggtcatgccgagtggagtcagaacctacgctaacgactgcgtagcagtgcgacgagccccgggccgatacatggtcgggaacatgctccatacacggggagctcgcagggaagggtcgcacggatcccgagagcgctcgcgtcaggaagccctagcgtcggcagtgactcatgagacaccgaggacgtccgggacgtccagtcccctccgtcggactagagctgatcgattggcgggctttgcaccctggtttcgctcggccgcggcaacctcgccactgtgttgcgagtgcggccccgaagaggacgggcctgcgtattctggcgtacccctttgccaagtgggttggaaagcaaacgggctccgccactggatccccagggacaccagcgtgttccatctccagtatacctctttgtcacgcgttctacgcaggttccccagcagtttgtgcgtccgcaataacgtctacttccgttcagggagaaagcgtcatttagcgctatcactgtgaaggacgtaatccgagagccttgcctaagctggttccacaaaatccccgctactccattgggaatatccccacttgctttaagcacagcaatccagaccttggaaccttggccagggactgcgaagtagcacattcggcacgtcagtggaacccccaaggcaacgtactcgttgtagaagcccttctctttgtgaaagcatgcttttgccatgtactccagaagggaaaagttagtccctgattcgataagtggctacttcggaagttaccctgtattatcaggccagcggggcaatgacgacttctgaggaaacccaagttgggatcccgaaggtccttcgaaccgtggcagttatctatgagggctccctgtgcatccttcattgcgcaactaggcatttagactctacgcgattttttctattccagaggcaaagcctatggtcacagggaagcaaaagttgtaggttaaagacttttgctaatgggaacacgcaaccgttgttttgtcaccaacaatttttggttctcccag

SEQ ID NO: 569321 - DNA, 161 bp, Homo sapiens
ctgaaatctttatcaggtattgtaaagataccccaaagatatgtttattaaaattgaaataatgtaaaacacaatgaataatttgcaaaacccaagatcccagtaccccatatgcactttggtaccttaatttttttttataaataataaaagtgaatatt

SEQ ID NO: 569322 - DNA, 208 bp, Homo sapiens
aggagacagcagtgaacacttatcaccagatgctttatatatgcaaggcacttaatcccctatagcttctgcattatgcaattaactagaaatgcctttgcaatgagagccgacgctcacacccccgtaaacctgactatcgtaccctaagaacagctaacagagcacacccgctcttatttggcataatagtgggaagattgatagg

SEQ ID NO: 569323 - DNA, 823 bp, Homo sapiens
  misc_feature (294)..(294): n is a, c, g, or t
  misc_feature (347)..(347): n is a, c, g, or t
  misc_feature (386)..(386): n is a, c, g, or t
tactcttgaacaaagaatatttagtttttcaaacagtttgttgggcagctaatagtgtgaaccaggtcatttttgtattgagtaaaaaaatcaaactttgagaaacttggcattttaacaagtaatgacaatgcttcaggttagtattatttgtaatttgaatcatttacatctaatgagaatgttagttgagaatgttttcttaaagttttatatcctataaataacggaataaaaaaattgtaaaatgaaacaacaaacatgcaaaattcctatttacttttattacataanagtaattttagtgcttacctaataaatcttgaatggttatttaataaattatnagatgggtgatgtgtttcaaaagatacttgctatttttngaagaaataaggatttccagtcattaaacaaaactaaacaatcttattagatgggtgatgtgtttcaaaggatacttgctattttttgaagaaataaggatttccagtcattaaacaaaactaaacaatcaaatgttctatattaggaatctcaagtatggctttttttaaagtaacttttaaaaaagccatacttgagattcctaatataggaacatttgatgtgtttagatttgtcattattcttggcctttaaaaattttacactcatcaaagtgaagattagaacatacaattctcgaacacatgtagaatagtattgattctgtccctggtaatagaatctcagtggaagtttattgcaaaactaactatggaatctcatctgatttattaatttcttaaatttagattttatgaggtacctcactagatgc

SEQ ID NO: 569324 - DNA, 732 bp, Homo sapiens
gaccatcaccctaacacccagcgcagagacagatgtatccctgtgtctacctgtggcttcatctacccaatgctgcctggagtggccatgtgtggaccagtgtgcttgagtgatgtggcctgtgtggacgcgggcccagcgcctacacgtccttgccctggatgtgccctgtgtgccctgacactgtgatgaacatggagtgagtgtgtgtgtgcgcttgtggttgtgctcatcagtgagaatgtgagactgctgtgctgtgctgcagctgccctgtggtctgctctgcctcttccctctgcctgtgtgctgtggaccacaatgtattgcatgtagatgatccatgtggccatgctcaactggctctgtgcatgtgccctgtggcacatgctgagctaactacttgcttgtgtgtgatctgtgacttgtgttgttgccatgtgatggtgcatgctgagatctccttcttcttcctggagccctacctgctcgtcgtcctgcacctcctattcttcctgcctggtgcttgcttggcagaccagggctgtggctggtgcctgaccatgtgccaccttgccaccttgcgccagggctgtgagcccattgctgggggattgaccggtgcttggtgtggtccctgcttgggtgcttggttgcctaccctcttgccactctgctgatggagcatctgtggacttgccacgcctgcacccatggaccccttctgtgagt

SEQ ID NO: 569325 - DNA, 777 bp, Homo sapiens
tcgctattgcggcattctccctcggtctccggtaggtacggggcaactcttctcttcctgtctgggaaaaagaccatagctcaaaaggaaggccgagggagaagttagaaagggatgatgaacgaaggcgtatagaggggactgcaatctgcccgcggcaataccccgctcctgagctgcgtcgcactaccgcctcggtcagctgtcatggtcgccgggtctacgtgactccgggtagggaccgtcctggtattccggtcaccactggtactgtatgtctcggttctgccgactccctcttgttctcgctttgtggactccgatgatattgccttcattccctgtaggagaatgatgagaccgaatctgagaaattggagaacacattgggaaaatgagccatgtggtcaataggaaccagttagaagccaagctcgctgttgtcttatatgatgatggggtagtccacgtgggccttctgcttacagataaatatgcaatgagtggaggtcattccaagggcaaagactctgtgaaagtggttaccggattgagctgtgatccagagtttgatgagcaattgccgcaaaattcatatttctaagttttagaaggctaataaaatccttaggatgagtctagccaagaacgcaagttaagataatatgaacattcagttggcctgatgattgcacggacacgtttcagtgccaaagaagatgtggtcgatgattcccaaggcattcatggagaatggcaacaaattgttaaaatggg

SEQ ID NO: 569326 - DNA, 629 bp, Homo sapiens
tggaagtgacatcgtctttaaaccctgcgtggcattccctgacgcaccgccgtgatgcccagggaagacagggcgacctgggaatgctccatctacttccttaagatcatccaactattggatgattatccgaaatgtttcattgtgggagcacgacaagtgtgggctccaagcacatgctgcacatccgcatgtcccttcgcggtgaacggctgtgtgtgctgcatgggcaagaacaccatgcatgcgctaatggccatcctgagggcacctggaaacagcaacccatgctctgtgcatgaaatctgtctgcctcagtatccggggcgaatgtgcggcttctgtgttacaccaaggtagtgacctcactgagatcagggtacatgttgcatggccaataaggtgccagctgctgcccgtgctggtgcctattgccccatgtgaagtcacgtgtgccagcccagaacacttggtctcgggcccgagaagaccactcctttttccaggcttaggtatcaccacgtaaaatctccaggggcaccattgcaaatcctgcagtgatgtgcagctgatcaagactggagacaaagttgggagccagcgaagccacgctgctgaatcatgctcaa

SEQ ID NO: 569327 - DNA, 323 bp, Homo sapiens
ccgcagtctggggcttggcagagactgtcttcgacaccatcaacgctgagacagaccggtctggaggctcgtcaagtaaagccaagaacaagcagctgggccatgaggaagactacgccctgggcaaggactgcatcatgcatggctacatatccaagatgggcaatcccttcctgacccagtggccgcggcggtacttctaccgtgttcccccaccgccctctagtcgcggggcgagggccgaggccccgacagacgcctgtctgaccactggagggagactccagatccggtggaccgcacaccgcgactcaagggagcgc

SEQ ID NO: 569328 - DNA, 792 bp, Homo sapiens
tataagactacagtttatttacaattagtttgtaccaaaaatgaggactagagagaaaaatggtgctccaaagcttatcatacattgtgtcattactgtcctagtctcattaattgtttgcaagcttttgggcctacattttagactaaccctgtttattcctgtgattcaaagatagtgatctcctgctagcttgtgcatagaaatatactacagggatggtgtacatgtaaaatgtctggaccaatatactggttctgggcaattagtcctgcaaattctgccaggtacataaaagtgatgtaggggtgccctaactagatccggaagtttcttgtgtgtaggaagatatagaaagagtagggggaggaactttcatagaactcccctcagaaggcgaattctatatccttgacaagtaaaatttgagatggaaattgtctataatacacaacttatggaatttggtatgcttcactctattggtttgagaaagggttgtactacatgtagctagccttctaatctgaatgtattagacatgagttgcctattgcggtcgtatttttgcttagtttatttatccttataagcagggataaatagttactaacaaaaaaggaagcatgaaagttttactatcactgagcctggtaggactttgattggggttaggggatgcagtttaaatgaaaaatgccgttgggattaataactttagtagggaaatttccgatactttaaaattcatcaaattttgggaggtcggaaatgccgttggcctgggggtca

SEQ ID NO: 569329 - DNA, 934 bp, Homo sapiens
gaccacgcgtgcgcggacgcgtgtgtcgagccacggcgtccggacctgactctctgaggctcatttagacagcttgttgaaattgtccccgtagttttcaatcatgtctgaaccaatcagagtccttgtgatctggatcagtctggtcaaattgcatattcactgctgttacagtattggaaatggatctgtctttggtaaagatcagcctatacattcttgtgctgcttggatatcacccccatggatgggtgtcctgtgacggtgtcctaatggaactgcatagtactgttgcccttccccgtccatgaaagatgtcatctgctaacagataaagaagacgttgccattcaagagacctggatgtggccattcttgtgggctcctttgccaagaaggcgtaaggcagttggccatgagtaagaacgaattttactgagaggcaaatgtgagaatcttcaaattcccagggatgccgaggccttaaccataaatacgtccaacgaacgtcacttaccaggtctattgtgtgtgggtaatccatcgctaataccaactgcctgagtgtcttccatgtcagctccttccatccccaaggagtatcttcagttgcttgactcgtttcggatcacaacccgagctaaagtctcatattggctctttaaaccttgtgtgttgactggctaatgatgtggcatgcaatgtctttaatctggggcaaacccattcctcgacctcccgtatccacgattgtcaacccatgccaatgttgcaccattgcaggaacacgaactcgggggttcatgaacgcctggaaggatgaccagcgggcttcacggacaatttgtccgctttcgtcccctgtgcgcgctttccataggcccaaactttcctgcagtttgtgcaagcccctggccgctctggacccgttgtc

SEQ ID NO: 569330 - DNA, 1112 bp, Homo sapiens
gctcgcagtctgttcttccgaccgcctcctcacgtctgcgttttctctgccggtcgcaatgcaagaagagatcgccgtgactggtcattgacaatactggtctcctgggatgtgctaagctggtttatagctggggacgatgctcccacgaaccgtgtttcctatccatacgtcggtgcgctcccagtactagccagggctgtctagggttgggctattggagcctagaacggtactaccttacgttgtggcgcactgaggtcctcatcacgtctagatgcgtaggtcatcgctgaaccactgaattcatcctcattagtagatcattggcgatcggtcacccagaacatggtgaggactattggtacgacagaatcttgatatccacggaggcattcttatcaaagcggatgctcgtcgtcgcttggtccccgagtatggaggcatcccatgtggcttggttgaaccgatgtgacccgctcgtgtaatcctccaaaggacctagagcgagagacgacaggaaagaccttcacgactttactttgtgtttgaagaacctttcagactagtccacgagcacattgatactgtgtggcgcgatgccaaggccagttgcgtgttcccatctagacgcctcttgtggcagcgaccacttgagcatttgtgcatgggactccgttggaagagcggggtcacccaacactgtgtgcccattctacgaagggctaccgccctcccccacgtcattccttgcgtctgggagccttggcttggccggggaacttgacctgaatacctcatgaagattctcactgagcgaggctacagcttccaccaccacgggcgagcgggaacatcgtgcgcgacgatcgagggagaaagctggtgctacgttgccctggacttcgagcaggagattggcacccgcgcatcttccttctttctctgggagcaagagctacgagcttgcccgattggcccgggtcattcaccatttggcgcaagtgagcgggttcccgggtgtccgggaggccgcttgttccacgctttccttccctgggctacttggactccttgcgggatccacgagaccaccttttactccatctttg

SEQ ID NO: 569331 - DNA, 335 bp, Homo sapiens
  misc_feature (44)..(44): n is a, c, g, or t
  misc_feature (75)..(75): n is a, c, g, or t
  misc_feature (87)..(87): n is a, c, g, or t
  misc_feature (245)..(245): n is a, c, g, or t
ggcacgagcatctacaccaaaaaacttctctcgtgagaaaatcngcctagcaacggcggtcaacctgggatgggngtcatcctggtnatggatctgggtagccaagaataattacctcaaagtaatttggtaatcctcgtcattggtccttaaaaactggttttcctttactcctctgaatatgtacatagtggactatagcacaggcattcccatggcaaggccctattcccaaatacagatcncttccttttagagagcctctctccattggtcatttaaatgaacagacttacctcgcaaaaacagaaagaaacggcggggattccagaata

SEQ ID NO: 569332 - DNA, 192 bp, Homo sapiens
ttatcccagccctacgagaagcttatcagttctgtgccattgacgagcattggacaactagaccaaaggatatgtttgatcccatggctggtctgaggacatcctactatgaggcattagccaagggccagaaaattgagatggacaaattggaaaagggcaaaaaggagcgaaacaaaaattgagtttgtg

SEQ ID NO: 569333 - DNA, 295 bp, Homo sapiens
ggtgtcggccatgcgacgactgacgctggtccgtcgtatcacaagggtcgatgactgttgttcaccctgtccagttctcacctggtaagcccgggattcaaaacagcaaaattgagcccccaaaaaagcagcagagagagagagacgcagccattgttcccagcagcccccgctgcacaggcaaaagcacctctggtgccatttccacgacaaaacaagacacagttgaaccttctattttgacacatggtggatctcttttcctaagacttggctagggggccacaggagggcg

SEQ ID NO: 569334 - DNA, 206 bp, Homo sapiens
tcactgttcaaaaaatacacttaatggagtatttggcatcagcaacctttcctgatgaaagcagacttttggccaaaaaacaatctgtaatcagaagatactcttccatccttctcttcctgaagcaaactgaagtgtccaacttcctctaagctatctatcaaaagctgctgtaattaaactatcgttatagggagtagtttttt

SEQ ID NO: 569335 - DNA, 261 bp, Homo sapiens
ttcatatcaggcttcatcccccatttccagtctgattatacaagtgctaagtggcatgaaagcgctcgacatgattcatgtcgagtcctttcatgccagctcacaccccgaagaaccttgagctgatgcaactcaacacctcgcatggtgccgtcccaacagagccttccattggcccccacccccttcgaaagccctttcccaacaactcatacactagcacctggggatgaaaggactggacatgacgggtaccgagct

SEQ ID NO: 569336 - DNA, 111 bp, Homo sapiens
tcaatcgacacatgtgttcagactcacatggacacatcatgctcactctcacccatgtgctcacacacggatactcgtgctcactctcacccatgtgctcacgtactctcg

SEQ ID NO: 569337 - DNA, 141 bp, Homo sapiens
ttatacatggcatgaccgagcatggacacatcgggtgtggtcctctgatatgcagtagaggctatttagcactgcacaccagcctgggtgacagagtaagactctgtctcaaaaaacaaaacataataaaaaatatccccg

SEQ ID NO: 569338 - DNA, 725 bp, Homo sapiens
  misc_feature (9)..(9): n is a, c, g, or t
tttaatatngttattaaaactttaagtatcctatcttgaacattggtgttagtataaaattacttggcaatgctgacattgaaatgaacatttttctatgtttgaaaaaaaaaaaaaaaaaaaaaaaagaaaaaaaaaaaaaaaaaaaaaaaaaaaaaaaaaaaaaaaaaaaaaaaaacaaaaaaaaggggggcccggccgccactaagatcgacccatgcggaggcccagaacacaagtcacacccacattctagcagaaagaacgaggcgcgccacgccaacgtcgcccaggcgactataaaaacagacaacgaacaagcggactctacaaaacagaaactcgagcacagggagaaacacaccgaagatccagaagacgcactagatgagaagcacagacaaccaggggcagcgagacaaacacgacggacaaacgcaaacacacaacaagagcactaaaacccacagctgaggcatacaagaaaaaaacacagcaaacagcaaaagcacctgggataccaccacaacaaaccaaaccattacaggaggaccaacaaaacaaacgacactagaaccaaagagagaaataaggagaacaaccatggaacacacagcgaacggcaagcagggacagaaagaacgacaccggaaaacagaccacgaaacaaccagcgcgaaacgaaaagcacaaaaccgaacaacaaaaccgaaaaaacacgaaca

SEQ ID NO: 569339 - DNA, 226 bp, Homo sapiens
gactaatattttgttgtaatccattaagtaatgtaacgcatgtaagatgcattagggtgcctggccaggactccgtggtctcctgttgtgacagtaataatggttataataattacaatgataaaatggccatcattctatttgtatccaaaagtataaatttgggctattggcatgaaaagtgtcctcttgactgcaataccacgcgagatgtatacctagatcg

SEQ ID NO: 569340 - DNA, 141 bp, Homo sapiens
actatgttgcccaggttggtttcgaactcctgagctcaagaatcctccagcctcccgaagtgctgggattacaggtgtgagccacccatgcctaaccctcacattttgttaagggaattttagaagggcaactttgctagg

SEQ ID NO: 569341 - DNA, 432 bp, Homo sapiens
tatttaaaaaaactaaggcgaggcttttggagagtagaagaattggagggcttaatatagtagcttagttggaaaactgtgacgggctttcggtacgggagtaattcccagatccagaggttaataaccccacttaatggtttttggctttggacctttgggtcaagattatattttaaatccctggaggactagcattaaattgacagctgacccaggtgctacacagaggtggattcaggttgatctaggaagacagcagccgacaggattccagggaaccagtgtatgatgaacgctaggactgaggagcaagcgaacaagcagcagttcgtggggacagataggaaacagaagtccaggagccagtgcgatttgggtgaaggaagctagtaagaagggcacggagcgctaacgatttggtagtgaagc

SEQ ID NO: 569342 - DNA, 1225 bp, Homo sapiens
  misc_feature (1225)..(1225): n is a, c, g, or t
ccacgcgtcgcgaggagcaccccgtgctgctgaccgaggcccccctgaaccccaaggccaaccgcgagaagatgacccagtatcatgtttagaagagcactgtcaacagcccccacgtccactgtaccgttgctatccatgggcgtgtagctaatcgcgctgtagcgcctcatggacctgtaccagctggacatcgtggatggactccggtgacggggtcaactctcacactgttgcccatcatacgcaggggtatgccgctcacctccattgccagtccgtgcgatctggatcctggcttggccatggacctgactgactacctcatgaatgtatcctcaaccgaggcgtcgggctaacagactgtacagcctaggtcaccgggcccgtaagacgggcgtaaaagatccgatgacgattgaccactttaaccggacgacgagtcttaggtggcgctaacgggctccaggcctcctttggagaaacggtgttcgacggccgaaggacgacgtgggctcatccggactgcgatctccatggcttcctgtcacctggtaggtaagagagcgctacccgagcgtgccctgacggcggccatcggtcactcagccattaggccacctgatagcggttcctgtctgcccttgagggcccgtcttcccagcgctttcgcttccctggcgctatggcagctcctggtggccaatccagagagaactacgcttcaaggtcccatcagtgcaagtggtgacgtggcacaatccggccaaagaccgtgtacgccaacaacagtgctggtctggcggggaccaccaatgttacctggcattgccgacaggatgccgacggagatcaccggcctgggaccacgcacaacggcgaatccggagcaatgagccgctccggaagcgccaaataccccgggagggcaccgacggggtgaaactgggcctcgagagcaaccttcccacgaatgatgaacacacaccagacggatatcaacgaccgggcccccacatgcgcccggaacgagcacaggggagaccacacaataatgcagcaaaccaaatgtgcaacgacacaaccagcgaacaggacgtgcggcagcacaggagtacagggtatataggagtcagaaacaaacgcgaggaagagagcacacaagacagtcacgcagagaggacatcaaaaaaaagtaccacaggcccaggcacacgccgagagn

SEQ ID NO: 569343 - DNA, 320 bp, Homo sapiens
tatcgagctcggtacctgttgctaggtggagtgagtggtatgatcatatcactacagcctcaaactcccaggctcaagcgatcctctcaccccagcctcccaagcagctgagaccacaggcacacacaaccacaccaggctaatttttttggtttttttaatagcggtgaggtctcactttgttccccagactggtatcaaactccgggcctcaagtgatcctccaaccttggcctcccaaaatgctgggaatacaggcgtgagccactgtgtccactctggcatactcttttttttttttttttttttttttttttttt

SEQ ID NO: 569344 - DNA, 241 bp, Homo sapiens
cctgttggccttcgcatcgtcccagcaggaacatgccctgaagaggccaggactccaagcgtcttgagcaggcgtgctgtgatatgtcctagtggtcccagcctccccaccctggccctgccccagcctgtgtagctcttcctgcgtgtgtatgctgcatgctctggtctggggcttggatcttgcacttgccccactgccctgtcccttctggtacaatagatgaactcttaatgcccca

SEQ ID NO: 569345 - DNA, 474 bp, Homo sapiens
  misc_feature (116)..(116): n is a, c, g, or t
  misc_feature (119)..(119): n is a, c, g, or t
  misc_feature (233)..(233): n is a, c, g, or t
  misc_feature (258)..(258): n is a, c, g, or t
  misc_feature (341)..(341): n is a, c, g, or t
  misc_feature (357)..(357): n is a, c, g, or t
attacgactcgagctagtacccaggcagcagctggtcagagactagtcccagattcaagacagtgttaccttcagcaacaaccactgtttcaacctctgccacttctctctctgcnacngtaatggtctctaaattcacttctccagcaactagttccatggaagcaacttctatcagggaaccatcaacaaccatcctcacaacagagaccacgaatggcccaggttctatngctgtggcttctaccaacatcccanttggaaagggctacattactgaaggaagattggacacaagccatctgcccattggaaccacagcttcctctgagacatctatngattttaccatggccnaagaaagtgtctcaatgtcagtatctccatctcagtccatggatgctgctggctcaagcactccaggaaggacaagccaattcgttgacacattttctgatgatgtctatcatttaa

SEQ ID NO: 569346 - DNA, 382 bp, Homo sapiens
tttttttgtttttcatgccccaagcccctggaagggaattaatgttttgtgacttccctgtgacctttgcaggactccttatcctgggtttggtttccaggggtcccctttttgccgggttcctaacattttgattcctgttttgaaaaaagcccctgctgcattgtaagcccagggatgtggcacctgcaacgggcttggctttgtgaaaaaatgagtggggtccccgaatgtggcaactgcagcaggcttggctttgtgaggaaccgagggtgtccagggatgtggcagctgcagcgggcttggctttgtgaggaaccgagggggtccccaaacttgaaacccccgtttttatttgcccaaaaaaaatgctatttttgga

SEQ ID NO: 569347 - DNA, 514 bp, Homo sapiens
gtccctaacatctcttcagcaacatcagattattttgtcattagaagccagcaacatttcttactaaagtcattgaatataatggccttttaacccatctccttgcttccatggtggctcaccttcaatctactctgcaaactagagtgatcttttaaaaagacaaatagaattataccatttctttatttaaaacctttgacagaaattaggtttctggttcaacatgaaaagagcttggaactccatcactcctgtcctacaataagaaaaaaagctagacaaattgaaaatcaatgacttttcttggccccatcaaagaaatgaggtcataaggcaaactgacatcctgaaatctggagagacaaggacgtccagagagttatattaatagcatctgagcttgcttacctggagtagaagccgaagggctccattaattaattacacaataattaaattgtacatatgtttaaagcaagattcagtattgagcaaaattgacagaaatata

SEQ ID NO: 569348 - DNA, 118 bp, Homo sapiens
cgcgtgtttcaccactgcggtggttgcctccctgtacacgttccgtcgccccgtgagcaccgtgctgccctcccaatactcgttccgctggcgcctggtcgcctctcgcggctcctcc

SEQ ID NO: 569349 - DNA, 428 bp, Homo sapiens
  misc_feature (30)..(30): n is a, c, g, or t
  misc_feature (61)..(61): n is a, c, g, or t
  misc_feature (178)..(178): n is a, c, g, or t
  misc_feature (423)..(424): n is a, c, g, or t
acccttcctgaccccctcaaaactcaacantaagaaggcaatcaatccccaattagaaaantgggcaaaaaggcatgaaagagatattttacccaaagaggatatacggatggcaaataggcacatgaagagatgttcctacatcaatagctgttaaggaaatgcaagctcagcatgngtgcacgcctgtaatcccagtggtttgggagcccaaggcacaagaattgcttcaggcaggaagttcaagatcagcctgcgcaacatagtgagaccccatctctatgggcatggtggtgcgtacctatagtcctagctacttgggaggctgagatgggaggactgctgagcccaggagtccaaggctgcagtgagctataatcatgccactgcactccagcctggacaacagagcaaaaccctgannctaa

SEQ ID NO: 569350 - DNA, 334 bp, Homo sapiens
  misc_feature (3)..(3): n is a, c, g, or t
  misc_feature (235)..(235): n is a, c, g, or t
  misc_feature (278)..(278): n is a, c, g, or t
  misc_feature (299)..(299): n is a, c, g, or t
  misc_feature (303)..(303): n is a, c, g, or t
canggaattcggaacgagcctgggatttttgatgttaaaattagagctaattattaatgaactagaatcttttattacttaaatttcttcatagcatactaggtaaataaagatttgcttctaaattaataccagggcttaagcttactgtgttaactgttgcaaagagaaaagcctgtataaaatgttggcactaccacagtgctagaattagaaagaaaaggctgagcacggnggctcacaactgtaatcccagcactttgggaggctgaggcagnagaatcgtttgaaccaaagtnggtngaggttgcagtgagccaagatcatgccactg

SEQ ID NO: 569351 - DNA, 1603 bp, Homo sapiens
  misc_feature (4)..(4): n is a, c, g, or t
  misc_feature (25)..(25): n is a, c, g, or t
  misc_feature (110)..(110): n is a, c, g, or t
  misc_feature (432)..(432): n is a, c, g, or t
  misc_feature (530)..(530): n is a, c, g, or t
  misc_feature (871)..(871): n is a, c, g, or t
tatntgtctgctgtgagtgagaagnactctcgacaacgtagtgatgtatagtatacccacctctctcgtgcgagtgcgtacctcacctatgatatgaggtatgtctgggnggtcgctgtccactacgcagtagcgacatcagagcttattgtgtcgtgctgctcttctgttgtatcgtatagtgaaccacagtccccgcttgtattggtagcaaacgatactatcgtacactacacagtggactagttgtcatactaacatcgaatcgcaaatcaacagtcttcacgccgtacgagaccaacctaggatgggttggtggctgtattttgtccaaattcgaaatcgtgatctacacaccctccgtattggtaagtatattttcacgcacccctcggtcttgtcgtgttgtctcgtctccttcaaatccatagntacctacgttactagaagtgacagttttgttttctgtctcgttgcgatgtaaccccctgtgtggtgtaggggtcggcccaacaactctatgagttggngctgttctgtgattcgtctgttcgtcatcgtctcgtctctctccccacttctgtatgtttagtttaagtgctgtggtcgtcgcaccacaccgctgtgttgcttcgctccatccctcgcggtcgcccgggcggtgatgtatgttgattctcgcccagctgtatcttggatcacacactcatgtcggcggcgactaatcatatctgggtcgctgcctgcttctacgtctctgtgtctagattcaataacatgtattgacaatacacgtacgacatcctatattgtttgttatacacaccacacagcatgttttgatcaagctatgtgtcccccacaatacgcnggtctattgtaaccttacattgtgactgccggaaccgccaaaaaaaggtttttagtgacctgatcaccctcggcttgcttgatccaccttcgtgaccttgaatattgttttgtcgtattctatcctgcggaggacgaatgtagtgagaagccccccccctcggttgtcttctccctgcgtgttcgcgagttgtcttgttgtatgcggctacttactgtgggcgttccttatcctcgccgttgtggtgtgtccctctttacttcttcctttggttcttgtgtgtgatacgtctcccggcgttgggctctctttgtggggagtcctcgctattttctttctggtctactctcacactttagtgtgctggccgcataatttggcgcggccacacccccagtgcgtttggtgcgtcagatctggtgttgcttcgtggttccctccccgtggtgagactcgtgtggtctccaaatgcgtgggttatgtgtgtgcctgcttcgtgtaatgcctgccctgggtgttcggtgccccccactccgttgccgtgtagcgttgttccactcctccctagttcccggccccggcgttgttctctccccagttctttttggccacgaggggttttcccataattttcccccgtgtttttgttccacacagggcccttttttcaaccccccccccctgggtgttttgaatttattggtttttttttaataaaagttttcactccca

SEQ ID NO: 569352 - DNA, 241 bp, Homo sapiens
tctagaggatccgggtcatgtggtggatgctagtgatccagttctagcagcatctttcacttgctaggttaggcgagcagtgatctccacaagagtactggccagtgtcctccacacaaagtgcagcagaagtgtttcttcaagcacaaaagcaaagacgctacagtgaccatggtaagttttggagtatcccagtgccttctcttagagtccagacaagaaccacagggtaccgagctcg

SEQ ID NO: 569353 - DNA, 619 bp, Homo sapiens
gggcttaagtaacacccctctaagcatttgttttcagtacttcctaggagtggttgcatttgggaatggaattgttcttaaactcttctttctcatatattcttcttctctgctttgcgtcactctcaccttccctataatcttgttcatctgatcctttcctctctttattcttatttggttcctctcttccatttttctcttccgttccttactctctactctatctttttctcatctatatatctaatctcatacccgttacctactgctgtagcctatcgcttatcctctatctctctcccatcctgattacatcctgtctctccttatctcttgttcaatcgtattgtctttcttcttctttcgttctcctgtttatcgtttctctatattgtataatttgtctcctactctcctctccatcctttcgtgcttctctttttctcatttacctctattccttccattgtactgtcttttatcctcttccttctccatctcttgtccctctctttttaatttctttctctttactttctcccttcctttattgctctccttttctcctctcttctcttcatttctaccttccttctcttcatcttttctctttccc

SEQ ID NO: 569354 - DNA, 353 bp, Homo sapiens
  misc_feature (133)..(133): n is a, c, g, or t
  misc_feature (187)..(187): n is a, c, g, or t
tttcactgtggtagccaggatggtctcgatctctactcaaaatacaaaaagttagccgggcacgtggcgggcgctgtagtcccagctacttgggaggctgaggcaggagaatggcgtgaacccaggaggcggnttggcagtgagccgagatcacgccgctgcactccagcctggggcagcagagcangagtctgtctcgaaaataaataaataagtaaataaattaaataaattaaattaaatgttaaattaaattaaatagatttaaaatgggaaaacttaaaaaaaagttaaattattttaaaaaatttaattaattaaacgttggcccggcccgttcacggtggcttcac

SEQ ID NO: 569355 - DNA, 133 bp, Homo sapiens
aaaggaggtaggaaacggatcacactgtttcaaatctcggatatcgccggggacccatttatagggcactcagaggaatgagctaatatgtgaggcagagctgtgctaagcgagggcactttcacttgattca

SEQ ID NO: 569356 - DNA, 386 bp, Homo sapiens
gaccccaggctcaatggagtgcagtggtgtgatcatggctcactgcagcctcaaactcctaggtacaagtgatcttcttgcctcagcctcctaaagagctaggactataggcacatgcttctatgcctattaaatttttttttggccagacacggtggctcatgcctgtggtcctagcactttgggaggccgaggcgggcagatcacgaggtcaggagattgagactatcctagccaacatgatgaaaccccgtttctactaaaaatacacacaaaaattagctgggcatggtggcatggtgcctgtggtcccggctgttcgggaggctgagacgggagaatcgcttgaacctgggaggtggaggttgcagtgagccaagatcgtg

SEQ ID NO: 569357 - DNA, 297 bp, Homo sapiens
cctagttttatggccagggccagggttattattgttattgctactgggttaaatatttttgtaatggtccattggccagaatataggaggttgctgatgatggctattattagtatcatggaggctgtggcttgtgttaggaaatatttggtggctgcttctgtggctcgtgggttaaaattttttattaatactgggataatggctaataggttaattgcgaatccgattcagatgagtagtcagggtgagctgattattactagtagggtaccggatattacgtaattaggggga

SEQ ID NO: 569358 - DNA, 319 bp, Homo sapiens
cccaagctttatcggcatgagaagaggcttgcaatgctgaatcaccaccacaaatttaccactattaatataaggagatacattggaagatggaattagaccatctcggaccaccaggttcacaattccacctgcagatacgtgcaaaacgtattgtcacaatacttatgtcacgttattgccgtttgaggtcaccaccaactaagcttatgattgatgtgtgatcgatttggtccatgtcaccagcgtagcatactaacaaaaactagggttgcatagtcgaatgcctattaggcagaacgtaaggcggtcaaagctt

SEQ ID NO: 569359 - DNA, 197 bp, Homo sapiens
taattctgcctctgataaaactgagtagaaatgctattccaagttagagccaagagaaagtaagaactaggatttcagaaaatataaaactcatcttcttaaacacactattactcattgtcatggtaagaaagaagactggtatgctggctacattccttgggaagggattaacgcgggtaaccgagcttcgaatt

SEQ ID NO: 569360 - DNA, 145 bp, Homo sapiens
accgagagggttgaggacgcagcaccctaggtcccagcctttgcaggagcctccttgtgcttagctagacttagatcttcggtggcctcatgtaaacgtggcagctagcctcttctagaacctaggccagggactgagcagaagg

SEQ ID NO: 569361 - DNA, 946 bp, Homo sapiens
  misc_feature (359)..(359): n is a, c, g, or t
gagattatgctttgccactgccggggatgatgcagtttgaatgaggcccttgagatctccttgtaacatcagggtacctttggaagaccatcactcagtgtacgccctgcttagctcatcttatatactagagagccagcaccctgcatgtccctggggtggctaggcaggagtggctgtggggccaatacccagactcgcgcattcatgggcactcgagacccctggcctgtgccattcgcaatccccattagccatttcttggttggtgccccttttcgcaagatacaaggcgtgcagatgtggtagctaagaagtgtattacgaggtcaggatctggtactgtggccacatcgagnaagctgggttcgccccatcctccattgtctgaggtctgattttcgctgtgatgcctggtgtttgctgggatcgtacgtgggtaggtgcatggtcagcccaatgactgacgaagtaaaccggaaagaggtcaaatcagaggacgctcgtgggtcaacaattgggagtggtccgaatagtacgcatttacaatggagttggctgtacgagggccaccatgtgaccctggggtggaatcttgtgcgactggtgtagcactagttccccttcccatggccttgagactgttgatggggtcgcatctcacaggggaccgcaaaaggtgactgcgtgaacgggtacatggagggcgctattacctcttagttggcggccgcagccagggggtacgcatgtagcactatgaccgggccaaccgctcaatccgctctaacactaacaacgggacattgaaagcgccattcaagccaggacacgcccacggcctccacgcaccacatgaaggaccaacgtccaacacgaaaggcccacaatttgctaacacaccacacacgcaataggagcacttagctggccaacacaaggagcg

SEQ ID NO: 569362 - DNA, 705 bp, Homo sapiens
ggtaatactatgaacattcgcttcgtagtagaattaaagtcaattaagaaatagaacttgggtcactaattctgttacaaagcttcataatttgtcccgaagcatatggtggagcatgctgagaaatgtgctttctgtgtgtttgacattcctgaattgtgtggagtccgttcgagcgtgaattatctattacttttagaacgttgacgacaggcagggtaatgcataacgtgaccttagtttgcatggtaaaacatgggacgatcagtgatgcgctatttaaaaaagtattagtatctacaccgttctcccctgatggcttggggagtgtgttcagccgcgtgcagttgtctctgcgtcatggacggtcgttgttgggatctgtgctgggcggctgagcatttagatgtgagccagtgacccatgaacttgccgctctgtgagggccagaggtcagggccatgtcactggtaatgggcctgaaggctacttcctagaaccttttatgtctctcgtgagccatctgttaggaacgttcttcttggtgtggtttgtaggcctacctgtcgctattctgggaaaccttcttgagtgctatgcaaatgtgttcacaggcaatgggggtggtcctgagcctttggggtgggcacctggtcagtgagtgtcttgcccttccccagctgggcatacagtaccttgctcttt

SEQ ID NO: 569363 - DNA, 693 bp, Homo sapiens
tgtatgtaatggtctagggtgtagactgagaatagtgggaaatcagtgaatgaatgcctcctatgatggcaaatacagctcctattgataggacatagtggaatgtgagctacaactgtagtactgtgtcgtgtagtactgatgtctattgatgagtttgctaaatacaatgccatgtcagtgccacctacgtgctgaaaagaaagatgaatcctagggctcagagccactgcagcagatcatttcatattgcttccgtggagtgtggctgagtcatgctaaatcacttttgacgcctggtgtgcggataagcgactgattataggttagctgtgagtgttgcacaatattgctctgtgttgtctactgttctattcctacttgtaacatagtataggttgtgctcaccctgatcaaacccttaggaatgccaattgatatcattacgtctcatgactcataccctattgtaatccagaatggtgcatataattatcactggagttatgtatagttacaaatatagggagatatattccgaaagcctaggtaggactaagaatataaacttcatgggttgaccgaataatcagaataggtgttggtatagaatgggtgtctcctcctccgagcggggtcgaagaacgtgtgtgcgaggttgcatacctgttataatatactatgcagcactag

SEQ ID NO: 569364 - DNA, 246 bp, Homo sapiens
gcagtcagccttcacgtttggcctcagtccccgtgtcagtgccgctttgggtgtgggtgtgggggtgtgtgagcctctacacatatatatacgtacaaagccttaaaccacattgtggcggtgccgttttaactgtaacgggtggctttgtttccagtttttgtacccgtgtccttgtttcccctcctcccccatttggggatgtgtttgtgttcccccccttgaaataaacagacacatacgtga

SEQ ID NO: 569365 - DNA, 443 bp, Homo sapiens
agccttctatcaggatgtcgataatagctagtggatcacggccatactcatgagtactatgatatacagcacgagtcccaaaacttggagacataccatacgacatgggcttgattgaaaagagggactataataacacattgtgcatttcgtcagaagccttttggatgacttacaatagctctgatgaagataccaccccagcgtcagtccaataggtcagtgagtttcaacaggcatccatccctcccatgaagggattctggtgatgggaagtttctgtcatgacaggaaagcattgaccctcattgattgtcaactttggtattagccatgaaagacaggatgctcattgggtgtactgtagagtgaggactgctgcctattccctcccagaacgtctgacccaggggtgtgtgttgaggagccctgggggaaatggc

SEQ ID NO: 569366 - DNA, 294 bp, Homo sapiens
ggcacctgtttacgaggaatgctgagtgcgggagagtcgcttgagcccgggaggcagaggttgcagtgagccgatatcacaccactgcactccagcctgggcaacagagcgagactctgtctcaaaaaaaaaaaagaaaaaaaaactgattgtgacatctgcagatctcagctttcctcgcaacactagtagcaagaaatagttgaggaggcagaagcataaagatccagagagcattataattctatcacaaagttctcaaactgtctctacagtcacaggaaaaaacaggta

SEQ ID NO: 569367 - DNA, 998 bp, Homo sapiens
  misc_feature (8)..(8): n is a, c, g, or t
  misc_feature (296)..(296): n is a, c, g, or t
  misc_feature (600)..(600): n is a, c, g, or t
  misc_feature (629)..(629): n is a, c, g, or t
  misc_feature (673)..(673): n is a, c, g, or t
  misc_feature (703)..(703): n is a, c, g, or t
  misc_feature (714)..(714): n is a, c, g, or t
  misc_feature (752)..(752): n is a, c, g, or t
  misc_feature (758)..(758): n is a, c, g, or t
  misc_feature (798)..(798): n is a, c, g, or t
  misc_feature (865)..(865): n is a, c, g, or t
  misc_feature (880)..(880): n is a, c, g, or t
  misc_feature (907)..(907): n is a, c, g, or t
  misc_feature (923)..(923): n is a, c, g, or t
  misc_feature (953)..(953): n is a, c, g, or t
ctggaaantcttaagaacacagtttcgcaggctgggtggagccgtccccccatggagcacaggcagacagaagttcccgccccagctgtgtggcctcaagccagctttccgctccttgaagctggtctccacacagtgctggttccgtcaccccctcccagggaagcaggtctgagcagcttgtcctggctgtgtccatgtaagagcaacggcccaagtctgggtctgggggggaaggtgtaatggagccccctaggattcccagtaatccttgtcctcgtctacctgtggctgcngcggtggcggcagaggagggatggagtttgaaaagcgggcaaaggctcctccgggcccctcaccagccccaggtcctttcccagagatgcccttgtgcctaaagaccagcttgtagaagagatccgacatcaagtgcccaccttggctcgtggctctaacttgctcctgctccttctgctgcttcttctccagctttcgctccttcatgctgcgcacttggccttgccgatgcccccagcttggcggatggactctagcagagtggcccagccaccggaggggtcgaccacttccctgggagcnccctggactgaaggagaagtgctgctgcngctgttgttctgcctggcgccttggcctacaggggccgcggttnagggtgggagttggggggcactggccagcncctcaggagcngggggtggtggggggggcggtggggggtggtgttagtnccccancttgtaggtcttagtttggaaggtgggcagttctggaatngtgccagggggcagagggggcaatgccggggcccaggtcggcaatgtacatgagggcgttggcaatnctgggcaggtcaggnaggtaggatggaacaacaattttaggnaccttggccaggtctngcacaaagaagttgttctttgggacctgcngttccagccgcccttttttgctgaaggacaagggggcatcaaaca

SEQ ID NO: 569368 - DNA, 135 bp, Homo sapiens
gagctgcggcttgggttcgatcaactcaccgtccaacatgcgccctggctgtgaggttgagatgggacatgtctgttacagagaccctggtccatctgtgagtgcttaatgctccaggagtgaataccaatcctg

SEQ ID NO: 569369 - DNA, 327 bp, Homo sapiens
ctcgttatctgttgtgtatccctgtgctggtgcatacagcctcatacactgatgttttaataagcctgcaccatatgtatgtcaatagctatcctgcgcattctctatccatcaccagaatcactttaactttccttgttcctttactcttccatagtaaattgtatattcaaccatcaggtgccaggaaaaagcctgtgagtcatgtgtcattggcacttacatggcaatctagtggcattttgaaaaaacagcatatttttatggcagtcttcctattcataaaaatagtatgtctccatttcacttatgtctttacgtgtatct

SEQ ID NO: 569370 - DNA, 630 bp, Homo sapiens
cttaagacaattcgttgcctaggttgagtagaaggtagtctctatagctgatggaatctcactgctggttttctccagcacctgtaaccttttctggtttgattgaaataaggaggaaaactactcaggagtgagacaggcttccatgccataaaactgttgctggcactaccattgttttcatttgagataatttctagtaactgtgtcaaactggactgtttttccctctttccctctgtttgttcttttaaagcttatctcaactgcagtgaagagatgaggacctctcacgtttttagttattgatgcaatgaaaatgatgcagcttggtttgaaattaaaaagttcatataaaaatgagatattgcaaatcatttagcttaatattaaaaaaatttaagttgttattttctgtgacacttcatccatttattgtctagatggttggttacattttgttattttgaagggataaaagacaccagaagcactggatttggtgtttcctaaaaggagagagagtttctgttgcgactcttctagcaaaagggatgcataggtgtggccatagccactattttggctgggtgacccggtgttaacagctatgagaactgaacagttggg

SEQ ID NO: 569371 - DNA, 909 bp, Homo sapiens
  misc_feature (2)..(2): n is a, c, g, or t
  misc_feature (27)..(27): n is a, c, g, or t
  misc_feature (29)..(30): n is a, c, g, or t
  misc_feature (34)..(35): n is a, c, g, or t
  misc_feature (206)..(206): n is a, c, g, or t
  misc_feature (230)..(230): n is a, c, g, or t
  misc_feature (248)..(248): n is a, c, g, or t
  misc_feature (316)..(316): n is a, c, g, or t
  misc_feature (336)..(337): n is a, c, g, or t
  misc_feature (347)..(347): n is a, c, g, or t
  misc_feature (369)..(369): n is a, c, g, or t
  misc_feature (383)..(383): n is a, c, g, or t
  misc_feature (396)..(397): n is a, c, g, or t
  misc_feature (400)..(400): n is a, c, g, or t
  misc_feature (407)..(407): n is a, c, g, or t
  misc_feature (415)..(415): n is a, c, g, or t
  misc_feature (434)..(434): n is a, c, g, or t
  misc_feature (439)..(439): n is a, c, g, or t
  misc_feature (447)..(447): n is a, c, g, or t
  misc_feature (449)..(449): n is a, c, g, or t
  misc_feature (452)..(452): n is a, c, g, or t
  misc_feature (455)..(455): n is a, c, g, or t
  misc_feature (463)..(463): n is a, c, g, or t
  misc_feature (478)..(480): n is a, c, g, or t
  misc_feature (482)..(483): n is a, c, g, or t
  misc_feature (486)..(487): n is a, c, g, or t
  misc_feature (495)..(495): n is a, c, g, or t
  misc_feature (519)..(519): n is a, c, g, or t
  misc_feature (573)..(573): n is a, c, g, or t
  misc_feature (579)..(579): n is a, c, g, or t
  misc_feature (581)..(581): n is a, c, g, or t
  misc_feature (620)..(620): n is a, c, g, or t
  misc_feature (626)..(626): n is a, c, g, or t
  misc_feature (628)..(628): n is a, c, g, or t
  misc_feature (630)..(630): n is a, c, g, or t
  misc_feature (633)..(633): n is a, c, g, or t
  misc_feature (635)..(635): n is a, c, g, or t
  misc_feature (637)..(637): n is a, c, g, or t
  misc_feature (640)..(640): n is a, c, g, or t
  misc_feature (655)..(655): n is a, c, g, or t
  misc_feature (658)..(658): n is a, c, g, or t
  misc_feature (660)..(660): n is a, c, g, or t
  misc_feature (692)..(692): n is a, c, g, or t
  misc_feature (807)..(807): n is a, c, g, or t
tnttaatttgacattcttaattttttntnnaagnncttggtatatatgcctttatttgaagcaaacctacaggtgtttcttaatatgacagaatcatgaagacttgcagttaatcagtgtttcctaatgattaaaacaatgttcaaataattacaaagttacttcatcaaaatacttagaagaatattctgaggagtgtttgaaancactgtttataaatagtgattganacatttatcatgtatttngtgctgaagataaacactttttacataaaacattgttttaatatactgctctactaatgccgctagtnattagatatactgtattttnncactaaagantaaagctttatcttcgtatttntcttatttataggnctcttatcaatgnnganctttgtntccaacantaataaactggcaaattgnaagtnacgttttntnggngangcaaaaangactggctgcgacgnnngnnagnngataactncattatacatgcttcgtacaaacngtccattctgaatggtacaattaaatgcagtccaaatccttttaaatgtttgtntgcctngntggcaattacaatctccagcacactaaaaagaaaaagancaatancncngancncngtnttcttaatgattatngcncntttaacaccttcagccatccactgggttttcngatcatattggcaactgaaatttcacatccacatgtgcttgcttcgctaaggtcactatttcagagagctttacaaccattctagcagcttcatccaagtcatcacaagcaagtnttttaagtccactgtccgctatcagtgccttagcatcatcgactcgtgtaccttgtaaccgtaccacaacaggtattttaatttccaagtcttttactgcca

SEQ ID NO: 569372 - DNA, 181 bp, Homo sapiens
ttgcccccaccccagtattcgcctagtttcccaagttgtggtttaggggaaagttggcttcctgcctttttcctttaaaatagcaagtttgggaaatcctggggtgagtggggtcaccccattcccagtttttggcagggattggggttaaagcattacttaataaacccccccggcccca

SEQ ID NO: 569373 - DNA, 283 bp, Homo sapiens
cggtagacctccagatatttatttcatataactgaaacttggtaccctttaaccaacacctccccattaccgtctcccctaacgcctggcaaccaccattctactctgtgcttcatgtgtttgcctatttagattccacatgtaagtgagatcacgtagcatgtgtctttctgtgtctggcttatttcatgtagcataaagttctgcaggaccatccatgttgttgtaattggcaggatttccatctttctaagggctgagtagtacagttagctttcgcatc

SEQ ID NO: 569374 - DNA, 892 bp, Homo sapiens
cccacgcgtgcggtccggagtaggttcgctggtggtgggttcttggtctcgcgacttcaggaatgaagccgcagaccttcgctgtgagtgttacagctcttaaagatggtgtgtccggagtttcttccttccagtgggttcgtggtctcgctgacttcaagaatgaagccgcagaccttcacagcaagtgttaccagctcttaaaggtggtgcggacccaaagagtgagcagcagcaagatttatggtgaagaccgaaagaacaaagcttccacagtgtggaagggggacctgagcgggttgccactgctggctagggtggccagcttttattcccttattgtccctgcccatgtctgctgatggtccattttacagagtgctgatcggtgcgtttttacagagtgctgattggtgcatttacaatccgtgtagctagacacagagcgctgattggtgcgtttttacagaatgctgattggtgcatttacaaatcctctagctagacacagagcgctgatgggtgcaagtatccacccgaccagaagcccagctgggcttcacctcccactagtatcttctttgttaatgtggtataggtgtatctaggatacacgtatagtagcttgtaagttccctgatacctgggaaagcatttcatttgctccccagctggggagcatccacaagtagaaccaatgactgggtcatgcaagtgggttaagtgggttctatcattacagggcaaagttctccctggtggactgagaaatacttattataaagttctatgacactagactagcttcaagtgtcacagtttgggtgtcaacagtgtttttgcccaagaaacccagataactttaatgaaagagacctacacaagggggcaa

SEQ ID NO: 569375 - DNA, 317 bp, Homo sapiens
gtcccttgggcgtgcttgttgccaggctggagtgcaatggcgtgatctcagctcaccgcagcctctgcctcccgggttcaagcaattctcctgcctcagcctcccgagtagctgggattacagatatgcgccaccatacccagctaattttgtgtttttagtagagacgaggtttcaccatgttggtcaggctggtcttgaactcccgacctcaggtgatccgcctgcttctgcctcccaaagtactgagattacaggagtgagctaccgcacctggcccctcctacatcttttatctcacaacaagcactccaaca

SEQ ID NO: 569376 - DNA, 215 bp, Homo sapiens
  misc_feature (12)..(12): n is a, c, g, or t
  misc_feature (39)..(39): n is a, c, g, or t
  misc_feature (153)..(153): n is a, c, g, or t
cagatccaaatnaaagtagggtctcaagtaacccaaggntggccgggtacggtggctcacgcctgtggtcctagcagtttgggaggcagaggtgggcggattgcctgagctcaggagtttgagaccagcctgggcaacatggtgaaccctgtntctactgaaatgcaaaagaaattagccaggtgtggcggcatacccctgtggtcacggctgct

SEQ ID NO: 569377 - DNA, 217 bp, Homo sapiens
  misc_feature (179)..(179): n is a, c, g, or t
taattgagctgctacgattagcggtcaccgttggggatatcagtccagagtggagaaccacctcccaacggtgacgggagaccctgtccctcacctgcgcagtttatggtgaacgattcaatggatacttcttgatatggattcgccagacaccacgcgggtgcgcctgtgagtggatntggggatatcatgtccgcagtggcagaaacctacctcc

SEQ ID NO: 569378 - DNA, 109 bp, Homo sapiens
aagttgacaagcgccggttgtactagcatccagccgcttagcccgacctgtcttcttcttcttcttctcctgttatggccaccttaggagtctgacctctcacttttcc

SEQ ID NO: 569379 - DNA, 422 bp, Homo sapiens
  misc_feature (12)..(12): n is a, c, g, or t
gcaaagggaggntgacttgagaccagcaacatagggagaccccatcactacaaaaaaagaaaaaaattaactattttagtctatttgtgtcaatcctatgttttatattaattattggatatgtaatatgtatctgattaaacataacactgtaacaactaagatataacagtactcggccttgaggctccaagatggccaaataggaacagctccagtctacagctccctgcatgagcaatgcagaagatgggtgatttctgcatttccaactgaggtaccaggttcatctcactggggcttggcagacagtgggtgcagcccatggagcagggcggggcattgcctcacttgggaagtgcaaggggtcggggaattccctttcctagtcaagggaagccgtgaaagatggtatctggaaa

SEQ ID NO: 569380 - DNA, 437 bp, Homo sapiens
tagctggtcttggagatgaggtccactgaatacgctcactttttcgaagtctttggcatggtactctctagtctcactcagccaattgggtaggcgcgctggcctgaggccctatcaccgccgcgactatggggtagcgttccagggcaggccgcacctcactcatgtacatgaacatgtgcgacgggagaagaatgcatgaatgtcatcagtgtcaaaaagccttcaccacgagcgcgtccctcgtcacggcacaggtagatatccacagcggggagaagccttacgagtgcagtgactgcggtaaagccttcaacgagccttcagcccttaggagccacgcaagaactcatctcaaagagaagccctttgactgcagtcagtgtggaaatgcattccgtatcctctcggacctgaatatccacatgcgagttcac

SEQ ID NO: 569381 - DNA, 301 bp, Homo sapiens
  misc_feature (26)..(26): n is a, c, g, or t
tccgtgattcaattcctccaccctgnggtccctcccataacatgtgggaattctgggagatagaattcaagctgagatttgggtgtggtcacagccaaaccatatcaccaaatatggagagactgtggatcaacaagatcatctcaaactaatacaggaggtgagagtttaaattagaacaaccactttggaaagcaatttggattatcttataagtttgagcattctcatatgttatggcaaagtaattcctctaccataggccctggagaaactcttgcccatatgtaccagaggtagt

SEQ ID NO: 569382 - DNA, 795 bp, Homo sapiens
  misc_feature (21)..(21): n is a, c, g, or t
  misc_feature (39)..(39): n is a, c, g, or t
  misc_feature (56)..(56): n is a, c, g, or t
  misc_feature (58)..(58): n is a, c, g, or t
  misc_feature (60)..(60): n is a, c, g, or t
  misc_feature (125)..(125): n is a, c, g, or t
  misc_feature (133)..(133): n is a, c, g, or t
  misc_feature (147)..(147): n is a, c, g, or t
  misc_feature (265)..(266): n is a, c, g, or t
  misc_feature (268)..(268): n is a, c, g, or t
  misc_feature (270)..(270): n is a, c, g, or t
  misc_feature (274)..(274): n is a, c, g, or t
  misc_feature (279)..(279): n is a, c, g, or t
  misc_feature (284)..(284): n is a, c, g, or t
  misc_feature (287)..(287): n is a, c, g, or t
ggcctcccgcacgccccgcangtagcgccccgcccgcgnccagagtgcgctcgccngnancagctcccggataaacggcgcgcgcggagatgacagccgaggagatgaaggcgacgaagcgggcncagtcggnccgctgcccatggngggagtggacatcagccccaaacaggacgaaggcgtgctgaaggtcatcaagagagagggcacaggtacagagatgcccatgattggggaccgagtctttgtccactacactggctgnntntnagtngcacnaagtntgnctccagtctgggatcgcagggacaaatttctcctattgacctgtggaacaaggggaggtcactcaaggcttgggacattggccatagccacccatgaaggtgggggaaggtggtgccacatcacacctgccaaaccagaatatgcctaccggttcaagccaggacagtcctccaaagattccccccaaatgccacgcttgtataatgaggtgcgagcttgtactgagttcaacgggagaacgatcgtgccgcggaacgaggaagatggggggaaatcatttcgcagaacataaccagacttcgcgggtagaagggctatgctaagccccaatgaggggtgctactcgtggcaggttgcacttggacagggtactacaaaggcacaagctctttgaacacgcgggagctccggtttgcacatagggagggggagaccctgggattgctccatggtctggcgaggccctcagcgcttggcgacagggaacatacgtgggtactaaggacc

SEQ ID NO: 569383 - DNA, 179 bp, Homo sapiens
tgtcggtaccgtcactgtcgataagagtgatagtctttaaaaaaaatacagcatcatgtctggtttatggtattgataatactgaagattcatgattataaagagccaaggtttttaacacaactgtaatttcattcttcaattttagtcctttttttttcaattccattttatttctt

SEQ ID NO: 569384 - DNA, 228 bp, Homo sapiens
caggcatgcactttgtatactggccggcgttgacaacgtgcgtggctgcaagcccgcttttcgcagtactttgggaccgctgaggcgtacggatcacctgaggtcgggagtttgagaccagcctgaccaacatgaagacaccctgtctctactgaaaatacaaaattaactgggcgtgttggtgcatgcctgtaatcccagtcctcaggagtctgcaggcagtctgga

SEQ ID NO: 569385 - DNA, 879 bp, Homo sapiens
  misc_feature (74)..(75): n is a, c, g, or t
  misc_feature (93)..(93): n is a, c, g, or t
  misc_feature (115)..(115): n is a, c, g, or t
  misc_feature (160)..(160): n is a, c, g, or t
  misc_feature (167)..(167): n is a, c, g, or t
  misc_feature (169)..(169): n is a, c, g, or t
  misc_feature (176)..(176): n is a, c, g, or t
  misc_feature (181)..(181): n is a, c, g, or t
  misc_feature (185)..(185): n is a, c, g, or t
  misc_feature (198)..(198): n is a, c, g, or t
  misc_feature (205)..(207): n is a, c, g, or t
  misc_feature (209)..(209): n is a, c, g, or t
  misc_feature (222)..(225): n is a, c, g, or t
  misc_feature (252)..(254): n is a, c, g, or t
  misc_feature (266)..(266): n is a, c, g, or t
  misc_feature (273)..(273): n is a, c, g, or t
  misc_feature (288)..(288): n is a, c, g, or t
  misc_feature (301)..(301): n is a, c, g, or t
tgaatacacatctctgtcagtgtgaaaattcagcggcagtgtgtccatcatattaaaaatatacaagctacagnngtccagatcactgaattngaacttttctcctgcatgtgtntatatgtcaaattgtcagcatgacaaaagtgacagatgttatttngtatttnanaaaacanttggntgtntataaagtttttnatttctnnngngcagatcactttnnnnactcacataggtaggtatcttatagtnnntagactatggantgtcagngttcagccaaacagnatgatggaacagngaaagtcaattcagtgatggcaacactgaaggaacagttaccctgttgtgccctcaaaagtgtcatcaattgtaatttagtataactctgtaaaagtgtctgtaggtacgataatatatataaggacaagaccaaaaatcaactataaagcttaaaaattgtgggaaaggggggattagtacaagcacattggttacagtaatgaactgattttattaactggttttggccatataaaatgctgatattaatgaactagccaagtttcacggatatgacttacagggaccagagtgatacttgcacgaaatataatgtgccggcactcgggggtgttcctgacaaacgggtgtctccaaaattatttactttacctttaaagaaatcgagggtcccctgcagtggggcttgggacacgaggtgggacacaaggcgagtccaaaggcaaaatgtggccctctgagggagtattgtcacatccggcacacagtaagataacactgcttgtaaccacctgtgcaattgcgcaattgccaaccacaaaaattggtcgaccgtgttcaccagaaacacaaatg

SEQ ID NO: 569386 - DNA, 404 bp, Homo sapiens
tgcaggaattcggcacgagatgagagagatagtgatagataaaaattaattcaagaaattatgggggatgaacttaatgattgatatgtaaaccctattgattgagtaatggtagatctagcctacctagtctaaaatgatgattaatccttaaaatgttctttaagtactcaactatatgagagcattttaattatgcttattagattaacaagtttaagtgagaaatacaggtgttatctatttataatatcaaagttaatattgactttcgaatagcatgaaacagatggggaaatatgccattttctaatgtagatgctaatatcttatctgtatgagttcattgaattctatggttaaatcttattttgtatttaattaaattatctttccatatggtc

SEQ ID NO: 569387 - DNA, 423 bp, Homo sapiens
ttcatcagcaaaccttaattgaattcaatacacaagttcaaatacttttcttcacaggtcattcttttatatacataatattattaacatatcatacccactttcaataagtttcttaaaacctctacaaaaattgtagttaacacttacggaacttacttgttgcactaaactaaaagcacattctaatattttacactctccaatgatactcaaatagctcacaaattttctttgattaaattctaacgcttttccacaaaaggtttaaattcttccaactcttatggcaaaacattcattatagatctacaaacgcacagcacttctctagagtggttggggatgtcttggcaaatatcaaacacacccgccatatatattcaggatgccttgataaatatatttccttgatcacacatt

SEQ ID NO: 569388 - DNA, 465 bp, Homo sapiens
  misc_feature (155)..(155): n is a, c, g, or t
  misc_feature (168)..(168): n is a, c, g, or t
  misc_feature (207)..(207): n is a, c, g, or t
  misc_feature (228)..(228): n is a, c, g, or t
  misc_feature (269)..(269): n is a, c, g, or t
  misc_feature (292)..(292): n is a, c, g, or t
  misc_feature (338)..(338): n is a, c, g, or t
  misc_feature (347)..(347): n is a, c, g, or t
  misc_feature (355)..(355): n is a, c, g, or t
  misc_feature (404)..(404): n is a, c, g, or t
  misc_feature (448)..(448): n is a, c, g, or t
gctacatttcctaatcaagaagttggcgtgcagctgggagagctagactaagttggtcatgatgcagaagctactcaaatgcagtcggcttgtcctggctcttgccctcatcctggttctggaatcctcagttcaagttatcctacgcggagaanccaggtaccaatnggtgcgctgcaatccagacagtaattctgcaaaatgccntgaagaagaccaatgtttcgnactacttccagtgaatccaaccaagatccccgtctgaggantgacctttttccaaagacgagantccaggacttgaatcgtaacttcccactttctgaggatatctggantaaggttcngctccggntccgctctggatcaggatttgggatggcttctaacggaaatggacaggntaccactagtagacgaaatggatgctttccatgacaccttaggnctcttgacggttgcctc

SEQ ID NO: 569389 - DNA, 988 bp, Homo sapiens
aggatgcgcggtgtggggctctgaagcatggagggggtgttgtcaccaagtggaccaactatctcacaggctggcagcctcgttggtttgttttagcataatggaatcttatcctactatgattccacaagcatgcatgtttgccaacagggcagcacacaggcacagccatcacacagcatggccagttttgtgccacacattcacacagttccattccagccagcacaaccaccaagcacattggcacattcaatccattccatgtgcagcagccagccattttctcaccattgcaagtgccatgttgcacattgccatgcttgcacacagccacagcagtgttggcttggtctgcatcttgtgggtgcagctctccaaacagccattgttatgcacttggatcacaagggcactcaacacaacagcaacacaagcaacatcaatgttgacacagccgagtgcaatcgcgtgcaacacacccaacaatggtctgcacactttctggccctcttcacttgtggaacctctttcaaattgccaggcacaagttccatattgcatccactgcgacattttgtatccaaccaatgcatgacggacactctactttcaattctccttcgttgccagcagaaacaattgacatgcaaggcctcctttctcttgcgtttaggtggcccaacgttgttacgaccattgccttccaacacacgacttggccggacattggtggtgccagcattagccacatggccacaggtcttaaacgctggagcattggtttccaagtcggcagccaattcgggcaatacccatatacgttatgcctcacttggttggtcacacatatcatacctgtggttcagaatgactcgcaaggcgatctgggcaaagcaaccattgggttcgtatgcacggatcaacacagggaatacggcaacgtataatattgagcaccctgtcagcattaaccttaacccgaacc

SEQ ID NO: 569390 - DNA, 788 bp, Homo sapiens
agcggataaggaaaggaacctcctccctggctgggatggctgccctgggcgcgggaggagggccggggacccggtgagggaggaccgtaggggcccgtgggggcttcactgcctgtgcagtgctgtgactggctaggcctccctccctgtacatggagagtaacctgtctggcctggtgcctgctgccgggctggtgcctgctgctgcaactgctgtgaccctggtggctgacagcatgcctacacacaccctgtatgccctgcatcttcttctccgtcatatgcccagactctggctggtgcattctgtatgggcacaagcgtctcagcatatcagacaggatgtatccctgtgccctctgtctgcctctggagccgacctatgcgatacacaaccgtcttctccgttcatacattccgaagatactcccccgaagacaaaagcgacatggaggccctttgccactttctgggcttactcatacatgcatgcacccgatacttgccattgcaagattcctttcaacacttgcaccgccttcatgcaacctcgtacattttgacccagggtgggtgatacacaaggacaaacggtgcacgcagatcgaggacagaggagcaatgaacaccacgagggccatcggcattcagcgtggtcccgacaagggcgcccattaacgacagaaagaggccatcagactggacaaccacaccctggatgggatgaaacagtcggaaagtagaggcctcgcggcacctcagcccataaggacacccggcgagacaaa

SEQ ID NO: 569391 - DNA, 350 bp, Homo sapiens
taggagtgattttttaaattttaaattaaaatttgtttttttgagacagagtctcactctgttgcccaggcaggagtgcagtggcatggttttggcttactgcagcctccatctcctgtgttcaaacaattctcatgcctcagcctcctgagtaactaggactacaggtgcacaccaccacacccagctagtttttgtatttatagagatggggtttcatcatgtttggccacgctcggtcttgtaactcctattctcaagcattccacccaccttggggcttccaaattgctgggattacagacgtgagctaccatgcctggcccaattttaattttttagagaaagaa

SEQ ID NO: 569392 - DNA, 157 bp, Homo sapiens
gcgcggaaggtatctggaagccactcagcaccactaccacaccctgaaggatcttccccagctcctctgggccagcgcggggtcgtctgggctcggtgccttctccgtcggggttttgcctgtcacgtgcccgcctgtgctcgcggcaagtggactg

SEQ ID NO: 569393 - DNA, 404 bp, Homo sapiens
tctctccctgacatcattaaaaaaaaaaaaaagggacagagcgactatatttaagtctgtaaaacgacttttaatagcaccaaatagaatgaacagctggcttgctttttgcaagggtgcattgatgtcgtcagaagaaactaaataaaaatgctgatacagttgtccaggttggggtttggccagcacaagaatattttattcattcagccttctctaagttcaaaagattggtgttgactttgatgaaaagatacaatgatacatttttagaatgaccgacctttcacatttaaatcttaaaattgtgctgctgcagctggatttttctcagggatgccattcaaacaaaatgttacattgtcatctcatatagcttttctatctgtaatgataggatgtta

SEQ ID NO: 569394 - DNA, 224 bp, Homo sapiens
gcttatctctgatctgctcataagtctgtgggtcagtatgcactcaggtgcgtctccagactccaggtttctagttgccatttggttcactcaggataccacctgaaagcccaaacacttcctgaagaagtccccttcccatgggggaggtaagaagctcccagatgagggcgaaacagtacgtgatgattcttcaaggcttccgcgccccggattcataccct

SEQ ID NO: 569395 - DNA, 812 bp, Homo sapiens
gatgttcgattagacacatgcgtgcgcacgtgaaccgttgcaggcctcgacagatagcacctatccgcgcgccagtcctcaaatcccggaaggtgtgtatcgtgagcgataatgccggagagacaagatgagatcacgtggtggaacgaatggggcattatctacttgaaagaatcgggtgtaatgctgggagacttccgtgtgagtgtggcataggctggtttggctgacaggaaattgtactttaatacgaagtgatttaagtcataatggagatgcgtaatgtgtagtgacctgagatattgtctagcatttagtttaacgaggagcatgttgctgtcagaagagcaatcgttgtcgatgggtacagcatccggttaagagactgtgaaagtcaccgtgctgattctactttcgagaaccagggtgacgaacgtccggcttcgatgttagtaccagcgtgggacgctgcttccgtcgaagggtgggaagatatgaatcgtctgatcgccgtgtggactggttggatacagaggtcagggtcatcgctgccataaaggtgcatgctcagtataaaatgtattatcacaaaaaaaaacacagtggggagcgcacaaggccttctggaaagttttggcaccccaaaagttgggaacagcggcccatggggcccggggaccggtgggaacggccccgggaaaccgggggccagagaagcgtggatctcccagggtggaaacccccggggaaacagggcggggaacaccgttggacacaccgaggggggcgggaacgggcaacacgatcagcag

SEQ ID NO: 569396 - DNA, 209 bp, Homo sapiens
ctacaccgctgcagagcactcagaaagagtctgagtgagtgtgggctcccgtggtcctcgcgccggaatggcctggagatcctcatacaaggccatgtgcaggcaattgcagaggtcgagacgtatgctgacgttctgacaccacgccttcacccaaaaggccaatctcaacaagcaccagcacaatcagcaccagcacgaattccctt

SEQ ID NO: 569397 - DNA, 953 bp, Homo sapiens
cgttccccccctgctctgggggccccggcccggggcctcggccttttggtgctgctgctgctcggcctggtttcgtccgcccccccgctctggcgcgcggccgtaaaagggccccgcggcctaatgcgcagcttctccagccttgggctgagtactggcgcttcctcgccgcttccggcggtcagtgccccgatgcttacgacggccgggggacggtgcaggagctgggccgcgggcgctggcgcatctgctggaggccgaacgtcaggagcgggcgtggccgagggcgcaggaggctgaggattcagcaggcgcgcgtccgtggctgcagactagcttgcagcgatctaggggcagccaccccgcaactcatgatcctggctctgggcctggagcgacgaccccgacgcagcctgacagcagcagcttcgctcgcgctcgtgactccgcgcccgccttgaccctgccgccctagcagcccagcgtttgtccccacgcgcccgtaccccagccgcggcgctccagacccaccggcgccaccaggtctacagacgacggccaccgacgggccacggatgcttgagagaggcaggcgatcgagacacccagacagtggacccccgagcatgttgaggtacttgctggggacggatatcttgcgggaagcagcaggactcctgacgggggtggcagcccccgcaccgctccgccgtgccgctcgaccacgatgtgggctctgagctgcctcctgagggcgtgctgggggcgctgctgcgtgtgaaacgcctagagaccccggcgccccaggtgcctgcacgccgcctcttgccaacctgagcactgcccggatcccgtgcacctgggacccagaagtgccccgccatcccgccaccaggactgctccccgccagcacgtccagagcaacgtaactacgccaggggccctctcaccc

SEQ ID NO: 569398 - DNA, 393 bp, Homo sapiens
cttttggggtctttgctgggtttccacccctgatcaggggcctctcagggacacatgtgctatgcccggcatgcaccctggcatgaagccgggtatgaagacaacctgggccatcaggctgtctcctgccacctccggtaccactgcacagtgctgatggggaccgcgagggctctgccgtttcccacacgaacagccactcatgctcatggaaaaggcatggagcaaaggcagtctgtgaacagtgccctgtgccagcatcctccctcccatagcaactggggccagagccctcaccatgctgccaaatggatgacctgcccggctcacattgcaaccagaggggccatcacctggcagacagccagctatccatgacaccacagtgtcctg

SEQ ID NO: 569399 - DNA, 124 bp, Homo sapiens
cgcactgttcttcaagatgctcggggtctgaagactgtcttcctatctgcttcttgcggctgaggagaggagccgttcagctttacaaaacaagtgcgaattaccaaactcaagagcttatttt

SEQ ID NO: 569400 - DNA, 409 bp, Homo sapiens
tatgatataaaaaaaaggcctacaaattcaggaatcattatagccaggtgcagaggtacatgcctgtagtcccacctagttggaaggtagaaggcaggaggataggttgagtccaggagtaagaggctatagtgtgttgactatatctgtgaatagccactgcactccagcctgtgccaagcatcttcaaacaaccagattcgtcatctcactgtttctagagggtcagatatccagtacacagcgtagctgtaagactggctcagggtctctcgtgaggctgcacgccaacagtgacatgtcacctgaaggcttgactggctgtagggtccacattctgagctcacctacatggctgttggctggaggcctcagatacctcacctctcaatcgggctgctaaggatat

SEQ ID NO: 569401 - DNA, 392 bp, Homo sapiens
  misc_feature (156)..(156): n is a, c, g, or t
tgatgtgcaggacctgctgcttgccggaagcctttgctggcagactgcatggagtgttacagcagactgggaacacctcagccccttcagcacagcaggagcttaacctcaaggggccagagaaaaaaggctgtgggcctggtcccaggtccccanggttagagcacacagcctaggaatgctaagctgagccttggccccctgcaatcatccagacatgaagccaatcaatttatacccagcttataccactgtcaaaccctcaagggcatcaaagaatgtaaaaagcaaaaagccctatatgaaggacagcaactttaaagattaaagaaacatcatctcacacagatgagaaagaaccagtgcaaaaatctggcaattcaaaaagccag

SEQ ID NO: 569402 - DNA, 289 bp, Homo sapiens
ctactacataagggatcaagtgtcacatatgcaattttaaattttctagtagccgtattttaaaaagtcaaacagttaaaattaattgtaataatacattttatttaacccaatatatctaaaatatcatctcaacatataatcaacttttaagattattgagatactattctttcatacttgaaatctggtatgtattttattcttataatacatctgatttaaaactattacatttcaggtgctcagtagccacatgggtgttggatgcacaagtctgtaggatgaa

SEQ ID NO: 569403 - DNA, 1456 bp, Homo sapiens
  misc_feature (287)..(287): n is a, c, g, or t
ggacaagcgacatttcatgcatccttttcacccgccgtggaaccccgggagctcgtgggcccgcgtctagccggcctgttagcatggaccaatggccgtgtaccaatggtgcgggaatcctccgcgtataagctggacggcaaccgcaatctggaccgtgagacctctagccgaaccttgaattgtaggtcgcctgcgctgcaaggatgctggcgtgaccgcattctcacagagggccccaccactcgcgtgggactcgtgctcttgttacatagaacctgatctanactctagccgttctggcatttcttgttggaccttcaccgacacctgtgatgtaatgtcttagaaccgtgtagtgtaagtaacatatgactagcactcaggctggccatgcagcatcttctgggccgttactggatacaaaccctacgcagtgcaaccatggtagtcatcgctcaacaacaatgactggatcaccgtatgtccgtgctcacggcatttgcatcacgactcaaatgacagcctggaacgttggatattggcacgcttgcatatgggagtaaagcgcactctcatgggagttccgtgttgcctggaccatacggttgagtccaggctgcactgcctctgggactgacgaatgccacgcttgttaaccttaggtgttgcaatagcaacgggtgtttaccacgtgatcatttgaacgtgtcccggtgtcacgcgtcattgcatccagggaagccggagcaagcaagtgcccagtcggggcgcgccttgagaccaggttagcaaagcggtagaacgcgtcacgtacgcaaggtaactcgtgtgggaagggcctccaggccacattacgaaggacatcaaagggacaccgggctccaaggaaaggcagggtgaaaacattgggcgagataccgcggtcgggaagcaaacttgcggcggcaccacaatggtatggggcaggacaagcacagagccagaaacatgcgacaaggtttcttgagactagtccccatacaacaagagatgtaggcccccgcaagtcgcgaaacggggcggaacacagtgcaggacaccttgtgcagaacgggtgtgcccactcagggacacacgaggccgcccggaaagaaggccccaagaaggctacgtttgatctcgccgtgttatccacacggcgaaaaaaccacctcgtaattacaccaagtgactgggggaacaaagatatctactcggagagacggtgaaccggcaacaaacaagcaaggagtgagtgtcgcgtacatcagtcggtaacaataaggccgcgtagcgagtgagaagcagcaccgaacgtaataatgagacatttagcacgtaaaacagtttactctatacttcacagcagttatataactaagactcagatctcaaataatttatatcatttagagacgccgtgtcagttataaca

SEQ ID NO: 569404 - DNA, 389 bp, Homo sapiens
  misc_feature (380)..(380): n is a, c, g, or t
taagcactttctcaggatgggtcgaggcattccctaccaggatagagaaagcccaagaagtaaccagactgttgctaaaagacattattcctaggtttggactgcctctaactttaggatcagataatggcccagcattcatggctgaagtagttcagcagctgtcgcagctgctaaagactaagtggaaactgcacatagtctaccacccacagagctcaggaaaggtacaatggatgaaccagacactaaaacatctgctgaagttttgtcaagaacctcatcttaggtgggatcaggtcttgcccatggcctttctccaagtcaggtgtacccttaccaaattgactgggctttcaccctgtgaaattgtgctcggngggcgcaag

SEQ ID NO: 569405 - DNA, 117 bp, Homo sapiens
gggcaagccatcccttgcttctcggggctgacgccaccgttgtgtccaagcccaccctcccctgcttcctcagcagaaccccttcatctgttaaccttacctgtcctcagaaaagaa

SEQ ID NO: 569406 - DNA, 354 bp, Homo sapiens
agtcatagaaaaaaacggtgatcgcgaatgtatcttagagaagaagttaccttttatcttacacttctccgattcgcaaaagcatgtttgtttctaataaataagctaccttccatagatcagctttctttacagatcatgggtggggaggcagtgcgacagcatattttgtcatgtagcattcatggttggcatcaattaaacaagatagactcatccagtaattgtttctgttgttttcatcttccatcaccttcctacaaatttgctcatcattcccaggtcactttatttacagagagtaggtggggaggagttgtgcagcacattttatatgtagattatggttggcat

SEQ ID NO: 569407 - DNA, 997 bp, Homo sapiens
acgaggatgtgcaaagattatctaagcagcaaagcattcaagatgtggccttctgctactaacagcctgtgctcagatgtgggggcaaatgaatgacttaaatttggaacttacatttaaacaggaagcagagcctaaaagttgggaaattttgcagcctagccaggtggtaaaaaaaaaaaccattttctccaaggaattcaagcaggctgtggagcaaccacttgctgatatttgcataactgaaagggatccaagtggtaatatccaatgacaagtggggaaaaggcctcaaaggcatttcagagacctatggggcagcccctcctgtcataggccctgaagccaaggaagactgaatattttcctgggctgagcccaggccctgttgccctgtgcagcctcagaacactgctccctgccatccagatggctccaactccagcaggggctcaaaggggcctaggtacagcttgggctgttactttggagggcataagccatagccttcacagcttccattaggtggtaagcctgcaggcacacagaatgcaaaaatggtgaattcttggtagcctctgcctggatttcagaggatgtatggaaaagcctgggtgtccaagccagaaccctgctgcaggagcagagccctcacagagagcctctatagggcagcgtgaggtggaactgtgggttaaaggcccacgcaaagtcctactggggcatgcctagtggagctgtggagaagaggtactgtacccagaatgggagagccactggcagttgtaccccgcctcttgaaagagcccgactaaccagttggtgatgaggggtctggagtttggagactgcaagctgggacaactataagtggcaaggacaggtctgggagtctagtatgacccgggataatgtggctacccttagtacaatgataccctgctatgaaagcaaagacagaataaaacagatagcccttgagaggcaccgagagaat

SEQ ID NO: 569408 - DNA, 770 bp, Homo sapiens
  misc_feature (2)..(2): n is a, c, g, or t
  misc_feature (70)..(70): n is a, c, g, or t
  misc_feature (269)..(269): n is a, c, g, or t
  misc_feature (322)..(322): n is a, c, g, or t
  misc_feature (361)..(361): n is a, c, g, or t
  misc_feature (370)..(370): n is a, c, g, or t
  misc_feature (383)..(383): n is a, c, g, or t
  misc_feature (392)..(392): n is a, c, g, or t
  misc_feature (407)..(411): n is a, c, g, or t
  misc_feature (434)..(434): n is a, c, g, or t
  misc_feature (442)..(442): n is a, c, g, or t
  misc_feature (446)..(446): n is a, c, g, or t
  misc_feature (461)..(461): n is a, c, g, or t
  misc_feature (473)..(473): n is a, c, g, or t
  misc_feature (503)..(505): n is a, c, g, or t
  misc_feature (521)..(521): n is a, c, g, or t
  misc_feature (553)..(554): n is a, c, g, or t
  misc_feature (572)..(572): n is a, c, g, or t
  misc_feature (584)..(584): n is a, c, g, or t
  misc_feature (596)..(596): n is a, c, g, or t
  misc_feature (601)..(601): n is a, c, g, or t
  misc_feature (604)..(604): n is a, c, g, or t
  misc_feature (606)..(606): n is a, c, g, or t
  misc_feature (610)..(610): n is a, c, g, or t
  misc_feature (613)..(613): n is a, c, g, or t
  misc_feature (759)..(759): n is a, c, g, or t
gngggttaggtcagcatggtggtggggggtacagttcatattccactcatactgtacaccagtaaaagcnaatattcaaagggttctctaagtttcaagattaaaaaccataatgccttgactgaatatcatgattacaaaacaggtattaagaactgtgaaggtatatgctcacaacatatcccttctcccattctcactttattccaaaatctcatttatttcactgacaatttgtttatactttcaaaaatccttttataattttnatagatataactcaaaatgactgcttgggtctttaaaaaattaacagattaanaagcaatacaagtgcacttaacactgatcaaagtctganatgccaaanagcaaaataaaantcctctganatatatatgtatttnnnnntatagaaaaactccaccaatagnagaaacanagtntgtttaatggttgcnttgggaaggggnggtgggcacctcatgccagggagatttacnnntgagacttttcaagcnagcactgcctatagcatagtctcatatcttgnnaatttaaacctaattttnattatatatacngggccggtttgncgggntcncncccnccngtgaaaaactggtaatctgtttacaaagtgcagcgtcagtacagcaaactcatctcaacaaaagattatgtgtggtttctcgggctttaaaactcccctggtttccatttaaatgctttaacattgtgtcatcctgcatacatganaagcctgtgta

SEQ ID NO: 569409 - DNA, 231 bp, Homo sapiens
ccaggtagattcacggcgattccataacacttataagtatacaaaatatatataaagacaggttctcaaactcaagatacaatatggcaagtggtcaccaaagtcttgtatatggttagcaaaacacaaatccagagtataaaatctatctgaaattatctaagccaacatcaaattatttaaatatgactcagctagtataaagagaaaattaaaatcttccttacatac

SEQ ID NO: 569410 - DNA, 491 bp, Homo sapiens
ggacagggagatcatgcaggtttgatatagaaatcggttcttatttctaatatattaagtgcttgctgtaaatttcataatccagaacgattgttctagtggtccctggatctaggagataagcacgccactgacttgctctccttggttgtccatgaaggccaccctatgaataacaacaaacccttgatttctttagtccacgtgtgtgtgtctgtgtctgtgttgtactgtcttgcgtgcatttcggtcctcacctgatgaagacaagtgagacactctgtctactctgtgggtacaaggtgtctcagagttgatgaaatgcatctgtgcttttccttgatcatctttgatgttcaaaacggtatgagaatcttcgtctagttgacaattatgtaaactaagcttcataacagtttagtgatttgcctaagttctcctagttagtaaagattggaaccaagtactggggtaaacttgaattatcgtga

SEQ ID NO: 569411 - DNA, 371 bp, Homo sapiens
ttaaaaaaaacaactgctggccaggcctggtggctcacgcctgtaatcccagcactttgggaggctgaggcgggcggatcacctgaggtcagcagcctgaccaacatggagaaaccccgtctccactaagaatgcaacattggccgggcatggtggcgcatgcctgtggttttagctgctcaggctgaggaagaagaagtggtagaaccccggcagtgagccgagatcacgccattgcactccagcctgggcaataagagtgaaaatctgtctcaaaaaaaagaattgctttatggaagaaagtaagtatacacagggagaaagggatttgatgacccttggagtccccggcatcctgagaaccttccaga

SEQ ID NO: 569412 - DNA, 138 bp, Homo sapiens
ccttgctccacatattcctattcatctctccagttatcctactctagatatcatctcatgctgataccacttcaacagtatctatgtctccctacattaccaaatcccagtgtcatttcattcagattacaatagggc

SEQ ID NO: 569413 - DNA, 1621 bp, Homo sapiens
  misc_feature (131)..(131): n is a, c, g, or t
  misc_feature (136)..(136): n is a, c, g, or t
cgtctgccacgtatagtctctgagatttgtcattctgctctccacaacgagagtctgagacgagatgcatggatccagggagcactctgcttggcagcccatcccgcacctgccacttcgcgcagtaagcncgtgntacacgtcgtatggagaatcgtcctgggtacacattcgttcttacgagatcaatcttgccttggactttctggtggacctggtccaagcatgctgttgcttagtagcgtatatagcttcgcatgtgcctatgcgcgatacgtcataatcccattgggaagcttggctatgtattgtcagttcgacataatttgcattacgcaacggcggatcgcttgggatgtgcacatgctcggttcagtacgcatgcgcttgcggttcgaaagtactttgtgccaccatagcacagtgcatttgcacattacacaacctcttacagctatcaccttcttgagggatcgtctccgtacttatgcacagaatccgcgtccggacttggcaaatttggtcgtgagcttcctcgaggaaaagggtggctgttcggaaggtcgcaaaccttttttccatataccccggtccgttatagctttggggggacacggaaggcgcatgcaaagggacagtcctgtaaggagtgccattaaacccggaaaggaccaggtttgcggattcgcatgggcatacatcgcatctggcgccaggagcaacagcgctaattgggcgggattggaaggcttgaggcccaccagaagctgtccctcccaatggccaatattccgccagggcgttacaactattaacggatactggcaagattgttcaacccaggccccttagaaaggaagaaattgggtacagctctggcgctgagatggatagtgttaccacaccccttacgcaaaacagcgcttccctttttggattcaacggaccgtggttcccttacttggagggcaacacaatcggcgtaaaaggaggaaaaaacacaacggcttggtggaggaccaccagacggaagacaactcttggttttggtgtggggcgaattcccttttccccattgtggacaccgccgctagtagaggaatatttgcaatagggtctggcccccgcatatggctggtgcaaatcgccaacacgggcaagctgttcaagtttcccttgagttggcaacccgggtttggccggcttcagagttgaggaagaaccgtccaagacgttttaacttcagttagggtaggttggagccgagggtatggaatttgaaaaacaacgaacccttgtcccattagcgatatcagaagaccttggcaactctcgagcgaagttggttcacaccccacttgacccatgtggtgggacccctgaatgagccatgaccaacaaacttacagccgtttggttgaggtggaattgccagcaagccgcgacggaaaagcccgcgactggggcggtgtctcatttgtcgaacgccagataccgtgtgatgtaccaatgcctttcggcacgatgaaaagcgggccccatttaaaccgttctatcccccacggagcaagcaagaactttttaaaacgtgagggcgccgtatcacatgcaagattcacac

SEQ ID NO: 569414 - DNA, 893 bp, Homo sapiens
ttggtgtctctgccgtttattagggctcgcccgttccccgttggtgtgcctcgtttcgggggtcgactatgcctagtgctctccccatgtgggggtgtttgacccgggccttcagtcacccttaatcggccctgtggctgtcgccttattgtctgcgcagtcttccctgggggggatgcatcgcctctggtaacatggcggttctctgccctgacattccgattttctgggcgcccgcttcgcacaccccattggggggcgcagcagggtgtgcgcgacccactgggttccccagggaatttttttctgagcgcggggtgtccaccggactacagggtgtttcgcgccgttttttttgtatgtggcccactcaccggtcgccagtccgttagcgtccggaccccagcggggccccaaactggcgcccagccgccggtgcctactgggggacgccccgcccccctggcgatgtctgtgcgtgttacccgggttcttcccccgtggatggtacagtacttggctgtccgcgggccacccacttaggggtctgagcgaaattcggacccacaccggcggtgctgcccccgtattcaaaatatgtggacgtgacccgatgcattggtcaatagtagcctctatgttcgacgcccggcttttaccacgaccgtttttatggcggcgtgtaccaaagtgcccgagcaagaggtagtcttgccccggagggttgctcacgcagccggaggctttcatgaaagattgctgcagggacaagtcagtcttgctctcccctcgtcacaataagaatagagtttggatagtacatataccactgctacaccaagtggtgggggcttttctccgacggcaaaaaggttagtcacaacaacaatcac

SEQ ID NO: 569415 - DNA, 470 bp, Homo sapiens
  misc_feature (456)..(456): n is a, c, g, or t
gggtcaaagccaccatatcagataaacagtttcagaaaggaaaactagtctgtttctgagtgtaattggtaaaaatataaaggattttaatggttttctaaaaagggaaaaaggggcagatacaatggccaagttcttgaacttaagtacaatcttaaaagaatattagttacaagtaactaacaaaaagatttttaaaaggacactaaaattactttctacactattcaaacatctgatacgagctgtgcatcagttaaccactgctctatagcaaacttaccacaaactcagtggcttacaacaaccatggatgatttacacatctctacaggtcagccagtgggtgattcaggtaaccctggccgacctagacttgctcaggagacagcacacagctgacaggtcagatggcattggctggtctatgatgaaatcggcaagcacaaacctggncccctccactgggc

SEQ ID NO: 569416 - DNA, 349 bp, Homo sapiens
ctctatccttaatctataaacacagcactgcattctgcctagtgtcacagaattgtcaattcctctgacccacagtgccagatgtccagtggaattgacaggacatcatacatttcaattagttccactctccattgctgtggagggtgaggtgctacctcaccttcacggggaagacccaatgttccaaggatgtgcagcgcgggagggccccgaaccattcagaccatactcatgttaaggcccatgcaacggtggggtgtgctcaagggcggaaaatagccctgtgtgctttgaaggcaagtgtgtgcaaacatacccaataacagacatgttttgtgtatgatac

SEQ ID NO: 569417 - DNA, 177 bp, Homo sapiens
aggattctgcaacggttggacacaaagagttcatgatcttcccagaaaaattcatgtgcacagatatggaaccaatggactgttgagataaacatgggagctcagtgatgcccttggaatcagtattgcttggaggaagaggaagtcccttagtgagatatcccctgtatttatttg

SEQ ID NO: 569418 - DNA, 87 bp, Homo sapiens
cagcaggaggactcggccgtgtatctctgtgccagcagctttccttcttttatggtgacgggacagacaaacactgaagctttcttt

SEQ ID NO: 569419 - DNA, 571 bp, Homo sapiens
  misc_feature (561)..(561): n is a, c, g, or t
  misc_feature (564)..(565): n is a, c, g, or t
atatggcagatataacagcacgtaatttccaaggcaaggtcataaaagacattgtagcttctgccttgtcccttcctcttggatctcttgctatggagtagcagccccatgaagacacccgtggtggaagatcactgaggactcctgccaacagccacccagtgactgaggcctcttgcagaaatccatatgagtgggccagctgacaagaaaatcttccagctctagtcaagccttcagaacaccagctcttagtgccaggaactgccaggtaagaattctgactacactgaggccaccatgctctgaggaagtcaagccagatggaaagatcacagcaggagaactggtcagcagtcatactcttgaactcatcccaacccagactccagacatgtgaattgacaagtcttcagatgattccagcacaaagccattgagtcacctccagccattgagtgtccccagccgagacaccagtcaccatcaagcagagccagtatgcctgttatgcctgtccaaattcttgacccactaaattctatgaaattaataaatggntgnntaagtt

SEQ ID NO: 569420 - DNA, 142 bp, Homo sapiens
  misc_feature (128)..(128): n is a, c, g, or t
gtatcccatacagagtacgagatggagaagggcgggtgccgatttagactgtgtggttcgggaccggcctctctgcaggacgcattacctttgacgcaatgcatttataaatgctctgctgcaagatngtgtggcgacatgc

SEQ ID NO: 569421 - DNA, 605 bp, Homo sapiens
  misc_feature (1)..(1): n is a, c, g, or t
  misc_feature (5)..(5): n is a, c, g, or t
  misc_feature (118)..(119): n is a, c, g, or t
  misc_feature (204)..(204): n is a, c, g, or t
  misc_feature (284)..(284): n is a, c, g, or t
  misc_feature (295)..(295): n is a, c, g, or t
  misc_feature (529)..(529): n is a, c, g, or t
ngccncctcctcgcgaggagaagagctgcaggatgaaagtgtctcagctcctgctggctgatggaggccaacccactcatcgtccttcttctgattgacagagcagaagcttcgtgcnntttgagggtagtataatgggcacgtgcacttgtcacacactgacagtcactggaggaacagagaaagtccgtcttctctgagctntctggccgtgatattgggctgtgatcctctagagccgcttggactcacatcattctatggggttgagacaactcattccntctgaggagcnttgtacatacagccttttatttataacttattttgtattgaaacttttaaacatactgaagaaaaaaaaacttttccgacatctgttcttggtcttttgtgacacaggttgaagggggaggaatagaaaaagacaaactgccttggaggagataaaccaattttatgtctatcatgttatacaaaaatctagaaataatagatttgtacagaaaaaaatgataataaatgagancacaaaacatataatttctagatttttgtataacatgatagacataaaattggtttatctcctccaaaaaaaaaaa

SEQ ID NO: 569422 - DNA, 401 bp, Homo sapiens
cctttttcaccagagccacagcatagtagaaggtctttggattctcttttgacccatagaactctgctactacaggcttcagtttgttgggagtcaggccggcctcatgcaccagacccgcgtccagtgtacacggcgtccgcttcgtgtgccgcgatggccttgatgcagtccaggtaggaggccttcttcacacagatgatacgggggccatcctcttgaaggacttttttcatactgtcccggaagttggcgcacttgctggcctcgtgatcattcacggcgcaccatcgcacggtcttctccgtgacggccagacacaccccagggcggcgcaggccagcaggcgcgcggcgagcctcatcttgtagctcaggggtggtggcgaggagcggcgagcg

SEQ ID NO: 569423 - DNA, 217 bp, Homo sapiens
caagtgtgtcccatgcctgaccttcataattggtttgggggacaggggagtcacagcccctgatatttaggtgatgtctcttaggacttcagtgccttattgccttccccgccccccccttctgggtttcacattttttttttgcatgccttaggttttgctctttggttttttcttcagtttccagtaatacccccctttttgagcaaggccaata

SEQ ID NO: 569424 - DNA, 891 bp, Homo sapiens
aaaagccaccaggattggcggattaggcagctctgcagtatctggaggcagcgcagttggcatgatcacagagaccatcattgaaactgataaaccaaaagtggcagctgcaccagccagggccttccaggcgcccagcaaggctttaaaacttggagccaaaggagaaggaagtagataactttgtggacgaattaaaatctgaaggtgaaatccatcatgttctctagtatgggcaagagtacttgtgaagcaaacaaaatgcatgcgtcctacccgattaatatggaaaagtgtacatatgaagattgaaggaataagataagattaagctgtggacgagacggaggatgactagaatatggagttgatggcatgaatcatggttaggatcgtcagtatgacaagtatggccgaagttcgtcctttccagtgtggaagaatgatagataagaaaggggtgcagctaaagacccatgcaaatgtgggtataaaaaatcttttcactggagagtctctagagttgggcgttgaagaatccagagaagtcatttgcagtcaacgagtgacgtagaggggtgctagagtggagactacaaagcatagaggaatcttttatttccactgacaaggtaatttgctggccctcgtgagagtggaaatggctgtgatgtctacatagaatatgagctacaagaagataattctgaactgtaggtgatgtggtttagcacatcccagtcccgtctggtgtcgggcgcctggtatcggtgagaaccacggggcgtatcgcttgaccgttgccgaaattaccttggatgcgctgccggggtgctgcccataagtgcccgtgttttttgcgcccgggcttccggcactggtccaaattgg

SEQ ID NO: 569425 - DNA, 215 bp, Homo sapiens
acgctagggggttgaggctataccatccatggggcaagacaggaagaacggactaaggcatcgagcattccgggaggcagaagatgtctaataacaaagacgttgctcccaaggctgacttcctgcatccacacgtcttcattatgacattgcaaagagattggaactatttacaccggattgggcccaccggggcgcccgggaaaaacagggct

SEQ ID NO: 569426 - DNA, 786 bp, Homo sapiens
  misc_feature (16)..(16): n is a, c, g, or t
  misc_feature (26)..(26): n is a, c, g, or t
  misc_feature (44)..(44): n is a, c, g, or t
  misc_feature (428)..(429): n is a, c, g, or t
  misc_feature (436)..(436): n is a, c, g, or t
  misc_feature (439)..(439): n is a, c, g, or t
  misc_feature (456)..(456): n is a, c, g, or t
  misc_feature (767)..(768): n is a, c, g, or t
cacttgttacagacanctttagcaanccatttacccaattaagnttagggcgattgaaattgaaccttggggccatataattttggcccccgagggggaagagtgaaaatttttttcccccccctttttttggggggggctaaccccccttcccctctttctgaaaaaaaaaaaaacaaaaaaaaaatttttcggggggggaggcaaatatttttaacccccccaaaaaaaaggggggtgtttttttaaaaaggtgtttaagcgcccccccccccttttttttttaaaaaaaagggggggggagaatttattttggggggggggggcccccccccccccccccgcccggggggtgttgtgtgtcccccaaaaaaaaaattttttttttcttttttttttttcttttaggcccgccccaaaaaaaaaannggtgggnctntttttatatttttcccncagaaaaaaaaagaaaaaattattttttttttttttttaaaaaaaaattaagtgggggggggggggaaaaaaaaaaacaacatcctccccgccgcgcggtggggggcggccccccccccccaacaaaagggggggggcgggggggccccccccccccccccataataaaaaaaaaaaatattaaatttttttctcccccccccccgccgcgtgggtggcccttttttttaaaaaaacgaaagagggggggggggggaaaaaaactacttcttcttcttctccccccggcgggggggggaaaattttttttnntttttttttttttttttc

SEQ ID NO: 569427 - DNA, 145 bp, Homo sapiens
tgacacgacgtgccagactgtggtggccgacacctgttatcccagcgctttgggaggccgagggattacaggcatgagccactgtgcctggcctcttgtttcttttttctcaaatatttgtgatctgagattggtggtggtatag

SEQ ID NO: 569428 - DNA, 298 bp, Homo sapiens
  misc_feature (25)..(25): n is a, c, g, or t
agcgggaacaatcacttgaggtagnagttcaagaccagtctaaccaacgcggtaaaatcccgactctactaaaaatgcaacaattagccgggcgtggtggtgcatacctgtaatcccagctactcgggaggctgaggcagaagaatcgcttgaatccgggaggtggaagtggcactgagccgagatcatgccactgcactccagccggggtaacagagcaagactccatctcaaaagaagaaaaaatggtaagtgatggttccccgctaagtgagtgttcccggcggggtacggagct

SEQ ID NO: 569429 - DNA, 363 bp, Homo sapiens
tagaggtcccttatgtgcccagaacaagttttattttgttgtcgttacacaggagggggcagtcagaagagtacagctcaccccagcagtggaggggttaaatctcagtggacaacgttggggcacgtggggacagccactcctgacctatggggtgtaccttcaagtagcaaggctggacagtgatgtctagaagggtctccacttctgcctgagttttggcaaaaccagtggtctatagggatgtgtgcaaaagaatgagctaccgcagtgtgattatcagtgttttctaaaataaagagcacgggtttggctttaaaataattcacatcaacgggatatgggagaacatgtagctggcat

SEQ ID NO: 569430 - DNA, 872 bp, Homo sapiens
  misc_feature (70)..(71): n is a, c, g, or t
  misc_feature (74)..(74): n is a, c, g, or t
  misc_feature (76)..(76): n is a, c, g, or t
catgcactgacctgggcagggacacacaaccaacagctctgtcgggaacttaggagcctgctcgcctacnnaantnataagagagatctaaagaaaacaagctaaaccttttgagggacatactgaagccagataacccaaggtattcacagcaagatacagtgagtcttaaagttaagcaccgtgcaattagctttgcttccttgggtttttgaaacatgcatctgtataaacctgcctgtgcagacatcccgagccccaagctgggtctgccaaaatccagtgaatcggctctaaaatgtagatggcacctagcagtgaccaagactcagcctcaggcggcctgcaaacctgtgaggcccagtggagcagccgaacagaacatatgtggacaaagtttctacgtgttcatggaatttcgttgcaggaaaccaccagagcagagacgggcatggcatacaggtactgctgattgcaaagtcatccaaccaggcactgcactgatgtcaaaggttgtcattcaaacgacaataaggactgaacatagcaagacaaaaccctgtacgaacacagacggaaacaatgcagtgagccctcttcattgggttgcattcttgtcttcaggattacgcacatttagcgtttaaccagttcctatttgacttcaagaagggattaacacgcacaacgaacccggagcaaagtgttcaaatcgtcgtggagcaaatcccataaacacagtgttcatcccagaagaacaagggtatccttgcgagactccgcacaatcacgcagaagctcgatattcggagcaggtccacaaattgtcagaagttaggacaacccatattacacgttacaggggaatcaca

SEQ ID NO: 569431 - DNA, 314 bp, Homo sapiens
  misc_feature (18)..(18): n is a, c, g, or t
  misc_feature (111)..(111): n is a, c, g, or t
gatggaaaacttatgtanaattgtagacttaaaaaggtttgggaggccgggcgcggtggcttcatgcctgtaattcccagccactttgggaggccgaggcgggcagatcanggaggtaggagatcgagacccatcctggctaacacggtgaaaccccgtctctactagaaatacaaaaattagctgggcgtagtggtgggtgcctgtagtcccagctactcaggaggctgaggcaggagaatggcgtgaacctaagaggcggagctggcagtgagctgagattgcgccactgcactccagcctgggcgacagag

SEQ ID NO: 569432 - DNA, 256 bp, Homo sapiens
  misc_feature (212)..(212): n is a, c, g, or t
tcttcgcagcagaaaacacgccaccaagcagagtgccacgcctattttacacctaaccccacggtgcgttggcccaacggccacgcaccgtgttgggccacgcaccgtgttgggtaacgcaccgtgttgggccaacgcaccgtgtcaggatgcaggcagatcgctgcagaagtgtctagcattcacactcgtcttctggagggacgtcgatngtattaggataaaagcaccaggtgaccccactaagggtgcgttg

SEQ ID NO: 569433 - DNA, 321 bp, Homo sapiens
aaacgcctgcgctgttttgttagactggtgctgaaacaaaaggttaaggctaggttgaagtttagaatgaaagaaatttgaatccatgtcattcataaccccttgatttgtagtgtcatgggtgctcccgcaggcagggagtaagctgggggtgcctgaagccttccattcttgccccgcctcaccccaaatggtccctgtttttcaggctttttttaacttcctcaccccttaaccaaaaaggggggtttttttttgggcaaaaagccatttttaaaaatcagtgatgtaaacctcactttattaaaaaattatccagca

SEQ ID NO: 569434 - DNA, 368 bp, Homo sapiens
catctggtatcacagtgtttgtatttatagtttgtcgtgagatatttaacatctgcgaaggacatactctcacttgttggacgattataacgatcttgactgtgaggaccctgtcgctccaccacagttctacctaaccaggtagctaagccttagacttctctttagattctagggatcccaccatccttttggttttctttccttcttctcttctcccatatctactcactgagtcaagcccattgttttctctgaattagtctgaggtcaggctgtatcctctgtggctactgccactctttgattgattagtccaaggatttccaaagactgatcttctagttcatattatccccccatcaggt

SEQ ID NO: 569435 - DNA, 324 bp, Homo sapiens
ttttacttaaagtccggttcccccctttttttgggtggaatttcccttggtttacctttgccaatagtttttccattgccccggtgttttggtttaattttcccaggcttattttaaaggcctttgggttccctttgaacccattttccaattggaattgttgtttctttccccttccatttcttatttttggccaatttgaaaacccttttccaatatgggttttttattttttttaattaaaagttccccttttcttaggttcttatttttttgaccggaaggaattcgggcctttttaaaaattaacttggctttacccca

SEQ ID NO: 569436 - DNA, 127 bp, Homo sapiens
  misc_feature (13)..(13): n is a, c, g, or t
gaggctgcagtgngctgagcacaggacgtgtgggcccgctgtcaaacggagactcgccggcggtacgggtcacagaaagaaccccgcgggactactggaagaaagtcccggcagcgtgtcgtgtttc

SEQ ID NO: 569437 - DNA, 214 bp, Homo sapiens
taatgaccatgcatttactagaaaagatgtcagtatattaatgcttaaatactaaaatatgctgtaggctttacaaatttaaactgtatctgtgttattttaaactgagattttatgagcaatctgtacttccctttgattcattctatcactgttgaatttttgtccccataattctcaggtctaccatcatccttttcagatgatttttttt

SEQ ID NO: 569438 - DNA, 559 bp, Homo sapiens
  misc_feature (510)..(510): n is a, c, g, or t
gctgcgcctactactaccatctcaggcatcacttctatagaagtgagagatagggggatgtgggcattgttagtgaaggcctgatgtgagtcaggctggaagagtgcctataacggatcctaattgaagtagcgattatccaggcttgtatcctgggggctgatgaggagtagggtttctggacaacttaaacagatccagagttagtcgatcctaatctcaataatgggagaaagggagtacagttgatattctgtaactgacagcagtttgcggcaacgcacgttatttttctccgccaatcttataccgtaggtagggatctctttcctacatgacagtattaatacccagggaaactggtcatcaggcgaactgaggtgttttgctggcaaaacatagcttcggttatgtcaatggctattggattggtccatgaagcgaaaaataacttactgcgtcactcgtaccgataaccgcatcaggtcttctaggtaagtagcctatggncattgaggcatgatagttcagggaattcggccaattagagctgtaactt

SEQ ID NO: 569439 - DNA, 282 bp, Homo sapiens
gctctacaggatctcccatgccagtgtgtctgctggctgacccaggactcagcagtgataactaacggccgcccttcaggatcacagatgtcgttgtggtggtggcaaagcatggcacttgtttcggtgatgagaagcagcacacggcaagggtgaggcctttatcagcaggcctccgtagagcgtgtctgcattgtcagctgccaatgcgctgagtggctagccttacccactcagtccaagagaggaaggaaacagcagtagcagctcatgaatggcaag

SEQ ID NO: 569440 - DNA, 1402 bp, Homo sapiens
ccgatggggggttcaaatccgttggaactcgcggtcgtattcccaaaagttgcttgagtgttttacacgttgtggggaggtggggggccgcgcctccgatgactaaattatctccgcgcgccactgctcatgcggcggcgaagacattatcttatatacatcacttggcgtggaaccccacacagggttcttaataagtatattgcttgcagtggtgggttatcgtgtgatcgccgcctctcgccgcctcccgccctttctcggataatgaggggcgttcgctcccccacgggagggctctctccccgcgctacttttttttcgctaggtgttgcccccgggggtaattagttgggggggcctcccccatatattctgtgctcagttgtttgttgccacctacacatatactaggggggaccttgtccccgaatgtccccgtcttgtgactccccccccccgcggggttcccccgggcgggtagtagctgtgggcgccctgatcccccggagatttttctgggcgcaaacgggagattctgtggtaagatgtgggcacgggccccccccccgttggggcccacacccctcacagcgggggacaccgaggcgtttatttttagagggggcgcttctcacccacaggggtgttaacccctcttttaaacttactcacacacttctcttatagatgagagccacgacgtctgctctcacgcccgccctgcccccctgtgagagaggagagagagagaaatcctctcccacataacccccctctctcactatagagagagtattttcgcgccgcccctccgcaccctctcttgttccacatggcccaccgcttgtcttctttctctttgtagagaattttgaactctcttggaggagtatatctcgtgtttacaccaccttgggcgcggggacgcggggctctgtgggggttttttctctcttttgtttgtgttgttcccctctctcgtcttgtttccctctctttgttttgtttttttgtgtgtggcgctcttgtgcgctctatgagagatgtgctctctgtaattctgacacacattgtgagacacatgtgaacaccacacagtttgtgctatgaatgcttcttgtgttgagacttccacgccacgaatgtggaatgtggggagaaacaccacgccacgctttcttgtgtaaaggtcctcttggtaaataaataaggtttgagatttttttaatttcgaggaggaatctttcacattttcctaatgtaatgcttttttccctttttgcccacgtttccctaatcaccctgctgtaagagatggcttatattttgcacattcacatgcagagctaatgttgccaatctgtttcatttagtaaactggaaattattgcttaatcca

SEQ ID NO: 569441 - DNA, 834 bp, Homo sapiens
agtataatcgtgactgatatgtgaaacagggcaggtgtaatcggacgaggtctccccggagcgggttgtgcgtggcggggctgctgggcccgctgagagtctccggtgcaggtggtcattgctccgctggggccctggcgctggccaacggcttcccaagtgcgcacgaggccctgaagagcgcacccagctccttcgctgcccgctgggaagtccctctgcttccgccctgtgccctggccctgcccatgcacagctgggccctgtcatgatgcttcccctggtgcccctgtgcatgcccaactggcgcccatgtgactggctgcctgcgcagaactccctgcccctggccccatgtggcatcacctgtgcgagttctgttgggcctgctgtgcttcctcgtgatgtgatgtgctgctgcatgggatggccctgcgtgaagcttggtggcttgctcagtggagagttctgtgagggtgcctgcgctggtgctccagtccaccctgtttctccccaccctgaagagagggtgaaagagtcgctgcacccaggagctgtaatggtctaaaatggaagttgacagcggtgagcccctgccctctgtggcacatcggaggtctagagtgtgcctggctggggcctcctggcttgagcactgcaccgcaaagctccagccacctggcacagagaactcttcccttaaaggaatctggccgagggcttgtctcccttttcccaatgaactgagagagagagaattaactgttagacccataggtttccgtgatgtgtaaatgccatctaaagggggtagggaggagtaggactggtctg

SEQ ID NO: 569442 - DNA, 356 bp, Homo sapiens
gctagtgggggtctttgtgtgcttggtgtggagtcactgagaaccatccgtggtttgagatcccaccggggctggacactgcttggagcactgtggagggcaagtgtaacctttgccccgggacccaggcagctatgcagccagcatagggtgtgtggtccttgcaggtctaggcgcacggctggctctccctgttctgttctgttgttatttctgtctggacgggagtgcttcagatgggttttcttttgctgagggtcacacacatcagtttctgagcagttagcgtctcagccgactcgtcctatggaaagcttgctgttttcaataaatcttagtttgctatcgtttttaaa

SEQ ID NO: 569443 - DNA, 406 bp, Homo sapiens
  misc_feature (11)..(11): n is a, c, g, or t
  misc_feature (25)..(25): n is a, c, g, or t
  misc_feature (59)..(59): n is a, c, g, or t
  misc_feature (65)..(65): n is a, c, g, or t
tgtttagtgtncactcatacttttnctggtgttaatctaggtgatttacaagtattatncccagncttgtattattatccccattttatgtatgtggaaactaggactataaaaatgaaaaaagggggccaggtgcagtgctcacgcctcacgcccagcactctgggaatccgaggtgggcggatcacttgtggccatgagtttgagaccagcctggctaacatggcgaaaccccgtctctactaaaaatacaaaaatcagccaggcatgtcagtggacgcctgtaatcaatcccagctacttgggaagctgggcacaagaattgcttaaatctgggaggcggaggttgcagtgggccaagattgcaccgctgcacactccagcagacagagtgagactttgtctc

SEQ ID NO: 569444 - DNA, 905 bp, Homo sapiens
ggcgagaacgagccccggacacgaccaatagcccgtcgtcgccgatgcaatcccgtcggtcagctaccttacgtcccgcatgccggtcgccgccgtgcatctatgcccaagagaaaggctgtaagggagtatgcttaatcgtgagattagaagcgtgacggatgaaagcgaccgaaccacagaaggaagatccgtcggatggtttggtcctgctagaaccatgctccttcctactatgcctggaagacccgaggccgcgtagagaatggccccatgtgactaccgggtagattcagggtacccgattatgggcatatcacacgggaagaacgcttggtagcatggtcaaagtgacctggagaatagagccgcttcgccatgaacaaatggtcgtgatgtgcgcacaaatatcgagcacccaggcgcgaacatgatacatggcttgtaaaagcgttgctttgccatacttgcaccagagcgttgagcatgtggtgcgctgcagttggctctggacctaaatccgtgttggttgaccctgtcgtggggttgaaatccttgttgagcaagactggttggagagactcaaccttagtggtctttgtctgaatgcgaatgtgtttgtgtaagtttcactgagagttagcccaagcacacacttaatgaggatctcatggtaacagtggtccgttataataatctcctcaatgtgtataagacatcaacgcgccgcgaaacttgttgtcgcctttggaagctgggacgattcccaacaaaagcccgccgtaatgcaacgcgcggtggttatgttaaacttaggcgtgagcccgaatatgggggggcacgcattttgtgtttggttctgcccgttcacaaactcacggctagacttgggtctttccccggga

SEQ ID NO: 569445 - DNA, 299 bp, Homo sapiens
tggaggtgaaatggcatgcaccaaggctgctgtcactacctgtctgctacccaaactgcaacaaagcgcccactcaacgggaaaaggcccagaccgaacccacgcctgcccctgcctggccccgatcgtttgatagctacgcaaccctaccagtgaaatttccatgcctggaagcctgaacaggcccacgaacaacatgcagtacgccaatgcgcccgcgagatctaccgccgtgaaatgctagcctccacccatgcgcgacacaaggcgccgtggtataacgtgacgatgtggcgcaa

SEQ ID NO: 569446 - DNA, 360 bp, Homo sapiens
gggtggcgatgaggaggtacctattgtgttgagtaacggtgataattttatacgctattctgagccaatgtcaagattcttctggtcacagttgagcaacttggaacgtgccaaacgcttttccaggactggcacgttcaaaggacctacgtgctacgtgaattgacattcacaccggagtaatcctagttcgtaactatgtacttcaaattcctgcgtgacctaaaggtctggacaagtaaggcctgctttacaaagcgccttcccgcgtataagattgcatctcaacttacgctcataccgagacccacccaacaagagggtctgttaaaacaatataactctagactccttgtcgat

SEQ ID NO: 569447 - DNA, 634 bp, Homo sapiens
cccaaaaaaaaccgtatgttaccaatccaaatccaaagtgactttccaggaatttacgcctaaagatttggtcccacaattttaaaactgtttaattgctcacaggttttacatacacatcagccatcaactaaagttgtacttaaaaaattctcccatatggacatttttaaagccaacccctggggcttttggcttaaatccccggatgttcctgccccccttaaatttggagttaatccttttttctctagagtagaggtataattgtgtgatatttcagaaatccagataaatgattcaaaaagtcccagttaaggagaatcatgtttctttgatcatgaataactgattagtaagtcttgcctatattttcctgatagcatatgccaaatgtttctaaggtaccaagatgagaccagataaagattgtgtggtgttttggatttggagagaaatattttaatttttaaatgcagttacaaattataatgtattcatatttggactttctgttaaaatgcatgattgcagaattgtttagattttgggtttattcttgatgaaaagctttgtttgttcttgtttttaagtttgcactcaaatcttaagaaataaatccacccatgttatc

SEQ ID NO: 569448 - DNA, 242 bp, Homo sapiens
  misc_feature (1)..(1): n is a, c, g, or t
ntggggctccgctcctaagtgcaggaagatggtggccgcaccgaagagaattagtcgctggaggcgatcaactctaggctccaactcgttatgaaaagtgcagaagtacgtccatggggtacaagcagcactctgcaagatgatcagcacaagtgcacagcgacaattgtgtcattctcgactaacaacatgcccagcctttgacggacatctgaaactagagtactatcgctcataatggt

SEQ ID NO: 569449 - DNA, 160 bp, Homo sapiens
tacttggtatctgtagcagagatggggttgcaccatgttggcctgacctcagatgatccacccgcctcggacctcccaaagtgctgggattacaggtgtgagccctcacgccaggcgaatagacttttctttccccactgaaatgtcttggcatccttga

SEQ ID NO: 569450 - DNA, 157 bp, Homo sapiens
tgggcaaaggttaacatccaattagggggaaaaggtaaacccggcccaaatgaggggcagtggcgggaccaaaactgcttaaaaaaatcttcagctgggggaaattacgggcaggtcatttccacatcctttggaggtccagagcatcaaaaggacc

SEQ ID NO: 569451 - DNA, 130 bp, Homo sapiens
gcccgcgagcggacgcggcagcgctctgtctcgcttttcttatttttcccccctttccccttcttatattctttcttttctcccctccacttacatacgtggaggttcccaggcggacaggcaaccaagg

SEQ ID NO: 569452 - DNA, 359 bp, Homo sapiens
aggctggagcactatggcgcaatctcggctcactgcaacctccgtctcctgggttcaagcgattctcctgcctcagcctcctgagtatctgggattacaggtgcccaccaccacacccagcaaatctatgtattgttagtagagatgaggtttcaccatgttggccaggctggtctcaaactcctgtacctctagtgaaccacccgccttggactcccaagatgctgggattacaggcgtgagccactgcccccggcctagtatgtacttctcaaccatgtggttttaaccctgtctgcccttttagaaaccatcatttgtgcttggcgatgggaactaatgatggaaagcctgaattg

SEQ ID NO: 569453 - DNA, 1428 bp, Homo sapiens
  misc_feature (1428)..(1428): n is a, c, g, or t
gatgacccctaagtacgcaataattaatccgccctaatataagattaaattaaaccagctcactcagtcgaaccatccccgaccccagtccaaacagtctctcgcatgactgaagaactatcaggcgtcacgtgccttggccagccatgccttgtatccttctcgaaatcgaccacaagagtacttaattccatagacctatgctgactaactccaccgagtacagccgtcgaaccagcccattgtgtcatccaagtcgcgccactatctactacgagagcagtgataattgtatgtgcattgaatgcaatacgcggactagccattacgaccggccatatgcgacggccttcaccatatctcttttattcattgccgcgtctttccgtactaacattcaggagccgcagcgccataatagttcactggcactcactctatctcctaccctcacgcaacaccctgatacaccactcgagtacatgattccgtcactgactttggcatatcttactacgccacatcaagtcccttcattacgtgccatacttgatcatctcacacgtatgaggtgtcctaaaaccaacttccactctccattgcatgaggagcccaacacatgcatacacatttaatcactaaacgctcttagcataatattctccgggcacagtcacccaatttaccaagttttgcgagtaacatgaacctcataagggtttcaacagttgcacatgttccttgcacgggcaagcgccgtcaccgctacaaggaaaaaggtatccacgggtccacacaaacatcacagtttgcacacaacgccgaagtgccctaatacagccccctttgttatccaaccgtgtacacgactccttatgtgcccccccttgtgcatatctaatattagtcacacgcagcccgattagtgccacagaacaagtatcccaacaccatttccacttcaatataccatttgtgcacatgcagaacacactggggtggcaatctcctcgaaacccaatatacacccaccatttagtggacacaatttccagccctttaccgcccaactaattcccgcgaatgtccataaacatattccacacgcccgttagtccccaaccccatttttatccttcaaccacacataagtacccaaagacacaaacgagccccccctattccagggatatttttaaccgttcaccatcacatcttcccctattctcattccattccaccatcttatacaccttgagtacccagttttaaaccacaagcattaaactatctacattatcacccaaaagaactacatgacctatatgggtggaaaccccccacagtacacgaaacatctacataatgccacccctatgtagccaccaacaccacaccgcttataatcgaccacccccttctccatan

SEQ ID NO: 569454 - DNA, 1047 bp, Homo sapiens
  misc_feature (968)..(969): n is a, c, g, or t
  misc_feature (999)..(999): n is a, c, g, or t
  misc_feature (1002)..(1002): n is a, c, g, or t
  misc_feature (1004)..(1004): n is a, c, g, or t
  misc_feature (1011)..(1015): n is a, c, g, or t
tggttcacgaataacaaaagcttaaccttcactagctaatattaaaggggtgtaggtgagaccgcagaagttcaccatgtgggtgaactaggattacattgaaagaaagcgaattccagcgtgatttgttctacactacgcgatgttccgcatagggtccctaggcgtagccttttcatgttgaatggaccgttcagcatagtataggttgccgcatgggccctgcaatgccgagctgagctaacaggccctgcaagaattggcagaataggactcggctagagattgctcatgggcctagagatcagtaggtcactgtccaggttagcaagagcccctaggcaaacttgcagcacattggcacatatgtactgatttagtgggattggtatgacatggagtgctcggggtccatgcaccctgccgggatatctctgtcggcgttctgtgccctgaatgctagctgtccccaagggctctttcgtgacttatggcagggagctggggattggtcctactttctcttctctggaaaggaaatgcctccatacgatctccatgctgtcttgggcaagcttgagaaggcgttcagcacctacagcctagcaggcagaccttgaagcctcacctttagtctatctgacagaggtattcagttcctcggcacatgagggactaggggcatgtagagtatatgaggaggcagtatggtctgtgcaggagccttcatttgcagcttcaagttaatagggaagaatgtctactgatagctcgtatagatgctgaaaaggtatttcgtaagagtttaaaatccatcccgtctattgaaaactcgttagtgaaattaacgtctggaatagaaacacgccataatcgtagataaaggtctgtttcagaaactcaacagtgatggcattctaaagagtcagacgccacaggcattcccattaaagtcagaaactagcaanncaagctattattcagcagtgtcccggcacnacnanccctgcnnnnngccagatgagaacctacagggagaattataat

SEQ ID NO: 569455 - DNA, 960 bp, Homo sapiens
aaatattatactagcatttaccatgctcactgtctaggaatactaggtatatcgctcacacctcatatcctccctgactatgcctagaaggaataatactatcgcgtgttccattatagctactctcataagccctcaagcacccactccctcttagccaatattgtgcctatgccatactagtctttgccgacctgcgaagcagcggtgggcctagccctcactagctgcgtcaattctccgaatcgatcgatatggcctagaactgacgtaccataaacctaaagcgctactcgcaatagcttgaaaagctattatcgtctccaacaaaatgtatatgtactaccactgacatgaacttatgccaaaaatacacatagatttgaagtgcaacgcaaccacccacaggctaatatattacgccatcgatccctcctactattcttgaaatcctaaatcaacaacgaacctattctagctggtgcccgcaattcttgttcgctccgagacccgctaacgaatacccacacttccttgaagactaatctacgcatgagttcacttatcccgtcatcgaattccagtaggcgtagcctagggccacattaatgagttgagaccacatatcatcgaatgaagaggtctatcgtgctactataactgaatacatgcctataagatctccttagtgatgaccacttcaccaggcctgaggatagctatatccatattttatgattcctgctttcggaagagcaattcttaatccccacttgggggtattcatcaccccgatggagcgcaagcaggcaagaaaggactgaaacgccgtggacattggtgtgctaatttctaaaaacccttaggaagattcaccttttcccctagatacttcggccctagttgcaacctccacacaaccgagggggcgcctagaggttctactacacactctccagg

SEQ ID NO: 569456 - DNA, 232 bp, Homo sapiens
gacaatcacactcgggaccaaaagtgactcttctatattaccccgagatggagtctagctctgtcgcccaggctggaatgcagtggcgcgatctcggatcactgcaactcctgcctcccgggttcaagccatactcctgcctcagcctcccaaatagctaggattacaggcacctgccaccgtgcccagctaatttttgtatttttagtagatatagaagagtgcacttttg

SEQ ID NO: 569457 - DNA, 238 bp, Homo sapiens
acatagcgcattctgacccacagaaatatataagatgtttgttgttttaagctgttaaatttcgggtgagtttagttatagcacgcaataactaatacatgacacaatacaaaaaagcaatccttttatttttatttatttatgaaacagactctcactctgtcaccctggctggagtgcagtggcttgatctcagttcaatgcagcctccgcctctcaagttcaagcgatccaccca

SEQ ID NO: 569458 - DNA, 208 bp, Homo sapiens
gcctaacgcgcatatggtgtcttgcacatcagcacacagctttccgcgaagggacatgctggctctgctgcatctgctgggtgcccacattgtctgctcccacaatgaaacattacggataatcatccaatagttggatgatcttaaggaagtagtcggacttccaggtcgccctgtcttccctgggcatcacggcggcgcgtagggg

SEQ ID NO: 569459 - DNA, 283 bp, Homo sapiens
gagtcctcgtgggctccacctgttcaactctttaatgagatgtatctaccatagtagtgtcacgcagacataggttcgctgtcccaacagtcatctgcgctccacctgttcacctcttcaatgagatgtatctaccattgtcgtgtctcgcccacatcgggggcgccgtcccacacagctgctctgcgcgtccaaccaggataccagaccgaagagatccatcgtagacgctcacctgcatggcaagcacagcgtagggcgctggccgccgagatacacgcag

SEQ ID NO: 569460 - DNA, 199 bp, Homo sapiens
tgaaacgcggctgattttcgtctcctgcgctagaccattgctcactcccgacagcttctgttctgtgacgggagcgtcagaaacacagtcgagcaaaggtttcacgacgtcggttccgaagtagccggttacgggcctgaacggcacggggttggcagccgggggagggatggggcttgaacccggtttgggatgaatg

SEQ ID NO: 569461 - DNA, 476 bp, Homo sapiens
tgagaggatcccgccaacacacatacacatttatttatgtttctattacatgtctttaaaaatatttatctggtcgagtgtggttgctcatgcctgtaatcccagcactttgaggggcaggcagatcacttgaggttatgagttcgagaccagcctggccaacatggtgaaaccccatctctactaaaaatacaaaaattagccggatgtagtgatgcatgtctgtggtcccagctactcgggaggctgaggtgggagagtcccttgaacctgggaagcagaggttgcagtgagccaagattgcatcactgcactccagcctgggtgacagagtgagaccctgtctccaaaaaaaaaaaaaaatttttctgagggaaattttgggtttaaaagacggcagatgagaggcaatttcttttctaaatgactacttaaggtgtgttcgagtgccactaatgcagatgggaacctgagag

SEQ ID NO: 569462 - DNA, 731 bp, Homo sapiens
cttgaaatgtaatccccgttgttggaggttgggtctgaggggagtgtgtttgggtcattggagtgcatccctcattaatggcctggtgctgtcctcataatagtgagtgtgctcttcatgagatctggttgtttgaaagtatgtagccaggcatggtagctcatgcctgtaatcccggcagtttgggaggccaaggcgtttgagcttgaccttgaacttgagctcaggagtttgagaccagccttggcaacatggagaaatccatctgtacaaaaaaaatacaaaaattaattggatgtgttggcatacacctgtagtctcagctattcaggaggctgaggtggggaagatggcttgaacctgggaggcggaatttgcagtgagctgagatcacgccattgcactccagcctggacaacaaagccagaccctgtctcaaaaaataaataaataaataaaacttaaaatataaataaataaagtatatgacacctctccccattctcttgctcctctcaccatatgacatgtctgctcccacttcacctaccatcatgatgtgagcttcctgaggccctcaccagaagctgagcagatgctggcaccacgctttctgtatagccggcagaaccatgagccaattaaacttcttttctctataaattaaaaacacaaatataacttgaaaaacacaaattacaaaaaaaggggggggccctaaaaaaaaaccc

SEQ ID NO: 569463 - DNA, 103 bp, Homo sapiens
cgtgtccgtacgtacccagcctctccccccaaccatcgccctgcagtgagaagccatgtgaatgcaggcacagtggtacagaacccagcatggcttcagatgc

SEQ ID NO: 569464 - DNA, 801 bp, Homo sapiens
atcggcacgaggcagtacagcgagggcacgctgtcccgagaggcatccagcgggagctgtactgcctgcagaagcattgctgagcctgctggaccagtatcctgtggcgcaatgctgggacctgtaccagacgctctacgtgtgacgctgtgacgaggatgtgagatcatccatgtactgttggtggtgcaccctgcatgcccaatgctcaatgctgttatccttgctgccaccccctgcccaatgaccctgtgatgcatgctcatccatgatgtgtgtgcatggatgtgtgcatgtgatgaccttggatgcatgtgctgtgcctgatgcctggcctgtgcccccacctccctgtgtggatgtgattgagtgctggatgatccctcactgctcctgccccacaagcatgctgatggtcctgttgtgccatagttgacctgtgatcccatgccactgaagtagtgaggtgtgcagtccctgtgatggccctccaagacttagcccagacatagcattccagtgccttgtgtgcttattgccacaccatgtgacttttttgatgctaggtgtgcttgcactcccttgccatgtggtgaatgcccctgtgtccatgcttgtgtgttgcctccctctgatgctcctgtggctgtgactctgcacactactctgttgtcactccatgattgtagatgcacctgtcaccccatggcggcaaaatgatgcccttcccccctctgccagtggccttccagccctatcacccctccctccgtctgtcttttccggcctggacccccaccc

SEQ ID NO: 569465 - DNA, 466 bp, Homo sapiens
  misc_feature (44)..(44): n is a, c, g, or t
  misc_feature (234)..(234): n is a, c, g, or t
  misc_feature (239)..(239): n is a, c, g, or t
  misc_feature (255)..(256): n is a, c, g, or t
  misc_feature (269)..(269): n is a, c, g, or t
  misc_feature (296)..(296): n is a, c, g, or t
  misc_feature (299)..(299): n is a, c, g, or t
  misc_feature (309)..(309): n is a, c, g, or t
  misc_feature (315)..(315): n is a, c, g, or t
  misc_feature (341)..(341): n is a, c, g, or t
  misc_feature (344)..(344): n is a, c, g, or t
  misc_feature (378)..(378): n is a, c, g, or t
  misc_feature (389)..(389): n is a, c, g, or t
  misc_feature (391)..(391): n is a, c, g, or t
  misc_feature (396)..(396): n is a, c, g, or t
  misc_feature (427)..(427): n is a, c, g, or t
  misc_feature (450)..(450): n is a, c, g, or t
gccaagaaggctatgaggagcatatctcttaaggacttaagttngggcattctagaatgtatgctttatggatttaccttataaatatataacattaactaatacacacagaaaatatatttcagagtaacatagatgacagaacttgaaatacgtgacattctaccgcagtctatcattattttctaacttatcaaaagactcagaggatctttttttgtattgataaatttntaacnagagccctatttactnntgtcttgaaaaanagtatttgcaaatatgtctgaagaggnaanagaaagaaantgattncaaaaaagctgataacattaagacanctntttatagaagatgtaaatttgcaaccattaaaancttataggagntncacanaatgtgaagaaaaataaatgaaaccaaaccnctacaagaaataaccaaactaanaagacagcaagagagg

SEQ ID NO: 569466 - DNA, 302 bp, Homo sapiens
tgacgtctcctatcaacgccctcagcagctagtctgccagcggagctaagagacctcgtgctagccggcagcagcttctccggagctggactcaagaggctctctacgaagtcactactcgtaccgtacgcgtcccccgacgcgcctggcaggctccctgcttggtctccaagaaccacgaccccgaggagggcttccccgcgggctgggggcctgcaacactgctgggtccccgcggcactccccctccacctcgccccgcgccagcgtcaactgaggagagctggctgggtgcccgctcc

SEQ ID NO: 569467 - DNA, 844 bp, Homo sapiens
  misc_feature (643)..(643): n is a, c, g, or t
  misc_feature (689)..(689): n is a, c, g, or t
  misc_feature (691)..(691): n is a, c, g, or t
  misc_feature (701)..(702): n is a, c, g, or t
  misc_feature (780)..(780): n is a, c, g, or t
  misc_feature (793)..(793): n is a, c, g, or t
cgtcgtgcagggacggattcggggtggcggtgcctggccgggcgtaggcaagagcaaacgagcggctccttgcaggctgtgtgcgcccggctttcagcatgggggatcaggctttgagctttcttaaggacttcctggcaggtggcatcgccgccgccgtctccaagacggcggtcgccccgatcgagagggtcaaactgctgctgcaggtccagcatgccagcaaacagatcagtgcagagaagcagtacaaaggcatcattgattgtgtcgtgagaatccccaaggagcagggctttctctctttctggaggggtaacctggccaacgtgatccggtacttccccactcaagccctgaacttcgccttcaaagacaagtacaagcagatcttcctgggaggcgtggatcgccataagcagttctggcgctactttgctggtaacctggcctctggtggggcagctggggcacctccctctgcttcgtctacccgctggactttgctaggaccaggctggctgccgacgtgggcaagggatcttcccagcgagaattcaatgggctgggcgactgtctcaccaagatcttcaagtcggacggctgaagggtctctaccaggtttcagtgtctctgtccaggncatcatcatctacagagctgcctacttcggagtctatgacactgcnanggggatgctnncagacccaagaatgtgcacattatcgtgagctggatgattgcccagagtgtgacagcggtggcgggggctggtgtccnatcgttgaactgntcgtcgtaggatgatgatgcagtctggccggaaaggggctgatattatgta

SEQ ID NO: 569468 - DNA, 275 bp, Homo sapiens
acccacgcgtcgagctatctttcctgcctcagcctcccaaagtggtgggattacaggcacaagccactgtgcctgacctcttttaaccatttttaactgcacacttcattctactaaaaatacaaaaatgagccagcacagtggcgtgcgtgtaatcccagctacttgggaggctgaagtgggaggatcgcttcagcccgggaggtggaggctgcagtgagcagtgagggcaccattgtattcccagcctgggtgacacagcaagatcctgtctc

SEQ ID NO: 569469 - DNA, 1084 bp, Homo sapiens
taatttttttgtattttagtagagacggagtttcaccatgtttgccaggatggtctcgatctcctgaccttgtgattcacccacctcgtgctcccaaagtgtcgggattacaggcatgagccactgcgcccggcccaggacttatcagttttcaacgacaagtgtttattggccttgttgagatatatgttagactacctatgtgactagtatgaacggacttgcaagatttagatgcttttattttacatgcctttactgtcttttctttcaaacttaacaactaaactattactgagtttaactagttgccttagctattaacatacttcctttgagctgaacaatttttctttgctattcagcgtaaatttcctttaaactaaactaattccacttaccaaattaccctaagatttcgttctcaggctgacaccatggatttcaaaattagattgcttagaaagtccctttgcaacacttacatagtgcacttaacgtcgtgcactatttcattgcgtataattcggtctttgggttcccttatgtcactccccggcgggttaaacgtcagccttatgcttgacttaccatctagggtagcttctggtatgtatgtggcctttaaaccttctctctgcacttactccaaacttatcccctgacttgcagcaagaatttcctctggtctttgtgcggccttcgaaggacgggcccctgggggggcttacccctggtgttcccgccccttgtgcaggccgacctggaccggtatccctgagcagcgagttttagccacccggccccacgggtaaacccgcgcttcacaaacaacaaacaacccaccaggagaaggcgcgtatacaccccacggctcgtcgaaattcacaccgcgcaacttacaagcaagacccccccgggaggagttccaaaaaaaactcgccccattacgcgcaacatccttttcatgttttctttctttctcttttctccccccccccccaccacaccccaccacccctccccccccccaccacccccccacccacctccctcccccccccctccacccacccccccccca

SEQ ID NO: 569470 - DNA, 737 bp, Homo sapiens
tgccgctcatttacataaatattatactagcatgagccatctcacttctaggcaatactaggtatatcgctcacacctcatatcctccctactatgcctagaaggaataatactatcgctgttcattatagctactctcataaccctcaacatccactccctctgagccaatatcgtgcctattgcccagtactagtctttgcccgccgtgcgaagcaggggtgggcctagcccgtactagtctcaatctccaacactatatggcctagactacgtacataaacataagaccctactccaatgctaaaactaatcgtcccagagcaattatattactaccactgacaatgactttccaataacataccacataatttgaatcaacatcaagcaacccacagcctagttattagcatcatccctctactatttttgaaccaccatcaagcgaagaagctatactagctgttccccaaccttgtccggtcggatcccctaaaaacgcgcgcgtccttagatactaacttagctgaatgccgtaccccctcacccctgggggcaagccaaagccacttatccaagtgaagcgaggatcaggaaggaaaagtgctactctctatataaatatccctaccaattgttcgttatgatgacatgcagggcggagaactaatcatcccatatctttgggaaccgttttcccacttgttaatcccgatgaggggcgcaaagccggc

SEQ ID NO: 569471 - DNA, 1739 bp, Homo sapiens
  misc_feature (486)..(486): n is a, c, g, or t
  misc_feature (573)..(573): n is a, c, g, or t
  misc_feature (595)..(595): n is a, c, g, or t
acattggtgcagaaggaagatcttcgaggaagccaggaagaaggcatctggaagctgtggggtccaaagagagggtgtgtcagtgtgaggagtggtcagcggggaggtgttgctggaggaggttcactctggctggggcatcgcaggtcctagtcgcgctgtgtgatggaccgctatccttgctgggcgctctctgcgtgccaggcccctgcactccggcgcacgcagaatcataagtgtgaacatacgaccacagacgggaagggggaccagagctattgtagtacgcgcgaactggtagcctagcaagtgcaacaggggggaaagcgagtgcaagtggttcctgcgtttggaagtcgtcgacgtcgtgcatcacgtccaccatgggcctccccacgctagcatgaaaaggtacacgttggcctgcctcctggggaggggatgggcgctggacacttttctgaacaaacccggggatgtgccatncggttggcgctgaccaagattgtagcgcttgcattgggggtaggtaaacggcccaaacaagcaagagcgaacgggggaagtatcgcncagtccctcgggagttccaacntctcgctataggaagactccagggtgtgaagggcacatagcgcagctgggaagataatccggtacagttgccaagcaagttcgaaggggtatccagatcggtcctgtgggacaatcgcttggtgatggaaatgcacctcgggagagaatcgcgaaagccagacacttagccgaaggggtacagtacgtaaccaacgggaataggaacccccaaggcggaggcggccaatggacgaaaacagtggacccccccaaaaaaaaacgcgcacatgggaaacaagtggacttcccaggagtgaattcaaggagggttgtcacacacacgctatacccgggggggtggccccttaggtccgcaatagcggtagagtccgcaaagccgcttccccaacgggaattcggggaccacaacgatctcccaaatcacagagaaagccgttacccctagtgtggaagggtcttcttctcgcaattgggtaaacccactcggaggagcggcaaagaagaccggctggcggcagacaatgggagttggggactgtgtggagagggccccgggtaaattatggagcatatcccgctagggagacgcaaaaccacggctttacaacatatgaggagaacttggaaaagtacccacagagcaagggctatactctacacgcaagagacaccccaagtacgagcggtgcgcactccaagttccctcgtagccacgggacgccaaatcaaaggacacatctgcgaggagcacatacaaccacaagtggacatcgggcggcacagtggggcgcaacaaaaacaaaacaaaggggccggggcgacgagaacaatcggtccgaacaccagcggtgggttacacacaccatccacgggaccacgaccccatcacaggtgcgacacatcgatcacgccacgatggatgaataggaagaacaacccagagacaacaagacggaaagagacaaaaaagcacagctgcagacaccagcgaacacaggattcacaccggcagcggacacccgacacacaagacatcgacggagcaacaacaagtgaataacacaacaagacgagacgaaaacagaccacgataccaaacgaaacgacacatacgagcggacccaccaaacgaacgaacacaa

SEQ ID NO: 569472 - DNA, 189 bp, Homo sapiens
cgcatgcagcggattgcattcgcacggtggcagtctgcgcgcacgcgcgatcagtggaggacaggcatgctcaataggctcgtcgcctaaactggctggagagacatgctagacaggcgtgccggacgcacgttgcggcgcaaacccaaccggcagcgccgaacatcgtttcggcattatggaaaaagg

SEQ ID NO: 569473 - DNA, 345 bp, Homo sapiens
  misc_feature (80)..(80): n is a, c, g, or t
  misc_feature (86)..(86): n is a, c, g, or t
  misc_feature (88)..(88): n is a, c, g, or t
  misc_feature (97)..(97): n is a, c, g, or t
  misc_feature (105)..(105): n is a, c, g, or t
  misc_feature (111)..(111): n is a, c, g, or t
  misc_feature (122)..(122): n is a, c, g, or t
  misc_feature (128)..(128): n is a, c, g, or t
  misc_feature (152)..(152): n is a, c, g, or t
  misc_feature (163)..(163): n is a, c, g, or t
  misc_feature (175)..(175): n is a, c, g, or t
  misc_feature (193)..(193): n is a, c, g, or t
  misc_feature (203)..(203): n is a, c, g, or t
  misc_feature (208)..(208): n is a, c, g, or t
  misc_feature (219)..(219): n is a, c, g, or t
  misc_feature (244)..(244): n is a, c, g, or t
  misc_feature (248)..(248): n is a, c, g, or t
  misc_feature (251)..(251): n is a, c, g, or t
  misc_feature (311)..(311): n is a, c, g, or t
  misc_feature (313)..(313): n is a, c, g, or t
ggggggggcgggggcccccattttcccccaaaagcccaaaggggtaaataaattttttcccctaaccccccccccccccntttttncnggggggggngggggggncccaancggtttttttncttggncccctttatttttgggggaaaaangggggtttttnaacccccccccnggtaccccccccaagggnagggggaagnttttngggcccccctnggtttttttttttgggggggggggntttnagntttttgttttttaaacccggcctttttttgggggcccccctgcccccaaattttgccccnantttttggccccccttaaaaggttttttgggga

SEQ ID NO: 569474 - DNA, 447 bp, Homo sapiens
  misc_feature (37)..(37): n is a, c, g, or t
  misc_feature (46)..(46): n is a, c, g, or t
  misc_feature (151)..(151): n is a, c, g, or t
  misc_feature (219)..(219): n is a, c, g, or t
  misc_feature (267)..(267): n is a, c, g, or t
aaaaaattacttaggttcgggcccggtgtcacgcctntacccacangggagccgagtgggaggatccgttgagctcaggagttcgagaccagcttggccaacatggtgaaccccatctttaccaaaatataaaaattagctgggcgtggtncatgcatccataacccagttactggggaggctgaggcatgagaatcgcttgaaccggggaggcagatnttgcagtgaccgagacggcgccactggactccagcctggacaacatgntgaaaccccatctgcaccaaaaatataaaaattagctgggcgtggtggcatgcatccacaatcccagctactggggaggctgaggcatgagaatcgcttgaaccggggaggcagatgttgcagtgagccgagacggcgccactgcactccagcctggactacagagcgagactctatctc

SEQ ID NO: 569475 - DNA, 188 bp, Homo sapiens
  misc_feature (38)..(38): n is a, c, g, or t
  misc_feature (114)..(114): n is a, c, g, or t
  misc_feature (133)..(133): n is a, c, g, or t
  misc_feature (160)..(160): n is a, c, g, or t
gggcgacatagcaagaccccatttctacaaaaaatttnaaaattgtcatggtggtgcacgcctgtggtcccagctactcaggaggctgaggcaggtggatcacatgagcctganaggtcgaggctacagtaanctgtgtgatttcatcattgcactctancctgggtgatagagtgagactttgtctc

SEQ ID NO: 569476 - DNA, 998 bp, Homo sapiens
tttcgtcttgggccaaaaaaagtcatcgaaatttctgagccccttacatgggaaaaaatgaaagagcccccctgttaagaagaggctcaagtatggtaatttcccgactcaattgaaattaattgggggttcgaagcctcgcgaggtgtagttcaaatcaactaagtggcaaatcccctactgataaaaagcacatatcagtacataagggtggataagcgcctataagacaagcagaattgattcttatttgacgttaggtacgtaatgaagggcataggtacggtaaaattcaattcactgtctacataggttatcgtaagtagcgcaaattcagaccctaccttgtttgacttgggccttttgtatatagatgggccctactatagcctacgggtaattccttagggctagccttctcgacagatagctcagagtagagtatagtccctgcacaaaggtagcctatgcatgggacaatgcgggtacattcgagtcctgacatacgctctacagatgcttggagatctctgtacaaagtctgagagtgcaacgttgggatactagatgtgagtacccgccgtcccctaacatctcctagaaagaggaatattagagctacccgttgtatgtctcagcctctgtgagactggataagcagagaatctacgctgagaccatggaatccagtacgtcagggccctacagtagaagcgtgaaagcagtaatatcgatatattgttttatgacacatagatctgtggtaacttctatacagccccaaaagatatgctaataacaggcaataatggaaacacctttactgtctttcagcgaacatctgcctgacttcagactgggtcaaaccatgggggaattccagaatcttgaatatttcaaggtctactgcccttgcagaatcagacagtaacaagtgacaactatcgtagttaagtgtgaaaacagtatggtcagataccgcgctagggtatgttaga

SEQ ID NO: 569477 - DNA, 1191 bp, Homo sapiens
agtactacagaccggaggactgccgatccatgaagctaatgtacaaggagtcagtgtgtgtttgaatggcatccccacctatacgcttcgtggctcccaaaaccctgtttgccaacgggtccatctacccacccaacgaaggcttctgaccgtgcctaggagtctaggaattcagaacgtcagcacctagcaggttcagttgtccccacttgtttactctacccatcctacacttacctcaactgccgacccgtgttctggcagcaagcggtgactaggcctgctaccctcaaccaggaggcacacatccttgtccctggcacatccacccggtcacgggaatccccatgacctgctctgtgacaactgcagctgagcctctacatgcacctctgtacgcaggccattggacaccactggcacacattgagccctgtggtcctgccgctgctctggctttgcagagagcaggcgccactgcacggcggcagactcttcacacatatctacacatacagctacgtgtcgatgcccacaggtgcactgcactaatgacacagtaccgtcctcctggcgcctggcactgagatccttgatgcctacggtccctagttcatcttgacacactcccgtgagcccccgacacacactgccaatctatcctctggcactaaccacactaacacagggcttcaacagcggatcacgcgcgggcctctgtcctcgggcttacatagcctaaatatcccgctggctggacctccatgctatccaacatgggcctctctgttcgcatgaccagacagcacaaactagaaagggtccctatgatgaccacacgtgatagcaatacaagcgcctccgcacgcatgggcctatagcaccgggcgcccacagaggcgcaaccactacaagacccgcacctatgccaccggaacaactcccaggccgactgtgacgcagactccccagcggcccccaactcaccccttgcccctgcccctatctgcgcaaccgactcaaaccgcgaacgtaatagacgcatacccactagcccctggtcgacagacgcagcgacccgactgcgcacactggcatttcgactcgtactcacacctgcatcacgacacgctccgggcggtcgcggctacagacgcgtagtcacacaacaactgaggacaagaacgtaga

SEQ ID NO: 569478 - DNA, 126 bp, Homo sapiens
gagaagacgaaaaaggcgctgggagtcgatcaactctaggctgccaactgcgttatgaaaagtggaagtacgtcctggggtacaagcagactgtgaagatgatcagacaaggcaaagcgaaatgtg

SEQ ID NO: 569479 - DNA, 361 bp, Homo sapiens
gatctagaggatcccttagaagacgacagaagggcatctggagcagattcagactgtgccttccagtccatggtgacaggactatccagtgtgcgtgtgctcctcttggcaggtgtagacttctccctggtgtggggtcatttccaagatcagcaggatctgtaaagtcagtctcctttacggatcaggttgttggtgcacgatcgctagtctgtttactcctgtccattcaggaaccatcggacttgaatgcttgctgggtagaaatccgtcacgtggcagacaagcaggttgtggtgctgcaaggagcccttcttggagggggaaacattcaccctagggtggactcggcgctgcaggg

SEQ ID NO: 569480 - DNA, 368 bp, Homo sapiens
catgggccaggtgttcagtaaatctttttttgaatggacaaattgtgaagtaccacagttgcaaccacgtacacgttttcctcattcccaatgtccaaaaattcccttgtgtccaatgataactcccagtgacgggatgcctgctatgtgcctgtgtgtgtccatatccatatactgttttgttgttagtttttatatgcaattttatgtttttcccctatgcaattttatgtttttccagacatggagaatattactccatgtctggaatttatggacatccaagattttggcatactgtattacatgaatgatataatgttgttttccctataaaaccactttaaaatcatatatgtgtgatgaga

SEQ ID NO: 569481 - DNA, 193 bp, Homo sapiens
  misc_feature (45)..(45): n is a, c, g, or t
atccattgctgcctcagcccccttcaaagacccaggcccaacacngcaccagctccttggacactgcccatcttcccagggagagtctcgtgctcagagaggctataaatatacgccggacagtcaagagtttccgtcgccaacagaagagctgagcaaaaggtgaaataaacatcccgtggctgcaaattaa

SEQ ID NO: 569482 - DNA, 112 bp, Homo sapiens
agatggggtctcgctttgtccccccgggtaaagagtgcagtggcatgattttccctccctgcagggtccgcctcccgggttgaagcccttttgctgcctttgctccctttga

SEQ ID NO: 569483 - DNA, 156 bp, Homo sapiens
  misc_feature (23)..(23): n is a, c, g, or t
  misc_feature (50)..(50): n is a, c, g, or t
  misc_feature (94)..(94): n is a, c, g, or t
  misc_feature (111)..(111): n is a, c, g, or t
agaaaaggaagtttccagaaaanaagttaacatgaactcttgaagtcacnccagggcaactcttgaaagaaatatatttgcatattgaaaagcncagaggatttctttagngtcattgccgattttggctataacagtgtctttctagccataata

SEQ ID NO: 569484 - DNA, 648 bp, Homo sapiens
  misc_feature (2)..(2): n is a, c, g, or t
  misc_feature (110)..(110): n is a, c, g, or t
  misc_feature (119)..(119): n is a, c, g, or t
  misc_feature (122)..(122): n is a, c, g, or t
  misc_feature (126)..(126): n is a, c, g, or t
  misc_feature (143)..(143): n is a, c, g, or t
  misc_feature (160)..(160): n is a, c, g, or t
  misc_feature (170)..(170): n is a, c, g, or t
  misc_feature (210)..(210): n is a, c, g, or t
  misc_feature (216)..(216): n is a, c, g, or t
  misc_feature (225)..(225): n is a, c, g, or t
  misc_feature (260)..(260): n is a, c, g, or t
  misc_feature (349)..(349): n is a, c, g, or t
  misc_feature (352)..(352): n is a, c, g, or t
  misc_feature (367)..(367): n is a, c, g, or t
  misc_feature (375)..(375): n is a, c, g, or t
  misc_feature (381)..(381): n is a, c, g, or t
  misc_feature (401)..(401): n is a, c, g, or t
  misc_feature (439)..(439): n is a, c, g, or t
  misc_feature (475)..(475): n is a, c, g, or t
  misc_feature (509)..(509): n is a, c, g, or t
  misc_feature (557)..(557): n is a, c, g, or t
  misc_feature (560)..(562): n is a, c, g, or t
  misc_feature (566)..(567): n is a, c, g, or t
  misc_feature (620)..(620): n is a, c, g, or t
tnggctagtttaaatccacaaaagtaaacaataaacattttcccaaaacaatttttaagtaacatctcattaacctacgtccttaagaactgcataagcctgtattaaanaaataaaanacntgtnaaaaacaagagtatgcnaagagtagaggtactcnggttaatgancaaaatggtgttcccagaggaaaagcaagcactattaaanattaangcaaatccnatcaacacaaatagagccattaaaaaaaaaaagcnagtccaaaaaaggttcccattccataaagattaaatcatttccaaatcacagtgaaaggaacctgagtaattaaccaattttgttttcnacnaagtgcctcagaganaccccacnaaaatnttgtatctaaaaaaacagantaacatttgcagaatgtaataatgtagtgacagtcctnaggttgaatgtaacagactataaaatggttacatcntaattgtttaaacagaacatggtccaataacatnaaaatagagaacagcatccggaaatttatcttatttaatgttcggagnttnnngagnnaaacatcctttccattattttctgcagttagttcttgttcacaatcaaatctnatggcaaccactttctggcattttcccc

SEQ ID NO: 569485 - DNA, 93 bp, Homo sapiens
  misc_feature (60)..(60): n is a, c, g, or t
tcatgagggggtaggcagaaaggatgagaggaaaaagatgctcatttacttaattttcanatgtatttctatttagcaacaattctggttttt

SEQ ID NO: 569486 - DNA, 382 bp, Homo sapiens
gcattaaaaacaataaaattcttaggaataaaattcacaaaagaagtacaagaattgaacactgaaaactacaacacattgaaaattttaaaactcttaaatagacagaaagacatctcatgttcatggattggaaaatagcattaagaaaacaatggtcccaaattgatttatagattcaatacagtttctagaaatattcccagctgccttctttttttttaaatggagaaattagaaagctgattctaaaatttatatggtggccaggtctggtggcttgtgcttatcttccagcactttgggaggctgagatgggagtattgcttgaggccaggagtttgagaccagcctaggtaatgtagcgaaaccctgtctctgc

SEQ ID NO: 569487 - DNA, 244 bp, Homo sapiens
actctggacactgatgtctttgcctaagccaatatctagaagggtttttccaactgttatcctctagaattgttagtttcagatcttagatttaagtctgtgatctactttgagttgatttttgtataaggtgagagacgaggatccagtttcattcctctacatgtgacttgccaattctcccagcactatttgttgaatagggtgttctttccccacttcatgttcttgcttgtcctgtgcg

SEQ ID NO: 569488 - DNA, 161 bp, Homo sapiens
gcttgaatgctaatagaaggtggagacggaagaccacaagacgcgagaacaaggacgaaagaatcagtgtagtttgagaagggagctacgaacaggtctgtcactggtagagacatagttaacaagtggcacatggggtgagaagcaggtaatggtatctg

SEQ ID NO: 569489 - DNA, 1019 bp, Homo sapiens
agcggggggcgaggccaggtagggtgagcggcctccgaagcggagcggggctctgaggagacactttttttttcctccgtccttccctcctctcctccgtcccttcccttccgccgtctcctccccgtcatctcctccttccccacacatcggatccagccgagagcctgctggggtcgagcggtgaggtattgcagagcgcttgcatctcacggggccgtccggacgagggtagcttggacgggggcggaacggagcgccgcgaaacccggcgaactggcagacctacagaaagacgacgagacgagaagagagagggaaggagcggacgagacctcagaggggaccacaggacgtcgacaggatccagggagggagaaaggacagaacataatccgacgagagctgcttctacagggcgacggagacagaagaaatggagacacggcacagcgcgcgaaacggcggaccataccagcagcgctccggcgaaccacacacagtccactgaggcctgaggtcaggtggagcaaagcaacatagctgaggcaacgagctgggacgactcgagactgtatgattctaccattccagcagaccacattccccgatcccattacccgcgttcacaaatccgcaggacagagagccacgcagagccaagacagagcacacgaggagcggagacattggcacgcagcaggacttaaacacaccaggagataggacaagagcaaaaaagggcccgggaaaagacacatggaggccacggcccaaaccgagggcttccaccgaggcggggcctcggaagcgccaaggcagggaaaaggagccgctgaagaatccacccccgtaggcagcacaaggggcgcgaccaatagcaccggcacaggaacaaacgcgagccccagaagcgcaccagcgaggcaaaactcacatcaccatagagcagagatatgtgcccagcgtcacggcagaagaacactcccggcgacaaacacgtccgctcaccaagctac

SEQ ID NO: 569490 - DNA, 560 bp, Homo sapiens
agcggggaacaatcacttcaacacctttagtgttgaactcattgggctatgggggatcacggcattgtctaataccaaaagaactttgagaggcagtcccttattggcaaggtacttccttagggaacaaagcattgatggaaccaatcaagataaagggttctcattgtccagactttcttttgtaaaatgaaaagactggcagctggtgtttatcttttccttccaaggctcaggggttagcagctttatagataagggcagtcctaatcataaacccaaactgcatttgcacacaatggtacaattctatccttctatcccttcttgccttaaatcctggggcttgcttcattactaattaatgttccttgtggcattttttccagaataaggcccttttgtccacattaaaaacctattcagggccaggcgcggtggctcacacctgtaatccccagcactttgggagtccagacgggcggatcacttgaagtcaggagttcgagaccagccttggccaacatggtgaaaccctgtctctactaaaaatacaaaaa

SEQ ID NO: 569491 - DNA, 241 bp, Homo sapiens
  misc_feature (7)..(7): n is a, c, g, or t
gtgcacnaatagtctagagggtttttgtacgttatgtagctgagcattccatttggtctttggagcctgggggaagaggacctttaatgaggacaagaagataggaaagtgcaaaaatacaaatggagggactctatctagatggatgctgtttttaagagttcctcaagtttatgtgtgtaaactgaggcagaaatgttaattatattctctaccaaagccacatagtaaagctattgtg

SEQ ID NO: 569492 - DNA, 113 bp, Homo sapiens
cttcaaccagaagtcaggccacacaagacatcagagaacacacacagggaaaactctatgtatgtcacggatgtgggaaggaccttctataagaattcagacctcattagaaa

SEQ ID NO: 569493 - DNA, 884 bp, Homo sapiens
gcaggtagtagcacgccaaccgcactcctggctcgctaggattcccttcatgtcccgaagcgcatcgcaccccctagatagaatgtactagtgccgcgtgaaagatcagtggaccttgggagcacctaatcatactaagctgcgcgcgacggatgcggaattaagttgttgtaacgaggcctggatatatccagggacttaaacactagtaagacttcgggcgtagtgtgtggactctatcaattatgcttggccagtctgagtcgccttgcgtttgaggcgcgacggataccaagattgttcgtatggtagtgacctccgtctgcaaaggagctgatcccggtagaatggtcccaatcatgccgttgtgcgaatggtcaataacgctaggaggagaagtctggcgtatcggagcgtggaggaagtgagctggggtatgatttcgtcagtatgtgaatcttcagttcagagtgttcccattggtgcgcacatcaagaatgcctgctagggagtcgaactcttgttcacctttataggttgctaggttcacaagaggaggaaccagcttctgtttgaccctcctgtcgcattctaatcttgtgacgaggcagtacgtttgttgactctaggcgatctgttggccgtagtctatatggctgcgccgtttgtgccaacagcaggtcgaagacgacggtcccgctcttagccttgctaatcgcgctagttattcgcgtgtgctcctcaaaggcgattggggtcatctattgacccgtagttaggactgttcgcggtatgaatagctttgggtccgtcccttgggttggccttgtcggttgaccctgtctaagttttctccagggctgggcccgtagcatgttcctgtg

SEQ ID NO: 569494 - DNA, 1378 bp, Homo sapiens
  misc_feature (661)..(661): n is a, c, g, or t
gaggaggggccctgtcccctgagccaagagggccatagaagccagtaagaggagtcagagatgtagtgacggagggatctgaaagtgaggagtgaggccccgtggcatgggtacaactgaagacccagtgtaaacggccgtctgacagagaaattcttcctaggtcagtagctgcgctcgagccctcgtgtcgcaagtgggacccactgtgtgaacaggggctacgcctcgagtcaaccgccacgtgtgggaagggcatggggggcctgtacgctctcgcgctatgagcctaatgggcaaggcgaaggccgaagacggatggacctcagtagagcagacatgctcgaaggacgtcactcgtgagcagggaggacggcagagcggccagcgttgtcgaaggcctcgtggcgttcatgggcagagacggcctcgaggagaaaaaggctcttctagggtctggtagacattgcctccagcaccgcgtgaccaagggcatgtcgcccgccagggaagaatggtacgcatgtgcccatgacgtcgcctcctggtgacacgtgacagggcgcctgcaatgtttcgccaagtggaccagggtcctgcggagaacgcgggagcagggcagcgacgtcggacaggagtcaggacaagctgcaggacagtngcgagcagctggacggcacggcacgggcgagcccttgcgtaccaagtgccgaaagggccttcgaggacggaagcgtgtcgcgcccgaaggttccagacggccgcctccgggggcccgtggcccataggggagtccgcccgaggacacacgggggcttggcgccaagcaacgtcactaggaaaaaactaggggggcacttgtcaagcccgcgccgcaggggtcccagggtggggggcacacgccagcgcagcggcagtgcaccttccaagcaccaggcagacacgtcgaaggacagtccaggaccagtggaccagacgtacgggcaccttgtgcaggccaatgtaaatgcgaacgcgtccaacggcaaacggtccttgggcggaaacatcccttccgaagggggcctaagatcctcaagacagtttctaatgggtaccttgtgccaataggggggcgcccccccttctatgatgatggcgtagctggcgtctatgttattccagtgtaccacaggatacacaggggtatgaacgaaagacgccatctgcatgctcacactctgtcaagaccctagctgcagcggcgcagctacggtgtactcgtctgcgacacactgtgacgtacgcacaacatagcagataaatggtacgcttatctgtaagcgaccagtcttaagaaatactttcaatgaaacagtgtacgccacctagtaaacaa

SEQ ID NO: 569495 - DNA, 126 bp, Homo sapiens
cacagcagtcctacttctcctatctctcccagtcctagctgctggcatcaccatactactaataggccgcatacaaaccataaaagcatcactgggatttaaggagaattgagagaatgtacccac

SEQ ID NO: 569496 - DNA, 344 bp, Homo sapiens
agcggataggggtggggtgggtaaggatcagataagccagaagcaggtgattttagttggaattgtaaactttattcagcccccacacgcgtgcgtggggaatgtggaatgttctagactctgagatgtttactgagaaaagagaattcaaactaagccgatacgtgcagctcctatcgtatgaatccttcattatccagtttaatcaggagtttcttggtctgttattaacttggtctcacagaaggaattcaagtcctagatgactgaatccctcaatttgttgttccctgaagtatggaattgaagttgggccagtatcaaatctctggatgccagagagg

SEQ ID NO: 569497 - DNA, 969 bp, Homo sapiens
gggctgactgcacgcgggcggctcggccaccccgacaggtgcttccaggcgcgcagtggccctgctccctactcagtggcggggctgatggacgaggctctcgctgggccttgtgcctcccagaaaatcccctgtggaaggcccagtgcccggaggtcaaggtggggcaccggtgaactgagtgcagctgaggatggtgggcagcggacatttctgggtgcctgggggctcggaaccccatctctacgcccggtggccgcggagctggagcagacgcggtaccgctttgggcgggggcccaaaagcccaggttcactcgggacccccgggcgccaagccaggtggatcccgcgtccattccggccagggagaacccccgcgaagatacagctcagagatagccagacgataccaaggagtgggggccgaggacggcacatgagggccagagaaaacacggaggagacgaagaggacgaagagcgagccgaggacaacaacaacacaaaagggaaggaagccaacgaccaccaaagaagacagagaaccagaaacaaaggagagacccacatacacgaacaagcaacagcgaaccaaacaagaaggagccaagcagacgcaaagcgccacccagcgaacagaccgagcacccgagagaacacacaaaggcgcacgaaaacacgagaaacacgaaacgcagcaggccgccaccgagaccagacgcaaaacgcggagacgcaccccgggcagggcgagacgcgcacgaccaacaggggaaagaggacgacgaaagcgcagagcacgaagcacagcagcatgggaacgggaaacaagcgcacgaacgagcacgacaaaccacaccgcccaagatacaccggcgaacaaacaaggcgtagccaagccaaggccgaacagagaaggaacagcagaaccagcagaggagaagaagcaccccgcgcggacacagagg

SEQ ID NO: 569498 - DNA, 314 bp, Homo sapiens
cttagaggactcctcgaatcgacggtttcccattctgagtgcactgcttgtgttgctcagaagcgctgctcacatctatgacatcagtgcattgagctccactgtatctgcgctgtgaccgagtaacacggcttgagttcctgcctttcactttctccttggctacagcttgtgagttgtccatggaagctcagggaaactgcgtggaaagcccttggggatgaccaccttctccttttaggacccccaggcagaggggaaatacaggagtggcaaatcagggactggggttcatttctcttcttggtctttct

SEQ ID NO: 569499 - DNA, 282 bp, Homo sapiens
agtatgtgttcagtatacagagagttctcagtcttgaccgcgatcagatcttctgagatccatgtatagccactgagcagaacatgaacgccaatgacgtgagcgctgggagcaagcgaccgagaatactatacgaaggcatgggatgccattgactccatgggaccaatgcggagtgatgcatacacatctgtgctcacattctacggagtgagtcttgacacactaggagaatacactgtgtgccaatgactacaccatgcgttatcgtttgtactggcg

SEQ ID NO: 569500 - DNA, 294 bp, Homo sapiens
taaattaagcggccgctcgaccttttgctgtttaaaagctctttagtttggtcccacttttctatttctgtttccattgcaattgcttttggagattttatcatgaaatgtttgccaaggcctaggtccagaatggtatttccaaggtattttgctagagtttttatagtgataggtcttacgtttaagtctttaatccattttgagttgatctttgaatacggtataaaaaaggggtccagtttcaattctctgcatatggctagccagttatcccagaaccatttgtcgacg

SEQ ID NO: 569501 - DNA, 398 bp, Homo sapiens
gtcatgttgccagtggatcagcatcatgaccgagcgtgtagcgtgccccacctccagaaagtattcgataggtacaagagttacagcccttatgacatgttggaaggcatcaggaaagaggttccaggagacctggaagatgctttcctgaacctggttcagtcgcattcagaacaagcccctgtatatactgctgaacggctgtatgactccatgaagggcaagggggacgcgagataaggtccttgatcagaatcatggtctccctgcagtgaagtggaaccatgttgcaaaattcaggtctagaattccaagagcaaagtaccggccaagtcccatggtactatttatatccctgccaagcacactaaaggggcgactaaccagcaaaagcgcct

SEQ ID NO: 569502 - DNA, 628 bp, Homo sapiens
  misc_feature (21)..(21): n is a, c, g, or t
  misc_feature (23)..(23): n is a, c, g, or t
  misc_feature (25)..(25): n is a, c, g, or t
  misc_feature (31)..(31): n is a, c, g, or t
  misc_feature (34)..(34): n is a, c, g, or t
  misc_feature (51)..(51): n is a, c, g, or t
  misc_feature (56)..(56): n is a, c, g, or t
  misc_feature (66)..(66): n is a, c, g, or t
  misc_feature (68)..(72): n is a, c, g, or t
  misc_feature (75)..(75): n is a, c, g, or t
  misc_feature (93)..(93): n is a, c, g, or t
  misc_feature (102)..(102): n is a, c, g, or t
  misc_feature (109)..(110): n is a, c, g, or t
  misc_feature (115)..(115): n is a, c, g, or t
  misc_feature (134)..(134): n is a, c, g, or t
  misc_feature (137)..(137): n is a, c, g, or t
  misc_feature (139)..(139): n is a, c, g, or t
  misc_feature (194)..(194): n is a, c, g, or t
  misc_feature (204)..(204): n is a, c, g, or t
  misc_feature (207)..(207): n is a, c, g, or t
  misc_feature (209)..(209): n is a, c, g, or t
  misc_feature (233)..(233): n is a, c, g, or t
  misc_feature (237)..(237): n is a, c, g, or t
  misc_feature (244)..(244): n is a, c, g, or t
  misc_feature (250)..(250): n is a, c, g, or t
  misc_feature (266)..(266): n is a, c, g, or t
  misc_feature (269)..(269): n is a, c, g, or t
  misc_feature (274)..(274): n is a, c, g, or t
  misc_feature (276)..(276): n is a, c, g, or t
  misc_feature (296)..(297): n is a, c, g, or t
  misc_feature (309)..(309): n is a, c, g, or t
  misc_feature (312)..(312): n is a, c, g, or t
  misc_feature (327)..(327): n is a, c, g, or t
  misc_feature (332)..(333): n is a, c, g, or t
  misc_feature (337)..(337): n is a, c, g, or t
  misc_feature (345)..(345): n is a, c, g, or t
  misc_feature (347)..(347): n is a, c, g, or t
  misc_feature (361)..(361): n is a, c, g, or t
  misc_feature (365)..(365): n is a, c, g, or t
  misc_feature (411)..(411): n is a, c, g, or t
  misc_feature (420)..(420): n is a, c, g, or t
  misc_feature (423)..(423): n is a, c, g, or t
  misc_feature (431)..(431): n is a, c, g, or t
  misc_feature (448)..(448): n is a, c, g, or t
  misc_feature (462)..(462): n is a, c, g, or t
  misc_feature (467)..(467): n is a, c, g, or t
  misc_feature (491)..(491): n is a, c, g, or t
  misc_feature (494)..(494): n is a, c, g, or t
  misc_feature (497)..(500): n is a, c, g, or t
  misc_feature (503)..(503): n is a, c, g, or t
  misc_feature (508)..(508): n is a, c, g, or t
  misc_feature (516)..(516): n is a, c, g, or t
  misc_feature (530)..(530): n is a, c, g, or t
  misc_feature (532)..(532): n is a, c, g, or t
  misc_feature (628)..(628): n is a, c, g, or t
tcatattttaataaacataanantngttttnttnattacatacaattttanctatnttaatatatntnnnnnccnttaagaattaaaaataanttacttttnttttttnnccaanaataatctaagttatggcngcntnttcaatgaaaggtaagtccggcccaatttttctttttctttttctcagataatcnggaacatcanccnanctttacattacgataccataatgncccncagaacncaagtnccattaagtagaaatnaancctcntnttttttcttttttaggaaanncccccccttttnttntttagccatcccccnaatanncttnctctactntncaaataacttttcncccncaagagctgcctcaagtaactttctttttggaaagctttcaaggcntgagccagngtngcaaaatncccctctggcctttgcntcttggggtttcanttttnctttaggttttagaccccagtttntanttnnnnccnaatcnttcccccntttttttccttttntnggaaagccttgctgtttcccctgttaacacaaagatagaaaatgtcaaatagtttaagcaagtttttggcagaccacagacatgaaacagtgccgn

SEQ ID NO: 569503 - DNA, 253 bp, Homo sapiens
acgctgtgactagagacttgataccgaagtctacaacgcactataccctacgataaagctctaaatcgcagaaccctcaaccctcggactcgagcaaatcctaaattcttcctcattgttttttttacctggtgtcccgaaaccggggagcactcagacgcagacagagcctgcgtctgtgtgctcttcagcctcatgggcttgactcagtgacacaaaaggattcttttgtgctcgccgagaagatccagaa

SEQ ID NO: 569504 - DNA, 313 bp, Homo sapiens
aaaggctctctgactgctccttcccagatcttctcagcttagcagctgaagactgatgctgcctgatcgccttggaagccccctggaccattacggatgctgagctttggataactcttacagtagaggattcccaactatatgaagacaccctagctggacgatcagttcttattaagaacctgacccctcaaactctacaacctcgatggactggaccctacttagtcatctatagtaccccaactgccgtccgcctgcaggatcctccccactgggttcaccgttccagaataaagctgtgcccatcgga

SEQ ID NO: 569505 - DNA, 610 bp, Homo sapiens
  misc_feature (47)..(48): n is a, c, g, or t
  misc_feature (115)..(115): n is a, c, g, or t
  misc_feature (485)..(485): n is a, c, g, or t
aagctcgtacccctcacggattactcaagaaaatcacagtgggtgannaagatacataaaccaataataatagtactttacaatagacaaaaccatgagaatgaaagaaaggccncttttaactagcggacagatgagaaggtttcacaaataaagtgaaatctgaactgagctataaaaaaaacgaagaaattttgcctggtgaaaataagggtgagggaattatagagttgcaacaataagaatatatatttggtctttgtctccacttccaaacagagagcttctaaaacctatggtattcctaagtgacaggaatatcttttgttacttgtaacaagcctattcccaagtgacaggaatatcttttgttacttgtaacaagcctattcccaagtgacaggaatatcttttgttacttgtaacaagcccctttcaaccacactagagtttatgctaatgaggtgactagtggtgagtccccngacacttcaggatggacactggttgctagaggaaccaaccatgtgactagcgggttggtaccttcagttccacctctgggaatctagagaggggatgggggttggagattgacgtatccgtgagg

SEQ ID NO: 569506 - DNA, 1426 bp, Homo sapiens
  misc_feature (321)..(321): n is a, c, g, or t
gtgaagttgacgcggcggtacgaaataatggcggccgctacgaggggatcctggactctcgtaaactgcagtttgccccttttagctacgatgccttggcactgttgaggttttcggcatgagttgacccataagaacgtctgaacgaagatatcgcgtctggatgtaacgctcccatagtgactttaacgggttattactacaagggtgactctgttggcgctgtcaactcgctataagcattgtgatgttcagatgcttgattagacattgagtgctcccatcccgcagtgccgttatgcatgtcccagcttattatgngatagcacatgttataacgaccaactactactatcgagctcattctcaacgacgtgctggataacgcacatcatcctgtttcttgggcacacacagcagccaatgtgacgatactggcgaagtgctattaaaaatcggtggcaccgtgcctcctttggacaaaaacccctttggtcacctcccttctgatctatagctatcacgtcactactgtatgcacctacgttatggccattgcaatctagataagtaaaggatggcgccaacccttgcgtatgctacctatgggggaccaacgcttattttccataggcgccatcccgtggttgcttatccccactgaaaaggcacggtttggaccaccttccgttcacatctactaagagtgcgacctaatggtgagcggctttttgggacttcgaggagaagcgcgttgttactagcatcatagagacctcacgcatctgaataggctacctaagacatgtttgttgccaattaacttgcatataaatcccgtatttggtaacaaaaatcgccacgacataggggacaccgtgcacccaaggaatgcatgtgcgcctcttaagctattgactttagaccagtcacgaaacggtaaattggaagtggaagcgcaaaaacaagtgggggttgcccatgggaggttgtttcccttttggcccttgttcaacaaccgcacgttaaccccgcgttgagaacttaacatctatccaccaacaagggcttccccatacgagtggcgaccggcacaggaaagttcctatcgccgcaaattttcggcggtctgcggtaagttgacctcgggaatcacccgcacatggggttagaaccttttacgggcacccacaggttcaacaccccctctgagaactgtgggcccgcctcgtctggagaaggaggcacatgtgcattcatacagacgaagtctcctctcacccacaagagcccgccaaccgacggaaatcaggcgaacgttaaactgcacagtcctaacccccaagcattccctcaggatcagacaacacgttgtcgctgctgtgcgcgttataccctgtctacgattcaccggacaaacaactag

SEQ ID NO: 569507 - DNA, 495 bp, Homo sapiens
atgatacgactcgagctcggacccggttcgcatgtgtccgggtctttgagtagcacgtcacaatctggggctgatcaccccacacttgcttactttagaatatgtaaatggtgaacgtgactcctctaccttttgccgagctgcccatctaagatatgttcaaggtcactgcttcaagtagctatgcgctatggctgccatcatgcgaggatcagtaattatggggagatggttcttaaggtctgaggaaagaggccaaggttagtgtatgaaaggtaaagagataagtaacagtcacatctgagtatggagttaagtaactgaaaatccgtacatgttgtgaatccagctctgctctgacctatcgagaactgagagcgagaggagaccaggtgtgagattgctatcggccattcttttgtacctcctgcctttgtcaggccagatgcctcgtcttctaattagtgacgcgcatgaatggatgaaggagattcc

SEQ ID NO: 569508 - DNA, 526 bp, Homo sapiens
aaccaccaggcggtccggaaccgtgagcggctgccaggggctctgggagggctgccggcagccccgtccccctcccgcccttggttttagcagaacgggtaaactctgtttcctttgtccgtcctgttgtgagtaactgaagcctaggccccgtccccacctcaaatcacacacaccccctccccaccacagagacaccattacatacacagacacacacagaaagacacacacagacacaaaatcacacacacaccctccccgccacagagacaccattacatacacagacacacacagaaagacacagacacaaaatcacacacacaccctccccgccacagagacacaccattacatacacagacacgcaatcgcagatacgcccttccggccacagaaacacaccattacacacacatacacagaaagacacacacagacacacaatcacacgcagcccctccccgccacagagacacaccattacatacacagacacacacagaaagacacacacagacaa

SEQ ID NO: 569509 - DNA, 1632 bp, Homo sapiens
gcgttgtgtttgatgaaggatcgtgcttagttgtgctcgcacttctattttgtatttttcttctcatctgacattctcgttctgtgtgttgtgtctccgtccatgttctcctgccaggttgttatagtgtggttgtggatagctttcgtaccagttcgctgttgtcccacctcgtttgggtgagactacttttgttgttgttgttgggttgggaccggtttgttgttcgtggtttcctgtctgcttacatctatgggcgcgtgtggggttcgtccactgactctttatgggggccgtccaccatctttgttttttgtgggccccgacttttttctctttactcctgcgtactaccacaggcggtggtgctactgaggggggggggtctggcccccccagattgtggccagctccacacagctgtgtttgttatcaacacccagggggggtcgactttgttttcttccgtgttccagcgaagtgctgccttgtggctgccttcatttggggggggcacgacccagccccttggtggcttcctctggcttcgtccccgcgagggggggttgtttcccccctcttatctgcctttttttttcttgttgtgggcgagccaaaccagagccgactcttgtgtgcgctgctctccgctctcttgggggggtgtttgtggacggaaacacatataattgttgtgtgttgtttgtgagtgatttcccgctgtcttcatcttagttttgtgtcacacaggggggtggcgccctccacaatgtgtccctctgtgggagccaacaacaaccatctagaggtgtgtgcttccttggtgggtgtattttcgcgcgtttaattccctggctagtttgtgtgtttgttcacgcactatttgttacgtctctttttttcccccctcgctcgtcactcatgattggagggcgcccgcccgttttacacactgggtggtcttctgctcccctttgccgccctggttctctcaataacacacctactcctgttgtttttctcgttttccttggtcccccccccacacagcggtttttttggggtcccccacagtgtttgttctctgcgtgtgtgtgtccccgcacaagtactccttctgtggcaccgcgctgttggtttgttgtttttttttgtgtttctacaggggtgccccacacgtgtgttttgagacacacgctcgcgggctcgttttgtgcttctgttgtgttcactcgcgggcccacacaggtttgtcttctctctcttttgtgccctctcttgttgttgcgcgcccccgagtctcccctctctccccacgactatattctcttttgtgtgggaatagagagagggctcttggcgcacctggcaccgaccgtggtgggtgcccgcatatacccccgtctccacacgagaagaagtgggcccctcccccataggagatgtgcaacccacagagtgaacaaacggggcccccaatcgagaccacacaaagggttaaggggcacacaccccccccccgttttttttgggagagaggggtacccccatttttccccccccggggctcccctcttcggttttctatttcccctttactttgtattacaaaaaatatattcctttttggga

SEQ ID NO: 569510 - DNA, 221 bp, Homo sapiens
aggaggatccccctctctccacactggtccagctaattttgtatctttgtagagacggggttcgccatgtgcccaggctagtcttgaactcctgacctcaggtgatccaccagccccggcctcccaaagtgcttggattacaggtgtgagccaccgtacttggccacgccattttctctttggtaaaatagagaaaatagagtcaaccagtgtggagagag

SEQ ID NO: 569511 - DNA, 158 bp, Homo sapiens
  misc_feature (116)..(116): n is a, c, g, or t
ctccccatcaggcggtgcgggcggccagacaggcggctgacttcgctctgaaggtggaagtggaatgcagctcgcccctgagttgcagctcgcccctgagttagcagctcgccccntagttagcagctcgccctgagtcagcagctcgcccctgagtt

SEQ ID NO: 569512 - DNA, 843 bp, Homo sapiens
tcacgttctaggaatcctagtatatcgctcacacctcatatctccctactatgcctagaaggaatcatactatcgctgtcattatagctagtctcataaccctcaaacccatccctcttagccaactatgtgtgcctatgtgccatagctagtcttgtgcccgcctgcgaacacaccgggtgacgccatacgcccatacctaggtctcacactcttccaagcacattatgggcctagactctacgttagagtaacccctaacacctacccgccagtgctaacaacacataaattcggctccccaaacaactttctagtaactaacccacgtgaccattgcctcttccaccacacaacacaccttaatttctgaactccaccacacacaaccacaccagcagccttaaatttataacgcactcattccctcatccaatttatatcaacccaaaatcgacggacaaccttacttcagctcggcccccaaaccctttacttcgcgaaccacaataacaagccccctcgttaaataccatactaccctgatcttctacccccctacaaatacttgtccactccacaccgcgcacttccttcccggtggataacccccgtaatcgaaggaaaaacaaatatcctaaccttcacttctacttcatcttccctacagaattttcctttcattcattcaccattcaccacgccacagaactcgtaaatatttagtattatctatgaaaacacacttatcccagggtggtaatcaaccgcccgattgagcacaccgtcgaatgtctcacgcgggcattcgtcaattctccactcgcgcgccttcctacatgg

SEQ ID NO: 569513 - DNA, 221 bp, Homo sapiens
acacctctgcctctttgcattcccactcagatgtctaggagtaactcaagcttaacatgtccaaaatagaacccctgaactttccctcgcctttaagtttgctccacccccccctctcccctcagtgactggcatcactgctcactgttgggccggcccaggcctcacagttaacctttgtctcatctttttttcatatttcccctccgctaccataatca

SEQ ID NO: 569514 - DNA, 454 bp, Homo sapiens
gctcggtaccccagttactgcttcggatgcaagagcatgtcaaccgcgtgctgtggtacctcaaagtctgcataccgtcgccctttttcatcggcaaggatgcctttgggggaatgatggaccacgctggcaaaacagagtccgtctggaggcaaaaccttgtttctccagacatgggccaattccttggtgacaaccttccccaggcataacacctttctgagcccacttgttatctctcgcctggattggatgacacttgttccttgttacggccttcttttgtggtgctatcttgtgcctttccctataatcattgctcggttcccatgtcatctgttcccgagttaccacattagtctccccgatgctgacaacttaccgtgcctcgttttgaccaaaaattacagatggggttccgctctgctaccagactaaactgcacttcttcaac

SEQ ID NO: 569515 - DNA, 379 bp, Homo sapiens
  misc_feature (279)..(279): n is a, c, g, or t
tttactggctgcatgtgctgtgaatatcccaaggaactggctgtggaatgggtgtttgggtcagtttgtgccctttcagtagaccctggagctgctctgtcccttaaaaggccccgtgccccaggcatggcaagggcctgcctttccccttccggtggtcacacgcccacgccgtgccacccgatgcaggactcccctttgtgccttgctgctcctgaggcccaagggcagccatggtgttttgtactgctcgggccgcccaggtcccagagcctgagntttgtagccaaagcagcctgatgaccccccccccaaggaagaaagcagaataaacatttttgccctgcctgaaaaaccccgggggtcaggggtgagccta

SEQ ID NO: 569516 - DNA, 177 bp, Homo sapiens
gtctgggcagcaatgtgcagatcaagtggtgcatgaaagcatcctgctctatggtctcctcagtggtctattattcgtgtgtggtttttattttatatatttttcactggctcacacctattttacccccatactaaccagcaattagtcaccatttagacctttctgatcaacatg

SEQ ID NO: 569517 - DNA, 356 bp, Homo sapiens
  misc_feature (1)..(1): n is a, c, g, or t
  misc_feature (42)..(42): n is a, c, g, or t
  misc_feature (48)..(48): n is a, c, g, or t
  misc_feature (55)..(55): n is a, c, g, or t
  misc_feature (124)..(124): n is a, c, g, or t
  misc_feature (126)..(126): n is a, c, g, or t
  misc_feature (165)..(165): n is a, c, g, or t
  misc_feature (296)..(296): n is a, c, g, or t
  misc_feature (304)..(304): n is a, c, g, or t
ngggaggcatctctgacaccaatcagatcttcggcctgagcnagacgnaacctgnctccttcctgtattatgctctcttcacactcaacctggggaccagctaccccagtattagcacctcttntntacacacctcattgacaacaacaggaaccagagcctggnttttcaggacctcttctgtgtttacctaacactcgagtaccagactgggagagagccaccgtggagatctttgtggggattaactcttatagacactgcatgaacgaactggccacctgctaccctcaagncttacagncaaataaccacacccagaattatcatgagcccagagcacacagcctgatttg

SEQ ID NO: 569518 - DNA, 282 bp, Homo sapiens
cagtagtagctaggaattcggttagcggcgccctaaaaaaaggggggcggggcggtaggggacagggtctcactctatatgcccaggctagaatagcagtggtagcaatcatagttcactagcagcctcgaactcctgggctcaggtaatcctacccaccttaacctacccaagtatactagggactacaggcatacaccaccacactatggtaaatattatagtataattaggtaagagattggggtatagccatgtagcccaggctgttctcaaactacc

SEQ ID NO: 569519 - DNA, 110 bp, Homo sapiens
ggcttttaatctgaagtgaagtatgcatatagcagcatcttaagggccattttagagttgcttacctactctaactcattaaatgtaatcatagttagttttgtatatat

SEQ ID NO: 569520 - DNA, 100 bp, Homo sapiens
  misc_feature (83)..(83): n is a, c, g, or t
cccgaagggttagggaaggaccgcgctggaggccgctgaaagtgaggatccgccccgacagtgcactctggaagcctggaagngttgcccatcggagctt

SEQ ID NO: 569521 - DNA, 511 bp, Homo sapiens
tcatcagatgatcagagaaccgggaggcagaggtgcagtgacgccgagaccacactgcactccagcctgggtgacagagtgagacgatgtctcaaaaaaaaattagccgagcatggtggcatgtgcctgtaatcccagatacctgggaggctgaggcaggagaatcacttgaaccgggaggtagaggttatagtgagccgaggtcgcaccactgcactccagcctgggcgacagagcgagattccatctcagggaaaaaaaaaaaaaaaaggaagaagggaaatctcgtgccggggtgccagggatggaagagctcaggtctagggggcggggaagccttccagaacaggtgaggggggtctccggcctgcctcccagtgcctcgggttagactcacatccggcggggggctctgctgacggaaccctgtttggattgggttacttgtatctgtcacctttcgggctctgtgtgggggtttccaggcccccgacaaaggggggggttctct

SEQ ID NO: 569522 - DNA, 153 bp, Homo sapiens
gtcggcccttgttgattgagcagcaggggtacgctgactgggggctgctgcaccggtaattagattggaagaaaacaggacaggtattttcacagtgcttttctatacaatgtctataatctatagatacataaccgttgagatcaggcatgt

SEQ ID NO: 569523 - DNA, 489 bp, Homo sapiens
  misc_feature (125)..(125): n is a, c, g, or t
tgctgctacccattcactgcaactcgggggggacgcgcaggtcgcgagcctaccaactcccccaacgaccctccatattggaccccaggaagccccctgctcccggccatatctcatcaccacgngacaccttccaactccaggcccgaacttcccttcaccccgtcttctcccccacgcctcagcctcatcaacgtcacctccacccaccaaccccttccttccattccccggactccgcctctcgcccccgaccccgcaccagctggccaccggaaccaccactactccagccgtctcatcacgctccggccaccacccggtccaactcgccctccccgggagcccacctcgccccacctctcgccagcccctaacggtcagccgagaccgcgcacggacctacaccatgctatgcctccacagtcccccgcactcgaggtcgtccaccactccctacccccctccattcagcagcaaccattcgcg

SEQ ID NO: 569524 - DNA, 167 bp, Homo sapiens
ccaccgattccagcctgggctacaagagcaaaactccatctcataaaaaaagatgtgtctcattgtatctttgtataatcaaactgtgagttatgacacccatataaatgaataatacagagtggctgtggcacagttggctacacgacctgtacattccacgcaca

SEQ ID NO: 569525 - DNA, 386 bp, Homo sapiens
gggcacagttgaccagatatgtgcagtattcattaccacaatgacaagaagtgatctctgcaagagttcatggtgtgagcaggcaggcaggaggccctcaccatataggatggatagggagcacacttctcaggcggaactaggtccgttaaatgatagaaaactttctcctcttgacccttcttcgcatacactcttgacaaactttaaccaaacactactacacagacacgacactttttactgtaccaaacgactctattaggcagacacgttttcgttactttactgactacacaaacaactggcacaaccccccctaacactgctcaactggcacctgtctacacccactactacagctgactgagggctgctgctgcgcg

SEQ ID NO: 569526 - DNA, 129 bp, Homo sapiens
ttcaatggaagacagattttactcacttaaacataaagggtataaaactagagctgcaggatttttagctatttgtgaaaacacttatccccactgcacagtaacaattactcgcttaataagaaaagg

SEQ ID NO: 569527 - DNA, 487 bp, Homo sapiens
ggtcgacagagggctggcctctctttgcaaaggtgtaattcagatggaagatacttcagtaatgggtagaaacaaattacttagaggctgtctgtatatcaaggttcttcattttatccttttcatcccattactgagtagctgcattataacttattggtgaaacacttgggttcagaggtcagacagaatggaattctagtccaggtgccactgcttgctgtgtgtgtgtctgggcaagtcatttagcttctctgggcggccccaccccagtgtatagaaagtgagaattataagtttcgacctagaccgggtgtggtggcgaatgcttataatcccaggtactttgagaggccagggtggggcggtcacttaagcagaacccctttagcagatgtttgaacagaagaagaagtttttgcctatcagtgaggggataagaggtcgtcacggccggaattgtagaagaggagtccagcgcggattc

SEQ ID NO: 569528 - DNA, 593 bp, Homo sapiens
  misc_feature (1)..(1): n is a, c, g, or t
  misc_feature (72)..(72): n is a, c, g, or t
  misc_feature (80)..(80): n is a, c, g, or t
  misc_feature (82)..(82): n is a, c, g, or t
  misc_feature (87)..(87): n is a, c, g, or t
  misc_feature (183)..(183): n is a, c, g, or t
  misc_feature (187)..(187): n is a, c, g, or t
  misc_feature (231)..(231): n is a, c, g, or t
  misc_feature (256)..(256): n is a, c, g, or t
  misc_feature (263)..(263): n is a, c, g, or t
  misc_feature (270)..(270): n is a, c, g, or t
  misc_feature (273)..(273): n is a, c, g, or t
  misc_feature (278)..(278): n is a, c, g, or t
  misc_feature (319)..(319): n is a, c, g, or t
  misc_feature (328)..(329): n is a, c, g, or t
  misc_feature (336)..(337): n is a, c, g, or t
  misc_feature (358)..(358): n is a, c, g, or t
  misc_feature (400)..(400): n is a, c, g, or t
  misc_feature (416)..(416): n is a, c, g, or t
  misc_feature (471)..(471): n is a, c, g, or t
  misc_feature (475)..(475): n is a, c, g, or t
  misc_feature (502)..(502): n is a, c, g, or t
  misc_feature (510)..(511): n is a, c, g, or t
  misc_feature (525)..(526): n is a, c, g, or t
  misc_feature (542)..(542): n is a, c, g, or t
  misc_feature (583)..(583): n is a, c, g, or t
nttcttacaaatttcaaaatctgcaccattggatatataagccagaaatcgtacatacaaaatctgaaactnacactgtntnttctntactttgcacacgtgaagtgtcagaatattttcctcagtagtacaggtgtatttatcactaaaattcacaattagggaaaagaataagtgaatcantganttgtggttctcttaaaacttgtgtcattaaataagttagcaganaacacaaagttctgttttgatgtgngcttttngtctcgntgnccaanaccaaacccaactgatatgtactatattcttaaattataanataagatannttataanngttaaccataatgaataagangctggggttatctgctataagataaatgatcagccttccctnaagataaatcacctgnaccacaattcacaaatgtgtttattattcttccctgcttctataacatttataanaggnatttgtgctcagttgtggtctattttngtgttaanntaggtaaatgagtnngacatcctattgccgnacatgatgcctttattgctgggatatccaaaggcattccanatattaacac

SEQ ID NO: 569529 - DNA, 637 bp, Homo sapiens
  misc_feature (492)..(492): n is a, c, g, or t
taacaacacaacctacggctaggtacaggctcgggtttaaactcgtgcacgatggatttctctccaggtgaagcagacaggtgccgacttcctggctgacggagtgtggaaaatggtaggcatccgttgtggcagcaagaagggtgtgaaccttcctggggctgctgtggacttgcctgctgtgtcggagaagtgacatccaggatctgaatgttatgtgggtctgatgcagtgatgttgatatggtgttttgcgtcattcatcctgcaaggcatcttgatgtccatgaagtttggaatggtccttggtgatgatgaatggtgaacatgtacaccagtacaacgcactttaaattccatgccaaacattccgaagcacattccattgcatgagtgtgtgctatctgtgaagtggcttctcgactcgcacatagtcccatgtgcacgtgccaaggctgcattggggactccataggctggtctcgtgtgctgnatactaaggggcaacttgcagcaattccatggcaatgaggcaaagggtactatccgtatgcctccacgaaaggattgactggacattgggatccgagctggcacaacccgagtcctggggtaacgcctgtcaatcttgtgtctaa

SEQ ID NO: 569530 - DNA, 85 bp, Homo sapiens
tggacagatcagcccattgctagctgtgtcctttgccacttgttgtgctgttccgggagttaccattctgatgttggagcggccc

SEQ ID NO: 569531 - DNA, 507 bp, Homo sapiens
tcgatctagaggatccgggggttctcgaggccactcacatttagcacgggtcaggacgttctatggcaaaagagaaaccttctcatttctctatctatctatctatctatctatctatctatctatctatctatatatctatctatcatcggtcagtcatctacctatctatcgataatctatcattatatcagtagggatgcagggatttctctttttgcccaaggggaatggggaatttatttaatttttttctcaattatctggtaatttatttctctcaattatttggctctcagactgggctcaggtggggccggggggagccccttcaggcgggctctaggtgtgggcaatatacctctattttttttttttttttttaaggacgggggtctcattcggggccacgccgggggggctgggggggggcacgagactggggtcagggcgaacctgggcgtcgggggtccaaggaattctcgggcctcagcctccggagtcccg

SEQ ID NO: 569532 - DNA, 853 bp, Homo sapiens
gaattctaagatgccctgatggctgggcctgaacatgtgtttattatatattcttatcttcttatttatcttgtattattttttttttattttattatttattagagagagagagagagagagagagagagagagagagagagcagagagagagagagagagagagagagaggagagagagagagagagagagatcttctcttatatatatagagacacgagcgacgcgacgagagagagaagagacgagcgcgcgcgagagagagagagtatttcacacacgacagagcgagagtgcgtgtgcgcgcgagagacgagcgacgcgcgacgcgacaaacgacgagagagacgcgacgcgggaagagagagaagtcgaacgcgcgcggcgcgacgacacacactcctccacaacaacaacacaacacacgcaccgcagcggcggagacaaaaaaacaaaacaagcgaggcgcggcgacacagtgcaggcgacgagacaacacaacaaaaaagaagagcgggtcgcgtcgacgagagacaccgaagcatagccgaggaggagaggaggacgagcagcaggggcgctgcacatagaagaagaggcagatgctgctggtgccccccgccgacgaggaggacgagaagcagaagaggcggaggaggaagcggagataaggaggagctagtggtggtggtggtgtttttatgattataataatcatactcgtatgatatgtgggaaatgataagaatgagaagaagaggaggaagaactgaagaagaagaaggagtagaagagcagatggaaaacatataatgtatggagaagaaggtgaagaaagaagaaaagagagat

SEQ ID NO: 569533 - DNA, 103 bp, Homo sapiens
gaggatccccccagcctgcgcgactgagtgagactcagtctcaaaaaataaataaataaataaaattgtagcatatatattcattttctgcttgttctttgct

SEQ ID NO: 569534 - DNA, 156 bp, Homo sapiens
tagtacagtgacatcgacgtgtctgtgccaatacagccacgtcgggctggagtctccttcggggcccgagatgctgttcttgaagctgcaactcgtactgcatcgtgaaggcatggagagttctgtagattttcccttggcctgcatcatttctgc

SEQ ID NO: 569535 - DNA, 264 bp, Homo sapiens
agcctgaccctctagctccaaagtgctgggattacaggtgtgagccagcaccggccggccaccctatctcttaagaaaaaaaaaaaaacaccaaccaaaaacattagttgggtgtagtggctcatgtttatactcccaggtactccgaaagctgatgcaggaggatcgcttgagctcaggaattgaaggctgtagtgagctatgatcactccactgcactccagcctaggcaacagagtgaaaccctgtctctaaaagggaaac

SEQ ID NO: 569536 - DNA, 677 bp, Homo sapiens
ggtttctctttcgttgtttccctttctttttcctttttattttatttatttttttggtgggcttggcgtaaggatgctcgtgatcggacattggacatgaacacaagagtggctaaatgctctgttggacttccagcagaggggagtgggggaaacacagcagttctgggtaaagctccttggtaataatagttggatttcttattatttcgagagaatctttcatttccctatgtatgctttttccctttttggcccagtttccttatcactggctgtagagtggctatatttgggcattcatggcagactatgtggcaagtctggttcatctagtaaactggaaaattatggcttaatcaaactggccgttggtctttaatatttaagggccttcccccccccttccttatgagttctaacttagtaattccaaatggtgacctttaatatctaagaccagtatagtaaacttagcccacaggggcaaataaggagtaatatggtaatatgtcccagttggcacctcagtatgttaaacgggtaaggtaagaagtcctcgtgaaaggtcagcaagataagtctcggaaacacatcaggcatgagataggaataaaacccaagttcccaataacgtagataactaaggctgcataaaaatgtgaaagtgtaaccca

SEQ ID NO: 569537 - DNA, 461 bp, Homo sapiens
aagcagttcgatgcatgggtaggcaacaacgaccaccagcgggcgctatggcctggcatcatgaccctatcggatgaatacttctcggaactgcgggccagtgcagttcctctcgacaatcgcgctttgttggccctgaaaggttccgcgctggcgctcgatgtgtatgcctggctcgctcaccggttgcaccgcatccacggccggggcgtcacgttgtattgggccaacctgcgcgagcagttcgcccaggagtacaaaggcaaagacccggacaaggactttaagaaggagttcgtgccgacgctcaagaaggttctggccgtctacccgcaagccaaggtcaagccagtcaccggaggcgtactgctgctggggtcgccgccacccatcccctacaagggcggcccaactgtttagctaaactccgttagatcgcccccccccgacgaagcggccgc

SEQ ID NO: 569538 - DNA, 105 bp, Homo sapiens
tcattactcgatagaataaaggactcaaataaacaccaaccaaacatatacactaaagctacactatatagacacataaaacaaagtaaggataagagcagcaaa

SEQ ID NO: 569539 - DNA, 1125 bp, Homo sapiens
  misc_feature (301)..(301): n is a, c, g, or t
cacaacgtgtgttcactagcaacctcaaacagacaccagtggtgcatctgactcctgaggagaagtctgccgttactgccctgtggagcaaggtgaacgtggtatagaatgtaggtggtagagtgccctgggtcgaggctgactggatgagtctacccttgcgaacccagtcggttcattgtagatgtccgtttggggagtctgtccacacgtccgtgatgcttgttatagggcaatcccgtaagggtgacaggctcactggcaaagaaagtgcttcaggtgccgtatatagctgatggcnctggcttcaagcctggacatacctcaacgtgcacactcttgctcacacgtgagatgaagctggtcatcgtgtgatcaacgctgcgagcgttggatatccatgagcaaactgtctaggcatccatgtggcacatgctgcatggatctggtgctgctaggcccagtacactttggcaatataaattcacccaccaccagtgtgcaggcgtgcgctatcacgaaagttggtggcttggtgttggctaatgcccatggacccatcaacgttagtcatctaacgctcgactttgcattgcatgtccagaattatcgtattagaaggattccgtttggttccctaagatccaatttactaaacatggggtgatattagtgacagggccttgaagcgatcgtggaaattcctgcgctcaatactaaacacaattctacttcttcaattgccaaaactaacgaggcccacatataaaacacagagaaggtgggggcagcgatagcaagacactattccacaagaagagggcgccaaaagggatataccgtcggagaaacaccaccagtgttcacaagggggatcgaacaaagaggggagggtcacacgaggatacgaggaggcgggaggccactacgagtatggaagacgacgtgaaggggccacacgtgagccccagtacgtgtatgaaagaacaaccggcagacagagcaacgtgcggagatacagcggcctgaacgctagcgggaaagacccagcgggaaagcgaagcccacgagctcctggcgggtgaggcccaccaatggtggacagaaagaatctgcactctacgc

SEQ ID NO: 569540 - DNA, 699 bp, Homo sapiens
gggggcgccccggcggtcgcagtgaagggggagaggggagctgaggcgcggtggggcgccgggagagcgcctccgcggtgggacggagccggactgggccgagcgagggaggctcctgagcctcggaggaccccggggttggctttgggagctgaaagtttcctttggacccctcggaagccccgtgacatcagaggccgggcctggcaggggcaggcaggaaacgtgtctggaggctactgccctctccgcgtgaccttgggcgagcagcctcctcctggggctcagtgggtgtgattttgtaacatttcccagcgctgcgacaggcgcgtcctcgccctgtccaacgctggagcccgaagaattactaagaaaccgacggtctgaaggagggaagaggtgacgggctcgaggccacacggtggtgccatgggctgtggcccggactgcacagaccggctacctgggtgcccaaaaagggacacaacacaaccatttacccatttgggcaaagcggggacacaacaatttaccccagaccggaagcgcaagagggaagccacgattatcctgaaaaggcgatattagtatatccgcccaccgttttgggagtataacccccaatgggatgtgggcatgggggtttaaggacagtttggcgcaaccggagggggacaacatttagggcccagatatacg

SEQ ID NO: 569541 - DNA, 326 bp, Homo sapiens
cgaggacgtcgggttccgttgtctacgctgtattgctgcattactcagcattatcttacaagacatccaactttctttttatttatttatttagagacagagtctcactctgtacccaggctggagtgcagcagcgcaatgcgagcttggtcactgcaacctctgtctcctagattcaagcgatcttcttgccacagcctccctagtagctaggactacaaacaggcgccctgatgcctggctaattttggtatttttagtagagatggggtttcaccatgtcggtcaggctgtcctcaaactctggacctcaggtgatccaccca

SEQ ID NO: 569542 - DNA, 246 bp, Homo sapiens
ggcccaggagggtgcaggctccctcattgatgagctgagattgtgtgagaaagtaagaaaggcctctttggctattgtccctgagaaagggcagagccacggttacttctggccaagcaggctccccagaaggtgggtctcaggctggggaagctttggtagaaggaagcggctggtatggcaagggccccagggctgtggtggacttctgagcaagacaagctcgctgccctggaaaggcaggct

SEQ ID NO: 569543 - DNA, 989 bp, Homo sapiens
gagcgggatggggtctgattgcgagagctgcaggaggaggaggcatgagtgaggcgggcgaggccatccggtatcaccaccaccgagcgctcctcgagtgtctcctagcggacggcggaccgccaggcagctccgatagactcggacatctagatgagttcgtctgacatcgagcatgatccatcctatacttggtcacaattggttcactcgtgctagcaaagttggtgttggtgcacttcacctagaatccgctcactgacatgttacttatacagtgtttcttgtgcctcctaagctgctccagtctctcgggccacttcgccgaccacggagcagaatatccttcctgcgccgtctttctgtaaattgtgcagatatcggggttgatcgccgtcagaactggtgcggcttgcccggagctcaccggttgtggtcgcccgtacacgtcagccataactgacgacctggtgcctcaggccatgagtcgtagtattccttcaatggaagacctcatgtgacagaccgtcctaccttccctcgcacaccatgtcgtgtacaattcgccgtcagcaaagaaactttggctctaaactattggaaacacgctatacccgttgacagaaattccaccctatggaaaactctaacgttcttgagacaactcgaaccccagtgcccttgtacactagcgaccgcgccacgcccaccctgcgacgggcaagtgtgcatacttcacagctacgccttatcccagccactacgcacgcgaatatcttcgcgccatcctcccacctccaatcgccgccgagccacttagataagatccacgagtatcacttcggcaccagaccccagcccggtcatcaggatcacaaacctcggcttcgcacgacgcgacacacgacccacacgcccaggtcgcggccccatctcccggcccacaacctcacctcatccacggctgcatatcaccacgacacccacct

SEQ ID NO: 569544 - DNA, 232 bp, Homo sapiens
aaatgtctggcacactctcaaagacattggtctgggcaaaatttattgaataataccccacaagcacaggcaaccaaagcaaaaatgcacaaatgggatcacattaagttaaaaagcttctgcaaggccaggcgtggtggctcatgcctgtaatcccaacactttgggaggccaagacgggcggatcacctgaggtcgggaatttgaccaacatgaagaacagagtgcttgg

SEQ ID NO: 569545 - DNA, 129 bp, Homo sapiens
tgtgttgatgaggtccggtagataactcatgatggtcgattgaatcggagacgacgacggcgctagcttagtagcgagaccatgaaactcggaggcgagcagcggtgctagccggagtcggggccatgg

SEQ ID NO: 569546 - DNA, 426 bp, Homo sapiens
cgttcgagaagtggcagcagatcatcgacgtcaccttcaatggggtattccactgcatccaggccgcacttcccgacatgctcgaggccggctggggccgcatcgtgaacatctcgtcctcgagcacacattcgggtcagcccttcatgtcgccctatgtcgcggcgaaatccgcggtgaacggcttgacgaagagcctggcgctggaactcggcccgagcggaatcacggtcaacgccgtcccgccgggcttcatcgacacgcccatgctgcgcaaggccgagggcaagggcttcctcggtgacaccgacaagcagatcgagcagacgccggtgcggcggatgggcaagccagaggacatcgccgccgcctgcgccttcttcgtctgccgaggaagccggctacatcaccggccagattctcggc

SEQ ID NO: 569547 - DNA, 331 bp, Homo sapiens
gactatggattgtgtgggttgatataaatgctaacaatcaaataattaggctttttctttcatgttgataactccagatttacgtcttttggcagtactattacagctaggacagttttacacactgttacagtcttgtccactttactaacatggttccgacaatactgaccttgacgacgtttctgactatgacactacctcacgtcacactttgctacactgtgtctactaaaacctacttggttaacctgacgtatcatgcttttagatacaggggaaccaatttctgtgatacgtgttctgatcatttaaaatccttaacatttaa

SEQ ID NO: 569548 - DNA, 397 bp, Homo sapiens
tgtcgcccaggctggagtgaaactccatcccaaaaaccaacgacaacaacaacaacacaacaacaaacgcagcaattccattcctaggtgtacacccaaaaaaattgaaaacaggtattcaaccaaatatttgtacacaaatgttcactgaagcattattcacaatagccaaaagaaggaaccaacccaaatcatcaacagataccggataaccaaaatatgatatccatacaatggaatattatttagccataaaaaggaataaagtactgatacatgctataatgttggttaaacttgaaaatatgatgatgtcccggtgtggtagctcacacctataatcccagcaccccgggaggccgagacagttggatcacccgaggtcagctcaggacca

SEQ ID NO: 569549 - DNA, 795 bp, Homo sapiens
  misc_feature (76)..(76): n is a, c, g, or t
  misc_feature (79)..(79): n is a, c, g, or t
  misc_feature (107)..(107): n is a, c, g, or t
  misc_feature (257)..(257): n is a, c, g, or t
ccctaggatctacaagaaatcttgcactctgaagcctgacagtttggtgcaaacctccgagggctcaccacttcantanaacatgggtaagggggagttctctctanacaaattgtatctggacaaataagaaggtgcagtgatctgcttaggccatatatatgctttaataagagggaaccaggacaaggatgatgtcaccaacagcatcgacatccaagctttggagcttgaagaaacggggggggtgatgctcnataactgaaagagtttactacacaaacgtcttggactcattggactcattaaccttcagattcaactcccagctctttccttcaataccagttttcatattaatgcttcccttttttcatttaggcattcccctttgaagaagccgatctccagaccctaaaacagctgatctttcctattgactctccacagatgggtcaggggggtctacaggaacaacactaacaaaggcctctggagaaccttcttggatcccgctccaccttctaagggaggggatgatcacctggggggggggtagcagtgagacactcggcttgaacaaaaggggagtggcgatggtggacttttcccggagtgtggggctccttgaaggggggagcagttatgaaagcccgccccccgggccttttggggcaggagggtagctcccggggacgcgctggcgtggggctggagggggggtggtggcctcctgggcgggagtccggggggtcgcggagggggggctgggggtggtgggtaaacccccgggcg

SEQ ID NO: 569550 - DNA, 167 bp, Homo sapiens
  misc_feature (56)..(56): n is a, c, g, or t
cattcttgttgaattctgggcagaaacactaaggagagatctgaattgaaactatnttatgggtaggggggtgttatcttcaatctgggcatggcacacacaggaacattctggcctgatgctgctcaagctctccctctttggataaataaatggcttcagttttc

SEQ ID NO: 569551 - DNA, 623 bp, Homo sapiens
ctctggcccgacgcccaatggcgttcctgggccccgtagcccagccctttcccacctcctctcgattaaggccagcccctgccctggcattgggggcccacctagatagccacctgggagaccccctggcgttgccgctggaccctcgaggacctgggccccgggtcggatggacacaccagccacgaccgttgacccgtcacgtagtccccaacgcctcggggcccccaccgcccctccggaacccgccagagctggggacactggcaatgccctgcaactcagtcaccccgagggctgagccagaattcctggatgtgatggacccgctcagcgtgtcccccagaccccatcccttctccttttcccttgtggccctaacaccttctgcatcagggagccccctctgcctcttgagtacccgacctcatgggacccagaccccttgggacaacctggcaccatgggacctctgttgtacattcccggttggcgggatgtagcgcttgtctaatttaattactaatattattgaatgccttagaggaggcccggcgagccccgtgtttctgaagacctgtggcccccccgagcctctgcccgtaaagttttgctccccccca

SEQ ID NO: 569552 - DNA, 713 bp, Homo sapiens
  misc_feature (35)..(35): n is a, c, g, or t
  misc_feature (75)..(75): n is a, c, g, or t
  misc_feature (79)..(79): n is a, c, g, or t
  misc_feature (82)..(82): n is a, c, g, or t
  misc_feature (90)..(90): n is a, c, g, or t
  misc_feature (106)..(107): n is a, c, g, or t
  misc_feature (116)..(116): n is a, c, g, or t
  misc_feature (130)..(130): n is a, c, g, or t
  misc_feature (137)..(137): n is a, c, g, or t
  misc_feature (140)..(140): n is a, c, g, or t
  misc_feature (162)..(162): n is a, c, g, or t
  misc_feature (261)..(261): n is a, c, g, or t
  misc_feature (329)..(329): n is a, c, g, or t
  misc_feature (350)..(350): n is a, c, g, or t
  misc_feature (358)..(358): n is a, c, g, or t
  misc_feature (414)..(414): n is a, c, g, or t
  misc_feature (428)..(428): n is a, c, g, or t
  misc_feature (458)..(458): n is a, c, g, or t
  misc_feature (575)..(575): n is a, c, g, or t
  misc_feature (685)..(685): n is a, c, g, or t
cgcacaccggggctatgataagcaagaaggaagtngggagggcagacccttgctgagcaacaaaggccgcctgcngccnccnctgtgtgngtgggggggggggggnnggggggggnttgcgcgcgaaggngaggggncancgagtgcgaggggtgggaatanagggaggtggggaggtgtgcataagaagtgataggcacaggccagcccggtacagacccctaggcgtcctgacaggtggatttcgacaaggtcattgtnccctgccaaggcacagcgtagatctggaaagagcagaatgctttccttttcagatgtggctggtcatngaaggggcagttgttcaagtngggctggntcttggtacacgtggtttggcccagctccacgtccaagaagtagttcaccccagcnacgatctgcttgcnggcgcgcaccacctgcagcgcgcggctgtngtacatgttgttgctggctttgttgttctcgccgacggcaaagtccagttcacgccgcacaccctcctcctccacgctggcgttcatggggcctcccaccaggagcggcggcttgcngggactagagcaggcagcagggctcacggccagggccacggccaggatggcagcaggagcagcggggcgcgcaggggcccggccatggtcggctaggacgcgggaagggngagttgggcgcaggcgagaagctggagc

SEQ ID NO: 569553 - DNA, 995 bp, Homo sapiens
gcccaggctgtggctcagctctcagagggaattgagcacccggcatgcggtctcacggccaagccccctgctcatggatggtcagcgagttcaagaagaagctcttctggagggcagtggtggccgagttcctggccaggaccctctttgtcttcatcagcatcgtgttcttgctcctgtggcgttcaaatacccaggtggggaacaatcctagtacggaggatccaggtacatacgtgataggtgtcagcgtgtgcccttcgggcttgatcatctgccactgcgtggcgcagaggtgtgggccacgagtcagcgggtcgctctcgaccatcgaacgccggcttgtcagcacgttgggtgctgctgtcgtcgaggctgccgagtagtctaggtcactcttcccgctgcacctctatgatacttgtcattccgtcctcgaaggtgctgattgcgtgggcgcagtctggtcgaccaaccggacagtccgtctcgaggccattcaccgtccttccgctgcacttggtgaactcgtcttgtgcccgcaaatgtacgctgggttagataggttgtcgaacatcggagagcgcaggggctcgtggtgcgatcggacgcattcgatcggcgcgaccctcacagcgtaggtggcataatgcggtcgctggcatacgtacgcgaccggaatggccgcctccggtgaacgcgtttgggtatggggatccaatgccccccgcctttgccgattcggggcacttcttctggtcagccccctttggggacgtaccttcccgttgggctcatttgacattaccatcttgggcttggtgggcgatgtaaaccccgttgctcagggtccgttttgggctccggctgggtggatcaacacaccaagcttgcaggcgaaccaactgggaatttctgggcgtggggcgcagatcactcaggaggagaagcccctgggctgtacctcatctacgaactttcatgcctgggcccca

SEQ ID NO: 569554 - DNA, 118 bp, Homo sapiens
taaaaacacccccacccctctctttttgggggttgaaaaaattcccggttattgaaaaccgcggggggagtttttttcccccccccccaatttgagggggggggggaacccaccccct

SEQ ID NO: 569555 - DNA, 107 bp, Homo sapiens
  misc_feature (101)..(101): n is a, c, g, or t
gcgccagcagtggaaaatgcggcaccagatggaacatgcctcgtccacgttacaagagttattgggcgagtgacttgtggtgatcttgttgaatgaatgtngaccta

SEQ ID NO: 569556 - DNA, 159 bp, Homo sapiens
gaggatccccttcgtatcgctataagaatatggcgaaggggcctgcggcgtattcgactgttaaccgcctgagactagttcggactccccttcggcaggtcgagagtggtacggtctggtctcctgctagtgctggagatcacatcattattatggcgc

SEQ ID NO: 569557 - DNA, 885 bp, Homo sapiens
gaaatgcaaagcttactccagatcctgccatcattagttcgctgaacctggttgaatttttacagaaggtctgaagtagtctttttctcttttacatgtgcaaacacacaagcacttttagaaatactttttatttttcttatttcatcttgatgataactttgtgaaaaaggcaaggcaagaaatttgcccattttataaatgcaaggaagccagagctcagagagtttgttcaactttttattgtggttaaaggccccaggttcaaaaccttgtctggtccgcctttttcagtggtccattttctaaacgtctgtcagctcctgattttctcagaactagattaattagtatgtccaataggcaaccttagttatgtgggcccaaaaaaaggggttgaacttgaaaggaactttcagaggccacacttagaatttcgttgtcttcgaaacaacttttcacgaatttggcttggggcgcaatggttcaattgccctgtaaattcccccaggcactttgtgggaggggccaagggtgggggcgtgggaatccaatctggaaggggtcccagggaggtttttccaggaacccaggcctgtgagttcacaccattggcgtggaaaaacccccccggtgcttttttacctgtgaacacttacgcaacgacacgacacaacaacatacaaatacaaagtaaacacaccacacacctgttgtttgcgcgcgcgcgcctcggcgcccccctgacaaaaaaaggcttttctgtatacacccaaacttctgtttttgggaggcggggcgggggccccccactgcatgcgtgtgttattgctctgaccagcgggcgcctactatgcgcgggtttccccataggagagagacagc

SEQ ID NO: 569558 - DNA, 244 bp, Homo sapiens
tgactttctggaagacgtggatcttcagcgaagacactatattggctggaacaccttggattttccccggtagatgtgggattgactggtaatgacctgagattcggtgtaatgacgtagatttcctcggaagctatcgatttcagggaagacgaggattttctgtaagacatggattgtctgtaagacattgctttgttgtaagacgtggggttgttaaattgttttgtccagtctagaattg

SEQ ID NO: 569559 - DNA, 720 bp, Homo sapiens
aggaacgagtgagagaggaaggtcaccgggtggaggagctggaaagggaggaaggagagagcaaggagtagagaaaggatggggtgaaagacgatgagggagggtagagggggcgcggaagattaagagtcagggcgtaggaatagatggtaaggcaggttagcgaatgatggggcagaaaaatgctggaaaaaatggtgtaagcttgaggcctatggggggtcttaaagataggagcagacgtctgagaggggacatctagggaaaggaagtgagacgttattcaggagtgtgacgtggaagatgaggtgaagagggtacaggtagtgctgcggaactatgggagtagatagggttgaagctattctgtagagtggtataatattggtagagagatttgaagcaggagcgtgacagagcaatctgcatgaggtgtagggtagccaagagagagatggggcaataggacatgttgtactagggcataaattgtcgaaacatagtagagtcggcatcagcaagaaggcaactagtggtagagagctagcagttgatcagtaccgagttgggcgttgcagtgaaataggacaatcgaagactggtctcagcaggcaggcggtttactgtcataggctgtctgactctctctctctgtctctctctctctctctctctctctctctctctctctctctctctctctctctctctctcctcgtg

SEQ ID NO: 569560 - DNA, 179 bp, Homo sapiens
tagtataaaaaacattaaatcagctgtctgaaatctgctcaaaaagctaaaagaaatgatgaataaagagttaaaggatacgaggagaacaatgtctcaacaaatgcagaacatcaacaaagaaatagaaaatattatagacaggtgaggggcagtggctcatgcctgtaattccagca

SEQ ID NO: 569561 - DNA, 254 bp, Homo sapiens
gaatcgcccagtcgcaccggagcaataggataatatgtggagagaagatcagcaggtaaacacgtgaacaaatgtctctgcatcataaacaaggggaagaaaaaagtgctgtgcttttgatgtgcatatacagaaacatctcaatgccttaaagagcagtattgctgccagcatgtcccacctccagtcctaaggcggttttctcctatctcagtagatggaatatacaatcgggctttacaccgagacattcc

SEQ ID NO: 569562 - DNA, 991 bp, Homo sapiens
gatccggaaaggcgtctgcgatgccaacgatgaggctgctgtcatttgctggtgttggctctatttgctgtcactcacgcagaggaaggagccaggctttcggcttccaaatcacctgctgaacagatacgccgtgaagggacgagacctgaccttgcagttacaacatctacaatgtaggcctcaagtgctgcattacgacgtggcactatctgatgattccttccctccagaagacttcgcgccatcgtgtctggaactgctcaactgtccacatgggaccggatatgcccctgcttagcaactgtacatcccaccactgtaacaccatgacgccactcttcaacggctgcgtcaatttcaacctatcacacatccggcacaccactttcactttaacttggccccaagagagggaatgagtgccccagtccgctgcatcgggcctcctaaccaagatgcaccttgagaaccacgcgacggacatccatgtacatacaccagcgaagctcatagaccaagggcgactactcccgcctccaacatgcacctgggaactgtgtgccatcaccttatcggaaggccccacgcaccccattttccacgtacaaaatacgagccagtacacaccattgcctaactcagttgagatacaatccaagcgcttagccggtatacttattgaacactctcatcaaaacacgatacgaacgaccttgccttctcgcgcactatacgacaaacagacgcataaccaatcgatccccaaagaaagcacccccaaggactcccacatccacaaagcacaacaccaagggaggcactaccaaagaacacccaaagagggctaaacatcacaacgcaacaaccccaatactaccaaagaccatctgaaccaaagtatccaccatcaaactcccggacacaggcagagaagcaatcggtccagacacacaggcccaaacgaacataaaaacagcacacctgagaa

SEQ ID NO: 569563 - DNA, 332 bp, Homo sapiens
gatacgctctagacggagtgttacgagttaggctcttctcgtcatggccgggatggctgtttttttggtatgttctttcagctttcactcatactgtctactcaaggtttcttaaaatttcatttttttttaaatagagatgggctggctatgtggcccaggcaagtctcaaactcctcaagtgatcctccggcctcacctcccaaacggcggggattgcgggagtgagccaccacactgggcctcattcagcctggtttttttttttttttttccggaaacagtttggctcggccacccggggggggtggcaggggggggatccgggtccg

SEQ ID NO: 569564 - DNA, 216 bp, Homo sapiens
tcggtctcgctactctatgatgtatcccttcgctgtggactcacgaggtaacgcacttctgccgaacgtgccatcatcctggctggggaataagaaggacctgcggcaagacgatgcacagcaggagacgagctggcaagatgaagcaggagcccgttcggtctgaggaagtgcgggacatggcgaaccggatcagtgcctttgggtacccttgag

SEQ ID NO: 569565 - DNA, 113 bp, Homo sapiens
ttgacacggcagtgaatcgagctcggtaccatctcgtgaccggcgataattgctaggatgacgatggatagtaataaggcaaggacgcctcctattttgttagggacggatcg

SEQ ID NO: 569566 - DNA, 181 bp, Homo sapiens
  misc_feature (28)..(28): n is a, c, g, or t
agtttatgtagcttacctcctcggagcnatacactgagcatgttttagacggcctcacatcaccccataagcaaataggtttgttcctagcctttctattagctcttagtaagattacacatgcgagcatcccccttccagtgagttcaccctttgagatcaccccagtcagaagggacag

SEQ ID NO: 569567 - DNA, 205 bp, Homo sapiens
atccagattacttataatataactgataaacagttaatttagccaaaaatatttcatttattctggacacagttaaacataatccttcttagaagtaaactataaatctcagtgaactaccttatttccaactttttagggatcatatacttgtatccatatccctccaatgtcttaatgcatatattctatgatgtctaatagg

SEQ ID NO: 569568 - DNA, 931 bp, Homo sapiens
  misc_feature (91)..(91): n is a, c, g, or t
  misc_feature (131)..(131): n is a, c, g, or t
  misc_feature (775)..(775): n is a, c, g, or t
cattctctagtcgcccgagggtcgcagccggctttcaggggtcctgctgaccggactcaggcttatcccgcctgtgccgaaccacttatanacccgcatgacccacttcctaaagcagagtttctctttgncagactcacaacgatgcagatgcaagcctgaatcagaaactgaaaaccttatacaaacgcctgagacagcacgcttattttatttcttatggcggaacatgctcgtataaacaaacacattaatggtgtccctaacgctgcccacaaacacgatgaggactcgccaacgacacctacctatcgcgcccctgcttatgggccgacggggatgagccagacccgggagtcaggcgttctgcgacggcccatccgttgccggcccggatagtcgcggattccgacgtctctctcacacggcccgcccaggacccacaggacgcccaatgcacagatagtcggggagccggtcggcaaacaggggccagtcgccgcgctcgagtcagcgtcgcaaccgtgcagtgcgccccctcacgtggtgcgtgaccgggcgcccagggtgagctgactcgcagttcccgccgcgccggctcggtccatttgtagttcgtatgaccaccccccgcgttgtggtgttgaggctggcgaacgaggcagcttgtgtcgagtagacgccctcggcccgacccgctcgcggactgacgcacggggtcgtacgcgaaccggaccgcgatgtgcagagggctgaccgtagtgacacaaacggntcgccgcgcgctcgatgctacaagctatccaaggcccatccgagagcggagcgccgaggtcggacctgtacgtagcgcagatcgccctgtgagccggaacgccgtatagaatgcaacggccatcgtgtcggcacgtcacgcccgcgaccgcaccgc

SEQ ID NO: 569569 - DNA, 592 bp, Homo sapiens
ctcccagatggtgggcagctgggcaaaggcgctcctcacctcccagactgggcggccaggcagaggtgctcctcgcctcccacatggggtggccgggcagaggcgctcctcacctcctagatggggtggccgggcagaggcgctcctcacctcccagacggggagaccaggaagaggcgctcctcacctcccagatggggcgggctggcagaggcgctcctcacctcccagatgatgggcagctgggcaaaggcgctcctcacctcccagactgggcggccaggcagaggcgctcctcgcctcccacatggggtggctgggcagaggcgctcctcacctcctagatggggtggccgggcagcggcgctcctcacctcccagacggggagaccaggaagaggtgctcctcacttcccagatggggcagccaggcagaggcgctcctcactttccagatggtgtgtcatccgtgaagaggcgcttctcaccttccagatgattggcagccagagaaagaggcgctcctcaccttccagatgatgggcagcaggagaaaggcttacagatggaggaacgtacccttgaagttcag

SEQ ID NO: 569570 - DNA, 904 bp, Homo sapiens
  misc_feature (148)..(148): n is a, c, g, or t
  misc_feature (205)..(205): n is a, c, g, or t
  misc_feature (221)..(221): n is a, c, g, or t
  misc_feature (250)..(250): n is a, c, g, or t
  misc_feature (252)..(252): n is a, c, g, or t
  misc_feature (255)..(255): n is a, c, g, or t
  misc_feature (264)..(264): n is a, c, g, or t
  misc_feature (276)..(276): n is a, c, g, or t
  misc_feature (285)..(285): n is a, c, g, or t
  misc_feature (287)..(287): n is a, c, g, or t
  misc_feature (303)..(303): n is a, c, g, or t
  misc_feature (317)..(318): n is a, c, g, or t
  misc_feature (325)..(325): n is a, c, g, or t
  misc_feature (328)..(328): n is a, c, g, or t
  misc_feature (332)..(332): n is a, c, g, or t
  misc_feature (339)..(339): n is a, c, g, or t
  misc_feature (344)..(345): n is a, c, g, or t
  misc_feature (355)..(356): n is a, c, g, or t
  misc_feature (360)..(361): n is a, c, g, or t
  misc_feature (363)..(363): n is a, c, g, or t
  misc_feature (365)..(366): n is a, c, g, or t
  misc_feature (391)..(391): n is a, c, g, or t
  misc_feature (397)..(398): n is a, c, g, or t
  misc_feature (401)..(401): n is a, c, g, or t
  misc_feature (419)..(419): n is a, c, g, or t
  misc_feature (424)..(425): n is a, c, g, or t
  misc_feature (462)..(462): n is a, c, g, or t
  misc_feature (490)..(490): n is a, c, g, or t
  misc_feature (492)..(492): n is a, c, g, or t
  misc_feature (494)..(494): n is a, c, g, or t
  misc_feature (496)..(496): n is a, c, g, or t
  misc_feature (536)..(536): n is a, c, g, or t
  misc_feature (544)..(544): n is a, c, g, or t
  misc_feature (614)..(614): n is a, c, g, or t
  misc_feature (616)..(616): n is a, c, g, or t
  misc_feature (644)..(644): n is a, c, g, or t
  misc_feature (660)..(660): n is a, c, g, or t
  misc_feature (666)..(666): n is a, c, g, or t
  misc_feature (710)..(710): n is a, c, g, or t
  misc_feature (716)..(716): n is a, c, g, or t
  misc_feature (736)..(736): n is a, c, g, or t
  misc_feature (745)..(745): n is a, c, g, or t
  misc_feature (749)..(749): n is a, c, g, or t
  misc_feature (752)..(752): n is a, c, g, or t
  misc_feature (755)..(755): n is a, c, g, or t
  misc_feature (762)..(762): n is a, c, g, or t
  misc_feature (767)..(768): n is a, c, g, or t
  misc_feature (776)..(776): n is a, c, g, or t
  misc_feature (785)..(785): n is a, c, g, or t
  misc_feature (796)..(796): n is a, c, g, or t
  misc_feature (807)..(807): n is a, c, g, or t
  misc_feature (810)..(810): n is a, c, g, or t
  misc_feature (818)..(818): n is a, c, g, or t
  misc_feature (841)..(841): n is a, c, g, or t
  misc_feature (844)..(844): n is a, c, g, or t
  misc_feature (858)..(858): n is a, c, g, or t
aggctggagttctccgggagcgccggtcggaggcggtcggcggaggtgtctaccccgccggtgatggcgttgaacgccactggcttcccggccttccgtccgctgcctccgtccgattctgcgtctgcttgctgaggaggcggattangggggcgcggagtctcttcccttgagtgcataggtcccggttggtaaagggtttgantccgcatcgccaaaantgaaagctgcgagggaataaaaaaaaaananatntttaaaaanaaattgcaaaantgaaaaagnanttgccgacgctaaaantcttgttgaaaaannaaaaaanaanaaanatgcagnaaaanntctgattgannaaannananntctcaaaaaacgagtagaagccatnaaaaannatnaggaaaaaattcaaaaanttaannaaatcgcgagacatcggccacggtccacgttagttangggaatccagcaaaaaaaaaaaaaaatnanananttgcaaaaaaaaaaaaaaaaattacgtacatctctggaanaaaataantcggccttggaacttataatgagcaagtaccgagaacaaatgtttagattgctaatggctagcaaaaaanangatccgggtataataatgaagttaaaanagcagcactccaaggnactgcnagcacatgttgaccagataactgaaatggcagcagtaatgaggnaagccnttgaaattgacgagcaacanggttgcaangaanaanaangaatatntcaanntgaacaanaaaacaaangcttgagaganatccttcaaanaantcgagaancatttttgaacctaaggaaagangangcgtcggaaagtanttctttgtcagcattagtgaccacagtgatttgagtctgagggaga

SEQ ID NO: 569571 - DNA, 106 bp, Homo sapiens
gccagatcagtgtggaggtggattcctgctccgggacctgatctcgccagatcctgagtgacatgcgacgccaatatgaggtcatggccgagcagaaccgaaagga

SEQ ID NO: 569572 - DNA, 952 bp, Homo sapiens
tgggcttttttttggttggtttttttttctttggacattgcaaccgaaggtcataaggccgttactccgttgggacaaaggtttgaaaaaacctaagcggttcggtgccttctccctggtctcaaaccatcgtctctgacgtgaaaggctttgggtacctcaccatctgagaatatctaatctagaacctagaatcctaggagtctttatcaggttctaggaggtcctttaggaagatctctcaagggcaaatccttgatcccccgccccacctttagccctgccctctcaccagagcaaaatccactggggacttttcccaccaacatggaatatctgtccatcggaataaccctctgttttccattcaaatgtagggggaggggatggaacatttccagtgatggtaaaagatcggttatgaacaggaaaacaacccccggtgttaataactgggtctgaaatctgtttttatgagcggggcccctgtggcctctagtatacttgtttttgagtctcatagttaccctttaagttttcactgtgtctgcgaaattttgcaatgggtggaaaatcctgggggggtccattctctttcaataatttccacgcggtttcttgaagctggtgtggtatcagttaactccgtgtatttcacccctatgagggtcaccacccttcccgccttcatcacactcctcggacgcaattctcggtttcccctcggaccacaacgggaatcacactcggctttcggcccacacaaaacacacacaaggggcgcgccaagatatcaccaagggacacttccaccacttcttgacagggccaccaagacgcaacaaatcaccacgcgacaaaatcctgcacccccagctcgtacgaacctcttgtgcgtcagcacccacacaccggcaaaccccagcacccctgggatcagtaactaaccacg

SEQ ID NO: 569573 - DNA, 186 bp, Homo sapiens
agatcacccccatgcacaatcattgtacacccacagtcacacccctacacctcaaacccagtcagcccacacaaacataacatacagaatcaacacaaaccacaatcaaccgagacgcacatcacacacccacccaagcatacaattaccccacacagtcacatccacacacaatcaccccacaca

SEQ ID NO: 569574 - DNA, 123 bp, Homo sapiens
tgtaggagttcgatacagtctggccaacattgtgagagccatctctactaaaactacaaaattaaccaggtgtggtgatacacctgtagtctcggctactcaggaggctgggctgaggcagaa

SEQ ID NO: 569575 - DNA, 1922 bp, Homo sapiens
gcccagaggggcaggtgcccctcgccaagcagcccagctcaccctccggcacagggagcatggtggaacaactttcaccacaggggggtgagcaacgacactggcctggaccggacgagcaacccctttgcgaggctgcactgacagcagccaacttctcagcggcaaaactgcgagaatcttcgacccctttttcaaccataacccgtaacccagcccactcgagcaaagttgccctggccaagttacttacccccgtgcatcagcccatttctcctccttcccagtgcttcttcccacacgcaaactgcgccacaagcacccacgctgcacgcccgcgctctatggggcactgcccaacaccattgcgcctctcacgcacgccacacacttgcacgcccgcaccccgagcatttccccgagcaaaacaggggcacgcggcccaacttgccccttgccgcctggcacaccccggctacagcctcctattcatcgcttatactctcttctgccgccacaaccttcacgccttcgcaccaccttggcaagctcttccgctcttcttcaccccaccttggcggcccccttactgcccatcccgtaggcctaactttggcggccacagtgcctcacctttttccgcaactttccttatcttagtggccgagaataggagccccttggtcacttcctgatcccccgaaagcacctagcgtcgacacaccgcacaaacctttacgggcgcgactacgaacaaacataccccgcccgaagtccttaaacccctaacaggatggatggcacaccccctctaaacctttgcgcccaacctctttcgcgccccaatttacacacttattcttagggtcacttgcgccgggcccttcgtctgggcaatccaacgcccataacagacgtctttgggccgctctaatctcgcaaatggtctgatcatcccaccccactttggcgctgtcagtcacacacccctacccggctagtgcgtacttattgggacgatttcccaccgctgccagccaataacccagtcgtaccattactgtcgcctcctaaaatcgcaggactaaaacgcccctcaacattcggtgcataaaacaggcacctcttttaaacaacctcaccgcagctcgtccattcggcgcccgacgcacctccactcaccctacttattgatcccaccccattcttcgagcgaaacaccaagccgcacgtcgtatctccctaggcgtccaactactttgctggttcgtccccccccctggtcgtgtcgtcctcccgcaccgccattttaacccacctcttttgtgccggtcgctcccctcacctcattcgggtcgcgcggcgccccccacacatgagcgtgcgcgccgtctgtcgtctgcccgccgtcacgccgtcgccgccctccgtcttgtgggcgctcttatggtcgacttctttcgcgatccgcccgccgtttacatatcgccagtccccccgtagctgatcgatacgcgcttcgcttgttatcgcgcccctgctgccgtgggtcttctatccccgtcgcgcgaccttctccgtccgactctacaccgcaggacaatctacccgctattaaacagccccaccccctacaatcgtcaccacgcagtgcgtaaaacaatgctggcgcactactagtggtcacaacaaactgcgtcactgtcgcgcgcattcactacacactttttccccaccacgcaatgacactcgctaccccccacaacaatcaactaccatgcgctcccactacatccctcgctacacgaccgcttcctctctccacgcggccactctaccccgcatcaattactctattgacctccacggcatctacatgatccccaccaccatcgtccatcgaatcaaccgcccctacaaac

SEQ ID NO: 569576 - DNA, 459 bp, Homo sapiens
gttggtctactagtagtgcacatcttgagtattactttcttcatccttagtataaaggggaggaggggtggccaaatgaacatgattcagatacagattttaaaaagaagaccccagcttaaatgtcacctagtgtgctaaactttttctaaatatccaacagcagttttatcaggagcaagggaataggtgggcattcaacatctacatctgaggctgggtgtggtggctcacacctgtaatcccagcacttggggaggctgaagcaggcagattacttgaggccaggaatttgagaccagcctggccaacatggtgaaacccgtctctactaaaactacaaaaattagccagcatggtagtatatgcctgtaatcccacctaatcgggaggctgagggaggagaatcgttggaacctgggaggcagaagtggcagtgagctgagattgtgccattgc

SEQ ID NO: 569577 - DNA, 307 bp, Homo sapiens
  misc_feature (52)..(52): n is a, c, g, or t
tttggggggggggggggcccccccccttgttcccgctcccccctggccgggnttttgttttgggccttctgtcaaaaccctgggggggggggatggggccccccttaaacccggaggaaacggggggttgcctggggtttcggaaaaccccttatgggggggggccgccccccccccctgtttcaagggggatgggggggggggggcaagcaaagcatccccccccctgagcaaaaacttttttttgttttttaacccccccggccccctttccccttggaaaaaaggggggttttgaaacccggga

SEQ ID NO: 569578 - DNA, 170 bp, Homo sapiens
gagagaatgtctgaagcgttgtcttacatttttaaggataaacttatcagagataatatacttgttacacagataattcccgtcctaccatatccttctttcccccactgagtcttattttttcagcaaactcactcctgacagcagagtctgtcccgccacctcacatt

SEQ ID NO: 569579 - DNA, 466 bp, Homo sapiens
  misc_feature (302)..(302): n is a, c, g, or t
  misc_feature (332)..(333): n is a, c, g, or t
aaccgatttagaacagttcttctaagctttcgctggacttgacgtggggtgtctaatgttctgaccactccacaccagcctgaagacccaagcagtcacgaattgaaagactataagcaccgatcagaaagaggagaaaccaaggctatcgttagtggctgcatatgccatacgcaccagtcacgctttctgagcctgccagatcgcagcctctcctgctcgcagaggttgtcagacaccccgggctggctcagtcctgcttcccagttgaatcaaaaaaaaaaaaaaaaaaaaaaaaaaantttttttttttccctttttttccccccaannaagaggagagagagagagaaccaaacactgtaaggagtatgaccttctccagcaagacagcaaaggtgcaaaggagagaaggatgctacatagcccggtttgtttttaagaaatgcaaatattaaacgagaaa

SEQ ID NO: 569580 - DNA, 449 bp, Homo sapiens
  misc_feature (10)..(10): n is a, c, g, or t
ctttgtttcntgcttaggaccacaaggctcgtggtaccccagggactcttggaatcctgtctaggcagcttggagggctgtctacgtggcttcttggacctgaaccctaactggacctgtgcatggttttgcagcccagatgtgaaacagggatcatccacctcaccagcaatcccccttgttttaaactgcagttaataactggctgggctgagggagccccctttatcatagtttacgtgcagcctaccccctggaatctgataaggtctttgggtgctggcagtaccaatttttatccattattttttctattacggataattcctttccacactggagtcacccagaggttggcttgagcccagccacatgaagataagtgccagtggttttgccgggtcccgggtgccctctgtttcattaaagcaacatattcgggatatata

SEQ ID NO: 569581 - DNA, 836 bp, Homo sapiens
ataaagggatggaggaatatttaccaagcaaatggaaaggaaaagaaaaaaagcaggggttgcaatcctagtctctcataaaacagactttaaaccaacaaagataaaaaaagacaaagaagggcattacataatggtaaagggatgaatgcaacaagcagagctaactattctacatatatatgcacccaatacaggagcacccagattcataaagcaagttcttagagacctacaaagagacttagactctcacacaataataatgggagactttgacactccactgtcaatattagacagaacaatgagacagaaaattaacaagaatattcaggacttaaactcagctctggaccaagcagacctacagaactcagaacttgaactcagctttggaccaagcagacatctacacaactctccacttcaaatcaacagaatatacattcttagcagcaccacatcgcacttattctaaaattgaccacataattggaagtaaaacactacacaccgaatgcaaaagaacggaaatcacaacagtctctcagaccacagtgcaatcaaattagaactcaggattaagaaacttactcaaaaccgcacaactacatggaaactgaacaacctgctcctgtaatgactactgcggtaaataacgaaattaaggcagaaataattaagtatattgaaacctatgagaacaagacacaatgtaccagaatctgtgggacacaggtaaagcatgtttggagagaactgtatcgcactaaatgcccacggagaacgcacggaagatctaagtcaacaccctacactccaattaaaagaac

SEQ ID NO: 569582 - DNA, 124 bp, Homo sapiens
tcccatcccacgactctacgcccgcactccgtcctccagttaccaacgtccccatcccgtcgtcccacctccgccttaccagggactcctccctgagttcgtcctccagaagtgcgcctgggtg

SEQ ID NO: 569583 - DNA, 1185 bp, Homo sapiens
tcacaattgggcaacacagatttattggggaaaaaaacctgcggaaaggggtgtaccagctagtgtgccagaagccccctttccgcggcttacgaggcgtggaccagtttacagttcccgggcaggaagaaggctcgtgggaatgtgtgtggtgaaaagtggggtgtgggaggcggtgtgtgttgggcgtgcgtgataattagaaggaatttaagtgtcgcacgccaggcggcttagcgccgtgggacctgtgcctgacgaggattgtttcctcacacgtctcaggcccgtggcggagaatttaccacttcttgaccaggttgtgtaaacgtggtcagcgggcctgacacacaaatagcgtgccagcttgggcgcctaaccatctctatattttcctatacctctcagtattacaaccgggaaaagagggcccctcgtgcgactcatcctggtctgcctccccctgtcgcgcaaagcgcggccgatggcggcaccaaggggccccgggaccacgccgcagccctccccgcaagggcaccccctccgaaaggaccaccggcaaacccacaccgtcgcccaaacggtccaacacctaccacccatccacgcggcgcaccgcgcccaccccagcccccgcgaaccacacccaactcacccccccgcggcaccacacacccggcccacaccacggccacacaccaccccgcggcccccagcgcacaccagcccgcgcgcacgccagcaaaccacccacgccgctcccacccaccgcccgcacaccccccgcgctcaccatccccaaccgccctcaaccccccccccccagcacctccgccccctttctcttcccccctccccgccccccctcaccacccctacccgacccccaccaacacatcccccactactcatccccacgcacccacaccccccccggcgccccaatccgctgccccccccaccacacggagtccaagctccccgccacccgccccggacaccacccgcgtgactaaccacagccgccaaccctccccgaagcgccacccacccgcccaccgggcgcccccacagccagcctcacgcgcaccccacccacccccccacgcacgcccccccccaccgaacacccataacaccaggcccagcccccaggacccgcggctccaacacgagcatacaccc

SEQ ID NO: 569584 - DNA, 881 bp, Homo sapiens
cacaccgtgtgtggggaattctccatgggggtgtcccgtttcaatgtttgtcccgtggccccttgggggttcggccgattatttgtccccctcccccgcgccatgggtcatgctcccggagcgcccgcccgactttttttaggggcctgatggagggctttgagaccctgaggtcttgcgcccagccgtcccagagacgtgaggctttgctagcgccttggacgccccaacgtggttgtcccgccatagtttgggcgcccagagataggccccccttacaccagacaatgcaccccgggggcccatacccccaggccaccgctgggggactcccagaccttagaagaggactgtgccccaagaaagaggggcctccctcggagagtgggaatttttagggcccccaaagaggggcccagagaatatcgctgcttggatatctttctagagcaaaatatcttctggggagaaagtgtttctctttggattccaataagaagattcccctcttagatttctttcccacgccataccccacttagccttagtagtgcctgctcacccaccccgcgtctgtataaagttaaggagtgaacaaagttgattcttttgcttccttttagaaacaataaaggatgttttctcttgcttaatagagtcaatttcttagaaagcgcccattacttaaaggtgataataattatttttttcccaaatagcttattttttttcgtggcccaccttgataattatcccgccagctttgatttctgtataaggaatcacttttcagctttgggccgaacccgaggccggggtcccccccaaattggaaaacccaaagtgggtttggggtcccggaacttttttttttttgttta

SEQ ID NO: 569585 - DNA, 312 bp, Homo sapiens
actctcgactttcgtatcataggaaaatcatctcttgaattgtagaagcccccttgtctctttttggctaacatcaactaacacaatatgtaaagaagtctgcgaaaaaagcaggagatcggtatggaccagctgaggttgctcacattttaagaaaagcagctgaagaagcatggcatgctgatttacaaggaataactatctatgttgcacaagaccgaacagctgacaattctgatgacattgataaacagagtgctaccatgacttctgataatgcagatgacaaagctgctattatcctagatcctg

SEQ ID NO: 569586 - DNA, 105 bp, Homo sapiens
tagctcatcactgattttttaaaaatctatttgcatctttctctctcactggcaaacctttacttatgtgctcatgaagaagctccttgtctatttgttcctgat

SEQ ID NO: 569587 - DNA, 1314 bp, Homo sapiens
aaacattgctactactcagctctcactgcccaagtaactatcaatactctcgtgagtccaacaacttaaatatgactagtgttactacaattgagcgtttgatagtaatacgataccgtcttgtacggtactccaacgtatgatgacatcccgtaagaagccgcatgtctgaatgtcccccgatcgctgggatcatatcagtagcttgccgcagtatcgtctttagatagactagagtcgtgcctatgtggtatcaactagcggcgctactatcatcgttcgatatacttctaagcctcctctgtaactatagatacaacatagtccttaccacctttccttgttacgatccgctatgaggcatactttattaacaagcttccactctgcctgcgaagtaagagactcgtaaagatcagcatcagttgctatacgtccttcgaactaccaagcacaacaaatacgaccccttctggtaaggtaatcgaggtcgcgattgtcttcactaccaaatatcccacccatgtaaagcgtatctaaccgggtcgcatgttcactatctacataaatcctgcccgacggtacctgtgaactgttcgctgcgatctacttaatacgcgtagcccataggcacaacatacgaacatcgttacggaaagcggccacacacaacgaaggatgccgcataattcagtacagtccctgctttcgtgcaatggcaactttctaggaacttcctaacgttcccgcaacttatagtaggctttattgggcctggcacacttttccttagcacaaatggtgcacttgcggtcattcagaacaacattcgaacctttttatcacactcctcgcaagctaaatttgaatccccttcaccctgggaagcaacaaacactctttcttgattgaccttatcttgaaactctaacctgatgtacactcccctgggaatctcacccaatttattcaaacttcccttcaccttacatcataccatggatatcttcaacaccaattaacttaatgtcccacaatgcagccccatattatgctaccgccttacttaacaactaaatttgcaacacccccacagtaactaaacatgttggacggacttccatcgatccacgcacagaccaagccagttaatctatacacaattacaataagcccttacagatttcatcaactgtaagaacacaacctcaccgcgtccatctgattttactttaccagtccctatatattcccccccaataatcgtcccatcgcatatacccttataaacccccgaacacatacaattaaccg

SEQ ID NO: 569588 - DNA, 1265 bp, Homo sapiens
aagataggcgtgtccccttgcacccaagttgatgtcacaggcctcgattgcatacacagtcaactgatccgaggaatgactcgtgggtaaaacataatctcaacacgtgtgtcttaagaggtgaggttgggcatgcaaaacaattacattcgatgtacaggtgtgtttgggacgctgggctctggtgtcgtgtgcatatgactaatcgtcgaggcagttgacgcctagggagtcgctggaacatgtcacttcgtaggatcgtcactgagactactgggacatcagaggtagtaaatgctcgtggtgctgggaagacattgtgcgaggtctgctttataccttctactaactatggtaagaaatttgttggcaagtagtatctgacattactattgatggattcgtacttatcacattgtatggaggaaggttagtaagccttggtgaaaacctgatgactttattgcccagtgagagctgtacgttcaagaaaaactaattacttagttattgcctaaaactagaaattggtccaaagtggtggccaattacaagtacatcacttttacttaaacacctactaaactagggtgcaaacgctacctatgccacccctgtatactttggccatatcaaatgccacgtccgtaagtgattactctctggacctttctagggcgagctacccatggacattggacggctccactagcttaaacccccatccgtgaatgccttcccatgctgggcataccacacctggttcactcaacccgtggcttcagtaccttcgcactccctggtggcgctccttgttaggcacctgctgccattgccctacgccttccaaactcggtcccagacctttcccccctcacaatttagccctcgcgggctcccttcctttcgcccttatttcccactcccctctcagcacacacccctagcactcaaaacgggcgccacttgcccccacgcaccctctcgcacaccagcgtcaacctcccctcttgcccgcaaaaccggcgccccccacccagaatgacccctcagaccgcccgccctcacccccccccgcccctcctccccaccggacccgccccaccgcccgcgtcccccccccccctatcaccagccccccccttcctccgccccctctccagcacagccctccaccgccccctctccgtctcccccccgcctccactctcccacccccccacccccccccgcccctcccccccctccccgcccacccctccgcc

SEQ ID NO: 569589 - DNA, 657 bp, Homo sapiens
  misc_feature (1)..(1): n is a, c, g, or t
  misc_feature (70)..(70): n is a, c, g, or t
  misc_feature (118)..(118): n is a, c, g, or t
  misc_feature (133)..(133): n is a, c, g, or t
  misc_feature (157)..(157): n is a, c, g, or t
  misc_feature (179)..(179): n is a, c, g, or t
  misc_feature (186)..(186): n is a, c, g, or t
  misc_feature (203)..(203): n is a, c, g, or t
  misc_feature (207)..(207): n is a, c, g, or t
  misc_feature (218)..(218): n is a, c, g, or t
  misc_feature (224)..(224): n is a, c, g, or t
  misc_feature (231)..(231): n is a, c, g, or t
  misc_feature (263)..(263): n is a, c, g, or t
  misc_feature (267)..(267): n is a, c, g, or t
  misc_feature (291)..(291): n is a, c, g, or t
  misc_feature (305)..(305): n is a, c, g, or t
  misc_feature (332)..(332): n is a, c, g, or t
  misc_feature (348)..(348): n is a, c, g, or t
  misc_feature (352)..(352): n is a, c, g, or t
  misc_feature (354)..(354): n is a, c, g, or t
  misc_feature (398)..(398): n is a, c, g, or t
  misc_feature (414)..(414): n is a, c, g, or t
  misc_feature (479)..(479): n is a, c, g, or t
  misc_feature (503)..(503): n is a, c, g, or t
  misc_feature (505)..(505): n is a, c, g, or t
  misc_feature (507)..(507): n is a, c, g, or t
  misc_feature (509)..(509): n is a, c, g, or t
  misc_feature (514)..(514): n is a, c, g, or t
  misc_feature (516)..(516): n is a, c, g, or t
  misc_feature (521)..(521): n is a, c, g, or t
  misc_feature (527)..(527): n is a, c, g, or t
  misc_feature (530)..(530): n is a, c, g, or t
  misc_feature (549)..(549): n is a, c, g, or t
  misc_feature (595)..(595): n is a, c, g, or t
ntggttctggtgccatactttgccttccacgttggcacggggctcaccgtggggtttggtagcccgggcntggtgggggccctccaggtgggggttgtggtggggtgctcccaaagcnaggttgttgtttttnggccacacagcaccccgccagttngggggatcatagctatgaattnagctggncataaaaggagctggangctnctagaggagcntaaacnaaagggnatccagagataaaggatgtcggctagaatgtncagnaggggcccaaagcgggttgaagtngggtacagcagtcnaagcaacaagaggaaaaagactgaaanaaaaaaaaacaacaanaaantncagttgaggttggggccgacccaccacccgaacgagcccctganggggcctgggcttcanctgtactgcttttgtgtggttcccaaagtctgcaaagactcctagctctggggcccagtgcgggnatccaggctctctgctgcctccantnangnaccantnggccnactcancanctacctcagcctcacccanatgctctgccagccgcgtcacacacgggcacccagtgccacccaanatcgcaggtccaggtgccgctcggttactgaagggtgtgaagcccgggggtagtcatccagc

SEQ ID NO: 569590 - DNA, 187 bp, Homo sapiens
gaaggaagaagaaagtaagaagaaggagaagacggtgacgaaggaagaagaaggagaaggaagaaggagaagaactaagaagaagaaaggagggggagaagaaagaactaaggagaagaagatgaaggaggaagaagaaaaggaaagaggaagaagaaagaagaaggaggaagaactaagaagaaga

SEQ ID NO: 569591 - DNA, 245 bp, Homo sapiens
tctacaggatctttgcggcatggtctgtacagacgggagtatcaccgtggcgggagtgcagcgtgctgactggtgaacggctgctggagggatggcactgggcccgtgaccgcggaggacagtggccgctctgggcggccgtagtttcttgacatccaggtctgcgtagtcacaccttggtctatgtctggattcgattatccatttcgcccgattgacgggatggctacataggccccttgctg

SEQ ID NO: 569592 - DNA, 175 bp, Homo sapiens
agctccggcacgactgaattcaggaggtgagtcatcgtctcgctcatctgggagcctggcttgaccatgccgtggcactgggctgttcaagtctggccttagggccggtcttttcctcggctagccacggctacgacaccttggactacttcactatcgaccctcggctaggcga

SEQ ID NO: 569593 - DNA, 589 bp, Homo sapiens
  misc_feature (12)..(12): n is a, c, g, or t
  misc_feature (41)..(42): n is a, c, g, or t
  misc_feature (101)..(101): n is a, c, g, or t
  misc_feature (106)..(106): n is a, c, g, or t
  misc_feature (108)..(109): n is a, c, g, or t
  misc_feature (113)..(113): n is a, c, g, or t
  misc_feature (115)..(115): n is a, c, g, or t
  misc_feature (126)..(126): n is a, c, g, or t
  misc_feature (144)..(144): n is a, c, g, or t
  misc_feature (147)..(148): n is a, c, g, or t
  misc_feature (150)..(155): n is a, c, g, or t
  misc_feature (158)..(158): n is a, c, g, or t
  misc_feature (161)..(161): n is a, c, g, or t
  misc_feature (172)..(172): n is a, c, g, or t
  misc_feature (175)..(176): n is a, c, g, or t
  misc_feature (180)..(180): n is a, c, g, or t
  misc_feature (183)..(184): n is a, c, g, or t
  misc_feature (188)..(189): n is a, c, g, or t
  misc_feature (200)..(200): n is a, c, g, or t
  misc_feature (208)..(210): n is a, c, g, or t
  misc_feature (226)..(226): n is a, c, g, or t
  misc_feature (234)..(234): n is a, c, g, or t
  misc_feature (468)..(468): n is a, c, g, or t
  misc_feature (517)..(517): n is a, c, g, or t
  misc_feature (519)..(519): n is a, c, g, or t
  misc_feature (549)..(549): n is a, c, g, or t
  misc_feature (578)..(579): n is a, c, g, or t
  misc_feature (586)..(586): n is a, c, g, or t
  misc_feature (589)..(589): n is a, c, g, or t
ttttcctgaaangtaatcattgatgcttgaatgatagaatnntagtactgtaaacaggctttagccattaatgtgagagacttagaaaaaacgcttagagnggacnannaaangngcctaaatgantttcgcagtaactggtantcnngnnnnnnccnacntaatacacagnaanncagnacnngtannctattatgagnttagcagnnnttgggagtgaccagcnactttgangtttgcactaagattttatttggaatgcaagagaggttgaaagaggattcagtagtacacatacaactaatttatttgaactatatgttgaagacatctaccagtttctccaaatgccttttttaaaactcatcacagaagattggtgaaaatgctgagtatgacacttttcttcttgcatgcatgccagctacataaacagttttgtacaatgaaaattactaatttgtttgncattccatgttaaactagggtcatgttcagcttcattgcatgtaatgtngncctagtccatcagatcatgtgttctggggngtgttctttattcaataaagttttatttnngtataancan

SEQ ID NO: 569594 - DNA, 371 bp, Homo sapiens
  misc_feature (55)..(57): n is a, c, g, or t
  misc_feature (250)..(250): n is a, c, g, or t
  misc_feature (299)..(299): n is a, c, g, or t
  misc_feature (301)..(301): n is a, c, g, or t
  misc_feature (331)..(331): n is a, c, g, or t
  misc_feature (360)..(361): n is a, c, g, or t
  misc_feature (368)..(368): n is a, c, g, or t
  misc_feature (371)..(371): n is a, c, g, or t
gaaaaataaaactttattaaatcaaaaaaaaaaaaaaaaaaaaaaaaaaaaaaannntcgggattcagtagtacacatacaactaatttatttgaactatatgttgaagacatctaccagtttctccaaatgccttttttaaaactcatcacagaagattggtgaaaatgctgagtatgacacttttcttcttgcatgcatgccagctacataaacagttttgtacaatgaaaattactaatttgtttgncattccatgttaaactagggtcatgttcagcttcattgcatgtaatgtngncctagtccatcagatcatgtgttctggggngtgttctttattcaataaagttttatttnngtataancan

SEQ ID NO: 569595 - DNA, 925 bp, Homo sapiens
atgcactgaccaataaagtgctctgctttgggtgtgatgcgagcacgtactgtggctgtcatgagtgatcctcatgcggcccatcctaagtggacctacagtttctagagactgctgatatgtaacatggcggatatccaataacaagatctcatggtcctcatgtctcagtatccaactatcattgagccagatggtaccatgtcatgacgacgaggtcgcatgtcgccgagtacctggcaaaggaacatgcaagatcagccctgaacgaaatcagaggggttctcatcatggggatgaccacgattgatttaccgtcagaagaagtctttcgacgaacacagtgagtagagctggcgtgcttctttctaatgtcgagggcgtagagatatacacgaaaaagaattcgggatgtcatgaacggaagcaagggttcaggcagaggaagcggctggtgagtataactaggaagctggtgagttctggagaggataagcttaatgaaggaaatgaaatggtggttgatattgcgaatggtgtcttaaagaaaaagatagtagtactccaagaggagtgtgaggaaggggatagtgtgcgaacttgctacaagagctcagagagtggtgtagctcaaaaccgttccctgggcaatttgtgtgctgtcattggtttgcatgccaggagtctcaaagggatgagaaagtgataattgcgtgcacctgttattatagagatataggggcaagactattgataaagtgaagctcagttggtccttaggcgaaggctgggatggcagtttgtttgtgtaagcaagaaagaaaatcttcagaggaggtagaagataaaaaagatgagtgggttcagggaaagttccaaggtaggtggcgtgagagaaggtaacaaatcaaaagtaggaaaaggg

SEQ ID NO: 569596 - DNA, 712 bp, Homo sapiens
cagttccttgaccccagtgtactccaacaagtagatgacatacgtcaaatttacctctccaggggactcacaaaacgggagattgttgccgtggccaagccgcaaagttttctactcgctacatcgttgcgtggcccctaagcaaaatttggctctatgacacggcaggtatctgcgcctcttacaacttaaaaggtccttgtcagcttaaggcgatgccgcatgtatcaaggtaatatcagaccgctgaatctccatgctctatcctgaaatctgctcataacttaaaaaccgtcaatcccactacagtgtcaggagcaattgattctgtcccccccccgtaccaatggtgatacacccccgtttcaaacatgctagacagtcgatctgtgatttagcaatctccagctcctactgttatgatcaagggcattccatagaatatgtagtttagttcccatcctcacatctttccattcaagcaagattccataagcatccgaacgccaataaggagcgatgttcaggcctatgcacgaaaacatcagcaaatatgcatacacaggcacactaggcttcagagcggcaaagcatacagccagtaaaatcccggcctgtaagtatgggacctgtgtccatcgcacaaaagtgattaaggcattatgcttgcgatccacctcctgcgtggatgtggtaaataaaaagtgatatt

SEQ ID NO: 569597 - DNA, 349 bp, Homo sapiens
ttttggcaaaggttcagggactgggaaatgggaaacgaaaggccaaggccccccctcggtttcccccggattttaagtcaaaacaactgctgctggaaacggaacggctgctgggaaaggcatcatcgaattggagccaggcaaaaagggtgctgcaggaggtcagggagtttaaaaacctgtacaaacaaatggacctgcagaccccggtctccccccttagacaaacccccccgcccagtcagtaccggaaaagcctaatttaagggcagggtggggtttggaacttttcgggttggacaaatttttatttccgtgttgctggataaagcttttttttttcccccca

SEQ ID NO: 569598 - DNA, 781 bp, Homo sapiens
tttttttggaaacaaagtcttgctcttgtcacccaggctggaatgaagtgggtatgactctcaggtgaattgcaaccctccacctcctaggttcaagcgatctctcatgcctcagcctcctgtagcagtgtgtggacatatatggcgcttgctaccatgccaggctaatttttatattttaattaagagacggggtgttgccatgttggccaggcaggtctcaaactcctgtgcctcagatgatctgcccacctgtagcctcccaaagtgctgggattacatggtatgacgccactccacccagcccagagtttccattggtcccttaaaataattaaggctggaaaggcaaggcacaattatgagcacaactgtagctcaagttgagaagaccctcaaaaaagtcaagtttagcacctctcggattcccatagaagagcaaaacgatcctaggttcagggtacagagagccagatctgaagagtacctcgcagggggaaagtgtgctgttacaactggaggtctatagaccactttctcggggggggaactttttgttgactgacccatgcaccccacatgggtgccttagcagaaacttgcagaaggactagatcctttaaaccaatcaacattcttgtgccaattctctgtcactgtgtgtgacccctggcagatttgacctttggacctcggggggaatcgctggcccccttggggtggcccctctctcttggtgtaccacggaattggcgattgttggcgcaagttcaccggttgc

SEQ ID NO: 569599 - DNA, 175 bp, Homo sapiens
  misc_feature (43)..(44): n is a, c, g, or t
gacaacatgagtagcacagcaactcattgatgacaccgacgannccggatcctgagaggcgcgcaccagcatctcgatcgccatgctggacgtgcattccaggcgcggggcgtaggaactggccagtgctggcggtgaatcaactgagtcccgtcgggcatgtggtcgcccactt

SEQ ID NO: 569600 - DNA, 334 bp, Homo sapiens
  misc_feature (128)..(128): n is a, c, g, or t
  misc_feature (216)..(216): n is a, c, g, or t
tgagacaagatttggctctgtcacccaggctgcagtgcagtgggcgtgactgcagctcactacagcctcaacttcctgggctccaacaatcctcccacttcaacctcccatgtagctggggccacagngcgtgccacctatgcccaacttatttttcatttttaaaatttttttggagaaggagtctagctctgttgcccaggccggagtgcagtnggcgtgatctcgggctcaccacaacctccgcctcccaagtgtcaagcaattctcctgcctcagcctcccaagtaagctgagactacaggtgcacaccaccaatggcccgggctaattt

SEQ ID NO: 569601 - DNA, 274 bp, Homo sapiens
tttttaaaaaaaagtttttttttttgggcccccccccaaacatgggggggggcccggggaaacacgggagacctttgtttttttttaaaaatgccccccaaaaaccggggccaaaaagaaaaccaaggggtcgggggttgtttttcccccccttttttttccccccccaggaaaaaatttttggggaaacccccttttttttttttttaaaaaaaaaaagctcccccccgccagtttacaaagaaaggcggggcccaaaaaagggttttcccca

SEQ ID NO: 569602 - DNA, 409 bp, Homo sapiens
tggaggtcttgccaggtcttggccaggctggtcttgaactcccggactcaagcgactctcctgacttggcctcccaaagtgttggaattacaggcatgagccactgcagtagccctgattgttttatatagaagaaggtctttagacaaactcaaccaattgtcaaccagaaaatgttggaagttccctcctaccccgcccgcctttgagttgtccggcctttctggacctaaccaatgtatttcttaaatatatttgattgatgtctcatggctctttaaatgtataaaagcaagttgtgccccaaccccggccaccttgggcacatgttctcaggacctcctgaggactgtgtccacaggccatggtcacttatattaggctcagaataaatcttttaaaatatttt

SEQ ID NO: 569603 - DNA, 903 bp, Homo sapiens
cacagtggctcatgcctgtaatcccagcactttgggaggccgaagcgggtggatcatgaggtcaagagatcgagaccagcgtggccaacatgtatacatatgtaactaatctgcacattgtgtacacgtaccctagaacttaaaagtatatatatgacaaagaagtcagaggtactcttgaaaggaaagaattcagtattgcatattgtatgccacaccttgtgaaacataggtcgtgttaatcatattctagcaactgaaagtgctctaccgttgctttacctacttaatcctactcatcaaaataaggatcctgatgaatacgatatttaaggctaacgaatgtggtagagtacttctatcatttggggagaagaaatgctctatgaactaagagccaggaaagtatacagtgaagcatgaacagcactgactacacaaatgttggaccacttctggaccacaaaaaagcaaagtaagaatctcacagggacattagttaacggaacaactactattcattaacatataacagatctgtcttttcccagttagtggctaaacgatcttgcacctgaaggaaacccagatacctcaggactcattgcctctacacaagggtagccaaacttaagcttcattctctactcgtattaggtctctgttcggtggacacacattatttcctgaagaaaactgatcatcacctggactccttaaccctctcaattggtttcacaacaacaacaggagtctagccacttgaagtcctatattttgggaaccgtgcgcccttaatcaataagatcccctaagtacgtctcctaattcctaacatgcaagagccacagcactgcacatgggcaccaaccatacacacatggtttcatcgacatgagtcac

SEQ ID NO: 569604 - DNA, 1161 bp, Homo sapiens
  misc_feature (503)..(503): n is a, c, g, or t
  misc_feature (519)..(519): n is a, c, g, or t
  misc_feature (522)..(522): n is a, c, g, or t
  misc_feature (571)..(571): n is a, c, g, or t
  misc_feature (581)..(581): n is a, c, g, or t
  misc_feature (773)..(773): n is a, c, g, or t
  misc_feature (775)..(775): n is a, c, g, or t
  misc_feature (894)..(894): n is a, c, g, or t
  misc_feature (896)..(896): n is a, c, g, or t
  misc_feature (1032)..(1032): n is a, c, g, or t
  misc_feature (1037)..(1037): n is a, c, g, or t
  misc_feature (1043)..(1043): n is a, c, g, or t
  misc_feature (1066)..(1066): n is a, c, g, or t
  misc_feature (1081)..(1081): n is a, c, g, or t
  misc_feature (1117)..(1117): n is a, c, g, or t
gatatgatattatcttttaccattgcacttctagtgactgactagctatgtcgcgcatgacctcgtatcctccgtagaactgcctagaacgagaatactacttatcgcagctatcactatataagtctgagcattcgtactatatacccatcatagtatccacttgccgcgtgcatgtcaggcacaaatgttggtgctctcattgccacatactaagtagctattgcgcgatgctgcctatagcgcaggggaagggctgctgagtgcctgactgaggtctacaatctccatgcatgatgatggggctcatactgaaggtgacatcatggcataaacacatcactaccatatgtgtagaaaacttgattggtcctccataatacactgtgatggtaatcgttaggcgacttgtgctgtttaccatctctacacggaaagaaacccatccaatcatagtatgtagtacaatcgagaaccaactagattcgactccgcgaccagancataagagttgatctnagnctagtcttagtcccgtcgtcacgtgatgtctctatttagaccccacaantgctagaacnagatcaaaccgtagtcctctagcctgatgttacaccacatagcgctctttcgcggtcccggaagccaacgaacatccacatttttcccctacgcgtcaatttaacgtgataatcaaccctgcattatataaatttctcccatggggggaacatcccaattgttgaaaaaagtcccaattgagggcctagacntntggatgtccacagacggttggaatatcacaaggaatacctttgtggcccgaaccaaaccaccggatcggttcgaataggcccaatagatagcataaagtatcaatacgtcttctgttcntngcataaaccaaatttaggctttcctacaaccgttaatgatcgtgtccgctccagcgctattctgttcctctcatatgtggtcgaagccattggagaatcccaacatacccccaaaaagctaaagtgggtctggatntaccnttgacnttataaccttgggcccgggcaanggaggccaacctatncttaaactattaataaagtctccgtcttggacaaanggttgtgggctggttgtttggataatttatttcattcatagcag

SEQ ID NO: 569605 - DNA, 465 bp, Homo sapiens
agctactacctgacacagctgaccacctcacccggctgacgacccacacagcctcctggcctgggtcctcctgcgccagcattgtgtgtcaagtgtgtgtgtggctggcattcctgtgtgccgcgtgcagagcctgcaggacgcccttcggttcccaggatgccccaccacagagggggactggtccccccgagggtcctgggaagccctgttccaaccacatgccacataggtcctgttacgtgagttagaggggtgcgtgtgcttctcaagatgagctttcatcaagttcttcctccacgcgacgttggtccaattggccggtggggagtacagtgctaggtgagggtctccgctggggagcttgacacagcggggcgcaaataaagccgtcaccaatccaaacccgttctgcactgatacctcgtacaatagcaataaaaatgtgtcagcaagaacgccaaa

SEQ ID NO: 569606 - DNA, 164 bp, Homo sapiens
aatgaggtctcctcgatatgtctgtgggtctgtctgtacagtacatgctgtctcggtatgtactcctgtaatataatttgaagttggatagcatgatgcctccagctatgttctttttttttttgggctaaaaatggcctgggcaaataaggctctttaagggt

SEQ ID NO: 569607 - DNA, 812 bp, Homo sapiens
cggagatggtgtgcagccataatctcaggatgggtccacccgagacgcccattgagtcaccaaccctagtcccccgcgcggaccccattacttcgcatccggacaagactgaacagacaacaagtcatgaaaccaggaaacagactcgcccaacagcctggcaggcacaaggtgcgcacttggatgggaagaggaactgcgtcgacaaggacacagaacggaaggctgggtccactacgaagcaggccgacgaggcagcactggacagaagaaaacgattcagattcgtccctgtaaagaaagcttagagggctaaagacacatatcttcatgggatagttgtggaaagaagggctgaaaaataatgatattacaaaagcccaaagggggaaacaaaggatgaagtccgagcgatgtgtagctcgaaagccgcggtaaaaaggtgtcaaggggcaaatcagtcttggggaaggcaggaaatcgaacctgtatgccaacccatgtattaacaaggggacccagtaggcctgggagaagcacaaaacagcacggcctggaaccagaaacacaagtggcataaacccacaggccaatcgtgcaccaagcacaagccgtggggggatgaccgggcagctgacgctcctcggacccttacgagtcgtgaacacgcgcaagcacacattggtgcccggagcaggcctatcttggggacccccaacacccaacaagacctggtggaggcacttgcgccccacaacgccaaccccgaaccgtggggcccctaacaatgaggagcacgcaccgggaagcgt

SEQ ID NO: 569608 - DNA, 495 bp, Homo sapiens
tgtccagagtatccccatcaaccctaaatttattatggagcaaactaagcttcacaagtgaaggagaaataaaatcctttacagacaagcaatgctgagagattttggtcaccaccaggcctgccttataagagctcctgaaggaagcactaaacatggaaaggaaaaactggtaccagccactgtaaaaacatgccaaattgtaaagaccatcggcactatgaagaaactgcatcaactaacaggcaaaataaccagctagcatcataatgatgggatcaaattcacacatgacaatattaaccttaaatgtaaatgggctaaatgcaccaattaaaagacacagactggcaaattggataaagagtcaaggcccatcagtgtgctgtattcaggaaccccatctcacaggcaaagacacatgtaggctcaaaataaagggatggaggaatatttaccaagcaaatgacaaacataataaatttagggttgatg

SEQ ID NO: 569609 - DNA, 521 bp, Homo sapiens
atcaaatcaaaatggattagacttaaatgtaagacctcaaaccatgaagttactaaaagataacattggtgaaactctccaggacattggcctgggcaaagatctcttgagtaataccccacaagtacaggcaaccaatgcaaaagtggacaaattgcattatattgagtttaaaagcttctgctcagcaaaggaaacccctaagtgaagagacaacccccagaatgattgaaaatatttgcaaactgagaagggaatgtgaattccctatttttatttgacaggggattatttactggaatacacccttgacccaaaacactcctttttaaaaaaatctaacaggcccatttaaaaatgggccaaacatcttaaatgacatttcttaaaagaacctaccaattggtaacaggtttatgaaaaggggctttaacatcctccttctttaaaaaaattgcctgaaaaaaccttccaccgggccctttctttaccctcggctttaacccgggttttaaaccact

SEQ ID NO: 569610 - DNA, 241 bp, Homo sapiens
gtttgtaaacagccatctgcattcacaatgtatggttctctacaatcatcgttagacgtcatgagatcacatgattgagactcagtgtcatccgtattgtaatgggtgtgctctcactcatcgtagtgtacccctagaaggacgtccacagcgcacaaggtgttcgccaagcggtcgtcacgtcaccatgtaggatcatgtgggcataccactctatagctggctcgttagtgcagttcat

SEQ ID NO: 569611 - DNA, 151 bp, Homo sapiens
cagagcctctagagaagaaggaaatatgagggacaaaagcaaaactttaatacttcatctaaaatggggtcttttatgatccagttcggccggaaattcgagaaccctggttatacatgctgggagaaatcggattaaggtttgggatcca

SEQ ID NO: 569612 - DNA, 246 bp, Homo sapiens
cgcgcgatcgctcgacatcgatacgactgtttagaaggtcaacttgatcctgattcaactttggtacctggtatctgtccagaaatttgtctatttcgtccaggttttacagttttgttgagtatagccttttgtagaaggatctgatggtgttttggatttcttcaggatctgttgttatgcctcccttttcagttctatttttgttaattaggattttggtcgacgcggccgcgaatttagtag

SEQ ID NO: 569613 - DNA, 596 bp, Homo sapiens
tgagtcaagtacctagggacggaggctctgtgcttcctggaaggccgagtactagtgctcttcctcctaccctccagaagcaattccatcactcctctccttcagaaccacccttgaacaccagcgccccctgctgacatcttcacctctccgctgaagtctcagccagggtgacctgaacaagtctgcacgtcctgtccccactttgtccttgcctcgccctattcttgcaacctccaaggacttgcattccgattccaggtaaggcctcagcagagtccccactcacctcctgacagctctccttctaaactgtcttactatcaacgaacacgcgatagatagcaccaagcacataaaccaatataaagcttagtgggttaccataagagaaacacctttgacttccacgcaggtcaagaatagcactttcccagccaacccaaatgccccatgaacctggcccagctgttgcctccgatcccggcaactgtgagcccctccctgatatgaagccagctcttccttttgcttacttggtgatctttgcacccaagccccactgctgcccctaagcctctttccatggatatccc

SEQ ID NO: 569614 - DNA, 601 bp, Homo sapiens
  misc_feature (514)..(514): n is a, c, g, or t
  misc_feature (585)..(585): n is a, c, g, or t
ttactgcagtattaaaggcaaattatccttggtttaactgattcttctcttaatttttagttagaaatcctgggttctgtcaacattctccagttaatattcatggccttaggactggccaggatcatccactggccctggctggaatgtaacttttaaaatccttaaataaactcctttttaattataaaggtaattcatattcactgtccaaggcttgggacggccaggcagaagtaatagcctaatagtcacccataatcccaccatggggagataccatggttagggttttaatgcctgtgttttatccaaccagtttggatataactgtgtgcaccattttgaatcctgattttttggttttaaggttgaatcataaacattttatcatgttaataaagggcctttataaccatgactcctaaggtttaattgatccaaattattcttcaggtgcatgtttcagaccatcctctaattcctaaattatggaatttccatggttgccagngttgaatgatttttcatactggagaatataggtttatgcattggtactggctctgaagttgggaactattngggattcaattacggt

SEQ ID NO: 569615 - DNA, 182 bp, Homo sapiens
tgcacacagtgcacacacacaagcgcacagacacacaaacgcacagcaacacacacacacacagcacacacacgagcacacagcacacaaacgcacagcacacgcacacacatgcacacacagcacacacactagcacacagcacacacacaaagacacagtacacatggaatgcacacaca

SEQ ID NO: 569616 - DNA, 491 bp, Homo sapiens
tcgcggctctgccctgcgttcccgggatttctgctcctgcctgggccccctcccggcccctagccctgggttgcacctggatctgggctcaggaaggtgactttctgcccagggtcagctcttcatgtcttgtgagccctgtgaccttgaccgaggggcctccatctgcatgtcggcgtgcacatctgtgaaacggagctgcagctcaggcagggtaaggacgtctcgccattgactcacctggtgcaggtcttgtctgctgcctcctcctgctgggacttcactccagcctctagtgtttctaggccccagcatggcagaggacagagccttgggctcagggattgctgacgcggcgatggtgccgcctgttaaaacgaggttcctgcacctgcctggacacctgaatgcacctgctcacaccgtgcccttgccaggggtcatgagagctggggcagcctttgctgggcttctcctttagcttgggggtg

SEQ ID NO: 569617 - DNA, 420 bp, Homo sapiens
tcgcggctctgccctgcgttcccgggatttctgctcctgcctgggccccctcccggcccctagccctgggttgcacctggatctgggctcaggaaggtgactttctgcccagggtcagctcttcatgtcttgtgagccctgtgaccttgaccgaggggcctccatctgcatgtcggcgtgcacatctgtgaaacggagctgcagctcaggcaggggccaagattcacagagatttgcctctgcatgctccctggaaatggggtcagcaaggaccaagatacagaccccagggaagatggcgacctccaggtccaaaaggaagagcagaaaattcatctccatggcaacgccttaggaagctgcagcctcaagattataacttcccaagcaatgaagacaataaatggatttttcacaaaa

SEQ ID NO: 569618 - DNA, 106 bp, Homo sapiens
aggatttccggcagaaggtcctgtgtgtcctggacctttaggatctgagagtgacttcgtaccttcttgtgctaaggcctacagcctacgagcatctactgttccg

SEQ ID NO: 569619 - DNA, 124 bp, Homo sapiens
aatgtgtcgaaccattgtgaaggctaagacagcaagctgcagaagcaaataagaatgcgagtattcttttaaaggactcgatcttgaaagtcaagagagagagcagaaagcaggctcttcttct

SEQ ID NO: 569620 - DNA, 254 bp, Homo sapiens
aatacaggactgatgcattctactgggtcactatcgctgtcacaagacacagacaatcagaccaaagtattgctgtaataactaagaaaaaagaagaaaaaccacttgactataaatacagatatcttcgtcgtgtccctatacaagaagcagatcagagtcttcatgtggggctacagctatgttccagcggtcaccagcaggttcaacaaactcatctggatacatcattctagtcacatggccactcacta

SEQ ID NO: 569621 - DNA, 474 bp, Homo sapiens
ctaccgggaagccagtcttcacagggatgtaggagaaggatgatgcggattttgtacatagagtagaagaggattggaatcgagactagaatggggacgagtggctcgcatagggtcctggatcttctctccctcagcatctgtgcccatggccaggtcctgctccactcgggagagtttgtctacggtgccatggtaatgcttcatacagtcctcagcaaggggcagagtgggtggagtacgtgctgagctctttctggtactgaggcatcttcgttcagcatcggggacaggtcccgcatggtggtcttctctccagtattcattctcttgctagaagaaaaatctttcagagaccgggtgacttcctgggacacctctgcgatgtgcttgtggcgcagtgctatccacaggtcgtcgtcctcgtccaggagcacctccttcacccgtgccccccctatacagcgaccaggg

SEQ ID NO: 569622 - DNA, 148 bp, Homo sapiens
  misc_feature (61)..(62): n is a, c, g, or t
  misc_feature (69)..(69): n is a, c, g, or t
  misc_feature (82)..(82): n is a, c, g, or t
actctacaagatcccctggtagcgctcgggttagcgaggcttgctagaagtcatcaaaaannctattantgggagtagagtntgaatgtccttgagcacaggcattatgatcgcgactcgtcgcagtagcagtacgtatttcgaatcc

SEQ ID NO: 569623 - DNA, 220 bp, Homo sapiens
aagttggcgtgcactgggagagctagactagttggtcatgatgcagagctactcaaatgcagtcggctgttctgggctctgccctaatccggttctggattctaagttcaaggtattctacgcgagagccaggtaccaataggtgcgctgcatccagacagtaattctgcaaactgccttgagaaaaaggaccattgttcgaactacttacggtaattcc

SEQ ID NO: 569624 - DNA, 186 bp, Homo sapiens
ttgacatggttgggactctgaaccagcacgttccgagacggccggtccctgtgtacgaaccggacatcctccaggtagctcatccccttagcaatctggattctccagttcagcaggtcctgggaacccatgcgtacgcggttttccgggccatggtctaagaggcagccctagggcataagctga

SEQ ID NO: 569625 - DNA, 832 bp, Homo sapiens
  misc_feature (649)..(649): n is a, c, g, or t
gtagaattctggtctaattgatggtcgcctcaccatctgtacagtctcctgttgtctttgccatagtgtgcttgatttgggattatatgcacccctttccagagtccagacccgtttggctttgtgtgtcatatcctatttagtgctgatggggattctgaccatttatacctcatatgaggagaagagcatctttctcgtgtgccctataggtatagatcctacgaggcaatggatcctgcactgcatatttgggtagtctgtctctccattcttaccaaggtttgatgacgggatactaccttggagctgaccttcatcgagtggtgagaacaaatgcagcagtcggggaagccgtgttcccaaagtccatcgcgtgaggtttttatgaccactgagtggtacattggtcgatggcatgcatatgagccttgtagatagtccaggctcgcatgacagtctagccatcagaaagagaactttacgtatctatgtctatgagtagccctctttctcctggcatctatgctgaataagtaggctgggggggtagggggagatacaaacgaaggttaaaagtgggtcacagtcaggcaaatcgttccaatagtccctgtgtggtcctgaaattctagtctatgctgggtcncgtaggattgcctgaccatcatatgagaacgcggtagctctgatgtctagctggagttccttgatcggtgatgggctattaatggcttactgggaaagcagtttggctaacagctgtacagacttttccttgtacctagcagtaccttatatagtaaagtttggggccgttacatttaagaat

SEQ ID NO: 569626 - DNA, 857 bp, Homo sapiens
  misc_feature (152)..(152): n is a, c, g, or t
  misc_feature (409)..(409): n is a, c, g, or t
  misc_feature (627)..(627): n is a, c, g, or t
  misc_feature (698)..(698): n is a, c, g, or t
  misc_feature (700)..(700): n is a, c, g, or t
  misc_feature (707)..(707): n is a, c, g, or t
  misc_feature (714)..(714): n is a, c, g, or t
  misc_feature (717)..(717): n is a, c, g, or t
  misc_feature (719)..(719): n is a, c, g, or t
  misc_feature (734)..(734): n is a, c, g, or t
ggtgcagcttcaagcttaggaccacccaccatgcctatccaggtgctgaagggcctgaccatcactcattaagaacagaggaggctgcctgttactcctggtgttgcatccctccagacactctgctgtttcctgcctaggcgtggctgcangccatggctaggaaagcgctgccacccaacccacctgggccagagctggttctgctcctgctgcagtggacactgagctggctatctcggcgcttcgggcaagaactgcaacaggctctcctgggtcctgcaaggtgtacagccgggcccctgccttgttgcctcagctctcgagagtctgctgctgccgggtgacctgatctcaacctgataaggtgccatcttcaggctaccactgcaatggccctgagggcaancagcagcacggcactgcccacccggctgctgatggcctggtgccagctgggagtcctcccggcacttcgaggccactgagccagcccttccatgccccagcccaccatggacaggggtatccagcttcctcctcaaactcgtcctctgcccctgagcctagtgacgcccaaggtacatgcctgttacccaggtcctgtaccagcactagctggtcaanggcatgacagtgctggaggccagtcttggagatccaggccatcactggcagcaggctgctctccatggtgncnggggccncaggcancangntcatgctgggacccnaccagtgcacaaggacttggctgcttgagccacacacccgggagaacggtggataacgtggggcttaccaagggcttccttgcagataaggggacgagcacccccgatcccctattgtgacca

SEQ ID NO: 569627 - DNA, 429 bp, Homo sapiens
  misc_feature (11)..(11): n is a, c, g, or t
  misc_feature (17)..(17): n is a, c, g, or t
  misc_feature (38)..(38): n is a, c, g, or t
  misc_feature (63)..(63): n is a, c, g, or t
  misc_feature (103)..(103): n is a, c, g, or t
  misc_feature (176)..(176): n is a, c, g, or t
  misc_feature (226)..(226): n is a, c, g, or t
  misc_feature (240)..(240): n is a, c, g, or t
caagcctccanccccgncccatggacccctctgaaaanctcccatctccctaggaattgctanactctgacacaaacatttactgctggatcgacccacaaancagatgtggcttccttaggttcctctgggagctgctcctgtgggttgatggaacgtccctgaaagcccccagncctggggatggggaaggacatggagcctgagccagagaaccagctctgantcctgaggagacanaggcctggggacaggaagggatgggggtccctgctgaatatatagagacctcaacagactccccgggctctgggtggccaaggcgaagcttcccatcaccacagaagtggggcttgcagggaaaagtgaacgtatggccacccggggtcacctggaaaggatctgaataaagggaaacttcctctcaaa

SEQ ID NO: 569628 - DNA, 1681 bp, Homo sapiens
cgggtggggcttaccgtggttgttcgctcgtgtggtggctcgtgggcttggttgggcgcgcctgcggtcgacctcgccgcttcgttgccgtctcctcacgcgtcgtctctctgtgtctcgggggctggcgggtggggcgttgtcccttgagcctggcccctccgtggtgtggcggtgctgtgttcttctctcgctttttggcacctcctccgccgtcggtttacggcatggtgtctcttgcgctgtcgtccctcctcttcgcttctttctgtcgtccggcgggctacgtggtggatttgccgctcgcttcggtctctgagttcgccccgcccccgcgcagtcgttgtccggtgagctctctgcgtcctcccctcggcgtccgtcggccctcgatggtggggggtgcgtgcgtggcttcccggtcgtcgctctgcctgcctccttcgaggggggtcgggtccgctccgccctcccgcgtccgccggccggtgggtggggtggcgctcgcgtggggggtcgcgtgtctgcctcggcctgccgggcggtgggctcctccccccgctggcgtctgtgtggtgggtgtgctgtcgtgctctctgcctcgttgccttgtgcgccgcctgtgtcttgtggttgggcgggtgtcgtgtgcgctctctcgctccctgcgtgtctcgctctctcgctcccctcttccgcgcttgccgccgcgcccgcgcgcgctcggcgtcgctgcgcggtagtagaggtaatgcctcccgctgcactcgtcggtgggtcgctggtgcctcggtgtcctgggagcgccggctctctgtggtccgttctgtctccccgctctcctccttctctctcgtctctcgcgcttctcgcgctcgcgcgcgctgcgcgggctctcgtctgccttcgcgcgcgccccccgcgtcgctcttgttgcggcgcgtcgttctccctctcccgtctctcttggtgcttctcgtgtctctcgtgctgttggtgtcgcgggtgtgtgtggtggttggtggctcgtcgcgcgtggttggctgttgcgtcttgttgtgtcgtgtgtgtgtgtgtgtgcttttgggtcctgtttgtgtgttggttgagtgagtgcggtgcttctgttcgcggggcgcgcgctctcgctctctcctcgtcggctgtggggggtgtggtgggttgttgttcttcgctctctctccgtcgccgcggcgcgcgcgcgcctgcgtggtgtgtgtgtggggtgtgttgtgtgtgtgtgtggcgcgcgcgccggccgcgacgtggtgctgtctctcgctctcgccgcgtgtgtgtgtgtgttgctgctcccgctcggttcgtcgtcgtcgggcgcgccgcacgcccgcccctgctccgctctcccctctccctccctccgctcgttcttcctgtgttgtgttggggtcgcgccccctgcgcctcgcttctctttctcccgccccctcgccgctgtgttgtcctctctcgctctctccctctcgcgcggtgggggtggctctccccctcctcttgttgttgttgtgtgttgtgtgtgtgctgttgctgtgtgaagaataataggatatacaaactaagatgtaaataaaaaataaagaataaaaataatattaataaaataataataagaaatgaagaaagataaagaaagagagga

SEQ ID NO: 569629 - DNA, 676 bp, Homo sapiens
  misc_feature (152)..(152): n is a, c, g, or t
  misc_feature (409)..(409): n is a, c, g, or t
ggtgcagcttcaagcttaggaccacccaccatgcctatccaggtgctgaagggcctgaccatcactcattaagaacagaggaggctgcctgttactcctggtgttgcatccctccagacactctgctgtttcctgcctaggcgtggctgcangccatggctaggaaagcgctgccacccaacccacctgggccagagctggttctgctcctgctgcagtggacactgagctggctatctcggcgcttcgggcaagaactgcaacaggctctcctgggtcctgcaaggtgtacagccgggcccctgccttgttgcctcagctctcgagagtctgctgctgccgggtgacctgatctcaacctgataaggtgccatcttcaggctaccactgcaatggccctgagggcaancagcagcacggcactgcccacccggctgctgatggcctggtgccagctgggagtcctcccggcacttcgaggccactgagccagcccttccatgccccagcccaccatggacaggggtatccagcttcctcctcaaactcagtacatctgacccctgaaagacatatgaacacccaaggaccatgcctgtatacacagagtccttgtcacaacactagctgggtcacgggcatgaaagtgctgataagcagtctggcacatccaggc

SEQ ID NO: 569630 - DNA, 1383 bp, Homo sapiens
  misc_feature (338)..(338): n is a, c, g, or t
ggagtgccgagtgtcatgcacgaacacattgaggatcgctggcgcctccgctctcatgagtacgtgactcgtaagccgggcattcctatggtgcatttggagcacagcaatgaaggaggcctctctagtgtgtacctgttaggtcgtatcgatgtgtcgcacgatggcgtacagaaacgtgtgcagactgtgcgtgtactgtctgttgtctaatgactggttggtgctgttcaacctagagggtatcttatcagaaggagcgttcgagaccatggtggactgtgtacctggaaccctcaacaagatagttgcctgatatagagctggatactgttgantcgtgagtcgcgtgagaagcgttgtacattgagtagatggcgatgtggagcctgaaggggagtgtccatggaagctagaggccggctggccatctgatgatacagcgttgccaatacaagtttgggaccaagcggggtttgttaaactcgagggatactggtacaatgcccatgcatacgggtttggcatcagcgatctgcgcagcttctccctgtaggtttgccaagcgccttaaatacgagtaatgccaccagtgagcctaaactgtggaggcgtggacgcgcacggttattgagaaacgcccagcagaaacttgtgcttgaaacctgaaaggaaaccactgtgagacccacggggcatagaacttaacgttggcctttcccaggttgtgatgggacgaaccgggggttgtggtgtcttgggagatggcgcgtgggtgagttttgaccgattacaacttcccgggcgagaaaaaaccttgggaactccggtagacgccgctgaaatggacattcaccagcgatgggcacttggagaatgtggaaagaatttaattggcaccattggtcgcccagagtgtacacgttttaactgtatgcttaagggccggtacatacggtgagtgtaccacacggcaagagacagtgtcggtgttgatgatttgtgggatgatacacgacgcaaacaccccttgcaacttgaagttaccaaacagtgtgctaggtggactaggacacacataatgacgaccaaagaaggtgtggtctatgaggacacactattcggcacaccctgggaacgcggcatgtgcacttggaacacttcgtgtggagccacagggcgctagtgagttcccgttgattgcgacaacgcttggcaggaaccgattgagttttgggccaccacaccggggggaaaagatcgtttgcgcgccaatgggttgcattcgacgggcagacacgttgaaaacgacatcctgttgatacccctttccctagaaggaagtgatcggaaacagacggaacactttatccgcggaaaggg

SEQ ID NO: 569631 - DNA, 182 bp, Homo sapiens
  misc_feature (98)..(98): n is a, c, g, or t
  misc_feature (128)..(128): n is a, c, g, or t
  misc_feature (152)..(152): n is a, c, g, or t
aaaaaaaaaaaagaacccccccccggggggggggggggccccccccccccccggggcgcccccccctccctttttaaaaaaacccctttttaaaaaantccctttaaaacctccctaaaaaatttaanaaagcccggggggggttctttggncgagaaagaacgacacgaagggaagctgac

SEQ ID NO: 569632 - DNA, 660 bp, Homo sapiens
tccaggagacgctgagctgtggggaggatctgagggagaaagagacggaggcaggcagaacacggcctaggtgaacccatggatggcctgggcactaagcaggaaggcgtgttatgcgtgcctggccgcggagctaagttgcagagaggggtgtgcacgacctacacccaccgtgctagagggagctcacgtgatgaggtactagagcaaactttgtgcagcgtggtcccctctgtagccagggacagggagctctgagactggggctcgcagagcagacgtgcagagagcgttgtggtatgctggaagagacagatgtgccactgacgtgtggtgcaccgatttggccccatgccccacagtgtacagctgcatggaagtgacccgtgcagcggtcaaacatcacagccacgttgtaggcccctttaggagggaccatctgaggtggcaccactgtagcactcaggtggaaccctatctgcaatgggtccttcacagcccgcatgcggaagagctgatcccctcgctgaaactcatccgcactgacattggccaggcacgaatacagccgaatgtcctcttcattctcagggaagctccaaaaagcaattcggagctgtagctgctcaggcactggtgggtaactttctccacacttca

SEQ ID NO: 569633 - DNA, 379 bp, Homo sapiens
  misc_feature (46)..(46): n is a, c, g, or t
  misc_feature (130)..(130): n is a, c, g, or t
  misc_feature (140)..(140): n is a, c, g, or t
  misc_feature (148)..(148): n is a, c, g, or t
  misc_feature (223)..(223): n is a, c, g, or t
  misc_feature (254)..(254): n is a, c, g, or t
  misc_feature (345)..(345): n is a, c, g, or t
  misc_feature (365)..(365): n is a, c, g, or t
aggccttgcttttttcaccacgtgaggacacacctaaaaggtgtcnttctatgaaccaggaaaggggcctgaaccagacactgagtcttctggcaccttgatcttggacttccaagcctccaggagtgtnaagaattaantttctgtngttttaaagatacccagtctatgatactatgttacagcagcctgaaacttgcacttttaaacaaacatagcaatnacaaaatctatcctctgacttctggctttancttctgcttcagtacatcctctcctcccaaactccgctactgcttcttcaaaaacacttggggcaaggcaaaccaactttgccccacagcntactccccaattccataacnattatggtaatttc

SEQ ID NO: 569634 - DNA, 250 bp, Homo sapiens
cacctacaactgagaagttagaaacagccctgtccagccagagatggctagtgcttcatccagccaaagaggtcgacgtggtactggaaactttggtggtggtcgtggaggtggtttcggtgggaatgacaacttcggtcgtagaggaaacttcagttggtcgtggtaggctttggtaggcagccgtggtagatggtggatactggaggcagtggggatggctataactaggattaagccgaggtggaga

SEQ ID NO: 569635 - DNA, 950 bp, Homo sapiens
ggccggaggggctctgctttcctgtagtggcgctgttgggcccgtggggattgtaagctgtggtttgcggtgggaagagcggcgagagggtcgcatgtgcgtcgggatccccgcgacggatgaggtgtctgccaaagaagtctcacccgtgtggggtgaggtgttgcagtctcccacaggatgagatctggggatctagcaatttggggaggcagcagacctgaggcgtcgcttgcaagaggaggaacaagcaggcagtcctgggagacttactgggtgctgggacaagaaactgagcaatactggtccgcctagttggctacgcgaagacttcaccagatcaccctctcacttcggaaccgggacaactcgcaccgcggacacttcacctgaatagcctgggcgtctcgatatcaccgcaaacgttcttgcgcgggcacacttagtccaggccggctcaccggcgcaccgcttggcggaactgggccttcaggagcaggtcagaagaacccgttggatggaagcaagtgttgatcggtggcgctgcagcatgctcgcttgatgcaccgcatgatgaataccgacctgggtcctggacaggctcccggcatgaattctggacccccgatacacgtctatgagcacaggatgacatccggtggcagaacactccaaggctggtgagccgcctgattgagtggaggcatcccaatacagcagcagagtgcaaaatgcgcttataacggtgcagtgggcactccagggttcattagtcccaagagggctggcttggttttcaaagcgaccctgttgttcaggcacgggagcaggttatggaccacacatggatatatttaaaagggcgttagctataacgccgtggtcaacgcgggtaacattgcgcgcggaacatgccgcgcggtatcagaatctcgactgtttagcacacc

SEQ ID NO: 569636 - DNA, 237 bp, Homo sapiens
ctctagaggatctccttcgaggtgtactgtgtagaaagaaatagacatgggagactccattttgttatgtactaagaaaaattcttctgccttgagtattctgtgaccttacccccaaatcacgctgatgctcgcatgataacatgtgctgtgtctaactcaggttacattggattaggggcggagccagctgtgctttgtaactctagatgcttcaaggcagcttgctccttaaga

SEQ ID NO: 569637 - DNA, 197 bp, Homo sapiens
gcggcgggcgggctggacggcacagagtggagggagcgagcgagcagtgagtaagccagcaagggctggtcgggtcccgaggtcagccgagatttctcagtgtccctccgtgccccctccctgtgagtccacagcgcctaccgtgtgtccagaggatcggacacggccctggccctggccatggcctcgttgcttga

SEQ ID NO: 569638 - DNA, 437 bp, Homo sapiens
  misc_feature (219)..(219): n is a, c, g, or t
  misc_feature (295)..(295): n is a, c, g, or t
agtcagagacgcaaattaacgagtccaggcgtctgttattattgcctatgcaaatcggccaggccgcttgacatagtcgtatatacacgggacgcacaaagccaatgctcggtaaaaacctacccctttcagaactagtccacgatcccagcatcaattcgatagctctcggaccatttggtacagtcggcgacatccatgccgatacagtgatcatgnctggacggcaatggtcttgatcatcgtagggtgtgcttcggtatccagcaatctggtagtccagggcgcaggcggncccgggcaggcaatacttgagagtctttacactttcgtagctgatattgcaaagggcgcgattggcgaacacagatacaagacctatctgcccctgctctgcgctatgtttacatttatactcggctccaaccttctcggta

SEQ ID NO: 569639 - DNA, 505 bp, Homo sapiens
  misc_feature (9)..(9): n is a, c, g, or t
cattgaatnccaatcgcatcgggtcgcgcgccatcgcgttgagacctcggaattcggccattatggccgggggctcaaagaggaacttgaacatttccactctagacactggttgccagaaactgattgaacaggccaaataacgcaatctacgaactttcaatgagaagcgcatggtcacgaacgaagctgactgagctatgggaggaaaatgcaagggatatgtggcactaagcagatggacgcaactacagacacggtttccgcactaaacaaggacgtgttgacccatggcagcgaaaggctgatactgaatgagggcaaactgtgagacaaaccaatgagaactgtccaaagaaatataaaattggctcgtgaatgcattgtcaaggctgatctgagcgaactacttggttattgtggacagatggatattcctggactgactgattctacactgcctcgacgtcttggatccagacgagcttgcagcatacttggcttt

SEQ ID NO: 569640 - DNA, 875 bp, Homo sapiens
tgtggtgactcacgcctgtaatcccagcaccttgggaggccaaggcgggtggatcacttgaggtcaggagttcgagaccagcccggcaacatggcaaaaccccgtctctactaaaagtacaaaaattagtcgagtgtgggtggcgcatgcctgtaatcccagctactcggaaggctgaggcaggagaattggcttaagcccgggaggtggaggttgcagtgagctgagatcgtgacactgcactccagcctgggcaacagaccgagaccccatgtcaaaaaaaaaaaaaaaaaaaaaaaaaatttgtggggggcctgggcctggaaaaagtttctagaaaaacattcgcggtgggggcgcggccggccccgagtagggttaggtgtgacaccgggcacaagagcgggtgccagaggaagaaccggcccgggacatacggggggctgggttcctccacccaaaaaaaaaagcggccgggggcgacacgggggggtgtcgaaccaatcccgagaggggctcgcgagggcactcacgggggtccaccaccagggaggtccaggggaagctcgatttaatagccgcccccggagggggtaacaacgtaccaagagcacgacagaaaccacagaaaccgcgaccaaacaccccctaccggcggggaccctgtcactgacacaccaacgcgacaaagagcaaacagcgcaaacaccgaccagcaagacaaaagacgcagccgcacgaacaaaagccgaagaacagcagcacgattacagcaacgaacagacagaagtcacacacgacaacacagccaataacacggccgcaggacaaccaacaagacagacaaacaaccaacagaagcaccgcaaaccagc

SEQ ID NO: 569641 - DNA, 409 bp, Homo sapiens
gagtcatgtgcggagacacagagcaggcttccgggcgtggtaatcctagacttgaaagtgggccagtactgaaaacttcaaagctgaatattttgttattggctaagtatttaaatgttctaacagatcagaacatgaaatgccctcctaaatgtcagctgttgtcacacagtagctccaacacttggagcatttttacgggagtggcctcatttcactagagacaaatctttaagaatagttctaaaattgggcttgtgatttccatttctgatgtctccagattggcacccctttctagttcagtgcctcacgagattggccaggggcatccaaggcaaacaatcccaatctttctatatagaatgtattcaagcaaacatcaaataaatttctgtgcccatttcaa

SEQ ID NO: 569642 - DNA, 804 bp, Homo sapiens
  misc_feature (4)..(4): n is a, c, g, or t
  misc_feature (68)..(68): n is a, c, g, or t
  misc_feature (86)..(86): n is a, c, g, or t
  misc_feature (140)..(140): n is a, c, g, or t
  misc_feature (170)..(170): n is a, c, g, or t
  misc_feature (194)..(194): n is a, c, g, or t
  misc_feature (234)..(234): n is a, c, g, or t
  misc_feature (239)..(239): n is a, c, g, or t
  misc_feature (254)..(254): n is a, c, g, or t
  misc_feature (302)..(302): n is a, c, g, or t
  misc_feature (344)..(344): n is a, c, g, or t
  misc_feature (349)..(349): n is a, c, g, or t
  misc_feature (353)..(353): n is a, c, g, or t
  misc_feature (496)..(496): n is a, c, g, or t
  misc_feature (502)..(502): n is a, c, g, or t
  misc_feature (517)..(517): n is a, c, g, or t
  misc_feature (531)..(531): n is a, c, g, or t
  misc_feature (608)..(608): n is a, c, g, or t
  misc_feature (610)..(610): n is a, c, g, or t
  misc_feature (612)..(612): n is a, c, g, or t
  misc_feature (614)..(614): n is a, c, g, or t
  misc_feature (616)..(616): n is a, c, g, or t
  misc_feature (637)..(637): n is a, c, g, or t
  misc_feature (642)..(642): n is a, c, g, or t
  misc_feature (650)..(650): n is a, c, g, or t
  misc_feature (660)..(660): n is a, c, g, or t
  misc_feature (723)..(723): n is a, c, g, or t
  misc_feature (741)..(741): n is a, c, g, or t
  misc_feature (764)..(764): n is a, c, g, or t
gggnaggaagagaaatctccctgctagcaacagcgactcagggagaaactctgggcccatagctagcnggaggcagggtgacattnctcccaccaatgggccatcttcttagctacacctttgtagctgtggtgccaggnagaggaaccacctggaaactgagctaaggnaggttccttcttccaacagaaganacagctgggcagggactgtgcagactcaacagggccaggncagcnagtggccagtaagtnttcatgttttttaccagtgcctggagggtccccagccaaggacagaantggtcagttcctgccagcagcttgagctggaatgccctgggngggtnagtngagggtggtcacttgaggagcttcacagagaggcggatgtcaacatcgcagaggaagatgttcatgaggtcatggcctgcctcctgtgctatctgggagatcacgtggcccttcggaccaatcaggagtttcacataagattntttggntaccagaagcttctnttggataaccagcnccccacctggtccttcctcccacactgctgttttctgctgtacattgtaaggcacctcctggggcaggtgttctagnancntntntaaaaaaaaaacccccccccnctctnctggtgtntggctagttngggttggtttgtggttcttccaggggcctgggtgggcctgttttagaaggtattgcttttgtnttttcacgttctcctggnttagggctgataacatgaagatnttcttgaagtggggccagcaaatctctaaggatttccaca

SEQ ID NO: 569643 - DNA, 341 bp, Homo sapiens
gacccacaagtcctccccgaattggcctctggctatttcttcagtttcatttcatgtcactcttcctcttgtgcaaataaactgatttttgctccagttcttttgtggcttgtgacacaaggagctagaactttaaaagacttgacatgacagtttggagaagatgtggagcaactgaaactcctctacatggattatgggaggattaattggtactaaagttaaagatgtgcttgttctgtggtccaccagtcctactcctgggtgtttgtccaatagaaatgagtgctcatggtcacttaaatatgtatgtaagaatgctcagaatagctttgtaatag

SEQ ID NO: 569644 - DNA, 559 bp, Homo sapiens
  misc_feature (57)..(57): n is a, c, g, or t
  misc_feature (82)..(82): n is a, c, g, or t
cagccgcaggctacccagtggtggatgaatggtcagaggcctcccctatgactcacnggttgcagctgtcccaaacccaacnggaccctctttatatttggtgtcacaaagtatattgcaggcccctatgaatgtgaaatacggaaccccagtgagtgccagccgcagtgacccagtcaccctgaatctcctccgctcttattaatgactgccacaacagaaacactgagaaaaagaggcaaccatgaaaacgtggaaagttctgacgacagaaaatagcaatcagcctttctcacatcccaaagctttaaaaaatatatgagtgcagcatggccagtatggaattgaccaaaaactaatcatcaagctagaaacgtggtgagagaaaaaaaaagggcaagaatatctttggcttatcacctcccacttttgcctactaatctgatgctgaaaagaaatgctcactgaagcattttagattttgaatctttcagatttgggatgctaaaccagtaagcatatgacaaatatttcagaataaaaaaatgtcagaaatcca

SEQ ID NO: 569645 - DNA, 972 bp, Homo sapiens
  misc_feature (19)..(19): n is a, c, g, or t
  misc_feature (164)..(164): n is a, c, g, or t
  misc_feature (174)..(174): n is a, c, g, or t
  misc_feature (200)..(200): n is a, c, g, or t
  misc_feature (204)..(204): n is a, c, g, or t
  misc_feature (212)..(212): n is a, c, g, or t
  misc_feature (230)..(230): n is a, c, g, or t
  misc_feature (283)..(283): n is a, c, g, or t
  misc_feature (294)..(294): n is a, c, g, or t
  misc_feature (300)..(300): n is a, c, g, or t
  misc_feature (306)..(306): n is a, c, g, or t
  misc_feature (336)..(336): n is a, c, g, or t
  misc_feature (377)..(377): n is a, c, g, or t
  misc_feature (422)..(422): n is a, c, g, or t
  misc_feature (439)..(439): n is a, c, g, or t
  misc_feature (441)..(441): n is a, c, g, or t
  misc_feature (465)..(465): n is a, c, g, or t
  misc_feature (473)..(474): n is a, c, g, or t
  misc_feature (480)..(480): n is a, c, g, or t
  misc_feature (641)..(641): n is a, c, g, or t
  misc_feature (715)..(715): n is a, c, g, or t
  misc_feature (824)..(824): n is a, c, g, or t
  misc_feature (866)..(866): n is a, c, g, or t
  misc_feature (949)..(949): n is a, c, g, or t
tctgctgggactgcatgtncctggatgggctcccccaggcctaagctccaggtttcctctggccttccgaagattttgtgggttacgaccaattgatcaaagatgattttttcctggcgcttgctcagctgcaaaagctttatggtgttttgcaacttcttttnttgttcaaanaattttttatgtagtttggtgaactntgcnttaatttntccaatttgctcaaagtnaagggggcactggccatcctcggggagttagatttttcagagaagcttaagcngcttgtaggcnttttcnagggtnagcttggccgttctcaaactgctcaaaaanttgctcagtggtgctgggtgtggaccctttgttcccagctnttgatttgtggagctgggagctttttgggtttgaatgttaatttnagaaaggagcttttgtncntggttgatatgtttgagaagggcnttatagtnntaaatnaggaaaaggaaatgggggcaatttttgctggcacaaaggtggtggccagttacaaggagggaaataaaaggagtttagttgcagaaatgaaaatgtagaaggagagggagtacgtgtaattaacagagagtggaggagtatatgaaattgattttggtgtnactgcctgggaggaatcaaacagatcaaatgaattatcactttccatgggatatttgtcaccatcgtgtttgtnaggctgaaggggcacctcagggatggacacggcttggacagccagagttagggctccttcctgttccttctctgccccccttgccagctgttccttgagcctgccctgngagtgctgctggtttcgatgctcctttctagttgcaagcgcngagcctggatctccatcaggaggctgttcaggtcctgaaagaatcctgccccttccagccttctcccgacgcctctttcagtntcctgttctcttcatccagcttt

SEQ ID NO: 569646 - DNA, 712 bp, Homo sapiens
  misc_feature (436)..(436): n is a, c, g, or t
  misc_feature (445)..(445): n is a, c, g, or t
  misc_feature (505)..(505): n is a, c, g, or t
  misc_feature (534)..(535): n is a, c, g, or t
  misc_feature (567)..(567): n is a, c, g, or t
aacatggtagaatgcttctgtctaggtttgatatgaagatatacccgtttcgaaggaaggccacaaagtggtccaaatatccacttgcagattctacaaaaagagtgtttgaaagctgaactatgaaagcaaggttcaactctgtgagttgaatgcaaacatcacaaagaagtttctcagaatgcttccgtgtagttctgggaagtttatcccgtttccaacgaaatcctcagagaggtccaaatatccacttgcagattctacagaaagtgtgtttggaatctgcgccatccaaaggaatgttcagctctgttagttcaatgcaatgatcactaagaattgtctgtgaatgcttcgtttggtttttagatgaagttatttcctttactacagtaggcctcaaagcagtccaaatctccaatcgcagattctacanaaagattgnttacaacctgctctatctataggaatgttcaactctgtgagtcgaatgcaatcatcacanagtagtttctgagaatgcttccatctagnntttatgtgaagattttccttttccaccacagncctcaaagccctccaaatgtccacttgcagattctagaaaaagagggttcagagctgctctgtcaagaggaaagttcaattcttgaagtggaacacaaacagtcgacgcggccgcgaatttagtagtagtagtaggcggccgctc

SEQ ID NO: 569647 - DNA, 186 bp, Homo sapiens
agcgctgatagcctcacgccgatactccctgtctgcacttggcagcccatacaaggatgaagttccgtgaaaggaaaatgacttttatttccaagctaagagtggcaagcttactcctcttagaaactggttccgacttagaggctcgggaagaaggtcttcaaacatgggacttggactcgggaa

SEQ ID NO: 569648 - DNA, 412 bp, Homo sapiens
cacgccgcaccgcgcgtacaaaggggggttgtctctggtcgggtcagagtcggggtcataagagtgccacgtaggggagcttttgagccaggatgagccaggagaaggagttccatgaagacaatgtctatcagttaaggcaggaacaggccattttcgctactttggtggtgtaatgtcatcagttaaggcacgaaccggccatctggatgtgtacgtgcaggtcacagggagatatgatggcttagcttgggctcagatggcctgacattcctgtcttcttatattactaagagaaatacactgacaataggggtaaagtgtctgggacatgctaaaattttcgggggtggtatggcgagataatggctgatgtctctcaaggctgctttgaaccggtggtgcgccgtgt

SEQ ID NO: 569649 - DNA, 368 bp, Homo sapiens
  misc_feature (125)..(125): n is a, c, g, or t
  misc_feature (127)..(127): n is a, c, g, or t
  misc_feature (191)..(191): n is a, c, g, or t
  misc_feature (204)..(204): n is a, c, g, or t
tagcaccgaatgtgactgacgcgtgatagaatccaacttgagcgaacttctcaaccgccgcctggccctgctcggcaagcgcgaacacctctccctgctagagcaatgcttgcacggcatcgagngngaatgcctgcgcgtcaccaacgaaggtcgactggcgcaaacgccgcaccccgaagccctgggcnccgcgctgaccantgaacagatcaccaccgactactcggaatcgctgctggagttcatcacccctgccctgccgaacccggccgatactctgagcagcctggacaagatccatcgctttgcctacaccaagctgggcagcgaatacctgtggagcccctcgaacattcggtgctcaa

SEQ ID NO: 569650 - DNA, 122 bp, Homo sapiens
cggggaggccgcagcaccttctggaagacttggcctttttcttcctcgctctgacgcagggccgaggtgggcagttccaggccgagagccggcggccctgaaggtgagtgaggccctcggca

SEQ ID NO: 569651 - DNA, 443 bp, Homo sapiens
gatattaacgtgtcgacgtggtgaaaaccccgtgacgggccttacacagatacacaccccagtccccaactgctggactaaaaccacgaataccacggaaaaaagctaaagacagaggacaacagtgaagtcaagacagcaaagagtggtgtggacgacccaaaagccagactcacgcattccatgcaaaaagataacgatgacaaccacagcaataataataatcataataaaacaaaggtacaggtgaaaagcagcgcttggggtgtgcagctgcaagctggggaaggcgcgtgatcaacttggatgggacacaccctagtctatcttcaagtccctaaattcaaagagcttcaaacgtacttgcaccgtcaggccttccttcagactctaggacctgatgttactaagtagccgggtgacacaggatctgtctttcttca

SEQ ID NO: 569652 - DNA, 304 bp, Homo sapiens
actgctcaaacacgcacacagtcacaacacgctcacacactgctctcacattcacactcacaaacgtcactaacacactcacacatcccccgttcacacacatctcacactcacacacgctcacattctacacacactctacgctctcacattcacattcacacactctcacacagtcgcacacacgttcacacatgcacttattcacacacattcactcaacattcacacattcacactcgctcaaacaagctcacgtttactcacattcacacacacgcccaggtaggtataaagaaggacg

SEQ ID NO: 569653 - DNA, 1188 bp, Homo sapiens
  misc_feature (17)..(17): n is a, c, g, or t
  misc_feature (50)..(50): n is a, c, g, or t
  misc_feature (53)..(53): n is a, c, g, or t
  misc_feature (55)..(55): n is a, c, g, or t
  misc_feature (63)..(63): n is a, c, g, or t
  misc_feature (68)..(68): n is a, c, g, or t
  misc_feature (81)..(81): n is a, c, g, or t
  misc_feature (95)..(95): n is a, c, g, or t
  misc_feature (136)..(136): n is a, c, g, or t
  misc_feature (198)..(198): n is a, c, g, or t
  misc_feature (244)..(244): n is a, c, g, or t
  misc_feature (246)..(246): n is a, c, g, or t
  misc_feature (260)..(260): n is a, c, g, or t
  misc_feature (397)..(397): n is a, c, g, or t
  misc_feature (454)..(454): n is a, c, g, or t
  misc_feature (464)..(464): n is a, c, g, or t
  misc_feature (468)..(468): n is a, c, g, or t
  misc_feature (494)..(494): n is a, c, g, or t
  misc_feature (523)..(523): n is a, c, g, or t
  misc_feature (572)..(572): n is a, c, g, or t
aagtaaggttccgcacngttcacccggatgatggatatcggtgatcgctnggngncagctagncttcncgtagcgctgccngaacccagaatagncaaccccgagcggtcggtcatagggtgatggacaccaactntggcgccgaccgctccatagagacccgcgcagcgttatcgaaaggaggtatatcctgactcncacggttgcttcccgaagcggcacagaaggtctcacccgacgtcgncnatagtttcgtgccnccagcggcggacgcatcgcccgaccgcacagatattgtcgcggcgaaccctctcccccgagaggatgggcacatgggtggaaacaaggcacggacgcacggccggcacgaatgcgtgccacaaggtgaaagcacgtnacgcacgtccggaacgcacgctgattctgaacgtctgtaggaggcctagatcctctnctccggaggntagnacagaacgtggcggcgcacgaggacngaacaccctgcggcggacccacaatatanggcaggtcgccaaacgcagatggtgccaggagttacacgaaaactgggnccacgttctgcgccggaagcagaaaaatgggcggcgcgcaaaaacacccgctggaagggcggcctatcatgcaccgcgtcttacagcaccagtcccaacgagcggggccgacgttgcgccaccaacctggtccgctcacgagagtcgtctaatcagaaaccctccaaggtgtcccttcacgagcggtcgcacgaagacgccagagacgggatcacacaagggatcttttctatggaacaaagatatagggtacacgaaggagccctaaccaagtgggaagaattaacccggtcatagaacacgcgagaatgccccctgagacctgcgttctcaccattggggagaccccaccggcgatgagttcaacacggtctttctcggcaccctgaggggcttcagctgatatctctccgcacagcgcccgtgcctaacattgcgccccacggggtcgtaaaagacgactttcagctctgggcgaaagcgagtatcatcaagtcccccccgcagcaaaacccccaacaggttaaatcccctccgtgcacgagtttgggcagctagtttgcggagtaatttttccccccaatggggctcccgttaattccaccccaacataacg

SEQ ID NO: 569654 - DNA, 160 bp, Homo sapiens
agaggatcccgtacagccgctgcgtggtagaagcagcaggtgccattgctactgacagtgctcagcttcccccggccgggtcaggccgtgggagccgtattatctagcgtctctgccaaagactcgtggggggcatcacactgcgctgtgcagcggagcc

SEQ ID NO: 569655 - DNA, 112 bp, Homo sapiens
tcacgtggtcgtggaccttagcccctggaatcactgagaatagccccggaggagaagaagtagggggagaggagaggactcagcgggcgcccgtctcgtatactgcagactg

SEQ ID NO: 569656 - DNA, 87 bp, Homo sapiens
gggttttttttgcggggggggttgcttttttctggggtctttaagctccaaaaaaaaaacacttcctttgagggagagcccccctta

SEQ ID NO: 569657 - DNA, 99 bp, Homo sapiens
tcaagcttctaacgatgtacggggacatgttaaaatcacttttcatggaaagagctctatgtaacagcataataaaactgcctacctagcaacaaaaaa

SEQ ID NO: 569658 - DNA, 390 bp, Homo sapiens
ttgaggatccccacactatgtaatactatgctacttgatgcatctgtgtgtttgagtattttatatacctcatataagtggtatcatgcattatttgtcctgtgactggctttcacttagcatagtgtttcagggttcatccatgttgtcacatgtggcaggatttccttttttaaaacttaatattccattgtatgtgtatactatattttctcactaattcatccggtgatgtacatttaggttgtttccacatcttggccattgtgaataatgctacaatgaacgtaggaatgaaaatacccctcaagatcctgatttcagatcttttggataaatatccagaagtgagattagtggatcatgtcatatgttttccatagcagctgc

SEQ ID NO: 569659 - DNA, 193 bp, Homo sapiens
tgacacctgcagcaaggcggaagcgacacttaggttgatgggccgcggcgagaccacgtgaggtcccagtgtgtaggtggctgtgtgcatgccgaggaggggtctgctggagaaatcatccctgctggcgcaatgatgctgggttttcatccaacacagatgtgagaaaataaaaggcgctttgtagacggca

SEQ ID NO: 569660 - DNA, 754 bp, Homo sapiens
  misc_feature (51)..(51): n is a, c, g, or t
  misc_feature (192)..(192): n is a, c, g, or t
  misc_feature (291)..(291): n is a, c, g, or t
  misc_feature (438)..(438): n is a, c, g, or t
  misc_feature (441)..(441): n is a, c, g, or t
  misc_feature (479)..(479): n is a, c, g, or t
  misc_feature (605)..(605): n is a, c, g, or t
ccctgaaggggcacggcgcctctcggtgttgccagatgcgtgaaacagtcncttggggcatgctgacctgacgccctccaagcgaccaagggcccttcatctccacagggagattgctgaaggtggagagccttggcacgtcagcaagggaccatgggccattgcagacgagaaaaaggcaaaggcagtgcnacttccccccaggaggggcaaacggttgttacgcgagggggcatgtgaaggaggctgctgccaagtactcgatgccattgcctgcctcaagaacctgangatgaaggaacagctgtggtcccctgaatggatccagctggacaagcagatcacgccgcttctgctcaactactgccagtgcaagctggtggtcgaggagtactacgaggtgctggacccctgcttttccatcctcaacaagttcgncgncaacgtcaaggccttcttcaaacggggcaaggcccccncggccgtgtggaatgcccaggaggcccaggcttacttttccaaagtgctggagctggacccagccctggcgcctgtggttaacccaaaacttcgggccctggaggcccggatccggcaaaaggacnaaaaggacaaagcccggttccgggggattttttccccttgacaggagcccttggccctgcctttcctgccaagccccctgctgcagctgccagcccccctgcccgtgttgggtcatgcttttgtgtatataaaggcctttttttttcca

SEQ ID NO: 569661 - DNA, 203 bp, Homo sapiens
agcaggttaggtctcaatctcttgactcatgatccgccacctctgcctcccaaagtgctgggattacaggggtgagccaccacgccggcctgtctaggtttgaacggagtggcttatgaaatatatagagcagaatttaagaacttatcatttttcaagagatgagaccatagatagttcattatgtagctgtgtcttctgag

SEQ ID NO: 569662 - DNA, 190 bp, Homo sapiens
aaggactgaaaaatgtagtatacagaggttatggattgtcattgatgctatcgtgtgacagtgtacatttgatttcggaacgagtatttaataaaccttcattgtatgcattatagtcattattgagcttcgtctaaaaagcactaccttatcctcgtgtataaggatctattagtttggttatgctcta

SEQ ID NO: 569663 - DNA, 496 bp, Homo sapiens
catcactctcgagtggagccgagtgagcacattgtagaattgtcaaggcaaagatccaagacaaggaaggcatccctacctgagcagcagaggttgatcttctgctgggaaacagctggaatatggactgcaccctgtctgactacaagatccagaaagagtccagcctgcatctggtgttccgcctcagaggtgggatgcaaatctgcgcgaagaccctgactggtaagatccatcatcctcgaggttgcagccccagtgagagcatcgagaatgtcaaggccaagatccaagatcaggccggcatccctcctgatcaggagaggttgaccattgctgggaaacaggtggaagatggacgcagcctgtctgactacaacatccagaaagagtccactctgcacttggccctgcgcttgagggggggtgtctacgttgccgcttagaaggtatcaacaaatttgcattgcactttcctttcaataaagttgtggca

SEQ ID NO: 569664 - DNA, 328 bp, Homo sapiens
tgactttgtacgagaaaatggattgtcatttgttcatacaaaactatatatagacaattatacgaatatcaccattctttacctgaactccagggtcctctaaagtaaaataagtgggaccagtctatgttatttccgatactcatatttatgtattgaaggattggtccacatcccgtacaagtacttatagtttagaaaactacgacctgggttctctccttttcaacatcgatttacaactaaatgaatattgatctgcagatacactcttttatatacatatgtatatatactatacgtcttcagtgaaaaaaatagtccgaaa

SEQ ID NO: 569665 - DNA, 195 bp, Homo sapiens
gccaggttccaggcgaaccctgtactatcaaatgagtggagatgacacccagcatatccagcaattctatgatctcctgacttgcttcatggaggatcattccggggcttggcagaggaagatcccttgcttcgcagaactgcccaaagccgacccaagaacctctttttggattagcttcttaggactgtgttg

SEQ ID NO: 569666 - DNA, 130 bp, Homo sapiens
atacatagactcatcatcgacaagcctgtctgcttcgtagggaggctggaaaagattcatcccaccggaaaaatgtttattctttcagatggaggaggaaaaaaaggaaccatcgagttgatggaacccc

SEQ ID NO: 569667 - DNA, 357 bp, Homo sapiens
agatgccgagggtgactctagaggatttcaccacggcacccccttctctgcgcgcgtacttctgctttcttcttggatggctttggcttcttctcacggaaggttgatagttgtgagggaccttcttaaagcggactttgagattgccctggcctgagctgagagtcgtgggggaaggcctcgtaggataagcagctcttggtccacagtgcaccagcagggtagggcctggctctggcgggctgcccagcggccaaccagcagacacctacctttgacgagggggcagcttcccctctgggcgggggtacccgaggctcgaaattcggtaatccatgggtcataagcttgttttcc

SEQ ID NO: 569668 - DNA, 177 bp, Homo sapiens
tggctgcttctctcctcgcccaaagacatgtgatgcaactgctaattgaaaagcagtaatacagccgctttaggctatagcagtttcaactccactctgaggtgaagattccatttacattcgatgacttaagttctttcatattttttcctcaacaagaagttcctagagtcctag

SEQ ID NO: 569669 - DNA, 425 bp, Homo sapiens
agcctggcggtcaagagtgttgatgactgtggagaccctggcgctacaggcacgcgccaccgcgcccggcctcaggcatcagtagggcaacagacacagccattgcctccagctccaccacagactgaccagctttcagtccagcaacaggcagctcagacaacccgcttgggtagcacctcggaaccgtggcagtgggttcggacatacattggggtggatggtaatggagtaggacagtcctcaggctggctctggatctactccttcagaaccccacccagtgtcggacaagctccggtccactactaactataaacccacagattttgcctggacatctgaaacatggacgggtttccatcattcacagctaccctgacgacgatatccaccgtccattaactatcatattggtgcacaca

SEQ ID NO: 569670 - DNA, 189 bp, Homo sapiens
  misc_feature (12)..(12): n is a, c, g, or t
  misc_feature (25)..(25): n is a, c, g, or t
ccactctagatnatcccctactttngctttttaatcccccaaagcatctaagcattgaagtgaatacaaaggaagaacttaatagatgcctgatttaaaactggccaagttggtaaaatcggaatgttttcaacaattatgtgatcaaaataattatgaaaaagtgacgaccaatacatatgtctctcc

SEQ ID NO: 569671 - DNA, 460 bp, Homo sapiens
gtgggtgtgggtataatactaagttgagatgatatcatttacggggtgaaggctgctattgtgaagtatgccttatattctacttgtcctttcgtacagggaaggaatttgaatgaagatagaaaccgacctgtgattactcctggtctgaactctagatcactgtagtgaccttaatcagttgaacaacactgaacctattaatagacggctgcaccatctgggatgtccatgatccaacatctgaggtcgtaaacccatattgtttgatatgcgactcatacaatagtgatctgcgctgttatccgctaggtgtcaccttgttcctgttggtcacagttatctggatcaatttgagtatagatagttcgctactgacatggtgacagtcttacgcatagtacttgctcaggagtgtctgggttcttgctcctgaggtctgcccaatcaaccatagttg

SEQ ID NO: 569672 - DNA, 243 bp, Homo sapiens
agtgtggccggtcgccctctcaggccggctacccgtcgtcgccttggtgagccattacctcaccaacaagctgataggccgcgggctcatccttcaccgccggagctttccaacctccaagatgccttggaggctcgtatccggtattagaccccgtttccagggcttgtcccagagtgaagggcagattgcccacgtgttactcacccgttcgccactaatcccctcccgaaggaggttcat

SEQ ID NO: 569673 - DNA, 145 bp, Homo sapiens
ggcacgaggggcccctggtgctgcgcgggcacaccgtcgaagagcgtgcggttacgcccgaacatcctcctcaggcgtagactaggtcctgcctgactacggtctggaacgtgctctctgaactaaatggacctggacgaggggc

SEQ ID NO: 569674 - DNA, 300 bp, Homo sapiens
ggggctttccccccccgggggtttttttcccttttttccaaaaattgggtgcccggcccggggcccgggccctcttcttttttttttttaagtggggggggtttccgccccccaaattccccccgcccgttttttaaacattttcccgattccaaatttatttttcctcttcccccccggtttttggcccgttggcccaacccccctttttccccccaagggccccccccttttttttttgtggggggcccttttccgggtttgcccccatttatttttgggacccccccggaaaaaaaa

SEQ ID NO: 569675 - DNA, 210 bp, Homo sapiens
cttcctccagtggggcgcaggtaactatgctggtcctcattctgagagcctccatctatcggaactcgatcacatactcttggagtataagcatgggagaagttcatcacaaggtccattggcaatacaaatggcatgacccattgggtaatgcattatattcctcccgttgaactgtccattgagatgctgctgtgctctcactacagg

SEQ ID NO: 569676 - DNA, 349 bp, Homo sapiens
gagacagggcctcactctgttgcccaggctgtagtgcagtggctcaatcatggctcgctgcagcctcaactttctgggttcaagcaatccttccgcctcagactcctgagtggctgagactacaggtgcacccccctacgcctggctagtttttgtattttttgtagagatggggtgtcactatgttgcccaggctggtctccaactcctggactcaggagatttgcctgcctcagcctctcaaagggctgggataacagatgtaagcccctgcatctggcctccaatgagttgttatgtgaaaagaacgtgattgtaggtgcttaataaatgcttgctgttataaacc

SEQ ID NO: 569677 - DNA, 630 bp, Homo sapiens
atgtgttattggatattgtctgtcttcatgacatgtctgtgcaacatactatcaacaagtcaaaattgtgtcatatatcgttgtaagcattctttatatagtatataacacaacattcttcatctgatatatgtgtaactaaatagtttctcaaaaccagatagtgagtatagctatcccatttcctcacccatgatctatggaatatacaagtaaaaatgttgatgcctggacaacaaagaggccccatctctacacaaacatacaaaacttagctgggtgtggtgtcatgcacctgtggtcccatctactaggaaagctggcgaaaaagaatcatttgagtctgggaggtcaaggctgcatagagcgtagtgaccacaccactgcactccagtctctgggcatacaggaacgaaactctgtctacaaataaataagtaaattaaaattatgtgactgtggcctcttctctctctctctctctccaagtagcttatagtaccgtactgctgtgtaactagaaccaggcaaggtgaccccgtgcataagaggggacggatgcgtatacatataacctatacagcgaatgtgactaatgataacaaggcaccaactgtcactgcatgcaac

SEQ ID NO: 569678 - DNA, 986 bp, Homo sapiens
gggtttctccaggaggcaggggccggggagaaagttgaagcggtaacctaagctggcagtggcgtgatccggcaccaaatcggaccgcggtgcggtgcggataactccatgaggccctggtacatgaacaagctgagtggaggcggcgtggctgcatggactcggtgtggaaggtgggccagcttgggggcgacgggatgtgtgacccgtcgcatcgggatgcttgtgttaataagcccacgcggggctggctgcatcccaatggacaatagtcatggagagccggggatttccgtacgttggttcggtacactggtgttgtgtggaggtcctccaggtcatatgcgtgccctggatcttcaacacactcggactcagagtcacacagggaggtcatcagttctggtgtgtgaagggctgtgcacggagtgcctaaggggggtcggacaaaggcaggggaggaaaagcgcgtgtcagccggcccgttggcaagggatcctaattcctggagcgtatgggagtaaaatccctcgtaagaccgcttgccttgtgaaattgcgcagaatgctactgctacagctcgatcgtccccctcatcgataccttgaaccaatctgtggactgcatgaactgccaagggcagagtcatggatgtacgaccaaatgcaattctaatctgcatttgccatcccggcgggatgataccgtgacagaagaccgagagatgtcgcttagtgtgaccaacagacactgtgtgcaagtccatagagcatgcacaattctggagtgtcccgaaggggtttggcccggcatgtctccaacaccattgggccaggcttcacagttggcactgaagcaaaccttcagaaaccaaccaaaatggggccacctcatgacaggatggatggcttgacggcaacttggagagacggaaagaaaaccaccgagcaacgatcaacagagcacggcacatgacatgttagtgt

SEQ ID NO: 569679 - DNA, 263 bp, Homo sapiens
ttccatgggcactaaaccacctcccaggctgatgctgaggcagcctccaggcaggaaggaccctgtgctccccgccccccatacctgacatcctgttcttttgcacttccctgtgctgtgaatgtaacagtgggccttccggcgcgcactctgatttgcatttcatttgtgtttgtttacacatcatgcactgcctgtagcatgcagattgtcacagcttcgacttttggatggtagagtgtgtgcactgactgtgagatcga

SEQ ID NO: 569680 - DNA, 266 bp, Homo sapiens
  misc_feature (165)..(165): n is a, c, g, or t
cttgagctaaaataaaaagaaaaaattaaaaagaaggacaaagaaacacaaaataggataagacagcacaagatagcacaagaaaacacaagaagtgaaaaggcttgtggctgcagctagctgcagactgctgtgaccccttgcagcacattgcagctgccacanaccacattcagcacagtgaagatgccggtggcatgcgccagatgccgaagacacgagagaatatgacgcgaagaacatgggtaccgatgctcgagattcgt

SEQ ID NO: 569681 - DNA, 864 bp, Homo sapiens
cacaggctcccctctgcgtcttcagcctatttccctgggcagttaccaaacagttaattctagtgtcatgttttacttttatgggtatttagaaactcaggtgcttaaaaaatatgtcaaaaaacagatcttcaaatagcaagtttcaaattttacttgagctgttaaagactgatactttaagtactgcttttatggcagtttataatataggaacaaatttgtactgtggggatgggtaaagatgggtgagtaaatgacatttttgggttgtgaacatggggttattggattattttgattttaataaggcatattcttagagaaaatacgagttctaaggaaagagtgtgatccttatgagggagatgctgatcatataaaacaatctggggtaaactaaaagcctgtcataacctcatagtatgcaaccaaagaatactaattcattttatcactttcatgggtaaaacttttaaaattcaaaactgaaaaatcatgagggaaaatgattacctctgagatactattatgtgactgacattaaaggggaaaagtcctaaattaactttaaataagtgaaatgatttaagcttcatagggtatttcttgaagcatttaaattgctagtgtgatcaaataattgctatacgtaaaaaattggccagttttatgtgacagatttaaggctttgttattgggctgacaagtttaaacttagtggtccaaatgtaaactacattcagtttcactggggttatatggggaaaattggtatggtttacatgtgtaaacaagtcatattatgatttctttttatatcaacgggtgtgttaaacgacacaatgtacaggtatcttggag

SEQ ID NO: 569682 - DNA, 93 bp, Homo sapiens
aaacttatgaattatagactgcagtttcctcgcatacattaccatcaatgcccggcctgtgagtgtgtgtcggggaggggcgagaccggccgc

SEQ ID NO: 569683 - DNA, 1753 bp, Homo sapiens
  misc_feature (267)..(267): n is a, c, g, or t
  misc_feature (401)..(401): n is a, c, g, or t
  misc_feature (410)..(410): n is a, c, g, or t
  misc_feature (502)..(502): n is a, c, g, or t
  misc_feature (522)..(522): n is a, c, g, or t
  misc_feature (526)..(526): n is a, c, g, or t
  misc_feature (613)..(613): n is a, c, g, or t
  misc_feature (677)..(677): n is a, c, g, or t
  misc_feature (689)..(689): n is a, c, g, or t
  misc_feature (710)..(710): n is a, c, g, or t
  misc_feature (719)..(719): n is a, c, g, or t
  misc_feature (822)..(822): n is a, c, g, or t
  misc_feature (950)..(950): n is a, c, g, or t
  misc_feature (1022)..(1022): n is a, c, g, or t
  misc_feature (1325)..(1325): n is a, c, g, or t
  misc_feature (1459)..(1459): n is a, c, g, or t
  misc_feature (1597)..(1597): n is a, c, g, or t
  misc_feature (1600)..(1600): n is a, c, g, or t
  misc_feature (1628)..(1628): n is a, c, g, or t
  misc_feature (1638)..(1638): n is a, c, g, or t
  misc_feature (1753)..(1753): n is a, c, g, or t
gcgtgagtgcacatggtgagccagcgctgacgggagaggatggtgtatggacctgttctccgtgctactggtctcgtgtcagactgggcgacggaagcccgtcatatgtagacaatggtggcgagacaagtgaaaggctggttcaggtccccaggaagagacagtgggtacagcgtgtcatgacgaaaacacccatggcgggtgggtgaatcacaggccctgaccatactacggggagcccagcgtaaaatcaatgtcggcgcacgntctgagagggcatcgctgacatagcatcgaagccgaatcgaaccatctcattggacaaataattcacacacttgagaacggtagtgaacgtaggatggtatatcgactgatgttcttacctatctacatatacncgtcagagnggtatactatggggcaaaggaatccttcccgagcaaacagcgagccctgtcacttgcaacgcggcatcgtacatagatcactcagaaacgcnaagtcaggtatttcacacantatnccacaatgacagagacaattacactccctagtatatgaaagtccaccccctcataaaatcagtccaccgtgttgtcttacttggacnctcaacattgagccacttgtggcccaatagacgcccacactaaattgtgatgctttctacctgngaggcaacagangtgcgcggcgtactagtatgnttcgctagnggtggcatatttgatacccactattcaagatacgcaataggtaggcacgtgccgttcgatgcattcgtcaaacactcgatacatttcgtgcgctacgcccacntgtgtcttttggtttatactcgtatcggcatatttcgccttctccgccttacattccaaatatgaggcgacccgccgttcaccagacacaatgccccagctgttagtggtgaggccaccaaaggcaantggtatgcgatcctttggtccagcataggagcttggacatatgtgccaaccttgcgagaggaaacacctggntgtcaccccgtgaaccatttgtatatgcacaaacacagccggatgagagatcgagaagcggccgtactagccggccattggtcagttattgcccgggttagattgacctaacgatacattggatttccaccctggttataaacctacctatcaacggtaccaaacaacacttcagagtgcttaactggggctgtggaaacacgggcacgcccggcacatcagggtgacccatgaagcctccttatcagtgcgcacagtcaacacccttgacaggtgaatatctggtgtcgctcattaaagttngggcaccacgagtaaaggcaggtatgtaacagggtgctgcttccatagggggcctgcagaagacacgtacagtgggaagcaatgcgcataggactccaacaatgtaatggacctaaggatcaaggtagagcacnggagaagagtaaacaccggtcgtgtgacgtatattaccggacgcattatcaacaacgcggagcgacacaactatcagtgacaactaggagtatcacgtcctgagactctttactaacaagatatagtcctactcgcancgnctgactacgaacatagcagcatcgaaangtagctactncagacagtaacatgcatagccgcgtacgagagctgagcaacgagcagtaagctaaacgagagaaacagagcagcgcactgactggataagtaagcaggaccgatgcgagtagagn

SEQ ID NO: 569684 - DNA, 103 bp, Homo sapiens
tctagatgctgctgttatcttctgcctcagacagacattatacgtggtctggtttctaagattcctaccaccagttactttgggccaagtctccacatcccct

SEQ ID NO: 569685 - DNA, 549 bp, Homo sapiens
agcggaatcatgggttcaatgactttacctgacagaatggatagaataaattcttcaagctcctttctttggacccagatggattagtgagcgttttgatagccatcggaagggatagggctggtgtcttcagcgtcagacgaggtcctctatgatggtgtgcacaggggagagcacgaaagtggccgcatcagtactccagcgggagtgacagcgactttgcaggcgaagctaatagagggacaacaactatgatggcaccagtcagccagcactatgtgttcatcaagacgaatgagacatgaccgtattgagtaaacatatgtacaacctgagagagataggcacgacagttccagaagatgggtgacagatagcgcctcgtacgagtatatataagaaggtgcaattgatagataaatacagagtgtgaagaatagaatctgctagtatagaagagcacaacacaaggtatactgttgagaggagatacaacaagataaattgttaagtaaagagcggattatattaatatgcatgggtgtttaa

SEQ ID NO: 569686 - DNA, 357 bp, Homo sapiens
ctgcttgtctgctctgcttgtcctgcctctgcttgtcctgcctctgcctctgagtttcaatctcagcgggattacttgtatcttttccaaatctgaaactctgcttgtcctgcctctgcttgtcctgcctctgcttgtcctgcctctgcctctgagtcactgggattagaggcatgagccatcatgcctggctaattttagtatttttagtagagacagaatatcaccatgttggccaggctggtctcgaactcctgacctcaagtgatccgcccacctcagcctcccaaaatgctgggattacaggcgtgagccgacacgcacggacgcattatcatttcttaagataccagttgt

SEQ ID NO: 569687 - DNA, 310 bp, Homo sapiens
cgcagcctgtcaataaaggacgatacacaaattgtttccatccaaagtccagtcgtagtggctaaaatcaattctttctcttcttcttcttcttcttcttcttcctcttcttcttcttcttcttcttcttcttcgtcgtcgtcgtcgtcgtcgtcgtcgtcatcgtagaaacgatcagggaatatgtactgtgcaatatggtcgaaaatcgagatccactctctctgcatgggtaattgttgcttccgagttaacgacatagcacgtaatgaattcgatgaaatacatggaaatttgagcctagccagcc

SEQ ID NO: 569688 - DNA, 1050 bp, Homo sapiens
ggtcaccaggcgagccacatcgctcagacatcatggaagaagagtgacggtcggagtcaagaggatagaggtcgtatggggcgcctggtcaccacgtctgctgtgaactctggtaaagtggatatggtcgccagcaatgaccccttcattgaactcaaggtacaatggtgtaatagatgtgtccaaatatgagttccacgccactggagaagagttccacctaagtgtggcgaccagtctagaggcttgagaacgggaagctgtgtctttgcacatgtgagaatcgccatgcgaccagtcttaccaggagtcgagatccctccaataatcaagtggggcgatgctggtgctgagtacgtctgctgcgagtccactgtcgatcttcaggcaccaatggaagaagcgctcggggcttcactattgtcacgcggtgtggacgccaaagagggtcatcatctcatgcctcgcatcgtgctgtatgccccccatgttccgtcagttggggtgtgaaccctatgtgagaagtatgagaaaaaggctcaagatcgatcgagctgattgcctcgctgtgaccacctaaattgcttagtacaccctggcaaggtcatccatgacaactttggtatcgtggaaggactcattgaccacagtccatgccatcactgcacccagaaggactgtggatggccctccgggaaactgtggtgtgatggcgcggggtctccagaacatcatccctggccttctatggcgctgcaaggctgttgggcaaggtcatccctgacctgaaacgggaagctcactgacatggccttcggggtccccaactgcaggtgtcagtggtggacctgaacctggccttacagagaactgcaatttaatgactcagagtggtgcccggttgaaggccccacaagggttcggcgaccgcgcctcggctcctgattcacgacacatctcaatatacggggtacccacctctccgtcttcgtaatgtccacgggtctgcagcagaccaccacgagaaacggtccccccccacagcgcata

SEQ ID NO: 569689 - DNA, 329 bp, Homo sapiens
  misc_feature (19)..(19): n is a, c, g, or t
  misc_feature (71)..(71): n is a, c, g, or t
  misc_feature (220)..(220): n is a, c, g, or t
  misc_feature (234)..(234): n is a, c, g, or t
aatattttataagtaattnctgtgtgcactgtgtgtactgtgtgtggatttgggcagttgtccctattgtnactcatataagcaatgatgtgtatctcctcatgaagctaggctatctgtgcccaccacataggtagcatgtctgaagatgaccaaggttagaacatagtatatccagtgagtcatcacagaatttaaatcaaggttgcacattattttncagataaacaatgncacgcataattttccatatgtatttcacatgtaatgagaagagttcatataaatagaaaaatatgtttatgacagtatggcctagtgggaaagag

SEQ ID NO: 569690 - DNA, 351 bp, Homo sapiens
gtcatagctgactctagaggatacacgatggcgccgcgaacgcctatgagttcccttagtatttattgatcattcgagggtgtttctctgagagggggatgtgtcacggtcacaagacaatagtggggagagggtcagcagacaaacaggtgaacaaaggtctttgcatcatagacaaggtaaagaatcaagtgctgtgcttttagatatgcatacacataaacatctcaatgctttacaaagcagtattgctgcctgcatgtcccacctccagccctaaggcgttttcttcctatctcagtagatggaacgtacaatcgggttttataccgagacattccattgcccagg

SEQ ID NO: 569691 - DNA, 1440 bp, Homo sapiens
gagttacaccgaaccaggacagaaatcgtgatcttagccaccagaacagagaatgttcttggtgagaagaggtccgtgcgagtcctccgggaactgactgcgtggtagttcaagaagaggtttggctttccagaagggcagcgtagaactatcttatgcctcggaatataggtggccagtacgcaggtcttgtggtagcctatgtgcccgaggcgaaggagtctctcgctgcttaataagacgtcctaagagtggcttcgctggtgctgtgagggacctgcatatgagtgtgcttgcaggttcatcaatggatgaagctggggtcggctaaagagctgcgtgacggacttgtgtgactgtcatgcgagagaactcacagcagggacagagaaggagccttaaagtcactagtgaagcttctggtgcgcagtggcacgtgaagtgattccctaggagcgaggggacccgtgttcaaactaacagtaacgatctgaccatgtttgctgctgacgccacggggtgttatgcgatccaaggacacgcgggctgtttgcgtgggggacgaatccaaaggatgaagcccgtactccgacgtggcgtggcgccgtggttggcacacccaagcatgggtgtaagtacctcggtcgcccgtaccaggaaatgtgcccctttgcctctgtggagtcgaaccggttgaatggcaccgtctggcgttgggcatagcgccgagaataacgaaattgaacggaagtaacgtggaactcaagacgggggcacccaccgagatcattcgaagataaggcagcacacagggcgaggatagaggtgaaaaggcccgagaggaaagcacaccggctcgtgtggcaccaattgttggctcccgaatgcttcctaggttcacacacgaggcttagaaacacgtacagcgcaggggacttaatcacctggtttgggggatataggggcgtggtgtaaattgccttgggggagagttccatgcgcaattgtttaagggggatgcttacatatattaaggaacctgttaattagaatataaccaattttgtatggtatgccaaggcagcggaagtcaaaacattggcgaggagaatgggtacaaaaaatagattcctgttgggagggggtacccatttaacaaagattcattggctgggggcactgcgaggtaaatacagaacacgaaaaggggccatccgtcacacacagggtggcaaacgcgggtgttatcacatgtaaagcctttgggtccctacccttgaaaaccctgggggcttctacaacgttgggttacccactggggtgggatgggatatttcctgcgccgcacttacacccatgtaagtctggacaacactcaataatcaaacattacgacatacaaaacagccacggcgtgtatacccgggcacatgtttgaag

SEQ ID NO: 569692 - DNA, 140 bp, Homo sapiens
aagaactttcatatgccagacaaaaacaactttcatatgtggccagaaaaaaatatatattttagagtgggacacccgattaagagaagagacagcattggattcttgagtaatagaaagcaagctattacattcaggta

SEQ ID NO: 569693 - DNA, 276 bp, Homo sapiens
ccaagtgacagaataactcctccgacctctccctggggcacgtgacccgggcactgtgccgaggcattgttctgaaccatgcactccatggctatccgattcagcagctccaggagtggggcgtggatgagggtgatgggcatgtgggagtgcgctgtccaggaatgacgtgctgaagcaggaggtagcaagagggctgaccctttgcccatatccttagggcaggatgtggatgcagctgtcgagtggcagctcgggtcatagcttccgttcgaa

SEQ ID NO: 569694 - DNA, 497 bp, Homo sapiens
tggtaatttaacctagtggcactcaaactttgctgcatgttagaatcacctggcaagactttaaaattcctgctgcacagtctctactacacatcagttaaataaaataattctgggagtaatactcagacacaggaatttttacatcacccttgacaagtgatcaaagtctacagccaagttttgacttctgttcattaactgtaaaatgggagaatttatagtttccatctctccatggagttaaaggattgaaagcaataataatgcaagtaaagcatttatgaaagtgcctggcacattctaagcacctgatgcagttttgctctaattctctagaatataacagtaaaattatccaacatatctctgctttttagaaaattcaatgattgtctactgctgcagttctcttctggacttcatttgtattctctgtgccctggatcatttgtcacagttttcctgtataataaaattgtattatgtgtgtaaaa

SEQ ID NO: 569695 - DNA, 677 bp, Homo sapiens
ggtgctgcagaggtccatggacatgcgctacgccagttggttgatgaccctgttcctgtctgccaagcttctggccctctttgccccccgtgtaccctattccatacctgccaccccttgtagaaagtgccacatgaaaaacagccagcaatcaaccttattgtggctttgcggccgtccattcgagagtttgaggaccctcgagctgcccctcctccaactcgtgctgaaacccgagaggagcgcatggatcagtgaaacgacggtgacaatgattgagtcggcgacagcaaagtaggtggagacagagcttacaatgtgggaccctcacaatgatcccaatgctcagaggggatgccttcaagactctcttcgtggcgagagtgaattatgacacaacagaatccaagctccggagagagtaagaggtgtacggacctatcaaaagataacacatggtctacagtaagcggtcaggaaagccccgtggctatgcctttcatcgagtacgaacaacgagcgagacatgcactccaccacgcaagctgagttgcagctgatgctaacgctcccattacaacacctcagtgtatggtaggaataagggtacgtatcatgggtaagatcactcagcaccgaaaccagcccagttaccaggcaatcaggacagggagcgc

SEQ ID NO: 569696 - DNA, 431 bp, Homo sapiens
ggcattcagactacctactaacaatatcgtggttaaaacatcaggcgtgggaccaactaatcttcgaatcgaataccaagagcgggaaaattcagaatggggactcctttcatatgtggtggtcacaatccacagcttaacacaattgtggacaggtggtgggtctcatcgtggatcgacactactagtgtgttcagaagtgtgtgcagagggaataagcgcggaacagggtccacgaaagcccccgcgggaagcgggcacgtggttcaccttttatcttgaccacaaccggcctctaccagcgttctagccacccatcttctgtggcgagcatcttcgtggtgagggctcacccattaacaaaagtggtcccgggtgccactcgtggggacgggctttaccaacaagactaaaagattactgggagaatt

SEQ ID NO: 569697 - DNA, 302 bp, Homo sapiens
gcgatctagaggatccgtgatgtgatccccaacacaccaccgcatatcctgttcaattcccctgatccctcactttagcacatatgggatcactaccaagtaaacttctgctcattagccttgttctagaccaggggatgtccactcttttggcttccctgggccacgtggaagaattgtcttgggccacacataaaatacactaacactactgatagctgataagctaaaaaataaaaataaattttaaaaaatctcataatgttttaagaaagtttaggaattggtgttgggcgataaca

SEQ ID NO: 569698 - DNA, 359 bp, Homo sapiens
gtgacttccagtaacttataattctgtctttaactataatatcattttagcaaatggatccttagattttcgtaaacttgatcaggtgttttagtgtaagtattccaaaactctctaccatgtttatctgacccaggttttcctctaaatatgatatacattgggtcttaactcatccaaagaaaatctctgcatgcaaacatcctgtagcgaagttgttttacccacacagatcacttcctggaaatcttctaggtaaatgactatatcccagagtagagaacttaaatacttactagcataggttcacccgtctatcttatggcccctcttcagcagtgtattgtttctcctcaaca

SEQ ID NO: 569699 - DNA, 508 bp, Homo sapiens
gtgttaaatatggtattgtgatagacggggggtcaagtcaagtttttttttgacaactagatcgactttttcaagatcacagtagaaaagctggttattaggttcacatccatcatacaaagttaccaataagtatctcccacaatcagacacttctccttgaatattccaagtaggttgatccggtcgttccaggcacaaaatatcatctgactgtagtgtacccagacgatggtacatgagcttctgatcagtattagtagttgtttcagtaccatctgctttaccttcatgctgagggtacatacagtaaaaaacacctttctcatcctttgtccgcgaaattgaactgaatttgacatgttgcaaaacatctggaagatcttcgcccgattcacaggttttaaatttaagttcacaccaatcagaaccaccaaaactaagaccataacaacagtaagttccttccactgatcccgcatccatcacaatacgatatcaagcttat

SEQ ID NO: 569700 - DNA, 88 bp, Homo sapiens
gccagcgccgacgatgcccagaatccagaactttgcctatcactctccccaacaacctagacgcgaaaacagaataaacttcacccag

SEQ ID NO: 569701 - DNA, 399 bp, Homo sapiens
ggctggaggaataccgtacgaggacaccttattgagggccatagacggttgactatatgtgggggcccgaatacaaacacggagcaccctctaacagagacccatgtggatgatgtgaatgcaaagagctattgttatctaagcttgcaaaccctgttgtacgagggagaggacgccttattcatatggcggatacgtaacataccggaggatgaaccgatcactgtatttgcactggttttgcaccacgattgcatatacttcattgacagccgagttgatgcccgccaactgagcctcatctctcataacccgaccatcaatgctttgggataatccacaccttatggcagacagcagaggctcttatagcttttacgccttgtgtctcatatgtgc

SEQ ID NO: 569702 - DNA, 305 bp, Homo sapiens
atcgatacatctgtgatgtggcgatcgtctggagatattctgggctgctcgaatcttgacgaagtatgatgtaccaggatacttgctcagtgcttctccaagcatcttggcagcactcggactcaccctcggcctgcacaattttctgccgctgttcctgctttgctttttctaccaagaattgggcccgctgggcctcctgctgggccacttgtttggcttctacagcagctgtgtactctcggctaaagctcagctctgtgatggccacatcatccaggatgaggctgaaatccctgggctgg

SEQ ID NO: 569703 - DNA, 451 bp, Homo sapiens
tcattgttcagctcctacttatgagtgagaacatacagtgtttggttttctgttgctgtgttagtttgctgtggatagtgacttccagctccagttccatccatgtgcctgcaagggacatgatccatttatcacaaacctacagccaatatcatactgcttgatgattttaaaccaaacacataggattaaagttcaggatagagatgagggctaaagataaccattttaacattctcttaatagacatgacagttgaacctatggaagtggaaaggattcatgatagagaacagtgtgcacgagaagataagattaaaagcagaaattagtaatgccagttgttttattggctctgattcctcacctaccctcgcatccacacccttgtagaatttgaagttccatgcacaaaaaggggagagtacgtgatacgctgccccctgatgtt

SEQ ID NO: 569704 - DNA, 261 bp, Homo sapiens
acggtcgatctgtacatacctaaagaacaccttcctatattacgcatgcacaattctccacgtaacaggtcttctcacatttaaatttctgtgacccagctctgacgtccctacttggcgcttatcatggtccacagacaaggaggggagcaaatgaccaggcctggtcacgctctatatggtggtctcagcggctgataccaacacgacttccagaagcaccccatctctgatatgacgctgacggctcatgatggagac

SEQ ID NO: 569705 - DNA, 528 bp, Homo sapiens
  misc_feature (121)..(121): n is a, c, g, or t
  misc_feature (462)..(463): n is a, c, g, or t
atcgtgccgcgagttgaagccgaattcagttcgtgatgtgcgcctgtggaccgcatgattgaacatgcgttcagcgccgccgtgatgtcggccggcgtgttggccgtgtagaagaagccgngcgaggcgcagttctgcagactggccggaatgttggggatgttccagttggcgtaatcatcctcgtcattggcaaacgaggcattgaccggattgatcggctggtacgggatgtagagcacggagatgatgatgccgcggttcttcagcggcgtgcaggacgtcgccggattgatcgtggtagcatggttgctgccggaccatgatccgttcgcacgcccttgactgcggatcctgcgcgccatcggtgacgaggaagacgtaaggcagcgtgttgttccacggctgccgtgccgacgctcgatatcagcgtattcatgctcgacagcgccgtgtcgatanngtgccgcccgagccgagattggtgttgatgttggtgtcgagcagggtcgcgaggttcgcggccgc

SEQ ID NO: 569706 - DNA, 480 bp, Homo sapiens
  misc_feature (205)..(205): n is a, c, g, or t
ctggtgtctgtcttttacctttcttaacactgtctttcagagagcagaagttttaattttttttcaatggccagtttacttgagatggagtctcactctgttgcccaggctggagtgagccaagatcatgccattatactccagcctgggtgacagaatgagaccctgtcacacacacacaaaaagttgaatgctgggccagtcnagtggctcacacctgtaatcccagcactttgggaggccaaggcaggaggatcacttgagcctgggagtttgagaccagcctgggcaacatagcgagaccttatctctacaaataataaaaaaaaaattagctgggcctgacggctcatgcctcaggtcccagccactcgagaggctgaggtgggaggatcatttgagcccagggagtcgaggctgcagtgagctgtgatcacaccactgcgctcccgcctgggtgacatagtgacaccctacctg

SEQ ID NO: 569707 - DNA, 636 bp, Homo sapiens
acagaaggttggtgtgccggaaagggtcgttgggcacccgttcttacagtggtgactagggttctcacgaggagttcggggcgaaatgcttggggcgcccaaggtgtggggggcccacaaggaaagagaggtagaattataatgagttgctccccctcgcctgcagagagatgctgttgagagatagtaacattgacactgatacccgcgtgtacgtttttgagagagggtgattactcccgcgggggggcagctcctgcagtaggaacatttttgtttatgtccagacagtagttttggtgaaaatttcactaggctcgcgggcccacacccgcgagagaagattatttcgcagaattttatgttaggaccacactgtagttgtttcactccgctagtgtaggtcattctgtactttcttgtcagattgacggattgcgccactcctaccccaagcttcagacctccctcccgcaaatctttcttgttctatccccgtttgttgccctttatacatcatttgaggagaagccccatggaagattacataaggagggcataacataataacatcaaaagagatagaagtgaggagaggagtatctttattccccaacccccaccaatagacagaac

SEQ ID NO: 569708 - DNA, 135 bp, Homo sapiens
ccctaattattatgtaaactggtactttgtgtcaaaagcataactataatttggtttctttcttcataacacggacaatttaacatatttctccgtgatggtcttgacggttatcacctgttatgacgtagtggc

SEQ ID NO: 569709 - DNA, 91 bp, Homo sapiens
  misc_feature (76)..(76): n is a, c, g, or t
accatggacaactaccctaagctggaggagatgatgctgctgagaacggggctccccagttcctcggcgccgcggnccccagaggaagcgg

SEQ ID NO: 569710 - DNA, 109 bp, Homo sapiens
ggggcggctgcggcgcgcggttcgctagtgcgtagctctggagctatggtggtggtggcagccgcgctctgaaaccggccgacgggaccctaaagttctgcttctgtcg

SEQ ID NO: 569711 - DNA, 1013 bp, Homo sapiens
  misc_feature (93)..(93): n is a, c, g, or t
  misc_feature (398)..(398): n is a, c, g, or t
atgcagaattggagatgtcagccagggaaagaccttaatcgggataaaagagaccaatagatgataattctgtgagtatctgccaatttcagnatctgctgtgcagccagagtagagcagtgagggcgtcattcactggtctgctgtattgtgtgttcattcggaatcaagccccaaaaggtatcgcgattgaatatgtattggagctcttacactattatcagactcaccaaatcatctttcaattgccaatttacaaaatcgatgtgtgacaactatcattcgtctctagctatttggattgggcgaggcgagtcgataaatagataccaagggatggttcgataaacggttgaggaggagtactagaatacgatgctaggtaaaaggtaattgtncaataatggaggtcgtctatcgacatagtaaagaggcacaatttcatcgagatatcttcgtttgacattggtctatagtatggtataaggtatagatcattgcgatagaggcgcgtcacgaaaagacatgctggaggggacaattgtcgatactacgatgtggcgttggttggaaactcgaacctgtcgtatcgtttggatgggccctatgctcattggaggcatttatcaatttggagagatgtgcagtacatcttttcgatcattgtgaagacttttcgggttcgggattccaaggaagatgtaattcgaagttcatggaaaccaatgtatgcgtcacgaataaaaattttggtaccaatggtaactgcacaaggaataagaaagactggaaaacaggggttgtgtcttcgttaaaataattgacttaaaggaaatatttgccaacgaaggttggaattgccaatatgaaattgaattctgaaactaaaggtcaatgtgggttacatgggttaaacaattgcaagtataaacactattcagcaaagtgaattgataaagaccattgagcactttctttatgaaagccaggtggttgaggcaatgaagaatgga

SEQ ID NO: 569712 - DNA, 219 bp, Homo sapiens
tctcatctagatgaatccatagctgtagtggccttcgagagtttatactaaagttagcaaaccaagaactctatgatgacgtactatgtatttattagccacagacaattctatttactacaaagacaaaggccagcatttaactgtaatataacacttttccaaatgggaccctaagaggagctgtcagcgtgtagtatcttccttcacagtatcatg

SEQ ID NO: 569713 - DNA, 1303 bp, Homo sapiens
atacaattatagatccgtgagacggcccttccgttgggaatgcttcctgaaaatagattgtctgctatgctttgtatgatgctaagctttgacaacaacatcagaatccagacacaagaagagttgcatgttatattattctgtgggcaccagacactagcacctcctgacaaagtaaaatgatctatgcaagctccaaggatgcacattacaaaagaaatttcacaggcataacaacatgaatgtcaagcaaatggaccagacacgatctcactcgcggcttgtattgctgcacaacagttaggtggcatccttaattgtagcctcttgaaggatgccctgctgtagattattcagatgccacaaattgaaagcttccatgtctaatgtacatcctctctcctatcataaataaagcaacatatcattaaggccagggctctcaatgaggggacagctgtctcgtccatctttctacgagtcacacctcattctactacacaatatgccacacagccctcaacataaacatctacaacgtctcaacagtacacatagaaagtcaacactcaaactactacactcggcacacaagtgcccctgctccacgaatcgacctcgcatcccactaacacgcatacaccggcccaagactacacagagatcaccacaccattcccacaaagactcaaacaaacacaatacaagggccacatgctgacgcacaactcatctcactccttcactcacaccatcaaacaatatacatcagcggatcccacacatacgcctacacaaaaacctgagatcaattaaaaccatgacttaatacaatacacgcatacaacacacccctcaaactcactccacctctacgcctcaccgcaaacaaacccagtgcaaacttcaaaacctgcattaaaaatacataaacacacaaccaaataccaccaccactcctcaacaaaaccatagcaccaacccataaccaccaactcgcgaacaaaggaagaaagcgaaacaaaacaacactcaccaacacaacaccaccaacaactcatcacgcggacacacaggacaagcacgcaaccgagaaaaagcgacacggcacgagagccacgaccacaaagaacaaacaaagaaagcaaaatcaaggacaactacaaaacgcaaagcacgaacacatacaccacaatcaagcaaataaagaaacatacaaaacacactgaacaaaccacgacacagatgaaaaaaaacacgacagaaggcacaaacgccaggaaccatcataaacaccacccaa

SEQ ID NO: 569714 - DNA, 1109 bp, Homo sapiens
  misc_feature (429)..(429): n is a, c, g, or t
aattgacctgcccgtgaagaggcgggcgatgcacactaggacaagacagtagaagaccctatggagctttaatttattaatgcatgaactgtatcctatagcaaatcccacaggtcctaaactctagcaatacccttgcacttaacacaagtttctggttggggcgacgctcggagcatgaactccaactcttccgatgcatgtacactgctaagacgttcagccagtcaagagcagaagcgtatctatactactaatttggcatcccgagattagagctttgcaccaatccggtaacgatagttaagccttagcgtgcactaaccatgcggcacatcctacttctatgagtcctatatcaagcaataggtgtttacgacctcgatgcttggatccaggtacaatccacggatcggtggcagccagctnatttagtagtgttcggtttagttcgaacggatttgacaatgtcctatacgtgatctgaagttcaagaaccaggcagttaatccgagggctcggtttgctcattctatctttcagaattacctcgcactgtcacggaccaggaacatagcagtatagataaggggccctatcgttcacaaaatggcgcctttcagcgccgttaacagtggatcatccatgcttcaatctttatggtatttattgatccccattatatcccactccacaagaaacctaggggtttttcgtgtgacatggaaggcggttttggaagccccggtgggcctggttgcgacaggggtcccaggtcgtaatttgattggctgaaagcccctggatacgagggcggcggtcccaagtaaaaattaacccctggaagacacaggggcctcttgaaagaaaccgcttttccgtgttacaccacatttgtccccttgggaatggggattcccccaacatttgaacagttgctccaatttaaaaaagcctcaagaatccacgggcgggcgtgtcccaacaacacgctagcgcggacattgtgagacaaccaccagggcggagcggcggcaacatgttgattcacagcaacgactcgcaccactgtgggggggaggcccacccaatgctggacatatcacacc

SEQ ID NO: 569715 - DNA, 206 bp, Homo sapiens
cagtggtacactactctctgggaagccgcattgtaatagagtcatgaggttagattaagggatgatgttttagctattttttttgagagatggggtctcgctcctgtagcctaggtggaagtacaggggggtgatgatagctcactgtagcctcaaactcccggactcaagcgatcctcctacttcagccttcctagaaacgggga

SEQ ID NO: 569716 - DNA, 394 bp, Homo sapiens
gacaggatagaatcgagccggtacccgaactgtatgggtgggtagtcccgatttgcatggctaggttagtcatggcaaaacaaatatatccagtacactacagctactaggacgaagcctgatctcttatactagtatcctttgtcatttttattgccacaaataacctcctcggactcctgtgtgactcatttatcccaaacacccaactatctataaacctagccatggccatccccttatgagcgggcgcagtgattataggctttcgctctaagattaaaaatgccctagcccacttcttaccacaaggcacacctacaccccttatccccatactagttattatcgaaaccatcagcctactcattcaaccaatagccctggccgtaca

SEQ ID NO: 569717 - DNA, 213 bp, Homo sapiens
  misc_feature (5)..(5): n is a, c, g, or t
ggttntgaagagatgcgagaaatggaaccttatgcctatgtatggctacagactctttaagacacaaaatattaaagtaaaagagaatcatatacaaccaaaaaatggtgggctatattaatatcagacaacatagatttcaggacaaagaaaaacaggaggactcaagaaggtgcatgtcgtaacataaaagggatcagtctatcaagaaaa

SEQ ID NO: 569718 - DNA, 141 bp, Homo sapiens
agtgcatggagctgtgagtgtatcagcatgtgtgtgtgtgcagagcatgttgctgtgagtgtgattgtgtgtgtgtgtgtgcggtgcatggtgctgtgtgagatgtgcgtcgtgtgcagtgcatggtgctgtgtgagattg

SEQ ID NO: 569719 - DNA, 1387 bp, Homo sapiens
  misc_feature (902)..(902): n is a, c, g, or t
gcaaggacaacggtccaggccggtggcacgtgtagtcaccatcgacgaaggcgacgggcaagatctccaaggctgggccgctccttcactagcggcgcccgtcgacgtacgacgcgtatgggtcgtcccagaccaagttcgtgcagtgacccatgatggtggagctccagaaacgcaaggaggtggtgcacaccgtgtcgcctggacgagatctgacgtctagtcaagctctcgcctagcgcgcagggcatttcctggctgctcttcatcatgggatgagcacagcggggagatcaaacgtcacgacaggtcccgtgaggcacgtagtcagatgccagagggtgtgattgaagttggccgcgaaggaagcgtgccaagggcgggagagttcatcaccgtggaagctggctgataccaatacgagcgattggtccaacaattgctaggcaacatcagacggaagctatctgtccatttccgtacaacatccggggcccctctggacgcaggatgaacactgggcagctcctgtgtcctgtgtgggtcaactcgcgcgcgacacaatccgggtgtgctatttcaacagcagaaaactgctggggtgtcacccatgctctgaccaagaatgctcggcgtccaccgtgcaaatcccctcaataacgaaccctcgcctcggccacccgggccatggcgtccacttcgggtcaatcccgacccgacccgccccgtaaccaacggcgcagcaaacacgaacgaccgcaaagcgcagcattccttcgcgacacctcccgggggtgcagacgggaaaagaagcgaatgctgcgaccggcactcgcaaggctgcacctggacccgccccttaccaccgggcttggtcttggaacccgcgtacgaagtccgcnggagcatgggaaagcaaaccggtcaaccgagcccacctaaacgaccatcggttcaaagaccttcggagatcgacacgggcacttgcacccaaaccactggcgactggttgccccggcgacaattcgtcggaaagggctgatcaccacggcaaaggtgcccagggcgtagcaactgacccagctcgagaccgcgcagaccctgaacaatcaagcgcaacaaccgtggccaacgcaacatacacgcccccaccggccaagcaacaccacgacaaacgccacgacacacaagcggaccgccccatacccggcacacaacaccggaaacccccaaaaggggcgacgcacccacgtgtacacgcccatcaggaaactgggacagctcggagcaaccacggagaaaccaacacgggcgagatatcgcaacagaaagcatccggacaccgtctacgacacgcgcatcaacaacgcggtggggacacacgctc

SEQ ID NO: 569720 - DNA, 279 bp, Homo sapiens
ggggggggccccccccccccccccccccccttttggggccccccccgggcccccttttggggttttttttttggggcccctgggccggggggggcccccccccggggacccggccccccggggttcccccaaggggggtttttcccccggggggtttttaaacccccccccccccccccccccgggggggggggggggagtttgggggtttttttcctttttttttcccctttttcccggcccccttttttttttttgttttttttttgggggggggga

SEQ ID NO: 569721 - DNA, 273 bp, Homo sapiens
accaagtctgaacctgcggtcctctcgtactgagcaggattaccatggcaacaacacatcatcagtctcagtcctgtacactgacagacagccgcatacagtctcaccaatcattctcataatcataatcacgcagagtctcatacgccgactcataaccaccctgtggtccaacacggcggcacagctgcatgttgtgctcacaaacggagggtccgcgatggtggagggtcaggtgctgcattctgaatactggtgccacctcatcatcca

SEQ ID NO: 569722 - DNA, 173 bp, Homo sapiens
ctagaaaggtatacatagtaatgtctatttatttacatactgaagtcctaaatttatattagaacaatgtaaataatcgggggtaaacattttgaagatttattcttttcgtgtgctggggtgtcatacatttatgtcttgtgacatacactggtggtgtccttcttacaaaa

SEQ ID NO: 569723 - DNA, 107 bp, Homo sapiens
gaaccgcatctgcagcgagcaactgagaagccaagactgagccggcggccgcgggcagcgaacgagcagtgaccgtgctcctacccagctctgcttcacagcgccca

SEQ ID NO: 569724 - DNA, 98 bp, Homo sapiens
catggatttgctggtgcagtacaactaggcttaatagggacatgccagtgcactccggcctgggagacagagcaagactctgtctcaaaatagtaaaa

SEQ ID NO: 569725 - DNA, 188 bp, Homo sapiens
ggaaacttagccgacgttcgtttccactgagctgtgatgggaactcctgagatggatgaattgtagacgttattctatacttgcactgttcaatgtgacgatttacgttaataaattaaaattcagaagtattaaatttttttctctcagtcgcactagttacatttcaaatgctcaacactcacatg

SEQ ID NO: 569726 - DNA, 777 bp, Homo sapiens
ccaggtttcctcctgtcccgtcccatgttccctccacaggtagtgtgacgaggatgggggaagcactgtgggaagaccagccaatagactggtctaggacagctgggagtacgagcacgttgtgaacgcatccctagactctcgctcgtctagatgggttccacgcacttagaagacatgacccctctgtacagggtggattgtggtagagtgagaaatcaaggcctacctatgtgtgttgtctcactctcgaatgcacagttgggcagtacgggcaagatattgactcggcgacgcccatgtgtcaagcggttccttgtaagcctgggccctcgtcacttgtgcactagtagcagttagcgtcctcgtctgtcagggtgatcttggtcccactcggggatcctggtttgcaataggttcgtcattgacatgcttgcaaggccctctgcttagttgttactggaattcttcagggtagccctctgtggcccttttgctttgcgtgctgttgtcccttgtcccatgagggctggcaccggtgtgtaatttctgttttccctggtcgcatcttgtgttgggattgcattactggctggagtaaaggaccacgtggccgttcgagctctagggtgggcctccagtctgcgttatagaggtactccgtctctgcgtagtgagctggaagccctactggccggggggtgcccgttcctttgtaaccttggttttggggcctttaatttttctctgcaaattgggggccccgcctgttttcgc

SEQ ID NO: 569727 - DNA, 322 bp, Homo sapiens
  misc_feature (295)..(295): n is a, c, g, or t
  misc_feature (309)..(309): n is a, c, g, or t
tttatttcttcggctacagacaaaaaagaaattcctttactcggccaggcgcggtggctcacacttgtaatcccagcactttggcaggccgaggagggtggatcacgagggcaggagatcgagaccctcttggctaacatggtgaaaccccgtctctactaaaaatacaaaaaataagctaggcgtggtggcgggcacctgtggtcccagctactcgggaggcagaggcaggagaatggcgtgaacctgggaggcagagcttgcagtgagccgagatcgcgccactgcactccancctgggcggcacgngtagctccgtctc

SEQ ID NO: 569728 - DNA, 113 bp, Homo sapiens
tggtgtgtggtgctctgacggatcccctgtgaggtgtggcaggagctgttctgtatcgataaaccccgatcaactcaccactcttgctcagtctatataccgccatctacaag

SEQ ID NO: 569729 - DNA, 117 bp, Homo sapiens
tttgatgaggtcagatacactttggcggatccaaatggagctgcaattttaagagtcttctgatgtcatatcatttcactgtctaggctacaacacggaatctgaggaggcagagat

SEQ ID NO: 569730 - DNA, 685 bp, Homo sapiens
ccttatgagcatgcctgtgttgggttgacagtgagggtaataatgacttgttggttgattgtagatattgggctggtagtttggatcaactttttgccaagaaattatcctgaggtagcaataaagtcgtgttgaattttataataaattcaaattttatttcaacaccgagattaaaatttccacaaaattatgggatattccctttaagacccacaatttagaggttccttatttcaaagtttaaattaaccttagaaccctatcttaaatcgcgcggcccggttttgggactacctttggtgcgggaaatctacccccctttacctcccccagattttttcctttttccttgcacaggagcatttcctctcttgggtccaaaattttataaaattcaaccgggcgctttcaaggaggtttcttggcggtccaaataaaaaacgttaaaaaaaaaacatttctttctttacaacaacccgcgttttctcacaaaggccttggttttttttaaaattatttcttcaaaaaagaaatagtgtctcgctcctctttttttcaagagggaaaaaaggcccctgtcgaacaaacttgtgggccaacttttttaagaggcattctcttgtcattcttttaactggatcacaaagccccacagggtataaataacatctattaacacacc

SEQ ID NO: 569731 - DNA, 117 bp, Homo sapiens
agcagttcagccagtcacagctggacagttctctccagatcagcaaggacagcagcagttcagccagttcacagatggacagcagctctaccagatccagcaagtcaccatgcctgc

SEQ ID NO: 569732 - DNA, 1167 bp, Homo sapiens
acccaatgagagcagagagatgaaaggataaaaaagaggaaagcgtatgtgtattgtgcacgcatagggttgattgtgttgttgagttcgcgtgtcaggttgtttatgatacatgtctctactcgtgggggtgataatacatattcgtttgtgacagcgacttctttttgaaaaaagttgctctgtggatggagcaacccccccgctctctgtagagaagtagttgacgtgacccctctttttaaagggtccccgcttaaaagggggcctctttttaaagtcgcaaattttccttctcgacccccttttaatccctcgtgatcaaaaaggttatttggaaaaccgaggcgtagagtgtgattttggggcgcgaccccagtgttgtcgtgtgcccccccaaaataggggaaagtcctttggggtttatccccgcccagtgatgttattttaagaagaggtaagttttaagagaccttttaggcacacttcccagagttaaaatagggtgccaattgccccaattggcccatcttcaagaaaaaatgggttcatttcgaagcgtgttccagaaactgaccttagagggtccacttataggaaacacataggttggaaaaggaatcacgtccccaggatccaattgtagaatggaatttgattggccccattattggcaccacttggacctaattggtaaaccccccgtttggttttggttttttaaaccgaagattttgccaccccggattagtttttttgttttggccttttttgccttattaattcacacagttttttttttttttcttccccctgggggagattgtcttcccaaagtttaactacgtttaaataaataaaaattgaattttattgttcatttatataaaatctgatacccttgatgtaatttccaccaataaccagttcccaatttttatggccttttataaattcaccaatgataattttctttctataataaaatcccaagtaaacatttaaattgtagaactgatatttttcatttatatgaagtataagcctctactgggtctatattgtgaatcatcctgcctttcaaatttgtttcataattgttagatgaaaactatttttttggagatgttactgaagttgattgagccataaaagtttacttaatta

SEQ ID NO: 569733 - DNA, 92 bp, Homo sapiens
  misc_feature (5)..(5): n is a, c, g, or t
gtggnacgcaagggaaaacaaatttgtaaatattttcttgaaaggaaatgtattaagggagaccagtgtaaatttgatcatgatgcagagat

SEQ ID NO: 569734 - DNA, 129 bp, Homo sapiens
aggcctacacttgctgcaggtgaaccatggtagccctccttctcacactcatcctgtgcaccctgctccagctcaagggttcacatgtacatctacccattcccttagccccttctgggatggaagcat

SEQ ID NO: 569735 - DNA, 150 bp, Homo sapiens
cactcacttcataccaggaggcagaagctgcagtcagccgaggtggcaccactgcacttcagcctgggcaagactggagactgcctcaaaaaaagaaaaaaaatgttggtacttagagtataccatgacggcaacctccccacccccacc

SEQ ID NO: 569736 - DNA, 95 bp, Homo sapiens
  misc_feature (53)..(53): n is a, c, g, or t
gggtcgacacggccgtgtattactgtgcgagagggggggagtgggagctaacngtagactactggggccagggagccctggtcaccgtctcctca

SEQ ID NO: 569737 - DNA, 239 bp, Homo sapiens
cctatttctcgagttcttaaagtgctggcgattacagtgtcgtacacatgccagccttaggatgctatttggagcccctcagctgagatgcaagtggggcacatgtaactgagactccatctgccctgggacagcttttcttttttctttttttcctctttttctaatccagtatgactggtagtacctgggcagcttttctgagccttggggtaccagcctgccatgaatccgaggct

SEQ ID NO: 569738 - DNA, 463 bp, Homo sapiens
tccctgccggtagtggtagtctctgagcccaagctaagccaccatatcccctgtgaccggcacgtacacatccagatggccttaactgatgacattccttcacaaaagaagtgaaaatggcctgttcctgccttaactgatgacattcccttgtgaaattccttctccttgctcatcctggctcaaaagctcccctgctgatcaccttgtgacccctgccacctgcacgccagagaacaatcccctttgactataactttcctttacctacccaaatcctataaaacggccgcatgcaagttagggtaatgtcaggtctctgagcccaagctaagccaccatatcccctgtgaccggcacgtacacatccagatggccttaactgatgacattccttcacaaaagaagtgaaaatggcctgttcctgccttaactgatgacattcccttgtgaaattccttct

SEQ ID NO: 569739 - DNA, 807 bp, Homo sapiens
tttttttttttgggcattgtacttttggttttggtaataaaggaaaacagaacaaatgggaatgttttatgatgttgtatagcaatcggctttttacctttcaaagttccgggtaacacatgtgttcatatctggagtatgggttgggttcttttaaggcactacatctggtcttcactaattggttaatttctggttggaacccttcattaaatttctcaatagatttaagtaacacagattgttttttggcgcgagtgcactgtgtctattttaacaatcctcctgcatcggtatttaatagttcagcctttggaccaccgtgggtgccacgctatatagggaataaaggtggattcatatcaactttagaactccagtcccaaacttatttctgtcgggctccacgtggtacataaataacctaggaaatattttccagtctacaattgggtgctatgtgcaggtaccctaaatagtactcttaccagaggagaaattatattaacgaagccggttaataattccttatctaagtaattgggtcctgggcacatttaaaaaagcgccgttaggagaaagcaaaacgttggtggattctctattatattcagagtttatgtttctgaaatggagcgggaggatctggcatttggcgtgcatccctcgaatggtggtgtggtccaacagtttacagtgagtaagtgtcgatgtcggggggtaacatattggaggatatggaagtgtataagatccgttttggggccttttgtaagaagtttagtaggggaaaaaggaagagtggag

SEQ ID NO: 569740 - DNA, 210 bp, Homo sapiens
tgtactacgagctgcatcattggtatatggtttgtgtgttggttagtaatgctagtatgaagagcgttatggagtggaagtgaaatcacattgctagtgctggaggtcattaggagggctgagaggtgccctgtataggggtcatgggctgggttttactatattgataggcatgtgatatggtgggtcatatatgttgcttgtcgtgca

SEQ ID NO: 569741 - DNA, 493 bp, Homo sapiens
gggctctggtggggcttcctcattcttcctgggatcacaggcagtgcttcctgtgtggggaaaagcaagagagatcagatgtcacgtgtctgtgtagaaagaagtagacataggagactccatattgttatgtactaagaaaaattcttctgccttgagattctgtgaccttacccccaaccccgtgctctctgaaacatgtgtagtcaactcagagttgaatggattacgggcagtgcaagatgtgcttagttcaacagatgcttgaaggcagcatgctccttaagagtcatcaccactccctaatctcaagtacccaggtacacaaaaactgcggaaggccgcagggacctctgcctaggaaagccaggtattgtcccaggtttctccccatgtgatagtctgaaatatggcctcgtgggaagggaaagacctgactgtcccccagcccgacacccgtaaagggtctgtgctgaggaggattagtacaaga

SEQ ID NO: 569742 - DNA, 476 bp, Homo sapiens
gacatcacgctataatctgtcacaaactagtgaagaatgtggagactatggcagccattattgtgccagcctcctgccgatcctttgtaatcggtcacatatattattatgtgactattggtgtgatcatgtgaaactgcatgttattaaactattctgtaatattaagagcgtgttcttcttactgacattttgtaatcaagaaaagtgatctataagatatgtaatgcaaactagtatacagtagtctgattatggtaatatggtcactgtgaatcacttctggatttataaaccactcacaccacacgtttgtcatcagtacatgatgattctctggtgaacatacatggccatgggaagattatctaaattatcagtgaaaaattccgatatattttcaatcgcagagaccataagcgccgagtatagttgctttactagtatgttgcaatacctcctttaatacgtttaag

SEQ ID NO: 569743 - DNA, 147 bp, Homo sapiens
tctcacggtcccttcgattggcgggcccttatgcacgcttactatcttaacaggcttgagtgcagagattgaagagtcaaatctgaccaagatgttggtgttggctaagagaattctctgctccccacctctaagttgcccgccaat

SEQ ID NO: 569744 - DNA, 657 bp, Homo sapiens
gcagtggtcacacctgcagtcccagctacttgggaggctgaggcaggagaatggcatgaaaccgggaggcagagctgcagtgaagccgtgattgcatcattgactccagctggcataagagaccctgtttcaacaccacagacacacaaccccttatacccctgttattcaagtgtaccaactgcgcacgttggtatgactgtagcggagatggagaaaacacccaagcgggaaacacagacacaatctccagttcctatcaagtggcttgtgccgaccctgcgtttttaggaaaacaacttatccacggtacaccggtcccttgacaaattcctggttcaccttgaaagtggggggagaatgtcaaccgaaatggtgtgcgccgggccccacaactcccaaatacaatgcccttaactgtgaaaaccttccaattcttccacgtcaagggcctttggagaaattctttacccccctctcatgatacaacaactacagaacacgcaacgagttacaccaagtgggccttctggtaggtcaccatgacctggacagggagacggtggtcccaaggaaggtgaccaaagacatcgtggactgttcacaccttgatgtgctttaaaaccctttcatactaagtgttataatcgaacaaaa

SEQ ID NO: 569745 - DNA, 375 bp, Homo sapiens
cagaggagcaaatcatcagcatcacatgactcccaggctcagcgaatcctcctgactcagagtaactagtactacaggcgtgtgccaccatacccggcatttaaagtattattagtagagatggtgatttcgccatgtccaggctaggtcttgaactcctgacctcaagcaatctgacctcctcggactcccaaagtactggcattacaggcatgaaccactacccctcaccatttcttttacatgtaaccttagttcataagtataacaaatctttgaagagtgtttaggtaattaatagacattatactatagagtgcagctaataatttatactgttgcttaatctattttactacttaattctcagctaca

SEQ ID NO: 569746 - DNA, 437 bp, Homo sapiens
cacaaacacacacacgatgataagcagactcactctaggtcaggcaggggttggtcgaagtcatggaactcgtcggggagggtgatggcgttgtaggcagcctctctgttctcctctggcagatctaccacacctgaaaaaacacaagaacaagaagaaccgtcagcatactggttggctaggcaaggatgtttctgcaggtgacattagggctgggttttgccaggtacctcacaattcaatttgattctttaggtcttgattcgatattgatccaattgcttcgatatcgattcaataatacgtgcacatgacagaaatacctaaatattatttagaattaaccatttcaaaatgaattaaccatttcattgtgctttaactagcaaaaagggaatacaccattgtatactattgttcctgagctaaacttgcag

SEQ ID NO: 569747 - DNA, 171 bp, Homo sapiens
ataggtgaagagatgccctagagaggaccgagtgggtcgaggtgaatgagtgaggaagagcagagtatgtggatacccggaaacacacacacacacatcatcattatcatcatcatcatggtcgtcgtcatcatctggctgagtcatcatcatcatcaccaccagaatctt

SEQ ID NO: 569748 - DNA, 105 bp, Homo sapiens
ggtcactttctacacatcatcctttgtaaccctaaccccttcccaattgcagtaagctctgagataagttcttacctacgcattattgacctaggcctgtgctca

SEQ ID NO: 569749 - DNA, 329 bp, Homo sapiens
ccgggcccaaaatttgggcccggggggtttttttccaaccgttttttccccccccttggggggggttttacaaacccccctttccctccccccgggggtttttgggaaccccccttttccctccgcctggtttgatggttcccatttttaaaggtttaggggggccccccaaaaaaggaaaaagggcccccaagtttcccttccccttccgtttaaatttatttaaccccccccccccccccatttaatttaattaaaaaaacccatttaattaattttttgttgggcccccctttaaaaaatcccaatttaaattttatttgggccca

SEQ ID NO: 569750 - DNA, 152 bp, Homo sapiens
tgggtaccggtaacaaggtcagcatcggcctgacccgcagcgaataccagagccgctacaactttggctacgtagacccctactggaccgccgatggcgtgagcctgggctacaacgccttctatcgcaccactgactacaaagacctcgac

SEQ ID NO: 569751 - DNA, 855 bp, Homo sapiens
cacacgaaaggttaaattagattgcacagttaataatcacgttgatatttatggtactatgtatgtgggtgatgcctttctcttttggtgcccagtacatatattatgcctgtctaggttctgaactggggctgtattgcagctagtggtagaatcatggagtatgttaggttttgatagcgtagatgtttaattgtgggatctgcgcagttgtggttctggcacaagagtcattgacaaaccatctgagtaatggtcaaatattataagaaagatattcttcctgtaggggaagtacagtttttagtcaaagtggccgttatatcctcttgttgaattgtacataatacagatgttgtgagaaagtagttggggtgtagtatgccaatgaaaatactgttttatgggtgcctatattggtaactaagttattgtactaagtgcgatatgtatttttgaaggtaacggtacaagtttaacatgttgtgtcacctgctgtgtgtcctgaaacacgaagttagcagtgttataatcatctgtagaagtgctgacagaatagctttttgcaatcatgttatgggttcacaggaatattttgtaaaagtaaagcacaaattggattaactgattattggaacgtgactaagataagtgcttccaaatacaagggtatgttaagagatataggtatcgccggtaagatgtctagtgaacatatcagggtaagggttggaataatataattttcaggagaaaacagaaaaagagaattgggcgggcgagatacacatcgtgggggcaaggaaaaggatagatacaaacggcatgtgtcaaaacgggggcaagagggtgttg

SEQ ID NO: 569752 - DNA, 241 bp, Homo sapiens
  misc_feature (124)..(124): n is a, c, g, or t
acaggtcaactggttggtctggcaggtaccacctgtgcagcatgaacgtcactgtgggtgtcagaacggcagctgacttctggatcagttttatgagaaaaggagactctcattgtgtccacanccacaggccggaaatctcctttaccgtgctcccagctaggaatgctgcaagcaagcacagtgtggcccttgatctttcgacacactcaccgtgggtggagcatggtggggtgtgttc

SEQ ID NO: 569753 - DNA, 464 bp, Homo sapiens
  misc_feature (16)..(16): n is a, c, g, or t
  misc_feature (57)..(57): n is a, c, g, or t
  misc_feature (113)..(113): n is a, c, g, or t
  misc_feature (192)..(192): n is a, c, g, or t
  misc_feature (272)..(272): n is a, c, g, or t
  misc_feature (279)..(279): n is a, c, g, or t
  misc_feature (334)..(334): n is a, c, g, or t
ataaccccccaaaggncaaaggttatgtgaaactcactctggcttgtacggtcctangggtctgggcaagtgtacaaatggtacgtgtctactgttagagtatcatatagaanagtttcgctgccctaagaatcctctgtgctctgcctgttcatccctccctccaccccccagcccctggcaaccactganctttttgctgtctccatagtttagccttttctagaataaatgccgtattattggaaccatacagtttgtagccttttcanactggcntctttcacttagcaatatgcatctaagtttcctccatgtctcttcatggcttgancatttcctctggcactgagtaatgttcccttttctggatgcaccacactttatttacccactcacctattgcagaacatcttggttgcttctgagttcaggccattatgaataaagctgctataaacatc

SEQ ID NO: 569754 - DNA, 205 bp, Homo sapiens
ctctagagtatccccgcgcggcaccggacgcggtcgccctccgtgatgattttaataggtcgtccccaggctctccctggcaccacaattttctcctccatcttccaatctgtatgggctccagcgcgtccgccacggtccgacgctcccacttctccaggtactctatgatgctgaccttgtctgcggaactcctcgcccatct

SEQ ID NO: 569755 - DNA, 817 bp, Homo sapiens
taagctgagtcaacaagtctttatgggtcatcaggcaaggaaccttggggaagggactgaagcagggggctgaggctggaaaggccggaaatctgtggggcagatcggggcggctggcctccccttgcctctctgggtgtgggccggccggggtgtacgctcgatgtcctccaccgggtgcgtgtctgggtgagacctggctcgcggagagagaagctagaccttggccatcctgggaccttccttccacaatggtgtaccgcacctagacgcggtgggtcacccgcggtgtccttttcccctgcgtgacctgcgaacgtccagggtgggggacattccctatctgcctctccccaagacagtgtggccggggcggcgtcagcgtgcggggacacaatccctccctctgcgcctccccccagaccccgacagttccttctcagctatttcccacgaccagcgatttctctggtgaatatccccctggggtactctgccgtttgtagcgtccctactctctcccgggccaaggcgacgaaaccagcttgtcgtgatgccccaaaagactattcgatgcatcacttcttcacaaaacacggcgtatcgccgaccacaaattccaatagcccccccccaggtggggaccctcctcggtggcgagcacacacaccgctttttgccgacccccgccaacaagaaataaacggccggggcgataccctctcactagagatgcctttcccgggccactaaaggcgatttgtgcgccctctcccccaggggggggacattgcctctttccacaagatcgcgctag

SEQ ID NO: 569756 - DNA, 1581 bp, Homo sapiens
  misc_feature (1165)..(1165): n is a, c, g, or t
gctcccagccgaggctttctacaacctgcgtcaataaaatggccgcacaccagactccgacaccacgtcagccccgacagccctagccgagacaccccgggctgcagctgagcgggcgcagacgggccgaggcgggcagccgggcagcgcagtggaccgagggaccgagatgcaccccatgagcgcacgtgggccgggcaggtccgaaagcccggctagagagcgcgccatgcggcaggcgggctgcaaggggctctgcctgtcgctgttacgactacaagaccgacaagtatgtcatcgccaataacaagaaggtgggcctgctgtaccgagatgactgcaaagcctaccatccctaggcgtaccttggtcgctattgacggtcgtatcctgactacaagaacagggtataccaacagaacgatcgaccacctaccactgacaccagatgctatgtacaatacaaccaaagtacaaagggacgatgaaccctacaacccaaacccaccctacggaaatccagagagccaagcggcattcatggggcagatgctcgcaccgaaacaacagatacactacccagccacacagagcaaagacgaaaacgatactacaacaagatcggatcatccaaaacacccagaatacggctgacccccccaacaaccacatgaggggcgacacgacaaccgatccttgcctggcctggacccacaacatgcacagctggccactaaccccatggacaagcgaacgaccgcctggccaccacaaaagaggacaccagggccgaaccagccccacaccgaccatagcgtggaacaacgacgctcgttaacacgacgctaggacaaaccaccggacagcgcaacaacgaacccacggaacccgcaactgcaccacataggcccacagaaccaaggagaggaaaccataggggcgcccacagcgggcacgcacaccccagtaccgaacgactaccctatcgcgcacccatcgagactagccaccgaatctcgcaccacacacgcagcctcccaagcggccagtccgacgagcgagcgcacacatcaccactcgacagaggaccagcacaccgagaacaacactcaccacccaactttatccaccaaagcaagcataacacccacccgtacacaagagnaccgacccccagcagacacttaccactactcacacagaataggcagacaactgcacaatgacgcagatcaagagaagccaagagcatctcgcacttagagtcgagccaataattgacaacaagagaacacaataaatgtcctcactattctcaacagtcactcacctagctcaactcagcgtcagcaacaccatccatcacgtatatactcacacacataagcactaacacaactacataaccatagcaatcgtcttcactacacccacccctatccatcacactaacgtcgcccaacaacaaaacaaaatcacgaacaaaacaacacaaacaacaaacagaaagaaacttatacagaaaacaaatcactaaaaccatatctaactataagtaacataacaaatataactatattt

SEQ ID NO: 569757 - DNA, 1038 bp, Homo sapiens
tacgcctgcggagtactgcacaagatgctgtccgtgacgcgttgctgcggccgtggatccgcgcccttcctcggcagggccggactggtctccagaaatgctttgggttcatctttcattagctgcaaggaactatccatgcctctaacactcatcttccaacaagcactgggcactgctcgcagcatgtcctctattcttgcaagcagcgtcattcttggagctgatacctctgtcagatcttgaagcacacactgggcgtgtcttaagtattaggtgatcggtcatttgcccagccgtaccatggctctgcaggacatgtatcaagctagcaagcaacatggtcagcagtatttcatatccaggcgttcaacagggtcatgtccattgaaactattggaacctgcacaatgttagagtagtatgtccgatgcatacagggcacaactgcataacacacctcacatctcacagtgcacaggcagcatacttcagcttagcacagcaggccacaggtagccccatatgctggcacggttccacagtatggatcgcaaggcagcctagtaaccggacgtacagctagtacaggattaggaatagacccacttatgggtgtcaagtaggcttaatctcgcactggggcacacatggtgtccccacaagtataggctctggcgccacaaggcaacagccggatcacagcagcacacctactcggctcactatgaacaagagcaccccacagagaatcatacacatatacgcatacccgacagaacttagacaccacagatggacgatagagcaaaaccccaaaagtggagcagaacaccatggcgccgattccacagcgcggaccacggccggcgaatcacgacctgctgggatagccacccgaacagcgagaacccgtccgcagccacccaagccggatggaaacaccatggacctaactatgcggggcatggaacccccggaccacatgccaaacgagggtgggcaaactcgaaagcaccagtacacaaaagatgtggc

SEQ ID NO: 569758 - DNA, 1086 bp, Homo sapiens
gcggatggactccgtccagaggcagaccaaggtggtagattctaggtgacggacggcaagtcccaggactgatgtgcacactgctgcccgtgtcctcaaggacctgggctgtgaacgtctatcgctgtgggtgtgaagaacgccgatagaggctgagctgagtgctcctggcgtccccgccgagggacatcacctgtccacagctgtgctaggacttcactgcacgcatctggctgcgctgtgcttggcctgactcatgccgtctcactcttgccaagagtgctccatgggttggagatgccctgcgtgcatgggcaccaggcaaggcacgctgtgctaccaaggccctggagaaccaacacgctccacttgcaccaccgacacaatgtccctgtgatcgcgtatgatgcacacgagatgacacctcactaccgagccgattccctgcacttagtccatgtgaccatccctagggtacccccaccgaggatcgaacacacccccatacaaaggctacatcatggacctccgcataaagggagcagcaagacacattcttagctagatgctgggaacaaaccactcacgaagggtcaacgcgctgagctcgcgctgcgccaagatgtgggtcccccgtgatccgggcactttacacaaccggggcaacgcacagggaccaacaaacaacacctggggcatccataccacacgacgcaccaagccacgatcacacccaaggcgatccatccccgcacgagataacccacacacatcctaatgcacgcgcgcacgcgcgggcacgcggaccgcaaaccgccaccctgccaggacgcaccccgcgacccggacgaccaaccaaaacgccgaaccagtgcagtagccgaaaccagacacacccaagggagccacaggcatggaaaccaactagcaagcaccagcccacgataagacccccacccacacgaaaacccaggtcccagacagcccaaaccacacaggagagcaagcaccacaacaagggacacacgaggatagacaacaaaccaacaaatacagcccaaggcatcgcgacaactcagtcgccag

SEQ ID NO: 569759 - DNA, 439 bp, Homo sapiens
cgactcagaccaaccgcactgtctattgatgtctaagcactagtgatgggtaagtatatgatgtacacatcgtttagcttatatggggacaatgtccactataatccattgtatatgattctttctgcgggaggggatggcttattaactagttcatattaaatggtggtatttaaaataatctttgaatataccacttacataaattcttaaataagcacagttttcatagttggacatctctcactatctgatgattcacagcatgactgtagaagtttaaactaacacatactgactggaatttggactcaagggaaacaatggtgagaataaaaatattggactcccttatacaaaggcaatcatttaacctttataggttaattcctaatatatatccttttccttcttaattaggatgagaatgcggtgtttg

SEQ ID NO: 569760 - DNA, 130 bp, Homo sapiens
  misc_feature (128)..(128): n is a, c, g, or t
gtaaattgacaaattatagttgtatatatttatggggtacaaagcaatgttttggtttattaatacaatgtggaagaattaaatctaggttgatattaaatcaataaaattgacatccatcacataanaa

SEQ ID NO: 569761 - DNA, 344 bp, Homo sapiens
accctttacgacgaagcgtagaaactggtgaaagtggcaggcagacgtacccaatggacccccacaggcacccctgtgctgggaggcggggtccagtaaaacaggacagcaccagagtaaccagtgtcctcggtaaccatggacaactgaccttacgtactgagcctaaaaggcgaggggcaggatgccctaattagggcattgcaaatgattgggcagcggggaatgcagatccccaataaataggcaccccaataaataggcagagagatactgccctgaccctcataacttttcaaccctggagccatagctgggccttggtagcagggaggggctctgag

SEQ ID NO: 569762 - DNA, 1183 bp, Homo sapiens
cggaccagagatctttcttaaatccctgctactgctcccttctcacaggcattcacagaacccttctgattcgtaagcggttacgacaactcactgcttcttctccagctccccatgtggctttctgctctggagcactaacggctccccagctaagccgggcagcggcacgcactccacactcacgacaccactgcagcatcagcgacgccctcctgcgccacacacctgcggctgcctcactcacgacaccgccgctggactctcctcctcttcactggccacgcaactgcctccttgcgcacctcgcgctctcctccagcgcctggattcctccgatctccacatccctctcttctcacgcggcgctctactcttaatatacactcttgaccctctaggacttcctactacgcctgacacgcaccaacgccattttcaacgcaacacgcagttttaccctgcgcactccacgcccactgcctccacgcctgctcgaccacccttgacactaccacttgctcatacctttcacttcttccaacctgcacaccccaccgtcagcttcctggtgcttcccacggccccaccccacgcactctctcatcaaccacctgcctgcgcactctcctcaacctactccacaacacacgcactcaactgcctctgcacccaacttacaacaccctctccaccccctactccaccacccccccaccacacccacacaccttaacacaccctacctccagacgcaccacaaccccactcacacctcttacaccacggcacacactccacaccgcggcgcacagccaacctacataacccccccgcaccccacaaccccacacactcccggacccacacccgcgcaccccaacgcacacgacacccccacaccctgcccacacacactggcaacacccacacccgtcacaacctcgcgccacaaccaccccacgcaaccactcacaccccataactcgcacaccaccacacgcgccgagccacaccggcgacacccacccgagcacgcccaccccacgacacctcacccccaacgcacgagcacacccgcaccaccaccaacacgccaccctcggcgccacacacacgacacgcccacgacccaccacccacggcgcccaccacatacacaccaccacctcacccacaccgc

SEQ ID NO: 569763 - DNA, 413 bp, Homo sapiens
ctggcatcaagactttgcctactcatattttttattatttaaaatagtctataggatccaaagatgccatgtctttttatctaggttcttctagtcagtatttctggacataaggccgttattacctttctacgagttttgtctctgacacgcacgcacacacacacacacacacacacacacacacacacacccctaatctatttatttaatggaattgtaaataaaggagaaaaagcacatgtgcaatttctggtttaaggctgggcatagtggctcacccttataatcccagcactttgaggggctgaggtgggtggatttcttgagcccaggagtttgagatcaatctgggcaacatagaaagaccgtgtctctactgaaaacttctgggcatggtggtgtgcatctat

SEQ ID NO: 569764 - DNA, 259 bp, Homo sapiens
cgatttctgtggaaaatatcattggaattttgacagggattgcactgaatctttagatcactttggttagtatggacattgtagcaatattaagtcttccaatctatgaatgtgggatatttttgcatttatttgtgactttaatttcttatgtcactgttttacagttttcagtgtagagatattttaccttcttggttaaatttattcctaagtatattatatttcgtgacactactgcttgttgtatattgatatg

SEQ ID NO: 569765 - DNA, 197 bp, Homo sapiens
  misc_feature (12)..(12): n is a, c, g, or t
  misc_feature (166)..(166): n is a, c, g, or t
  misc_feature (175)..(175): n is a, c, g, or t
ctctagaggatnttccccgatagccgacagcctcgcctgtgtggaggcttaggacgggcgggtgcaatcctcgaaggggggtctcagcgaccatgggggacaccatccacatgcaggcggtagttggggcctcggcagtgcctcatacggggtgccgggggtcacntgttgcccnctcagtgccctgttcgggctag

SEQ ID NO: 569766 - DNA, 172 bp, Homo sapiens
ggactgtaagggactggtgttaactcatagagttggaaagggattattatataaattctgcctcttgaggagctgacatagtttggatcaagtttgtgggataagagattttttagcacactcaacatcagggacttgggtaatccaaaacttgcctgcaccaaactaatgg

SEQ ID NO: 569767 - DNA, 1372 bp, Homo sapiens
ggtactacttaccttacaaaaacataatgaccagtataagaattgctttcgctcttgtcaaaaaactagaatagaccccagtgtcgggcaggtagtgtgagcagagccatgacatactgcacccgttacacataatcccacatcgtctctaatgatcagacattggctcgacctctgaccagagaccccagacaacagatgagcggaagatgcagaattgtcaacatgacctgctagggggcaggctacagtacagggcaggtcacaagccgcataatggagttggtagggctaggccgcagcagcaagcagaagaagttggtagaagataattaggtagtaggcaaccactgtgagcacgcaagatagtaacgcagacaagagctgtgcacgagaagataaaatccaaaaagagagaggagaaagaacgaaaacgaaacaaaaaaaagagaacaagaagaaaacaaaagaaaaaaaagaacaaagaaaaaaaagacagaaaaagggcaaaccacaaacgagaccaaagacaagaaaacaagaagaaacgaaacaagcaccaagaaacgagaaaaaaaaatcaacaaacagagagaaaaacacaagacaagaactacaaaaaaaacacagaaagaaagacaacaaaaagcagcccaccaagaaaagacacaacaccagaaccaaacacgaacaagacgatcgacagaagccaaccgacaacaaacagagagaaaacgacaaaaaacaacacaccaaaaaagacaaacgagaaaaaaaaaaagagcacagaaaagaaagacaaaaaaaacaacgaaaagagaaacaaaaaaaagaaaacaagaaaaaaacaaagaacaagagaaagaaacaaaacacaaaagacaaaacaagaaaccacacccaaaccagaacaacacggcaacagataaaacaaacaaacacagaagacaaggacaagaaaacaacaaaaagacaaaaagaagacaagaaaaaagcaaggagcagagaccacgaaaacacgaagaacaaagcaaatgaagaaccacacgtggaaaagagagcacaagacacacagcgacacaacagcgaacgaaagaaaacagacgtaaaaagagccaaaccaacacataggcacgacaacgccaccacaaaaaagaaaacacagagagaaaacaacacaaaggagaaaacaagcaacaaagaggcgagaaagacaaaaatacgacaaacgaaacaacaacagcaaggagaccagacgaaaacaacgaacagcagacaaaaagaaacacaagcacagagaacaagaagagagacaaaacgaagaagagagcacaacaacagcaaacaaaacgcagaaccgagacaagacaat

SEQ ID NO: 569768 - DNA, 112 bp, Homo sapiens
tacctgtcccattttggcggacatcagcttttctgctgcgatagcggtccactgcccaacgccgaagcggatcgacagatctggcggtgtcgctcagtgtaattgcgggggt

SEQ ID NO: 569769 - DNA, 1116 bp, Homo sapiens
ggctctgcgggctcccgggctacagcggctgcggtagaaatgcccctccgtggctagtgagcgacggcgccgggcccgctatactcgtcaccaccgtccccacctccccgctgcagaacagcgctgttggaccgccggctccgcggcgatggcgctctataacccctaccgccacgacatggtcgctagttctaggggagatcatgatggactagccgcatcctgtaaggtcctcagggaccagatgaggagggatccgtgagggtgcccatgatcctgcaggagcgtccccgagatttcgagatcctaactctcgaccttggagcatagtcgtcctagagccttgccagagaagggctctccgtcgcgtcgacgagtatcatccgtatcctgcgatgttgaacagtggtctccccagatacccgatgaacctatgcgcttcgtgcgatgatgaggagctacgcgtactgtgattacagcgtgttagccgggcatggttgctcagattagtgcttcatagatgcctgtctgggagatgccccatcaaatatacctggcaggggagatcgtggtgacctggtccgacggctgtccagaagtgctcttgtgcattgtgcattctcctgtggtgcctactatgggatccgactcctgactttgggcgctcaggagcctggcatcggtggcctgggtctcgctagcttggattcccatgggggccggtgtcggacaccggggctgtaaagtgccccatgttgtcctctaagcctggtacctagtagaggctggcctgctggaggactcctggtcccatgaaggggcatcatgcgcgagaggaagactgtgcctgttcacaaggtagccaaccccattgcagccgttccgagggcttttggcgccttgtagcgctttcctgcaggcccagctgggggtacctggactgtaggcttctccccaatacccctggtttctcgttgggagcgcagagggggctcccctttggatgttacccctttgcttccttctacttttgcaacccgtggacccgttgtgtccacgcattgatctgcaatttggtcataacccccgtgtctgattgcctttattgaggaaccc

SEQ ID NO: 569770 - DNA, 293 bp, Homo sapiens
  misc_feature (153)..(153): n is a, c, g, or t
  misc_feature (155)..(155): n is a, c, g, or t
  misc_feature (157)..(159): n is a, c, g, or t
  misc_feature (164)..(164): n is a, c, g, or t
taaacgctaaggaaaaaaaacaaacacaggactgtttcaagtactcaagactgacttacagaccaaccaaccaccttgctggacccttgctagcagcattcttataaaagaactttcgacccctatatgctgaaactcactgtgctccagacnanannntcctnacctatgcaagggatttttaattaatttttcctaatttaaggcccccggctttttttggttccagggtatgatggaggggaataaaaaaaaggtttcttggggaaaccaataccggtaggttatttgaa

SEQ ID NO: 569771 - DNA, 132 bp, Homo sapiens
atgagcatcatcaggcaaggcagcatctggaacacagggccatttcatttcattctcccacatggccacattccactggcaggcattttcacatcatggggcacatcaaggcacatttagctttgcagcatt

SEQ ID NO: 569772 - DNA, 846 bp, Homo sapiens
ggtgcctgtgaacatggcggcgcccgttgtcacggccccgggcagagctctgctgcgggcgggcgctggacggtgcttcggggaggcgtccaggagctactgcggacgtgacatgaagggaacgcccctgacctggcctgcaacttcagcctttctcaaaatcggggcagggtcatcgtggagcgctggtgcgaaggtaccgctggccgtgtagtggccggaagccgcgcctgaccgggacatcgcgtctataagctggtggaggacaccgaagcatcggcccaaagaaaaccctggagctctatcctgacgcagtcggtgggcgaactgtccgcaggtccggggtgaccgtggtctcagtgaagaactctttagggccggaatcgactcccttcctcagggacttggctgtatttgcatccccctgtaaaacaagaagctgtttgacagaggacgaaacttgttgagacaatgaaggaaacctacgacgaagatccagaccacggccaggtgaggcgaccagtgaaattttctaaaagtgctgtctgcctgggaggtatgggatcatgcaccaaatgtccacactggggacgttgaaccctgaaatagttgccgccacttctttagaatcttggtgttgtggttgccccaccttacattaagttcccagagagcctatcaccggtggggcgagtatggtgtaggtgacggagcaagcagatcggaccgggcgcaatgtgcaccccgatttcatccagttgccatagaatttagaattggacacagagcggtacagtggacccattccctatgtcccgggcgacgccaaacacgttgttaatgccc

SEQ ID NO: 569773 - DNA, 424 bp, Homo sapiens
gagctcggtaccccacatggccagagtaggagagagacagagagcagggaggtttaaacaatcagatctcatgagaactcactaactatatagtagcaaggggagatggggctaaaccattcatgagaactccactcctatgatccaatcacgttccaccaggcccctcctccaacactggggattacaattaaatgtaagatttgggcagggacacaaacacaaaccatatcagagtatgttgaaccatccttgcatccctgggatgaatcccacttgattacaatgaatgatcttttaaatatgtagttgaatttggtttaaggattttgcatctctgttcaaagatactggcctgtagttttctttttttgttgcgtctttgtctggttttgtaccagggaaatactggccctgtgaagta

SEQ ID NO: 569774 - DNA, 155 bp, Homo sapiens
gagctcgcgcgaacttagcataaagtctttaagatgcatccatgtttccagtgttttgggtttttttagaaaaactcataaggtgaatttcaagccgggatgggtgggctaacgcctctaatcccagggactttggaggccaagaaggccggtca

SEQ ID NO: 569775 - DNA, 502 bp, Homo sapiens
  misc_feature (491)..(491): n is a, c, g, or t
cggtgaacctattcagaaaatcctcgggtggggaaagaccccacaccttctttaaggatcattggtctcgccatcacaggatctgggaattgtttcctagggtgtgtacaaataagccgggggggaatgaagcacatttgtctggcaaccaaacttgagtccctcagagaacagatgcagagagacctgctctggctggcccggttacaggggccacggtggagtcacagggaggctgtgaccggccataagcccaggagagcccgtggcagctgtgccgaggcgccaggacctctaaggggaagcttcccaagctaggatgggagcaacacggcaagtgatttgtgtccaccaagttcatggtccctccggggcgcttataaagctcagatgtatagtgaggtagggacaaatacaaaaaagcatttttaagaaaggagaggcatgagtcttccccttttggataaaaagcagccggtgatgaggtcggnagcacaagaga

SEQ ID NO: 569776 - DNA, 178 bp, Homo sapiens
gctatgccaatatcattggttcgagatacagacgatcctaatgctgagtcatagtgcggacttacatcgaccagatctgcctcttcactgcttagtgtgtccattcgagggcggatcctctctggcgtggtgaccaagatgaagatgcagaggaccattgtcatccgacgagtgcaat

SEQ ID NO: 569777 - DNA, 133 bp, Homo sapiens
  misc_feature (96)..(96): n is a, c, g, or t
  misc_feature (129)..(129): n is a, c, g, or t
agccactagcgcagctcgagcgatggcctatgtccccgcaccgggcataccagccacctacaacccgacgctgccttactaccagcccatcccggncgggcatcaacgtgggaatgtctgtttaacatnggaa

SEQ ID NO: 569778 - DNA, 260 bp, Homo sapiens
tcttacaggctactaattttatcgcacattcaacttcaaaagagagcagtgtaaccattaccactaatcactgaatgccatgaagccatggagtgaagcaggagctttcaccttttatgtgaatttccaatggtactgtggaggctgaggaaattttcttcaggctaacccagatatactaaagcccaagttcaccagtctacacctgccaaactaaaaaaacaagcagccacttgcacaataaaccgccaggcccattg

SEQ ID NO: 569779 - DNA, 108 bp, Homo sapiens
cccaggttcacagcaggctggcctgaatcgtgagtgtgacggcgtgagtttgtgctcgtgtgggtgtctgtgatggttgcgcagagtgttggcgttactgtgtgtatg

SEQ ID NO: 569780 - DNA, 915 bp, Homo sapiens
  misc_feature (915)..(915): n is a, c, g, or t
gtctcgcgacgtcaggccaagattccagaatgactactatctttgattacccctttaaaaatcttcccatgcatcaaaatgggccctcagattttccataagacctctgagctgttcctcccagttacgagctgcccagtgtgtccagaccaaaaggaagaagatgttagccaaacccaatatacggcatgtgtgtgcgtgtggatggtgtcgcactccattttgctgtcgtggcacttcatataaagaactgatgcccacatgatttgctagagcagcgctcagggggttgttgcatcggaccagtgtccttaaggaagtagtggattatatcatcttcggtacaagttattccaggaaagtgacaacacacacgcaattgtgggctagagagtgctgcctttggagcttggtttctctgaccaagatccttgctcacactgtcaaccatggtgtgtatctctgcacaaccaagccatgaccaccaggtttgttggcttgatttgcttctggccaggtgtgatgtgatcgtggcaagggcgtgttgagttgaatgtccgatgtaccttattcgtcaactcccagaacatgagaaactggatagtttgatctcaattacaggcaattttatgggccaggattgtcttaatctttaatccgaatgattcttaggactgagtcccggggtattgggttcaacagtggactggcatctgagaccgatggccgtgcttgctgttctggtgacagtgataggatggtcaaaggtcagcaaaaggaggagagatctttgtgtggactcaatcggacgaagccaagatggcggctctggaagcaaacgtagcaggaggggacttgagggaagatagacacggttactaatattgcaaaaacggcatctggtgtgagtatagn

SEQ ID NO: 569781 - DNA, 292 bp, Homo sapiens
catagtctttgtgttttagcagattatcggttgtcagtgcgatgcccaaggccaaggcataaacccggtagcatgaagtttgtctacagtgtcaaccgaaagcgtctgaaccggaatgctcgacggaaggcagcgcggggattcgaatgctcccacatccgacatgcctgggaccacgctaaatcggtacggcagaaccgggccgagatggggttggctgtggaccccaacagggcggtgcgctccgtaaaagaaaggtgaaggccgtggaggtggacatagaggagaggcc

SEQ ID NO: 569782 - DNA, 127 bp, Homo sapiens
gtgcggagacttgaggatgagatcagttgagctgcatgcatttgaaaggcatgtgcctgtctcctcacttgagtgcaatgttccatcgaccaaagccctgttctgatcattactcatgtactgccgg

SEQ ID NO: 569783 - DNA, 835 bp, Homo sapiens
gaaaggtggaattttaagtatgactctttactgacagttaatgtggactgttgttactggagtgatggtattgataggaaattgtggtcggaacagcgtagtaattggtacataaagtcttgtatggctgtggtatgctggaaagtaatgactgggcctcagatggagtaagctaaggtatttctttaatgtatccttttaaaagctaatggagagtaactgactttgttcattgtggcccatttgagagaaacatatatctttctcaaatactttacacaaaggtcgatcacactgtgtaactgtttgccaagtcgtactacacaacgaacaactagaactcagaatcattacactaactttgctgacagtttcacatggtttctaaatggcagggtcaggatcgaactatggggactgactctgaagtctatgtgttctcatagctatgctacagagtaacatattttccagaactttcgatagagtacctaaactttatgcttgacgcgtggcggttcacggcaaaattgtcgacatccaaccgaattggtgcgctctctctcgtaaacgcgaccgaacacgtgcctcactacttcttattcggccacatcctggtagctcctcccgtttgggtctcttcttgctggcacactggagcaacagccccacaggcaacacttgaacgacgcctatgcccattggtggttcctcctaactcttgttcttcaagcttctggtcattgggctcagctttttcccatcctcagaggctcttgccctctttggtctctcacactctgggctcggccttgccccaggacagaacacccta

SEQ ID NO: 569784 - DNA, 407 bp, Homo sapiens
acattcatcctgggtgacccaccagctcagcaccgtgttcagctaaccctggggacaaacagccgtctggctcgagtgggagggtccaaacctgcttttctcatctccccccaagtctgtgccgtcagagcttctggctgctcctgaatggtggaatgctgtgtcctctcttctgtgtcccgcggcctgtagggtttggggctctctcgcgcgtgctttctgggggcccagacgcaaggccccgattgggccaacatcagagccctgctgccagaactcaaccctcatggtccaacccacccctggccccttttctttttctctttctctctccccttctttggttttccttcctttttaaaaggagatgggttcccctttatattatggtttttttcttaggcctt

SEQ ID NO: 569785 - DNA, 453 bp, Homo sapiens
ctgggtagaggtgtctggatccagggggtggatcactaatgggttggtgctgtggtgacagtgagttctcacgagagctggttgtttaaaagtgtgtagaacctcccctcccctctttctcgctcttgctttttgcatgtgatatgcctgctcccccttcaccttctgccatgattataagcttcctgagaccccccagaagctgagcagatatcagcaccatgcttcctgtaaagcctgcagaactgtgggccaattaaacctcttttttctttcttcttctttttttttttttagatggaatctcgctctgtcgcccaggttggaatgtgcaggggtgaaatttgggctcactggaacctccacctcccaaggttcaagcggattctcagcctggggtctccaaggggtcccggagctcggaattcggtaatctatggctcatacgctgtg

SEQ ID NO: 569786 - DNA, 530 bp, Homo sapiens
ctgaggatcccctgatatgcgttctcaggagcaacaggaaataacgcggagatctgtgtcctgcacttagactatggaccctgccgggccctaacttctccgtatactactacgacaggtacacgcagagctgtcggcagttcctgtacgggggcggcgagggctacgccaactatttcgacacctggaaggctagcgaagatgcttgttggaggatagaaaaagttcgtaaagtatgacggtgtgcaagtgagtgtggagggaacagtgtgcaggggtccagagagacagtgatttcttgaatctaagttctatgacatgtgagaaattcttttccggtgggtgtcacgggaacgggattgagaacaggtgtccagatcaagctacttgtgtgggcttctgcgcaccaaagaacattccatcattgggctacagtccataagatgagggactgtgctctgccaatgtgactcgctatcattggaatccaagatacagaacctgtgatgctttcacctatactggccggg

SEQ ID NO: 569787 - DNA, 312 bp, Homo sapiens
gaggatcccctctatccactatgggcaggccacggcgtccaggcgggcccagtcagtctgttggtctagagaggagcctggctcggtatccggcgctgcttcgtatgactgaccccggcctctggctgaggacatgtcagcggctcctacatgttagagatccctgtggctgaggtgggcctctctacctctgtccccactcactccagagagcactggcgttggtcacgtcttgactggaagaacctgttcgttgttcccttgccctggtggtgggggggccagaccacatccgtactggcccggggtacc

SEQ ID NO: 569788 - DNA, 132 bp, Homo sapiens
aacaagttgatattactcaaaaacagctggaagaagaaatttctagattacccaaagaaatagatcagtttgagaaaatacaaaacaattcaaagctctttaggataaagcttttcaactttaaaatgagct

SEQ ID NO: 569789 - DNA, 648 bp, Homo sapiens
  misc_feature (573)..(573): n is a, c, g, or t
ccgggctgcaggaattgggaccgggctgctgtcagaggttctatgcagatgatggcagttctagcaacggtcccaggagtctgttccctgttctagatccgcacatcctataggtaggcccagatactgtgcgttgaggctctagtgagggaacagtggatactgactgtgcgtcagaacgtttactaccgatgagcctaccttgggtttgcggacccagtctaatacgaccttcatgtgttctccatgctctcaagcgagccatgtgcccatggactgagagtcacgcctgaccagagccagctcatctcacagccatatgccactaacggactatgcgggatcggagctcacactgttccagatcccgctacttgcatagccaggcctacagcgaggtccagtagccttgatgcatgatgtacacctgagcttccagctagatctgctcgagctggagagacctgagagcctgaaccagagtgtggtcctgagctgctgacggctgacagatatgtggagcctacagggaccaagtgtgagagaggccgcaggtgtgagaccaacggtacnggttgacacagatctgagacatgtcgcggacagcgagacgtgcactgagggactgttggacctgtggtggcctgt

SEQ ID NO: 569790 - DNA, 902 bp, Homo sapiens
ggctgcagtcccccatagacctgcattattgaatcgtgcatatatgacgccagcctcacgcccctcgagttccaaggctacaatctgtctgccaacaagcagtattctcctgaccaacaatggccattcagtgaagctgaacctgcacctcggacatgcacatccagggcctccagtctcgctacagtgccacgcagactgcacctgcactgggaggaacccgaatgacccagacggtcatgagcacaccgtcagcgtgacagaagttcgaccgacgagactgcacattgtccattataactcagacctttatcctgacgccagacactggcagacaacaagtcagaaggacctcgactgtactggctgtatctacattgagatgggatccatatacaatccgtcctatgacagatcttcagtcaccttcaacatgtagagtacaacaggccaggaagcatacgtcccgggattcaacattgaagagctgcttccggagaggaccgcatgaatattaccggtaccgggagtacctgagcacaaccaacttgcaagcgccacatggagctctaggacaggaaaccagaaataccgatgcaaaattacacgaggaagcaggatagtaggactaagagagaacaagccctgatactgcaacagacaatggactaaacatatccaccaagagaaatactgactctacacaagaataccgcgagcaggggtcacaagaaaagataccgaagtgaagagggcatgggtaaaagaagccttccctttctatcccaaggatgggaaggacatggtaactgacggataaggactagaagatgtaggggcaacagttccatcgattcacataggccacatgagatgggaatacattgaggaatcaagaactg

SEQ ID NO: 569791 - DNA, 344 bp, Homo sapiens
ggtaccaaacgaaaggcatgaggtgatttcgttaaatttcactagcggcactgccatggaaggttatgaaggggaacttgtggcagggaccagccttatcatactggtgcatctggttgccggggcagagtgttcacggcctgtttgtggggatgttgaggcacaaggaaaatacaaagttttaaaaaatgtactatcactaatttgccttgaaattccctgaatcctttaggatagatttttgcttttgtttttgagacagagtcttgctctgtcaccgaggctagagtgtagcggcacgatctgggctgactgcaacctctgccgtctgggctcaagcgatc

SEQ ID NO: 569792 - DNA, 92 bp, Homo sapiens
cgtgacggggctccactgtgtcggggacacctaccccagcaacgaccggtgctgccacgagtgcaggccaggcaacgggatggtgagccgct

SEQ ID NO: 569793 - DNA, 292 bp, Homo sapiens
ttggttcgtctctgaggatccctcagagaagagacgagatgaaggaataaagaaagacaagagagagaaagaaagagaaaggagaggagaggagaggagaaagaacatttcataaagagaaactggattatcccactaggctcagtcctgatgagatgtggtcctgtcttcctctatctcgatctctctctatactgctgagacgcgggagacttgggggccacggaacaggaggagtgtgagcagttagcaagacagttgctcagaactccgaccacccatggtgacttct

SEQ ID NO: 569794 - DNA, 454 bp, Homo sapiens
ctgaaggtttttaaagcagggtggaagcccttgccctttcctttctacctttaaaaccttcactctcattgcatataggccgaacctaattagacacctaggatgaagaaggactgctccagtcctctttctgtggtagtggtggtgagaggtggctgattcccagcaatatgccattgacgtggcgttaaaaggttcttacaacggtagaacaggaaaaggggcaagggcttccaccccatgctttaaaaattgattcagttctaattctctgcttgataatatgctatgctgccgcacggaggtatcgggaatataaaccagagccaaggttgcctgacacacgcatgaaaatagtgcgcccacccgatctcacgatgcactactcttatcgtacttatatccagcagacattcaggtgcagctggtcacagtaatcacactctcacacata

SEQ ID NO: 569795 - DNA, 125 bp, Homo sapiens
attcgcggccgcgtcgaccgtgaggctaaggttttaacatgagacagggttcttgtagagagcctagatgaggtcaatgctctttaagctgggcaatagagcgagattgtcctctaactgggact

SEQ ID NO: 569796 - DNA, 1361 bp, Homo sapiens
  misc_feature (1137)..(1137): n is a, c, g, or t
tctgtgatttctcttctctcttgtgcaccgctgttcctcttgtttgcttgtgctttcttctttagctttcgctgctttggcttttcgctgacttgcggcttgctcgctcttcacttcgttctgcatgcttgtcgtctgcttcgtctcctctgtttcccttttcagtcttcctcatctgccgcgtgtctgtctggttgctgtcgttctcgctgtcctcgttctactctttcgtttgtggttctctcgcctggcgtttttctagctctgcgtatctgtctgcaatgttgtgctcgcggttctactcctttcctcgctgttctggatatcccgatctgtgatctttcgtatagtttctagtatgcgctgtctcacgtattgtgtctcagtgtggtgtcacgtgagtggtcgttcttcaaagcagaagtactcacacgagtacatcggataaggacaggaaggaaactgcaagcgggcgacagaggcaaatttcgtcgttgtcccccgcccctcgtttgctctgtcgtcgttggaaactatctcgcccctcgcgataatctcttcgcctatttataaccccgcacagagggtgcccaaattaacggcgcggttgaacacttttcgccacgggcggccaatctctgctactcccgcaaggggcaggggcacaagttaccagggtcacaaattctctcgacagtcaccagatgttatctctctctgcgtgaggaccacagtgccgtttctcctccagaggagttaggctgtgggctttctataataaaaaggtcggcgggttgttccgccaacccccccgttcgatgggtcgctaaatctcaaagactcccgtgttattttttcttccgcccccaggatcgcacgccggttcttaaacggcctccgagtgtctccacttctgcccaaaaggaaagctcggtctgccccctctcagggagagcctctctctccgcaagaaaggtagcccaatctccgtctgaaaagaaatgcggccggtggacctctcctcgatcttcgcccccgccttatgtggtgaagaaagtaattttgtggctgtacgacctatattatatataagggagagttgtgggaaagagtcgcttataaaagggtgtttccacntctgtgggaagaggaatatttcgtccacgcccctctctctgacatcaccaaatggggtctcttcggagagtatcctatattgtaaattccccccccgtaaaataaatataaaaatttttttgtaaaaatataccacccatatatgggtcttctaaaaattgtgggtttttattttgcgcccacacactttaaaaaaaaattttttctcaccccacaaaaaaata

SEQ ID NO: 569797 - DNA, 80 bp, Homo sapiens
cctttaaggatttacttaaatacttgtacatttacatatgtgtattcatagaaaatgcacagtattgtttgtgtagagtt

SEQ ID NO: 569798 - DNA, 292 bp, Homo sapiens
tcgatctagaggatcaattgagtatagtagtacgcttggactgggtgaagtcttagcatgtactggctcggaggtggggttctgctccgaggtcgccccaaccgaaattttaaatggcagtgttgggaagttataggacctggtgggtttggttaaggtactggtttggctattatataaatctaaagtctccataagggtctccttcgttcattgcttgttgtcattgccctgccttctttcactggcgcaggttcaattttcactgtggtttaaaagttacagagaacag

SEQ ID NO: 569799 - DNA, 207 bp, Homo sapiens
aagagagacaaaagagaacccgtgcactatgtacataagtagcatactttgttgtagtaaatagatgaggcatgcctgggaaatgctcacttggatacatagcactcaattataaattaagtaaacaggtgtaccacataaacaagaatttacatgcatacggtaaacaaaggaccaggacacgtgagattcctgcaaggagttctt

SEQ ID NO: 569800 - DNA, 249 bp, Homo sapiens
ggccctggatttgtttttccccctggaaaagggttttaactctgggattttaaaagggtagaatattttttcaaaagaacagtgggactcaaaaaaatgaaaggtgggccccaccttttttggattcatcccttaaaattttttatttttccgagaactacaagtaacattttaaccaagctgctgttggaccttaaacaaaaactcagtgataacccggatttagtttattaaaaatgctctttttta

SEQ ID NO: 569801 - DNA, 713 bp, Homo sapiens
  misc_feature (43)..(43): n is a, c, g, or t
  misc_feature (77)..(77): n is a, c, g, or t
  misc_feature (100)..(100): n is a, c, g, or t
  misc_feature (104)..(104): n is a, c, g, or t
  misc_feature (110)..(110): n is a, c, g, or t
  misc_feature (132)..(132): n is a, c, g, or t
  misc_feature (147)..(147): n is a, c, g, or t
  misc_feature (169)..(169): n is a, c, g, or t
  misc_feature (177)..(177): n is a, c, g, or t
  misc_feature (180)..(180): n is a, c, g, or t
  misc_feature (217)..(217): n is a, c, g, or t
  misc_feature (225)..(225): n is a, c, g, or t
  misc_feature (394)..(394): n is a, c, g, or t
  misc_feature (414)..(414): n is a, c, g, or t
  misc_feature (416)..(416): n is a, c, g, or t
  misc_feature (441)..(441): n is a, c, g, or t
  misc_feature (445)..(445): n is a, c, g, or t
  misc_feature (452)..(452): n is a, c, g, or t
  misc_feature (456)..(456): n is a, c, g, or t
  misc_feature (462)..(462): n is a, c, g, or t
  misc_feature (485)..(485): n is a, c, g, or t
  misc_feature (543)..(543): n is a, c, g, or t
  misc_feature (546)..(549): n is a, c, g, or t
  misc_feature (554)..(556): n is a, c, g, or t
  misc_feature (561)..(561): n is a, c, g, or t
  misc_feature (564)..(564): n is a, c, g, or t
  misc_feature (567)..(567): n is a, c, g, or t
  misc_feature (570)..(570): n is a, c, g, or t
  misc_feature (582)..(582): n is a, c, g, or t
  misc_feature (595)..(595): n is a, c, g, or t
  misc_feature (610)..(610): n is a, c, g, or t
  misc_feature (613)..(613): n is a, c, g, or t
  misc_feature (616)..(616): n is a, c, g, or t
  misc_feature (623)..(623): n is a, c, g, or t
  misc_feature (633)..(633): n is a, c, g, or t
  misc_feature (635)..(636): n is a, c, g, or t
  misc_feature (642)..(642): n is a, c, g, or t
  misc_feature (646)..(646): n is a, c, g, or t
  misc_feature (693)..(693): n is a, c, g, or t
gtaataaatgaatacttgatgtattcatacaggcaagaatccnatcatcccagagaagctctgtctgcgctgcaaancctatggctgcagacatcagggnaagntggtgnagttctagtctggcctcctcgnatttccctgccagcngtcttcctctctttcattcttntggccctntgnagaaccagggaggccaactgacttccacccatatggntttggtgnaggagcagaccaaaggtatctcccaattagaaggctaagaagtcctttgggctaatgtttagtgtcacgaagttcctttaaaaagagaggaaagcataccagaagtccctatggattagttaaagtagttccattcagggcacccatctgcaaacccagaccttctgcnaggacacagcttttgtttcntntccctctaaggcttgaacatacagnagtnctctccnatgnccttgnagtgtaactgtatggaaaagtanagttccttggagagcagtcctggtgaccttttttgtgagagtggttttgtccttcccncannnnaaatnnntgccnacntanctnctgggatcttcnacatctagccagncatgtcctgctccantgnttngagatgnccccgccctncnncgaccncccnccggggttcctttggtcctgctgtggatagcgccgctgcgcctttgnatctccctgtggcttctctt

SEQ ID NO: 569802 - DNA, 356 bp, Homo sapiens
  misc_feature (7)..(7): n is a, c, g, or t
  misc_feature (74)..(74): n is a, c, g, or t
  misc_feature (170)..(170): n is a, c, g, or t
  misc_feature (354)..(354): n is a, c, g, or t
agtctgnacagcatagtgagacccccccatctcttcaaaaaaaaattttttttttttgagaagtagcccaggcntggtggtgtgttcctgtggtcctagatgcttgagaggctgaggtgggaggactgcttcagcccagtatttcaaggctcccagtgaactgtggtcanacccactgcactccagcctggatgacagcaagatcctgtttaaagcaacaacaacaacaaaaaccaagtagacacatgggataacagatgatgttgcatgatgtggtaaattgtatcattagccccaattctgcactcctttctatatgcataccctttctcgtgttactttgcagttcctccnac

SEQ ID NO: 569803 - DNA, 155 bp, Homo sapiens
ctgtggccactgcatggccgcacatcggcagttgggggaggaggaacccactgtatctggtggctcaggccaacagcctgtgcaagcagggcgagtggaatgttgtgtggcgaatctgtgccgatctgtattaaagggatccctcttggtgggca

SEQ ID NO: 569804 - DNA, 552 bp, Homo sapiens
  misc_feature (183)..(183): n is a, c, g, or t
gcgacagagtgaggctgcgtctcaaaaaaaaaaaaaaaaaaaattgccccttcttaagtttgcatttagatctcttctcctttgaccacttttaatttatcttcacttctgatatgacatttaatttttcattcattttctgtctattattgttccttttttaacttaaaaaaaaattctgtnctttatgaatttctgtttcaaggtgtttttcccatctccaaatgcttatttgaaaatgtttcctttcctcttggttcatttcttctggtgtgtgtgtgcggcgcccgcgtgcatgtgtgtactcgggtctcattttctgctttcttcctgcagtacctcgtttatgggagatgcacttcgcttttcttatttttttagtagagagggggtttcactggtttagccagaacagtctcgatctcctgacctcgtgatcccgccacctcgggctcccaaagtgctgggattccaggagtgagccaccgcgcccggccgtccactttgcttcttgcagaggctgatggtttgagtaatttccgagattcatag

SEQ ID NO: 569805 - DNA, 402 bp, Homo sapiens
atttcgaaatcaccacgtcatctgcctaattcatgctcgtaatgaggatcatttgtcctacttcacttttattggaagagttgctgcatctggccgtcatttcataagaagctctatagatggtttcttcattagaccatattacacgatgatgttgggaaagcagataaccctaaatgacatggaatctgtggatcgtgaatattacaactctttgaaatggatcctggagaatgaccctactgagctggacctcatgttctgcatagacgaagaaaactttggacagacatatcaagtggatttgaagcccaatgggtcagaaataatggtcacaaatgaaaacaaaagggaatatatcgacttagtcatccagtggagatttgtgaacagggtccagaa

SEQ ID NO: 569806 - DNA, 227 bp, Homo sapiens
atggccggggcactggcatcacacctgtgttctcagcactagggaagcccaggtgggcagatcacaaggtcaggagtttgagaccagcctggccaacatgatgaaatcctgtctctactaaaagtacaaaaattagctgggcatagtggtggacacctgtaatcccagctactcagaagactgaggcaggagaatcgcttgaaactgggcagtggaggttgcagtga

SEQ ID NO: 569807 - DNA, 759 bp, Homo sapiens
  misc_feature (19)..(19): n is a, c, g, or t
  misc_feature (62)..(62): n is a, c, g, or t
  misc_feature (93)..(93): n is a, c, g, or t
  misc_feature (236)..(236): n is a, c, g, or t
  misc_feature (396)..(396): n is a, c, g, or t
  misc_feature (437)..(437): n is a, c, g, or t
  misc_feature (510)..(510): n is a, c, g, or t
  misc_feature (542)..(542): n is a, c, g, or t
  misc_feature (610)..(610): n is a, c, g, or t
  misc_feature (619)..(619): n is a, c, g, or t
  misc_feature (621)..(621): n is a, c, g, or t
  misc_feature (624)..(624): n is a, c, g, or t
  misc_feature (627)..(627): n is a, c, g, or t
  misc_feature (633)..(633): n is a, c, g, or t
  misc_feature (674)..(674): n is a, c, g, or t
  misc_feature (683)..(683): n is a, c, g, or t
  misc_feature (704)..(704): n is a, c, g, or t
  misc_feature (716)..(716): n is a, c, g, or t
caggtggcacagaaaagangtaggagggggtaaggacactgaggatcaggtctccagcaggnctgtccagtttgccttttctaattctgagtnttctacttctttctcagtgtccatctggcacagccagaccaggtctccccaaagcagttactcctcacagcaagggcattggccctctaggggcagaagctgccctggttcttcctcgcaagaaactcctctgccaggcagancacatgggcccttagcaggccagccagggtgggggcaacacaagcggcccctcttcatcctggatggtctgggcgcacaggcgcagcagcaggcccctggatccccctggcctggctcaggctccgcgctcaccaaacgcgcgcacctgcgcggcgcctngcgcggccggggcctggggcggtggaggcccgaagccagangcacgttcggcggcggcgggcacggaagacgtcctggcggaggtctgggcgcacccagcgcacttgcagcgcngaggtgagcacagggcggtgcgcgcacatgtncccacgcccaggttgaaacgaaggctgtttctctcgcagcgaggcccacgtgcgctaggggccgaggngtgcgggtncngcnaanccactnaaaccgaaggcggccacggaggacgggaagccgtgcacgangagcaccanctcccagggccctcgcccgcnggtccgccaggncccgccttttttgcggccccattgtgctgctggacccgacgag

SEQ ID NO: 569808 - DNA, 2619 bp, Homo sapiens
  misc_feature (11)..(11): n is a, c, g, or t
agccattgtgnatgagaagatcttctgttgtcatggaggattgtcaccagacctgcaatctatggagcagattcggagaattatgagacctactgatgtccctgatacaggtttgctctgtgatttgctatggtctgatccagataaggatgtgcaaggctggggagaaaatgatcgtggtgtttcctttacttttggagctgatgtagtcagtaaatttctgaatcgtcatgatttagatttgatttgtcgagctcatcaggtggtggaagatggatatgaattttttgctaaacgacagttggtaaccttattttcagccccaaattactgtggcgagtttgataatgctggtggaatgatgagtgtggatgaaactttgatgtgttcatttcagatattgaaaccatctgaaaagaaagctaaataccagtatggtggactgaattctggacgtcctgtcactccacctcgaacagctaatccgccgaagaaaaggtgaagaaaggaattctgtaaagaaaccatcagatttgttaaggacatacttcataatatataagtgtgcactgtaaaaccatccagccatttgacaccctttatgatgtcacacctttaacttaaggagacgggtaaaggatcttaaatttttttctaatagaaagatgtgctacactgtattgtaataagtatactctgttatagtcaacaaagttaaatccaaattcaaaattatccattaaagttacatcttcatgtatcacaatttttaaagttgaaaagcatcccagttaaactagatgtgatagttaaaccagatgaaagcatgatgatccatctgtgtaatgtggttttagtgttgcttggttgtttaattattttgagcttgttttgtttttgtttgttttcactagaataatggcaaatacttctaatttttttccctaaacatttttaaaagtgaaatatgggaagagctttacagacattcaccaactattattttcccttgtttatctacttagatatctgtttaatcttactaagaaaactttcgcctcattacattaaaaaggaattttagagattgattgttttaaaaaaaaatacgcacattgtccaatccagtgattttaatcatacagtttgactgggcaaactttacagctgatagtgaatattttgctttatacaggaattgacactgatttggatttgtgcactctaatttttaacttattgatgctctattgtgcagtagcatttcatttaagataaggctcatatagtattacccaactagttggtaatgtgattatgtggtaccttggctttaggttttcattcgcacggaacaccttttggcatgcttaacttcctggtaacaccttcacctgcattggttttctttttcttttttctttctttttttttttttttttttttttgagttgttgtttgtttttagatccacagtacatgagaatccttttttgacaagccttggaaagctgacactgtctctttttcctccctctatacgaaggatgtatttaaatgaatgctggtcagtgggacattttgtcaactatgggtattgggtgcttaactgtctaatattgccatgtgaatgttgtatacgattgtaaggcttatgtcactaaagatttttattctgattttttcataatcaaaggtcatatgatactgtatagacaagctttgtagtgaagtatagtagcaataatttctgtacctgatcaagtttattgcagcctttcttttcctatttcttttttttaagggttagtattaacaaatggcaatgagtagaaaagttaacatgaagattttagaaggagagaacttacaggacacagatttgtgattctttgactgtgacactattggatgtgattctaaaagcttttattgagcattgtcaaatttgtaagcttcatagggatggacatcatatctataatgcccttctatatgtgctaccatagatgtgacatttttgaccttaatatcgtctttgaaaatgttaaattgagaaacctgttaacttacattttatgaattggcacattgtattacttactgcaagagatatttcattttcagcacagtgcaaaagttctttaaaatgcatatgtctttttttctaattccgttttgttttaaagcacattttaaatgtagttttctcatttagtaaaagttgtctaattgaaaaaaaaaaaaaaaaaaaaaaaaaaaaaaaaaaaaaaaaaaaaaaaaaaaaaaaaaaaaaaaaaaaacaaaaaaaaaaaaaaaaaaagagcaaaaaaacaacaaaaaaacaacaagagggcggggggggcacaaacgaaacaacccggagggggcgacaaaaacaagcaccacaacctcgtagaataaacgggggctccccaagaaaaagaggaacaaaaaaagacggcgggccgccagacaacccgccggaggacgacaaccagacaggacgataagtggaagaccaccatgagggggacatgagaaccacaacaaaaagcggcgagcacacaagcgaatgacaaccacacacgcgacaacgcgcagtaaaaatgcgcagat

SEQ ID NO: 569809 - DNA, 2045 bp, Homo sapiens
  misc_feature (11)..(11): n is a, c, g, or t
agccattgtgnatgagaagatcttctgttgtcatggaggattgtcaccagacctgcaatctatggagcagattcggagaattatgagacctactgatgtccctgatacaggtttgctctgtgatttgctatggtctgatccagataaggatgtgcaaggctggggagaaaatgatcgtggtgtttcctttacttttggagctgatgtagtcagtaaatttctgaatcgtcatgatttagatttgatttgtcgagctcatcaggtggtggaagatggatatgaattttttgctaaacgacagttggtaaccttattttcagccccaaattactgtggcgagtttgataatgctggtggaatgatgagtgtggatgaaactttgatgtgttcatttcagatattgaaaccatctgaaaagaaagctaaataccagtatggtggactgaattctggacgtcctgtcactccacctcgaacagctaatccgccgaagaaaaggtgaagaaaggaattctgtaaagaaaccatcagatttgttaaggacatacttcataatatataagtgtgcactgtaaaaccatccagccatttgacaccctttatgatgtcacacctttaacttaaggagacgggtaaaggatcttaaatttttttctaatagaaagatgtgctacactgtattgtaataagtatactctgttatagtcaacaaagttaaatccaaattcaaaattatccattaaagttacatcttcatgtatcacaatttttaaagttgaaaagcatcccagttaaactagatgtgatagttaaaccagatgaaagcatgatgatccatctgtgtaatgtggttttagtgttgcttggttgtttaattattttgagcttgttttgtttttgtttgttttcactagaataatggcaaatacttctaatttttttccctaaacatttttaaaagtgaaatatgggaagagctttacagacattcaccaactattattttcccttgtttatctacttagatatctgtttaatcttactaagaaaactttcgcctcattacattaaaaaggaattttagagattgattgttttaaaaaaaaatacgcacattgtccaatccagtgattttaatcatacagtttgactgggcaaactttacagctgatagtgaatattttgctttatacaggaattgacactgatttggatttgtgcactctaatttttaacttattgatgctctattgtgcagtagcatttcatttaagataaggctcatatagtattacccaactagttggtaatgtgattatgtggtaccttggctttaggttttcattcgcacggaacaccttttggcatgcttaacttcctggtaacaccttcacctgcattggttttctttttcttttttctttctttttttttttttttttttttttgagttgttgtttgtttttagatccacagtacatgagaatccttttttgacaagccttggaaagctgacactgtctctttttcctccctctatacgaaggatgtatttaaatgaatgctggtcagtgggacattttgtcaactatgggtattgggtgcttaactgtctaatattgccatgtgaatgttgtatacgattgtaaggcttatgtcactaaagatttttattctgattttttcataatcaaaggtcatatgatactgtatagacaagctttgtagtgaagtatagtagcaataatttctgtacctgatcaagtttattgcagcctttcttttcctatttcttttttttaagggttagtattaacaaatggcaatgagtagaaaagttaacatgaagattttagaaggagagaacttacaggacacagatttgtgattctttgactgtgacactattggatgtgattctaaaagcttttattgagcattgtcaaatttgtaagcttcatccctatgaagcttacaatttgacatgctcaataaaagattttagaaggagagaacttacaggacacagatttgtgattctttga

SEQ ID NO: 569810 - DNA, 208 bp, Homo sapiens
gcgcgcgtgctagcgtgcccagaagattccgattagctgtggaatcccgtggagtagcccttccagcttagcaggggcactgggtctctgaatttcaaagacttgctgtcttggttttacccctcaccgtaccacctgcatcagaaactcttggggtgctcattaaaaatgtaaaccattgggtccctctgtcgccggcaaaaacaat

SEQ ID NO: 569811 - DNA, 314 bp, Homo sapiens
caggtggatcacgtgaggtcagaagttcgacaagcctggacaacatggtgaaaccctgtctctactaacaatacaaatattagccagctgtggtggcgcacgcctgtaatccaagctacttggaaggttgaggcaggagaatcacttgaagctgggaggtggaggttgcagtgagtggagatcacaccactgcactccagcctgggtgacaaagcaagactccatcacaaacaaacaaacaaaaaagtatgctgaagaagaatcatctactccagtgcagcttttccaaaactagttctgtgaaactcagtttc

SEQ ID NO: 569812 - DNA, 222 bp, Homo sapiens
tgttgatcttctccttgaagaacagcacggtcgaggcgaaggcaaaaagcatttccacctgcgccagcgccttgaccacggcggcctgctgcaaggtcatcgcggtgaaccagccgaaagacgccgtggcgcccacgaaaccgacagcaagcgacggtttccacgcctttgcgatgcgccgcagctcgtccctctgccgccaaacgatccacaagaacatcg

SEQ ID NO: 569813 - DNA, 267 bp, Homo sapiens
  misc_feature (8)..(8): n is a, c, g, or t
  misc_feature (61)..(61): n is a, c, g, or t
gcttttcncccccttccccccaaaaaaaaatcccttccaaatttttaaattttctggtccncccttttccaaaggaaaagggcaaaaaatggcctgggcttttttggggggcgtgttcccgggcggaaaaaaaaaaaagggaaaaacctccccccggggctttttttttttgttttagggccccccccccccccccctataaaatttggaaccacccccaaaaagggtttgattccggcctttttttgggttccttttgttttttta

SEQ ID NO: 569814 - DNA, 2344 bp, Homo sapiens
attctacataatcagacttagcacatatctctttcactctaatgaccacaaaccaccatttcaacatgcagctcttgcaccgaacaatgacgatatcttccttgccactaaagtaaatgccaagagatcatgttacattttcagccacagtgcaaatgaaatatctcttgtattacttactgcaagagatatttcattttcagcacagtgcaaaagttctttaaaatgcatatgtctttttttctaattccgttttgttttaaagcacattttaaatgtagttttctcatttagtaaaagttgtctaattgatatgaagcctgactgattttttttttccttacagtgagacatttaagcacacattttattcacatagatactatgtccttgacatattgaaatgattcttttctgaaagtattcatgatctgcatatgatgtattaggttaggtcacaaaggttttatctgaggtgatttaaataacttcctgattggagtgtgtaagctgagcgatttctaataaaattttagttgtacacttttagtagtcatagtgaagcaggtctagaaaataagcctttggcagggaaaaagggcaatgttgattaatctcagtattaaaccacattaatctgtatcccattgtctggcttttgtaaattcatccaggtcaagactaagtatgttggttaataggaatccttttttttttttttaaagactaaatgtgaaaaaataatcactacttaagctaattaatattggtcattaaatttaaaggatggaaatttatcatgtttaaaaattattcaagcactcttaaaaccacttaaacagcctccagtcataaaaatgtgttctttacaaatatttgcttggcaacacgacttgaaataaataaaactttgtttcttaggagaaaatgattctgtaattccagtgtcactaatttatattgttctttcctctgatttttttcaggttagtgatttttttgtatacaatttaatccaaatgttatgacattcagaaatcatgaaacacagtagatatctgttataatgtggtgtatcacatggattataaagcaaagttatggtcgatttctattcttgaaagaatcaactacagtgaatcctttgcatttgaagccttaacatgcattgctttaattttgcccagggacaaattttaataatcagcaagactggtttgtgcaaagcgttgagtcatcaggtatttagagcctagccagctacccagtatccatgctgccatatcccttcattgtaaaaagtacctaaacattcgtgaaatgattttttttagctgaaaaatgctggcaagaagaattttaaagcttaaaataggtggtaaatttgaagtatgagtgtgttcacgagaaacataggcttttcaaaaaaatttttattcaaggcaaagcaaggaacatcttgagatatgtctcaagaatataaagatgtattattttaagccaaggagctgaaatatatctcagtttataaattcaggtatattctttttgtctccatggcaaccataacttttgaaccaaaaaaaattgtttttacatctttatgctgaaaatgtgtttagattaggaatatggtcgggctgaatttgctgttgctccctaaccaaatccacctcttgttttccttgtgagtccatggctaaatcaaagctgcccctgagaagagacttaatccaagcctgattgtactagtggcatcacttagaagtaggctttccctcttcctagtagatctcaatgttttataattccttaaaacagctgaaaattgggacaacatactttacgcaatgaacagtagttaaataggaaataaactagttccatgtaagtatacacctagagttttaattacctttataatgtttcttaaaagtgaaacttagatacaattgtgattggatacttagatactaagtgaaacttagtgtaacaattttgatctgttaaattggattttacatgtacatttgaatgccagaatttctaaataaatcccctggttaggaaattttaaaagtcaaagcttgttttcttcaaccactaccttctacattggttgacttagaccgtaagctttttaagtttctcattgtaatttaccttctcatgcagattgctgatgttttattaaaccttatttttacaaaaatgaaaaaaaaaaaaagaaaattgggcggcggcccaaaaatttaaaatgtgggggggccagtatgaagggtaggcagagaaggggaaggggggtcacaaaagaggggggggaaaaagggggggtggaaaagag

SEQ ID NO: 569815 - DNA, 1416 bp, Homo sapiens
  misc_feature (11)..(11): n is a, c, g, or t
agccattgtgnatgagaagatcttctgttgtcatggaggattgtcaccagacctgcaatctatggagcagattcggagaattatgagacctactgatgtccctgatacaggtttgctctgtgatttgctatggtctgatccagataaggatgtgcaaggctggggagaaaatgatcgtggtgtttcctttacttttggagctgatgtagtcagtaaatttctgaatcgtcatgatttagatttgatttgtcgagctcatcaggtggtggaagatggatatgaattttttgctaaacgacagttggtaaccttattttcagccccaaattactgtggcgagtttgataatgctggtggaatgatgagtgtggatgaaactttgatgtgttcatttcagatattgaaaccatctgaaaagaaagctaaataccagtatggtggactgaattctggacgtcctgtcactccacctcgaacagctaatccgccgaagaaaaggtgaagaaaggaattctgtaaagaaaccatcagatttgttaaggacatacttcataatatataagtgtgcactgtaaaaccatccagccatttgacaccctttatgatgtcacacctttaacttaaggagacgggtaaaggatcttaaatttttttctaatagaaagatgtgctacactgtattgtaataagtatactctgttatagtcaacaaagttaaatccaaattcaaaattatccattaaagttacatcttcatgtatcacaatttttaaagttgaaaagcatcccagttaaactagatgtgatagttaaaccagatgaaagcatgatgatccatctgtgtaatgtggttttagtgttgcttggttgtttaattattttgagcttgttttgtttttgtttgttttcactagaataatggcaaatacttctaatttttttccctaaacatttttaaaagtgaaatatgggaagagctttacagacattcaccaactattattttcccttgtttatctacttagatatctgtttaatcttactaagaaaactttcgcctcattacattaaaaaggaattttagagattgattgttttaaaaaaaaatacgcacattgtccaatccagtgattttaatcatacagtttgactgggcaaactttacagctgatagtgaatattttgctttatacaggaattgacactgatttggatttgtgcactctaatttttaacttattgatgctctattgtgcagtagcatttcatttaagataaggctcatatagtattacccaactagttggtaatgtgattatgtggtaccttggctttaggttttcattcgcacggaacaccttttggattgcgtactgcctggacaacaaatcgcgatgccgggtccttagtaacaga

SEQ ID NO: 569816 - DNA, 966 bp, Homo sapiens
  misc_feature (25)..(25): n is a, c, g, or t
tggcgttctagaggatcccagtgtncatgtatacataggcttttcaaaaaaatttttattcaaggcaaagcaaggaacatcttgagatatgtctcaagaatataaagatgtattattttaagccaaggagctgaaatatatctcagtttataaattcaggtatattctttttgtctccatggcaaccataacttttgaaccaaaaaaaattgtttttacatctttatgctgaaaatgtgtttagattaggaatatggtcgggctgaatttgctgttgctccctaaccaaatccacctcttgttttccttgtgagtccatggctaaatcaaagctgcccctgagaagagacttaatccaagcctgattgtactagtggcatcacttagaagtaggctttccctcttcctagtagatctcaatgttttataattccttaaaacagctgaaaattgggacaacatactttacgcaatgaacagtagttaaataggaaataaactagttccatgtaagtatacacctagagttttaattacctttataatgtttcttaaaagtgaaacttagatacaattgtgattggatacttagatactaagtgaaacttagtgtaacaattttgatctgttaaattggattttacatgtacatttgaatgccagaatttctaaataaatcccctggttaggaaattttaaaagtcaaagcttgttttcttcaaccactaccttctacattggttgacttagaccgtaagctttttaagtttctcattgtaatttaccttctcatgcagattgctgatgttttattaaaccttatttttacaaaaatgaaaaaaaaaaaaagaaaattgggcggcggcccaaaaatttaaaatgtgggggggccagtatgaagggtaggcagagaaggggaaggggggtcacaaaagaggggggggaaaaagggggggtggaaaagag

SEQ ID NO: 569817 - DNA, 492 bp, Homo sapiens
ctagagatctgtgcatggtcatgctgtatagtagtttttgggagtcaaggcaggcagatcacttgacgacaggagttcgagaccagcccagccttcacggcaaaacctagtctgtactaaaaatacaaaaattagtagggtgtggtgatgcgctcctataatcccaactactcgggaggttgaggtgggagaattgttggaacccaggaggcagaagttgcagtgaatggaggttgtgatgagctgggattgcaccattgtactccagcctgagcagcagagcaagactctgtctcaaaaaaaaaaaagaaaagaaaggaaagatcagtatcacccatttttgtcccggaatttaacagacaattttttaatagggaattaaaacggagtaagaacctcaagattcgtaagacagaaatgctattgaatttagacctccctacagtcaatctacgggttacctattataatttacgagtcagtttatcaaag

SEQ ID NO: 569818 - DNA, 1262 bp, Homo sapiens
  misc_feature (11)..(11): n is a, c, g, or t
  misc_feature (1070)..(1070): n is a, c, g, or t
  misc_feature (1073)..(1074): n is a, c, g, or t
  misc_feature (1079)..(1079): n is a, c, g, or t
agccattgtgnatgagaagatcttctgttgtcatggaggattgtcaccagacctgcaatctatggagcagattcggagaattatgagacctactgatgtccctgatacaggtttgctctgtgatttgctatggtctgatccagataaggatgtgcaaggctggggagaaaatgatcgtggtgtttcctttacttttggagctgatgtagtcagtaaatttctgaatcgtcatgatttagatttgatttgtcgagctcatcaggtggtggaagatggatatgaattttttgctaaacgacagttggtaaccttattttcagccccaaattactgtggcgagtttgataatgctggtggaatgatgagtgtggatgaaactttgatgtgttcatttcagatattgaaaccatctgaaaagaaagctaaataccagtatggtggactgaattctggacgtcctgtcactccacctcgaacagctaatccgccgaagaaaaggtgaagaaaggaattctgtaaagaaaccatcagatttgttaaggacatacttcataatatataagtgtgcactgtaaaaccatccagccatttgacaccctttatgatgtcacacctttaacttaaggagacgggtaaaggatcttaaatttttttctaatagaaagatgtgctacactgtattgtaataagtatactctgttatagtcaacaaagttaaatccaaattcaaaattatccattaaagttacatcttcatgtatcacaatttttaaagttgaaaagcatcccagttaaactagatgtgatagttaaaccagatgaaagcatgatgatccatctgtgtaatgtggttttagtgttgcttggttgtttaattattttgagcttgttttgtttttgtttgttttcactagaataatggcaaatacttctaatttttttccctaaacatttttaaaagtgaaatatgggaagagctttacagacattcaccaactattattttcccttgtttatctacttagatatctgtttaatcttactaagaaaactttcgcctcattaccttnggnntttanagattgattgtttagctgatgtgaatatgcgtcaaaggattgacggattggttggcactaattaacataggcgctaagtagagatactaaagaggatatgtatcctatggttgttttttagtggtgattattagaacattgtttatgtaacaagagtttaatattgggtgtagtacaaggggt

SEQ ID NO: 569819 - DNA, 226 bp, Homo sapiens
gatacccccagttcctgcttcgttgaaatcaattccatgatattagatactcctgaagttggggatgtctgctagagagccgcagtttcttgtggatcgagatgtatcaatctttttgccatgcactgtttacctagatccccaactacgggaaattattgctcgcatctggtttcagaaagccaggaacggggggtaccgacgctcgatcttcgtgctctgttgt

SEQ ID NO: 569820 - DNA, 543 bp, Homo sapiens
  misc_feature (6)..(6): n is a, c, g, or t
  misc_feature (9)..(9): n is a, c, g, or t
atcctnttnaatccaagcagtcggtcaccagacctgcaatctatggagcagattcggagaattatgagacctactgatgtccctgatacaggtttgctctgtgatttgctatggtctgatccagataaggatgtgcaaggctggggagaaaatgatcgtggtgtttcctttacttttggagctgatgtagtcagtaaatttctgaatcgtcatgatttagatttgatttgtcgagctcatcaggtggtggaagatggatatgaattttttgctaaacgacagttggtaaccttattttcagccccaaattactgtggcgagtttgataatgctggtggaatgatgagtgtggatgaaactttgatgtgttcatttcagatattgaaaccatctgaaaagaaagctaaataccagtatggtggactgaattctggacgtcctgtcactccacctcgaacagctaatccgccgaagaaaaggtgaagaagtgaatttgaaggtttttttttttgttgcgagttttgttgggtgaggaaaagcgaa

SEQ ID NO: 569821 - DNA, 696 bp, Homo sapiens
  misc_feature (56)..(56): n is a, c, g, or t
ggatagtctgtacgcctgcaggtaccggtctgtaatttcccgggacctactactantaaattcgcggccgcgtcgacctaccatagatgtgacatttttgaccttaatatcgtctttgaaaatgttaaattgagaaacctgttaacttacattttatgaattggcacattgtattacttactgcaagagatatttcattttcagcacagtgcaaaagttctttaaaatgcatatgtctttttttctaattccgttttgttttaaagcacattttaaatgtagttttctcatttagtaaaagttgtctaattgaaaaaaaaaaaaaaaaaaaaaaaaaaaaaaaaaaaaaaaaaaaaaaaaaaaaaaaaaaaaaaaaaaaacaaaaaaaaaaaaaaaaaaagagcaaaaaaacaacaaaaaaacaacaagagggcggggggggcacaaacgaaacaacccggagggggcgacaaaaacaagcaccacaacctcgtagaataaacgggggctccccaagaaaaagaggaacaaaaaaagacggcgggccgccagacaacccgccggaggacgacaaccagacaggacgataagtggaagaccaccatgagggggacatgagaaccacaacaaaaagcggcgagcacacaagcgaatgacaaccacacacgcgacaacgcgcagtaaaaatgcgcagat

SEQ ID NO: 569822 - DNA, 914 bp, Homo sapiens
gccggcctgaatttttccctggtgctcacgccgttcctgtgaagatggggctgtactcacgggctgttcgtccactgcagtgttggggttccgaagtaagggtcctgtgaccgattgctttgtctgaacaagcggggttctcgaatgtttccaggcgccttatggtgccccgatgtacaatctttgcttaactgaacccttttgtcttccagggtcaggtggccatccgcaggcttagttgtctaggaaggtttggacagagtccgcctggtgattcagacgttcccaggactttggcagcaaggaggagcaaggggaggccaggcgcggtggctcacgttgtaatcccagcactttgggaggccgaggcgggcggatacacgaggtcgaggagttccgagagccagcctggccagcatgggtgaaaccccgtcgtctactagaaatacggagaagcacaattagccgggtgtggtggcacatgccctgtagtcccacctacctgtgggaggctgaggcagggagaattgtttgacctggcaggcggaggcttgcagtgagccgagattgcgccacctgcactccagtctgggcgacagagcgagactctgtctcgagggaggaggagtcacaaagagctaccaggagtgtagtgagaatgggtttccggcgtgggcgtggtggctcacgctgtgaatcccagcacttgggagagctgaggttgggcggatcaccgaggtgcgaggagttgagaccagccttgccaacatagggtgaaacaccgtactactcgtccagggtgtggtggtgagcgcgccgtatgtgtctccgagctagtcaggaatcagaggcactagggtggcttggatcagtggctcgtgtgaggccagaggttactaagtccggttggcgac

SEQ ID NO: 569823 - DNA, 436 bp, Homo sapiens
tccgatagtgaataggtaggtgtaaacatttatagaacaattatcaaagctatattggacttaaatattggtcatgaatgtatgcacaccccataggtagctgccctccttgggcagctttagactcctatgccaaattttaaaataaaggccgtggccaggcgtggtggctcatgcctgtaatcccaacacttcaggagtccaaagcgggcggatcgcgaggtcaggagatcgagaccgtcctggctaacacggtgaaaccctgtctctactaaaaatacaaaaaaaaaattagatgggtgtggtggcatgtgcctgtaatcccagctacgggggagcctaaggcaggagaatcgcttgaaccagggaggtggaggttgcagtgagctgagatggcgccacggcactccagccggggtgacagagactctgtctc

SEQ ID NO: 569824 - DNA, 216 bp, Homo sapiens
agcaggtctggttcccagacttaggatgtcattaggtatagatagatgctctagcatgcgatcatctcgagctccttcatgaactctggctagaaatggtgtataccgaaaatttacttcctctctttcttcttcccactcatcctaaccctactcctaatcacataacctattcccccggaacaactcagtacacagtgtaggtctacctggggc

SEQ ID NO: 569825 - DNA, 348 bp, Homo sapiens
  misc_feature (6)..(6): n is a, c, g, or t
  misc_feature (9)..(9): n is a, c, g, or t
atcctnttnaatccaagcagtcggtcaccagacctgcaatctatggagcagattcggagaattatgagacctactgatgtccctgatacaggtttgctctgtgatttgctatggtctgatccagataaggatgtgcaaggctggggagaaaatgatcgtggtgtttcctttacttttggagctgatgtagtcagtaaatttctgaatcgtcatgatttagatttgatttgtcgagctcatcaggtatgaaatataaaactcttaagctttttcttttttctttcttttttttgggggcagacggaggggcagacagattcttgttctgtcacccaggctggagtgcaa

SEQ ID NO: 569826 - DNA, 359 bp, Homo sapiens
ccagatgtgcagagtataagcgcggttgcagtatactgagaagggtagtgggtgcatgagaagatgtggatggttaatgggtacaaaaaagttattaacagaaagagtgaataaggcccaatatttgatagcacaacagggtgactactgtcagtaataatttaattgtacatttaaaaataactaaaagaggccaggcatggtggctcaggcttgtaatctcagcacttggggaggccgaggcaggcagatcacttgaggtcagtagttcaagaccagcctggccaacatagtgaaaccctgtctctacaaaaatacaaaaattagccaagcgtggtggcgggcacctgtaatcccag

SEQ ID NO: 569827 - DNA, 1065 bp, Homo sapiens
actgtgcagcaccccgagactggagccatctcttcctcatatttcagcagtgcagcctgggggtgcagagaagtggcagtgcagtggtctgattgtggtgtctctttttatccttattcctcccccgacctaattgtctttgttctgtgattatttggggtgacacccggctccctccagacaatgccatgcataaatccatccatccaaaggcagagaaccaaaggggccatggaaggttctctgtgctcctcctacccttccagtgccctaggcctggcgactgccgctgccttttagacccgacctccccttttatacctgcatcttgttctactgagaaaagcctctccagcaatacatgtaatactagtcactaacctccgtctccgggacggagtgcctggacactgtaccgactttgatcgcattctacactgaggttgcattcatatcgcctgagttgcttctacttctctatacaaaatgattttgcagagattaacagaacgtcccttatgttattctcttcctcatccaccgccactggggcctgtacactgatggtggctactggtgtgacgtttgctttgtactgagggtagaagtgaggaagacaatatgtattcattgttccttagcacaagccacgtgaacttgggaccacagctctgtgactacacacttatcacttcatagctccaacaagactggttataacctgcgggtattggaaaccctctctgactaccaatggcagaaggccttattgaaaaggttgacggctgtggcaccatttggggccacgacccggaactacggaccgtactgcgcgacgccaaggcacatcgcggcgagcgagagtcggatgaataccagggggctgcgacgagtgcacaccggacactaacgcaaggaaaagaggaaacaagaacacgagaagagagtaaaagggacaagacacatagagcaatgagcgatagctgacatacccagagagtgagtgaaaagccatataagagcatcgacaaataatgctgccgtcacttgctcgtctcgcggcag

SEQ ID NO: 569828 - DNA, 706 bp, Homo sapiens
  misc_feature (50)..(50): n is a, c, g, or t
  misc_feature (222)..(222): n is a, c, g, or t
  misc_feature (248)..(248): n is a, c, g, or t
  misc_feature (299)..(299): n is a, c, g, or t
  misc_feature (303)..(303): n is a, c, g, or t
  misc_feature (366)..(366): n is a, c, g, or t
  misc_feature (383)..(383): n is a, c, g, or t
  misc_feature (420)..(421): n is a, c, g, or t
  misc_feature (458)..(458): n is a, c, g, or t
  misc_feature (494)..(494): n is a, c, g, or t
atcggcgctgtagagcaggttaacggtaacttgaatcgacgggtccgctngtcacgggtccggtgattacctggacggaaacatacatcaactttaaccacccagatcgtttggtcttgtgtttattggccatcaactctttgcgccaacccccgatttagtatactacacttcaatgataatatccctctccctcccttgttctgggaaagaattgtaggntgtgcccggattacgctattttcaantttcaaatctgactgtggaacttaaccacaacaattcttctatccctaggncttncaccatcaccactaagatccctaacattacgcttaggctaaccattagcaatccgttcgtttntaacatggcatatatcntcatcgctttggccccttcgaagatggccccatcggnnatcatcttcccaacgcagtcgcctattttcacaactnctttgtgccccattttcccgcctctacatcctactnccacatctactcggacccgtcaattcaagaattgccgttaacagctgtatacctactctcaggcggccgcacgtgctagctacatgtgggcccttaacgcccatatgagtgacgataatcttaactcaggccgacgaaaatcttcgacgagtcagggttcttccaggagtttttcttctttttttttttttttttgtttttatctttttctt

SEQ ID NO: 569829 - DNA, 1104 bp, Homo sapiens
agaatagctgattgctgccgtggtgtagtgctgtggggaaaggaggataggattcgtaaaccccggaagcggaaggttctgctataccacgtaagtggcgcatgttcgtgcctatagatcgcgcactgagtgctgacgtcatccagtccggtcagttgttctagaatcagagtacgcagaaccttgcaatctcgagggaacctatgagctggggatatatgaaagggaagagtcgtaactatacttcaaagcatgccaccaagataatagtcgagtaccaaggcataatacaagtagagaatttcgattatgcactagtgagaaattgacaagaaatttgcaagagatatcatagtaattctattggtatatagatgagaatagtgtcacaatgaaatatcaacttgcagtgtatgcatactttctaggacgtgagtcaataggaaagtttggcgtagagtaaactgcaatatctcacaataatgcaatctggcgtaaattagggtatgagtaaacagatacgaaattgttgaatatagagcgattataatccaagagaaaacgagaaggcggggggggtcattctcatacctaggtgttcatgtatattttcctttctttctaattttctcttcttcctctttttcctcctctatatccttggttgtttattcttgtttaaaccaaagttagttcatttttggtaaatgtagggtgttctaaaaaatggaagttgatagatgtggctaccccagtctccttttgaaagcatctggtatgttgaactcctaggtgctcatttatctcattatcagttcgccattcacttggtgctggattcttggggtgatcaacgccgtacgagttcccccttcttattaccctcttactttttcactcttgtaactgtgtgcaccaagataggtcgacctatttatctagggaaaattgccgttgtacaagcgctagtcgggtgctcaagataaagatcgaccggggcaggtgtacactaatttgacttgccaattggccgtaaatgttccatgcctggtaatacacttcaccccccggactgggcttcacggggagaagggaagctcggaa

SEQ ID NO: 569830 - DNA, 250 bp, Homo sapiens
gtatgctgcaggattcagtgcaggtactatgattcggcgctgagagcaggttaacggcaattcaatgaattgccgttaacagctgtatacctactctcaggcggccgcacgtgctagctacatgtgggcccttaacgcccatatgagtgacgataatcttaactcaggccgacgaaaatcttcgacgagtcagggttcttccaggagtttttcttctttttttttttttttttgtttttatctttttctt

SEQ ID NO: 569831 - DNA, 606 bp, Homo sapiens
  misc_feature (13)..(13): n is a, c, g, or t
  misc_feature (18)..(18): n is a, c, g, or t
actcgtcgaaganatcgncggcctgagttaagattaacgtcactcatatgggcgttaagggcccacatgtagctagcacgtgcgaccgcctgagagtaggtatacagctgttaacggcaacttgaattgacgggtccgcttgaattgacgggtccgcggaggcaggctcgtttaagtccttcccaggggaatgatatgcaatgaatttcaaacgaaataagcatttggaattactcagcagaaacccgaggggggagaggcatggcattgcgaaaagtgcagctaagcagcgagcaagtagcaagacccaaaagtacgaggagtaaatgtgggagttcactcaggttcggggtagcaagctagagattacaatcattgtgcattatgtttggcatggtcctttccatacggacccgtcaattcaattgccgttaacagctgtatacctactctcaggcggccgcacgtgctagctacatgtgggcccttaacgcccatatgagtgacgataatcttaactcaggccgacgaaaatcttcgacgagtcagggttcttccaggagtttttcttctttttttttttttttttgtttttatctttttctt

SEQ ID NO: 569832 - DNA, 399 bp, Homo sapiens
  misc_feature (13)..(13): n is a, c, g, or t
  misc_feature (18)..(18): n is a, c, g, or t
  misc_feature (162)..(162): n is a, c, g, or t
  misc_feature (164)..(167): n is a, c, g, or t
  misc_feature (169)..(169): n is a, c, g, or t
  misc_feature (197)..(197): n is a, c, g, or t
actcgtcgaaganatcgncggcctgagttaagattaacgtcactcatatgggcgttaagggcccacatgtagctagcacgtgcgaccgcctgagagtaggtatacagctgttaacggcaacttgaattgacgggtccgcttgaattgacgggtccgcgatangnnnncntgatattataattgatagctaggtccantgtgcattacggacccgtcaattgccgttaacagctgtatacctactctcaggcggccgcacgtgctagctacatgtgggcccttaacgcccatatgagtgacgataatcttaactcaggccgacgaaaatcttcgacgagtcagggttcttccaggagtttttcttctttttttttttttttttgtttttatctttttctt

SEQ ID NO: 569833 - DNA, 442 bp, Homo sapiens
  misc_feature (21)..(21): n is a, c, g, or t
  misc_feature (244)..(244): n is a, c, g, or t
ttggggtttgggggggggagngcgtgggcccccaaccttttccccctttggggcttttttaaaaccccccaagggggcccggggaaagggggtttttttaaccccccccggggaaaaatttgtatttaaagggggttttgggcccccaccccaaacccgggggggggggggggggggtttccccccccccccttttttgggctggggaaagacaccccccctttgggaagggggtcaggtttgnctttccctttcccgggtttttgggggggcccccccccccccccttttttttaaccccctttggtttggttggggggggttttcggggggtttttttgggggggtggggtttttccccccttttttgggtttccaaagaggggggggcccccgcaattttttgatgggcccttttttaaaaatttttttccctttttga

SEQ ID NO: 569834 - DNA, 404 bp, Homo sapiens
  misc_feature (8)..(8): n is a, c, g, or t
  misc_feature (11)..(11): n is a, c, g, or t
  misc_feature (21)..(21): n is a, c, g, or t
ttcggcgnctnagagcaggtnacggcaacttgaattgacgggtcggttgccatgggagcgggcccgggtagttgccgtcgctggagctgtacaaggaggatgaagctttataactttagtgttcaatagttggccgttgaggtgttgggatcctagatgttctgctgaagttctatgggactgacggacccgtcatttattagcggacccgtcatttcaagaattgccgttaacagctgtatacctactctcaggcggccgcacgtgctagctacatgtgggcccttaacgcccatatgagtgacgataatcttaactcaggccgacgaaaatcttcgacgagtcagggttcttccaggagtttttcttctttttttttttttttttgtttttatctttttctt

SEQ ID NO: 569835 - DNA, 182 bp, Homo sapiens
ctatgaatgttactgggactgggacaaccgaattataccagttgaaaagaattctcgcgtagaaccagaaaggtactgattccgtaaaggtaagtagtttacgtacagagaacttaatgactctgttatacttgtacttgttcagttaagatcgagtactcatgacctagtaactatacgga

SEQ ID NO: 569836 - DNA, 1289 bp, Homo sapiens
actcaaagttagggtgcgggtacattacctggagtatcgggaggtgccccagagttcgtcctcgcatattattgaatttccatgtggggtccgaagagccctagttcatgaaagcatcaaaggaagaaagtacgtaggaggtttataggcgcaaaagctgaacgatagcgacatgttcctagttccgtttccatccgtggtagcaaggatgcttgtgtgacacgcatgtggaagagagagtcgctagggccacgagattgatgaccagctaaatgagtgctcaacgtgtcaatggaccgaggtgagaagccttgcgagtttgtcatagtctcatgacgaactgtctcccattattcgtgaggatgcaaagtctcacggatcatgttgtacttaccccctatgtacgctctgaaacgcagggcaacgtcaaacggttcatagtgtaagtggtagaggcccacggtagggggctctgaaggacaccgtaaggtgttcttttgcgattatctttgtccccataagtgggtggataggtagaagattgaaccgtagtttggtcaagtcattattcttagaatcgctgtagacctgtggcatatgagcaagggtaagttaagctctgcagcagtggttaaacctagatgacactacttcaggtccgacaacattggtattgctacctttttatgctgggcttgtaaggacgtacaccagttcttgcataatcgtttgtccagaacatacaatcgtgcacatcttgccttggcttgccccctatacttttcctgtgggcatcccacgttctaaacaagggggctcagtggtggggcaaatacgctaaattgacgaggccatcttactgagccgagaaagaagagcaccgtgggttagccctataaaccttccacgccggttaacattgcggggcacacacagatccggacgtggctgccacaccgcgaggctcacatacgccctgtgaccaccgaatataggctacatagggagccccggaacaacagcacgcgaacccacacgggcgtagaggcacagcctggctggcacacaaggcaagacaacacctagcacgctgaaccaggaagaagacaacggccacagacaccccggcccaaccgcaacacagacacacaccgaaagaccacaccgacgaaccacgcgcggcggcgcgcacacatgaccggcgccgcccaaccgcacacaacacaagcgagcacagacagccacaacacagggcgcaaaaaagaggaggcgcgcgagcaaacaaaccg

SEQ ID NO: 569837 - DNA, 406 bp, Homo sapiens
  misc_feature (8)..(8): n is a, c, g, or t
  misc_feature (11)..(11): n is a, c, g, or t
  misc_feature (21)..(21): n is a, c, g, or t
ttcggcgnctnagagcaggtnacggcaacttgaattgacgggtccgggtccttatgcctgttagagatgtgccggttaaactacactgcccatgtgggcagtatatctttattcccgttagatatctgcctgttagacatactgcccatgtggctttcaatcgttcgatagctgatgctgtagagagcggacccgtcaattcaagcggacccgtcaattcaagaattgccgttaacagctgtatacctactctcaggcggccgcacgtgctagctacatgtgggcccttaacgcccatatgagtgacgataatcttaactcaggccgacgaaaatcttcgacgagtcagggttcttccaggagtttttcttctttttttttttttttttgtttttatctttttctt

SEQ ID NO: 569838 - DNA, 1027 bp, Homo sapiens
agttagtgttgggcccggcggggcggcggtggttccccgggctgcgcgtgtccggggtctgctgtgcagttggtgcgaccggagcagctcccgtctatcggacacctcaggcatctggtcattgttcagtgcgatacatctagttgcctttcccgatggcgcgtgaccgtgatgcctgtcatgcgctgtgacattgctaggccgtgcagagtggtgcttggggactggtcgccgtggatctagtagttctggcctgtgagttgccacgtgacccttggatcgtgtactcgcgctcgacatgcgtagtctcgggtggtcttcaacgcgtgagacttgcctctcattccttaggagcagagccgagcaatcctggaggcgtgttttgccagtgttttctcaggtcacggtgattggcgccttcgcgtgccacgaggttatgggcacttcggatgtttctaccgtcaccctgtgttgtgtgcgtgtgcgtacaaagagaaggcaatgtgaatgtcttacgggaagcctggactggacgagagggtagtgcagggttcaacgactggccccaagagaagaactggggacgatggtgccacttgcggcccaggaaaaagctgcttccgaaaatagttttccccaaaaacattaccgccaaacaagtgaaggctggcatcgaaggcgtgggcaaccaaacggggaagacattggcacctcacagagaccatcaaggcttaacgattcggtgcgaagctaaagacatggttggttgaggggacataacagttcttacatccccgtgcttcacggggctacgtgcaaaagcaacccacggggggttgacaacatgcggggaaaaggtctctaatatcaaaacccataaatattccttggcaaggccaattggccatatggaccgttcccaatttaaacagaatgttattacaagttttgacgattggaccccaacttaaaccatggtccacagataatagcacaggagtgtgttacccttcctagcgggggaaaa

SEQ ID NO: 569839 - DNA, 376 bp, Homo sapiens
  misc_feature (50)..(50): n is a, c, g, or t
atcggcgctgtagagcaggttaacggtaacttgaatcgacgggtccgctngtccctagaacttcagcagatctctaggttcccaacacctcaatcggcaactttgaacacgaaagttataatagcatcatcctccttgtacagctccagcggcggtacctcccgggcccgcgccccggacccgtcaattcaagaattgccgttaacagctgtatacctactctcaggcggccgcacgtgctagctacatgtgggcccttaacgcccatatgagtgacgataatcttaactcaggccgacgaaaatcttcgacgagtcagggttcttccaggagtttttcttctttttttttttttttttgtttttatctttttctt

SEQ ID NO: 569840 - DNA, 114 bp, Homo sapiens
acccaggctcctctacacgggactatgaagcaccgcccggtcctttgagttttaagctgtggctcgtaatgttctggcgagcagtatttgttgatttaactgttgaggtttagg

SEQ ID NO: 569841 - DNA, 326 bp, Homo sapiens
gtaactgacgggtccgcttgatttgacgggtcgaaataggacggttcatcgtcggatacagtacgacaacgttccaccgtcaaacgtacaagtaactagttttctaacaaggctttagctatcgcacacggacccgtcaaatcaattgccgttaacagctgtatacctactctcaggcggccgcacgtgctagctacatgtgggcccttaacgcccatatgagtgacgataatcttaactcaggccgacgaaaatcttcgacgagtcagggttcttccaggagtttttcttctttttttttttttttttgtttttatctttttctt

SEQ ID NO: 569842 - DNA, 1154 bp, Homo sapiens
gcagtaccctctctgaggcagcatagcatcagaagccggagtcgtcggatgtttgtgttgcccgacagcatgagctacacagtgctttgtccaggcatctgaaaacacttatgcatgtcgacatactcggataccagacgctcagcaccagctgtgatatatggatatgtgaactatggaactctggaaacaaatacgaggctacgagggcatatggcatattggatagtggcataatgagacagagagtaacagcacgcaagctatcgaggatatggtataggacaaataagagaaataattgagagaaagtgagataagatacatgacagaaaatgaaaaacaagaagctgcacatacgaggatagacagaccaagaagtacaagaaaatatacacgatatataaaaccaagaaataaagcaaaagaaaagataaagaacaagagacaagggcaacagaaattaaagagaagaaccaggaagatataaatagcagagtgtgaagcgagcatatagagagacaagaaggaccaaaaaaaaaaaaaaaaaaaaaaacaaaacaagaaaaaaaaaaaaaaacaaaggaagacagacaaacagaaaaagaaccaaaagaaaaaaaaagaacaggaactaaacacgaaaaaaacaagaaaccaaacagcaagaaagagaagcaaaacaagaagccaggaaggcacacgaaaaaagaacagaacgaagacacgacacagagcaaagaacaaacgcgactcagaaacaagataagaggacagagacagagacgccagagtagcaagacgacaagcagagacagagcagaaaaagcagcgacaagagaaccagcacgtgagaaagaagagacacacagagacaagacggcgcgaccgaaaaacgacagacaaaaacaaaggaaaagacagagaaacaagagcaagcagcaaagacatgggcagaacaaggaacgaagaagacagccagaagaggagaaaaaaaaaaaagccaggagcaggaagcgaaagaagcagagaaacagagaagaccaccaacaacagggagagaggcaaagacagaggcaaaggacacgaggaaaagagaaagaagagaagcgaacacgggacacgacacgcaacaccgcatgccaaaaagcaaa

SEQ ID NO: 569843 - DNA, 1882 bp, Homo sapiens
  misc_feature (316)..(316): n is a, c, g, or t
  misc_feature (464)..(464): n is a, c, g, or t
  misc_feature (628)..(628): n is a, c, g, or t
  misc_feature (856)..(856): n is a, c, g, or t
taacgctgattagtccctacacactattcatcctttggctgaacctagagggacttacgtcagaggacccttccatgtacctaccatgatagctagcaaatgccatagaacgaggcggtcgtcgagcggatctagtcgtagctggctagtcagttatgtgcgagaaggcatgtgcatggcgtgagtgcacgctcgacagtagttgtggcgacaccaaaatagccaaagactttcccaacacgtctatctgctcgaaaaacattcgaattcccccgatggatatgagctcgagacggtgtgggcctatgctatgccncgaagtatacagctagcttgtgcatgcgcacactctcatccgacagaccactaatgggcgtcttgcatgtttggcagacactctcgacgcaacatcggagatccgatggtaacgcccgcaggcagactcacaagtgcaaagcaatgantcacaggaaggcatttgttggagcaacgtcttatggatgtttgtcaagtctctcaggaccgcttgtagccccacgtaacctgagaaggagtatgtttaaggcacacgcaatcgctttggataggggcgcttagtccccccgtgttaaacaccgcgccacagggntgacctttttcaactacactacaacacggtggccacttcaaaatggttctatcctacgccccatttgtgggccaaggttatcgcatagggcagagccacgtacaatttttccaggcaaacttagacaacccaaacttccatattacgttaaacgagaatggaagggttaaacgccacggtggaggctggagaactctcgcgaattatgtgtaggacttggagaaacgnacattccaaataccactgctatgccgcgagcgagttctgaatggggcgtgggttgcccctttcattcttagagtgcctctccccatacaaattcctcccaagtaaatgtcgacagaaaagaatcccctttcgatgtggaaacaccagcctaattacgctcgctttttctataccttctacattatgtgggaactattcgatcccgcaagggacctaggaagaaggcacactcgcggtatccaacgcttttactcaagaagacgggcccgtagagggtagcacaaagctttattaccattggaacaacctttgcccaataggagaacggcggggacagggtgtgggccgccattaggtttacaacaaggggtcgaccatctccccttggtttggcccgttccaagtgtcttgcgaagaacacgaatttatatatcgccatggattacgtaatcgaacccgcaaagggggttaacaacagggcaagattcgttggagcgctccctatgggaacttgtggaaccccctttattcttggaatttagaggaagaaaccgtttggacaccagaaacgaaagagttcggttgccttggcaagagggcacgaaggaccactattgtgggtcagatggcccgcgatatggtcctcggaaaaggaattcacatctttggcagattcagggccgcgcacacaggaaaagcgcagcaggttggtcttcacaaagtgggggccttctggttacccaagtggattcccgggtggagatacttttttacagggatagacccccttcttggctttcccccaaggaaaacccgcccaaggacaatgttagagacctgcttggttcacgagcgaaccgccacgttttcaagacatgggtcgccgtagaaaacattcaggccacagggattctgcgcgggcatctgtgatggaaacgatataatgcggtatagtgtgttaatacaccacagaacccgcaatctttgtgatagtacaaaacacctgagagtaatgtataaaacagg

SEQ ID NO: 569844 - DNA, 159 bp, Homo sapiens
cccacagagtgtaggatcgtcactgccccccatggtgccatatgtgctactaagtggggtgcacattaaatgctggacaacttgcttaacttatttatatgtggtctgcatggagcacactattcctgcttttagcacagcactcatataatttttttt

SEQ ID NO: 569845 - DNA, 463 bp, Homo sapiens
  misc_feature (13)..(13): n is a, c, g, or t
  misc_feature (18)..(18): n is a, c, g, or t
  misc_feature (460)..(460): n is a, c, g, or t
actcgtcgaaganatcgncggcctgagttaagattaacgtcactcatatgggcgttaagggcccacatgtagctagcacgtgcgaccgcctgagagtaggtatacagctgttaacggcaacttgaattgacgggtccgcttgaattgacgggtccgcggaggcaggctcgtttaagtccttcccaggggaatgatatgcaatgaatttcaaacgaaataagcatttggaattactcagcagaaacccgaggggggagaggcatggcattgcgaaaagtgcagctaagcagcgagcaagtagcaagacccaaaagtacgaggagtaaatgtgggagttcactcaggttcggggtagcaagctagagattacaatcattgtgcattatgtttggcatggtcctttccatacggacccgtcaattcaagttgccgttaacctgctctcagcgccagatcatantac

SEQ ID NO: 569846 - DNA, 390 bp, Homo sapiens
  misc_feature (13)..(13): n is a, c, g, or t
  misc_feature (18)..(18): n is a, c, g, or t
  misc_feature (387)..(387): n is a, c, g, or t
actcgtcgaaganatcgncggcctgagttaagattaacgtcactcatatgggcgttaagggcccacatgtagctagcacgtgcgaccgcctgagagtaggtatacagctgttaacggcaacttgaattgacgggtaccggagaagcgcccacggcggtcaggtgtggccacgggtaccctccacgaccgggcgtgcgcgccggccaactccaactgagcggcctcggcggcaaacgagcgtgcccccgtcacgcgctcgagaatggtcccgtttgtaggagttcatacacagggctgggcgttgctatgatggattcacaggaggtgaaccgatgcggacccgtcaattcaagttgccgttaacctgctctcagcgccagatcatantac

SEQ ID NO: 569847 - DNA, 266 bp, Homo sapiens
tccattaggtgcatgagtaggtggctgcagtactgttagcggttaggcgtacggcagggttattggttgaatgagtaggctgatggtttcgatcataactagtatggggctaaggggtgtaggtgtgccttgtggtaagaagtgggctagggcacataaggcacactgcaaacgtttccggcttcagtcatgcaggcaaggctctggaatagcgtagccctcggttcaaatcccagctctgtaacttataagctttgtgacctcag

SEQ ID NO: 569848 - DNA, 310 bp, Homo sapiens
cagtgaggctgaggcgggagaatctcttgaacctgggaggctgaggttgcggcgagccgggattgtgccactgcagtccagtcctgggtgtcacagtgacactctgtctcaaaaaaaaaaaaaaaaaaaaacccttttaaaattttggtgttttcacaaagccctaatttcccttcctttgacccctttgaatttggacactctgctgcttttatttttttcattccttttactgaagtaccactccaccatatagccccggttttcccttatattcagtgacactggtccagtcgctgtaaagagctct

SEQ ID NO: 569849 - DNA, 156 bp, Homo sapiens
gtaccctacactcctcttatcatctgtgcttcaaatttattcccaaaatataccagcttgtcaatgcactgtgaggtagttaggttgtgcttcatctctgagtgcttaatgtatctcatttcggtagcagaataagcttagggaaaactaaatctc

SEQ ID NO: 569850 - DNA, 1041 bp, Homo sapiens
  misc_feature (90)..(91): n is a, c, g, or t
  misc_feature (103)..(103): n is a, c, g, or t
  misc_feature (109)..(110): n is a, c, g, or t
  misc_feature (114)..(114): n is a, c, g, or t
  misc_feature (121)..(121): n is a, c, g, or t
  misc_feature (127)..(127): n is a, c, g, or t
  misc_feature (134)..(134): n is a, c, g, or t
  misc_feature (142)..(142): n is a, c, g, or t
  misc_feature (150)..(151): n is a, c, g, or t
  misc_feature (159)..(159): n is a, c, g, or t
  misc_feature (199)..(200): n is a, c, g, or t
  misc_feature (213)..(213): n is a, c, g, or t
  misc_feature (215)..(215): n is a, c, g, or t
ctgaccaaagaggaaagattgaatcctaaaggggatccttgcccccatgggaggccccctactagaaggacgtgaaagcagctttggggnnaactgaggcagngggcgnngacngagcagnatgagncctcacnctggctgngggtccanncacaggcngtatctgcagagggtcccagaggaacgctggagccaagannaagccctgggaangnagcgggtgcgggaacgacgatgcatgtgagggatgggacaatgatgtgtaaatgcaccctgtacaacaggagcgcaatggccattgggattcggaaaaggaaaatggaaaactaagaagaaggtcggaccgggccattgggtgagattcatgccatgtaaaaccaacagccagatgagggaggccggaggatgggacgggatcaaacctgaggatcagcgagtacgggacggacaacgtggcaaaacacccaggtctccagctaagcgaaagcggcatgactcatagcaaggaatttacaacaaaatctagcagggcactgcacgcggcagtggagagataaaacccagggctcactcgggaagcgcccacgaacgtggtgagcaatggattgaacccgcggaggtgccaagcaggaggcgagagcgaggacaggcgaaacagacactacacaacagggagaacaaagaagagaccccaactcaacaagacggaaccaaacaagggaaagtacgcacgacggtggaaaatggaagaaagcgagcagacaagaaaacgaacagcatgagcaaacaacagtacagccgagatctgcacggccggaagaaccagaccaagcaacgacgggaagacagcgagagcacgcgagcacgcaacgaaacgcgagaccccccaaggcagccacaagaggacagagacaacgacccggggcaacggaagaacgaaatagaagcagggaaagaagagaaataaaaaaaccaggaagcgaccagaccggaagacaacagacgaactaagtaatacatcgaacgcagcaccagccacga

SEQ ID NO: 569851 - DNA, 353 bp, Homo sapiens
ttgaatcctcctcctcctctccctggtggtaggagagatgagagatggagagaggcaaggaaggggggaaaataacattggtatatattatcttattacatacattgtctcattacagcctcacacaagaatcctatagggagatataacttgtatttgcaaataaaaaaggctcagataaattaaatcactcatctaggcttacacagttaatatggcagagctgaggttgaaatccagttctgcctggcataggttctctccaccccactctagtagtggagaggaggtgaaggaagaagtcaaggagaattatccaagcacctgccacaggctcctccctccatttttag

SEQ ID NO: 569852 - DNA, 663 bp, Homo sapiens
  misc_feature (90)..(91): n is a, c, g, or t
  misc_feature (103)..(103): n is a, c, g, or t
  misc_feature (109)..(110): n is a, c, g, or t
  misc_feature (114)..(114): n is a, c, g, or t
  misc_feature (121)..(121): n is a, c, g, or t
  misc_feature (127)..(127): n is a, c, g, or t
  misc_feature (134)..(134): n is a, c, g, or t
  misc_feature (142)..(142): n is a, c, g, or t
  misc_feature (150)..(151): n is a, c, g, or t
  misc_feature (159)..(159): n is a, c, g, or t
  misc_feature (199)..(200): n is a, c, g, or t
  misc_feature (213)..(213): n is a, c, g, or t
  misc_feature (215)..(215): n is a, c, g, or t
ctgaccaaagaggaaagattgaatcctaaaggggatccttgcccccatgggaggccccctactagaaggacgtgaaagcagctttggggnnaactgaggcagngggcgnngacngagcagnatgagncctcacnctggctgngggtccanncacaggcngtatctgcagagggtcccagaggaacgctggagccaagannaagccctgggaangnagcgggtgagtggcaatcgtaccaatgtcattagtgcacgggattgggctaccgagcttggattgatgattgtgattgacagcctggtaacacaagagatggcggctatggaccaatgaggtctttgtgacaagacggagaatgcgaaacacttagaaggaagggtcggcacgggcgttggtggcttaaagctcgtgtaaccccatgcacgtttggagaaggccgatgtgtggagcgcgatcaacctgacggtcagtgatgttcggcgaccagcgctgggcaagagcaccctcatctcgtactaagtcgaaaagccatctctactaaaattaccaaaattagctgggcatggttgcgcatgcctgtaatcccagctactttggaggctgaggtggggagaactgttgcaactggaggtggcggtgctgtgagccacggcgcgagatgc

SEQ ID NO: 569853 - DNA, 146 bp, Homo sapiens
tcaggtagcactccttcttgttgctggggcgtgctccagctcctctacaagccgtgctggtctctgggctgggagtgaagccgctcatcggcagacacacgcataggaggcctgagggttcttgcagggcccatggggtatgcaca

SEQ ID NO: 569854 - DNA, 430 bp, Homo sapiens
tactggtagagatgccaccaaaaatcttacaatgcacaagacagctccctacaacaaagaattatccaacctcaaaggtcaatagaactgagattgagaaatcatgtgttaaatcaagactgtgatgttgttaagcttctgtataaattctagttgagaaatacctttgtggtaacttttaaaattacaattgtttcaaggaaaacaactaatttaggcttatttactatttcaaaataataacttcttatttgcttagcattttatcgttaaaaaaaattttttttaaatacagacaggacctctctatgctgcccaggctgatattgaactcctgggctcaagtgatcctcctgcctcgggctcccacaatgctgggattataggcatgaaacaccatacctggccttttctttttattttcttttag

SEQ ID NO: 569855 - DNA, 225 bp, Homo sapiens
  misc_feature (212)..(212): n is a, c, g, or t
  misc_feature (220)..(220): n is a, c, g, or t
ccccatcagcttagctcctcttataatgagacatacgatgttggttttccattcctgagttacttcacttagaataatggtctccaaatccatccagggtgctgtgaatgccattatttcgttcctggctgagtagtattccagtggtacgtatagtctacaccacatatttctttatccactgtgtggactgtatgggacgcaacgatggnggggatcnctcta

SEQ ID NO: 569856 - DNA, 372 bp, Homo sapiens
  misc_feature (70)..(70): n is a, c, g, or t
gatggggagagggggtctcaccaggtgggccaggctgggtctcgagctcccaagttggtgatccaccggnctcggcctcccaaggggtggggatgacaggcatgaaggataaggttatttctacccatcaggggcactggcccttaatccgagtcattggggagcccccttctcggtctcggggcctggctaaataagttatatgcatcctggagggctgagaaggagggaagggagagtcggcaaggggatttttagtcttcacccaaggcagaggcagttttgagttctgtggacagcagaagcttcagtgcttggatgtatctatgagtgggccagagttgcagatgaccaggtctggggacagacaga

SEQ ID NO: 569857 - DNA, 537 bp, Homo sapiens
ctccgggatgtgatcaggggtttaaaatagaagtgaattttacagaagatatttggtgcttgatggcaaaatagtttggaaagtccatattctccaggggaagaaaaaggagataaacaaggagaatgaggaagagaagtaaattcgggaactatctatgcccaaataagtgaaaaataataaaactcgggactccaatactaggacatacactaaaagcttatgtgtccagaggaaagctaataaaatcaaacacagaagcaagaacagatgtatgttcggtgaagagctatgtaagttttagatatttacctccggtaatacactactctacggggcacagtaggtgctcaataaatacgggtttggataattataatccaagttttttctctcttatactggagtccttcctggcttatcttggtactagcacggagcctaggggtacttcaatcaatcctggtaaaacagaacaagattggaatcttcttcagaacaagcccaagcagtcacaagcggtatttccagggaatc

SEQ ID NO: 569858 - DNA, 312 bp, Homo sapiens
  misc_feature (6)..(6): n is a, c, g, or t
  misc_feature (57)..(57): n is a, c, g, or t
cacgangacaattatgaaatcctgtgactgaaagtcccctcgatttcactctgtggngcgcatgcgcccgcccacggaaactctggcatggaaacataaactcccgcaaaccagtgctacccagaagcaccaacacgtgtgttctccattccaccaatcacagaccagtatctactccaaacatccagtaacgaaaactatggcatcttcccaggaacagcaaggcaggcttcttactcacgatgaaccagcacgaataaacccagcaaaaagagaactgcatacttaaatttaggatagtcattcatgagg

SEQ ID NO: 569859 - DNA, 193 bp, Homo sapiens
ctcaagcatgcctctgtttgatagctccaagtttaatttcaaattcaaatccagactatggtactttagcatgactcagtatgtgtcattttgcgtgcctgtagtcccagctaccaaggaggctgaggcaggagaatcgcttgaacttggaagatggaggtttacagtgagccaagatcgtgccattgcactc

SEQ ID NO: 569860 - DNA, 950 bp, Homo sapiens
  misc_feature (280)..(280): n is a, c, g, or t
  misc_feature (721)..(721): n is a, c, g, or t
ggctcactcttgctagaaacctactgtgtgacaatgtcttcttggtctatgacggatgatgaggggaaccacaacgaaattgcaccagatgatggccggcatggagagggctcgcttgacgcacccacaggactgtcggagggcgcctccgtattgctctcacatgcacagctagactcatggcttctccggtcgcactatccttggcttgtttaaggcccgagtcagtgtttgctgcggtcgtgtgtctcatctcgcttatgacctgtggcgtgcgttnttgtggtcagctcccagctaccagatagctcgccacgctactaggacgattgcgggtcgccgtgcgcgtgcgctatctcgttgggcacacttggcgatagctccgtcgattggtcgacgcggcccaagcgtcgagttgcttatttgcgcgatacatggagtgcgggtcgttgctccccgttgcgtattgagaccataccttgacaatttagcgtgaggcgggcgctgtgtccctgggtgcacgcgcttcgtctgtagctcgtggtgacttgatgtctccaactgcagggccagcttctgcgactcttcttctcgtagttcacgccccgtgtactcatcgaggccgcttcgtgctgctttacatgacgagttgcccccatagtggtgcgaccgtggttcgcgttgcctttcatgtgtcttgtgcctcggacgttgctcctangtctagagcataatgtgacttggacgtagcgtgccgtcttcgtctcacaggtaccttcggtgccagcccggatggtcgtgtcgctgtccgctctctcattgatcgcctgttccattatggggcgctgtgtgctccacgggcgtgagaccgtcctcactcctgaccagggaatggaagtccgcgttgtccccagggcttgaactgtcgtctggcgttgtcgttgaaccgg

SEQ ID NO: 569861 - DNA, 595 bp, Homo sapiens
gagctgcaggagcttttattttattttatttttccatatcccagtggcacctggaacgccagcgagacagaactgttcactcccctggaaagggggcctgaagccagggagccaagtggtctggctcggcggttcccacccccatggagcccaggaaagtaagatccactggtttgaaattctcgcttccagcacagcagcaatctgagatccacctgggacggtggcgcttggtagggggaggggcgtccgccgttgctgaggcttgagcaggcggttttaccaccacagtgtaagcaaagctgctgggaagttcaaactgggtggagcccattgcagctcagcaaggctgccgtgttcagactgcgagattgctcctccctggacagggcatctctgtaaaaaaggcagcagcccagtcaggcttgtagcagacttaaacgtccctgcctgatggctctgaagacagcagcggatctcccaacacaagatgcgagccttgctaaggccagacttgcttctaaggggatccctgacccctgtgtatactgactgggagacaccttccaattggggcttgacgacaccttatacc

SEQ ID NO: 569862 - DNA, 433 bp, Homo sapiens
acacaaagagctaaaggagaaacagagactcgtcaacacttaattagcagctaagtactcaaaaagagcctcagttctgtctttaaatagcacagtggcccctacacagtgcacaggacaaccctgttgcagacagcttggagtgtgcaggaagcctgcagccgtagtgggcagcagaggggagtgttttaagtacttgcacctggagcttaaaatccgactccaccacttacaatgtagtctcatcctcagttttcttcttaataaaatggggacaataatgaccaactgaccgagataatacacatggaacaatttaccctgtggctggcactgagtggctcactattactatgattcactgttaggaaaccaccaagtcccccgttgcactgcccttgactgtactttgttctacgagagatgatgagta

SEQ ID NO: 569863 - DNA, 207 bp, Homo sapiens
gagagggactgtgacttgggctccgctgtgcccgccctgggctgggcccttcctggctaggactgtggaggaacccaaggccccatggctgctttgtagtccatccagagttgggggctaggggagggggcaccaggatccaggatgcctgagccccctgagttcccaaagggagggtggcagagacagtgggcactaagggtggag

SEQ ID NO: 569864 - DNA, 930 bp, Homo sapiens
aaggaccttcgagaacgagtagaggtgatccaaattcacggtgccaaccacatgattgaagtaaggcatcaccacggagtgtaagctgttgcaacctgatgttcgacctgctccggccaagttccttatgtcacctcattgagcacagcttcgagggcatggcaggcaccttcaaatgccccgtgtgtttcacagtcttcgtccatggccaacaagttgtcagcagcacatcttttgccgtgcacggtcatggaggacaagatctacgatctgctcacagtgccctcagaagttcttcttccagaccgagctgcagaacctacacgatgagcctagcacgcacagtgagggatcgctcaacaggtacacctctccgcagataggcttgctcggagatcgccgtggggtagggcctatttgagacagttactatccatatcagaagtgttcattttgccacccctagtatgtaagaactgcgtaatggatcttggccagtgacggcgctgcgtgatgtatgaagctagcatggataatgaattattacatggccagagacttaagaagtattcctatgctcagctatctttgtattgtgcctgtctacagctacgtgtgctcttctagactttcctgccgcagacttacattatctagatgttagatgaaacctgctcttttaaggctattgtccttttcgttccttgcatcgtatgtatgatctgatagtgttttaacaaagatattagtgtgatcttttttctctttgcttctttttgtttctttcttgtttttcgtcccccccacccccccacccccttccgttaactactttgtaattgcaattctaggtaattgtgcatcgtgatgtgattgcttggctattgtctgaatatttcctttaattttataattacaaggtaatgcttg

SEQ ID NO: 569865 - DNA, 916 bp, Homo sapiens
  misc_feature (462)..(464): n is a, c, g, or t
  misc_feature (539)..(539): n is a, c, g, or t
  misc_feature (544)..(544): n is a, c, g, or t
  misc_feature (569)..(569): n is a, c, g, or t
  misc_feature (575)..(575): n is a, c, g, or t
  misc_feature (588)..(588): n is a, c, g, or t
  misc_feature (590)..(591): n is a, c, g, or t
  misc_feature (697)..(697): n is a, c, g, or t
  misc_feature (701)..(701): n is a, c, g, or t
  misc_feature (703)..(703): n is a, c, g, or t
  misc_feature (707)..(707): n is a, c, g, or t
  misc_feature (721)..(721): n is a, c, g, or t
  misc_feature (733)..(733): n is a, c, g, or t
  misc_feature (743)..(743): n is a, c, g, or t
  misc_feature (751)..(752): n is a, c, g, or t
  misc_feature (756)..(757): n is a, c, g, or t
  misc_feature (763)..(763): n is a, c, g, or t
  misc_feature (816)..(816): n is a, c, g, or t
  misc_feature (836)..(836): n is a, c, g, or t
  misc_feature (842)..(842): n is a, c, g, or t
  misc_feature (844)..(844): n is a, c, g, or t
  misc_feature (853)..(853): n is a, c, g, or t
  misc_feature (855)..(855): n is a, c, g, or t
  misc_feature (858)..(858): n is a, c, g, or t
  misc_feature (861)..(861): n is a, c, g, or t
gcccgggctagcgacagccccacgccggcccgggcggtcgtcgtgcggtcccgccgatccgtccgacggtccacccagtgcttgcggctcgcggcgggccggcctgggctgcaatcaatgcggctttgtctgggacgcccacatcccagaggccattcccgggtcggcaaatcggagcgcggccggggcgcgcgggggtgagataagctggccatgtgatcccacctgggctggaaggggatggggcgccagtgtgagtgctggcgtgcctggctggggcgctggtgctgtgcactgcggggctcctgcagctatggctgtcagcaggaaggactggtcctgcgctgtccagcctttgccctgtgcagaggactctggaggatgaggaggaacatggagcgcgagctgcatggcgggtgcaccgcaacctgaggctccaccactggacgattgaggctcccnnngctcagccagaatggagaccggcaggcctctgttctgagagactaccgagcgtggaagaagcagaggtgcccaangccantgcccccaagcctccaaagatgagngacganggacatccagagnanncctcagaacacgggaggagcggaggcatgaagtgcgggcatggtgggtggaggctgcacatgtgcccccaatcccaagggagaggcttggaggcagaggacggggnaggnancagnttgagccctgtgcnggccacacaganacccctagtntccaaganncganntggaantcccactcgccggagatgagtgggaaagcgggccctgggcctgaggaagaganttgtgggcaggagccaaagngagganangggtccagnanagnccnagttgagaggcccaagcagaagaggccggaagacaggcccgtaagccacttgaag

SEQ ID NO: 569866 - DNA, 371 bp, Homo sapiens
aataaagaggctatgttgtatatatacgtcgaagaatatagtaaactagaccactcttttatagtttctcaacctaccttttatcttctgaagaatgacaacatgcattctactataggagaggtagtgggagaggtcgttaccttggaaatcacgtcctgcatctcatttctgggatccaatgttccatccatcatagcgcaaatctatataacatctgtgctgggttggaatagatgtatatccagtaactacgaacatagcaaatatatattaaaatcacgcatctctcaaagggggcagatcaacagccactaactttattaaatacttattcccaaatactaaaacttttagtttaacaaaaagca

SEQ ID NO: 569867 - DNA, 745 bp, Homo sapiens
gggaggcggtgctggggctgctttcccctggggccgacagcgcggctggtgcggccggggtcttctgcggtgtggcctggcggtagaggacgcggttttggggcggcggcccgcgaggtggaccccttgttcccgtcctgggcgggattcgcccatgtgaggggggtgtcgcgcagcgagatggtgtatttgggcgtgtcctggcggcctctcgtgcacgcgcgctcccgtggtcggctcgtcgcggttctactggtttccgcgggggtggtccctcacgcgggcattttggcggcgtgttcccgcctccggctagtcggaccaccactgtggcggccctcgtcgttgctcgccacggcgggcaatctgccggcgggtcggccccctcctcgtagagcccgcgcctccccatgcgtctatcaccaggtctctctgcgcgcctcggcctgcaccctctttcgccgccacctcccgcgcgcgagataagtaatctttcgtgcggcctcgcactgcggcgcgcaccccacagcttatgtagtgcccctcgtttgtctggggcggcaactctcgtggtaggtgcacagccctggtgttctcccccctgggcggcagtgctgcattctcggtggtgtgatgggctgcgacacttgttgtctcatgagttctcatagccgacgcgctcgctcgctcgcttccactgctgtaactgcaaaagttgtccttctacggcggccccaacaaaaca

SEQ ID NO: 569868 - DNA, 395 bp, Homo sapiens
  misc_feature (30)..(30): n is a, c, g, or t
  misc_feature (96)..(97): n is a, c, g, or t
  misc_feature (99)..(99): n is a, c, g, or t
  misc_feature (112)..(112): n is a, c, g, or t
  misc_feature (161)..(161): n is a, c, g, or t
  misc_feature (186)..(186): n is a, c, g, or t
cgatcaatagtgcgatgtggggacggaaangttagctcagccaactgttggatatgttggttcaagcgtgtagtcgtgctctttaggcaaatccgnngngcttagatgaggngtgataacgagtctgcttgcagacgaagtgagtgataccctgcttccangaaaagccactaagcttcagctatngacgaccgtaccgcaaaccgacactggtgcgcgagatgagtattctaaggcgcttgagagaactctggagaaggaactcggcaaattgacaccgtaacttcggaagaaggtgtgcctttagtaggtgaaccatttagcttggggagcaccaatgaggtcgcagagaatcggtgcctgcaactgtttaatgaatacacagcacccgtctg

SEQ ID NO: 569869 - DNA, 497 bp, Homo sapiens
  misc_feature (16)..(16): n is a, c, g, or t
  misc_feature (45)..(45): n is a, c, g, or t
acctgggcattgtcantgaccctccccctggactgtgctgacccntagtccaacttgcacaggccctgggaacgcagcttccagcctctccggactgtgctcccaccggccactgctttcaatgctttcctttagtagactaattaccttgtacctccaatctctcctaaaaactcgccctgtggattttttctgcacaagccctctatgcttctgtaaaagctacaatcccatctctatatcctgcccatttccaggctcctcctctactatgaaggacaggtctccaaaaggcaacaggctcctctgggctattaataaagaacattacccttgccacaactcaggcacactgatttccatggacctagctgaaaagacaatagccctgaatatgcacaagaatatggggtagcaccttagatcatttttttccctaagttctttgttgctagaagtaaaattctgattattagcttgtgattaaatatattatt

SEQ ID NO: 569870 - DNA, 1291 bp, Homo sapiens
  misc_feature (208)..(208): n is a, c, g, or t
agcggagttatctgtgggtacccgagagcgcggagatctcgccggcttttacggttcacctcggctgtctgcagcatcccatcccgcttcgctctcctgaggctcgactggaggacccagtcttgggctagaagttcaccatgctgcgtattctcacattgatccattggccagggtagtatcttctgcatctctcgccgggaatccncactgtatggacgtgcttcgtatcgtcgtttcacctgcgaaacaggtctcttcagaaggctggctgtgcccactggtgcttcaactggtatctatgtaggccctagcagctccgagtgactaatgactggtgatctcgactattatgggtgccacgtggtgttctcaagaggcgtgtctgagcacatcaattaaaactagttgcgcctgccctggttagcatacgaagctgaccgtcatcagaacattgaagacagattgcacaagactgacttgatcgatgatggatggtaacgagaagaagatcgagatctgaagttatcggatgcgaacgcccatttctggggcgttgctcccttggccgtactagctaaagctgagatgtccgattcgaacaaggggggttacccccctgttaccgatcgacatcgctgcactatgcgtctggcaacgtactgaaagtcaagtcctggtccatgtccccaggcaggttcacattgtctactcgaacttggtcgggcttgctcattgcataggtcaacacaggcatagggcgcatgtcagtggagtttcggatgaatcccatcccccacgtcgggtggccaggccacaatcttcgagggcaaaggccaatggcggccattggaggcgagaagcggttttaacccatcacaacccttggaatgaaattgtccagtccagccggagcaaagtattgggggagaaacgaatgggcaccctacaatcgtgggcgggactcggaactgcgggagtgttggcttccccggagcattcgcttgcgtacggaattaaatgagcgcggggccttgggaaacctaggctggaagaacttggcgtaatgtgggggaaaaggcctagggcttacagcatggagttaagcggcgggtccaatccggcattgggaccgcgtagtccgggcattccgaagttgcttccaagggtccctgggaaaagtactgacccggaacattcgagtcttcccgaatagctccccgcagggtacttttccgccctgaccagctgggttgacccgtgtacaagtcctttattcgaaaggactacc

SEQ ID NO: 569871 - DNA, 1257 bp, Homo sapiens
  misc_feature (71)..(71): n is a, c, g, or t
  misc_feature (560)..(560): n is a, c, g, or t
  misc_feature (1138)..(1138): n is a, c, g, or t
gggcgaccagagctgagaagcggggaccatgtgccgacgcaagttgacggctctcgacttgaccatcgaanccccggcacgggcttacatactgcaaacgaatgaacacaggaagtttataacacattcatcgatttgcgacttgacacgcaccagaatagatcaggcactacaagattgaagacagagggaatttagatgaaacatccacagtcgagcgatcgtggcccaacgttgctttgaaaaggtatctcagagatgttaaatgtcctttcatagattcaagatcgatcaagaacgctattggactggcttgcttggtgttagctgtatagactatgaatatggaggattaatgctgatgaatacgaggatttgagtacctgataattcaaaaactgctgacaatgcaactaagaaatgcagaaccattggatccaattcggcatgtacacataagtcctgagttgccaacggctggtgtgatggctttggctaacctgcttcagattcagcgtcatgatgattacctggtaagtgcttaaggcaattcggattcnggttcaggagcgcctgagacatggatgccgttgctaaggcaaagtcaaacaaaagagggcttacctgttgctttagacgaacatattcttggtgtggacacaggagatgcagttcttaatgaaggtgctcaaattctgcgattgctgcgcatagaggagctcagagaggtagagataaaagattaagaagcatagtagctgtttagggactcctgtgttgatccaatgacagagccacagacgcggaaaagtcgtgagattgaacattggggggttccctgtttcacctacttgttaccttggggaacggtaactctggccgcgtggggagccacaattggcactctcgcgggggagaggcgacaatgggtcttgttccaaatttcaccccccgcgggtgatggatgtgtatctaattaaggtggggggaggaggaccacaaaacaatacacacaatgggctttctttctcggtgggcggagaggaatagtataaaagtacacgtatacttactctacgcgcacctatataaagtatagacggcgccaatcgtggctgtaattcgagaaggacagtantagtagtctataacatactgtctcgtagatacgactaaactagtgacctatcactactcctgccttctttatactctcttctacttctcctatcaatctatcttactaaacagagacac

SEQ ID NO: 569872 - DNA, 450 bp, Homo sapiens
attttgaagatggcgcctaccttcggggtgtggaggtagagacaggagagaagctcaggatgctgctcagaacaacccatggctcagacttcccacctgcaagatgagcagacgggcagaagggtcctctccttgtctgccacccgcatggcgtgctgtgaggagcctgtgagaacctgcccatcaccatgagaagtgcaacaccaacctcaggtggaaggtcttaagagaaaacactgaggtccctcgaagatgaagaaatcctcatgaagatgaatccaaaggtggattcaatttcagctgtctttggactgaagactgcaacatcaacacttcccagggtctccagcctgcccgcctctcccgcaaatttcagatttgcaagtatccacagtcatgagcaattccttaaagtaaatatttctctgtttctttctggaaaaaaaaaaa

SEQ ID NO: 569873 - DNA, 325 bp, Homo sapiens
ggagtacccctagattctcacaggctatgcagtttaggaaaagctatggatctgaagtcaaggtaatctggagtctaggcagacccaggctactcgctgggatcctgatcctggggtaactgcttatccactgtgagcctcactttcctcatcgtgaaaagtggggaggctgagcgaagtggctcacacctgtaatcccaacactttggatcgcttgagcccaggagtttgaggccagcctgggcaacatagcgagaccctgtctctacaaaaaatttaaaaactaaccaggtgtggtggcttatccttgtggtcccagctactc

SEQ ID NO: 569874 - DNA, 801 bp, Homo sapiens
cttgtgtggccgagagagcagcgctggtgggtagactgtacggcgagcaagccggagccatggcctttacccccacgtcggtgtcggccaccctgccgccgtcggctcctcctcctccggcggccaccaagggcacgccccgccgcgcgccatggaatgccgcgccgctggccgcggcggcagcctcgtcgacggctgcattgatggacgcgacgccggtcgcgcacgccgcggcgttctccaaggaggacgtcgccgggtcgttcaccaaggtggtggacacggtggatgcggtgatcggcgtcggcggcaaggtcgccgagcagtcctttgtcgtgctcagggcgctgagcgaggccgtgaagcccgcgctaccggtgctgcagagcgccggcgagcaggccctgaagctcgcctcgccggtggtctccgacgcctccaggcaggccacggaggcgctccagggcgccggcgtcgaccttgcccccttccagtctgctttcaagacggtcgcagatgcggcgcagccggccttcggcgccgcgaagccgatcgcctcggagactgtgcagaccatcgggtccctggaaggcacggactacgtcgtggccgcggagccgcgttcctcgcgtacctgctcctgccgccggcctggtccctgctctcatacggcctgcgcggtacaaaggtgacctgagcccagctcaagctctggacatggtcgcctctcaaaggctaccttatcatcgacgtgcgaaccgagaacgacaaggccaaagccggcgtgccggagtcccctca

SEQ ID NO: 569875 - DNA, 1791 bp, Homo sapiens
  misc_feature (305)..(305): n is a, c, g, or t
  misc_feature (790)..(790): n is a, c, g, or t
  misc_feature (1198)..(1198): n is a, c, g, or t
  misc_feature (1222)..(1222): n is a, c, g, or t
  misc_feature (1791)..(1791): n is a, c, g, or t
taaaaacccccaatttgggttatattatatctctcttggaatgggcgaatgtcatattgtgcgcgttatttaatataaaaaaagaaaactccttggggtttaagaaaccgcgtgtcactcacaagattaccaaataagcatatctctgggcccggggttcccagaagtagagtttgtggagacccatatttctctcacagagaaacaagagaagcgccctctgtgtgtagttcacacatatataattgaaacacaagatattcttatatttgtcggctcacacaaagagatctctgtagaacccncacatattttgtgagagcgcacatctctctctgtgtgtattatatatatatagagaacactctcgagcccgcgtggcaattgtgtgtctcgagtgtgaaatatagagagagagaatcaacgagagataaaatatatgaggaagagtctccgcgatgtgagagagagaggcccgagagagtgtgtgtgtcgcacacaaaatatctcttacaagcgatgtgtagtgtgtgtgtgagaagagtctcacaaaacagcaccaaaaacagcacagcagaggaggaagaaaacaacacagagggcggctgctggcgagcgaccttttattcttcacaactaataatagcagcagggcagcgtcgttgtgttgtagtcctcctgtgtggagaagaaggagtggtggacgtaatcctcgcagggtattataaagaaggggtgctcatcagaggggtgctctactctaataatagaagtaggcgcgcgcgagganactagtaattattatttttcccgccgtcgcacaggaggtggtgtcgtcgtccgtcgtcctgatggagagctagagagtatattactacctcccacacaagaagtggcgcccccccagaggggggcggggcacacaacaaccttatatgcagccgagggacgagcctctcctgcagcggatgtgaccaacactacatgtggcgcggcgcggtggtggacaaacccccgataaaatagaacccacaaaaagaagggggggagtcatgtgtcgtttcctcggcggcgaccagatgaggtgcggtagtagaaacaacgcaactaacaaacagacagagcgccccccctatggtggggtgacatccttgcaggcagacgacaaacgattctaatactttcccaacgaggcggngcgagtatttcttcgttggacccnccccaagtaggaacaccaacgagattctttgtctgccacaacgcacactcagttgtggtgtgtcccccccccaaataaaacacagagggaggaaaggcggcacgttgggttccttgtgacgagcccaagagatgggtgttgtttacaatcaccccacacagctaatgtgtgtcaaaccatccttctcgggggcagcaaacaaagcagggccggcgaacggagggggggatacatctcccaccagaaggagcagtctggtggtgatagcggttcttgcacaccgcccggagaaaaaaccttgctgtggtgggcggctattaaaagggcgagagaaagttttcacccagaaaagagggggcgcccccgcaagatagaaggaacccacaagagctggttgtcccccggggaaaacaaatattggggggagggcaacgatgaataaataatatctctccataaggatcataaacaactgcagagaggagggggcgtcaaaagagatattcaccctccgaggagcgggacgcgagcgaattacagctgaacccacgcgtgtttcgtggtataan

SEQ ID NO: 569876 - DNA, 160 bp, Homo sapiens
gtacatacaaatagtcaagagtactgaatgtacatgactatttctataacctatggtggagatacccccttttttttttttgagaaatatattctcattctatccccaaggtggaataacaggggaaaaatctcggctcatggaaagttctgcccccggg

SEQ ID NO: 569877 - DNA, 246 bp, Homo sapiens
tcctccgccaatctttggccgcgtgccttttctctgtggttacagcagacttcggtatctggaacgtgagcactatcggagctttggccgtgcctgaggagatgactgtcaggcttctccttctgcctcttgcccattctatgagagcagatagatggagagccaagctggtcaagcatagatacagactcccctgagctgatcagaaggcatacaccaaatacatgtctcacatcatgagatttc

SEQ ID NO: 569878 - DNA, 228 bp, Homo sapiens
taagagcttacataatgaaaagcagaatgtgggctaggcattgtggctcacgcctcttatcgcaagcactttgggaggccaaggtcggataggtcaccttagtgtcaagagttcgataccggctctggtcattatggtgaactcgtgttctatactaaaaaatacaaaaattagctgggcatggtgccaggcacctgcaatcccagctcttattgcccaggctggagt

SEQ ID NO: 569879 - DNA, 154 bp, Homo sapiens
agcgggagacactggcagggccagaaaacgcgcgcagcgggggcggaaggtcggtaagctcccgcctgccggacgagccgctgcgatgtgggacaccgcgatgggaggatgatgaagcaggcggagggtttaccactcggaggacagatggcac

SEQ ID NO: 569880 - DNA, 1480 bp, Homo sapiens
ggactgtttaccagcgtggagttcctgtgcgctgcgcgatctggttgcactgcagctgagcatgtgagagcctcaatgctgctccaatggagctcaaactgtgtgctggactgatgatcaagagtgtgcctgtgtcagaaaggcagtgctgctgcgagactggagactgtgcaatctgcacctgtggtgcctgcctaacagaggagcccctgatttgaagcctgtgtgaactgtgctcacacctggcactgtgcttgcacctgcccacctgtcttccatcaccttgccacacgcttgcttggcgcaatgtgagaggccagtcttgcaagccctgtggtgcgctgttgtgggcgcagggcctgcgacctggaagttgtctggtgtgttgattgggcatcccctgaggcggttgctgtgctgcagaggtgcaacaatctgtaccttgaacttgacaacttcttgcgactccgactacatacttacagagacttgaagcgcctgcatgggaacgcaacagggatggacatcggagtccagtcagttgggttgcttgaattctgcgcagtatgagcttgaacttcaacaagattaacaacatatctggggcatgattgacaatggaggaaacaattacagatggggccatttgaatacagcaccatatgggaaaggaattcccaacattacattgagtgacattacacatttgcagcaagctgcatacaatacgatcaaaagcagaccattccaccacaccgcccacgagttatcaaatatccccctttgacaccattctacgttcaccaggacacttcaccagaaggagaggtaccattatttgggagaggaacacaccccaaaatgttgaacgaacgcacggtcacaacggggtcgatagacaggtggtaacaccaaacaaaaatggacaacgacgcattccgtgaagttattaactgtttgggtgtttccgcgatttcgcaagttgggcagtcggttcaccggcgctgccaaggatccgaataatagtcggcgctatacttaacgattaaacgcggtttgccaactgacatttttggcatgtggacacagtcgaaccacatttcgtgatgtggcccgaatagcacccacgaatttaacccgtttgtaggcgagcacaacatattgtagatgacacagactttattgggaagaatgtcaagagaagtgacttttataaacaagtggtacatgttggattgcaaatcacggtgtgggcagagtatattagcacaaaggaatggagagatataacaagtggggatcaacggacatgtagtgaaagtagtagtagtctgggatacaagttgataaggtcgtggaatattgtgaggaaaggaatcaagtaatgtcagagtagttgtataaccgagtgggtaaaaaatggcgcgattatagtagtgtggaatctgggtgaaccgcaatataacagatgtgggtagaa

SEQ ID NO: 569881 - DNA, 911 bp, Homo sapiens
ggaaaaacatcagcaccaaggcagtgggccaagtacaggcggagcagcatatcacctatgagtaacaagtatccagaaggctcgtctgaggagaggcaggtcatggatcatgcctatcctccttctcagtgtctgagagggagcacaggagagacctgtaaaagagaacttgcttcaccatgtcggtagcatagcagatgatgtgctgctgggagactcggttagatggcaccgtgcatttcttaatgcggaaggaccgtctgacctacaggaagtgtcacatcatcttgggctcctttgacacgtacagttgtagcactggcgcagaaggatggggaatcctgtgtgacctgcaaagaggagctcgcagatccatacggtcaaagtatcaggaagtgactcgtgagccttgggactccaagatctacaataaatagtcctggctgatatggagatgatgagccatggcatgagagggttatcagcataagcggaagaggtgaagtcgtaagggaaatcatggctctgaagtattcacgtcttgccggtaccctgagttctctatagagtagccgaacacaggcagaatggcccagtacttgtgtgcaatggtttcttcaagagtaccggcatccctttgactgacgtcaagtactcttgggacagcctgggcatctcctcagtacagactctgaccatgggacgtgcagcctggtgagaccatcaatccccaaataaagtggcccataaaatggaccaggaattatcggtaagttagtccaaccgtgaagaattattgtcgcaagatgtacatcaccggtgagctgttggtggggagccagtggatctggtctaggtggaagacaccagggatataggccacatggggaaaaggaaagacaaacaaggaa

SEQ ID NO: 569882 - DNA, 112 bp, Homo sapiens
tactcttccccccattctgtgagatggatggcaggcacgcgtgacttgtagtgttgcatggcatgtgtgggatatctgcgtttcccctgtgaaagcttgattcctgccatat

SEQ ID NO: 569883 - DNA, 382 bp, Homo sapiens
gtactcatcacgccttgtccgtgctaccgtaacctcactcaggtgtgaagagattctttcataggtggaaactctcgtacctgcactgatgccacaatctcgtcgcaggaatggcatcctgtgaaaagtactcttaatacattaagagtatgcaaatagggtcacagaattgactgtagatccaactgctgctggtgatgttcgtccactaatgcaccatccaccaaaccagatcgatgaccacgacacagtgcaccacgacacagtgcaccacgacacagtgcaccacgacacagtgcaccacgacacagtgcaccacgacacagtcagaccagacacagtgcaccacgaccacagtgcgccacgacacagtgcaccacga

SEQ ID NO: 569884 - DNA, 301 bp, Homo sapiens
tcggcagctttaaaaagagagaaatataaaaaccaagtgctggattggtccctattcattaaaaaaaaagggtacttgtggctcgacacaatcatgaccagacacatgtgcaccacgaccacatgtgcaccacgacacagtgcaccatgacacagtgcaccacgacacagtgcaccacgacacagtgcaccacgacacagtgcaccacgacacagtgcaccacgacacagtgcaccacgacacagtcagaccagacacagtgcaccacgaccacagtgcgccacgacacagtgcaccacga

SEQ ID NO: 569885 - DNA, 254 bp, Homo sapiens
tcgactgtgtgggtacaaatactagatttattcattctatctacccatatttgtacccattaaccagtccctactttccccctgctcccagtctccaccacccttcccagcaccacgacacagtgcaccacgacacagtgcaccacgacacagtgcaccacgacacagtgcaccacgacacagtgcaccacgacacagtcagaccagacacagtgcaccacgaccacagtgcgccacgacacagtgcaccacga

SEQ ID NO: 569886 - DNA, 584 bp, Homo sapiens
aaccgagtatactgcatcctattataagtatactgtcaggagtggactgtgatcagtacttgtcgcattaccatggtaattgttctggggtgacgtgaactgcacccatataaaacagtgaacttaatctgcaaatgtgtgtgttctgactgccctactgactggctagtcccctgtctctcaccgtctccttgggcctctgtattccttgagacacaacaatattgaaactaggccaactaataaccctatgtgtagtggcctctaagtgtccaagtagaaaggaagagtctcttactttaaatcaaaagctagaagtgattaagcttagtgaggaaggcatactgaaaacttaggtggcaagctagatctcttgtgccagtcagctaagttgtgaatgcaaaggaaaagttcttgaaggaaatttaaagtgctactccaatgaacacatgaatgagaagaaagcaaaacagccatattgctgatgcggacaaagtttgagtgggctggataattgatgttggcccaaataaacaaatttcagggtaattgatacaggcttactgggagaagatgccttcaat

SEQ ID NO: 569887 - DNA, 932 bp, Homo sapiens
  misc_feature (232)..(232): n is a, c, g, or t
  misc_feature (839)..(839): n is a, c, g, or t
gtctttaagaaaatccaaaaatgagatgaaaacatcctgaataataatgaaaagataggaaagatgcatggattaacagtatgaagataatgaaaatactatagtacagtaaaaagaatgcatgatggggataagaggagtggggagtaactggaggcagtcctaaaggtggaatcttgccacctgtgtcacagtatgtaaacttcaaggataggaaatattaaaataagancagaaaatattgtacgggtgtggaagctatcaggccgatacgaagggggtttagagtataggtcgctttcatgtactgaagggtcaaagtttcaatgtagatctttaagagaaatccttttcaagagtcggagggcgagtgtggagtagagaaacgaggcatgggaagaatggggtggaaggatgccagaggaagaaaaggaaatgtgcagaagaaaaggaaatgtgcaaaagaaagtgcttccatgggaagactaccaggttagttagaatgcgaaaaacacaaaaaatgctaagtaagaagtataaaaagcacatgaaagaagtagtaaaaaaacgaacaaacaaaaacaggtataaaggggcattctggcccttcaaaacaatgatcttcaacagtaaatgcaagcacaagaaggctccaggcttgggaggccaaggtgggtggatcgcttgaggtcaggagttcgagaccagcctggccaacatggcgaaaccctgtctctacttaaaaagaaaaaaatcagctgggcgtggtggtggatgcctgtaatcccagctacttgggaggctgaggcaggagaattgttgaagtccagaggtgaggntgcagtgagccgagatcgcaccacctacactccagcgtggcgacagagtgacttcttcgtctcaaaaacacaccacccccaccaaacacacag

SEQ ID NO: 569888 - DNA, 237 bp, Homo sapiens
gactgagatcaacaggtccttcaggaagccctctggatcggtgatttctgataaaagaccggccacatcgaggaactctgagaaggtctccactaccacgacacagtgcaccacgacacagtgcaccacgacacagtgcaccacgacacagtgcaccacgacacagtgcaccacgacacagtcagaccagacacagtgcaccacgaccacagtgcgccacgacacagtgcaccacga

SEQ ID NO: 569889 - DNA, 410 bp, Homo sapiens
ggggatcagggaatgtactgcagcaagggaggcatgccaagagcaagagtgtgggtgtgaacgtagagaatcctcctttttgcccaaaaggggcgaagtgtttgatgcaggtcatggaggagaaagcatggtgtgggtaagacacggaaggaatgaaggagaggtgagatgaggccgatcttgtaagggatctgaaaaaaggggtggggattaaggaaaactgactatagtaagcacccataagaaacaggttgaggccgaagatactgacacagggcctaagagtcctatcaggtgggaggactagacgtatcgggtggggaggcattaaaagaacaagtttcccatgcagactggtgtttggggtcagaggtgtgttaaagggcaaatagggaaccgaatgaagtgct

SEQ ID NO: 569890 - DNA, 1417 bp, Homo sapiens
cgcagttttgtttttttgtctggcttctttcgtcgtctatatgctagtttatgagtgggaacgcagcgcacgagcactgcaggcgtaagatcaatataaccacagagcggagcagcacgccggtgcatgcacgggtcgcagcggagtgatacatcatattgtagtcacgtgctttcgctcgcgcgctgacgcatcgctctctcccgtgagatggatcatgccctccatgttgttgtgttgacgcggcggggtcgtgaggacaacacgacagatggtgtgcttgctcgtgaaagatgtatggtccctcctctctcttatattaagtatgtcccctgtggtgggcaaaaagatggtcgccgccgccgtgttgttgtcaccgacatttattgtagtccgcgcgagtatttgtttgccggcgatgagtattgttggcgccgctattaaaggagcgtccctcctactcggggcgagggggttcgtacaataataagggggtgcttgctcttcaccccccctgccgcgctggtggtttgtgtaagtagcagctgttccctcctacgctgggggtgttaaaaacgcggtgttgtttcacaggccgcgctgtgtgtgacgccacaggtggttgctcctgcggccccccctctgtttttgttgcccctcccttgtgggggcgccccctcgctgcttttgggggttctagttataaagtggttcgcctcttcctcccaccccggttttaaatagattatcatcgtttcaaaaaacgtggttttagacgcggttgatcttttaaaaatcactgttgttgttaacccgcgccccttttcctttttaataaaccccggtgttggtcttctccccctctccgtgggtctttatttataacaccccccttgtcaaactccccatctatcccgctgcgggggttacgatcttcgcggcggcctgtatttttgcccccgcccgcgcggtgtgcggggcgctgtcgctcttgtgaggcccggctggctgtgcatcttggcggccgccgttttatttgtggggaggtgtggctcagggggttgtgccccctcctgtgcggtgcagagggctatccgtaggtttcttaacagtgcggggcaatacctcgggcataaccccacacaagtcttctcgcggcctagggcgccaatgtaaacgcgtatataggcgaatatccttggggaaccaattagtaagtgaggttgaccctcgtctcgctcttataagagaggaacaaagtgacgtatagttttaagccccgtgactatttggagcccaaaactagtccccggtttgggccccctacgctttggcgcccacaagcatcgcccaccctttgcagcaaaacttcgggacaaatacaataccacacagaataatcaatagtacagaaaag

SEQ ID NO: 569891 - DNA, 434 bp, Homo sapiens
  misc_feature (411)..(411): n is a, c, g, or t
  misc_feature (416)..(416): n is a, c, g, or t
agttgaacctaagaggagacaggaaagaccagttgctcctccatagaaaagaagaagaaaaatacataggatggatcattatgctgcggaaactcatcaggacaaaatgacaaatcctctgagggaaatcgacaaaatagtggggtaattagtgtctgtacagggtccgatgcagaaaaggggaaggaggaaatcagagttccccaaatggggttttatcagatctcagggaagttggtatcatgcttcttatcaaggccaacccataggattacggtagggaggcaaaatcccaggcttttcagaagtggatccttaggaaaggaaagtagggggaaggtgcctaagtcactcagggtaaatggaggaaatggggcatcactgcacattcagacagcacctgcatggaangtacnggcaggtaaaccttgggg

SEQ ID NO: 569892 - DNA, 3688 bp, Homo sapiens
  misc_feature (3429)..(3429): n is a, c, g, or t
  misc_feature (3443)..(3443): n is a, c, g, or t
  misc_feature (3646)..(3646): n is a, c, g, or t
ttttagagattgtttttttcccttacttttctaagcagtgttcagctcagaaaaagtaagggaaaaaatcaatctccaaaatactaaatgctggaaatggcagagtaaaggccagggagtcaaggtggctgtccacagcagtgattcttatctggggtggggggtgggtttcacccgagggagggctgggggcatggacccccaggcaggcctatccaatcatctgaagggtgagcagtgttcagctcagaaaaagtaaggggaaaaaaaagcaatctctaaaaggaacatagacaatagcaaaagaagaaaccgagcccaaaagatgcttctgataggccgccttggggtcctgcatcctcgggtgagaatcactggtggacacgggaggatggagagccgggcagacatgtggagtgagaggggaagatgcatgtgtggcagggctgatggaggcatcagggtcaagactgtcaggtgttagaacacagttcctgacagaccaggacaaggatgacagcgaacaaatggatgtagctgaaaaggcaatgggaccacggtggtgcagctggggtttccaacgcctcggtcccagactcaaggactcaggtggaggagtgaggcccagagaagggcccagtgactcagaggaagtgggctgtgcgggtgagagcagagagcaggggatctgttgtcacggggaggaaaggcgcaaaggggaatggagacagcgtggaagaagagcgtcttgaagacatcggtgctaaggagggaggaggcaggaggagggtgggactgacaggaggacccaggaggagcggaggagccgggtttcaggcagggcgggagagtcaggttgagactgggtgcgtttgtacccgtgggatgtgggggaagagggtgggcaggtggagtggggacagcagtgagcgctgatgacaaaagtgctgtggtgacaggaagaaggtaggaaattcacaggcgcatgttccccagagtgtttttacacagaatgtgaaagaaaggatgagaagagaatcaggaaggtttaggggagtcagggttgtggggccctggaaaggactcatagcctgggccactgggacgtgagcttggacagcagagcgtgtggattcagtgcagtacgtgtgacacagagaggactgcatctggtggagcagtgggtgcggggccaggtcaagaagggaggacacacctgagaacacgaattaggccagtggcagaatcacaggtggtgctgagagaacgcagcatggtgcaggtgggacagtaccgtgctatgcagtagaggaggaaagcaggagaaacgaccaacctgggcccaggagctgggagctgggagagcagagggtgagtttgcagcatatgggagagcaggacagaggagaggtgttccccaatgggcaagaagaatgagtcggagcaggcaatggagcccagcagctaagagaggagagcttgttgagagcaggagggatgcgctgcagtaaaggaggcatgccaggcgccaagagtgtgggtgtgaacgtagagaatcctcctttttgcccaaaaggggcgaagtgtttgatgcaggtcatggaggagaaagcatggtgtgggtaagacacggaaggaatgaaggacaggagggaggatggcaatagacaaggaggatgtagaagatgctggcaccttggaaaagctgaggcaccacagtgtcaatgaagggcatggcgagactgatgaaatgtcaggtggattgactttgagacaggaaacaattgtctccagcatagtagaaccaaaaatgtaggacggttaagggtgccttaagatagcagatggatccaatgctgcatattgtggataaaaaggatggcaatgttggcagcagcaagggcagggcaggaagggagctgacatcaaggaaatgactgcagagtgcagtcattgacttagaaagtggcagaggagggagtggatgctgaagatgaagctgagggtctctggaaaataacagtagggggatgtgcagtacatattaactagaaaaacagaaactgctctaaagtcctcaaggcatgatgtcagactcaagatgggtccaggaagttgatggacataaaaaaggacagaaggtgcatgatagggggagaatctcatgaatttgagggtctcaacattggtaaaggggccaagtgaatagaggggaggcagaattcagagtcccaaactgaggtgtccgcagatctcaggatacgttggtggtatgcctggtattaagaccagaccacagaggcagaatgaagcaatagctccagcagcctttaggagaaagtgggttaagggccaaagtgattggttaaacaaaggaagctggtcagcactgcacactaacatggcacctgcataaaaaccacagacaggtaactttagggacttcacagtggactcaagcagactgatcccagattgtaggtagaagtgtgtttgcaaaggccagaggagctgttaggacataatgcgatggagacaatttgcaacaatcactgaatccacgtttctgctgtttaagggtggctgaaaggatggaggtatagcttgtaatgcaaaatatacgcagaggttcatagtgaagctgaggaggagggccttcaaaagttaagtgggagatgtttaggtcagtagcaaatgggcccagtgggagagagtatgcccagagtttggagagggtcagggtgtcgggtgctgggatgagggcttcatgtttggaagacgcaaggtagagagcaagagaggaggaaaggtagaacaggatggagggcaagacctgtgtaagaagaagtcttaaactgtaaacatgggtgtagtgagggtagtgtggctaagaggaaatggatccagatgggcttgatggggagcagatgggcaggcacgatggcaggggtgcatcggctcactggggctgcatctgaggtaaatggaaataaaggaggtgaggaaatgaggaagagaaggaagtggcgggactggctgtggagttttgtgggagccttcttgatggaacagaaagaaagaagaggagaacaaggcttgagtggaagaggggaaggaaaaggcagcctaagggaaggcgctggcctgaatcagtggaagatctggaggagcaacagaaaacagttcttgaagagaaggtgggatagagagaggatggaaaagtttgagcggtgagagagcaggtcaaagtagtgagcacatccctatggagaagagatgactgagcccgatgaagcaataggccctgggtggttgagagaaatatgggccacagacaggcaggtaccttcccttggccaaggaagcaaggagaagaaatgtggacgcaaggggaaaggcttcaagaaagaatgtggaagtgggacgatnaggcagcgccaacnggggagtcacctacagaagacagggtggaggggcccccagggaaggatggagggcagaaagcgtggtggaagggagctgggcaggacagccacaggcaggacagccataggtggagtgaggtgaaggggcaggtcccagagtaggaacaaaggaatttggagtgctcagagcagcctgcaaggttcagcatggggcaaggaangtattagaggggggaagtcgacgcggccgcgaatttatagta

SEQ ID NO: 569893 - DNA, 166 bp, Homo sapiens
tgtgtgtctgaggatccactgttgtcatactgcactgttgttcatactgcactgttggtcgcatgtatcggggggggggctgtaacatcgggggagggtatgaacaacagtgcaagtatgaacaacagtgcaggtataaacaacagtgcaggtataaacaacagtg

SEQ ID NO: 569894 - DNA, 792 bp, Homo sapiens
  misc_feature (10)..(10): n is a, c, g, or t
  misc_feature (21)..(21): n is a, c, g, or t
  misc_feature (24)..(24): n is a, c, g, or t
  misc_feature (26)..(26): n is a, c, g, or t
  misc_feature (29)..(29): n is a, c, g, or t
  misc_feature (32)..(32): n is a, c, g, or t
  misc_feature (80)..(80): n is a, c, g, or t
  misc_feature (87)..(88): n is a, c, g, or t
  misc_feature (94)..(94): n is a, c, g, or t
  misc_feature (98)..(98): n is a, c, g, or t
  misc_feature (101)..(101): n is a, c, g, or t
  misc_feature (133)..(133): n is a, c, g, or t
  misc_feature (367)..(367): n is a, c, g, or t
  misc_feature (476)..(476): n is a, c, g, or t
  misc_feature (573)..(573): n is a, c, g, or t
  misc_feature (588)..(588): n is a, c, g, or t
  misc_feature (790)..(790): n is a, c, g, or t
ccatccagcnagcatcttccnccncnccnccnccaccctcccatatatcactttccacctctccaccatcactttcccanatttttnnccaccncccnccnccaccatcccatatatcatcttcccctttctncttctctctcctttatatttcatatttccccttttctctcttctttcttttacttctccttcttactttccatttcttctttacatccttctctccttttcatttctctcccttctcctcctataatctctctctcttccctcctttttcctcctctttctcttatttcaccctttcctccttcttcttctttttccctattttctcccttcctcttttctcctctttcttttnttctacttcactcttctcccttttactcattttcctctctcttcctttttatcatcaacctcttcactccctcaccctcttccaattctccttctttcattattcttantcctcctctccccattcttcatattcatttatcccttaaatcccatatatcacttatataacttattattatctcctttataatttccatcttattnccccttcttaatatnatcattccatccttttttactccatcattacctattatttctctaattctctccatttcaccaacatcaaaaaatttaattatcccttcctaatataactctacatattcttatatattttatccaattcacattatacatcattataataaatttccaaattttaccttccaaacttcaacaataatttattttatcacanca

SEQ ID NO: 569895 - DNA, 787 bp, Homo sapiens
  misc_feature (505)..(505): n is a, c, g, or t
  misc_feature (621)..(621): n is a, c, g, or t
cctaagtgcgtccctcccacccccacccaggtgatactgaatctatgtgaatttgtggagttctcccttccttcccctctggcagaatcaccaggattcagtctagagtacaacattatagatgttttctagcacttttcagctgtccatacgctaatatgtagtcttgggtctttatccgaatggagtcctattatatttgtttcacaccatctgctttccttatttttgtatctttactgaggtatattgaagtacagtaagctagacttgtatgaagtgtgcagttttaatctggtttttcttttttatttctttgtttgtttacatacattttttagagacaaggtctcactatgttgcccaggctggtctcaatctcctgggctcaagcaatcttcctgcctcagcctcctgagtagttgggactataggcgcatgccaccacacccggttaattttttattttttgtagagatgaggctccagtgggcccccaccgggngggcttaaactcctggggctaaagggatcctcctgccctgggccttccaaagggctaggatactacgggtttgagccaccgtgcctggctcgtttttcataacacaccacacaccncatatttgtgaaccagcaccacagcaagaatattcatcacttccaagttacttggctttttgaatggtttcccctcctctaccctttccaggaagcttggagggcagctggacatgctttcagcattatatacggaacggtaggcctatattgccgccgtctcttg

SEQ ID NO: 569896 - DNA, 3690 bp, Homo sapiens
  misc_feature (1545)..(1545): n is a, c, g, or t
  misc_feature (3431)..(3431): n is a, c, g, or t
  misc_feature (3445)..(3445): n is a, c, g, or t
  misc_feature (3648)..(3648): n is a, c, g, or t
ttttagagattgtttttttcccttacttttctaagcagtgttcagctcagaaaaagtaagggaaaaaatcaatctccaaaatactaaatgctggaaatggcagagtaaaggccagggagtcaaggtggctgtccacagcagtgattcttatctggggtggggggtgggtttcacccgagggagggctgggggcatggacccccaggcaggcctatccaatcatctgaagggtgagcagtgttcagctcagaaaaagtaaggggaaaaaaaagcaatctctaaaaggaacatagacaatagcaaaagaagaaaccgagcccaaaagatgcttctgataggccgccttggggtcctgcatcctcgggtgagaatcactggtggacacgggaggatggagagccgggcagacatgtggagtgagaggggaagatgcatgtgtggcagggctgatggaggcatcagggtcaagactgtcaggtgttagaacacagttcctgacagaccaggacaaggatgacagcgaacaaatggatgtagctgaaaaggcaatgggaccacggtggtgcagctggggtttccaacgcctcggtcccagactcaaggactcaggtggaggagtgaggcccagagaagggcccagtgactcagaggaagtgggctgtgcgggtgagagcagagagcaggggatctgttgtcacggggaggaaaggcgcaaaggggaatggagacagcgtggaagaagagcgtcttgaagacatcggtgctaaggagggaggaggcaggaggagggtgggactgacaggaggacccaggaggagcggaggagccgggtttcaggcagggcgggagagtcaggttgagactgggtgcgtttgtacccgtgggatgtgggggaagagggtgggcaggtggagtggggacagcagtgagcgctgatgacaaaagtgctgtggtgacaggaagaaggtaggaaattcacaggcgcatgttccccagagtgtttttacacagaatgtgaaagaaaggatgagaagagaatcaggaaggtttaggggagtcagggttgtggggccctggaaaggactcatagcctgggccactgggacgtgagcttggacagcagagcgtgtggattcagtgcagtacgtgtgacacagagaggactgcatctggtggagcagtgggtgcggggccaggtcaagaagggaggacacacctgagaacacgaattaggccagtggcagaatcacaggtggtgctgagagaacgcagcatggtgcaggtgggacagtaccgtgctatgcagtagaggaggaaagcaggagaaacgaccaacctgggcccaggagctgggagctgggagagcagagggtgagtttgcagcatatgggagagcaggacagaggagaggtgttccccaatgggcaagaagaatgagtcggagcaggcaatggagcccagcagctaagagaggagagcttgttgagagcaggagggatgcgctgcagtaaaggaggcatgccaggcgccaagagggagggagcngatgcagagaatccagggactttaccccagatggggcaaagtgtgtgacgcagttcatggatgacaaagcatagtgtgggtaagataagcaaggaatgaaggacaggagggaggatggcaatagacaaggaggatgtagaagatgctggcaccttggaaaagctgaggcaccacagtgtcaatgaagggcatggcgagactgatgaaatgtcaggtggattgactttgagacaggaaacaattgtctccagcatagtagaaccaaaaatgtaggacggttaagggtgccttaagatagcagatggatccaatgctgcatattgtggataaaaaggatggcaatgttggcagcagcaagggcagggcaggaagggagctgacatcaaggaaatgactgcagagtgcagtcattgacttagaaagtggcagaggagggagtggatgctgaagatgaagctgagggtctctggaaaataacagtagggggatgtgcagtacatattaactagaaaaacagaaactgctctaaagtcctcaaggcatgatgtcagactcaagatgggtccaggaagttgatggacataaaaaaggacagaaggtgcatgatagggggagaatctcatgaatttgagggtctcaacattggtaaaggggccaagtgaatagaggggaggcagaattcagagtcccaaactgaggtgtccgcagatctcaggatacgttggtggtatgcctggtattaagaccagaccacagaggcagaatgaagcaatagctccagcagcctttaggagaaagtgggttaagggccaaagtgattggttaaacaaaggaagctggtcagcactgcacactaacatggcacctgcataaaaaccacagacaggtaactttagggacttcacagtggactcaagcagactgatcccagattgtaggtagaagtgtgtttgcaaaggccagaggagctgttaggacataatgcgatggagacaatttgcaacaatcactgaatccacgtttctgctgtttaagggtggctgaaaggatggaggtatagcttgtaatgcaaaatatacgcagaggttcatagtgaagctgaggaggagggccttcaaaagttaagtgggagatgtttaggtcagtagcaaatgggcccagtgggagagagtatgcccagagtttggagagggtcagggtgtcgggtgctgggatgagggcttcatgtttggaagacgcaaggtagagagcaagagaggaggaaaggtagaacaggatggagggcaagacctgtgtaagaagaagtcttaaactgtaaacatgggtgtagtgagggtagtgtggctaagaggaaatggatccagatgggcttgatggggagcagatgggcaggcacgatggcaggggtgcatcggctcactggggctgcatctgaggtaaatggaaataaaggaggtgaggaaatgaggaagagaaggaagtggcgggactggctgtggagttttgtgggagccttcttgatggaacagaaagaaagaagaggagaacaaggcttgagtggaagaggggaaggaaaaggcagcctaagggaaggcgctggcctgaatcagtggaagatctggaggagcaacagaaaacagttcttgaagagaaggtgggatagagagaggatggaaaagtttgagcggtgagagagcaggtcaaagtagtgagcacatccctatggagaagagatgactgagcccgatgaagcaataggccctgggtggttgagagaaatatgggccacagacaggcaggtaccttcccttggccaaggaagcaaggagaagaaatgtggacgcaaggggaaaggcttcaagaaagaatgtggaagtgggacgatnaggcagcgccaacnggggagtcacctacagaagacagggtggaggggcccccagggaaggatggagggcagaaagcgtggtggaagggagctgggcaggacagccacaggcaggacagccataggtggagtgaggtgaaggggcaggtcccagagtaggaacaaaggaatttggagtgctcagagcagcctgcaaggttcagcatggggcaaggaangtattagaggggggaagtcgacgcggccgcgaatttatagta

SEQ ID NO: 569897 - DNA, 753 bp, Homo sapiens
  misc_feature (351)..(351): n is a, c, g, or t
agataaaatggcgagtgaggctgcggggactcgctgagcacgcggaggggtgagcggtgcaagagccggctgcgtgccctcacagatccggagcccggccgtgccgtgcctgtagggaacatgcacttattccattcccgaaaccgagtcccgctagcggggacagtggcgggtccgcctacgtggcctattacattcacgtgaatggagtcctgcacatgtcgggtgcgctacagccagctcctggggctgctacgagcacgcttcggcaaggagtatggggccaatgtgcttcctgcattccccccaagagtaagcttttctctctgactcctgctgaggtagaacagnaggacgatgatgcgagttacgagaatgtacatgctagctgttcggcaagacccattgcttgggagcagggagactttcaacagtttcctgcgtcgggcactaataggagactagcaggaggtccccacagtaggcaagtgtccttggaagtgctgctcagcagcgggcagaaagtactggtcaacgtgctaacttcagatcagtactgacggatgtcctgggaggctgtaggctgctaagctggatcttccagatgacttgattggatactttagtctattcttagttcgagaaagaagaggatggagccttttctttagtacggaagttgcaagagttggagctgccttatgtgtctgtcaccagccttcggagtcaggagtataagattgtgctaaggaa

SEQ ID NO: 569898 - DNA, 2481 bp, Homo sapiens
  misc_feature (1859)..(1859): n is a, c, g, or t
  misc_feature (2047)..(2047): n is a, c, g, or t
  misc_feature (2458)..(2458): n is a, c, g, or t
  misc_feature (2463)..(2463): n is a, c, g, or t
ttttagagattgtttttttcccttacttttctaagcagtgttcagctcagaaaaagtaagggaaaaaatcaatctccaaaatactaaatgctggaaatggcagagtaaaggccagggagtcaaggtggctgtccacagcagtgattcttatctggggtggggggtgggtttcacccgagggagggctgggggcatggacccccaggcaggcctatccaatcatctgaagggtgagcagtgttcagctcagaaaaagtaaggggaaaaaaaagcaatctctaaaaggaacatagacaatagcaaaagaagaaaccgagcccaaaagatgcttctgataggccgccttggggtcctgcatcctcgggtgagaatcactggtggacacgggaggatggagagccgggcagacatgtggagtgagaggggaagatgcatgtgtggcagggctgatggaggcatcagggtcaagactgtcaggtgttagaacacagttcctgacagaccaggacaaggatgacagcgaacaaatggatgtagctgaaaaggcaatgggaccacggtggtgcagctggggtttccaacgcctcggtcccagactcaaggactcaggtggaggagtgaggcccagagaagggcccagtgactcagaggaagtgggctgtgcgggtgagagcagagagcaggggatctgttgtcacggggaggaaaggcgcaaaggggaatggagacagcgtggaagaagagcgtcttgaagacatcggtgctaaggagggaggaggcaggaggagggtgggactgacaggaggacccaggaggagcggaggagccgggtttcaggcagggcgggagagtcaggttgagactgggtgcgtttgtacccgtgggatgtgggggaagagggtgggcaggtggagtggggacagcagtgagcgctgatgacaaaagtgctgtggtgacaggaagaaggtaggaaattcacaggcgcatgttccccagagtgtttttacacagaatgtgaaagaaaggatgagaagagaatcaggaaggtttaggggagtcagggttgtggggccctggaaaggactcatagcctgggccactgggacgtgagcttggacagcagagcgtgtggattcagtgcagtacgtgtgacacagagaggactgcatctggtggagcagtgggtgcggggccaggtcaagaagggaggacacacctgagaacacgaattaggccagtggcagaatcacaggtggtgctgagagaacgcagcatggtgcaggtgggacagtaccgtgctatgcagtagaggaggaaagcaggagaaacgaccaacctgggcccaggagctgggagctgggagagcagagggtgagtttgcagcatatgggagagcaggacagaggagaggtgttccccaatgggcaagaagaatgagtcggagcaggcaatggagcccagcagctaagagaggagagcttgttgagagcaggagggatgcgctgcagtaaaggaggcatgccaggcgccaagagtgtgggtgtgaacgtagagaatcctcctttttgcccaaaaggggcgaagtgtttgatgcaggtcatggaggagaaagcatggtgtgggtaagacacggaaggaatgaaggacaggagggaggatggcaatagacaaggaggatgtagaagatgctggcaccttggaaaagctgaggcaccacagtgtcaatgaagggcatggcgagactgatgaaaggccagaggacacaacagagagaggaaaccactgttccttagaggcagaactgagaatacaggacggttaggggtgaactgagacagcagatggactcagtacagcangttgaggacatggaagctggcagtggtgtcatcagtgggggcagggcaggaaggggtcagagttcaggaaagattcctgagtctgtggattgacctggcggagacaggcacgcaggactggatgttgaagaggaggtggagcatgtctggaagatgaaagtgggaggaaacagtggtgcaggaattanatgtgaaccttgtgtggaaaaagtgagacattggagtggagcagccacatggaggtggtgtgatgtgagtggggtcagggaagttgatgggaaaagaaagagatttgtggtgcaggaggggaaagaacatcatgaagttgtggggagcttagtgtctgtacagggtccgatgcagaaaaggggaaggaggaaatcagagttccccaaatggggttttatcagatctcagggaagttggtatcatgcttcttatcaaggccaacccataggattacggtagggaggcaaaatcccaggcttttcagaagtggatccttaggaaaggaaagtagggggaaggtgcctaagtcactcagggtaaatggaggaaatggggcatcactgcacattcagacagcacctgcatggaangtacnggcaggtaaaccttgggg

SEQ ID NO: 569899 - DNA, 344 bp, Homo sapiens
ggaggccactgtcagatgtgccggcgaagagaggagacacatagttgtaagaagcagaccatgacagcttccctttctgtgactcgccctcatactcttcctggtccccttcctggggtgcacactaaaaggacctatgtgctcacacacattgaaaccactaggtctgtccccccaagagacctcggtgtgtgtgtgtgagtggttgacctttcttcataccctgtgcctttccttccctttccgaggcacagagagacagggcaggatccacgtgcccattgtggaggcacgaggagaaagtgttttatataccggactctaataatatccctttttttgtt

SEQ ID NO: 569900 - DNA, 474 bp, Homo sapiens
tcaagggcctgcgccgaaaatgtaacggggctcaagccacgagccgaagcttagggtatgcaccgcaaggtgcacgcggtagcggagcgttccgtaagcctgtgaagggacagccgtgaggcatcctggaggtatcggaagtgcgaatgctgacatgagtaacgacaaacagtgtgaaagacactgtcgccgaaaggtccaagggtacctgcgtaaagttaaactgcgcagggtttagcgggcccctaaggcgaggcagaaatgcgtagtcaatgggaaccaggtcaatattcctgggccagtgagaggtgacgggtgcccgccgtagttcagccttaacggattggaagagcagcctaagcgttccaggaaatagcccctcacgcgaaaacgtacctgaaaccgacacaggtggactggtagagcataccatggcgcttgagagaactatgctgaaggaactcgggaatttac

SEQ ID NO: 569901 - DNA, 2665 bp, Homo sapiens
  misc_feature (15)..(15): n is a, c, g, or t
  misc_feature (520)..(520): n is a, c, g, or t
  misc_feature (2406)..(2406): n is a, c, g, or t
  misc_feature (2420)..(2420): n is a, c, g, or t
  misc_feature (2623)..(2623): n is a, c, g, or t
gatccccccgctctncacccaccccaggggagtcagggttgtggggccctggaaaggactcatagcctgggccactgggacgtgagcttggacagcagagcgtgtggattcagtgcagtacgtgtgacacagagaggactgcatctggtggagcagtgggtgcggggccaggtcaagaagggaggacacacctgagaacacgaattaggccagtggcagaatcacaggtggtgctgagagaacgcagcatggtgcaggtgggacagtaccgtgctatgcagtagaggaggaaagcaggagaaacgaccaacctgggcccaggagctgggagctgggagagcagagggtgagtttgcagcatatgggagagcaggacagaggagaggtgttccccaatgggcaagaagaatgagtcggagcaggcaatggagcccagcagctaagagaggagagcttgttgagagcaggagggatgcgctgcagtaaaggaggcatgccaggcgccaagagggagggagcngatgcagagaatccagggactttaccccagatggggcaaagtgtgtgacgcagttcatggatgacaaagcatagtgtgggtaagataagcaaggaatgaaggacaggagggaggatggcaatagacaaggaggatgtagaagatgctggcaccttggaaaagctgaggcaccacagtgtcaatgaagggcatggcgagactgatgaaatgtcaggtggattgactttgagacaggaaacaattgtctccagcatagtagaaccaaaaatgtaggacggttaagggtgccttaagatagcagatggatccaatgctgcatattgtggataaaaaggatggcaatgttggcagcagcaagggcagggcaggaagggagctgacatcaaggaaatgactgcagagtgcagtcattgacttagaaagtggcagaggagggagtggatgctgaagatgaagctgagggtctctggaaaataacagtagggggatgtgcagtacatattaactagaaaaacagaaactgctctaaagtcctcaaggcatgatgtcagactcaagatgggtccaggaagttgatggacataaaaaaggacagaaggtgcatgatagggggagaatctcatgaatttgagggtctcaacattggtaaaggggccaagtgaatagaggggaggcagaattcagagtcccaaactgaggtgtccgcagatctcaggatacgttggtggtatgcctggtattaagaccagaccacagaggcagaatgaagcaatagctccagcagcctttaggagaaagtgggttaagggccaaagtgattggttaaacaaaggaagctggtcagcactgcacactaacatggcacctgcataaaaaccacagacaggtaactttagggacttcacagtggactcaagcagactgatcccagattgtaggtagaagtgtgtttgcaaaggccagaggagctgttaggacataatgcgatggagacaatttgcaacaatcactgaatccacgtttctgctgtttaagggtggctgaaaggatggaggtatagcttgtaatgcaaaatatacgcagaggttcatagtgaagctgaggaggagggccttcaaaagttaagtgggagatgtttaggtcagtagcaaatgggcccagtgggagagagtatgcccagagtttggagagggtcagggtgtcgggtgctgggatgagggcttcatgtttggaagacgcaaggtagagagcaagagaggaggaaaggtagaacaggatggagggcaagacctgtgtaagaagaagtcttaaactgtaaacatgggtgtagtgagggtagtgtggctaagaggaaatggatccagatgggcttgatggggagcagatgggcaggcacgatggcaggggtgcatcggctcactggggctgcatctgaggtaaatggaaataaaggaggtgaggaaatgaggaagagaaggaagtggcgggactggctgtggagttttgtgggagccttcttgatggaacagaaagaaagaagaggagaacaaggcttgagtggaagaggggaaggaaaaggcagcctaagggaaggcgctggcctgaatcagtggaagatctggaggagcaacagaaaacagttcttgaagagaaggtgggatagagagaggatggaaaagtttgagcggtgagagagcaggtcaaagtagtgagcacatccctatggagaagagatgactgagcccgatgaagcaataggccctgggtggttgagagaaatatgggccacagacaggcaggtaccttcccttggccaaggaagcaaggagaagaaatgtggacgcaaggggaaaggcttcaagaaagaatgtggaagtgggacgatnaggcagcgccaacnggggagtcacctacagaagacagggtggaggggcccccagggaaggatggagggcagaaagcgtggtggaagggagctgggcaggacagccacaggcaggacagccataggtggagtgaggtgaaggggcaggtcccagagtaggaacaaaggaatttggagtgctcagagcagcctgcaaggttcagcatggggcaaggaangtattagaggggggaagtcgacgcggccgcgaatttatagta

SEQ ID NO: 569902 - DNA, 1181 bp, Homo sapiens
  misc_feature (124)..(125): n is a, c, g, or t
  misc_feature (168)..(168): n is a, c, g, or t
  misc_feature (194)..(194): n is a, c, g, or t
  misc_feature (922)..(922): n is a, c, g, or t
  misc_feature (936)..(936): n is a, c, g, or t
  misc_feature (1139)..(1139): n is a, c, g, or t
cagttctggtccccactgagtctgaacctctgttgtcaagggagctgagaggatggaggtgtagcttgcaactgaaaatatgcactacacacacttcactacagaggtgcagtgaagtaggaanngggggccttcaaacacaggtagcatcttagatttagtgggagnttaggtcagtagtaaatggcacagtnggcatgcccagaagtttggataggatgaaggtttgggtgctgatacgggggcttcatttttggaaactttttccagagggcagagaggaggaaaggcagaacaggatggatggcaggacctgtgtaagaagaaggtcttaaattctaaacaagggtatagtaaaggtagtgtggccaagagggaaagaagaaatggtggatccagatagcttcaatgggtactgcaagatcaggtgtgatgggcaggggtgcatgggctcactgggaccctatccaaggtaaatggaaataatggagatgaagaaaggaggaagaggaggaagtggcgggactggctgtagagttttgtaggaactcacttcatggaacagaaagaaagaagaggagaacaaggcttgagtggaagaggggaaggaaaaggcagcctaagggaaggcgctggcctgaatcagtggaagatctggaggagcaacagaaaacagttcttgaagagaaggtgggatagagagaggatggaaaagtttgagcggtgagagagcaggtcaaagtagtgagcacatccctatggagaagagatgactgagcccgatgaagcaataggccctgggtggttgagagaaatatgggccacagacaggcaggtaccttcccttggccaaggaagcaaggagaagaaatgtggacgcaaggggaaaggcttcaagaaagaatgtggaagtgggacgatnaggcagcgccaacnggggagtcacctacagaagacagggtggaggggcccccagggaaggatggagggcagaaagcgtggtggaagggagctgggcaggacagccacaggcaggacagccataggtggagtgaggtgaaggggcaggtcccagagtaggaacaaaggaatttggagtgctcagagcagcctgcaaggttcagcatggggcaaggaangtattagaggggggaagtcgacgcggccgcgaatttatagta

SEQ ID NO: 569903 - DNA, 162 bp, Homo sapiens
ccgggagggttctcttgtagggcagcacagccgatcgggacatggatgaagtggtaggaatgtgcacgagtggggcagtgtgggggcttctcagtaatggagaaccagcttggtgaaactccatgttgttaggacctaggcaggtgaaaagtcttgcctcga

SEQ ID NO: 569904 - DNA, 929 bp, Homo sapiens
  misc_feature (62)..(62): n is a, c, g, or t
  misc_feature (66)..(66): n is a, c, g, or t
  misc_feature (70)..(70): n is a, c, g, or t
  misc_feature (77)..(77): n is a, c, g, or t
  misc_feature (90)..(90): n is a, c, g, or t
  misc_feature (155)..(155): n is a, c, g, or t
  misc_feature (182)..(182): n is a, c, g, or t
  misc_feature (189)..(189): n is a, c, g, or t
  misc_feature (196)..(196): n is a, c, g, or t
  misc_feature (205)..(205): n is a, c, g, or t
  misc_feature (211)..(211): n is a, c, g, or t
  misc_feature (227)..(227): n is a, c, g, or t
  misc_feature (229)..(229): n is a, c, g, or t
  misc_feature (249)..(249): n is a, c, g, or t
  misc_feature (265)..(265): n is a, c, g, or t
  misc_feature (284)..(284): n is a, c, g, or t
  misc_feature (291)..(291): n is a, c, g, or t
  misc_feature (300)..(300): n is a, c, g, or t
  misc_feature (312)..(312): n is a, c, g, or t
  misc_feature (326)..(326): n is a, c, g, or t
  misc_feature (341)..(341): n is a, c, g, or t
  misc_feature (371)..(371): n is a, c, g, or t
  misc_feature (376)..(376): n is a, c, g, or t
  misc_feature (414)..(414): n is a, c, g, or t
  misc_feature (433)..(433): n is a, c, g, or t
  misc_feature (457)..(457): n is a, c, g, or t
  misc_feature (463)..(463): n is a, c, g, or t
  misc_feature (509)..(509): n is a, c, g, or t
  misc_feature (552)..(552): n is a, c, g, or t
  misc_feature (616)..(616): n is a, c, g, or t
  misc_feature (696)..(696): n is a, c, g, or t
  misc_feature (709)..(709): n is a, c, g, or t
  misc_feature (723)..(723): n is a, c, g, or t
  misc_feature (774)..(774): n is a, c, g, or t
  misc_feature (784)..(784): n is a, c, g, or t
  misc_feature (830)..(830): n is a, c, g, or t
  misc_feature (905)..(905): n is a, c, g, or t
tgactgaaaaagataatttattccatcagaggcatcacaattacagattacagacatttgcnagtnaatnatatgcngggttagagcgcngcgttttaacatttaacattcatgagttaacagagatggccggggggtaaatatcttgccaaggnggttcctggtattaagccttttgagtnttaagangacaaanccctagggntcaggnggttttcccgcccgancncttgtcaatgagaaaccccncagccccttttgtctngggtctcacagccccagangtgagcngggccagancgaagccatccnagagtccccaaggncagccctcccgtggnccccggctagggcccccagagtctcacccncaggngtgcgccaccctgggcctgcgtgccggcggggtctgcngccacaggtcccgcgagtnccggacacttccaggacgtggtcncctggngagacagcccccccgggtaccagtttcgactcccccgggcagcganaacaaagtcgagtcccgccctccagcttcgcctgccgcgcgcncttgtcctctctcggccgcgccaaccctggggcacagctggctcctcctgggggcgatgcagcntcacagggctccggcccaccccgggccagggcgccgaccctccctgccggaccctctttagaaggccgcgggtttgggtntggctcacccctnaaagattccaagantgggcgcactctgagccccccaaacacaaaatgatgggatccctgcgcgtncccccacgtnacaaagtggtaggggtccaggggcattttaattataaacggggctnaatcacaccccaaaattctaaacgcctccccccctaacctgcaggggcaaacagcccccctatttcattgccggnagcaactttgtactttcgtactga

SEQ ID NO: 569905 - DNA, 1682 bp, Homo sapiens
  misc_feature (1620)..(1620): n is a, c, g, or t
  misc_feature (1644)..(1644): n is a, c, g, or t
ttttagagattgtttttttcccttacttttctaagcagtgttcagctcagaaaaagtaagggaaaaaatcaatctccaaaatactaaatgctggaaatggcagagtaaaggccagggagtcaaggtggctgtccacagcagtgattcttatctggggtggggggtgggtttcacccgagggagggctgggggcatggacccccaggcaggcctatccaatcatctgaagggtgagcagtgttcagctcagaaaaagtaaggggaaaaaaaagcaatctctaaaaggaacatagacaatagcaaaagaagaaaccgagcccaaaagatgcttctgataggccgccttggggtcctgcatcctcgggtgagaatcactggtggacacgggaggatggagagccgggcagacatgtggagtgagaggggaagatgcatgtgtggcagggctgatggaggcatcagggtcaagactgtcaggtgttagaacacagttcctgacagaccaggacaaggatgacagcgaacaaatggatgtagctgaaaaggcaatgggaccacggtggtgcagctggggtttccaacgcctcggtcccagactcaaggactcaggtggaggagtgaggcccagagaagggcccagtgactcagaggaagtgggctgtgcgggtgagagcagagagcaggggatctgttgtcacggggaggaaaggcgcaaaggggaatggagacagcgtggaagaagagcgtcttgaagacatcggtgctaaggagggaggaggcaggaggagggtgggactgacaggaggacccaggaggagcggaggagccgggtttcaggcagggcgggagagtcaggttgagactgggtgcgtttgtacccgtgggatgtgggggaagagggtgggcaggtggagtggggacagcagtgagcgctgatgacaaaagtgctgtggtgacaggaagaaggtaggaaattcacaggcgcatgttccccagagtgtttttacacagaatgtgaaagaaaggatgagaagagaatcaggaaggtttaggggagtcagggttgtggggccctggaaaggactcatagcctgggccactgggacgtgagcttggacagcagagcgtgtggattcagtgcagtacgtgtgacacagagaggactgcatctggtggagcagtgggtgcgggtgagaacagatcccctgctctctgctctcacccgcacagcccacttcctctgtgtcactaggcccttctctaggcctcactcctccaccttgagtctgggaccgaggcattggaaaacccagttccaccaccagtgattctcacccgagaatgcaggaccccaaggcagcctatcagaagcatcttttgggcttggtttcttcttttgctattgtctatgttccttttagagactgctattttttttcccatacttttactgagctgaacactgctcacccctcagatgattggatagccctgcctgggggtccatgtccagagacctccctccacgtgaaattcaccccctaccccagataagaatcactgctatggatgccaccttgactccctgacattactccctcatttcacacctagaccatnctagtgcttgccataggtggcatnctagtacttgccatttaacttcccacttaacacatctc

SEQ ID NO: 569906 - DNA, 209 bp, Homo sapiens
  misc_feature (189)..(189): n is a, c, g, or t
  misc_feature (194)..(194): n is a, c, g, or t
  misc_feature (198)..(198): n is a, c, g, or t
tcggtcctgaactcatgttgaagggggtcgagcccaagcccggagagtacgacgacgcctacctggccagcatcacccgcacagtaagaacacttcgcgctcacggcataatgaccctcttggacgctcaccaggacatgtataatgagaagttcgagggtgagggagcccccgactgggccgttctcnacaangggnaccgagctcca

SEQ ID NO: 569907 - DNA, 995 bp, Homo sapiens
  misc_feature (373)..(373): n is a, c, g, or t
  misc_feature (561)..(561): n is a, c, g, or t
  misc_feature (972)..(972): n is a, c, g, or t
  misc_feature (977)..(977): n is a, c, g, or t
ggggatcagggaatgtactgcagcaagggaggcatgccaagagcaagagtgtgggtgtgaacgtagagaatcctcctttttgcccaaaaggggcgaagtgtttgatgcaggtcatggaggagaaagcatggtgtgggtaagacacggaaggaatgaaggacaggagggaggatggcaatagacaaggaggatgtagaagatgctggcaccttggaaaagctgaggcaccacagtgtcaatgaagggcatggcgagactgatgaaaggccagaggacacaacagagagaggaaaccactgttccttagaggcagaactgagaatacaggacggttaggggtgaactgagacagcagatggactcagtacagcangttgaggacatggaagctggcagtggtgtcatcagtgggggcagggcaggaaggggtcagagttcaggaaagattcctgagtctgtggattgacctggcggagacaggcacgcaggactggatgttgaagaggaggtggagcatgtctggaagatgaaagtgggaggaaacagtggtgcaggaattanatgtgaaccttgtgtggaaaaagtgagacattggagtggagcagccacatggaggtggtgtgatgtgagtggggtcagggaagttgatgggaaaagaaagagatttgtggtgcaggaggggaaagaacatcatgaagttgtggggagcttagtgtctgtacagggtccgatgcagaaaaggggaaggaggaaatcagagttccccaaatggggttttatcagatctcagggaagttggtatcatgcttcttatcaaggccaacccataggattacggtagggaggcaaaatcccaggcttttcagaagtggatccttaggaaaggaaagtagggggaaggtgcctaagtcactcagggtaaatggaggaaatggggcatcactgcacattcagacagcacctgcatggaangtacnggcaggtaaaccttgggg

SEQ ID NO: 569908 - DNA, 120 bp, Homo sapiens
taatgtcctttagaatgtttcggtacatttacacagggatatcgattcacagtctccagtgttcggcacgaccctggaacactcgcccatctccagctgtgacacagtgacaccgaggcc

SEQ ID NO: 569909 - DNA, 297 bp, Homo sapiens
caaacaagggctaccctttgaaaaatgtatgctgcctatggactattggcataggtataaagacatttaaacactaccatgggatggatattggctgggccgaggggttcatgcttatagtccccgtactttggaagcctgaagtggggggattccttgaggctaggagtacaagaccagtttgggcaacatagcaagaccctgtatcagcaaaaaaatttaaaaagatttaaaaaatttacctgtgcatggtggcatgtgcctgtagtcccagctgctagggaggctgaggcaggg

SEQ ID NO: 569910 - DNA, 491 bp, Homo sapiens
  misc_feature (195)..(195): n is a, c, g, or t
  misc_feature (200)..(200): n is a, c, g, or t
  misc_feature (202)..(202): n is a, c, g, or t
  misc_feature (205)..(205): n is a, c, g, or t
  misc_feature (291)..(291): n is a, c, g, or t
gatgaacaagcgcttaacaacaacgtgccggtgatcatcacgactttgacgaggttcgagatcatggtttcagttccctatgggctggaggcgctggggtcctctctcagtaggggatcgtagacctcaacagcgcagggaattatgaaactttgctgggtgacagcatgagttcaggttgccgccttagggcanggcgncnggnttggttgtcaggctttgactggggccgttacaggcgcaacctgctcctgggctcggtcaacgagtagcgaactcaactcgattaantgctgaatgcccagggcgatggcgcgttgggagtcgtcgaggtcgaacgccaaggtggcggccatttcgttggcggatgcgaggattacggcggcattggccaggagggtttcggggtcgatggtcgggtttacgaggaataggttgttgcttgggagttcaacaggcgcagcgtcgtcggatgggggcaagtgatgatg

SEQ ID NO: 569911 - DNA, 142 bp, Homo sapiens
cagcctggggctgctttatactcctgctctgtagcagggacggtttgtgtggcttcgccgggcatttcctttgctggatcctgggaagcaagatccaaatcaagactgaatatgctggctaactgcctacttatcagcttta

SEQ ID NO: 569912 - DNA, 272 bp, Homo sapiens
  misc_feature (17)..(17): n is a, c, g, or t
accgtttgcctgttttnaaatggggaaaaccgggcgggcgcgttatttatttaagggcgcccgtgtgcgcgggggtgggaggccccctttcaaaaaccccagggtttttggttttggggggacagttttgtgggcccggcgaaaaaaaaattttttttttttttaagtcctttcatgtttttgtttggggaaggcaagttagttaaggatcccttatgtggggtgagaccagccctttgtgaaacctttaaattagaagtaaaggccgatga

SEQ ID NO: 569913 - DNA, 348 bp, Homo sapiens
acgtaacgatcaatacggtgtggtgacaagccaccacggaatatcgctgaaccagtccctgaaatgggataaatttcaatgttttcttcacgggaaaattcatgtaagcgcgcaatggctaacttgttacccgtaattgagctcatgaaaccagctgtcaacgctgaatcagatccagccaggaaaacacgcatatactttggtcggaatccaaaatgttcttcatgcaacttgaggtggtctttcaaaatttctggtgcgtgaagttgggtgtcaaaatcctcaaataggggattaatttcattatagggggtgtttttatctgaccgggtaacctcacctgactta

SEQ ID NO: 569914 - DNA, 207 bp, Homo sapiens
tgagctcggtaccccaggctgagtgagtggtctgatctcctggactatgatctgcccgctcggcctcccacagtgctaggattacaggtgtgagccaccgtgcctggcctgtacatagcttttttgaacaacaataatactatgcaaaatttctataagaaacacactcccggtggacgcattgtcaataaagcacagttggctgag

SEQ ID NO: 569915 - DNA, 224 bp, Homo sapiens
gtcgaccaggaggtggaggttacagtgagctgagattgtaccactgcactccagcctgggcgacaaagttgaggctctgtcccccaaaaataaaataaaataaaatttaaaaaataggcgaaataggccgggcatggtggctcatgcctgtaatcccagcactttgggaggctgtggcaggtggatcacctgaggtcaggagtttaagaccattctggtcaaca

SEQ ID NO: 569916 - DNA, 194 bp, Homo sapiens
aggtacagagtgtccccagacacgaggaggtcgagaatccggcgctcaatagacagaaacccggggcctcctgtaaggtggggctagccacagatgagcctggctatcgccggactgtggaggagcctgcagactcctgacgagctggcagctctgacgatggtctgacgggataacttacttggaactgctga

SEQ ID NO: 569917 - DNA, 383 bp, Homo sapiens
gggagacgctccctagtctatttttattcataaaacatcgacagagaccattccatggcctaacacacaggtaagttacacaagtagtccattttacttttcatcagtcttaccctgtatcgaacaagtattattgagaatacttagtcctagtttctgtatagcttacacactgaaaattttgagaagcatctaaaaaaatccacaattagtgcacaaagaggggacaatactttaagtcattccttctataaaacgaattaaggttactaaatgccaatttttaagcaaatatatagtttcctatttgccttctgaaagacagcagatataaaaatagttcaatattaggtttaacaaggtttgaacaacacatgtactat

SEQ ID NO: 569918 - DNA, 133 bp, Homo sapiens
taccgatcatcctaaatttattatgatggctatgagttggacaattgcaagaaactgaagctacactcctttatcaggagtttaatgagacaactagtctaaatcatataactcaaagtgcatgtcaattaaa

SEQ ID NO: 569919 - DNA, 491 bp, Homo sapiens
gacagcccatggggaggccgaggggcgcggacgtggggtggggagtccccggagccccaggtccggccatgggccgcaggagggcaggcgcgggccgggggcggaatggtggcgcctcggcacctcccgacgcgctccctggaggccttcgccgaggaggtcggcgccgcgctgcaggcttccgtggagccagggcggctgacgggaggggggccgggccggttggcgcttgccctgcaagctgtgcatgtgggagttgggccactgagatcgccgcggggctgcacgggccgcaagcgtggccgttctggggctgttgcagctgccctgagccggggccagagattcggcggtctggtgctgagccccgtggtcaaagcagaacagcgtccccgggagacagacaggcttggtggcgcagtcgggggtcgccgacatcgactgttcctgggcatggctggaagagacagcgtgtggaacagatggaggga

SEQ ID NO: 569920 - DNA, 284 bp, Homo sapiens
  misc_feature (27)..(27): n is a, c, g, or t
  misc_feature (113)..(113): n is a, c, g, or t
  misc_feature (138)..(138): n is a, c, g, or t
  misc_feature (202)..(202): n is a, c, g, or t
  misc_feature (244)..(244): n is a, c, g, or t
ctggtcttgaactcctgaactcaagtnatcctcctgcctcagcctcccaaagtgctaggattacagccatgagtcaccacgcctgggctgggctaatttttttttaacctttnatagagatggggatcttggtatgtngcccaggctggcttcaaactcctggcctcaagcgatcttcctgccttggctccctgaagcactnggattacaggcatgagccaccacacctggcccaccctttttnaagtagtctgggcaatgcacaaagcagtccatggtgggcc

SEQ ID NO: 569921 - DNA, 404 bp, Homo sapiens
caagttcgagcagttttcctgcctcagtcttctctgagtaggtgggaccacagtggcacaccaacacaccttgctaatttttcttttaataagagacggtggtctcagccgggcgcaatggctcatgcctgtgatcccagcactttgggaggccgaggcgggtggatcacgaggtcaggagttcgagaccagcctggccaatatggtgaaaccccgcctctactaaaaaaatacaaaagagtagccgggtgtggtggcggtcacctgtggtcctagctactcgggaggccgaggcagaagaatcgctcgaacccaggaggcggaggttgcagtgagccgaggttgtgccactgcactccagcctgggtggcagagcgagactctgtctcaaaaaaaaaaagggc

SEQ ID NO: 569922 - DNA, 248 bp, Homo sapiens
  misc_feature (4)..(4): n is a, c, g, or t
  misc_feature (30)..(31): n is a, c, g, or t
  misc_feature (246)..(246): n is a, c, g, or t
acgnttacggtcactgatagttgatgtgcnnctgaaacccacatccgatcaatctcctcatagagcttcttcttcacctgaggattgcgcaacaggaaggccaggatccatttaccacagaggcgggatctccacgccaaccccaaagatgtcccctatgacgacgagaatgtgattatctgaaagcaacttgatcttgatctgggccagcatgcctcatctgattcatctcgcttccatcaatgngt

SEQ ID NO: 569923 - DNA, 148 bp, Homo sapiens
tatgctgtacaagacggcgagcatatgtggccgaggacgagtagtatctgccactgaggatgaggctgatcctgctcagagaaccatcatgtgccgagaaagaataccatctgctggagagaaagaccatcatgtgaagagactcagc

SEQ ID NO: 569924 - DNA, 682 bp, Homo sapiens
tcagtgttctagcaacagatcagacattttgtaatgatgcctgaaataaacataaccacctcgaaagcaacaggttcaagctcctggcagagatgtgtatccttatggatgacaaatgacacataacaatgtggagctggagaccaagaagaattggtcacctgaacgagaacattgagaacggatatggcatcgagcttaaaggtgtcttcttatacaacaccgaaaataagcttctgtacagcaaagatcagatgctaagattacctttccaggtttgttatacgacatacgtgtggtagtcatccatttaagcaaatccagccgagcttgtgaggaacatgtgacaccctgtggagtgaggcagatgcagcacagagacggctgaaagcttgagcttaggaatccctttggaagaggttcctccagagagaatttactcattttaacaccgaatttcactacaaagctcagtcgtgatggaatcgtggggatgaccattgacaattgggattaccattttggtcggtgacggaagactgtaaccttttgaatcccgggatccaatgagataaaacggctatggtcatgtgtcacaaggacgacttaaaagaactttcttgaaaaaggcaggccaggggttgcaattcaggataacggcatggttcaaattatttgcggg

SEQ ID NO: 569925 - DNA, 178 bp, Homo sapiens
aagaagcgcacaagaggacgagagcgaccctcaatgctgggaagtccctgccacactcagtcccccaccacactgaatctcccctcctccccgttgccttgtagaccccttgacgaggggaggggcctactgagccgcaccttgtcatgtaccatcaataaagttccgttgccgccgt

SEQ ID NO: 569926 - DNA, 112 bp, Homo sapiens
  misc_feature (2)..(2): n is a, c, g, or t
  misc_feature (50)..(50): n is a, c, g, or t
cngaagggcccctgcaaagtaatagggcttctgcctaagcctctccctcnagccaataggcagccttaactatcctaacaagccttggaccaaatggaaataaagctgatac

SEQ ID NO: 569927 - DNA, 1024 bp, Homo sapiens
gtggagtgcatggaaaagaccttgccagaagcctgtgggcacccaagtcagcatggaagagattcagaatgagtcggcctgtggcctagatgtgggagaatgtgaaaacagagcgagagagatgccagggtatggggcgccgggggctccctgaaggtcaccattctgcagagcagtgacagccgggcctttagcactgtacccctgacaccatgtcccccgccccagtgacttccggtctcgcgtccaccgcgtgcggactaccaggcacgtcccctcgtaaagcgaggcccgtccgatgttacttcgtgctagtagtctggcaaaggggcagttgcatccaagccaggcaagggaagttcgcagggaccaccgattggtcgtaaggccctcaggcaccagggcagccggcctaggggggagatccaaggcaggcatgagccaaggcgctgcctccttgtccgctgcgtgccctgtgcccgcgggacggtccttggagacaggacggattgaggaggcctccacccaagggcggcctggttgcaaacacctgccagcgtcgtactacattgggggacctagatccaacaccgcagggacacaggaccacaagattgccaaaacaatccttgcggacccttctgcaccggtttgaaaccgtacttcaaaaagcgcgtcgcaaaggttttgtgggaggcacgtttaagttccccagggggcataaggggacaaaaaggcgcaagggggagctgaaagttctgctttggacgaaaagaaaaatttgcttggccccaagtgattgatggggacgcgctttcccttaacaggctgcgacgcctgtgggagtagcgacccaagggggtgaatgaagaaaaacgggaacagcgagttcatagggctctacaaagaggagtctgcggttgtaggaagaaagtcttcgtaccaggtagggtccgaaaaaatattcggaagaccgaagggtgtgaaaccaaaggcccaatgtatatttgggagcccggggcga

SEQ ID NO: 569928 - DNA, 658 bp, Homo sapiens
taatttttgtatttctggtagtgatggggcttcaccatattggtcaggctggtctcgaactcctggcctcaagtgatccacccgccttggcctctgcaaagtgctgggattacaggcgtgagccaccgtgtccagccgattgaatgttttaatctctgattctgataccgttttttgttttttgggtttgtattctttttttagacagtgtcttgctctctcatccaggttggagctcaatggcgccatctcggctcacggcaacctctgccccctgggctcaagcagtcctcccacctcagcctcccaagtagctgagtctacaggcacccgccactatgcctggctaatttatgtgtgtgtgtgtacacacacacactttttttttttgagacagagtctcgctttgtcgcccaagctggagtgcaatgtgcgaacttagcttactggaacctttgtctcccaggtcaaggcattcttggaccttagcttcccagtagcttgggattcaggtccccacaccatggctggctaattttggattttagtagagccggggttcaccaggtggccaggttgccttgaactcctgctttaagtgaatcacctgcttggcctccgatgtgggattgtcgggtgaggcccccttctgcccccc

SEQ ID NO: 569929 - DNA, 220 bp, Homo sapiens
ttcccctgatggcccatcccagcccctgaagttttatgccaagaacacaggtaccgcacaccaccttgaaacagccacagccaaggtaggcatgcatatgaggttttccccataccctttgggtgttgagaggtttagccacatgagggagcagaggacaatttttgcagggctgggagtgggtagggactgaaggtttcaataaaccttcagaccctga

SEQ ID NO: 569930 - DNA, 144 bp, Homo sapiens
  misc_feature (28)..(28): n is a, c, g, or t
  misc_feature (135)..(135): n is a, c, g, or t
gatcttaaaagtgttattattggctttnattttttaaaaaaagaaaaggaaaattggcaattgtattaatccattctcgaattgctgtaaagaaatacctgagactgggtaatttaatttataaagaaaagaggnttaattggc

SEQ ID NO: 569931 - DNA, 396 bp, Homo sapiens
aatctcgagacccgcttgccatttgaacccgatgattggggacattccggcacctgtacaaacgtctaccattggaaccacgcaaaaagcactgattaatagatcaggaaaagaatggcatttaaggaaattctcagcgacaagggctttgcgctatcgcataaagcttttgaccatgttcgttgttgaactaacctgcaaaacgaaattagctgactacttaccaccaatggcggaaacaggaaagagccctgcgactggattgattctcaggtttaactggcacagatgcaaagtttatataataaactgagtatgatcaatctgctgctaagggtgacgatatgagttgatactttgcacttgcggcgtgattaatgagcgtgccccagaggt

SEQ ID NO: 569932 - DNA, 523 bp, Homo sapiens
ggtgtagttgtaatcagtggcctctcatctccattaaaaacacgaaattcacgcgggaaacctatggtcatggatttcctatctgctactcacagcttgaccagatggtctaacatgggggaatgcctagcagttaacagccattacctagcctcgggttaccctcttctggatttctagtttttttcttacggtcttcttgtactggcttaccgctctgttcttggtgagaaagcttttcccgtgcggcctttaaaacttatactatgctggggaaaatttgggactaaagtgacattcacattatcctgacctcatcgcccaaagtgactgaatgaactgaactaatgtacactacaagaacatgtcttaataggaaagtagacggtggtcggtagtcgtcccatggtttaatcatggctgctactatatggacatgaagtagcagtgggtgtgcatgttggtatatcttgccggtgcggttaaataagtccacgcacatctcccgtggggtaggaggtgc

SEQ ID NO: 569933 - DNA, 875 bp, Homo sapiens
ggaggtacttttctaaaagtggtatctgttatccacaatgtattttagttattcccacaagtcaggagtccagatgacatgagcggttatcagctaactgataatgctatcgattgaggttcatcaagtgaatttcgtacagtttctagttccctattggtgaaggcgaaaaatgatgattttgctagacctagattttggcttggtttctatgcctcctttttatggcagccttcagtcttctcatctcccaaatcccctgagccctgtaggtttacatagtggacaaagaacttgtggtcttttaataactgggtactgatacttttttgagagagtatcgtgtcgaacagtgtgatgttctaccactttatcgaataactaatttcgaacatacacagttggcctctctgatctagaggaccgaaactagtacagctcacagtcggacggcattatcaagggttggcattagcggtcgaagcagcgtctgctccctactctgctacagccaccaggctcggtcaatagagtgactgtgacagcatgtagcattgttcctattatgggctataaactaggtccacagacactaagctggtaacggcttattgtacagctatattgtcagtattcttctggcttcagcataccttactagttcatctctaacctgctatcactctgaactcgactggcgcataacacacgctgtcacccgcacttctcatctctccctcagaatgcatatcacaacgcccctcctgctactcatccgtccgctcgctttcctctgcgttcctctcactcgtcaactgtactaacaccaccaacgtgtctctaccgcttacttcacgggcctgcatatattccaa

SEQ ID NO: 569934 - DNA, 391 bp, Homo sapiens
agtacccaccttgcatgtaaaatgtttatgataaagataatgaacacagtaatgaaaaaaaaaaagaaagaaacggtatggagattggctcatggaactagagctgggtcattctcttaattaactccggtccaaagtgatgatggaatttttattctactttttcatagatccgagtacaggtgacttgtgtcatgacacactccaccattatttccccttctttcacttttctggtgatggtgcttcccttcccatcccattcctgatgctgaaccaaggcaccatcgtgtaggtggcagacagtctgagtttttctgccatcagcggtggtttcttcaaacttctctcccagggtacaagaaagcggtgtggtttccaaggtgccctc

SEQ ID NO: 569935 - DNA, 170 bp, Homo sapiens
ctactagtactctttgctgtcaagacagaaaatatcatcataagaaaactacaggccgggcatggtagctcatgcctgtaatccaagcactttgggaggccgaggcaggcagatcacttgaggtcaggagttcgagaccagcctggccaagatggtgaaaccctgtctct

SEQ ID NO: 569936 - DNA, 489 bp, Homo sapiens
tgtctagaggacccgtgattctctattatcgacctgaatacgtatgtaaatgatagcactaaagttaccagttttaagaactcctgcatattcccaagggaacagaaaaaaatacattgcatggataaattagatgattccaatccttaacgtggtaagggctgcaatagagaagtgggcagtgtgctagagggactcagaggaggaaacatcattgatgcctaggggagctgggaaaacctttacagagtagggaaacatagccactcagtcctgcagagggagtaggaggtaacagtaactcaaaggaaaaagggagaaaggactttctggcacagaaaatatcatatgcaagggcaccctgctggaaacagacccagcctgtccagacgctgagaaatgtattattgccaaggtttagggatagacccattgaggtgaagctggaaatctgattgagaccagaccctgaagagcttcaaaagccaa

SEQ ID NO: 569937 - DNA, 293 bp, Homo sapiens
catgcggaacagggaaaatcaactataaccgcaattcctcagagataacgagctatcagaatattatttcagagttctgctcatcaccacgaacatacgcaggtttccacatgggtacttcccagggcacctgccatggcagatcccgttcacgttggaacactggcacacaacagcacaccagtggcatggttctcagctgcagcatctgggcatcagtttcctgcaattccagcacagtgttcaccgagcccaccattgccatggtattcagcgtggccacccatcatcat

SEQ ID NO: 569938 - DNA, 427 bp, Homo sapiens
  misc_feature (23)..(23): n is a, c, g, or t
cccgggtcgactactactactanattcgcggccgcgtcgactgagctgctgggactacaggtgcttgccaccatgcccagctcatttttgtattttctgtagagatggggtttcaccatgtttcccgggctactcttgaactcctgggctcaatcggtccacctgcctcggcttcccaaagtgccgggattacagccatgagccactgtgcccgaccttcagtagcttcctgactggtctttcttgctgctggtctctctccctagctatcctacatttggccgtttgagttagctctccaaagcataggtctcccaacacctacaggataaagtccaaacatcttaccagaatatgcttcaaactctgacaccaactatttgtttaatgtctgactctttaatagactgtccattctatcagggca

SEQ ID NO: 569939 - DNA, 937 bp, Homo sapiens
  misc_feature (451)..(451): n is a, c, g, or t
ggctgccctcatcgatctccccatcccattcaatatactccgtatgtatggaacattgagatcagtccttgggtgcctgcctgactcctccgacatcagcacaggacctagtcctagtccatgttcttagtcaccaaacgcctcgaccggcttgtcatcaagcggcccacatcagtcgcagacgtacagttgtggctgaatcatccgaagaaccttccaagtcagagatgtgacgtcctacattaatttctctagatctgacctcttctctacaccatcaggagacgagtgatctatatccacgagatcatttctctagtcagaaacctgaaaacatcgtttcataaatcgcatacctgctgtgacaaactatagacaacaagaaacttctatagagctaatgtccgccgccgttgaaggcccaaatatcactctctatggggggccaacnagcttgatatacaaactatgacttatccgcacaatccccaatatcgatttgggtgcactaagcacacatatgttacaaagtggtaattcctggatggtagggctatcatccatgtaataccatgttcccacaaacctcttcaactaccgtataacattttgacccttatcgaacattatccagtctcgtccacttgtgcgatatactatgcaatgcgcccatacgcaagctcgacacaactcgtctctattcgtgtggcacgatagagcggcgcgatcgaaactaggtccccctaaggagatcactctcccaatatccgaagtaaagatcaggcatggaccactcccttaaagagattaaaccaaaaagagggccctcgtgcttatatttctgttttccttttttctccctgttcaattggtgtgacaggcacttaatatgtcaacaaggagcttccctaattgggtgaacccaaaacaaacgttt

SEQ ID NO: 569940 - DNA, 667 bp, Homo sapiens
cccccccccacagcaccaagactattatgacgtgccgtaccggttgttaattcagtgccgaggcctcgaatctcttggttaaggtttggtcaccacgacagaactgcctgatggaaaggccctgtagcacggaaaggatatggtacccagcacacttgagagaaccgaaagaagtccacgaagggaaagcagaggctgtgagctgttgggaggcaatgcagggcgcatcacctagtggccttctccgccaagtggtggaagctagtctttatcctaatgagcattgtggaaactatcgtgaggctttaatcatggaaacgatgtcttaaagggaacggagtgcaagagtggacactgttaggtgccagttcagtggccaggttgaaaggtcatggtagctcacactagcgatcggcagtggtagacaaacaggcaggctgattactagtgtatctgggacagaacattccatacaaatcgtaggatggtggcgctggaattatagtgattgattactgtggcccactcacacagtacagactatctgccccccgagataatttctaggaagtggaattcacgactctctcagtttgacaggtggggtaacagcaagttcaaagaacaggaacttgagtcccagaccatgtgccatgtccagagctgg

SEQ ID NO: 569941 - DNA, 257 bp, Homo sapiens
agaggatcctgggctcagtgatcctcaatagcagggattcactggggcccatcaaggcagcagtcttccagctgggtgggctggctcatccctggaatcccaggatttaaggaggccaaggttggaggaccactcgaggccaggagtttgagaccagcctggcaacatagcgatgacagcctgtctctacaaaaaaattaaaaaaattagccaagcatggtggggcatgcctgcagtcccagctactcaggaggtgg

SEQ ID NO: 569942 - DNA, 141 bp, Homo sapiens
gcgcgctggctccccccatgacagtgccagcttcagatagaccatctgaaaagagatacgtgtgcgagaagagttgtactgctgtcacaggaaatggacgctggattacaagcatggcagctcaggcagcaggttgagtga

SEQ ID NO: 569943 - DNA, 1016 bp, Homo sapiens
gaggattctgtggactcggatgaatctgacgaatctcaccattcggatgagtctgatgagaccgtcactgctagtacacaagcagacactttcactccaatcgtccctacagtcgatgtccccaacggccgaggtgatagcttggcttatggactgaggtcaaagtctaggagtttccaggtttctgatgaacagtatcctgatgccacagatgaggacctcacctctcacatgaagagcggtgagtctaaggagtccctcgatgtcatccctgttgcccagcttctgagcatgccctctgatcaggacaacaacggaaagggcagccatgagtcaagtcagctggatgaaccaagtctggaaacacacagacttgagcattccaaagagagccaggagagtgccgatcagtcggatgtgatcgatagtcaagcaagttccaaagccagcctggaacatcagagccacaagtttcacagccacaaggacaagctagtcctagaccctaagagtaaggaagatgataggtatctgaaattccgaatttctcatgaattagagagttcatcttctgaggtcaactaaagaagaggcaaaaacacagttccttactttgcatttagtaaaaacaagaaaaagtgttagtgagggttaagcaggaatactaactgctcatttctcagttcagtggatatatgtatgtagagaaagagaggtaatattttgggctcttagcttagtctgttgtttcatgcaaacaccgttgtaaccaaaagcttctgcactttgcttctgttcttcctgtacaagaaatgcaaacggccactgcattttaatgattgttattcttttatgaataaaatgtatgtagaaacaagcaaatttactgaaacaagcagaattaaaagagaaactgtaacagtctatatcactatacccttttagttttataattagcatatattttgttgtgattattttttttgttggtgtgaataaatcttgtaacgaatgta

SEQ ID NO: 569944 - DNA, 105 bp, Homo sapiens
tatcgtacaccatctctggtccccagcatcctcagacctctcagcttctctttcattaacttttattctaatctgtattacttccttccttctttctctttcttt

SEQ ID NO: 569945 - DNA, 174 bp, Homo sapiens
tcccaacgagtcgcaataaacatgcagttccaggacgtgatactctgcaggaacaaagagagacagcagactacaagtctatggggggtgacaaaggatctgagatcccatcagagtagacttcaagttggcagaaaccttttcattggccaccaggcattcccttgattacac

SEQ ID NO: 569946 - DNA, 376 bp, Homo sapiens
agggatctctgcgctcaaaaattatacctgtgcagcttctcaaacacgtgactgtgtgctaaacattaagctacgaggatcttagtgcacctgaggcacattctatctgacacggatatggcagggtaaggccactctggactggcacacatgctaaagcgccacaagaccttcaacattgtctgagagcaaccgagtatttgccaataaatgagaccttatttttccagcttgactggccatgtaacttaaacatagaataagcgctaattttcaagcacggctggaaagccgggctttacctgcccctccgttaccatctaaagtgtatgctgaccaaattgctgagtaacatataccgaggctgagaccacgg

SEQ ID NO: 569947 - DNA, 536 bp, Homo sapiens
  misc_feature (11)..(11): n is a, c, g, or t
  misc_feature (48)..(48): n is a, c, g, or t
  misc_feature (72)..(72): n is a, c, g, or t
  misc_feature (74)..(74): n is a, c, g, or t
  misc_feature (77)..(77): n is a, c, g, or t
  misc_feature (112)..(112): n is a, c, g, or t
  misc_feature (119)..(119): n is a, c, g, or t
  misc_feature (133)..(133): n is a, c, g, or t
  misc_feature (150)..(150): n is a, c, g, or t
  misc_feature (157)..(157): n is a, c, g, or t
  misc_feature (177)..(177): n is a, c, g, or t
  misc_feature (179)..(179): n is a, c, g, or t
  misc_feature (181)..(181): n is a, c, g, or t
  misc_feature (185)..(185): n is a, c, g, or t
  misc_feature (187)..(187): n is a, c, g, or t
  misc_feature (222)..(222): n is a, c, g, or t
  misc_feature (225)..(225): n is a, c, g, or t
  misc_feature (227)..(227): n is a, c, g, or t
  misc_feature (229)..(229): n is a, c, g, or t
  misc_feature (242)..(242): n is a, c, g, or t
  misc_feature (249)..(249): n is a, c, g, or t
  misc_feature (251)..(251): n is a, c, g, or t
  misc_feature (286)..(286): n is a, c, g, or t
  misc_feature (292)..(292): n is a, c, g, or t
  misc_feature (313)..(313): n is a, c, g, or t
  misc_feature (322)..(322): n is a, c, g, or t
  misc_feature (333)..(334): n is a, c, g, or t
  misc_feature (337)..(337): n is a, c, g, or t
  misc_feature (339)..(339): n is a, c, g, or t
  misc_feature (343)..(343): n is a, c, g, or t
  misc_feature (354)..(355): n is a, c, g, or t
  misc_feature (375)..(375): n is a, c, g, or t
  misc_feature (379)..(379): n is a, c, g, or t
  misc_feature (421)..(421): n is a, c, g, or t
  misc_feature (429)..(429): n is a, c, g, or t
  misc_feature (449)..(449): n is a, c, g, or t
  misc_feature (476)..(476): n is a, c, g, or t
  misc_feature (489)..(489): n is a, c, g, or t
tgaaagtgcanagggtgaccaagcctgggaaggccccaggggtccaanaccaaaattaaaggtttattaaananaanaggacgttctgtccctcaaagtggctggccacccnccccacnctggccaaggtccngcacaaaggtttgtccncaagggngacccttcttggccgcccanancnaaancnccggcggagaggcacgcagtccatgctgctggcanaantnanttggccagctccncaaccancnctttgcgcatcttgtccttgaggtaggcgcctttntgccantaaaaattgagttccaaccantcaaaaaangggacgtccannaanangaancctgcagccannatgtgtcgccgggccaaaanaaancgacccagcaagtccttgcttcggctgttgaagttggggaantcccaccncaaaaacgctagcctcttanaccctggaggtggtgactggctcccanttggctgggcaangtgaggtgccacaaagtcccttacgggcagaaactcgccgtcactgt

SEQ ID NO: 569948 - DNA, 135 bp, Homo sapiens
  misc_feature (107)..(107): n is a, c, g, or t
ttgtgtactagcatatctgagtagctgacgttgagactggcaccaatgtgagtttgtgttatcaatgtactgtgcccatccagcggaagacttctccgtaaccttgncttttgagcacactacacatgaaaactt

SEQ ID NO: 569949 - DNA, 856 bp, Homo sapiens
gacacactttctgggcactgtgtccagtcccaaaatggaacataatgaagtgttgcttctagttcttcatttctgaaatcaggtcaaggagagccctgaatgattatgtgaatatcgcagtggcactttcgactgttcagtgtcacctaagaagcagtctggggagcgaggaagcagagaagaatgtgcagcactaatgtgaagaggagaaagaattctgctgcaagggtattccaatatgtaagtaaagagctaaagtgtgtgataatggtctgaaaatcaggatgtcctccataatcattaggatgagagatgcagagtaagatctgaaaagtaaagtgtatcttccatgagttgcatagactgggaatggtatgaactacagagggactattgtacataaaggaaaaatggaatcagactgtcatgaaatggtgattccatttactccacggaagatgcataggtcgagattttgaccctttggatctattgtgtatacttactgtaaagtgtcggtgtgtgtctgtgagggatggttccaggatcgatgtggatacgcaagatccatggttctcaagtggcttatgtacaagtggtggcacgtgttagcgtatgacctacatacgttctcttggtgcattcccgtaatataatgttaaatgctatgtaatccgtggtaatactggattgatttctaatgtcgtattgttggttcattgcgtattggaaatggtcgtgtcagtcgtttcaaagtgatttgcattccagagttggtttgatttggttggtgtggcaccatggaataggagggcaattggttcggatgatttatcaattttagtgggacagagta

SEQ ID NO: 569950 - DNA, 117 bp, Homo sapiens
gcaggattagggcaggagaaggtggtgggatgggagaaagagctgaggattctttgtttggtttttgagatggagcctcactctcttgcccaggttggagtgcaatggcacaagctc

SEQ ID NO: 569951 - DNA, 255 bp, Homo sapiens
gatacactcgagctcggtaccgaacgggtgatgcggttgtagacctcgctgaggactacaggtgtgctctaccatacctggttaaatttttttcactttttgttttctgtagagataaggtctttctatgtttcccaggctggtctcaaactcctggcctcaagggatcctccctccccggcctcccaaagctctgggattacaggcatgagccaccatgccctggcgcgtattctttttctttttttttttttt

SEQ ID NO: 569952 - DNA, 745 bp, Homo sapiens
tgggcttgggctatagagcattaatggcaaacaaaattgaggtaaaaaaatgctgacccaaaacccacgcccgtccaggcgggggaattctctatctcgccccacaccatggcccctgagcaccgtgtgtgtgccctgaatgcagcccccagagtgacatgagtggtgccctgcgcactgaggtacgctgcatcctaatgcccccatgagtacaactgcccatgtggcttgcccaattcccagatggtggatggatgtgatgagaagatgtgcatgtgcatgggagtgagcccctgtgtcttcatggtggggtgcacaccccacaccctccaaacaaacctccccagctctctcgggtctgggcatcttcctgctccttggccacccaggccatgccatgggtggcatgcggtggtgtgccaccatgatgtgcgggctgtgctgggggttgcgaggtcatctggtttgtctccaggcagtcctcggtcaccccctggtgtgcatgccagcttcatgccatgaatggttctgcatggtcagtggggtgtcagggataagcctgtggccctgtaatgtgtgcggctccatctcgtgtctgggtggtggatctcgttccataccagggggtgttccgtctccccgtggttgttggatcgtgcccactgtgtaatgagccgctcttccaggccctcaggagccaggccttgtgccttgcgtgttgcatgtcctggttgacccttgcata

SEQ ID NO: 569953 - DNA, 334 bp, Homo sapiens
  misc_feature (210)..(210): n is a, c, g, or t
gcagcaagatgggatggtggcagggccttgtgaactccggggccttgttccggcagcccgtctctcggctgcgatcgtctccatggcatgaaccgggttgtggtaccctggttgtgtgggagccacggagactatcttcgcctgccgactgaaaggccgcgcgagcaaatggagaaactctcggagggaaacatcagcaatcattggtcntatgtgggaagtgaatatccatccaagtatggacatcgaacatggcacagggcaaggaaggcaggacattgttcgcaagagaagtaaagaatcagcagaagaacttctcttcgcagacaaacag

SEQ ID NO: 569954 - DNA, 324 bp, Homo sapiens
  misc_feature (12)..(12): n is a, c, g, or t
  misc_feature (41)..(41): n is a, c, g, or t
  misc_feature (75)..(75): n is a, c, g, or t
  misc_feature (96)..(96): n is a, c, g, or t
  misc_feature (278)..(278): n is a, c, g, or t
gagtgccaatgncacaatcctggctcactgcaaccacccanctcctggtttcaagcaattctcctacccttagcncccgcccccgagtagcctggnactaccaggcgtgtgccacccacacctggcttttttttttaaattagagaccagggtttcaccattttggccagtctggtcttgaactcctgaactcagatgatctgcctgcctcagcctcccaaagtgttagaattataggcgtgagccaccgtgcctgacctatattaagactttttatncccagaaacattatgccattacgttgaatatcatggttctgtcttt

SEQ ID NO: 569955 - DNA, 198 bp, Homo sapiens
acgttaacggctcctagtggactgccctgctgacctaaaatgaagaacccctgagatgacccgcagccaggcccatttgctcctcttctgggatgcccatcatcctcatggcctccatgctctcctggaacatgtccttgtcctgcgacccgggcatgtgagcacacagggggggctcgaaagctggaaggccgccaa

SEQ ID NO: 569956 - DNA, 779 bp, Homo sapiens
  misc_feature (779)..(779): n is a, c, g, or t
attcagcgttatttaagcgcataaagaccaaaaaaaaaaaaaaaaaaaatccaaaagaatccaaactttttttataatacttctacaaaaaattctcttctggtagtattggtcaggtggcacttttttttcttggccaataattggtaaccggtagcttcggccccggtcaaaacaattctcaatgttaacaattctcaggggccaggcaatctccgtggttcccccttcagcattccggattacaattttctccggtggtgggcaatatgtagggcgtgggcttatccttcacaaatttaaacataaggtttcacggtggaacactttttctagtgcaatgtgcgtggcactccttactattggggactctctctcaaactgtggcccaggtcttgcggacacaggtgacacacgaacatatttatctctcagagggtgggtggcaacgagccaaagtgacacctcaaagtgttttcacaattttaaaacgtccgtgagaaacacaggcggcgcttaacttcggggcagaaactttttgggcgcccccaatattatttataaactctcccagagacagattggcgccacacaacagaagacaaaacaagagtggtctctctccaatttatttttaccctccaggtcgtgttgagaactctcgcggcgggctcccctccatctttctccccaacattttctttacaaactctctttacaaacacttttcacttgcggggtgtctctcacaaacctctctgggtgggctgtctaccccn

SEQ ID NO: 569957 - DNA, 255 bp, Homo sapiens
cagtggatcacttgaggtcaggagttcaagaccagcctggccaacatggtgaaactcttgtctctactaaaaatacaaaatcagcagggcaaggtggagtatgcctgtaatccctgttactctggaggctgaggcaggaaaaccgcttgaatccaggaggtagaggttgcagtgagccgagactgtgggcaaagtcatcatctctctggatctcagttcttgttctgagcagctgaattctccagaaattctccg

SEQ ID NO: 569958 - DNA, 790 bp, Homo sapiens
agcggataaactatatattaggtaggtagtcataacacattcgtttcagacatttattcaatcattgttcagtcttattaaatacctatcatgtgtcaagaaccaaatgcgtaggtttgaattaaaaatggaaacagggctaaatagctaccatgatcttggcatgagagtacacacacacaaacacacactatacatatatatatgtggtccttcactaaaatctaaaagtgctgtaattataaggtaatctgcagagtgtatattgttacctcagtccctttgggctgtgactgctgtacacattatcatgttaccattgacatcttcacgttgtcccagatgctgatgtgtacatgcatataagcagcactatgtagtggttagaaggagtacatggctgtctgggaaatggcacaggcgctgggattccaagtttaacatgctctgtgcgcctcaagtatttcttcaatcgtctgaagcatgcgtgagataatgaatatccttcttcctagggtctttcggtaggatcaacttggagtttaaatactattataaccactatttacgagacaattgcatggacaccgtaaataacgctcttgagtgaaaacaggctatttacttgaagtactaccctgtgtgataaccagggaagagttttttttgacccagtattatatcggggctgtagtgtaaaggcgtagatccctttgtactagtggtaaaagtgcgccaagactaccttgcggtaggcctctgcttgagggggcgggcatctcttcctcac

SEQ ID NO: 569959 - DNA, 164 bp, Homo sapiens
  misc_feature (136)..(136): n is a, c, g, or t
ttccctcaaggcagtgttggagttcagtggaggagggagttcttggccttgtgaagagtgcccagcagtccgctgtctggggcgggctccttagatgagtatcttggatctccttagaactgggtggtggacggcnatcacccgacaatgctgcagaattgagc

SEQ ID NO: 569960 - DNA, 609 bp, Homo sapiens
tgatcgcaggtgtggagctcccacagctttgggtagctctgcctctgtggctctgcagagtacagcctccatggctgttttcactggctggcattgagtgcctgtggttcctcaaggcacatggtgcaagctgtcaatgaatctaccattcttgggtctggaggatggtggccctcttttcacagctccactaggcagtgcctagtgcagactctgtgtgggggctccaaccccacatttcccctctgtgctgccctagtagagggtcttcatgagggctccacccctgcaacagacttgtgcctggacatccaggcatttccatacatcctctaaaatctaggcaaaggctcctaaattcctgccttctgcacacccacaggcccaacaccatgtggaggctgcagagacttggggcttgcaccatttgaagcaacagcccaagcttgtaacttggtcatttttgccatggttggagctggagtagctgggacacagagtgccatgtcctcatgctgcacagagcattggggctctgggtctggccaagaaaccattttccctcctaggctctaggcctgtatggaagggtaccacaaaggttctgac

SEQ ID NO: 569961 - DNA, 295 bp, Homo sapiens
  misc_feature (92)..(92): n is a, c, g, or t
  misc_feature (94)..(94): n is a, c, g, or t
  misc_feature (106)..(107): n is a, c, g, or t
ggctgtcggggaaccatggctgccccgagagacaatgtcactttattattcaagttatactgcttggcagagatgaccctgatggtcgtagncnataccatagctnnaagaaacacaaggacatcatttttttatctctacttttcaaccacagccgtgtgtatcacagaagttataaagttattgctaagtgtgggaattttagctaagaaaaacagatttgggggaaaaagatatcaacagtttgattttggagaaactggtagtctgggtagattcaaagcatctttaagag

SEQ ID NO: 569962 - DNA, 139 bp, Homo sapiens
tgaaaatgaaaaagcagaatagttgtatgggtgctggagtactgtttctactgaatgtgtatcgccttctcaccatcattaaggtaaaactcgtaacccaaatcataagttggggactgtccatcgttccatagcctga

SEQ ID NO: 569963 - DNA, 315 bp, Homo sapiens
cggcacgagggatttttaataacaagaagagagtaatgctttaatcagcaaaaaatggagaactcaaatacccttttataaggtccagatttagtagcaggtggcttttgttcagtttcttattcaacaagaaagctcattaatgattttttgtttcattttgttttttggcagtctccctgtctcacccagactggagtgcagtggcgccatctttgctgattggctcacggccatgtccgcctcccaggctggagtgtggtggcgccatcttggctcactgccatgtccacctcccaggctgcagtgcggccg

SEQ ID NO: 569964 - DNA, 291 bp, Homo sapiens
ataatttttgtatttttagcagagatggggggtctcgtcatattacctaggctggtctcgaactcctgggaggattgcctgaggccaggattttgagattaacctggccaatatagtgagactctgtctctcaaaaaaatttatttttccttttttttttttttttttttttttttttttttgggggaaaaagacctctttttggcgcctggggtgaggggggggggcacaaatagggtttttggccccccccccccccgggggaggggggttttagggggtggcccccca

SEQ ID NO: 569965 - DNA, 815 bp, Homo sapiens
gcctttgagaaatgaatgaagtagagagaaaataaaagaaaaactagccaggcacagtggctcacacctgtaatcccagcgctttgggaggctaaggcaggcagatcacttgagaccagctttgggcaacatggcaaagccccatctctacaaaaaaaacacacaaattagctgggcatggtggcgcacacctgtattcccatctactcgggaagctgagatggacagaattatttgagcccacgagttcaaggctgcagtgagtcgtgatgtgtgccactgcacttccagcgggggtgacaaggaagagacctgtgtctccgaaacaaggaatctgaaaaccaattggaaccatgccttcataattctggaaggggttatttcaactgataaatctatattcaccccaaataatcaaggggtgaggtaccactaattacatttttagacaagcaaagactcaggggttacctccatgtggccctttttggggaagctgtgtggagaaaaattacttccagcaaaatgaggagtaccacaaaccagagaatgacttgaatccagcaaataggatccaacacaaggcaatattccagctatggagctagctttaaaagggaccgtaacaatattatcggttagctgggtggaatggccatggcttgtagtcccagtactcagggggttcagcagaggacgattggagcccaagagttcagacagctggcacctatgaatcctttcttaaatatactttggccgattgcgggtggaaagtcctgggaaacacctacacacaacacaagggggtggtc

SEQ ID NO: 569966 - DNA, 101 bp, Homo sapiens
gtgaatttctgtgccacgagggggttctttttataatctctcttgtctgttgtgacaacttctcccttgactcggaaatcccgtcccgttgatttgtcccc

SEQ ID NO: 569967 - DNA, 312 bp, Homo sapiens
cctggccctaagtatatttgctttattcatatagcatgaggataacattatatcgtggaagcttgcacttagtggcactgactgatgatctacacagggacatccttcaaaggctactattaacgatccactggccgtcgttgcagactcacgcctgtaatcccagcactttgggaggccgaggcgggcagatcacctgaggtgagaagttcaagaccagcctggccaacatggtgaaaccctgtctctacaaaaatacaaaaattagccaggcatgatggcgggtgcctgtaatccctgctacccaggagc

SEQ ID NO: 569968 - DNA, 410 bp, Homo sapiens
gaggacccccacactactgagtcagactctgccggcttcctttatggtacgaattgtgctgcagtcttcttatccactgtgcaacacaccccattggctgttgcagaggtagctttacctttctaggggtgtcaaaatggcaaatgatttagttactgtctaaataagggggaaagaggacttaactctgctcattgtaagggactagtctgaaagagcctcaaacgcatgataatattattgcatgatagactgcctgacaagtgagaggaaaaagaaagcactaataggaaggaggaagacacaaagagctacggggagaaaagtagctcaggaaagggggaacctgaaatgtagatgggtttaaggcccactacgattaaaacttttaggtatccccattgtccata

SEQ ID NO: 569969 - DNA, 172 bp, Homo sapiens
aaccacaaaaacactaccacataagctatacagtgcccttttttcacagtgtctataggtggaagatactcagtgaggtttgttggagtgaataaaggatcttcactgggtgcatcccatttccttacaatttatttattttttattgatcattcttgggtgtttctcgcag

SEQ ID NO: 569970 - DNA, 252 bp, Homo sapiens
tgctcatctcagcagcatggcacccaacgcttaattctaactatgcaagatagcatcttatttctaccaacataggccaaacgtaaccgcgaggcactctgttatacagaatatcaattattacaaagattcaaaagattaccaacaagccctgtaccagtttcttaacgccggtaccaactctggcctcacaacatttgtcttccctaggagtttccaaaatgcctcactcctgtcaacactgccccaaaa

SEQ ID NO: 569971 - DNA, 106 bp, Homo sapiens
acgaatttgcatgtaatagagcttcgcaaaacagaatgagagaaaattgtataaccatcctgctgttcctttagtgcaatacaataatactctgtatgggggatct

SEQ ID NO: 569972 - DNA, 348 bp, Homo sapiens
tgcagtggctcacacctgtaattccagcactttgggaggccgaggtgggcagatcacttgaggtcagggttcaagaccagcctggccaacatggtgaaaccttgtctctactaaaaatacaaaaattagccaggcgcggtggtgtgtgcctgtagtcctagctattcgggaggctgaggctggagaactgcttgaacccgggagacagaggttgcagtaagctgagatggagccactgcactccaacatgggcgacagagcacaactccatctctaaacacaataaagactgcagttgttgctatgattattaataattcttcaatcagcatagagaggtagtattct

SEQ ID NO: 569973 - DNA, 438 bp, Homo sapiens
agggcgtcgccccatgtctgcacgggaaggacccatctttctggatgctactcccatggctatttggtgacgtggccaagaacctctgcctttctggggacccaggaccgcgggttcctcttctgcaggggattgagctacagcccatctcaactctcccaccagatttgcctcgggcccaggagcccctcgttgtcacactagactgtccctgtctctctgaaggcccatcttccccaatcagatcatgagctctctgggggccttccagggcgtaggtccccctcagggtgctggctcctgtcactgcatggatagagctgcatgcatcctactttcccccttcttcggctcctctcatccattacaaaatccagtgctttctcccgtctctcacccccagaaacaacacttcctcttttcactctcaaaattccc

SEQ ID NO: 569974 - DNA, 344 bp, Homo sapiens
  misc_feature (285)..(285): n is a, c, g, or t
  misc_feature (325)..(325): n is a, c, g, or t
caccgcgggcacacgggttcatcagcaggaaggattgccgtacaacaggagcacgaacgcagcccctgacgtatccccgtgacgcctggttttagcggtggcgcagttctggcatcggggcgatgtcgtcccataaccagcgacgatcaacgcactgaaaagcgcgcagttgcaggacacaaaataaacaccaggggagaaagctgctgcctaccccaatgctgccgtaagccatcagtttaacgaaactgaccagcacacccgcgaggaaaatctccgccattncccaggttttgagttgaaaaagcacccgtgccagttagtnttttaaacgggaccggtta

SEQ ID NO: 569975 - DNA, 273 bp, Homo sapiens
gtcggtaccccacttatgcgtgggcacatagtttattgagaattttttttttggagatggcaggggtctcatatgttccccagactagagtgcaggggctattcacaggcgccgtctagcgcactacaaccttaaactccgtgggctcaagcaattctcctgcctcagccttgggagtagctgggattacaagtgcccgccaccacgccgggtctgccaatactttctatcagtctgtcatgtttacggtcttttcccccacggcataagggg

SEQ ID NO: 569976 - DNA, 227 bp, Homo sapiens
ttttggggcgtgatttttagatttgtccttttttttttaaagaagaatttgttactatgtaaaccccgacatttaaatgttttatctctaccagcatcaggaggaatcactgctttaagggtattaagtaatgcctagtgccttttattttcagttaaaaaaaggttttgcgaaggcctttatggtcattacccaaaacttaatttaaggccctgggtttttaagcc

SEQ ID NO: 569977 - DNA, 244 bp, Homo sapiens
tatcccctgtcggaaccctatccatacatatcccaaattagtttttgatcaaaaacatgattatagatccacctgctatattttaagcttattatgcaggaaactaagttggaccattttctatttgtctattttatacaataaggctactacaattgttacactttatacagattacaatttattagcagtgattattagttaattagtgttctacatcattactccatctcttaaacattag

SEQ ID NO: 569978 - DNA, 184 bp, Homo sapiens
  misc_feature (48)..(48): n is a, c, g, or t
  misc_feature (129)..(129): n is a, c, g, or t
  misc_feature (160)..(160): n is a, c, g, or t
aaccctgggtcttgtgtgataagccccttgtcccagggacccacaggnacagggggccagccactgtcagaggtgccctatccaggatgacctcgtgggattcaagctgttcctgcctgaagggccttntgaccacaccgtgtcaagcttccagccaggngatatggctgccatcaccaccaag

SEQ ID NO: 569979 - DNA, 298 bp, Homo sapiens
aaatagttaccacagtgacaactcagaggatatcatcaagctcctgttaggacatagatccagtctaggagcccagcacacaagagacgcaacactagatgcgtcagacatcatttacttcatttgacaacctgcgtgatgcgcacctccactgacacacgggtcacaaaccggtagatcattacctttttattttgcccaatccggatgagctctgataaaggcctgaatgtcattatgggggttccagtcagagtcatagctaataaatgtgtccgcagtggacagattgattcca

SEQ ID NO: 569980 - DNA, 178 bp, Homo sapiens
tatatatctatctgttcatagttatatgaatacagagagatatgtggcttggtccccatcatgttgttctatttgtgtgccaataatagcatatacatttttcctcttgaatattttcctgtggcgcacgccattttaaatatgctgccagggctgctttggtccccagtttagtatg

SEQ ID NO: 569981 - DNA, 577 bp, Homo sapiens
atagctgactctagaggataaaccgacgcctggcaattaaaaactagcagcctcagagccaagaccagcctagagaaacagagttcagggaggagggaagatagtggagtgagacgtgcggagaccagccggcctctgagcttggggtgcgctgacctctggggagccgagtgcatctgctggactgaaggcagagtaattttttcatctcatgcagaagaagaaagaagatatgtagcagaggaaaggaacggaacattctccctccctaccttacacaggagagtggtcatctacactaaagcaaaacttccttatcataggaagaccattttccttgacctttaggtgattttatagtcatctcgaaaaggaaacaaaactcaactcaggacttgattgaacacagagagtccactaggatgcagtattcctgcccacttctccaggaagaaagaagcaaatgacgcgggtcttttggcactgtttgcttaattataaagaaattattttgcaagctgaatactgatgctttatttgaaacaggtgcttagttggtggcatttatgaattcttt

SEQ ID NO: 569982 - DNA, 1141 bp, Homo sapiens
ctggagatttctctcttgaaatctgtgctgtctctgactaaatgtcacgtgggggatttttcctgccgctgtccaatctgggtccccccaaagatattctgtgtggccccctggtgcccaaccacaatgtggggaaggtctcatgaattcctccgtaaaaattttctatccggggaaatactcttcaggaattcccgcggctatgtgagcatatccataaggcccccgccatatcacacaagaggttattggcgccttgatttaggcgcccacaaagttgtccttaattggggccaccccgggagttgccccacctgcggtttccattgccctcccctccattctctttacggaacttttggagccccccacgtgcccccgggtattttccaaggatggaaacttctttcgggggccctcgtggttggcccccttctgtgttgccgctgtcgcaagcccttggaaggaggcccatccacgttctagtcaaacccacgcgtgatgaagcccccctgggcccctttaacaatgtttttccacgcacacgactcaaaagcgtgatttaaagaaagaagtgagttttccccgcagaccacttccccactggtttgtggttgccggtccccacccgaaggtcacttcggtccaccatgcaccctttgcacacttctttggccctttcgggggctctttgggaaacacccggccactgggatcctaccactggccacagaaagagactttcgcagacttttctcttcaccgcccgccttcttgtcctcgcgtgaggcctctctgatgaatgactgaagagccctcaaggtccgaatatccccccgaggcccggccacaaatgtagccccgccctgaggaaggggtttctccccctggcctggccactatctgtgtcccactcggagagttcggagccacaccctcacactggctctcctggccctgggagaatctgctcctgcagccccacgcccacgccccacactcctctgcatgagacctgctgaaccctgtgcaccacccccacactcccacacacatgggcccacaggcctcacccacattcccagtttccacccctttttagacccataaagagaccaataccattttttaaactcagcca

SEQ ID NO: 569983 - DNA, 315 bp, Homo sapiens
cgttgccttcacacatggagaaggctggggctcactttgcagtgtggcacaaaagggtcatcatctctgccccctctgctgatgcccccatgttctgtcatgggctgtgaaccatgagtaatgtatgacaacagcctacaagatcatcatgcaatgcctccttgcaccacccaacgtgcttcagcacccactggccaatggtcactccctgacacacttctggtatctgtggacaggactcactgaccacatgtccactgccactcacttgccacccatgcaagactgtggactgtgcccctcctggtgaaactt

SEQ ID NO: 569984 - DNA, 960 bp, Homo sapiens
  misc_feature (638)..(638): n is a, c, g, or t
ctctcgttggtaaacacggtctgctgtgcacggtcttgtctcacccggtgtccggtagtcctgtttcccggtaggcccatatttagcacgtgccgccgctcatatagctcctttcggccgggggtctgtccgcagttccccctgtggcccccttgtttgtcccccggtgtctggtcagcgactgtggtgtccccccgccccctcatggtggacccagccttcgttctcttcgggggcacttctcctcgtcgagtgtggtttggagccacacgtctgttctgtccccgggatgcgtaattccgttgtggttcgaagatagccacacgacgtcctcacgctggtcgaccatgttccatagcgggtcggttgtttagcacccctcgcggtgcgcacctttcctcactcaggcaggttcttctgctccataactgttggttttgttgaaccgcggctgcctttctgtgcggcccccgcggtgggagatatacgcccccggcggtgtttattcccccctcgtgtggacctccctctcactcggtagatggttttgtccccacctctcgcaccgcacgcacgccctcctccttgggcgggagaagctgctcacgcactccccccctcctcgcgggggggcggancccactcacacgctcgggcggcaggaacgcatctacaacgcccgctcgctaaagaaggacctaccttttttcagaatgcttcttcatctgagaccgcaggcgaatatgtaatatttgttttccgccatcagtgatcgcactggcagctcgcaagaaagactgccgatctatcttttgtaagcaggcgacaagggagcgccgcctctgtgtggtggagacggcgcgcctctgcccccggttttctactgcagtgataatacttgtgtttcccggcccgctctccgcgacaaaccctttttttcctaaaacgacaaacaaaaca

SEQ ID NO: 569985 - DNA, 519 bp, Homo sapiens
tcaacgctttatactttaaaacagatcttctttaattgtggaggtgagggactatagcttgttggaaagcattcgtctttgttgtttattacggcttgcatcatatataaatgaggagtctggtgctatggccttagcacaatattaatgctgtcaaggtttctattatactgggtatgaaagtctccgtaactattacatgaactcggggtcactcaaggggggggcggattgcagctttcatatctagacctgtagactatagggtatgggtctttattgccttaactaaataacaatcacaaaataattgcagatttccaaatgatatctaaaatgatgggtactatatacattccggatattttcagtacttaaatagttgctttggtataccaaaacatcagtctaccaaaaacaagttcgggcatgagtaatcccagagttgagaccttcggggtcaacctgaaaaacaaaccttcaacttccacctatgttgctgggtggaagtttaaagcg

SEQ ID NO: 569986 - DNA, 957 bp, Homo sapiens
agcagccagccccaacacagaggccaaagggttcgtcagagccacatggtggaaactctagcagagggttttgaaagcaggttgcacttcattcttactgagtgcacgtgtgtgtgtgtgtgtgtgtgtgtgtgtagtgtgtgtgtatgcagcgcccctgggtctgtgtaatatggcacttcgtggtggcttccacgcgtgcacggcgcacatgcttcccgggggaggggcccggtgggacagcgggtgtcgcgcccccctcttcttttcataagagtccgtggcctcgggacagccgtgcacaggcgtgcctagctcgtgtggacgacggggacaggccctgtcccacatcacctctttccccctgcgcgctccgtgcccggcagcctccaacctgtgggaggggcgctgtctttctcgcattcgtgtgtgtgtcgtgactctggcgggagctgaaacccaggactccagggggtgtgcccggggggtgccctcagaactcctcgtgtgtcacgtgccagcgtgtgtcggtgcaatccaggttcagctctttctcgtgagatcatcaccaccccgagggagacgtgtgacgacatcaagcgagtgtgcaacagcggcgagagtgtcgtgcggaaaatcttcggagtgggggaacacagagggggagctacgagtgcgtgtgcagcccgggatttgagccagtgtctggcgcaaaacacattcaacactgagagcgagaaccctggtccagatgtggacgagtgcactccgggcagcaaccagtgtgacagctccgcgatatgctacaacacgggggtcaaacagacggcggtgcgccaggggggagccagaagggaaccccaaaaacaaaggacatgtgtggaaaaagaatccccaccgaccgcccggacaagacaacaaccattagaaagcggcgggaaccaaaaccgaggaaca

SEQ ID NO: 569987 - DNA, 581 bp, Homo sapiens
  misc_feature (184)..(184): n is a, c, g, or t
ggtggttgggggggggagtgttaaaagagtgggcggtcttcggcccccgccttgagtggcaggaccacagggacagatcttctgccgcacaccgcagtgaggacacggcgggggggccgccttgtctcaagttggataaagttggtcccgggtcccctcctccctctgcccgcagtggtttttntggtttttttttcccctttccctccctccctctgcgcattcttcccttggttgagcacaggtaaaagggttcccctccctccctgccttcatgggtcaccagctcacgtcatggtgccttctcttttcttgggggggggggtaatttaaggtatttttcttcctcctctcccttttctttttgggcctccctccctcccttttttgccatggaactggaggatgtgctatgagtttgcaaacagctgggctggcagggtgctttttttccagatggtcctcctttgcctccccttcccctcctctcccctccttttccttccttccttcctttccttggagccctgagccccatttggaaggttgagagaaaccaaaattaaagagagaaagagaga

SEQ ID NO: 569988 - DNA, 185 bp, Homo sapiens
  misc_feature (31)..(31): n is a, c, g, or t
  misc_feature (76)..(76): n is a, c, g, or t
  misc_feature (115)..(115): n is a, c, g, or t
tggctggaggggcctaatgatagtgggcganagaaccctgcagcctgtgccagcccagtggatgcgtgccccagcncagccagcttacccagcccctctctgtgttgcagccggnaggttcctaagaatggctacccggagctaatgagggcccagccttttttctgcatgatccaggagcacat

SEQ ID NO: 569989 - DNA, 169 bp, Homo sapiens
cagagtccaaacagtgcccagagtccaaacagtgcccagagtccaaacagtgccatggaaatacttattcagcagtgatctgtattcgtatctgcattattctctttcgattgatatgaccctatataaaatttacattcgagaatgtctgaatcgcatctacttaaat

SEQ ID NO: 569990 - DNA, 363 bp, Homo sapiens
ttctggaagtgatatatgtcaaattacattcctactgcaggtatttgagcagggacagtcattttttaaatgtttttggccgggcgtggtggctcatgcctgtaatctcagtacattgggaggccaaggcaggtggatcacctgaggtcaagagttcgaggccagcctggccaacatggtgaaaccctgtctctactaaaaatacaaaaaattggccgggcgtgatggtgggcgcctgtaatcccagccactccagaggctgaggcaggagaatcgcttgaacctgcgaggcagagattgcagtgagccaagatcaagccattgtactccagcctggacaacaagagcgaaactctgtctaaa

SEQ ID NO: 569991 - DNA, 537 bp, Homo sapiens
aacattctgtttcaggtacctgtatgaaattcacgaggatcagctgtctcttactcttaccagtgactattgacctgtcctgatattgagtctcctctcaaacaggaagtagagaaaatcctatgtagctttgttatattactgcctacagaacctaacaaatccacaggtcctaaactaccaaacctgcgttaaaattttcggttgggactgactcggatcagaacccaacctccgagcagtacatgctaagacttcaccagtcaaagcgaactactatactcaattgatccaataacttgaccaacggaacaagttaccctagggataacagcgcaatcctattctagagtccatatcaacaatagggtttacgacctcgatgttggatcaggacatcccgatggtgcagccgctattaaaggttcgtttgttcaacgattaaagtcctacgtgatctgagttcagaccggagtaatccaggtcggtttctatctacttcaaattcctccctgtacgaaaggacacgaatgttca

SEQ ID NO: 569992 - DNA, 124 bp, Homo sapiens
  misc_feature (65)..(65): n is a, c, g, or t
gtggtggtgaagacgctggagcagctggcgcaacaaggcaagatcaaagagaagatgtacggcangcagaagatcctaacaagaggagtacacaccttgatttaaggatggtggcctaagacag

SEQ ID NO: 569993 - DNA, 882 bp, Homo sapiens
  misc_feature (1)..(1): n is a, c, g, or t
  misc_feature (72)..(72): n is a, c, g, or t
  misc_feature (77)..(78): n is a, c, g, or t
  misc_feature (106)..(106): n is a, c, g, or t
  misc_feature (113)..(113): n is a, c, g, or t
  misc_feature (228)..(228): n is a, c, g, or t
  misc_feature (232)..(232): n is a, c, g, or t
  misc_feature (252)..(252): n is a, c, g, or t
  misc_feature (256)..(256): n is a, c, g, or t
  misc_feature (258)..(258): n is a, c, g, or t
  misc_feature (261)..(261): n is a, c, g, or t
nctggccggcaacagagaatcccgttgtgcttgctgtgctggatgaagaaaaggaaggggtggtcggcgcanaaccnnggacgggctggggcaccgcatcatcatnatggcanctgtggcggctgcagcctccgtgccttcctcattgacctccacaaaagacttgtgcacgaccttggacagagacaggtctgtctgggacattccagagaagtctgccttgcccanctcnaatgcatcgggcgtgggcangttncncangacactctccatgtcgtagctttcctctagtttaaaccgcgggagggacacttccacctcctcttcatccatcatgtccagcctcgtgcattctacgaacttctcgtaagtgagttctttctccaccgttctcaagtcaggggtctcgtccggaagcatgatgattatatttcgttccttgccacatatgggagcaccaagattggggtaaatatttctcctatataggggcttcttaaaggggattgcgtaaacatcttttgcacagggttctcctcattctggctggctataaacagggctctcctggggggtctccttggcaaactgggtatcccaggttcctttggaatagaccgcctttccccagaacccagccttgtggagtgggttcacctggaccccggagaagagacactcggaattgtacctttctgggtttgcagctagcccgaggtgttttggggtttctgggactttttgcgggggggtgagggagacgtcgcccttgcgctgtggggaaattgggcggggattgttaaaagaggagggaatacaagaattgtccaaaaggcggttggctacgtggaggaagtgggggccggttggcgaccttgggaa

SEQ ID NO: 569994 - DNA, 213 bp, Homo sapiens
  misc_feature (160)..(160): n is a, c, g, or t
aagatccgtgacttagttggtgactttgttggtgactttgtctgtcgacttctgtctaggaatcattgtacccctctagtgctgtcactggtctttcagtgtcgtagttgtgaaataaatgtgaaatgaggacataacttaatgttttgacatctagttnttgggaatttgattgtgaaaaaaatttggaggcattgaaaatattatatagat

SEQ ID NO: 569995 - DNA, 805 bp, Homo sapiens
tagatagcttttgttcacacaaaagctgaggattttgaataccactccatttagtttctcttctggaggcccaacccacacaatcctaaccactctacctcttaagttgatgccataaccaagtactgtgagacatcattttaatgaagacaaagaaaacatacagaattggaagccctgcctccccaaggcacagacagagtctcctccgtcttacttgggctccaccaaactcaggaagcgtgcaaatactttcatcctgccagcttttctttttaactttgctttcttggctactatggaagatctaactgtggggcgcctccatcaacaatttggaatgatttttgctaacaaagtgacacccagaaaaaaacaacgttcacaattttacacagaaatcagtgacatgcgtggaaagaaaatggaacagaaggtagaaacctgcgttctggaattagactgccggcgtttaaagcttatctctgccactaaccacttatatgatgatagcggaacatagtttatctgtatgtgctactattttctcaaaagtaaaaatgggaagttgcattgtacgtctgcctaactccataatttttgagatcccgatattaaattcgcatccgttatattgtgtactggcccagagccactgcttacttacaatattctcttcttttaaactgtccaagatgtcaacatgcttctttttcatcccatttctttaacccatccatctttcattcctgtgcgatttttatcgcaatccctattacactacgttccttagtatgagtaggct

SEQ ID NO: 569996 - DNA, 929 bp, Homo sapiens
  misc_feature (1)..(1): n is a, c, g, or t
  misc_feature (106)..(106): n is a, c, g, or t
naaagtgtaagcgtttctcgctatcctctttcgccggatgttcgttctctgtcgctgtcgttgtggcgcgtggttgtctccttgctcctgtgtggcgtgctgcggncctcggtccggagtgggacccggtcgcctctccggttacgcgcgccgagttgttatcccccatatggcgtcttccccagtgctgtgccgctcgccgtacccttggtggtgaatccgccgccactctctgttcggacacctttccaggtgccctcgccgcgccccgaacaattgtcccggggttttctccctcttctgtcccgggttgggcggcttccccggttctctcttcccagccaaaatagcaggtgcccgccccgcgccatttgggctcccccgaccccgttcttgtcttcttcaaaggtacccccttcctgttcccgcgggttaaaaaattcccccaccttcttacccagggtttttgcatgctggcgcaccaggaaccgactattccagcacttggggaactcaaacgggcgatggcgccacgattgtggcgaaaggaactgctccctcatgactcacagaggcttgataatcccccgacgttcaaggtcataaaccttcatgagtgctccgaaagtatctacataaactctgtggattttatcctcacaaacccagagagccctcctttcttttccttctcacaccacgcggcccttgtttatcttccactgaggttcatattatccatcctggttctacccccgctccaagacccctctacaaaatgccaacccacactttaccctacgaggaccccgacaggaatacacatgtatggcaagactatgcaaactgcccaaaacccctctttgggcagccccccagggtcccccccgggggggagcatggaggcccctttcaccccccacaaaaca

SEQ ID NO: 569997 - DNA, 490 bp, Homo sapiens
  misc_feature (84)..(84): n is a, c, g, or t
  misc_feature (106)..(106): n is a, c, g, or t
atggcatgtagtgaggacagttttaaagtgaagaatgacatagaagaggaggaaggtttcttgtagaactccagagtggataantgggaggggcaaacagtcaaantagctataaaaaccatttagcaatactaccacctctccctgcattctggttgcataagtcatgacttttcttagaagtctgtttgtgcaatagttttgtatgtttgtacatatgtgaatagccattttctactagtacatccagtattttctgataaaagctgagtcatgattgatcacagttttgaacaccaaaatttcaaacttctgtaagtatcaattttccttcaaaggctaccattgggttatgtttattgtaaggtagtagctaatattaacagctaacagtggcagttgcatacaatgtggcagctgcatacaatgtggcagcctctgtggggaacattttacatattatttcattaattctcatgacaattgccat

SEQ ID NO: 569998 - DNA, 942 bp, Homo sapiens
cacggtagctcggatttctattcaagtgattttggtttgtcctgggcgtgcggaccagttgagggcgagttagttcgagatagtcctgaccgcctgaatgaaatcctgtgtctcactagaaatacaaaaattagggtgggatgatggtggttatatgccatgtagtcgcgagataagttcaggaggctgtaggcgggaaaaatttggcttgaaggccagatgaatgcgtgtaggttggtagtgagctcgtggcggaatcaattgcatctccaagtcttcgggacaacatagggcagattcatgtctcaaagtaagaggagaggaaatgattcatagtgacttatctggaggttgacttggaatgtaagatggaaactatggggtataactcagatggttctacaaatacagtgccatactggtgcggagactcccgtcctggacaggtggggcataccgtgggaattcgtgttagttgatgttcacaatggctttagtttggagtaacttgtcccgtatgggactctgcttcgacctagatggggcaatgtgtaggactagggggtaagctagtccgtatagaaaagaaaagtgcggttagggtcagaagggaaaaaggtacgagagtggcacgcagtagacaatccaggagttgggcgctttttgtgaaccctgattatggccatggggaaacagggatgggaactgagatagggtttatgattgagagatgttgttgtagtgaatcaggagctggtgcgttgggcactgtaaaggaataaggtgggggctagttgaggaaaaaaccaaatgcagttgtgaaacattggacctggtgcggagtacggaaaaggacacagtgggaatggggggggcaaatggggaaggtttggatagtatagcgcattatacgtggataaagtagtaaggagtgatgacaaa

SEQ ID NO: 569999 - DNA, 870 bp, Homo sapiens
gagcgaggggaaaatttcgaatgtggcggggtaggttccaggcgacggggaggtggtacggtcctggagggcccagtggcggggtagccgtggtggagagttcgaagagcctcgaaatgtgaggaggaggaagatagctggtggcagaagtagtggccaaggtatcgttctggacgcgcctgcggcagggagggtcgccgcgtccacttccgcagcccacctcccccccggcttcctggagtccctgaaagaggacgacgtaggcttttaaggcaaaacagatggcaacggaaagatgcctgaaaaagtcctttccaagatagtccttgaagacattaaagaagcgaatgaccagagaaaggaatacaaatttgggcagagatgggaaacgcaggtcttttatagctgaccatgcaaaataatcaccaacatttctacatgctgaaaaaattaccaagacaaccaacaaaaactgtgagttttagcttggcaaatgacaatccaaagttgaagaagccaagaatatcatcctacagtgagaaagaatgttactatctcaatgtcaggtatatgcttgaaggaaaactttactcacaacaaacagtagaactggtcagagcaggaaataggttccttctggaatggacccaatagtgtgacgtccagaaatcatggggaggattaaccgaattctcttgaaaaatgattcccgacacgggatcttccaatgaaatcgatctactttctcagacctggggtggtttgatcacgggggcagtcacggaggttccgaacggttcggcgctctacacatgcgcccttcgcgcgtgggtttgacacctcggggcgcctttccaagttgccccactc

SEQ ID NO: 570000 - DNA, 109 bp, Homo sapiens
tccgcgcccagtttgacgtgcgcttttatctcgtcgccatcctgttcatcatcttcgatctggaagcggcgtttctgtatccctgggccgtgtcggtcttcaaacttgg

SEQ ID NO: 570001 - DNA, 1200 bp, Homo sapiens
accggaagccaccaacatcgggaaagggggcgtagggcgagggatggcgagagagaacagggcaggagagaggatgggaacagggcaggacgagagaataggattaggagaaaggcgatcccttctgggggaaggggcgcgtggagctagtgtgtgtgagtgtgctgtgctgtgcatacggtgtggttgcacggatgctcgcttgcgttctgcgtatctgcgggatgtgatgccttcttgtgtagttgtatgtcctggatgtcagctgtctcgcgttctgcgcgctgcacgtgcatgtccactgctgtctgctgggttgggtctgatgtcctttgtggcttggccgtgtcgtgtccgtgccgttcgccagctgggggtctgtgtcgtacatgttgcgctgtccgctacactggcttctttctgttcgttctctggcacgagctaaacttccatggtcgccagtttgcttatcggcgctggccgttgctgtcatcgctggcgtttgacatgggcccgggtcgccgcttcttctcgagcagggcctacgcgagtcctagggccctgcgtgccaacctgttggctgcttgccgtccatgtgccccagctcggccctttgcgcgggcctgcatcgagcattgctcgtcgtccctggcccaggacgccgttcgtgacgccttcaaggggtggggcgtggggcacggtccggacggcccatcatagactaggtatgcgttccacgatccctgcggtgctggagctgggggccactctccggcgcacgcacctggatagctgcccttgtggccgcttttcatcccctggggccgggggttgcggcgccgcggcgcggccccctggtgcgagcgccctgcaagcgagttgggaggcctgtgggtacttcatgtgccagtgggcacctggttcttggctatgggtatgcggtgccttctcacccttcgaaagacctggccttgcatgccggattgggcgcaagtgggggcacgtggccttgtccttctgggggcaggggcaacgccaggctgcagccctttcgagcctggttgcaatcttggcccgactgcgggggccccttgctctttgaggctcctaccttgcgtcttcttgggaggggaccgccaataagtgtgggctcgggatttcaggcccagggtggcctcctggtccgtccttatattgggc

SEQ ID NO: 570002 - DNA, 207 bp, Homo sapiens
attcgattccattggcaccgtacgttatgtaggcctccctgcccacagtcccggtcctcatgccgcacccagaacttcacgcgtgctgggtccaaggctcgccagagctatagatcagcggacatagagcccaaagcagatagcagctggagggaaggagacgaagtcacactcgtctgctctgccgacgcccattcaacgcctccg

SEQ ID NO: 570003 - DNA, 229 bp, Homo sapiens
ctttctcttttgatgagcttggcctaactcaaacccagttgcaaggactgggtttattcaggtttgccatgttgcccaggctggtctcaaactcctgggctcaagcgatccacctgcctcggcctcccagagtgctgggattacaggcctcccagagtgctgggattacaggtgtgagccactgcacctggccccaaaacaccatatcttggaagtataaagcgttgag

SEQ ID NO: 570004 - DNA, 926 bp, Homo sapiens
cttgaatatagttgtgtaccttgattatctaggtaataattagcaacagttcccttcacaggctgcattgtgcctctactgccacctaagatattacttcccttacaaatctgcctttgaatcatcatcatctaaagaaaatcaacatgttcatgtgttagttatctgtctggggtttcaattcctcagaaacaactttttatcacgaccgcgccaaggaaagaacactagtgttctttcagtaaagtacaaagtgtttattttacaaaagagtaggtactcttgagagcaattcaaatcatgctgacaaggatactgatagcaaaagtgatttcttcttcattataaagtacatttacaagttcactggactaaccttatttatttgggacaggggaggaggaacggaaatgatatggtacccagacactgggctaggctgcaactttatctcatttaatactcccagctgtcatgtgagaaagaaagcaggctaggcatgtgaaatcactttcatggattattcatggcttaagagggcatcaatcagctcaactcaagatttcataatcattaagtattgtagattgtgcctcaaagttgtacgtacctcacaatacctccactgggtttcctggttgggtaaaaacctttcagtgagttttgaccaattgatgctctggggtctggggcctgggagttccggtgtgagggaggtaaccactagacagttctttggtacaacccctggtcttgtgtccccgggtgattcctacaccagtggtggtgtatttctcctaaaggggctaccatacccagggttaagatgacattgcgtcatgttaaagtgcggaactagtactaagaggaaggcccccggacatagtgggtgaacacgtgtagacaccggcgcgagaaaacatgga

SEQ ID NO: 570005 - DNA, 276 bp, Homo sapiens
aggtattaaaaatgtgttgttggtttccaaaaaggaaccctggaaaataaattttgaatgtttatgttctcagaatcaggttgacagtcccttgctgacagggctttgctttgggtaaaaacagtggatctcaattttcggggtgtgatgaaaagcgaatcatttcaaatccttgagccctcagtttagtgaaaatgttgtcattatggccaaaacaaaactagtttaattaactatgggatgttaactattattaataaattttaacattttcca

SEQ ID NO: 570006 - DNA, 361 bp, Homo sapiens
aatcgaagatgcatgtcacgaagatgagtataaccactcactacacggccaatgcactgaacctgaaatcacacagaggcactcagacaccattgaacgaacaagccgttttttactactatagacacaatggtgaaaaaacaacgcataaactgacaaaagaacactaattaggcaccaaagctagacacaatcacacaactctggtatgaccaacatcatccacagggcaattgagcatggagaccaaacaaaacagactactctcatcataatacacaaaacatatagagcgtacactactagggcacaaacgacactatccaccagataacacacacgcacaagcactcatatgacg

SEQ ID NO: 570007 - DNA, 153 bp, Homo sapiens
cgctgatgacccgccgcgtcctcgccctcatcgtcggattggccctctacggtgcgggagatgctctcgcgatccgcgccggtctgggagtcgatccgtggacagccttcgcgcagggcctctccctgcacacgggcatcggtgtcatcagcg

SEQ ID NO: 570008 - DNA, 453 bp, Homo sapiens
attcggcacagaggagagaactcccctacagcccagagatgtggcagggctcagagaagcagccagagctcctggaggaaaggcagtcgggactgaccccctctcttaaaacacattcccgcccgccacagcctgaggtctgggacctttccctcccaggagtcccctaggtggctgggggaggcaggccactggccattttccctggagtccagcacactgcagaggtcggagaggattcgccaccctaagcttcctcagcccctgcctggtcccagcctcagtgcctcttggccaggcagagtcgtggttgcaaagacattaggtgctgctgtggctgggagacagggacaatggggaaaagttaaggagcaaaatgggggttggaagcaaaaaatagggccccacctatttaggacgagattgaagactgacccttgaggcacacttgca

SEQ ID NO: 570009 - DNA, 745 bp, Homo sapiens
  misc_feature (653)..(653): n is a, c, g, or t
gtgagtgctacatgaattttagtcatgtactgtggcgactatatgataagccaaaagtaggagtctcacactttagtttcaaattgtgtgctgttcattgagtaagatttcttaacaatgagatcgccctctttctggctaaactgtcatagtatataagcccattgaaattgacttttatgcctcttttccttgtttgttttttgttcaaccgggttaagaacttttgtttgctttctcatttttaccccgtggctgagaggagggcctcaactctcccgggaaatactttagtacaagggcagaaaagaattgtattgctgtagatggaagtagaagataccgaagagctgtgtggtgacgaggatgtttcggtcatgttgatacagtaaggggctgcagggtccaggggcttggatttaccttaacttgttatgtttgagaaggaggatctgttctggtggggggaagagatgtgaagccacgtgattgggggcaagacgaatgtaagagaggacgctgtgagcatatgagatgtggatcccatgggcagggtgccttgggaggggccgggtgcctggagagtgtgttctgccttggttcttgacgcgaggatctcattatcctgtggacgccgtcaggatgctgatgtncgggctggtggtggtggggtcggccttgtatcgccgccttgggggcggttgcggcaagatgttggttgagcccagggtgttgggtccatcgg

SEQ ID NO: 570010 - DNA, 368 bp, Homo sapiens
acctggggccctaagtttatgaggaaaaaaatagacaggattcataaagagatatcaaagcacgattttacgatacctaaactggcccatcttattacgaatgttgattatagtctctcgagtgtcggttaaagattgctgttcttgggagtcttgaggtcttgtgagttgatttcctgctttctttcagtttgtttcaatttaagttataatacattgtgtcatatccctgttccgggtgttggtaagctatttggacaattttatgggaacatgtgcattctctatgtgagcttctatcatattcctgtataattagcagaacctaaaggaatttatttaatgatgttgtgacattactgcttttt

SEQ ID NO: 570011 - DNA, 396 bp, Homo sapiens
cgaatggtggttcctgagaggactctgatgggagtagatgcacactgagaaggcatgtgcattgaggctctctatcgcaagtgatagctctgaacggagacaattctcggtcgggcgcggtggtcacgcctgtaatcccagcaccttgtggaggcgtcgggctcccaaaggaagtgaggataaggcaggaggataacgaggtcaggagatcgcgaccattctgacaaacacggtgaaaccccttctctactaaaaatacaaaaaaaaatagccgggtgtggtggcacgcgcctgtaatcccagccactcaggaggctgaggcacaagaatcgcttggacccaggaggcagaggttgcagtgcgcagagatcacaccagtgcactccagccttgaac

SEQ ID NO: 570012 - DNA, 388 bp, Homo sapiens
acagtaaattcatgtggcttgggacgtgacacactataaggtcacatcaagagaccgagatgacctcgtctcagtgtgagccctagcgggccccttcaccaccccctccgccctgccccggacacaagggtctgcattgcgtccatttcaagaggtggcccaggacgcgtgcagcccaggctcctgctgttcttgggcaagatgagactgttcccccaaatcccatccttctccctccaacttggatgaaacccacctggagacgcagtacacgtacaggctcttccactgtggaatcttgggccagtcagtaacgagcctcagtttcctcacctgcaaaacgggtacagcattcctgtatgatagctcacgccgtcccaaagcacag

SEQ ID NO: 570013 - DNA, 580 bp, Homo sapiens
  misc_feature (345)..(345): n is a, c, g, or t
tcatcctatggagaaaggcacagaccacagactgtttctgtgattctgtcttttcttataggcaggtccttaactttggcaaaataaacttctaaattgattgagatcagtctcagatagttttggtttacactgtttaaagatttcctttttttttttacctgcttcagcctcctgaataactgggattacaggcgcccgccaccatgcctggctaatttggggtttttagtagagacggaagtttcaccatgtgggccgggctagtctcgaactcctgcctcaggtaatcctcctgcctcgtgcttccaaagtgctgggattacaggcatgagccgccgcgcncggccaggaacctttatatggtacaatgaattccagcctgaaaattccccaagttctgagcctttacttcatacatatttacccaaatatatcaattattatattaaccttagcacatgaagaatggctgtcagatttataatgactaaagtcagtttgcttattttccttcaagcgttattaaaccgtactcctctttaagcaagtttgggggtcactaggtacctatgtgatt

SEQ ID NO: 570014 - DNA, 118 bp, Homo sapiens
  misc_feature (118)..(118): n is a, c, g, or t
ggatggcggaggtgcaggtcctggtgcttaatggtcgaggccatctccttggccgaccttggcaaaatcaaatgctaaacaggtacttcttcggccggcaggttggtggtccgtacgn

SEQ ID NO: 570015 - DNA, 343 bp, Homo sapiens
tgttccgggcaggcatatagcgagactctgtatcatcaactttttaaaacttagctaggcatggcagcacagacctgtagtcccagttactcaggaagccaaagcaagaggatcacttgagcccaggagttcaaagctgcagttagctatgaccacaccgctgcactccagcatggacaacagagcgagactctgcttaaaaaaaaaaaaagaaagatggattatacttcagttggagaaatattcaaaataactaatttaaatacctaaatattggcccattggtgctactttaccacacaacatgtacggtatgttagtatggatatatatgggcctcccg

SEQ ID NO: 570016 - DNA, 365 bp, Homo sapiens
  misc_feature (137)..(137): n is a, c, g, or t
  misc_feature (190)..(190): n is a, c, g, or t
  misc_feature (331)..(331): n is a, c, g, or t
gaggttcgttgagcccaggagtttgagagcagtttgagcaacacagggagaccctgtctctcccaaaaaataaaaataaaaaaataattagcctgtggtacatgcctgtggtcccaggtacttgggagactgaggtnggaggatcgtggctacagtgagctctcatcacgccaccacactccagccttgnaacagagtgagaccctatcttttttttttttttttttgagacagagtctcaaacaaacaaaaaagaatgatattgtgggttcatgcctgtaatcccagaaatactggaggccaagggtgggaggttcgttgagcccaggantttgagagcatgttttgagcaacacagggagacc

SEQ ID NO: 570017 - DNA, 329 bp, Homo sapiens
gggtcgttatgacgttcggtaggtacttgttacacactccttagcggattcctgatttccatggccaccgtccttgtctgtctatttttatcccccaaatttctggggtctgatgagcgtcggcatcgggcgccttaacccggcgttcggttcatcccgcagcgccagttctgcttaccaaaagtggcccactaggcactcgcattccacgcccggctccacgccagcgagccgggcttcttacccatttaaagtttgagaataggttgagatcgtttcggccccaagacctctaataattcgctttaccggataaaactgcgtggcgg

SEQ ID NO: 570018 - DNA, 797 bp, Homo sapiens
  misc_feature (257)..(257): n is a, c, g, or t
  misc_feature (340)..(341): n is a, c, g, or t
  misc_feature (350)..(351): n is a, c, g, or t
  misc_feature (353)..(353): n is a, c, g, or t
  misc_feature (356)..(356): n is a, c, g, or t
  misc_feature (364)..(364): n is a, c, g, or t
  misc_feature (375)..(376): n is a, c, g, or t
  misc_feature (413)..(414): n is a, c, g, or t
  misc_feature (424)..(425): n is a, c, g, or t
  misc_feature (429)..(430): n is a, c, g, or t
  misc_feature (449)..(449): n is a, c, g, or t
  misc_feature (476)..(477): n is a, c, g, or t
  misc_feature (479)..(480): n is a, c, g, or t
  misc_feature (526)..(526): n is a, c, g, or t
  misc_feature (579)..(579): n is a, c, g, or t
  misc_feature (594)..(595): n is a, c, g, or t
  misc_feature (598)..(598): n is a, c, g, or t
  misc_feature (616)..(616): n is a, c, g, or t
gccggctctccgcgcggccggggaaggtcagcgccgtaatggcgttcttggcgtcgggaccctacctgacccatcagcaaaaggtgttgcggctttataagcgggcgctacgccacctcgagtcgtggtgcgtccagagagacaaataccgatactttgcttgtctgatgagagcccggtttgaagaacataatgaatgaaaaggatatggctgaaggccacccagtcgtgctgaatggaggccgagtgaagaattnctggtaccgtcagcatccacagccatacatcttccctgactctcctggggggcacctcctatgagagatatcgattgctacannggtccctannantgntgcttatnatgactggcannccttctgagaaggcaatgtatcctgattactttgccnngagagaacanntggnngaaactgcggagggaaagnctgggaacgagaggttaagcagctgcnngnnggaaacgccacctggtggtcctttaactgaagctttgcccccgtcncgaaaggaaggtgatttgcccccatgtggtggtatattgtgaccagaccccgngagcggcccatgtannaangagagagacctcatcttnctgcttgcaagtgaaatatgttacaggaacatgcacttgcccttagataagaactccgggtgaaagtgctccacaagagaactaactcagcgcatacaaaagccccgggggcactttctgtgtagggggccggcgaacatcggtacacacgtggcagggtgcaaaccagtgttccgtgccg

SEQ ID NO: 570019 - DNA, 871 bp, Homo sapiens
  misc_feature (331)..(331): n is a, c, g, or t
  misc_feature (414)..(415): n is a, c, g, or t
  misc_feature (424)..(425): n is a, c, g, or t
  misc_feature (427)..(427): n is a, c, g, or t
  misc_feature (430)..(430): n is a, c, g, or t
  misc_feature (438)..(438): n is a, c, g, or t
  misc_feature (449)..(450): n is a, c, g, or t
  misc_feature (487)..(488): n is a, c, g, or t
  misc_feature (498)..(499): n is a, c, g, or t
  misc_feature (503)..(504): n is a, c, g, or t
  misc_feature (523)..(523): n is a, c, g, or t
  misc_feature (550)..(551): n is a, c, g, or t
  misc_feature (553)..(554): n is a, c, g, or t
  misc_feature (600)..(600): n is a, c, g, or t
  misc_feature (653)..(653): n is a, c, g, or t
  misc_feature (668)..(669): n is a, c, g, or t
  misc_feature (672)..(672): n is a, c, g, or t
  misc_feature (690)..(690): n is a, c, g, or t
gaaggacatgatgaactgatgaataactgaactgaatgtgattggactccgtatttggagagtagtaagacgtgcaatagagatatacagttgtattaaagcaccatggccttaatgattcactgatgggacgcgatcttcgtcccatcagcaaaaggtgttgcggctttataagcgggcgctacgccacctcgagtcgtggtgcgtccagagagacaaataccgatactttgcttgtctgatgagagcccggtttgaagaacataatgaatgaaaaggatatggctgaaggccacccagtcgtgctgaatggaggccgagtgaagaattnctggtaccgtcagcatccacagccatacatcttccctgactctcctggggggcacctcctatgagagatatcgattgctacannggtccctannantgntgcttatnatgactggcannccttctgagaaggcaatgtatcctgattactttgccnngagagaacanntggnngaaactgcggagggaaagnctgggaacgagaggttaagcagctgcnngnnggaaacgccacctggtggtcctttaactgaagctttgcccccgtcncgaaaggaaggtgatttgcccccatgtggtggtatattgtgaccagaccccgngagcggcccatgtannaangagagagacctcatcttnctgcttgcaagtgaaatatgttacaggaacatgcacttgcccttagataagaactccgggtgaaagtgctccacaagagaactaactcagcgcatacaaaagccccgggggcactttctgtgtagggggccggcgaacatcggtacacacgtggcagggtgcaaaccagtgttccgtgccg

SEQ ID NO: 570020 - DNA, 820 bp, Homo sapiens
  misc_feature (280)..(280): n is a, c, g, or t
  misc_feature (363)..(364): n is a, c, g, or t
  misc_feature (373)..(374): n is a, c, g, or t
  misc_feature (376)..(376): n is a, c, g, or t
  misc_feature (379)..(379): n is a, c, g, or t
  misc_feature (387)..(387): n is a, c, g, or t
  misc_feature (398)..(399): n is a, c, g, or t
  misc_feature (436)..(437): n is a, c, g, or t
  misc_feature (447)..(448): n is a, c, g, or t
  misc_feature (452)..(453): n is a, c, g, or t
  misc_feature (472)..(472): n is a, c, g, or t
  misc_feature (499)..(500): n is a, c, g, or t
  misc_feature (502)..(503): n is a, c, g, or t
  misc_feature (549)..(549): n is a, c, g, or t
  misc_feature (602)..(602): n is a, c, g, or t
  misc_feature (617)..(618): n is a, c, g, or t
  misc_feature (621)..(621): n is a, c, g, or t
  misc_feature (639)..(639): n is a, c, g, or t
ccggtaccgaactcttcgtcccatcaggatatatacattgatttgttggttatctgatggagcaagatgggacgaagatggcgcagtcttctcccatcagcaaaaggtgttgcggctttataagcgggcgctacgccacctcgagtcgtggtgcgtccagagagacaaataccgatactttgcttgtctgatgagagcccggtttgaagaacataatgaatgaaaaggatatggctgaaggccacccagtcgtgctgaatggaggccgagtgaagaattnctggtaccgtcagcatccacagccatacatcttccctgactctcctggggggcacctcctatgagagatatcgattgctacannggtccctannantgntgcttatnatgactggcannccttctgagaaggcaatgtatcctgattactttgccnngagagaacanntggnngaaactgcggagggaaagnctgggaacgagaggttaagcagctgcnngnnggaaacgccacctggtggtcctttaactgaagctttgcccccgtcncgaaaggaaggtgatttgcccccatgtggtggtatattgtgaccagaccccgngagcggcccatgtannaangagagagacctcatcttnctgcttgcaagtgaaatatgttacaggaacatgcacttgcccttagataagaactccgggtgaaagtgctccacaagagaactaactcagcgcatacaaaagccccgggggcactttctgtgtagggggccggcgaacatcggtacacacgtggcagggtgcaaaccagtgttccgtgccg

SEQ ID NO: 570021 - DNA, 356 bp, Homo sapiens
  misc_feature (44)..(44): n is a, c, g, or t
  misc_feature (105)..(105): n is a, c, g, or t
  misc_feature (353)..(353): n is a, c, g, or t
aaccaaagaaatttaaatgttccattgccccttgttcctgtccnagattaccctgtttgaagcccgtaagcctacttgtgcccaacttggtgttgtaaatagcancccatggacccagtcgtggtggcttatgccctgtaatctcaacacttggggaaagccaaggcaggcggatcacttgaggtcaggagtttgagaccagcctggccaacgtggtgaaaccctgtctctactaaaaatacaaaaaaaaaattggctggatgtggtggtgcgtgtctgtagtcccagctactcaggaggtggagattgtagtgagctgagattgccgttacactccagcctgagctacagangtg

SEQ ID NO: 570022 - DNA, 129 bp, Homo sapiens
attttttgttttttcaggttttactgatgaggcttgggaggccaatcaaaaaaatgtttgtgatttttaccactgttgattttgcccccggagccaactgaataaagcccccagattgaaaaaaaaaaa

SEQ ID NO: 570023 - DNA, 468 bp, Homo sapiens
  misc_feature (54)..(54): n is a, c, g, or t
  misc_feature (80)..(80): n is a, c, g, or t
  misc_feature (96)..(96): n is a, c, g, or t
  misc_feature (127)..(127): n is a, c, g, or t
  misc_feature (164)..(164): n is a, c, g, or t
  misc_feature (189)..(189): n is a, c, g, or t
  misc_feature (201)..(201): n is a, c, g, or t
  misc_feature (227)..(227): n is a, c, g, or t
  misc_feature (250)..(250): n is a, c, g, or t
  misc_feature (253)..(253): n is a, c, g, or t
  misc_feature (319)..(319): n is a, c, g, or t
  misc_feature (338)..(338): n is a, c, g, or t
  misc_feature (406)..(406): n is a, c, g, or t
  misc_feature (451)..(451): n is a, c, g, or t
ccgccctgcccctcggttctgctcggctggcccctggctctttcttgaaggaancccgtcaatggggggaaaggtccttnaaaatgaatgctcaanctgtggggcgggcctctaaaaatgccccaanactttgggggtctcaaaaaatggaacccccgttgtanaggggttgggtgggggttgcaggantccactcaaaancctcctgatgtcaaggacaggcgganagggctggcctcccccagtcccnaanccccactgtgccttgttgtctgctggggggccatagctgcactgcccaccgtaaaggccctcgcanattttcccccttcctgtanacctcggggccagcatcctcaccttcttcaactgaccagtcgtggttactccctgctgccaggtcctntcccttcccgggggtattctgtgaccatgaataaagttatcaaantctttctctttcaaaaa

SEQ ID NO: 570024 - DNA, 292 bp, Homo sapiens
gtctagagggcatccccagtactgtcgacagggttgcttggcgtgtattgcgtattattacgtcacatggttctaaagtgagagaaaatctagtatgagacccagtggaacttcgtggcacagacacacacatcttcttaaatctattcaattagggaggtgaataaccggagactcagtcagtaggccctaccatcctgaacgccattaagacactgtatttcgtgagggacttaattcgtagggacttgtgggttgatttttaggtacactggattagttgtctttcgta

SEQ ID NO: 570025 - DNA, 540 bp, Homo sapiens
  misc_feature (33)..(33): n is a, c, g, or t
  misc_feature (74)..(74): n is a, c, g, or t
  misc_feature (79)..(79): n is a, c, g, or t
  misc_feature (96)..(96): n is a, c, g, or t
  misc_feature (102)..(102): n is a, c, g, or t
  misc_feature (105)..(105): n is a, c, g, or t
  misc_feature (109)..(109): n is a, c, g, or t
  misc_feature (115)..(115): n is a, c, g, or t
  misc_feature (124)..(124): n is a, c, g, or t
  misc_feature (136)..(136): n is a, c, g, or t
  misc_feature (149)..(149): n is a, c, g, or t
  misc_feature (153)..(153): n is a, c, g, or t
  misc_feature (216)..(216): n is a, c, g, or t
  misc_feature (234)..(234): n is a, c, g, or t
  misc_feature (240)..(240): n is a, c, g, or t
  misc_feature (259)..(259): n is a, c, g, or t
  misc_feature (269)..(269): n is a, c, g, or t
  misc_feature (271)..(272): n is a, c, g, or t
  misc_feature (276)..(276): n is a, c, g, or t
  misc_feature (280)..(280): n is a, c, g, or t
  misc_feature (324)..(324): n is a, c, g, or t
  misc_feature (442)..(442): n is a, c, g, or t
  misc_feature (449)..(449): n is a, c, g, or t
  misc_feature (476)..(476): n is a, c, g, or t
  misc_feature (478)..(478): n is a, c, g, or t
  misc_feature (533)..(533): n is a, c, g, or t
gggggaatggatagggggggggggggggggggngaaactgacacagaaaagagagaggagagaggtttggggcnggggngagaagccagccagagngggggnggnaggngatagnggggggggngggggccaaggnggggccacaggangagngggctcctccccccagaatacaaaattggggggactgacaggggcggtcctgggcctgggggncggggaagagatgggcgntgtggnggggctgaggtcagtagtnggtttccttntnnaccnaacnccctgggttcctgcgcaggatgagtttgcggatttcgtcgtagnaagggatgaggaaactgtaggggaaggcacagaaccaccagctgggcttgagagggtacatgcgcagggccacgtccatgccggggcagttggacaggaaggcagccagggccgtctnctcaaanagcccgaagatcaggatcttgttcttnangccctgctggaagaccgagttcctccgggtcttgcagatgatcagatcggcccantggacga

SEQ ID NO: 570026 - DNA, 1077 bp, Homo sapiens
ggcggcgggcggaggctgggccggaggggtggggactggcgacggaggtggaggcctggcgctccgctccgctccagctcggtttcatgtccctgccatggctgaaggatgacttcctgctggcactacacagtgtctggaccccaggactcaccccaagggctacacctgagtacaaagtaacctgcgcagttcatctcaaatgaatggacccatgagtgatgtcaaagcaggtggtggtctggaagcggtacagcgacttcctgcaaagctgcatggagacctgtgcctacagcccaccggcaacctcttccagcctgcctcgaggagttcccttgctttccccctgtggccccaggtgtttgcgccgggtttgagagccttcagtgatccgaggcagctgggcgacaatggcgggcagcatggaccttgcttcggtttcacgtgtgcacattaccattgcagctcgaagcaacaagccaccacagcctccacagggaggaaccttccagggggatggagagatggtagaccctgagccccttggggaagggtaggtcccatgggggaaccctttacaacaattcctttgggacaaaaccgccttcatggaatccccgcaaagcacacgggacaccactcgaatagacatcgcacgttgagagtaatccccgaaagtcgatcccacttttcctagacaaattacgtccatacagcagtggcacatctgagcagagaaaaatttgggaccaggtgttgcccaacgcattgagatatcctagcctataaacacaatattccatgccaccttggccccaaatagggaagcggcacaattcgaaacctagatactaccattattaaacaccatagacagcaaagtaagcaaccctgtaaagtgccagaggaccactctcgtgggatcagcacccattgtgaccccgtgagtggtaccaccctatttataacaaccggtatgtgcactagtatcgtgttctgtactccattcaagcttagggatcgacccacacattcctctgccacaatagcataacaccaacgcggacacccaacgag

SEQ ID NO: 570027 - DNA, 155 bp, Homo sapiens
cagcagcagctgcgggttgacccaggactgcgtgtgagtttgtgacttgtttggtgggagagcagaggtggacgcggcgagagccctacagagaagctggctggtaggacccgcagagaccagctgaccaggcttgtgctcagtcgaacggactg

SEQ ID NO: 570028 - DNA, 144 bp, Homo sapiens
actgggaataatctctgaaacagtctcatgcgtggcaggggacatttatcttttttaatgatcatcaacacgagtgtcttttggtagctatataagtgatttttacctccgttctattaatatcctcttgcatgtatgttttgc

SEQ ID NO: 570029 - DNA, 171 bp, Homo sapiens
  misc_feature (21)..(21): n is a, c, g, or t
  misc_feature (57)..(57): n is a, c, g, or t
  misc_feature (147)..(147): n is a, c, g, or t
caaggtagtttcataccgttntcataacctaaattgtcatcgcataaactgtttcanctcctacagctctggacaggctgcttttaattttggtgagtccatccagtacctccacgtgccctgtttttttccagggacatccttggnctcttccacagtccttgggtaaat

SEQ ID NO: 570030 - DNA, 142 bp, Homo sapiens
tagcgaccaagcagttataagactcacggtgaaggctatgcaaagcccaaatgagggtgctatcgtggaggttgcactggaatggtactacaaggacaagctctttgaccagcgggagttcgttttgagattggcgaggggg

SEQ ID NO: 570031 - DNA, 149 bp, Homo sapiens
actggagctcgccaccctgttttggaatgaacaaggcggttttgcttgcctagcacttctgaagatagtatagctcttcatcggtgtcattgatcacgtcgtcagaacacgtctactgagaggggacaatcactggcaaacacaaaagg

SEQ ID NO: 570032 - DNA, 503 bp, Homo sapiens
  misc_feature (393)..(396): n is a, c, g, or t
  misc_feature (406)..(406): n is a, c, g, or t
cctgccgcatcagggctttatttaacagttttattgatataattcacatcacatacaattctcccattgaaagtgtacaattcaatggcttttagcacattcgcaaagttcacccgcatcaataatagaacaattgttattaaccccaaagaaaacccagggccccaaaaacaattaacccccaattcttttcatgggggcctttttcaaatttttaaagggtaaggagaccgggggttttttaaaaactctttcccccatcaaaaggggggaaaaacgcgggagaaaatttttgagataccccaaaaacaccgggctttccccccagtttttttttttcttaaaaccccttttttaaacccacaaaagggccccccccctctcttttttttnnnnaactattcantctacatttcttgaggaagactggaggggctgttccgtgacctgtctcagggctgaatttgttcctcaatttcttttggcatgtattatttttctat

SEQ ID NO: 570033 - DNA, 383 bp, Homo sapiens
gctgggcgttgctgtgtgccacggctgttgtcccataccctcatcttttaatcttcatggttaaccctattaaggctgtctcgttgactcccattttatactaaggaagttgatgttctgaacgggtttcggtctcatgacccccatgtgttaaatcatggattcggtccagctttgtctatctccgaagctagtaccctttccatgcattctacccatatgctctcttccctgttgatgttgtttatagcctggatcttcttcttggtaagttttgatcgggctgactgacctttaaattttgcttaaacagtcaatcgaagatctctgatctatgctggcctaccatggtcctgttctgcagccccacttggtcgatggtg

SEQ ID NO: 570034 - DNA, 481 bp, Homo sapiens
ggggagactgggaaggtcctcagcctttcagcaccatgcggacgagctttttatagttgatacaacctttgttgtcttcatgccctgccaccagcatctttactttttcctctggcatcttttcacccagtgtgacaagaacatgccggatttcagcacccatgacggggccttttccttctttgtcaaacacccgaagtccttcgccttaattctcataggtggccctgggccttgttcttggccactgtttgcagcatgggcagaaaaggctcaaaatccaccccctttccatttattttatatattttttggggttccccaggaccttaaccccctcggcgttggtagggtttttgcccaggggcccttataatttcccacactgggttgccaggatttttcccttaaccttgtttggttaacaaagcgggaaggcctccttaaaccttttgggtcggtttttcgggaaaaaacacca

SEQ ID NO: 570035 - DNA, 208 bp, Homo sapiens
ggtccatacagcgcgtctgcgtggactggctaagagatcatctcaggagctgaattattgctgatatcttaatcaggatgcacagaattatcatgcctggacagcatcgacaatgggtaatgtcaggaattgtaaactattgtggatacatgacgctgcagatatgtcggaccagacttctgtacacgaggatgtgacgaaagtatat

SEQ ID NO: 570036 - DNA, 848 bp, Homo sapiens
ggaagagagtaccggtatcgggtttccttgcggatcaagtttcattaccgtgtacctttcccatgtgtggtcacgccatttggcagggggagaatggggaggcttggccttcttgtgtgatggcagtgtgagcagaatgaagctgatgccagcatgtcactggttttgaaggggatgagcccagacttgatgtgttgggattgtccttattgttaagcctcaaggtctcgcatggtgtgggcccctgtaccaagctacagcaagttccctcccagcaagtggacatcagtgtcttctctgtgaggcatctggccattcgcactccctggtgtgtgtcagtctctctcacacaaggaggaacttgggtgacaggctgagtgtgaggcacctgaagtttccctgcggaggtcgataagattagcagtaacacactatccgccatctgttaggccttggtgaggaggccctgggcataagcaagggtctgttcgcatcagcgattgtccagagggcggttttgacgctattctataagctatagcgtttgtgtatttcacccgttcactttactgtataatttaaaagtcattgtatgtagactgagacacttctgtgagtctcaatcattatcactgaacccttttagtttagctaaatctatgtgtcatgtgtaggctgcaatatgtggtacactcgtgtttaagagaaaaactgaaaccaaaatggcgcattttcctgactcaccttctgccgtgggatgggccagggaacatacttctaggcaagcagcctaaactggtgatcgggggcagatacaaggaacagtatgaagctcccagcggttcgca

SEQ ID NO: 570037 - DNA, 470 bp, Homo sapiens
gattgtgtgtgtgtgtgtgtgtgtgtgtgtgtgtgtgtgtgtgtgtggctacatgtgtttatgctaactataaggatccccagaagcttaaaataaaatcctcaagggtctaaggtaatatctcagtcagagatatatttgctttataagacataggacctgggttcagtagttcagtctccaaaacacaattgatgaaagccaggcttggtgatacatattgccatccatctaggtgctggggtgggatagacagctgggtcccaagagtacattgagaagcctgtttgattcagcctacttggtgatctccagacaaaattagagagtgtgtgtcatgaaacaaagctagtggcccctgaggagcagcagtatggcttcctgtggcttgtctgtactcatctgtacatgcacgcatactcacaaggatatgcacacctttgcagatataaatgaaaaagaaaagaaag

SEQ ID NO: 570038 - DNA, 1083 bp, Homo sapiens
agtctccagcagatccctccagagcagccagaagcccccatgtctaccccccgagagccctgccctcatgcctcgaaccagagcctggcaggcctccccctcagtgccttagccccacaccatggttcgtcccgacaccacaccgagtccctgcagctgctcactgggagggggtcagggaaacggggccaggaggggagagaggcggcacttacgcgcgcatcactggtcgaggccaggcacagcccgggggacgaaagactgcgacaacgacacgcagacacactgcgacgcaacagggacccctcaccaacgtgaccgcggacaaccgactgggcgcgcctacaaaatgcgcccaacaatcagcaaacgggctccccccaaaccgaaagaacccccacaaaccaatagcgaccagcactaacacggcacaaagccaagacaccagacaccgcccggtcgcccagacgaccccaacgcggctaccagcacaaaacatcaaacggcgggaacaaccaataacactgaacagcgcgacccaaaaacacacgttgaacgccacacgggaagacggatcaagaccacgacaaccagcacccgccgtacagcagagcacccgcgaaccgcgaccacacacaatcagaacaaggcacatcacaccccaccggcaacccaaaccagccagccacagcaagccacgaagacaacaagcagcaacaaacggcaaaccacaccgaggagaaaacgacaaaagagcagcagccataaacacaggacacacagaaagacaacaggagagtgagaccacaagcaatggacccatccaccaacggaggaaccaacacggacacaacaagacaccaggaaggcaaggagagtgaccaacaaccaaacaaacggtaagagagaacaacatcgggaaacaacaaaccaaagagcaagcccacccgcaaaagcagaggagaaaagaagtctggaggaaagtacaatcggaaaaacaacagtagaaacatatgcagacagaacaaagcacagcaaagacaacagcctagacgtacaagacgacgaagtagcgcgagaaca

SEQ ID NO: 570039 - DNA, 186 bp, Homo sapiens
caggcggtaccgtctcatctctgaagtccaggactggtggaggacaaggccaggcttacttgagcccaggagtccaagactagcgtgggcgacatagcaagaccctgtcactacagaaaatttataattaggtacacattgtgatgagcatctgttgtcctagctctatcccaggctgaagccata

SEQ ID NO: 570040 - DNA, 157 bp, Homo sapiens
tgagctggtaccttggttcacaactcttcatccacttgtgtggctgcattcatagctgcatccacctcctccacagtggcatatgtgacaaacccaaagcccctggagcgcctggtgtttgaatctctcattaccacacagtccagaattgccccga

SEQ ID NO: 570041 - DNA, 192 bp, Homo sapiens
ttggctctggtggtaactccctccctgtggtcccagatactcggaaggctgaggtggaaggatccttgtgcccccagggagttctgggctgtagtgcgctaatgcggaatcgggtgtccgcactaagttcggcatcaaatattggtgacctcccccgggagcgggggaccaccaggttgtctaaggaggagt

SEQ ID NO: 570042 - DNA, 118 bp, Homo sapiens
tcttagttaagagctaatagaaaggctaggaccaaacctatgggtctgctgagattcctggtgcagggctcttgggggaaggagcatgggggctcaggtcaaacataccctgaggtta

SEQ ID NO: 570043 - DNA, 119 bp, Homo sapiens
ctccctcagttcaggcgtgcttggccagagagccattgtcaaccgcagagatgctgttgaaactcaagtccctcttagccaaattattcagtcctttcaggctagctgaatcatctcaa

SEQ ID NO: 570044 - DNA, 975 bp, Homo sapiens
gtagaaaaacgggagggaaggaagaaggaagatgaatccagttgctacacaaccccaccggggccctgggttcacataacacaagtagcacaggctaaacagggctcctatcaccacacaggggtggcatttcagagtgctggtgccagtgcccaaagcctgttagtaggctcacagagaaaaaccacagtatctactggttagctttactgtgctgataccactcctggttctagatggaactaaaatgaacttgcctaaatcctccttccctagaggtctctttaacatgttcatcagggttatggtttaggatcatcatggttacctaagcatcttcctaagagaagttagtgatcttagtcctatagcaacaacaacaagagaaaggtgagtgtattgtggctcaccatagaaaacgcctccctcctaaatataaacgaagagaatcttttctaacacatcagggaatatgctgatcttttacacatattagaatagtgaaagcaacagtagcaggcaaacacacagtggaatataatatagagcaatataatctataaaatgttaacaatcatgacaagaggagctgcttttcaatgttaggctcacaatgtcctaattatcaggtacctaacagagacaatggaaaagacaaaataaagtttaccaaggaaaggagaccaagagtttggaaacatggtgccaaggtttgagagaagggaataatgacattaaaaacaggaaaatagggctgggcgtggtggctcatgcccccagcactttgggaggcagaggtgggtggatcacttgaggtcaggagttcgagagcagcctggccaacgtggtgaaaccccgtctctactaaaaatacaaaaattagctgggcatgatggcaggtgcctgtaatcccagctactcaggaggctgaggcaggagaatcacttgaaccaacgaggtggaggttgcagtgag

SEQ ID NO: 570045 - DNA, 126 bp, Homo sapiens
cgctaatccctgcagagcacagtgacgggcactgaacgtggagaggcagcccttcctgctcccagaggatggcacctgaagcccagtgaagcctggtcaccatgacaatgtacgcccgcaaagatg

SEQ ID NO: 570046 - DNA, 1799 bp, Homo sapiens
ggtgatgtctcacagaaagttctccgacacccagacatggtgtccctcgagacttcctgcctcggacagctgcagcagcaggcatcagtggtgaaggtgaagagcttccctaagtgatgaccctgtccaagcctgtgtccacctcacagccttcctgtggataccaaggctggcatgactctacatctgtgctgggaagtcgaccagtgcctggtgcatccaataggtgcaacacagcacatggcaggttgtgttgtgcagtgcttgttgcacccacttggttaacagacaaccaacaccacatgtggtgcgctaagatgggcgcatactgttgggtgctcacgattggcaaacaaccactctcagtgccctccagcgcaccgttcccacagcaactggtctatttgcgttgcagccaccatctcagatgcatgccacttgcgacagtcagggctggtattacttcatacacagcacaattggggccatcagagatcatccaagcacagcaatgtgcccattctacaacccacacgttcactttgccgaagaaggaacacacataaggaggagcaaggagacttagaaacgcggaactcggcgcgccacaaggaccagggccacgcacgttcggcagagacacaggggacacctgttccaaggcacgcaggagcacgtacgagcacggcgaacggtaacgcactgagcaaaaacgggatccgacaatgcacgggaggcacccgcatagtagggccccacacacgacgcgcccaacggacgtcggcagggcccagctgccaacgaccctatacgatcgcgagcggcacatcaggcaacacgacacacgtgggcacctcacacccacgatcgggacgaggggacaagaacgtcccacgagatggtgagcacacaccggaggagcacggcgaccccccctggagtggggccagcccaggcacgaggcacaaagacacatggaggagcctagtggtgacgccaccgacggaccagacagggaactgacgctatcggaaagagcaagcagcgagaaggaggtcaacgacctgttgagttgagcacacgaccaccacaacgtactgggtcacagggacgcgcacaagggacccgcaacgaattgaaacaccacgacacagggtacgcaactacaggcagagggaactgccacccccagagcggtgatcaacagacgcgacgctaccgaacacaagtcgaggtaccacaccaacaggacaacaggaacggagacaccccacagaccagaagggaacgcagacatgaccccccgacagacaacagcgaccacaaacggtaagagagcccaatgacgacacccagagcagtggcccacgtgtaccaatcgggcagcacagtggacaccacagtgcaacccgaggctaaacaccaatcacacagtcatgacacgacagcactagtggacaagaccaatgggctaccacatcacacacggcaaccgtgcgaacacaaccgacaggagccgacatacaccactgaacagggccacaacgagacccaatatacccaggacacggccacagaagacacacacacacagacggccacgcgcataccctcaacgtacaaaggcgcacaccaccactggcgacggaggtacacaatcaagacagccaccaaccagcgacacgcgaaccgatcgtgcgcccaacagacggcacaaccacaaccaacgatcagcccacgagccaccaccagaaaagaaaaaagcgaacaacgagacagaacacagcaacaacacagac

SEQ ID NO: 570047 - DNA, 775 bp, Homo sapiens
tgaaattcgtgaaagggcaaatcgggggtgtggaaaaagctggccgcactgccgaacaaatggcaggcagctcaagtgatggagcttctggtcattccggaaggtcagcgtgtatcagcactggaacagttgaaaaaaggccctgttacagtcagtggacctgcgttgaatgaagcgctggaacgatatatccgattacgaagtcttgagttttcccgactgaacttttccggtctgcctgccattcaactgcgtaatctggctcgttatgctggcatggcgtcggtaaaatatatcgctcgaatgccacagcagagaaagcttgctgtacttactgcattcgttaaagcacaggaaataacggcattagacgatgccgttgatgtgcttgatatgctaattctggacattatccgcgaagcaaagaaaagcgggcaaaaaaaaagactcaggcaccactgaaagatcttgatcaggccgcattgttactggcgcgggcatgtgcattgttgctggatgataatacagatgtcccagatctcaggcaggttatcttcaagtgcgtacccaaaaaccagactggagaatctgtaaagcaaggttaatgaacttgctcgtccacagaacaatattttccatgacgaaatggttgagcagacggtcgggttaaaccgtttcttccggccggtgttgcgggacctgcatttccgtgcggcaccggcaggtgaccatgtactggtgcgattcattatctggcagaactgaatgggttcga

SEQ ID NO: 570048 - DNA, 179 bp, Homo sapiens
gtttttttttaaaaaattgggccccgcgggggggcccccccccgtaatcccccccctttggggggcccaaccccataaatccccttggggccggggttttagaccccactggcccccccccctgagtcccctttccccccccgtttttttttttttttataaaaactgttccgggttta

SEQ ID NO: 570049 - DNA, 294 bp, Homo sapiens
caccctcctaacgttctagtgaggactaattgaggtaaaatatgtgaagcacttgccccaaagtatgaggcaaaagtgaatacatgtgactatcaataataaagatcttcgcgtgaatgtgcactaatattatggaacacccccaggaacttacctgggaaaaataagccccaaaccaaccctccctgggggctacaaaaaatcttggggcagggaaacaaagtccccggacaccagattatttcctgtagcacacctgcattaactataattatttaactgcctcattttatg

SEQ ID NO: 570050 - DNA, 426 bp, Homo sapiens
tcttctgtgtgtgttgttggtgtgttggcttacgctgtaatcccagtactttgggaggcgaggcaggcagatcacgaagtcaggagttcaagacccgcctgaccaacgtgatgaaaccccgtctctactaaaaatagaaaaattagcttggtatggtggcacgtgcctataatcccagctactcaggaggctgaggtaggagaatcgcttggacctgggaggcagaggttgcagtgagctgagaccgcgccactgcactctagcctgggtgacagagcgagactccgtctcgaaaaaaaaaaaaaaaggattttcgtctctgggtatttctcacaggaaggcccaggcgtttggatttgccctacggtctcagtgaactccccacctgtttctctcacagtctacttggtccacctctcaacacag

SEQ ID NO: 570051 - DNA, 300 bp, Homo sapiens
acggatcgcttccccgaggcaggactctgccattacgctgcggtcggtgccagaggttttccggaccctggcatggtgctttcatggtctggggcttttatgagcccccgcgtgtggcttacacattccacagcatacagctgcaggccacgctcaggtcctgcgtgcgggccagcaagttctggaaaccacgtggtgtcccctgccaatggggcgatcaagtgcagagcctggacactttcagagtttgaaaggtaactaatagcagcacgtcctccagttacaactccggcgatgcat

SEQ ID NO: 570052 - DNA, 360 bp, Homo sapiens
aaaattttggccttttaaatattaaggttaaaaaaaccccgtatctaaaattgattttgttaacggttgtcttaaaactaaaggttttaaagtataaaattaaaatttgccattttttttaaaaaattccaatttttattttcatgggggaaattggaaaaaatttttttttttgcctctggagtttaaagtttccctatggaaataagttttgtgattcccgtaaaaaaggggtatgttttttatttgaaagttaaaccctttgaaagttaaaacctttagttttaaacccccctatgtataaaaacttttgggttaatttttgctttgtccttaataaaatttaaaaaaattccctta

SEQ ID NO: 570053 - DNA, 155 bp, Homo sapiens
agtgtgcggcccatacagtaaattctcgagtcaaatggggtgaacatgtggtgtctacatacatactggcacaaaatcatttctccaagctataaatacacgggtaataattctctaaaactggccaaaacaacttagaacccactgtctaaatt

SEQ ID NO: 570054 - DNA, 1084 bp, Homo sapiens
  misc_feature (808)..(808): n is a, c, g, or t
gcaaccggcgtgggcggacgctgtggggtacctaaccatagggtatgatagatcaaacaggaacctgttgcttctgaggtgcaactaggataatgacgaatagagtagcaagacaggatcacttggtgtactcctcatggaggctgacgtgggtatgagccgagattcctcttccagctgtggtcccctaggcatcaagcatgccatggtgcagtcagaagtctacgatcgccccacaacacaaccaatgtactcatgagagaagactgtgctcgtgcaacatgtaccgaccttgaagcaatgagaatggggataatggcagagacggaggaggcagacccaatcttcaaatcagcttgcaaccatgacatcctagatctgatatgcacgcatctagaaaccttaggtgaggtttgacacgatgttggaaacccattagaataatgaacaacgttgaatccatgaacagtcgaggcatctagaggaggcccaacatataggtgatcgcacgcgtctgagcgttccctactctcctagggcggaaagaggcccacacatagacctagaaatgagaggattgactacaggtgtacattcaccaggcgactggattgccagaaacactcaatatggatcctctggatggggctttacaacaggaaatctgctccttaactagaataatccttaagaccactgtggctaggtcccaacgtccgtaaacaacattgctacatttgcactgggtgaacccaaacctcttggcttgaccaaataatgactattgaggaccatgccctagtgtaanacgttggtatgctaagcataccccagaaaccaggggtttacagcggaactcactagcgttcaaagaagagtcacagcctatcaaaatgccaaaacggagaggcggaggcgcaaattaaagccatactggcacaaccaagagtgtagaaaaactgcagatgaatgaaaatatcaagagatcacatctaggtccgaggagacaaacaggatactcacatttctctcgtcactgtgttctattatcgcacaaacagacacaaccaaaaagcagctaaaa

SEQ ID NO: 570055 - DNA, 100 bp, Homo sapiens
cccctgccaaatgttaatgtagtgggtggtcatctacaaaagataccagcctataacaattttagtgggagttcttacagtctagttgtacttataagca

SEQ ID NO: 570056 - DNA, 103 bp, Homo sapiens
atggcgacaacgcgctgggctctggcgcggaccaggacctttctcacccacgtatcacccatagagacactcacagcaagcagcaaccggggaaaaggacgaa

SEQ ID NO: 570057 - DNA, 1321 bp, Homo sapiens
gaattggcccggagcaggagcatggcgtcgtcggggtcggtgcagcagctgcccctggtgctgctgatgttgctgttggcgagtgcggcacgggccagactctacttccgctcgggccagacttgctaccatcccattcgcggggaccagctggctctgctggggcgcaggacttatcctcggccgcatgagtacctgtccccagcggatctccccaagaattgggactggagaaatgtgaacggtgtcaactatgccagcgtcaccaggaaccagcacatcccacagtactgtggttcctgctgggcccacggcagcaccagtgccatggcagaccgaatcaacatcaagaggaaaggtgcatggccctccatcctgctgtccgtacagaatgtcattgactgtggcaatgctggctcttgtgaagggggcaatgaccttccggtgtgggagtatgcccacaagcatggcatccccgatgagacctgcaacaactaccaggccaaggaccaagactgtgacaagtttaaccagtgtgggacctgcactgaattcaaagagtgtcacaccatccagaattacaccctctggagagtgggtgattacggctccctgtccgggagggagaagatgatggccgagatctatgccaatggtcccatcagctgcgggataatggcaacagagatgatgtctaactacactgggggcatctatgctgagcaccaggaccaggccgttatcaaccacatcatctctgtagctggctggggtgtcagcaacgatggcatcgagtactggattgtccgaaattcatggggcgaaccctggggtgagaaaggctggatgaggatcgtgaccagcacctacaagggaggcacaggtgacagctacaaccttgccatcgagagtgcctgcacatttggggaccccattgtttaggtagatgtctctggaagcagcgctgtgaaccatgacagggaggggtgattaattactgacactggacatgtccagacagctataaacagtgcttgtggacatgaggaccagagtgtggactgcatcccgagaggagacggtaaaggatgaaacacaactgcactgggaccctccgccgtaccctccaggcctgcctcctccaccacttgagccctccaggcctgcctcctcttctacagtgcttgccttcagccacccggagaagagagctatggtttaggacagctcaacttatcaccagatctggagccctggaatccatgggaggggggaacaagtccagactgcttaagaaatgagtaaaatatctggcttccca

SEQ ID NO: 570058 - DNA, 222 bp, Homo sapiens
cacctatgggaaacggaggagacgaagacgagaatcaatccttgaaagagagatgggcattaagtgaacatgctgaacacttataatcttaactactaagcaggaagcctcatccttgcacagaactgaagaggaagtagtatgaaaagagaggcatgctgtcgaccccggagtgagccagctactagcctatatgaaattgagatgctctacacaacacag

SEQ ID NO: 570059 - DNA, 1490 bp, Homo sapiens
  misc_feature (1121)..(1121): n is a, c, g, or t
tcaggcttccgggtcttaaatgggggcgggggctgggggcagttcatccaaagttgtgttccaaagctagaggtcaacctttgggggtgggcttctgcagggcaaagggagatggtaacgcggcccgtcaggctgggggagatcttgaaacggctggaatgtgaagagccccatgtggttggcagccacagtctcaaagagtctgagaggaagaagtcttcctctgggcccaagtcacccgagaagtctttcaaaccacgaggcgaggcgctctggggcgcccaaggcgaaaaagcttggcattgggcctctctggtgtgggcgcctctcttgggcagagggcggcggggttcctccaggtgtggcgccggaggacccccagggacgtctgggttgggggccccacttctgggttatcctctggccccagccccttggggccgggcgcctccgggagaccctccgggggtcacggcacccggcctaaattcccaggggggctcttacacacagagggctctccggttgaggctctcagatacgcgagagatctgggagatactactgggcccctgtgtgtgtggctctcagagtacaagttttagtccccacaacacaagatactcggctttggaggcctattctcccaaatgttagtggctcctggagggttgagccccccccacgatggtgtccccaaaccttgtgtcccccgtgtcgtcccagtgagcccttccttccgggggcccaaccacattctgtggtctcccgggaaagaacgtccggggcgctcccacttcgggcgtctagagacccccggtctggtctccacccacgaggtcattttgggcgcgcgttgggtgtacgcccgactcccatctgtgacaattgcacccacaacgaaccaaagcctcgcggcgactgcaaagggaagctgtagaaggcgttgtaggcaatctgtagtgggcccgtccaaggtaaatttcgcaaaaagagacctcaggggtacagcggtgttgcggcacggtttcacaccacctatgtctgtggtaactcgttgtggtccgccgtgttcgaaaagaaaaccaccgcgtgtgtgtgggaagacgaggctaaatgangtgcaacagcgcaccttcggtatcggtgagccacaaaagacgaccaccgtccaacaaacgagggtcagacacgaagactccggcgtggacaacaaaacgaggggcgcaatttcaccactctgtccgagaagcccctattaagttctcgacaacaaaggcgaggagaggcgccctaacaaatcatctgcaagagacatcacattcgtgggccaacatgatcctcacgcaagccaccatcaggagaagcggggagtctcaaattaccgcagctgataatttgatctccttcgtagacacacacttcatcaaatcagtaagtaggaatggtcattatgcctcttcgatggctacatgtttagtactatcggt

SEQ ID NO: 570060 - DNA, 1308 bp, Homo sapiens
gggatccctgagctcggcagcagcgcagcgggccggcccagctgctggtgccgctggaggctctgagtccccggcggcgcccgggtccatcgcggaacgtacggggcgagatgcgagccgagccctctggctgctcctgtcgtggttcccgtgctccatggatgggataggcggttgtgatgttggatgacacacttagataccgatgtcgtcccgtccagtaaacgagctcgaaagtgggccccagtcccaagaactggcaccgcacactgtgcgtgatttgcgcgccgtgcatggcccgaggcatagcatgctcgcgagaatgcgctgtcaagctgcttggtgtgacgcagctgcgctaccccgtctatggggccccctattgtcctccctgggaagtcccggaggagggcgggcggggcctatccagggcaccgtgggcactggccacccttagcaggggcgactgtagtgtataccctgtagaagggctgtgtactccccggaatcccgaggacaggcccttgggacccggattgtgctgccaagacaccacgtaattgcgtgcgggccatgaccccccggtcaccgaaagcacaatggtggcctccgtgaccccaacttgaagggtcccctggtggcttcgtgggaacccacaaagctttcccttccataaactggcccattgctctgccagacttcgtgggaacccccaatgtggcgcgagaacccacttggccagcaagagggccgtagagggatggcagaaaagcgcacggcacaacccaggtaagttcgcccttgaatggcgcttggaaggtggctttgcaccggtagcccgtcttattccaggccaatgaagtggggccccaccccggagcacttgtgggcggccactttgtcgaacctaggagcaaccgggctcttgggtttcccattggccggttggaattccttctaaagggctttgggtatccaggcgattgggggtcgtttcaggcgttgcaccctggtggatgacggggaagacacggccctggtatgctgggaaaggacacccttgggaagcgccgaacgtccactggacgagttgcctgggaccttggggggaccgataaagggcaatctccgccgtgtgtggggaaacaaaagtggaacgcgcgttggcccccagggccctcacaggatgggaggaaaaccctgcagaaatacgtgcggctcacacggggccttcaaatactcgggtgacaaggggtaccccggatgttcatgggaggacctggggcggttgaggcgctcttccaccag

SEQ ID NO: 570061 - DNA, 704 bp, Homo sapiens
gcccagtgtattgctgtctgtagaccccagcactgacgtccggaggacttttggataaagacttacaaaaagtagcccactctatccacagagcggtagagctgaccctgcagatccagagcgacactggtgtcagagccaccctgaaagagttcatggagagactggcaggggataagtaccagacgaccgagcaggctctccgcaaggaggttgagagcttcgactctctctttcatatgcactgcctgcctgacttctaaaggagcgcgcccactctgaacccacctggcgccacagaggaagctggctgacggaggacccccacctgagagatggatgagctgctccaaatgggaactgataacactcaggccctttgagggaggtgattttggacttttatcatgtactattgacagatcaaaatttgactaagcctcattgttagaaattctgggacaggctattaaaggatttaaatttgaacctggctttctcacagctggacatacttctaggtgctgaaagaaagacggagccgtttactctacctgagctttcctccggcttgctgaacagagaggaaatgcccatgtccacaggtgtgacacactgaaccttactatcttgattccagtgcatgccaaggagaactgattacctctgaggtttagtgcaatcgaagcgatgttagccaaggc

SEQ ID NO: 570062 - DNA, 331 bp, Homo sapiens
  misc_feature (323)..(323): n is a, c, g, or t
tgtagaatcagacaggaggggagagagaaacccacacataaacaatgcactaaagatcactgaagcgtttaaacatttccacttgccagtttaactttcttgaagactgtagctcgtttggaactgtctctcgtccactgcattttaacggttgcatctgagaaaagactaataggcttcagtcaccctcccaccaccaggcaatgaacaacaaagcattttaccgtaaaaatacaccagcaagaatgtactcagcgttcaatcacaacatacgacgtgcttaaacactgcaggaaatttccgtcaacacgtcagccgtttantgcactca

SEQ ID NO: 570063 - DNA, 1306 bp, Homo sapiens
tttaggggttaccacaaaggctattgggtttgattattataattttaaacaaacatacatagggaaatagtaaaggttcctaatggaaaaaagacctaacggcaatagtattctctgcagcatagaagaccaccgtgtttccaaactatcaagggttagggcttggaaacataacccgtggtaaattatctccagcgggctagctagtcaggcatatggggtgccacacatgtggtcatcacagagggtgacttcatttattggccatatatcacgcacaagtgcagcggctatatcactatttgtggcagtgtaattttacacatcccagaatgtgcctcaacaaagctcatggctccatctctccacggggacagccttctatgtgttccaatacacaacacaatctagtgtgactacacactccaataggtggaaacagtgggtggccgtggtggggcaatccctatagatagcagaggctcccagtggcactgcaagggctgtgaaaacataccttagaactccctgggcgcgaacatatcaagggggttaaatgggacgccaaacggggtctatgagacacaataagcgtcacagagaacgctcaccaagatcatacccaaaaggcaacatcatacagctgataaccaccagaatacagagttcccaagaaggacaatttaccatacaaccctcagtgggacacacaactggcgacaacaactggcaccaggccccgggggaaccctccggggctggccatataggcgaaggaaacgccgaaactcaacaaaatcaacggactacatgcgacaggggagaccacacggagacccccccgcgacccaccacggacggcaactcaaagcccggcgacaaacaccaggagacccccatggaaatcctcacgacaaccggggagcgaagacaaaaactgcacaggcaacagacccccccaaaacaaccgggggcaacaccgcaccccgaaacaacacgacaggcacaaaacaggaaacaacagagtaaaaacaggataccaccacatgcgcacagcggcaaaaagaccggcacagcggggaaaaccggcaaacgcctatcaggagcaacacacgggagcaacgcccacgacggaagccgccgcagaaggacaacgacgaagacacaaaaagcgggtacagtcacaagcaacggatctgggacgaagcgcaagcagggcaatcaacagagacagaaacaaccagaccggaggagcaaccccgggagccaccgcaacggcagacgcgatggagcgaccacgagcgaa

SEQ ID NO: 570064 - DNA, 106 bp, Homo sapiens
gaattctgtgactgtcgcagacacggccgtgtattactgtgccagaggaaagtacggtgaagggactcgacgctggggccagggaaccctggtcaccgtctcctca

SEQ ID NO: 570065 - DNA, 164 bp, Homo sapiens
accaccccttccgccggctccatgttaagagagggcggaatcgaaccccccaaagctggtttcaagccaaccccatggcctccatgactttttcaaaaaaaaaaaaaaaaaaaaaaaaaaaaaaaaaaaaaaaaaaaaaaaaaaaaaaaaaaaaaaaaaaaaaa

SEQ ID NO: 570066 - DNA, 313 bp, Homo sapiens
  misc_feature (1)..(1): n is a, c, g, or t
  misc_feature (21)..(21): n is a, c, g, or t
  misc_feature (32)..(32): n is a, c, g, or t
  misc_feature (58)..(58): n is a, c, g, or t
  misc_feature (67)..(67): n is a, c, g, or t
  misc_feature (74)..(74): n is a, c, g, or t
  misc_feature (79)..(79): n is a, c, g, or t
  misc_feature (91)..(91): n is a, c, g, or t
  misc_feature (105)..(105): n is a, c, g, or t
  misc_feature (111)..(111): n is a, c, g, or t
  misc_feature (114)..(114): n is a, c, g, or t
  misc_feature (121)..(121): n is a, c, g, or t
  misc_feature (152)..(152): n is a, c, g, or t
  misc_feature (265)..(265): n is a, c, g, or t
  misc_feature (294)..(294): n is a, c, g, or t
  misc_feature (310)..(310): n is a, c, g, or t
ngaagcgcccaccaccaaccngacgtgttttnattgcgtgctggttcctccagtgagncggttctgngactgcnctccntggccagtgttncgtcatccaggggntcgtgntanggctaangaggtaagtaaagggctctgggccgcaccanaaaaatccgggggtggataggatgcttgggccgagagggctcgaagcgagaacagggacgcgccctgcgaaaagggcgctctttgcgcgccgggaccaggcctttcctcgctnccaaacggcctcgcgcggggcgggagctncttcgtgttcctcttnggg

SEQ ID NO: 570067 - DNA, 316 bp, Homo sapiens
tttcagacgcttcagctaactcctgatcaagctttacaaattgcagtcttctactcaagctcccatccgtagtgcacatgagctagactctcacacgatccagttagagacgtagcaacatatctagcacatcacgctcctcgactagactatcatcattctgtcgtagcccagtgagatccagctcataaccatactgttcccgctctcagaacttcccccctcccactccccaccatgtgaccaggaccctcccaaccgccgctccgagctccaccaatcagcaaccacctccacccagaacccgggacctggc

SEQ ID NO: 570068 - DNA, 130 bp, Homo sapiens
ttcgcaaaggagtcatcacctcatgagctcccatctgcctagcgatacctccgctacacactccagccttaagtctcttggagaagctggtgctgtgagccagaggatgtcagctgccaattgtgttttc

SEQ ID NO: 570069 - DNA, 172 bp, Homo sapiens
tacatatcgatcgagctctcccatcttatgcgtgcctagggtggcgacgctaactcagacgttacgttcagtgtgactggggtgcgagcacgtcactagggggagcgcttcccagccacatccatcgtggctcgttgctggctggtgtcctggctgtcctagctcctaggag

SEQ ID NO: 570070 - DNA, 464 bp, Homo sapiens
atagctgactcttgaggataaaccttatgctctgacccaccaattagtgaaagtagctgtcaccgtgtgagctatcgacacaaagtgaactaggaggcaaatttatatccatcaggggcagggaatgcaccaactttttaagttcaggctatcttgaaagcttgcaacataccagatattgctatgttgtctctcacgacagcaatggatgacactgagaagttgtgttttgagtagcaggtgttttctatagtatgttgctggaaatcaagaggtttataaaacatggtacatgtttggaaatgagttagatacttgaaaagtctaaacacactgatttaggagtgcttatgttgctgtctcaatgaacaatgggtcaatagttcatatggactaaattaatctctgggtagcacgtatgtgtgtaaatataaaattatattagacattagcaccagtgcaga

SEQ ID NO: 570071 - DNA, 220 bp, Homo sapiens
agctgcactcagtgcgcacttccgtgagcgaggcagcacccgggcccggctctcacccgacggcgtgcacccacctgcccgctctgtgggaagaccttactcgtgcacatacacactagcagaggcacgagcggacacactcgggtgcgaagccctatacgtgtgtgcagtgtggcaaacagttttcagtactcccacaacctgagccggcacaccgtag

SEQ ID NO: 570072 - DNA, 146 bp, Homo sapiens
tgtgtgtgtgttgtgaggggtgtgtgtgcctgtgcacatggtgggtgtgctgattgtgtggtgtttgtgtgcagtgtatgcatgtgcatatggtgtgtgtgcagtgtgtgtggtgtctgttgtgtgtgtgtgcacaatgagtgtat

SEQ ID NO: 570073 - DNA, 338 bp, Homo sapiens
ctggtccaggagcacaacgtgccacgagtggaggatccgggtgaaccgcaggagctggtagaagatgaagcgcacgtgaacgtcctgcagcagaccgccctaccgaatgactgcgttcaggtcagtgtctacacagagggtgcgcactgcagtcgagggtggggggctggggggacaacctggggggagtgggagaggggcacctggcaggtctgtcccactttgaaccagcccacggcctggccgccccgctcctccatcctgtgcactgcctgtgggcacagcggtgaggtctgcaggagttttaacactttatttcatgttgcctttgtttcata

SEQ ID NO: 570074 - DNA, 496 bp, Homo sapiens
  misc_feature (354)..(354): n is a, c, g, or t
  misc_feature (382)..(382): n is a, c, g, or t
gtcaccttctgactcctgttgggtgcggcatgacccaagtgcagcgcaggccatctgcaggcaccagcgacagacgctgcaaggggtgcttcgtttcagcgttaatgccgctcaagttatcgtttgtcctgagaggtgctcccatgtcgtggtgctgagacctcctctgaagatgggtctttattcctcctgtaacctacctctaacagtccacccagctctgctttaaactgtatgtagaagaggcccatttccagaagcccctggaatggaggagacaggggctgaagcagactcatctgtgcatgactagttcattaggagttcagttttttttttttttttggggggccnggaaaaaaaaaaaaaaaaatttattttntaggaggatttttttgtaaggaggatgctcctaaaaccatgggcaaccaaatacataaagtggggctttcttttccccttgtaacagtgttttactttatagatttatttaaag

SEQ ID NO: 570075 - DNA, 141 bp, Homo sapiens
gtcatcttgctacagaagatataataataataagaaaccaaactacaatctcagaaaagcactagcaacttagactgacatactaaaggccaaaaataccctccgtgacacacatgctaataatgtgtagaacattgaact

SEQ ID NO: 570076 - DNA, 169 bp, Homo sapiens
atatagactgtacttttcagacaggacttttcagaagcaggaaatttagttgtcgccagagaggtgtgtcaggaccccgtgaaaggagccatgcggacatggggtcaagggcttggtccacatgttacaaacttttgtaatgagcaaacatctttacaatcttataatc

SEQ ID NO: 570077 - DNA, 966 bp, Homo sapiens
  misc_feature (173)..(173): n is a, c, g, or t
  misc_feature (204)..(204): n is a, c, g, or t
agcggggctacgacgggccgtcaggcggggatacagtctggaacgtgcgtgtggggctgggtctcggagtgggagacgtggagttgcatcgtaatgcatggttgtccaatgcgttacagcacgagttcgacgagaagggtgtagatagagtgacgaacgacgcaggtgaccgntgtgcctgtgtgggtcgctttgacctggtgnggccgtccctggcgcccgtacagcgggggactcctacggggtggcacatgtacgcaaatgccgcatccaatcgagccatagtacgagtcccaccaaccgcaggtcgagggctaggagcggaccagtgtctggaggagacctgagccccagcttgctacgcatgacaggtagagcccgggacttggtggcaagcaactggcgcagacatccccagactagcaagtagggcgggagccgtccccagggaagggtctcggttgccccctgctttacctgtcctgctggaccaatgctggcaactgggtacacaggtatatcactgagtgctctcagtgggaaaacgtcatatgtaacgacactgagggtgcgagaaagaatccagacgggactaacgagaaccaatctataggttcattggaggtagacctagtagataagagcaaggaaggatatttaatctcgagggtgtgattgacgttgcttcgaacctccatttccctttggtaaggcgaggttttaagaaatgaggattggccgtataattcctagagaatagttagccacttttagacaagacttagatatggaggtgaacgcgaagaaagtcacgggggaagacacggcggcgacacaatagaatttacatcgccaaacaagttaataattgagggcaatttttgaatggacattgggaagaatgttcgctttggggaaaaaaagataattaggaggaaactctggctagaggggttataggggttg

SEQ ID NO: 570078 - DNA, 470 bp, Homo sapiens
  misc_feature (87)..(87): n is a, c, g, or t
tgtcacgtcctctatgcatgacttattaaatattcccctgcagcttcatttcagatcacgggtgtttcctccttgacctggagcgtnctgtactaattcactcctgtcctcaccgaaaacagcggtactggaggaatcaaccccatgcccgccagtcaccgggttgtttgaggtcatggattaatacagctgaagatcctctgtcccgtacgtatcgggtagcacgagaaacttactgtagttttagttttaacatttctcccataggtgactttaaactttcatttcttgaaaatggggttccaataagaaaaacttggcctggttgcgcagggatcaccaccccgcagcagacggcgcgcgctggccttggcggggcgggcgagagcggccttaggcgttcactcccctggcctgcctgcgctccactcgaacccagctttttcttgggcgagtatgctaagggccga

SEQ ID NO: 570079 - DNA, 230 bp, Homo sapiens
atctagagatccccagcggccgcctatttttaactatatttgtctgttaactggtggtgaactttagtcttttaacaattttcagactatgaagtttggatgtatacacctctaatgtgggacattagttttttttaaagtatctgtatggagttatggatatatattaatttaatgtgttgaatctgttttattttagtaacatcttttgaaaatgttcaaacatatat

SEQ ID NO: 570080 - DNA, 864 bp, Homo sapiens
attccccgcccccttctgttgttaggaggcaaacaattgtttgcccccccgctgtcggaaaggatgtaccgcacgtgtcccctctgtaactgctccgcttccacctctgaggggaggtcaacatattgggggctgcgcgcgccttccttccactcaaccgattggcgagacatggccgcctccttgctcccgcgtagctctgggtcgtctgagctctgtcgtgctttcgtgctcgatcttcttctgtctctccccgtcccgcccacacttgtgagaaaatgtgttagtgacatatataaatgagaaaacctccccacctgcttcatgtcacatcttccgagattctctctcgtgcctccccataactatatttctctcccctagatgttccccccccccctaatccctctggcagcgcccctagcatgcaacgcctgtgcccacatgtcttcactcctctctgtttaagagagacaaggagggtcagaagatatcttctcctgttgtctactcgtagacgtaatacaatatgctttctctacgcctctcttctcaaaacatctgtttcaatgttattaacagagtcgtccgccccgcccccctctcgagaagtaatcattccgtcggacgcactggcgcttactatcagccgtctcatgagtagttgtgatttccggagtgctctctctctcatgggttaagatgacaacattgggtggtgcaagaataacgtggtgtgtctattgtcattagtgcccccgcccctattatggtaggacttgtctgacaggaattttctgccccctcctttttcctcttcccaccagtatcataggattctaagaaaaaaaccccaacaaaaca

SEQ ID NO: 570081 - DNA, 349 bp, Homo sapiens
tgagaaggtcaggtttggtcaacaaattgagtcccaagaaacctttgggtttccagagcttttatagattttgggaatggtgggaacaagattttaaacctgtgcgggggcgcggtggctcatgcctgtaatcccagcacttggggaggctgaggcaggcggattacctgaagtcaggagttcaagaccagcctgaccaacatggagaaaccccgtctctactaaaaatacaaaattagccgggcgtggtggtgcatgcctgtaatcccagctactgggggggctgaggcaggagaatcgctagaaccggggaggcggaggcggcggtgagccaagatcgcaccatggc

SEQ ID NO: 570082 - DNA, 926 bp, Homo sapiens
ggcgcttcttgtgcttgcctggtgtcggtgtgttagttgctgcgacttgtgttggagactgctgatagtgaagatgtctctcacgtgaaatgctcaaatttggggcaccctggcccactaaatgctaaagaccatcagtctgtttatgtgcaggatgtgctcagttagagaatgatatcatgtcctggtcttgactatcgagagaggcaccaatcatgtccgtgttctattctatttatcgcctctatgacgtgtcaccatttgtgatgccgccacggagatgcatagctttcagctgatgagggcagagatacattaatgaaactcaactgccaggctggagtaggtgtctatctgtgaggatctctgtccacctttcatggtcagtctaaagcgaatggtggtcagatacaaccgttaagaatgacaaagggcagtgtactgaggacccacttgatccatttccctcttgggatgatcaggaacccggaaagacggcgaccatctggcatcaggactctagtgggcgctcgtaaaacagcgctggagtgacgggcatctcggctagcaggaggccctcttgtgaatcatgttggagtgataccggggtatacctccgcgccaagatcacggtcacaatagaggcctcctcctggtagagccagcatcggggaggaatgaagaactcttgtagtagctatgcttcacgtgcgctttgccgggttcacttgagcaagagcatgggcgaacttgtagcccacgctaggcgtgggactagcttggtgggttggattagcatgcaatgcctgagtgtccacgaatgagccccagaaatatttcctccaaggcagtaaagtgagcgccgggcttgggccaggtgccaggctgcgggggggcagccatgacaacaagacccttccggcgtg

SEQ ID NO: 570083 - DNA, 100 bp, Homo sapiens
tgcactcaccacctctggtagttccagacactccacgccacctggtcctctcccatcgccgcaaaagggggggcacgagggacgagcttagctgagctgg

SEQ ID NO: 570084 - DNA, 436 bp, Homo sapiens
aattggttcaatgcgtacagatgtttaaaacgcagcaaacaagattaaccactctataaaaatacctagtggcgccaactagtggtgttgggaagtagattatcttcctcggagatcatatagtggtactatagtgcaaagactgaaaactaacaataaacataatcctaatgtggatttatcataatgtcaatcagatggaatctttgactggcttttacaatagagggcagtttcattacactggcatactttgcataccaggtaagtacagaaacccttttcaagatttaaaaaatggagcaacactagtcagcatttggtaccgtgaatataatacacctactgaaaatcttcccatacatcatgaaaacttggaagtaatttgtatagcttgaaatgtcttcattttagaatattatgcacaaaatccccg

SEQ ID NO: 570085 - DNA, 105 bp, Homo sapiens
ggtggatgcaagtgttgcaaaaccagaccagcgtcgagttatcagtacgacggtggttttgcggaatatatgatcgtcccgcccgcaagtactcaaggtagacgg

SEQ ID NO: 570086 - DNA, 336 bp, Homo sapiens
gagatgggaataggccagattgcaaatgtcctttagacaaaactgggcacattctaaatcacacagatacttgtattgggagtgaaaacttttgcaaagagccagttggttcagaacatcacaggcaaaggtgaaaaaatggatgactttttcatccactaaggatttatgtaaacaatgtatagataagactgtctcatatccagaagagatttcacctgcaactcctaatatgcagagactagaacaccgtaaatacatctctagtaggtaacagagcctcaaaaaccattcaagctgaacatgagggcagtttggtgtcttacaaagcccact

SEQ ID NO: 570087 - DNA, 138 bp, Homo sapiens
taggctgtggaagacgggtaggctgaggaagacgggtaggctgtggaagacgggtaggctgtgcaagacggtgatggacgagctctccgcgcggcgaacctcacagccatcgtgaccaggcctggcacagagacctga

SEQ ID NO: 570088 - DNA, 301 bp, Homo sapiens
ggcagacactgaccttcagcgcctcggtccagcgccatggcgcctccaggaagttcttcgtgggggaaactggaagatgaacgggcggaagcagagtctgggggagctcatcggattctgaacgcggccaaggtgcggccgacaaccgaggtggtttgtgctccccctatgctatatctgacttcgcccggaagaagctagatcccaagatgggctgtggttgcgcagaattgctacaacagtggctaagtggggcttttactggggagatcagccctggcatgatcaaaagatgcggagc

SEQ ID NO: 570089 - DNA, 1926 bp, Homo sapiens
cgtgcaggggtaggcacaccagcgggtggcgctcagtgatgtatcagcgttcgtcttgtgtcgaggcgcccccgtaggtcgtccggcgcgtttttccgcggttcgtcgccgtcaccgctttaagggagatgcgtggctcttcgtggtgttgtgcttcataggtgtggggggttctatcgtgtttgctggctgatctcctcctcttacggtcgggctttccgccacatgttttgtgggctttgtttgttgtagacttgttctttttgtaaagtgtctgttcgtgtgttcgacactcctatgtggcccttctgggatggaagtggcgtgctgatttcgattggtgtgtctgctgtggggcccgccacgacggcgccgcgaggatagtaggtgtggggccgtcgctcgctcgtctctcgtgccaccccgatggctgtgggctgtgatgtctcttgtctggccggcggaacgccccgttgtgcccgcccggggcgtgtccctgctttgtggggagatagcgatgcctggcgttgattaaagggttggttcttgcgaaaatgtgtcgtagcatgcgccccgcgagccccccgggggtttaagttgggccccgccccaccacgccgtcgtcttgggatgggggatgttctcctaccgttcgttcccccgccgctagcaggtgggtgatggttataggggggctttattatgtgcggggtcctcgtggttattgagcaccacgtgttgtgctgtatcaacaacacggggtaggggggtgttggtgggcctcctcctctccgtcttgttctcggggaggttgtagaggatccccccggcagttggtggccccacctgtatgccacgccccgcctggtctgtttggatatgtaggtgtttcttgcgccgccggtcggctcgtctgttgtgggtacaccgcgtgatgcatctgtcggtggtggtagtgagagcacccccctccggcgatgacaccagcctgggtttagtttgggtgggtgtttaccccctcttagtggcccccccccgccgcgccgctggggagatgatagatgttgtgctccatcatgagccctccccgcgcagcccacgctctctgggttgttgtgtgaagacacacgactggtgtggggtagccacaacgcgcggtgagcacactatagacgcttcgggaaggttgttctttttgttgtgggcgggcacactattggtgtgttgttgccacaccccctgcgcgctgcgagttttctctgtgggtgtagtctctcggtggttgttgagaaaataaatagagatatatatagggggttgtcccacacgggagcgtgtttcttgctctgtgggtgtctctctcacacagagagagtactcttggagattttattataagaggtgtgtgatatgcgagataggggagactctctgttgtggccgcactgtgtgtctctctctctcgagtgttgggtgagacccctcggtctcggcaccgcagcaccgctggggggtttatattctctgtgggagactccccgcggcgagaagagtgtttatagctcttcacagagactcttctctctcgcgccctctcctctcccacccgcagcagagttgccccagcagagtgtctctctcggatagagaagagaagaccttggtgggtttaacacccagatgagaggttagagatcccaagacccaaaggtgggcatgtgtatttgccttggtgtggactaccacaggtttgtaagaaatagatgtcccataagaggacacttttgataataatttgcaccacggtttagggaattgtctattcccgaaataaattaccctagagactcttgtcgtataggcccagaagatttccagaattttctggttgtgtaattaaccccccaagtcgttccatgtaaataa

SEQ ID NO: 570090 - DNA, 1176 bp, Homo sapiens
  misc_feature (971)..(971): n is a, c, g, or t
  misc_feature (1033)..(1033): n is a, c, g, or t
  misc_feature (1037)..(1037): n is a, c, g, or t
  misc_feature (1045)..(1045): n is a, c, g, or t
  misc_feature (1101)..(1101): n is a, c, g, or t
ctataccacaataatatataataatagaaaatgcgaatctattgtacactttgagaaactagccacatcgtactcagcacccccacagcagactacaggcaaatggtatccctgaagaaagaaaacctgcactcgaagccactcgagattctactaaatctaggacacatactatgcgaccgctagcatacagcatgtgtctgtttactacttcacaatcaatagcgatgcgagctttcttactcggccatcatcgttactagcactgtatgcgcacgtacttagagtgtgatacacaaagccagtacacacatcaaccttctccattctctactacatcgtcgctttcttcgagccactttacaacgcacctcctccccacgaactccttgtaaacaacacaactggacgcaaccgttatacaagccgcgcccacaatcaaaagcttggacacctctctcaccagtccatactaaatacacccattaacacattaccccactactccacccactcacaaagcgtaacttactaactcacccgcgtagcggagaaggctacaccataaaaccgctctctccttcgcgcccactcttcgcaactctcactataggtctcacccatatgtcatcgagccgcagccgccacaaccgaactatcctccagctgcgctacagataagcggacctatcgtcaccctcaacccccgtacgacagaacgcgcaacgcctaaccccactctgtagctactactacagtctctcgatcaccaacaatccggtgcactaacccacgggaaatcaataatggtgaaccaaccgatgtgcctcctaaacatattcacgacatttcccgactcacaccgcccgccacgtccggcagtcgcccatgttaactccatactcgtagaccccatcgaacattacctgcatacgactgcccgtcgcacacgcattgcacacgcgcgcacncgcactctgctatacagcaggtatccgagcagatagtctatgatgacgcagctgagtcactnaccntgcaactnctacgacggcagtatattgatatgcgtagcggccatcgcgacagcatgaccgtagntacgcgcaaggatatggcgacgatccatgatacacggtgtggcggaatatacactccgaaccattcacccgcgcg

SEQ ID NO: 570091 - DNA, 234 bp, Homo sapiens
ttttggctttcccggggggttttttttccccccctttgggggggggggttttttttatccggccggggcgggggccttttttttttttccttttccggataaaaaatggggttgttttacccccccgcccctcccccccccaacctggggggttttccggggccatttttttttttcggggagggttttcggcccgttttttttggttcctaatttaactttttggttaaatta

SEQ ID NO: 570092 - DNA, 190 bp, Homo sapiens
tgcctaggctcgacttctcctgtcccctgtcctgcgtctgcattttgcattttatcatcaaatctctctatggtctggtggattctggccttcaccttcttcatgtcatcatagatgaccttcgggagaagctgtggccgtgcgggggatcctctcgacgtcgctctgcatgcattctcatggtatctct

SEQ ID NO: 570093 - DNA, 193 bp, Homo sapiens
cgtcgacgtctgacctgggccgattgggcctgatgatgatgatgatgtctgacctgggcccattggacctgatgatgatgatgatgatgccttacctgggcccattgggtctgatgatgattataatgatgcctgacgtgggcccatttggcctgatgatgatgatgatgcgtcgacgcggccgcgaatttag

SEQ ID NO: 570094 - DNA, 731 bp, Homo sapiens
  misc_feature (176)..(176): n is a, c, g, or t
  misc_feature (387)..(388): n is a, c, g, or t
  misc_feature (434)..(434): n is a, c, g, or t
  misc_feature (499)..(499): n is a, c, g, or t
  misc_feature (547)..(547): n is a, c, g, or t
  misc_feature (591)..(591): n is a, c, g, or t
  misc_feature (669)..(669): n is a, c, g, or t
  misc_feature (707)..(707): n is a, c, g, or t
tacagaggtaggaggggctaattacttcaccaacaaaatcatccccctaaaaacttttttctatagcaaatagggaaatctaatatcacctttcaacatctctggatcgaaaatcaatctaccacgaacacgttctacaacgttatccaaaatttttttctgggaggggggacganaacaccacaaccccctatttagaactccgtacccctattttcaagcttcaatggtctttaaatcttcaccacaggccattactctcctcccttataatacaccaatttaaatgttaacggcatccagcaggtaccccacttctccaaaattttttgaagatcaacgctctttcattgtacgatttccacgacaggctcccatccaatcccnnagaccttccaaaagcagcgggttggttattaagcctatttcccganagcctttttccgatatcttaaaatagggggagcccaaaagcctttctttcctaaaaagagatttngaacggcgcgtgaattcttaaaaacgcgcctttaacccttttttttanttaaaaaaccttcctttgcgagggttttgaaaaatcccgaaagnacttctccccctctcaacttatatccccccgtgggaaagtatttttaaaaaaaagatctttgaaaagctgctcatccnctttttttcttttgagacttttttccagcattcccaanaaatgatccccccccccaccatag

SEQ ID NO: 570095 - DNA, 128 bp, Homo sapiens
gctgaccccccaggttgtgggcccacttcgtacatgcgtcacgtactctgactcaagcctgaatcatgctaagctgctaacagggagttgtatgtcggtgtatacaacgtactgtgcggtcaccgctt

SEQ ID NO: 570096 - DNA, 1186 bp, Homo sapiens
  misc_feature (507)..(507): n is a, c, g, or t
agcgggtgcctgccgcgtatgctcgccctggcatgcgctgtctgccctggcgtcctgccgccctgtcggcctgccgccgctggtcgctgggccgtggtgctccggtcggctccccgcggcactcctcatctgtcctctccactgcgtcggggaccagtctcgtgcttacagacgagtgtcgtcggctagtgattcataggaagatctctgcgtgttcccggaacgccgtagaggactgtgctctgtgtgcacgtgtccctacagtctaaatgggtgaacaaatggcatacgcaatacgctttgcacctactttgaatcgaataagtgcgctcattgtgcaaatggccgggacacaacttgtagcactagcgaagataacgtataagcttgtagcaaggaatagaagtctcatcgttgggacttgacgggtcgtacataagcgggggaaacgccaaaatgtccccaatagggttcggctgacatagtattgctcgggggcgagtcacncaaagttgaacgaatcggtgcacactctggcggaattggagtgcatcgactaggttgctcacttcagtgcattccatgtctgtctggctcggatttacgccccaaaactgtaaagaacttgtgcgtgctcattgccatcatagcactcctttagttaacggtcctggtgactctcaccggcggaaagttttccccacaggaactcataccttgtatcgacaagagggccaggaattcacccaacacacaaagtggcggtcctcccaaagggtggcactccatataccaagaccaggcatatcaggacgaagtctcgcaataaacatctgcggcggaaaaatgggagctagagttctaaggtggggttccttactttctctccaagttggtccacgcttgtatgggcggggtagccgttaattatttgccaccgacatgcggagaaaagcccgtagggaactcattaggcgcgcttgagagtcgacgcaaaaaagttgccacaacgcggcggggtccctggcccggcctgtccattgttcccacctttgcggtaaagaggtggccccaccgaaggtcggcgaatagcgcttaagcccctggggcgggggagcggacacccatattcgggtaagccctaatccattggcggcagcggagaaggttcgtaatgttcaccctc

SEQ ID NO: 570097 - DNA, 258 bp, Homo sapiens
  misc_feature (144)..(144): n is a, c, g, or t
  misc_feature (146)..(149): n is a, c, g, or t
  misc_feature (156)..(158): n is a, c, g, or t
  misc_feature (160)..(161): n is a, c, g, or t
  misc_feature (165)..(165): n is a, c, g, or t
  misc_feature (167)..(167): n is a, c, g, or t
  misc_feature (179)..(179): n is a, c, g, or t
  misc_feature (184)..(184): n is a, c, g, or t
  misc_feature (187)..(187): n is a, c, g, or t
  misc_feature (202)..(203): n is a, c, g, or t
  misc_feature (211)..(211): n is a, c, g, or t
  misc_feature (226)..(226): n is a, c, g, or t
  misc_feature (235)..(235): n is a, c, g, or t
  misc_feature (244)..(244): n is a, c, g, or t
gagccaagcctgatcccggagccggagggggactgggaccgagagaacggcgatggggggcggccccgccgcaggaggacccgggcgcgtaaccccgggggcccggcccgctccagacccagacccgcggggtgcggcaccctngnnnnccctaannnanncctnanctggccatcccngcccnccnccccgccccctagcnnccaacacnctcggcccctcaaanaccgaaacnacagctttntcaaaaataaaaaa

SEQ ID NO: 570098 - DNA, 699 bp, Homo sapiens
  misc_feature (20)..(20): n is a, c, g, or t
  misc_feature (50)..(50): n is a, c, g, or t
  misc_feature (56)..(56): n is a, c, g, or t
  misc_feature (101)..(101): n is a, c, g, or t
  misc_feature (138)..(138): n is a, c, g, or t
acggacagaatatggattanaacattgttgccgaaaaacggttgcaaacntttganatggcggcacacagtgaataatgttgagtaagccaggagaccacngtggcttgcagccatgaaaccacttgtcggggctganagtgaatcccagcagactagagacttagaggagctaaaatctcccaggccgctgcctaattccgcactgttccacggatgttactgggacaggttccaatcgctttcctttccctctgtttctaagaatccttcctgtgccagaggaaatggaccgaggagggaggagggaggtcgggatagagtcgggcgggacaccctgtcacccaagcccgcgtgatatttatagacattcatggcgctgactccatgctgtcacggcggcaaggctgccctgtgatggggcgctggggtcttcagcctgccctcactccctctgcccaagctccctggggtggtgattcggatgtctgctacagggaaggaggcctctgaagagccattcccctggcaggggcctggagcttcgggaaggcctgctcagggcaaacataaaaaccgctgaagggggcagaatcccagtaatcttagccacccggcccccacccctccctggccaggcattaagtgtcccttgccgcggcggggccctccttgagctccctcctccccggtcgcgtgc

SEQ ID NO: 570099 - DNA, 111 bp, Homo sapiens
gtaggtcaatcagcagtgaatcatcagctcctggtactcctttcagacgcaggtcctgcttggccttctgcagggcatgtgtgtctgcgtgaatgcgtgggtatgagtgtg

SEQ ID NO: 570100 - DNA, 492 bp, Homo sapiens
  misc_feature (144)..(144): n is a, c, g, or t
gaaagaaacagtatttgccttatttaatctgagccgtgcctatctttgtaaagttaacatgagaataacttcttccaaccatgcttaattttttttttagactggtgatgatgtcctccaaacaacatcctctcaggtacccanaagtggcattttatcaagtaatcaaagcttaaccgggaatccccagttaagcatctttattctggtttaattggcggatcaagaagacccagttgtgggcaggatggcctttgtgatcccagcaagagaagtggatggcatcacgtgaattttaacccccggacccttgtgcccaaagggaaaaccctttaacccacaaaagggggcaaaacgtgaccaacacgggggcaggcggcatctatatattgagaatttaccccacgagtggagagggggccacccacaacacgggtcccccccccttttggccaaccaaccttgggacaccgcgaaacggccgcgggcgag

SEQ ID NO: 570101 - DNA, 113 bp, Homo sapiens
gccagcgttcaagcaaccaaatactacactgttttcatttagtagttggagctaaacatgggtactcacgtacattaagatggcaccgcagggagttgtggtcacatctgtaa

SEQ ID NO: 570102 - DNA, 444 bp, Homo sapiens
gtgccccctatgctgcgcggacttcggaccggctctgtgttcactacactcagaatagcctggctgctcctctgatctccgatcaccggaggtcgctggtaaccaacagactgggctggagagttggtgctggcgaaacagtccttcccctggggccggttcttaccctggtccatagaaaccaacgcgggatgtccgtaccttcaccagaaggacttcctggttcccccttgctggcttcctggcagagcgttcgtcctctagtttctcagggatggagcgacagccctgcctgagaacagctatcaggagctgctctcctatctgcactcacccaggccttcatccatacttttccacggacggcgcctcgtgcagctctcgctcggtccgcgtccctcatccttttcttcttctgcacgttctccgtgaaactggaaggat

SEQ ID NO: 570103 - DNA, 164 bp, Homo sapiens
cacctcccccatccagctaatctctgtactcctagtagagacaaggtttaaccgcgttggccaggccgttttcgaactcctgacctcaggtgatccacccgcctcggccccccaaagtgctgggattacaggcgtgagccactgcacacggccaaggagagcgg

SEQ ID NO: 570104 - DNA, 548 bp, Homo sapiens
agtatcgcgacggaagatggcgtccgccacccgtctcatccagcgtctgcgagacactggcgtccgtacagaccgtgaggaagctgagtaccacaggagatctcagcgaatcagctcctccaagctccctgtgagtcctagccacaagctctccaacaattactatgtgcactcgagatggccgccgggaatctgtgcccccttccatcatcatgtcgtcgcagaaggcgctggtgtcaggcaagccagcagagagctctgttgtagctgccatgagaagaaggcggtgactccagctcctcccattaaagaggtgggagcttgtccctcggaccaagcttaccgtgtaaacacttgcaccctcaaggccacccgattaattttggcctccttgggatttcctccccagggagacatgtggccctcagtctattgaccaaataacgatagagctcagggtatcactttcttagcttttaacctttaacaacacttaccaccaatacgacgacgaccaacaaaaactacacaaaacctaccacaaaccc

SEQ ID NO: 570105 - DNA, 257 bp, Homo sapiens
  misc_feature (17)..(17): n is a, c, g, or t
  misc_feature (175)..(175): n is a, c, g, or t
gtggtgggggggagggnaggccgtgtgcgggggggtgggtaccgggggggggggtgggggggggggggggttccttggggtgaggggggtggaaggtggggggggtacggcgaggtgggatgggggggtggggggagggggagggggaggaggaaggggggggggggggaggaanaaccccccccattcctccccacatttttgggccttaccgggggattcctacctatttccccttttaaattaatatttttata

SEQ ID NO: 570106 - DNA, 282 bp, Homo sapiens
cgtacgtagatctagcgaggaggaagcagaagactgatagtgttggccaaactgatgcccactctttactggttaccagcagcagaggattgcagagttggaggccgctgcatttggctgtcgattggatgagctggatgctggttgggcagtggactgtggcaggggctgattggactggttaaagctgttgtctcaactgctggacttgctgctgctgctgctggctggaagcccgctgttggtactgagcactccctggagagaaagggccagtgtaat

SEQ ID NO: 570107 - DNA, 443 bp, Homo sapiens
ttcaaagacctcctgacgtcgtctaactaggtcaggctgaaggcacagctaatctcagtagaatatggcacagaggaaaaaataaaaataccaataatatctagtaaatacaaggtaccactacagaagtggtaggaacatagaaagagtgtctttactaccataagattttccattagaaggcccactggcatatgatatagaagtaattaaagacaatacatcaacctgtagttcaaatactgtttctttatatctttatgcttatattctctctctctattctcatggcactttcataacattcatggctaacctctaattacagattttgctttagcctccctgaatgaattacaagcctataaaagatatgaaatatgcctacccgcagagcttggcacaaagtggagtcaatctttaaatgtttaaaatatgcatat

SEQ ID NO: 570108 - DNA, 146 bp, Homo sapiens
agtgacctccgcttacattatttagctttatgagcaagctacccacaaaacgtgtgtgtgtgtgtgtgtatctgtttcagacagagtttgctctgccacccaggcaggagtgcaatggcactatctcggctaactgcaacctccac

SEQ ID NO: 570109 - DNA, 676 bp, Homo sapiens
  misc_feature (46)..(46): n is a, c, g, or t
  misc_feature (76)..(76): n is a, c, g, or t
  misc_feature (87)..(88): n is a, c, g, or t
  misc_feature (93)..(93): n is a, c, g, or t
  misc_feature (95)..(95): n is a, c, g, or t
  misc_feature (101)..(101): n is a, c, g, or t
  misc_feature (118)..(118): n is a, c, g, or t
  misc_feature (120)..(122): n is a, c, g, or t
  misc_feature (133)..(133): n is a, c, g, or t
  misc_feature (146)..(146): n is a, c, g, or t
  misc_feature (213)..(215): n is a, c, g, or t
  misc_feature (238)..(238): n is a, c, g, or t
  misc_feature (240)..(240): n is a, c, g, or t
  misc_feature (245)..(245): n is a, c, g, or t
  misc_feature (253)..(253): n is a, c, g, or t
  misc_feature (255)..(255): n is a, c, g, or t
  misc_feature (298)..(298): n is a, c, g, or t
  misc_feature (380)..(381): n is a, c, g, or t
  misc_feature (569)..(569): n is a, c, g, or t
  misc_feature (581)..(581): n is a, c, g, or t
  misc_feature (667)..(667): n is a, c, g, or t
gcatctcattacaaaacagaccccctggaaccagggaagccaaggnagcggcccacctgaaagtatttagattganaagaaaaattnnacctncntgacanaggttaggggtcacggngnnnggagggctgcngggatcacagggncagcagcatctactagcagcacggccataccagccactgaggtcctaactgcagcgaaggggccgtnnngcacacgtcgctcaccctctgtncnctgtnccccacanancaaacgcacatagcaacgttggtccgctcagccactggttctnagggggaacggtggatgtctgccctgtcacaacagccgagtcagtcacaacgactgacgatgccgctgacccagggctggcnnaggggactcccagcccagacaggcttggctgtggtttgctttgggaggagagtgaacatcacagggaacggctcaagttagccccaggagggtgggctggcccctggtccccgggctccttctggccctgcaggcgatagagagcctcaacctgctgccgcttctccttggcccgggtgaaggccgtntggaagagcctncagtcgaggtgcacagccagcagagagtcgtcattaccgggtacagggtaggtgaagaggcaggggttgcagttggtgttcacgangcccactgt

SEQ ID NO: 570110 - DNA, 760 bp, Homo sapiens
agcggggtggcgccttgaggagggagagagaacgtgctgcacgtgggtcccaccaggtgtcatagacatcacaagccgcggatccctcccgaagaatggattcctcttctccttctcctccactgcctatatgggagcctctatccagtccacagaagcccaaatcgaggttactaatgagctccccttgcttcgtgacccaggggacccctactcggacctcaaggctctgctcccctgagcttggcccatggcacccggcgcccctgggactcaggcccagccatcgtcacctacccgggccagggcggcaagggctccacaggagaccggacaccagggaggagcgggacatatcgtgacgtcacattccggccgggcctggccaaagtaacgaggctccgtatggccagagggggccgatacggaggctaggcagcatagtgggacggaggcgtgacgtgggaaggcccgaggagctcaaagccacggaggcaatcccccaacagttcccggggaccgatggaaaccttgaacacctggcagacgtacccgggaaagctgaaaccgggccaggatagggaccagcgtgaagcccagaatacgaggcacactggcttgagaaggccaccatctgggaagctgaacaatcagggcatgtatcccgcatatcatgagaggaccgtggaagccctggagcgattcccatgtaccctgattggactcccgtatcggctatacatccggtcaagcaatattg

SEQ ID NO: 570111 - DNA, 3074 bp, Homo sapiens
gttttttttttggatgtggaagccgagacctaaagttggggggtgatctctgaggagatggatcggtacctgctgctggtgatctggggggaaggaaaattcccgtcggcggccagtagggaggcagaacatgggccagaggtgtcgtcgggtgagggtactgagaatcagccggacttcacagcagcaaatgtttatcacctcttgaaaagaagcattagtgcttcaattaatccagaagatagtactttccctgcctgttcagtgggaggtatacctggttccaagaagtggttctttgcagtgcaggcaatatatggattttatcagttttgtagttctgattggcaagagatacattttgatacagaaaaagataaaattgaagatgttcttcaaacgaatatcgaagaatgtttgggtgctgttgagtgttttgaagaagaagacagtaatagcagggaatcattatccttggctgatctctatgaagaagctgcagaaaatttgcatcagctgtcagacaagcttcctgctcctggtagagcaatggtagatataatactgttgctttctgacaaagatcctcctaaattgaaagactatttacctactgtaggagcattaaaacatttgagagaatggtattcagcaaagatcactatagcaggaaatcattgtgaaataaactgtcagaaaattgcagaatacctttctgctaatgttgtatctttagaagatctcagaaatgttattgactcaaaggaattatggagggggaaaatacagatatgggaaagaaagtttggatttgaaattagttttcctgaattttgtttaaagggagtcacacttaagaattttagtacttctaatttaaatactgacttccttgccaaaaagatcataccatcaaaggataagaatattttgccaaaggttttccattattatggccctgctttagaatttgtgcagatgataaaattatcagatctaccctcctgctatatgtcggatattgaatttgagttaggattgacaaacagtaccaaacagaattctgtgttgctgttggagcagatttcttctctgtgtagcaaggttggtgctctttttgtattgccatgtaccattagtaacatactgattccacctcccaaccaactcagttcaagaaaatggaaggaatatatagctaaaaagcctaaaacaatcagtgttccagatgttgaagtgaaaggagagtgttctagctattatctcttgttacaaggtaatggcaatagaagatgtaaagccacattgattcactcagccaaccagatcaatggctcatttgcactcaatttaattcatggaaagatgaaaacaaagacagaagaagccaaattgagttttccttttgacttattatcacttccacatttttctggggagcagattgtacagagagagaaacagttagctaatgttcaagttttagctttggaagaatgcctaaaaagacgaaagttggcaaagcagcctgaaacagtttctgttgctgaactcaaaagtctgttagtactcacaaggaaacactttttagattattttgatgctgtgattcctaaaatgattctaagaaagatggacaaaattaaaaccttcaatatattaaatgattttagtccagtggaacctaattcctcaagtctaatggaaaccaatcctctggaatggccagaaaggcatgttcttcaaaatttggaaacttttgaaaaaactaaacaaaaaatgagaactggttcattacctcattcatctgaacagttgctgggccacaaagagggtcctcgggactcaatcacattgttggatgctaaagaattgctgaagtactttacctcagatggattacccattggagatcttcaacctttaccgattcaaaagggggaaaagacttttgttttgacaccagaacttagtcctgggaaacttcaggtcttaccttttgagaaagcctcagtatgtcattatcatggaattgaatattgcttggatgaccgaaaagctttggaaagagatggaggattttctgaacttcagtctcgtcttattcgttatgaaactcaaactacctgcaccagagaaagttttccagtacctactgtgttgagccctcttccatctcctgtagtttcgtcagatcctggaagtgtccctgacggagaagttttacaaaatgaacttcgaactgaagtatcccgattgaaacggagatctaaagatctgaattgcctttatcccagaaaaagacttgtgaaatctgaaagttcagagtctcttctttctcagacaactggtaatagtaatcactatcatcatcatgtgacatccagaaagccacaaacagaacggtccttaccagtgacttgtccattggttccaattcctagctgtgaaactccaaaacttgctacaaagaccagttcaggtcaaaaaagtatgcatgaatcaaaaacatcaaggcaaattaaggaatcaagatcacagaaacacacacggatactgaaagaagtagttactgaaaccctgaagaaacacagtattaccgagactcatgaatgtttcactgcatgcagccagcgtctctttgaaatctctaagttctatctaaaggatcttaaaacttcaaggggtctatttgaagaaatgaagaaaacagcaaacaacaatgctgtacaggtgattgactgggtattagaaaagacaagcaagaaatgatacataatcattctctttaagacaattataaattggatggagctattattcactacttcttttcttagtttgaaaattataaacaaattttaagctttattcaaagaatagatgttatatttctaaagaatttcatgaatatatattctatatttgtatagtttgagggatgctatgttaatgtatttttaattagatacatattttgtaaagtgttactatattttaaagttatttttatatgttttaaaatgtttactcttatttaattattacaataaacagaattttttttttttaaa

SEQ ID NO: 570112 - DNA, 129 bp, Homo sapiens
gatctctcacggatccccggcacgatctttgccgaacgagactctggtcctgctggctagttccgcacccccgcagcggtctgcgctcccccttcttcttagagcgcgtacatgctggcgttcagtcct

SEQ ID NO: 570113 - DNA, 1989 bp, Homo sapiens
gttttttttttggatgtggaagccgagacctaaagttggggggtgatctctgaggagatggatcggtacctgctgctggtgatctggggggaaggaaaattcccgtcggcggccagtagggaggcagaacatgggccagaggtgtcgtcgggtgagggtactgagaatcagccggacttcacagcagcaaatgtttatcacctcttgaaaagaagcattagtgcttcaattaatccagaagatagtactttccctgcctgttcagtgggaggtatacctggttccaagaagtggttctttgcagtgcaggcaatatatggattttatcagttttgtagttctgattggcaagagatacattttgatacagaaaaagataaaattgaagatgttcttcaaacgaatatcgaagaatgtttgggtgctgttgagtgttttgaagaagaagacagtaatagcagggaatcattatccttggctgagtatgcttatatggtttttgtattatcattaaaatacttaatattagacagttattttaatccatgagaatgaagattatatattttagcatctttactgaagaaactctagttaattgaaatttttgactctcaatttgggccttttatttgaataaaattctttaaaatgcatgtttcttaagcttacataatgtcaagaatcataaaaagtgatattttaataaacatgttcctttcttgaagataaattctgcctaatattttattttatttttgaaacagggtcttgctgtgtcacccaggctgcagtgcagtggtgcagtcacggcttgctacagcctagacctgggctcaagcgatcctccgacctcggcttccagagtagctggaactgcaggtgtgcaccaccacacccagctaatttttgtatttttttttgtagaaatatcatttcgccatgttgttcaggctgacctcgaattcctgagctcaagcaatctgcctgccttggcctcccaaactgctgggagtacagctgtgagccaccgtgcctggccaataatgtattttaaaagcttgaatagaaatgttatttaatgttaatagctagcattcataccaaagtatcattttcattttgctatttgaggctgaaatatgtgacttctttaatttatgtgtatttgcagcatttcaggtaccttttaaaatccatagagtttgtgaggattatatgtacatgattgagttcacttttaggtttttttcaattgtggtacaatatgtaagttgatccaggtgacataagttgtgataataatttttctcttgatgaaatatcccacctcttatagttaataccttttattttagtctttcataacatttcatgacaaaactgctcttattttagtattcacatattatatctgtaagtagctgtagacttaaaaattttcattttcctttttccagatcatatttgtttgtactgattaataaaaggagacctttccaaaccagagaaatatcattgaaccagggattagtagaggtaactttatttacacaatcttaggccagtcacgtaacttctctggtcgtttgttttctcatccataaagtattgaagtacttttagataatttcttaggtgctttcatttacccttaaaaactcttatcatcccatatgttttcctaccactgttaaagacaagtatagccaggcacagtggctcacgcctgtagtcccggcactttgggaggccgaggcgggtgggtcgcaaggtcaggagttcgagaccagcctggctaacatggtgaaaccccttttctactgaaaatagaaaaaaattagccgggcgtggtggcaggtgtctgtagtctcagctactcgggagcctgaggctggagaatcgcttgaacccgggaggcggaggttgcagtgagctgagattctgccactgtactccagcctgagcgacagagcaacactccgtctc

SEQ ID NO: 570114 - DNA, 692 bp, Homo sapiens
ggggttcttgttgttgaaatacaacgatggtttttcatatcattggtcgtggttgtagtccgtgcgagaataccaaaaaaaaaaaaaaaaaaaaaaaaaaaaaaaacataaaaaaaaatatcacaggcaaaaaaacaccccaaaaaatattgccttcccctggatttatcctcctttatctcctatcacccttttatcaccctgcattccctctactgtaacaccttcttaaatcctctctcttgtctgaaaccccccatcccccatttcttccgctctgatggtttcagccttcctcaacctgtgttttttctcatcacagcccctccttctgcgctttccagagaatctcccacttggagtggctcttgtcactcctcttcttccaaatttcgtataatcccgagcaaccttcttcttacacctcctctttttccccctttgcccatattgccctaaatccccccttcattcacaccattggcccttttttgccttggtcgtttctccactttcccccccgtctccttttttattcccctggccttccctcccttttaccaatcccgtattcccgggcggcccccccctattgaccttcccccttatcagcttcttgctgccggtttccctttgtacccctatcccatccctaaaggtccctccgaattattttttacgccgcgagacct

SEQ ID NO: 570115 - DNA, 415 bp, Homo sapiens
  misc_feature (394)..(394): n is a, c, g, or t
  misc_feature (408)..(408): n is a, c, g, or t
ggatttgagttcctttcttaagacactgtagtcatttcctgctaacatattattcctgtgacacttctgaccatgtaaatgttagatcttttttttctcaatcattttgtcttaatgaacctgtctgtcttttagcacagcaaaatgaatgtgtaattcacaggattgaactctaaagctgaaataataggtttgtgccttttccaagaaatattcgtcatatgttatgttctgttcaagatactgaaagaagtagttactgaaaccctgaagaaacacagtattaccgagactcatgaatgtttcactgcatgcagccagcgtctctttgaaatctctaagttctatctaaaggtacggtatcttcccaactaatgggcaaatttagttccangttctaatgttccngtttgac

SEQ ID NO: 570116 - DNA, 679 bp, Homo sapiens
ggggttcttgttgttgaaatacaacgatggtttttcatatcattggtcgtggttgtagtccgtgcgagaataccaaaaaaaaaaaaaaaaaaaaaaaaaaaaaacatgtggtggcggcgcgcgcccgcgggccccggcgagaaaagcttttacaaaacacacattgcgcgggggggcgcgcgggggccccaggagggtaagggaaacagggggcacaaagggggttctcccagagaggagaacaccgcgggcgccagagagaacaagagggaggagggaaatctctctccacacaaatataaaaacaacagcgccgcgcggggggacacaccgcgagaggcgttttcggagaaaaatctccccaagagagggagagcctctgaggagagaggccaataagagggggggccctctatacacaagcgggagagccaccaagaggagagagcccgcgaaatatataaaatattatatcagcgccccccccgaggccctgcgggggggggggtaaaacacaacacacgcaccgaacactaaactaacaacgaacgcgcaacaaaacacaacaccaacaacaaacacacaacaccaacaaaaccacaagaaagaaaacatataacaaccaaaaaacacaacaccaaacacgccaagacacatgaaaccagcacgaagaaaaata

SEQ ID NO: 570117 - DNA, 493 bp, Homo sapiens
gtgcggcgctcctagaggatccccttcgacggtgtctgagaaggtatgggtaccaggaagaaacaaacagaagtcttaagattagaatgagaaccaaagagaatttaaccctgccatttttttttttttaacaccaagatcctaagtaattccaaaggccttagatatcaaggaaagctacacaccatggagaggggcaaaattctttctctacaaggggagtaatcaagtaaataccgtgtctctttcaagggacggtggcctatggagcatgggggatgagtggtgtttcagatttccaggtgaagttctgaccctaccgtggtgggccaaagacgtaaatggagaggaaaggcctgggtcttccggatcaaccagcatttaacgaacaggggcttaaggcagatcactcaagaggcagcatagcaaggtaaaaggaatataagtaggtgtgggatgcctttttcctagaccaggaagggggaatatataa

SEQ ID NO: 570118 - DNA, 3437 bp, Homo sapiens
  misc_feature (3216)..(3216): n is a, c, g, or t
  misc_feature (3345)..(3345): n is a, c, g, or t
gttttttttttggatgtggaagccgagacctaaagttggggggtgatctctgaggagatggatcggtacctgctgctggtgatctggggggaaggaaaattcccgtcggcggccagtagggaggcagaacatgggccagaggtgtcgtcgggtgagggtactgagaatcagccggacttcacagcagcaaatgtttatcacctcttgaaaagaagcattagtgcttcaattaatccagaagatagtactttccctgcctgttcagtgggaggtatacctggttccaagaagtggttctttgcagtgcaggcaatatatggattttatcagttttgtagttctgattggcaagagatacattttgatacagaaaaagataaaattgaagatgttcttcaaacgaatatcgaagaatgtttgggtgctgttgagtgttttgaagaagaagacagtaatagcagggaatcattatccttggctgatctctatgaagaagctgcagaaaatttgcatcagctgtcagacaagcttcctgctcctggtagagcaatggtagatataatactgttgctttctgacaaagatcctcctaaattgaaagactatttacctactgtaggagcattaaaacatttgagagaatggtattcagcaaagatcactatagcaggaaatcattgtgaaataaactgtcagaaaattgcagaatacctttctgctaatgttgtatctttagaagatctcagaaatgttattgactcaaaggaattatggagggggaaaatacagatatgggaaagaaagtttggatttgaaattagttttcctgaattttgtttaaagggagtcacacttaagaattttagtacttctaatttaaatactgacttccttgccaaaaagatcataccatcaaaggataagaatattttgccaaaggttttccattattatggccctgctttagaatttgtgcagatgataaaattatcagatctaccctcctgctatatgtcggatattgaatttgagttaggattgacaaacagtaccaaacagaattctgtgttgctgttggagcagatttcttctctgtgtagcaaggttggtgctctttttgtattgccatgtaccattagtaacatactgattccacctcccaaccaactcagttcaagaaaatggaaggaatatatagctaaaaagcctaaaacaatcagtgttccagatgttgaagtgaaaggagagtgttctagctattatctcttgttacaaggtaatggcaatagaagatgtaaagccacattgattcactcagccaaccagatcaatggctcatttgcactcaatttaattcatggaaagatgaaaacaaagacagaagaagccaaattgagttttccttttgacttattatcacttccacatttttctggggagcagattgtacagagagagaaacagttagctaatgttcaagttttagctttggaagaatgcctaaaaagacgaaagttggcaaagcagcctgaaacagtttctgttgctgaactcaaaagtctgttagtactcacaaggaaacactttttagattattttgatgctgtgattcctaaaatgattctaagaaagatggacaaaattaaaaccttcaatatattaaatgattttagtccagtggaacctaattcctcaagtctaatggaaaccaatcctctggaatggccagaaaggcatgttcttcaaaatttggaaacttttgaaaaaactaaacaaaaaatgagaactggttcattacctcattcatctgaacagttgctgggccacaaagagggtcctcgggactcaatcacattgttggatgctaaagaattgctgaagtactttacctcagatggattacccattggagatcttcaacctttaccgattcaaaagggggaaaagacttttgttttgacaccagaacttagtcctgggaaacttcaggtcttaccttttgagaaagcctcagtatgtcattatcatggaattgaatattgcttggatgaccgaaaagctttggaaagagatggaggattttctgaacttcagtctcgtcttattcgttatgaaactcaaactacctgcaccagagaaagttttccagtacctactgtgttgagccctcttccatctcctgtagtttcgtcagatcctggaagtgtccctgacggagaagttttacaaaatgaacttcgaactgaagtatcccgattgaaacggagatctaaagatctgaattgcctttatcccagaaaaagacttgtgaaatctgaaagttcagagtctcttctttctcagacaactggtaatagtaatcactatcatcatcatgtgacatccagaaagccacaaacagaacggtccttaccagtgacttgtccattggttccaattcctagctgtgaaactccaaaacttgctacaaagaccagttcaggtcaaaaaagtatgcatgaatcaaaaacatcaaggcaaattaaggaatcaagatcacagaaacacacacggatactgaaagaagtagttactgaaaccctgaagaaacacagtattaccgagactcatgaatgtttcactgcatgcagccagcgtctctttgaaatctctaagttctatctaaaggatcttaaaacttcaaggggtctatttgaagaaatgaagaaaacagcaaacaacaatgctgtacaggtgattgactgggtattagaaaagacaagcaagaaatgatacataatcattctctttaagacaattataaattggatggagctattattcactacttcttttcttagtttgaaaattataaacaaattttaagctttattcaaagaatagatgttatatttctaaagaatttcatgaatatatattctatatttgtatagtttgagggatgctatgttaatgtatttttaattagatacatattttgcacagtgcacactacattctaacgtcatctgtatcccttccaaaatgccctcctcttactcaaccatcacaatcaacacaaactccttgtttcacacccacctaccccacatgccatcacccccaaactcccaaaccccacgtcaaaatcaattatcgaccccccaggccccagccacgaaccccgcccagccctcccctccgcaacgagctcatcacctcacacctcacgctccnaacgccaactacccaccagcccctccccccccagccacccactctatctcacttccccgacgccacaacatcaacaccctaagcactcgttcatagtccgcgcgttccgtcaccccacagaacgtcgtncccgccactaatgaggctcgccgaggaaccaggccgtgtccgctccctcgtccacacccggagtgcaacaaatatattctcacccccagcat

SEQ ID NO: 570119 - DNA, 440 bp, Homo sapiens
ggggttcttgttgttgaaatacaacgatggtttttcatatcattggtcgtggttgtagtccgtgcgagaataccaaaaaaaaaaaaaaaaaaaaaaaaaaaaaacatgtcggccgaagcagtggtatcaacgcagagtgcccattatggccggggtgaaggctttggaataacgcattgaatgacttagaaaattctttgaatataaaataaacatttgaaaaaaccattaaaaaaaaaaaaaaagaaaaaaaaaaaaaaaaaaaaaaataaaaaaaaaaagaaaaaaaactgaaatacaggaatcagttgattttgcatatgggcacttacggatagcccatgctattacatccacctaaggaatgactcccaattgtaacaattaagagataaggttgtgtgcacagatgtaatttgatatgtccgatttatcccatt

SEQ ID NO: 570120 - DNA, 742 bp, Homo sapiens
acgactgggaattacccagtgctatgtgccatctccaccgaatgcataagtccagacactgtgaataaccatcatgggcgcgggtgagacatccaaacaattgtgtcgatgcgagaagctagagtgctcttgcgatgcttgctgttgtttggagtcgtaggctgagatttgagaatgtatgaatctgaggtggatgtgtagtatacattttcaatagattcgagcaccagatggggaagaggaagatgttgcagttcaatgaatgaggtttcctcatggtatcgatgggatatgagtcgatgaccatgatgggtcacatggataaggtaatgattagggaagtcggggccgatagtgttggatgtatgcaacatacgagagatgagacttggatcagtgtgtaccaatcttagggaatccccatgtctttcgtaaatctttatttgatatcagtgtttggacaatatagatgatagtttagtatcaatgcctttcaaactaatataggataaccacttgatgccacaacgtaggaaatagggtagatagtggcagtgtcgcctttaggtggtggaatgatgtttcacattgaattgtaatgatgtacaacctttcgccttcatagatgtgcttggcaagatgttaaggcatgactgtgagctacaaggaaactgaataggcaaaatttgtgaaaccctaaaatggggggggcaagtggtcctggaatgggattttatctgtc

SEQ ID NO: 570121 - DNA, 423 bp, Homo sapiens
  misc_feature (11)..(11): n is a, c, g, or t
  misc_feature (67)..(67): n is a, c, g, or t
  misc_feature (88)..(88): n is a, c, g, or t
  misc_feature (169)..(169): n is a, c, g, or t
  misc_feature (187)..(187): n is a, c, g, or t
  misc_feature (191)..(191): n is a, c, g, or t
  misc_feature (217)..(217): n is a, c, g, or t
  misc_feature (281)..(281): n is a, c, g, or t
  misc_feature (312)..(312): n is a, c, g, or t
acaaaaaaaanggaaaaaattaacgccttccaatgccttttaaaaacagccaagataaatagtttcntttgataactttgagaggcgnctttgatgacccctccatcccaagtcctatgaacacctttcccttatggcttttcctgttattcttatgttctggaatggnagcctgttcaaaagatgnaacnaaattggtggatatttggggaaagcnaacacgaaatcttaaaactcacccgtgaagtgtgagaaaacagaggaggggaacaaatgggacnttaccaagcaaggtcaattgttgtgaaaagnctgtaaatgcttctaactcttccccctctcaaaatcataatagttgtacagaattttaaaaaggaaaagtttaaaatacctatataatagaagaaaaattagaggaaagca

SEQ ID NO: 570122 - DNA, 1039 bp, Homo sapiens
  misc_feature (1024)..(1024): n is a, c, g, or t
gttttttttttggatgtggaagccgagacctaaagttggggggtgatctctgaggagatggatcggtacctgctgctggtgatctggggggaaggaaaattcccgtcggcggccagtagggaggcagaacatgggccagaggtgtcgtcgggtgagggtactgagaatcagccggacttcacagcagcaaatgtttatcacctcttgaaaagaagcattagtgcttcaattaatccagaagatagtactttccctgcctgttcagtgggaggtatacctggttccaagaagtggttctttgcagtgcaggcaatatatggattttatcagttttgtagttctgattggcaagagatacattttgatacagaaaaagataaaattgaagatgttcttcaaacgaatatcgaagaatgtttgggtgctgttgagtgttttgaagaagaagacagtaatagcagggaatcattatccttggctgatctctatgaagaagctgcagaaaatttgcatcagctgtcagacaagcttcctgctcctggtagagcaatggtagatataatactgttgctttctgacaaagatcctcctaaattgaaagactatttacctactgtaggagcattaaaacatttgagagaatggtattcagcaaagatcactatagcaggaaatcattgtgaaataaactgtcagaaaattgcagaatacctttctgctaatgttgtatctttagaagatctcagaaatgttattgactcaaaggaattatggagggggaaaatacagatatgggaaagaaaggtaaatggattattcacagtttgccaagtaggcctttcaattttatttacaacacagatatttaaataaatcttaatgaaaatgtaccttataaagatattctagaatagcactaagtagaactttctgcaataattaaatgttctatatctgtgctaatacactagcctacaaaccacttattgctactgagcactttatatgtgagtagttcatccantctgaaactgaattt

SEQ ID NO: 570123 - DNA, 736 bp, Homo sapiens
gttttttttttggatgtggaagccgagacctaaagttggggggtgatctctgaggagatggatcggtacctgctgctggtgatctggggggaaggaaaattcccgtcggcggccagtagggaggcagaacatgggccagaggtgtcgtcgggtgagggtactgagaatcagccggacttcacagcagcaaatgtttatcacctcttgaaaagaagcattagtgcttcaattaatccagaagatagtactttccctgcctgttcagtgggaggtatacctggttccaagaagtggttctttgcagtgcaggcaatatatggattttatcagttttgtagttctgattggcaagagatacattttgatacagaaaaagataaaattgaagatgttcttcaaacgaatatcgaagaatgtttgggtgctgttgagtgttttgaagaagaagacagtaatagcagggaatcattatccttggctgatctctatgaagaagctgcagaaaatttgcatcagctgtcagacaagcttcctgctcctggtagagcaatggtagatataatactgttgctttctgacaaagatcctcctaaattgaaagactatttacctactgtaggagcattaaaagaaatcccaaagtgctgagattacaggtatgagccaccatgcctggccttattgagctttctaatttgcttcaaatgccaaatgaccatagaatggtcgacaatga

SEQ ID NO: 570124 - DNA, 181 bp, Homo sapiens
gtacctgtctctgtctaggctgggtgcagggctcactctggaccagcactttgggaggcactgtgggcggattgcttgagcccaggagttcaagacccgcctgggcaacatggcaaaaccccgtctttacaacaaaaaaatacaaaaattagctgggtgtggtggcacacgtctgtagtcc

SEQ ID NO: 570125 - DNA, 1237 bp, Homo sapiens
gctggtacggggaacctaaggacttgaacaactccaaggaagggagtgtacagaatctggggagggacagtgtccccatctgacaagtttccggtcattgacagggattttaaggacgcgcgggtgtagtagccagggatgcagtgaatgtcgttggtagtggagaactgagttgtagaatcgagagtgtagggggaattctggtcatatctcagtgctgctatgtgctgaggtctaatattgtattggatgcggggtacgtcatgtgacctcatgtgaagcctcaattctcctgatctgtgcacccatggggatacattatgccatagatgatgcctgtggattacctgatgctgggttctctgttgaagctagagcctcacactcgactgtaaagaggggccagggtgtctactaggcactccatgctcgctgtgacttaaggggactgtcccctggggttggtgcaatggtctatgggagccgcaaggcctccaagcacagggcctggtgggacctggtagccatagacctagaggtcgatccctctgctctggatggcaacttgaaagcagacacagatgagtaggtttcataggacctgtggggaaaggacttacgcattgcggaaaatgggacaacgaacgtggtgcgacccaccagtgacggggtcctacatcgaaggtggacccggggtcatcaacgatgaccgaatcacttataatgcggacgagactacctgtgacgcatgcacttatacaacaccagaccagggggagaacacataaaacgatcccgcgggtgggagcgtgagaacacactcaaacacaccgaggcggagagaataacacggggaaaaacagagcggcacagacgcaccgccaagaagcacccacgagggacaatcgagggatgagaacactccaagacgagaacaaagcaacaaagagagcgcgccaagctctgctggctgcatgagtagaacagagcacacgaggagaaaaaagacagctacgaaaagaggctgaagagaaacgcgaagacagcagcggagggaagcaaccgacgcgaaagaaagaggagaccgaagccgacagagagagggcgagagcgagagacacaacaacgacgaggaggggaaggggcaggcaacacacgcgcgagcgcacacagcaacgaaggaagagagccaaaagaaagggggacggggtaggtaagaagcaggcgagaggcaagc

SEQ ID NO: 570126 - DNA, 895 bp, Homo sapiens
cgcccgccgcgcgcgcgcgcgcaaccccggccgccgcccgcgctcccgccccggctctagcgcccccgtcccggcctcgcgccccgtgcgccctttgtagacgccggccaggccggtgcggtcggatgcgcggcggcagccccgggccccggctcggaggctcactggcggagaggaggcggcccgcccgggcccgggaccccgcgcgagtcggcagcccgcgcgaggcggctgcgctaggccccgcccggccacggcccaccccgggcccctggacacagacacggccacggcacttgctccatgcacctgcaccgacctcagcagccccgccaatgacctcagggaacggaaactctgccatccagcatcgccggcactgcccccacagaagtggtgacgaataacacccacacacggccacgtgtgaccagcccaacactcctgacgcactgttatcgacacgggtttgtgatccaggaccgcgcggccgcagcctaaccccgccagggacgctcgtaccgtgcctggctggcgcactctcgcagaagaagtatgcacacgggcgtccccggcctgaagaaactcaccacccgccacgcatcacggcccatcaccaactgcacctacggagcaatgcgagcgcagttccgtagttctgcccacccacattccatagacggcagcggctgccacccctcccacctcctccacatctgatgcaagcttcctcgcgcgcacgtgcgctgacactgtctgccttactatagggttcaacgcagtccacggccccataccttgatacacatgcggcgttttcgcgatcccaagtgctacacaccgagatgaatgtcgcgcaaccccgcggtgcccaactattttcccttattcccta

SEQ ID NO: 570127 - DNA, 951 bp, Homo sapiens
  misc_feature (7)..(7): n is a, c, g, or t
  misc_feature (19)..(19): n is a, c, g, or t
  misc_feature (46)..(46): n is a, c, g, or t
  misc_feature (62)..(62): n is a, c, g, or t
  misc_feature (64)..(64): n is a, c, g, or t
  misc_feature (88)..(89): n is a, c, g, or t
  misc_feature (91)..(91): n is a, c, g, or t
  misc_feature (96)..(96): n is a, c, g, or t
  misc_feature (107)..(107): n is a, c, g, or t
  misc_feature (109)..(109): n is a, c, g, or t
  misc_feature (117)..(117): n is a, c, g, or t
  misc_feature (120)..(120): n is a, c, g, or t
  misc_feature (123)..(123): n is a, c, g, or t
  misc_feature (157)..(157): n is a, c, g, or t
  misc_feature (160)..(160): n is a, c, g, or t
  misc_feature (175)..(175): n is a, c, g, or t
  misc_feature (185)..(185): n is a, c, g, or t
  misc_feature (197)..(197): n is a, c, g, or t
  misc_feature (203)..(203): n is a, c, g, or t
  misc_feature (220)..(220): n is a, c, g, or t
  misc_feature (257)..(257): n is a, c, g, or t
  misc_feature (270)..(270): n is a, c, g, or t
  misc_feature (272)..(272): n is a, c, g, or t
  misc_feature (281)..(281): n is a, c, g, or t
  misc_feature (287)..(288): n is a, c, g, or t
  misc_feature (298)..(298): n is a, c, g, or t
  misc_feature (306)..(306): n is a, c, g, or t
  misc_feature (311)..(311): n is a, c, g, or t
  misc_feature (315)..(316): n is a, c, g, or t
  misc_feature (318)..(318): n is a, c, g, or t
  misc_feature (325)..(325): n is a, c, g, or t
  misc_feature (329)..(329): n is a, c, g, or t
  misc_feature (335)..(335): n is a, c, g, or t
  misc_feature (339)..(339): n is a, c, g, or t
  misc_feature (347)..(347): n is a, c, g, or t
  misc_feature (357)..(357): n is a, c, g, or t
  misc_feature (365)..(365): n is a, c, g, or t
  misc_feature (369)..(369): n is a, c, g, or t
  misc_feature (382)..(382): n is a, c, g, or t
  misc_feature (420)..(420): n is a, c, g, or t
  misc_feature (434)..(434): n is a, c, g, or t
  misc_feature (467)..(467): n is a, c, g, or t
  misc_feature (507)..(507): n is a, c, g, or t
  misc_feature (671)..(671): n is a, c, g, or t
  misc_feature (691)..(691): n is a, c, g, or t
  misc_feature (761)..(761): n is a, c, g, or t
  misc_feature (763)..(763): n is a, c, g, or t
  misc_feature (784)..(784): n is a, c, g, or t
  misc_feature (799)..(799): n is a, c, g, or t
  misc_feature (824)..(824): n is a, c, g, or t
  misc_feature (847)..(847): n is a, c, g, or t
  misc_feature (851)..(851): n is a, c, g, or t
  misc_feature (853)..(853): n is a, c, g, or t
  misc_feature (888)..(888): n is a, c, g, or t
  misc_feature (951)..(951): n is a, c, g, or t
caaacgnggcatagaaaanaacatgttcagaagccatggggccaancacatgcggggacggncncaaatgcgtgatcagcagaatccnncnccttngccgaaaagtnancccagcanccnccnccaccccccccccccccccccccccccccccccnccnccccccccccccccncccccccccncccccccccccnccccancccccgccccccccccnccccccccccccccccccccccccccccccctccgcnccccccccccccntnccccccccnctcccnnccccctcccncgcacccnccgcncccnncnttcgctntctncacccncctntccccccnccactcgctntgcaaacncacngatctcagaactnttctaaagttaaaattttaaaaaatttctgatttgttntgccaatatttggngtggtgtttacctcttaagaaatcgcaatgctngtaagaaaatgctcaaaaagttgcataatggggactcagntcctttaaggtgcttcttttttctttttaaagaaaataaccctccttacaggtgtgtaaaccatttgcgggctctggtccaccttctcgtttgctgctctgtgggcacataatcggaaagcaggtacagcgcgcgggctctaacacgcttggggtagcgggganaaagtcactgtttttctttnatttctttaaaaaaaaaaaaagttctgttgcaaacgactgctgttggattctgagggtggggagggagananagggagggagagggagtgaanagcctgccctcctanatggattcttcagggccctccacanctgaggtggctcattcccatcanacananattgtcctggtgttcatttcaaggccagtgttcancagcagcgtttggaaagcaggttctgtgggacccccgccccgcccccgcactccttcatagcn

SEQ ID NO: 570128 - DNA, 259 bp, Homo sapiens
ctttttccttctaaaaagggttgccttcgtcttgtcccgtcccctccttttctcttacataaagttgtccttgtggttctccaaacaactgtccatagcagaaaaccccaactgggcagcagtcaggtggggaggcagcctctcaggggtggggaaaattcaaagtaactgctggcaggctggtgggcgccctccaggaaaagggggtgctgggccgagccgggctggcaagaagtggtgtcggtcttgcgtaaaagtg

SEQ ID NO: 570129 - DNA, 113 bp, Homo sapiens
ccagtgtgtgtcacagaagatgtcgcagcttctctgtgagggtcactgctgaccactgcagtgtccctgatgtgaagtaatcgccggagctgggattggccagtcggcagtga

SEQ ID NO: 570130 - DNA, 188 bp, Homo sapiens
ctgaccaaagcgtgcagtcagaaatatcaaaagctggaatctcttctagtacacgagtcttcacctgctgctcatgatatattctgagagccttttttacattgcacacttttggagaacggataggaagagattttatttcagatgctgtacgagtactcaaatcaccaatagtttgtatattctta

SEQ ID NO: 570131 - DNA, 672 bp, Homo sapiens
  misc_feature (171)..(171): n is a, c, g, or t
  misc_feature (177)..(177): n is a, c, g, or t
  misc_feature (179)..(179): n is a, c, g, or t
  misc_feature (302)..(302): n is a, c, g, or t
  misc_feature (310)..(310): n is a, c, g, or t
  misc_feature (332)..(332): n is a, c, g, or t
  misc_feature (335)..(335): n is a, c, g, or t
  misc_feature (350)..(350): n is a, c, g, or t
  misc_feature (354)..(354): n is a, c, g, or t
  misc_feature (361)..(361): n is a, c, g, or t
  misc_feature (376)..(376): n is a, c, g, or t
  misc_feature (395)..(395): n is a, c, g, or t
  misc_feature (407)..(407): n is a, c, g, or t
  misc_feature (430)..(430): n is a, c, g, or t
  misc_feature (468)..(468): n is a, c, g, or t
  misc_feature (470)..(470): n is a, c, g, or t
  misc_feature (472)..(472): n is a, c, g, or t
  misc_feature (580)..(580): n is a, c, g, or t
  misc_feature (666)..(666): n is a, c, g, or t
tcagcaaaataattttatttcctaacatatggtaacatatacatccaatatgtgccccccttgcacatctattcacaagttactcccaaatgacaactgctttgatatttaagcatgttctaaaagttattttagttgagaaatgaaaaatgctttagatggataacattntgagtntnttggattagtcacagcagaatttactttagttagatgagttctacaaatttaaagctttgaaaagctactacttttacttctaatacatccagatgaacacgatgtagcaatatcagcttgtnttccaganaaatctcattagtttttctggnganggaaccacttatccncgtntgtgggnactgtgcaggcaganacacagggggggggtaaancatccaaaaaanactggcagcatcaggatcaaaanaaaaggggctctcagacaaagttgtattcatgccactnantncttttccattcgttttcttagtcactaatgctttccaatggtcatgagtgcttttaataatatcaatggcaaagtccttatctttatattctgcattacacgcacacncatttttctggttttccatcaggaaccttataccttctaaaccagtacacagtagcttctaagtagccaggtttcagccgtgtganatcatt

SEQ ID NO: 570132 - DNA, 294 bp, Homo sapiens
cgtcgactgagatagtctggctctaaccggaagaccatcaagttgttcttgcccccatcttgctactattgatacaccccccaggtagctcccccaaccttgcccaggtctcactgtgccttctccatgaccagttctttcttgcccactcccaacatgatatagggacagtgtccttctgccttgatctggtctctgtttgtattatattctccctccaaaataccctgaggagcatggacaacatacctgcttgggaacccattaggatctgatggaatccctcgtccacgc

SEQ ID NO: 570133 - DNA, 160 bp, Homo sapiens
aaaaaaggtttttgtggcccctttttttaaaaaggccattttatgggggggggggttcccccaaattttttttttttagcccccccgggtgtccttccttgaatttgcccccttttttttcggagggggggcccttttttttataataaaaaatggaaca

SEQ ID NO: 570134 - DNA, 157 bp, Homo sapiens
aacccccctggaaagggcattttaaaaccctgttttttccccccaacccttatgtggttccctttttttaattttttcaatttttaaaatgtttatttttttttttgggggcttatttttttttaaaattatgtaaataaatgggctttttttttta

SEQ ID NO: 570135 - DNA, 659 bp, Homo sapiens
ttgaattgagatatgaaaatcttaccatgtacattatagatgacttacagaatattttggtgggaaaatgtgagggtcattaccaggtaagaaatgatctcagatggcattcttagatgacaccttcagttatgaactgtatggcagaaagaatttttgttaggggaaaagctttcttcttacaacattgtgactatacaaccaaaacaatcttgaaagtctgcataaaaatcttgtgcctttccagaagtgtcttcgaggctttaggaccattgcctcaaccactgtctcccatctgcttttctaatgtcaccaagtaaagaaaagacttgtatggtgaaaccccatctctactaaaaatacaaaaattagctgggcatgctgaccggctactgtaatctcagctactggggaggctaagggagcaggatcgcttgaggccaggaggcggatgttgcagtgagccatgatcatgacactgtactccagcctgggtgacagagcgaaattccagcaaagaaagggagagaggaagggagagagggagtaggggagagagagagagagagagagagaggcaggaaggaaggaagaagggaagggaagaaggaagagaaagaaggaagggaaagaaagaaggaaggaaagagaaaaagaaa

SEQ ID NO: 570136 - DNA, 659 bp, Homo sapiens
gttggagaagcgggtgacgaacacgtggagagtggtgagcgaggggctggaagcgtgaaacatatgtgatcgcaagagatccactatgatgcgcttactaatatactcatatggatccgccgtctgagacaccgagaagcgtgaagaacgtctatgcgcagattctgcccttgtagtgttgtgtggactggtgcggaggggccaaatgtccatatggtccctcgtgtcatccatggttggtctgtgtgtctcgtcttgggcgtccctgatagttgatgatttggcgtgatggcaattacgctcatagccatgaaactgaacagaaaagactgggactctctatgctggatttgcacttccttacaggagtttggccctggggcgctgtcgcctggcagtttcgtacttgctgtcatagcccagtcatctcttcccacgtgcattgcatggtctcacgaaactgatctttactctgcttcaccacctcagtgcaactctatgggcaggcagcacgtaggctacactctttgctgggacggtatcgttagatgtgcagaccctgagcttgttgcttttgtcttccctggggaatgtttcttcggatccattcggcttttccaggacaaacctgtatgtgggagctggtggtacactgtgtg

SEQ ID NO: 570137 - DNA, 155 bp, Homo sapiens
agcggagtggaggggagggggcggcggccagcggctcgcgcggagccggtctcccgggcttacgtaaggcgcgagtcccgcgcggcggccggggctccgcgactgggcgggcggaggcggcgccgccctgcaggatccgggctggaagcctctcg

SEQ ID NO: 570138 - DNA, 1168 bp, Homo sapiens
ggccaagtgacttacgcccccgaccctgagcccggacctgctaggcgaggaggatcagatctccgctcgagaatctgaaggtgccctggtcctggaggagttccgtcccagcccggcggtctcccggtactgtcgggccccgtgcctctggagcttcagtgaggcgagcgtcagggtcggggagtatttgggtccggggtctcagggaacgggcggcgcctgggtctgcggtatcggacaagagcctgctggagccaagtagccctccctctcttgggacagacaccctacggtcccatgtccatgtgtgggcaccgcgtgtaccatcctcctggccctggttgctggcactggccagttgcccgtaccgcaccaacaatcgttgctgatctttgccgacagagctcggactatggggacctagggctgctatggggcaccccagactctaacaatccacaaactggaccatgcttgtctggcgtggagtggcttgtcggttcacagacttcatacgtagcctgtgtctcctgtgacacaccctctagggccaggcctcctgacctggccggctcccggatccgggattgaggcattgtaccctggcagtcccttggtttgcccaagtttccaggggagtggacctgccccctggcaggcagcgtgaaccgagggccagaggtccctagactgccagaggcaaccctccacagcaacttggccgggcacaagatggcaactatgagagataggcggccattgaaggagtgacccatatccagtcacaaccaccatatacaaggggcttaccaaacaagacatgccacaagacaatcccaggttatattcccacagaaccacgggatcgatggatcccccgagaccccagctgctatggagacaaaccatcactcgcatgagaacgggcagcagtacccaggcagggtaattaccacatgcacgttaagatggggccgggaacaatggcgattggggaccagagaacacgtcatatgggcaaatggcccaacgtgccctggtacgcgcgcgcaaacgcatcgaggtacacatggacatagtaacaggaaccacgaagaacttcatggtcagaggcgacaagacgctggacgagcagtgtatgagcgtgggctgcaagttgggagacaca

SEQ ID NO: 570139 - DNA, 763 bp, Homo sapiens
ggagagctcaaccagtatagttgcaagtctggagagcgtgttggtgaactgttcaaggaacgcagctcccggcagatcatacagatatccagattatccagggacatgaccatgtttgtgaccgcgtccaaggatcgcacatcggcaggcaagcttttgtgactccacagatgtcttgatacatcatgaatgactttccggacgatgaacgtcctgttcaaatctcagcatgaacctctcccccaaactatgaccatgtggtccttgggcggtggtcaggaacgtccatggatgtaaccacaaactccaggcaggggtattggacaagatttgaggcacagagttcttccatttggcctttgacagaagagtctaggaaagagtcaaggcgtcgacttgggagcctatcaacaagtgtagccacttccatcctgatggcaagcagcgtactagcagtcggcggcgaagcatggttacgtccgtatccattacttcgagcctacagtacttcgaatccgaggttagaggcttacgaagcctggatactcctgccgggcgtgggtggctccatgcctggtcatacccgatgcacgttgtttatttacatggccagtgcgggtcacctgaggtcacggagatcttaaggaccaggactgaaccaaacatgggagaaagcactccgtctccttactaaaacattacaatacaatttaggccacggccattggtgggctcacgtcctaatagtccccctggctacctc

SEQ ID NO: 570140 - DNA, 559 bp, Homo sapiens
taggcagaatatagtatacatttcataagctatttgaaatttggtcttaataggtacttacagattatacgaggcagaacgtgtttaatcgcagtttcctaacaaggtactagaattgcatctttccatagtgtaaataataatcaaacataaacatgtacaattacggatatttgagtgcaatgttgtttgtttcaattacatatcttttagcatcctacctattatacataaagtaacatcaaaatgaaaactccatttaagaaagagcatccggaaatgacccccaaatggtagccgagcaaacagagaagcggtttccaaagataagtatttggaagacctatagtgaattatcaagctatattccaggctgtgtcactttatagtctaagaaattcggcaaagcatgaaactacccaaagctacatgggctctacagttggctagagagccatcaaggctatgcgttaaccagctggcaaacattcagtgataagtgagttctcttcacacctgttagtccctattctgtccatggattgtcactttcgtctga

SEQ ID NO: 570141 - DNA, 328 bp, Homo sapiens
tgcctctcccaaacccaagccggcaacactgcggcccgcggagacactgcgtgttgggtactagctgataactaagcatgagcacaatgaagggagactgcaagtgaaaaggccaggcctaccctcctccaacgaaaggacgaactgatccaagagacggcgtgaggcaggagaggacgtagctccgcatcaggcaggcccggacaggcaccctccaaagagggtttcattagggatgcaaaatgaatctggctttacagctggtgtagaccaggctcctgccccatcctgggctacccaggccctgccggtgctgacagcaaagaca

SEQ ID NO: 570142 - DNA, 390 bp, Homo sapiens
  misc_feature (360)..(360): n is a, c, g, or t
gctcgaccaaaagtttggtatttcgagttgtcgtggtttcttttgtaacattgctttgtggtaattatctgcatgtgttttggttattctgtgtattcagagctgtctattttaatccatgtatgctttggccatagtaacccatccagattaacacatttataagtcaccatcgatttgtcccatagttgtgataccgttgctttgtattaacaccagagagtcagtgatgatgaagggaagtgtagtcgttagtcaccagggattgctgagcagcaaggatcaagaagctggtcatgcccaaacgcaaccttgagggagagatgttggtgagagataagagatgggtggctgggtacngtgactcacacctgtaaccccagcactctg

SEQ ID NO: 570143 - DNA, 375 bp, Homo sapiens
tgagatggagtctcactctgttgcccaggctggagtgcagtggcttgatctcggctcactgcaacctcggcctccggggttcaagcaattctcctgcctcagcctcccaagtagctgggactacaggcgcgtgccaccacgcccgggtaattttttgtatttttagtagagacggggtttcaccgcgttatccaggatggtctggatctcctgacctcgtgatccacccgccttggcctcccaaagtgctggaattacaggcatgagccaccgtgcccggccatctcctctcttttttacaactttacttctttcactttaccaagaaaataatatttctcattctgggatttttactacagtattctgctcaag

SEQ ID NO: 570144 - DNA, 482 bp, Homo sapiens
  misc_feature (429)..(429): n is a, c, g, or t
  misc_feature (438)..(438): n is a, c, g, or t
gggggggccgggtgtatggagggtgcggtggtcggggtttcgggttggtggaaggaaggcgggccgggagaatggggctgttcggagcgcgctgtggtttcgtttagtgggttggatgtcggcagtctgcggggatgctgtagagggttcaggtagtgggggatgcctcagcaggcattggaggcgcccatccttcggagagcttgaagccgcaagtgtccatcttccaggatgcacgggactccccgagccttcgtcctcccattactatttaatatccgcgctacattgttcggcgcttggtttccctccagtatgcgccgtggcagccagtgagacgcccccagggagcgcggccgcagcaaacttgttctcgtgccgagttcctgcagcgcgggggctccggtggttctagagcgccaaacggcnctgcagtcnccagggggtcaaaggggggcgagtgtgtggtttggcgcggtggg

SEQ ID NO: 570145 - DNA, 422 bp, Homo sapiens
cgctctgcaagatggagtttcgccatgttggccaggttggactcgaactcgaactcagtggttccgaacaacttggcctcccaaagcgctgggattacaggcatgaaccaccgcaccccagcccagcatttgtcccttggtggactgctttatttcacttagcataacgtcctcaaggttcatctatgttgcagcaggtgtcagaattcccttccttttaaaggctgaataacattgtggtatacaccccattttgtttatccgttcatctgttggtgtgtattcaggctgtttctgccttcgggctgttgtgaagaatgccgctatcaacatgggtgtgagaatatctgttcaagtccctggctatatttttcttttggatatttagccagaagtggaattactggatcatctggtttctt

SEQ ID NO: 570146 - DNA, 376 bp, Homo sapiens
  misc_feature (139)..(139): n is a, c, g, or t
cctcgtgtgcttatcacatggatggtccctttggaggacccagtcctatgtgctcgcatcacgtgtgcccagagcttctgccataccaatccacatgcttggtgtgtgtgagagaatgcactggttagggcctgggcantcgacagatcccctgtttagtagttttcccctttcactcatgtccagtgatgtggagcggtccattttcctccccaccatggggtcttagcctccttggtgctggcgccctggtagggactgctgattacattctcattggtcgaccaaggcccggtcccgtggcggctcttccgtaaacacgtccagtgcagccccggcacactggccagactgcagggcccggagcagggcgcct

SEQ ID NO: 570147 - DNA, 250 bp, Homo sapiens
cactactacttaggggtgtgtgtcatacaacacatgtgtctgaacctggtccatatggacgaaacaaactttatctattatgtgccacactctatgcacgctcctcatcagtaatgggatggtgtcgactgacctacacggtaatctacgggcaaattccgggtaggctataaacttatgtctggatacaccccaactctagttgccagcgtcatgtctcgctcaggaacgctgatatgcccttaacctg

SEQ ID NO: 570148 - DNA, 134 bp, Homo sapiens
tcagctcgtcctggtctttcttgagcattggccctcaggcccctggaaccaggcacaccagtgcagagggggagcccttgaattccaggagtaagggccagagaggaaccccaggagccaaccgtggactagtg

SEQ ID NO: 570149 - DNA, 169 bp, Homo sapiens
ccgacccacggccagaagcgccgccagcgccagcagcacgccatggctccccgcgcggcccccactctgcgcccgatgcccatgccgctctgcgccctgttctccgcgacgtcgggctgcctccgcccctccccgcgccgtcctgccgcaaacttccagggactccggg

SEQ ID NO: 570150 - DNA, 590 bp, Homo sapiens
tacaggtcgagacgatcacagtctctgcggagccgcccaagcccgtccagtctccaggcaacaactccaaacccgtggaggacaaggatgctgtggccttcaccggtgaacctgaggctcagaacacaacctacctgtggtgggtaaatggtcagagcctcccagtcagtcccaggctgcagctgtccaatggcaacaggaccctcactctattcaatgtcacaagaaatgacgcaagagcctatgtatgtggaatccagaactcagtgagtgcaaaccgcagtgacccagtcaccctggatgtcctctatgggccggacacccccatcatttcccccccagactcgtcttacctttcgggagcgcacctcagcctctcctgccatgcggcctctaacccacctgcgcagtattcttggctgattgatgggaacatccagcaacacacacaagagctctttatctccaacatcactgagaagaacagcggactctatacctgtcaggccactaactcagccagtggccacagcaaggactacagtcaagacaatcacagtctctgcggagtctgcccaagcccttcatct

SEQ ID NO: 570151 - DNA, 343 bp, Homo sapiens
  misc_feature (185)..(185): n is a, c, g, or t
  misc_feature (187)..(187): n is a, c, g, or t
  misc_feature (203)..(203): n is a, c, g, or t
  misc_feature (251)..(251): n is a, c, g, or t
  misc_feature (288)..(288): n is a, c, g, or t
  misc_feature (291)..(291): n is a, c, g, or t
  misc_feature (335)..(335): n is a, c, g, or t
ctggtccccctggtgcccatttgggctgggtggagccaggaacaggagggacacttccccagaatccgcatgtgtccccagtgattacactccactgccaccgtggtgccgggctttaactcccaccccggaaaggactcctctcggcagagacgcgacgggcggctccagaagggacaaccctncnaaaaaacccagggggnccacacacacacacacacacacacacacacacacacacacacacactnttgatcccttgcttccctcccccagtgcgttctgtgntcnccaagttcaaagctgtgcacatgtggacactcaataaatgttcnttggttta

SEQ ID NO: 570152 - DNA, 95 bp, Homo sapiens
tgcgagggatcgagtctatgtgtatgacagtagtggttctcaatacttccaacactggggccagggcaccgtggtaatcgtctcctccgcctcca

SEQ ID NO: 570153 - DNA, 274 bp, Homo sapiens
  misc_feature (230)..(230): n is a, c, g, or t
agttatacagacgttagatgtatttctcttcctaagagaaaaattagttataaccttggaaactaattctgtaagggtcctccacagctctgattaacaaccgtcccagctggtctaatatgcaagtctgattgcatttcagacctagcaatggtttatatcagggatcgcagatttttctatttcttgggtggggcctgtttatgacagtaggctagtctaaagtgcanactcagtctaacatgcaactcacggggactcctctagcagtcga

SEQ ID NO: 570154 - DNA, 247 bp, Homo sapiens
cactgtaagcatcctaacagccttcactctcccactctctgggcacctggtccacccaccccggctcctccaaacatgtcaccatcccactgtgcccgtgctgcctgtccttctgctgtccccatcttctttttcattatatttttaattggagaccgagtctcgctcttgtcatgcagtgctggagtaccattggtgcgatctcagctcactataacttctgcctccctggtttaggggatgctgt

SEQ ID NO: 570155 - DNA, 357 bp, Homo sapiens
cccaaataccatgtcagatctttttggtaaaagagttaatgaactatgagaattgggattacatcatgtattttgcctcatgtatttttatcacacttataggccaagtgtgataaataagcttacagacactgaattaatttccactggctacttttgaaaccaggaaaataatgactggccatttcgttacatctgtcattagttgaaaacgcatattttgttattaatattaatgtctgacttgtatttgaatattatctattcaaattcacattatggcagaggtaatatgcaatctataatgacttcttaaaaagtgtaacgtaattagagatacatatatcgttacatatt

SEQ ID NO: 570156 - DNA, 383 bp, Homo sapiens
  misc_feature (3)..(3): n is a, c, g, or t
  misc_feature (21)..(21): n is a, c, g, or t
  misc_feature (28)..(28): n is a, c, g, or t
  misc_feature (200)..(200): n is a, c, g, or t
ttntccaaattccgtttcttngtcttcngagggctggataattggctgacacaaggaccaaaaacctgtatatcatctccggaagggataagggacggctacaacttcggggggggttgggcatccaggagggggcattctacaacgaaaggcataccgtggaaaacatggcgtgtttctttattttgaagataatgcangactcatagggaacaataaaggcgagatgaaagggtctgccattacaggaccaggagcaaaggagtgtgcacacttgtggccccggattgcatccaatggtggcaggattggatgattctccagtatatttggaaaaaataaaaaaaaactaaacccattaattaaaaaaaattccaggtaaa

SEQ ID NO: 570157 - DNA, 263 bp, Homo sapiens
ccaaaccaaaggggggggggttggagacgacccaaaccccttgtgttttcccccctaaaaaaacccccccgggggggggggggggttttttcccttcccccccggggggttttcggggaacccaatttttttggttccggggggggggggggtgccaaaatttaatttttaagaattttgggggggggccccccccgggggggggcccgggggtttttttttttccccccgggggccccttttctttacccccttttgggtta

SEQ ID NO: 570158 - DNA, 118 bp, Homo sapiens
  misc_feature (29)..(29): n is a, c, g, or t
tcgagccggtacccagcggacagcactgnaattagagatgtgtgcacatgctggttaattttttttacttttggtggagacagggtctctctatgtgcccaggctcatcttgaactct

SEQ ID NO: 570159 - DNA, 434 bp, Homo sapiens
ggaggacgtgcaagcagccctgtgaagaggtcaacacaggggggaactgaagccccttccgaacagctagcaccaacttgccagccatgtaaagtgattcaccttggaaacagatcctccagcctgtcgaggggcgtccaacccgaccagagatttccgcgcccaacgaacggtttcggagaggccacctttgggcaacccggcgggggggggagggggtgggggtgggggggttggtggtgggggtgggggggttaggggtagcggcgggggggggtcggcggcgcgcgtggacaagactactgaaccagaaacacacagccaagctgctgacccacagactttgtgagagatcataaacatttactgttgttctaagacactgttttagggtgctttgttgtacaacaatagcttactgaaaatacagagag

SEQ ID NO: 570160 - DNA, 234 bp, Homo sapiens
gcggaccccagttggccttttctgttggcacagcttgctggacaccagtgaaagcttccagcttgtttatttatgtttgcagcttgatttctcaggctgctctttgttagaaaaaaaaataataatttattggggctgcttttctgttagacagggaagccttgcccgaggactccttttacccatcacttatcgtgcaaatataatttctttactacgctcctgatatcaccc

SEQ ID NO: 570161 - DNA, 783 bp, Homo sapiens
  misc_feature (138)..(138): n is a, c, g, or t
ttcgtacaatctcaggaatgtatagacccccgccccacacttcatatcccgcgctaggccttgcgtgatgaggccccctgcttcagtcccttccccatgcttccttgcctgatgacaataaagcttgttgactcagcnaaaaaaaaaaaaaaaaaaaaaaaaaaaaaaaaaaaaaaaaaaaaaaaaaaaaaaaaaaaaaaaaaaaaaaaaagaagaaaaaaaaaaaaaataaaaataaaaaaaaaaaaaaaataaaaaaaaaagataaaatgtaagagtaggggtgacgcataataattatttgaggagagttataagaagattatatcaagagcgcgatatattaatatacagaaagtgtgtagagaaaataggtgatagtatgagaaatatgaatgaaaacacgaacactcattaaatcaatgtgtgggggtacgatgaaaataaaaaagcaccacaaaaaacaataaaaatacataagttaataatagaaaacaacctaaagagatgcaaatcagatgtgaagaatactaaataaataacagtgttagttattagaatattggagtcatcaaaacaaagccagcagaagaagaatatttaagagctccgcagagcgataagaagagaacaacaaataagataagagcaatcaatcgagagtatatgatattgaatattgtgataagaaaaacaatagcttaataagcgcttaacacagtgaaacagaaaaaaataaatggtaggtaagagatgaatgattaatttaaattatattttttc

SEQ ID NO: 570162 - DNA, 516 bp, Homo sapiens
  misc_feature (516)..(516): n is a, c, g, or t
cttctgtcctcacgttggctgacatgatgatctctatccctgaacgtctattgtagtgggcctgggcatctttggtagcctttgtttgaatcttaatctggaactgcagcctgggccttggtttgatccttggctttggcctttggcccacacaacctgagacccttggcaatgcgggcacaagcacacttcccaagcttggggtgggtaatgtaggcaaattgattgagcttgaggctgacaccctttggcatctgggcttaacctcctttggctttatgaggaccttgatagcctcagtacgtgcactcatggccttggcattgttggcctgcatcttctttaggcccttcttgttgcacttcttggcaaagcccatgttcctcaggaacttggggtccacccccttaagagattcatatctttgcaatcggggtctcttgatgccattctgtgccattttcgggactggttgtgtgtggtgtggttcttggacttggccttgccatatgacan

SEQ ID NO: 570163 - DNA, 122 bp, Homo sapiens
  misc_feature (42)..(42): n is a, c, g, or t
  misc_feature (44)..(44): n is a, c, g, or t
  misc_feature (52)..(52): n is a, c, g, or t
  misc_feature (122)..(122): n is a, c, g, or t
tagattgagctggtaccgtcaatgacatctgccacagtctcngnctctcagnctcagccccctgcttcagtcccttccccatgcttccttgcctgatgacaataaagcttgttgactcagcn

SEQ ID NO: 570164 - DNA, 872 bp, Homo sapiens
tacgctgagacatcgcatatggatgaccgtaatcctttaacgttagttttgaggccgagcacgattaggatataagcttgcttaaggttatttgatataatatagatgtaatttgagtaattcacatagagattttatgtagagcatattgccacatgggcgagcaaatgtactttcatataagatcaatagagcttggcagaaacgttaggcgacagtgttaagttcaatgaagccaatacttacatatgggaatctagagcctaagaaatcgctacttgaaggaagatatttgtcttactcgtgtattctcttaccaagacttgaagaagcaagatgggatatgctgccacttcaaatgacaactcagaagattgatgggaatatctaaggtgtgactggatcttggttgcttagacaaggaaaacgttcaagtacagtcctaaatactttctaaccagtcagaagttgggccaagtttaaaggtatagtactacaatcttctcatcctaaattcttttaagtactgatctgcaatgcatcaccagtctcatttgaaaatccctttaagctcgtcacgatctgacctatgtcaaatgtagttactcggtatccatggtagtacgagagttagattagtatcctaattggagcaatcattggacggcagtggatgtcgtctacgagtgatggtgtaaaggtgaaatgggggagacatcgtttggacctatggactattaagaaggcagatttatacgaagattgtattagggttgattagacagtgtcgtaggaagattatacacgggggacggagtcttggtgatgatgggaccaaacgtggcgaatatgccgaagtagttagctaagat

SEQ ID NO: 570165 - DNA, 695 bp, Homo sapiens
gggcccaaccaaaccattttaaaaaacgttttaaaaagggcaccccattttaaaaacccccggggccaaagccggggtaaaaaactttcctgggccccagttccgggggaaaaccccctttcccaggcaattcttttaaaaggccctgggggtgggggaaaaaattttttttttttaaaggggggccacccccgttttttggcccctcccaaaggccccaaccttatcgaatatgcccggccccgtttttaaatttccaagggtttttttccttttcttcccaaaaagggaagatggaccccggtgttttctcaggaaaaactatttcaaacccccgggatttttccgtttaccgcctccaaaaggcccaccgcttttttttttttggttccaataaaaaggaaaagcccccccccatggtatcgcgggaggggggggtgtgtccttccccccttttggggacaactccaccacaggccgggctaaagaacccctcggcagggtaaaggaaacccccccccccactccccccggagagcggggggagccctgttctcccgccaacacaaggtggaccaactttggccatatttcccgcgagcgcaatactttatcggagaggggctccctcggcggggcgcgaattatagtgccccttttacacaccggatattaaaccccccggggcgccacct

SEQ ID NO: 570166 - DNA, 966 bp, Homo sapiens
agcggagtggcggtagcggcgggtactgcagtatctgcgtgccgtctactagtcggtgtgactcgatgcgggtgctgtgactgtgtgttgagcgtggtcttcatcttctttgtggaacacatcttgcatagggcaacctgatcagtctgcagcatgaacgtgttggttctggtaccgttgctaccgatgttgttgcgttagcagataggcgccgtagtgaaaactccgtggcggcgctgccaagtccatcgttctgtgtagcgtatactcgctagctaattcatcctggcaaagaaatggatactcatccaagacaggatacagttatttgacagtgatgctggctacagacctgagtcccactatgcaaagatgtaagccctatacgatggcattacgtccagcaatcagagtaggtttccaagctaactgatcagttgctccacaacgtgcattgtcatattgcgctagaagttctattggatcatttgcatgaaggagctaaacgctcgttgcatgtacggatctggaagtggaatccttattgtatgtcttgcacgtgtggttggatgtactggataaagtcagtaaggaattgatcatgttgaagagctagtagattgactctgtaagataatgtctgtgaaggacgaatccaagcacttctgtcttgcagggagagtacagtttgtcgtgggggatggaagaatgggatagtgctgaagaaggcccttatgatgccgattcatggtgggaagcattgcagccctgttggtacccccagggatgcttaattagattcagttaaatgcccggagcgaaccattggatcttggcctggttggttcccttgcaagcggaaaaccaaatggttggaagcagtaatgacgaggctaccaggattgggcgggttccaaaattgaaggcctctaatgggggtggatatagtggcctttaacacattag

SEQ ID NO: 570167 - DNA, 1077 bp, Homo sapiens
ggcctggaggtgatctggggacgtggggaggttattcgatggcctgcagcgcatgcccaggatgatcatgcaagatcaagcaggttctcacctactctcgtgtgggactccgatggaagcagctgcgttgcactttgtcaagagataatcctacgcggcgctatgccatatagccaaaggccaacgactatatcggtgtctgcatgtgtactctctaccacgagaacacgctgtggtactcaatgtctttgaccggttagcacaacgagtaggaagtctgtgctaggtgttgcgacgacgggccccaagacaaaaggggagctgtaataacaaggctctgggtgagcctcagacaagagttgctcgaagtcctgtgatggagacatgactataggataggcgtctacgcagaggataatcgctagaagtgtaaccggtattcccactgttatgagtcctctgcgtgcgtgtggctggtatccgagggatgtacccagaggggccagctatagcatggcgcctgccggtaatcttgacacgcacgtgtcaatggtgccgggacttaaaacccatactactgagctcctatcctggcgatatcgaaatgatccttggggatccacggaaacacgatagtggtcgtagagaggcaggagcgaagggaggtgggcctgagcaatccagagatgactactgctcgcataacgcagacggggaatacaactggggacttatgggcattggcgtgtatactacaagcaagtccatgattgaggatgtaattaaaggcggctagtgacttcaacacgacagcaaggtgttcccccaggtcaagactggaagccgggggtgcaaaggagaccagcacaaggggacagtcccgtgtggccggaagggccctccgtgcccctggaaagctatgagagaggagagacgcccgggtggttggcaccgtacacagtccaaggggcttcggaaagacgcagagaactggcactaaaaaaacacacaggtggagggaattctggggagaaaagagctgaaaaaaatcctgtgggtcagcccccccacgtaaaa

SEQ ID NO: 570168 - DNA, 456 bp, Homo sapiens
tgggaaggtttttccaaagctggatcttctcaccaaagtcccacagcgagcgctggagctggacaagaacagacccataggaactgctcctgtcagcttccgaaccctggtagggtctgcttggaatggaacctgctctggacagctcgaatagagtcgctttgtgcagaggagaaccactaggttccaaaacagtgaacgtggaggatgaagatgctgcgtggaggtacatgcaattttattcaatatagacatttgctattttctgcttagaacccaccccctgaatacgtgctgtctatgcagttatggcccattatatggaaactctcatgccatgaagaatagagtaccgctagttaagtattaattgccaaatgaaagtgacacgttctatgaagtaaatccgccacccgccggggagaggggatatgcgggggcaagttattccccccc

SEQ ID NO: 570169 - DNA, 281 bp, Homo sapiens
gttcaagtgttcacaagagaaagatgtatggtgcaggaattctccaaagtagaaaggacacaaagggactccatccatctaggacaacagttagacatagatattctattaaaatgtgtttaaattttcaacaccttggggatctgggattgacagttgcccttgcttctaaggtaggaatctatgccactctatggttgataaatgcaatagttatgcacatagtcctttgtgaaaacacagtcgacgcggccgcgaatttagtagtagtagtagtagta

SEQ ID NO: 570170 - DNA, 595 bp, Homo sapiens
tgtgatcacggagggtgtgaagccaacactctctgagctggaaaagtttgaggaccagccagaggccattgacctggaggtggtgactgagagcacagggaaggagcgggagcacaacttccaacctgtgggacaacagtgtgatggtctcgtgagaggtgatgctcatcaacactgcgagggcgaacgatctctcagcgtgtgatggcgaacgaagatctaccatcatgcgccaagcatgaggacctcaaggacatgtttggagttcccagcccatggaacttatgagaaatacgttcacaagattgtgtgtggacacaccgttgaacgtgtggagtttgcgttggcgccgaattctcgagtggcggagcaacaatggcgcgtacatatgtggccggggttgtgatgtgaggaaatttccgtgtatccttggttctcttgaggctctaccactgcgatgagcttgaaaggtgcgtccccctgggacactgcgatgctctgcgtctagagacaagcatcacggtggtggatgtttggagggccacgcatgaatgtgggcgaagctggtgcaagcttggatacccccagacttgtg

SEQ ID NO: 570171 - DNA, 330 bp, Homo sapiens
ggggaaacgccgagagccacttcatgaacaaaagcacctacgattctgggcctacatcctctacctggctgatgtctaggatacaagcgaccagtcccattgtcccaatacaggataaccctggtagatccatacctttccaccatgacagagtagtgagaatcactctgagagcattgatagtatctatctatgaagcccattttctcatgctgacaatcctgcttccttcttcttccacaagtatagtttatgaactcactccctgttaaacttcctgcacacaattctccacctcacaatctgcttctcatgagaacaaaaacacaa

SEQ ID NO: 570172 - DNA, 162 bp, Homo sapiens
ccccccccccccccaaaaaaaaaaaattttgggggggcaacaaaaagggggggggggccccccccccccattttagaaaaggaaggaaaaaggggagggcccccccggttttggggttaaaagggggaaaaaagggggaattttttggccagggttttggga

SEQ ID NO: 570173 - DNA, 1263 bp, Homo sapiens
atgggcacctccaaagaaaaggccaagcccctcacgctcaagcaggctctccttggccacactgatactgtcacctgtgccagagcatccctggcctaccacataattgtcagcgggtcccgggaccgaacctgcatcatctgggacctgaacaaactgtcattcctaacccagctccgcggccaccgagctcccgtctccgctctttgcattaatgagctaacaggggacattgtgtcctgcgcaggcacgtacatccacgtgtggagcatcaatgggaatcccatcgtgagtgtgaacacattcacgggccggagccagcagattgtctgctgctgcatgtccgagatgaacgagtgggacacgcagaatgtcatcgtgacaggacactcagatggagtggtccggttctggagaatggaattcctgcaggttcctgaaacaccagctcctgagcctgtggaagacctggagatgcaggagggctgcccagaagcacagatagggcagcaagcccaagatgacgacagcagtgattctgaaacagaagagcccagtgtcagccaggaccccaaggacacgtccagccagcccagcagcaccagccacaggccgcgggcagcctcctgcagggccaccgccacatggtgtaccgacagcggctccgacgactccaggcgctggtccgaccagctcagtctagatgagaaagatggcttcatatttgtgaactactctgagggccagaccagagcacatctgcagggccccctcgcccacccgcaccccaaccccatcgaagcgcgcagttacagcagattgaaacccgggtaccgttgggagcggcagctggtattcagaagcaaactgactatgcacacagcctttgatcgaaaggacaacacgcacccagccgaggtcaccgcgttgggtgtatccaaggatcacagcaggatcctcgtgggtgacagtcgaggccgagtgttcagctggtctgtgagtgaccagcctggtcgttctgccgctgaccactgggtgaaggatgaaggcggcgacagctgctcgggatgctccgtacgcttctccctcacagagaggaggcaccattgcaggaactgtgggcagctcttctgtcagaagtgcagtcggtttcagtcagaaatcaagcgcctgaaaatctcgtccccagtgggtgtctgtcagaactgttactatagcttgcagcatgagaggggggcagaagatggacctcggaactgctga

SEQ ID NO: 570174 - DNA, 881 bp, Homo sapiens
gaacaatgaagaaatccaaaacctgaacagaccaataacaagtaacaagatcaaagccgtaataaaaagtctcccagcaaaagaaagcccaggatccagtggcttgactgctgaattctattaatatcaagcttttaaagaagaactaatgcaatttcgactcaaactattccaaaaaattgaggaggagggaatacttccaaaccttattctatgagactagtattactatgatgccaaaaccaggcaaagacacagcaaaaaagaaaaccataggccaatttccctgatgaacattgatgcaaaaaatcctcaataaaatcttagcaaaccaaatttaacaaaatgtttaaaagatccttcatcatgaccaagtaggatttatcccagggatacaaggatggttcaagacacacacatcaatcaacgtgatacattttatcaacagaatgtacaaaaaccgtgtgatcattttaattgatgctgaaaaagcatctgataaaattcaacatccctttatgatacaaactgtttaaaaactgggtatagaaggaacataccttaacacaataaaagctatatacaacagattcacagctaatttcattatgaatggggggaaaactgaaaagccttttcctctaatatctagaaggtgacaagggatgcccactttcaccactgttattcaacatagtactggaagttctagctagggcaaccagatagcaaaaggaagtctagggcatccaaatggaaaggaggaagtccaattatccctcttggcagatgatggatcttaaaatctgcgacaaatgttaacactttcacaaaaaaatattaaaactgttgcacacacatggataattcggcggatacaa

SEQ ID NO: 570175 - DNA, 1340 bp, Homo sapiens
  misc_feature (361)..(361): n is a, c, g, or t
  misc_feature (363)..(363): n is a, c, g, or t
  misc_feature (366)..(366): n is a, c, g, or t
  misc_feature (413)..(413): n is a, c, g, or t
  misc_feature (597)..(597): n is a, c, g, or t
  misc_feature (612)..(612): n is a, c, g, or t
  misc_feature (729)..(729): n is a, c, g, or t
  misc_feature (862)..(862): n is a, c, g, or t
  misc_feature (864)..(864): n is a, c, g, or t
  misc_feature (1289)..(1289): n is a, c, g, or t
  misc_feature (1313)..(1313): n is a, c, g, or t
gctggcagtgacgacttgcgacctgcgtccttgtgctgcaagcgcacttaaccctgtccgggactggatcgagacctcctggcgatgcagcatcttgtggccgaccgtgcgtgggtttgtgcacgaccatacatcgaggagcgaacttgtctgcatgagaccgctggttactaagtgcaaacaagacttcttgtcgactgctgctttcctcacatccagctctgctgcaatagctacgaaatcttagaaatgctttgtggtgtatttggaactagatatacagatgcgaagcattataactctacatgcgaactgaatcttgagggtccactaccgatttatatacctatgtagtagtggntnctntccatttgcgcatacacaagcataatcgtagcgcctgagagggcttntatggtaaatagtaacagcgaagtaacagtattgtacattctatagactctttccaagtaccataacacgtcgaaaactataaatttcttgtgtaaagttgaatactcatcactttgtcctttggtcggagatcattgaaataaagcaaattacacaggttcggtatacgaaatacaggagccntttgttgtttgcccnatcccggccggattggtcaacggtcgccagagattatttaataaaagttgccgtttgaaagggcgtggtgtcccacacaagatatacataattacaccaatgcttactcaaccatanatccgcggggatcggatacgcctcggggtaatcggattgggacgggaatcaacgttccacgccactttaagtgtctcctaggcatccgaacacttccttcggacggaggaaatgtctttttaccttcgggacntnaatcaacaaaagctggcaacaccatacggcctcttctaacggaggcacgtatacccattgttattgcacacgtaatatatacagaaacgtaataacggtacctgtattgggcggcaccttttgcggatttttttatataatggcaatggtcgcccggtttttggcaaggaagtggtcggggtttgccactattccctatcctttggtaattggtctcctatttgccagtcggtattacatccggtgtgcactcagacattatccaccccccgccccagttaagttgcatatgggcgagggccttccctccaaggttgtttccctttgattcatatcacatatcggcaccattatcgcgaatccggcgttgtattcctatattcacttggggtcttggtgcaggacagcgcgcctctcagggtgtnatgtggcctttcttacagtcctcntcacaggtatccgtgacttccgcatta

SEQ ID NO: 570176 - DNA, 294 bp, Homo sapiens
  misc_feature (217)..(218): n is a, c, g, or t
  misc_feature (244)..(244): n is a, c, g, or t
  misc_feature (257)..(258): n is a, c, g, or t
tttatttgttacagccctgggggctgagaagtccaaggttgaggggctgcacctggtgagggccttcttgctgctggggactctgcagagtcctgagggtggcgcaggtgtcacatggccagggggcggagcatattcacaggccagctcaggtcttccttcctcttctaatgaagtcaccagtcccactccggtgataacccctttaatccatgannatccatcgacaggttaatttcccaanccacgtttagagnngccccaccctcttcaagtactgccacaaattggaga

SEQ ID NO: 570177 - DNA, 196 bp, Homo sapiens
  misc_feature (166)..(166): n is a, c, g, or t
  misc_feature (192)..(192): n is a, c, g, or t
ccctccctcctctgtgtgcacacacatcccatgctgtgtccatgcgtggcctccctctctccgtgtgcacacacatcccatcctgtgtccctgcgtgcccctccctcctctgtgtgcacacacatcccatgctgtgtccatgcgtgggcttcctctcttcgtgtgnaaaaaaatcccatcctgtgttcctgngggg

SEQ ID NO: 570178 - DNA, 423 bp, Homo sapiens
gctgtccccggcgcatgattgtgctgaggcggcaccgtgagccaggatcacacgggtgcccggtaggccgactgccagtgagctgcattcgagagctgagcacaccaaggagaacggccttcccttacctgagccccagcgtgtctggcagtatgaagcttagtccctcagtacccgcgggccctgtcccctggggccttgtctcttgttggagtagaagagctgtgagaatgggcctggagaggagcgcgcctacggctgctgcgtggagctcatcagcagcctgcccatcagcatcccgctcagcaccgtgcagcccaacaagctcccggtcagcattcccctggccagcgtggtgctgcccagccgcgccgagagggcgaggagcacccccagtcccgggcgcagcctcgtgccggggat

SEQ ID NO: 570179 - DNA, 116 bp, Homo sapiens
accgataataccacctaatataggatagctagctcctcctacgctgaaagccatgatatgccatggactcacacgagtttacctggaacatcatcatacatacctagggactagct

SEQ ID NO: 570180 - DNA, 468 bp, Homo sapiens
ttttttccatgttaattgaatttatatattctggaaaaatatttattttcaaatactcatatgcaaagaaaggactcagtttgagatatcttcacctcaccatattcgaaatcttgtttgaaagcggggggttcagggtgtcctccacacattcataaccggggaatgacacagagtttgtaacgtggtggaacacagccaaacccattatgatatagggttaagttcaatatcctttgggtcagcaagaggcttcaaattaaaatgctgcaaaatggcacacaacaaaagaaacacactccatgcaagccaggccttctccagcacacactggttttcttgtggacaatgcgcttgaaatagtcactgtacttgaactttccattttcacacagaaagtgttctggcttaaacttttgtggatcaggaaattcttgggtgtcacacaacacagagtccagagttgcc

SEQ ID NO: 570181 - DNA, 362 bp, Homo sapiens
atgacactttcgcctaaccagggagtggggaagatttcagaacaagaatatttgaaaaatatttttcacttcacaaagtatcaaacttcagggaaacaacaactacgcaaacattttttaaagagtcaaacatggggtttgaaccccaagccaagtacgagagaggagtgagcctgggctgcaggaggggctggaggctgaccctgcagagctgctagaactttccatctggggcgaggcttcttcattttagcttcaggaaagactggcaactgtagatagcttcatgaatattgagtatacttctgagttttttcctccccccgaaaattcaagagaggcgtctgctctgagcgggttct

SEQ ID NO: 570182 - DNA, 230 bp, Homo sapiens
gtcactttcagagggttggggggcacaacatctgctttcctcttgagcaagtgctgtgcctcgatggcggagatctgtcacacagtaatgaagacgagagcgcagtgggctgccgccctttccatgcagtatcgggggtagatctgcctctcccctgcttccttgtccacgatgaagctctccaggatgttgtagaacttcacggcacccgcacacaggtagcgccccag

SEQ ID NO: 570183 - DNA, 186 bp, Homo sapiens
  misc_feature (99)..(99): n is a, c, g, or t
agcggcgatctagcaggatctcctctctcacactggattacactattgacttgttagtggggtagtacttggactggcaggacaatctcccatgacgtngaatgttctagagagatggagcacgagaaggggccattatttgggaaataacacgtgtaacagtgcactgcgatggatcattggccc

SEQ ID NO: 570184 - DNA, 208 bp, Homo sapiens
gggggtttttttttccccccaattttgggggggattttatgcccccccaaaaggggttggggttcccaaacccaccccttttttgcccggaatttttttttccccaaaaagggtttttccccccggggggtttacggggccggccccaattttgggggggcccttttggccgggaaaacccagggtcccttaaggttttttcccttta

SEQ ID NO: 570185 - DNA, 244 bp, Homo sapiens
acatcctaccccacgcacaagcagtgtagccaagacaagcagtcgtatcacacgggatcatgaagccatatcgtcctcatccatctcacaaatacagtcgcacaattgcattaaggagcatcatcctcatcctagagattcctcaaaattggtttgaatcaaaggtcctgattgtattacatccccacttcagaagcaagagctctgccggtatgaatgaatcatctagtgaagtctacagtct

SEQ ID NO: 570186 - DNA, 681 bp, Homo sapiens
  misc_feature (36)..(36): n is a, c, g, or t
  misc_feature (75)..(75): n is a, c, g, or t
  misc_feature (94)..(94): n is a, c, g, or t
  misc_feature (108)..(108): n is a, c, g, or t
  misc_feature (112)..(112): n is a, c, g, or t
  misc_feature (137)..(137): n is a, c, g, or t
  misc_feature (238)..(238): n is a, c, g, or t
  misc_feature (327)..(327): n is a, c, g, or t
  misc_feature (549)..(549): n is a, c, g, or t
  misc_feature (571)..(571): n is a, c, g, or t
  misc_feature (579)..(579): n is a, c, g, or t
  misc_feature (594)..(594): n is a, c, g, or t
  misc_feature (661)..(661): n is a, c, g, or t
ataagacgaagctaaaatccctcttcggatccacantcaaccgccctgaacacatcctgcaaaaagcccagaganaggagcgccatggatcacnacagcacatatgcngctntctctctggtcacattgtcggtgtntctgcatgttctccattccgctcctgatgtgcaggattgcccagaatgcacgccacaggaaaacccattcttctcccagccgggtgccccaaaacttcagngcatgggctgctgcttctctagagcatatcccactccactaaggtccaagaagacgatgttggtccaaaagaacgtcacctcagagtcnacttgctgtgtagctaaatcatataacagggtcacagtaatggggggtttcaaagtggagaaccacacggcgtgccactgcagtacttgttattatcacaaatcttaaatgttttaccaagtgctgtcttgatgactgctgattttctggaatggaaaattaagttgtttagtgtttatggctttgtgagataaaactctccttttccttaccataccactntaacacgcttcaaggatatacngcagcttnactgccttccctccntttcctacagtacaatcagcagtctagttcttttcatttggaatgaatacagcatttcgcttgtccncaattgcaaagttaaaagcc

SEQ ID NO: 570187 - DNA, 775 bp, Homo sapiens
  misc_feature (332)..(332): n is a, c, g, or t
  misc_feature (421)..(421): n is a, c, g, or t
  misc_feature (643)..(643): n is a, c, g, or t
  misc_feature (665)..(665): n is a, c, g, or t
  misc_feature (673)..(673): n is a, c, g, or t
  misc_feature (688)..(688): n is a, c, g, or t
  misc_feature (755)..(755): n is a, c, g, or t
gaattactcgtgaggaaactccattaaagaccgaaggctaaaaaatccccttctttcgggtatccaacagttcaaaccctggcccctgtgaaccacatttccgttgcaaaatagaggcccccatgaggaaagagggacgccgccagtggagaattcaaccttacaaggaaaacatttattgcgaggctaatctgtccggggctcactgtgagtgcggatgcttctcgtgcattgtgactcacattcgcgtgtccgtgatgtgcaggattgcccagaatgcacgccacaggaaaacccattcttctcccagccgggtgccccaaaacttcagngcatgggctgctgcttctctagagcatatcccactccactaaggtccaagaagacgatgttggtccaaaagaacgtcacctcagagtcnacttgctgtgtagctaaatcatataacagggtcacagtaatggggggtttcaaagtggagaaccacacggcgtgccactgcagtacttgttattatcacaaatcttaaatgttttaccaagtgctgtcttgatgactgctgattttctggaatggaaaattaagttgtttagtgtttatggctttgtgagataaaactctccttttccttaccataccactntaacacgcttcaaggatatacngcagcttnactgccttccctccntttcctacagtacaatcagcagtctagttcttttcatttggaatgaatacagcatttcgcttgtccncaattgcaaagttaaaagcc

SEQ ID NO: 570188 - DNA, 911 bp, Homo sapiens
  misc_feature (202)..(202): n is a, c, g, or t
  misc_feature (264)..(264): n is a, c, g, or t
  misc_feature (542)..(542): n is a, c, g, or t
  misc_feature (735)..(735): n is a, c, g, or t
  misc_feature (795)..(795): n is a, c, g, or t
  misc_feature (871)..(871): n is a, c, g, or t
gctaactggaggctgggggtacaatggtgcatgagcttatagctgaagccaacacatgagactctgcacatcatattgttgcacctaccactaccatgcatacgggcgctcagcggttggacatgacctagactttagtccatttctttatcctatcataagtcataagcggctactcgcctgcatgaattggggactgttngacatatcgtaccatccagtgatcatggagaacacatgacctactgtctcctctctctcctntactcgagcatgcttaggacacacttgaagaagacctaatcctcgtgtaatctcgcttcactaccatgggaagtaacgctcaacgcctacctctggcgtacgatgatcgagcacgtgtcgcatgacttgtgtcgtagaagacaagtactcttcatcgaccctgcaagagcacgccaactactaccgccataaggccgatatgtggacatctaagccttatgagagtacagtacacaggctccttgttgacactcattcgctcacgcaggtgcgtatangtagaacgcacctacctgtcccctactagcgtacatgaatggcactcggagtatgatatgacctgttgattgcgtctctacccttctaccacgaagagagcccccacacagatcatgtgttcgatcagacaccgcgttgtggtcagcacggatctgctatacgatatcatgctaatagcattctaccatgccncgaacgtaatacatgccgtcctaagactcaagactgggatgattatgtgcgactctattntctagtttcaatggccagagctaattccatcatggcaagggatggggttatctcgagctgacttgccatcccccangatagtgcatggggcataacggacagcgtgtcagaggccc

SEQ ID NO: 570189 - DNA, 153 bp, Homo sapiens
gaacgggtacattttggaacactgataaggacccagtaactaaagaaacctccaataaaatctgcaggggctccaccaacttagctgaagttggaaacagactcacagaggtagaaaagatcaaaacagtggtcttcaaccgcatcacccgtt

SEQ ID NO: 570190 - DNA, 227 bp, Homo sapiens
gaaatcattacggtctcaattcatagatcatagcagatgccagtcgcagttcacccaagacatacacaaacatacacacaccaaacactctgagtgagtggtaaaggccccgtatttaactcgtggcccaccggcaaacaaaaggtttccctcgtgtggcgggagacaaaagaaatccagcgagctctctcccgtggattaacaaccaagcgaggtagcagacccaa

SEQ ID NO: 570191 - DNA, 104 bp, Homo sapiens
agtatcctctttacatgcctataattaagtctgtgcttccattatgaaggtcaattcctagacatacttgggaagtatatatctcatactcatcattcacatat

SEQ ID NO: 570192 - DNA, 574 bp, Homo sapiens
tgcataagttttaacttgatgtgatcccattgtccacttttgatttggttgcctgtttgtcaggtattacacaagaaatctttgcccactccaatgtcctggagagattccccgatgttttcttttagctgtttcatagtttgaggtcttagatttaactttttaattaattttgatttttgtatatgctaagagatgggggtctagtttcattcttctgcatatggatatccagttttcccagcaccatttattaaagacattatcttttccccagtgtatgttcttcattcctttgtcaaaagtggtcaccatagatgtatgaatttgtttctgggttgtctatactgttcctatgtgtctgttgttatgccagtatcatgctgttttggttactgtagctctgttgaataattggaagtcaggtaatatgattcctccagtttgattccttttgctcaggatagctgactattctaagtcttttgtggttcccatatcaattttaggattgtgttttctatttctttgaagactgttcaagttttctggatgtccacagtttatcatttac

SEQ ID NO: 570193 - DNA, 244 bp, Homo sapiens
ccggggggggttttaaacccccccctggggggggggggggcgccccttttttttttttaaaaaaaatttttttttgggggggtgtgggcccccggggggggcaaaaatttttttttccttggggctattttttagggggtttttgaggggccccctccccccttgttggtttctttttttttccccttgggcccccttttttccccttttttttttttaaaaaagggttttggaccccccccca

SEQ ID NO: 570194 - DNA, 206 bp, Homo sapiens
ggttggctcacagtgctgcattagacgtggacctatctgatgattccttccctccagaagacctttggcattgtgtctagaattgctccaatgtcaaatgggaccggatttccctgcttaggcatgtctcccacatttggtgcctgggccctctcaaggctggttatttccaactttcactcggcaacacttacttacctgggccc

SEQ ID NO: 570195 - DNA, 514 bp, Homo sapiens
atgcccagccaggattagtattatgacagcaattattaggatttttattgtagaaggctcacagtgacagtaacaagttttaagccaactggctcctgcttctgcttgctgacataggacctccagccccttgcaaagtccctctgaaatatcactgatggtccccctagggcatttcacatgggctcagaaacatgtttgggctggctgagtgctgcagctgttctggagggctcagtgttttcctgctggtgggggttggggcactggaaatctctcctctcccttgtcacctctgttgggggttcccaagaaaggcggcttgtgttttcatgtgttacagattggcatgtctgttcttcgattttttttttctttttaagacggactctcactgtcacccaggctggagtgcagtggtgaaatcttggcttgctgcatagtctgcctcccgggttcgagtgattctcttgcctcagcctcctgagtatatgggattacaggcgcatgctac

SEQ ID NO: 570196 - DNA, 80 bp, Homo sapiens
tgacccaattcccaatttgtgttccagtcttgattggtcctgcctgattcaaataaagttggtttattttcgaatattaa

SEQ ID NO: 570197 - DNA, 406 bp, Homo sapiens
tacctctcttcatacacaagcattgttacatatgtgatactttgcaaaagttgagatgcgatcatatataagttgttatgtctaagaatattaactgaagaggccatctctccaggtcataacctctctcagtgctccatgctgttccgtcttggggatggttggttctttatcagtcagatccttgtcagtgttcatctgttagtgccaccttgtgtctgttacagtgagctaaggattgaacatgtagtctcatggtttttttttcctacatgtttatcagtctatccatctgcttatttttagaggtagggtctggttcacccgggctggagtgcactggcatcatcgtggctcactgcagcctctacctcccaggcttgagcaaatctcatgcctcagcctc

SEQ ID NO: 570198 - DNA, 132 bp, Homo sapiens
gactctcgaggattaccccgactagcccgacagcctcagttctacctctgaccccagcttctctctgtgttcccacaggcccatgcattctccctgcctcactcccctcagcccctgtcgggctagtcgggg

SEQ ID NO: 570199 - DNA, 151 bp, Homo sapiens
ccccaaaaaaaaaatttttacccggggggttgtgggcggggggccccccccccaggggggggggtttttttgggccggggggtttggggacccattaaccggggttgggccccccccccccccgcggggggaaacccccagggggtttcca

SEQ ID NO: 570200 - DNA, 111 bp, Homo sapiens
cttcggcacgaggaagtcttagggggaccttgatagagaaccttataaacttctctctctctaataaagacttgtcttacaccctgctcccattaaaggcactgttctaga

SEQ ID NO: 570201 - DNA, 537 bp, Homo sapiens
caggctgccaatggcgccgagacaatggccagtagaggcagcactgtgcccataccgagacgttgctcctggcccgagatgccgagcgatgctgaagtggacagaagctgatgcagagtctagagacgctgtaccactagcgagaatgatgctcatttcccgtgttctcatggagcaggcagtcggagatgatgcgatgacgatcggtctttatgtcccttggctgtgtaacgcagtacaagggccgtgtgctcccagcaatatgctgtaatctaatttcggtgaagagacccagcgtttcctcctgagcagtgcctctcacggcttgtctcatgcagtcgtgtggcttcttgcccaggtttcaaagctgaagtacattgtccttagcggctgtaacatgtctcttgacagtagtgcacttggaatactccaggtgggtgattcatacccccaccacccacccccaaccccccacccccccccccacccccccaccccaccccccacccccccccccccacccaccccctccccccc

SEQ ID NO: 570202 - DNA, 343 bp, Homo sapiens
  misc_feature (16)..(18): n is a, c, g, or t
  misc_feature (25)..(26): n is a, c, g, or t
  misc_feature (29)..(29): n is a, c, g, or t
  misc_feature (45)..(45): n is a, c, g, or t
  misc_feature (201)..(202): n is a, c, g, or t
agataatacaggaaannnttgtaannagntccacttctttacaanagaagtgctataaaaaatagcacacaatattaaaatgtacctccctcacacaatcaagttgttttcaacatgtcatttaacacctctgattttaaagacttgcaaaaagtctcagagcttgaaggtatgaagaatgataccatatcaacttatttnngtgtagtgctttctacttcatatatcactatcatatcattcatttgttcaatgaacagttattgaacatccgctttgttctagcactgttctaggtataaaacaaagatcctgcctggggagcaaacagctaacaatgcag

SEQ ID NO: 570203 - DNA, 314 bp, Homo sapiens
  misc_feature (260)..(260): n is a, c, g, or t
cggcatggggtctgtagcactgtattaatagtgattatttccttttttgagatggagtctcgctctgtcgtccaggttggagtgcagtggtgcaatctcggctcactgcaacctccgtctcctgggttcaagcgactctactgcctcagcctcctgaatagccaggactacaggggcgtgccaccacacctggctaacttttgtagtttttggttgttgtttttttttgagacgacgtctcactctgtcacccaggctgnggtgcagtggcttgatctcagctaactgcaacctctgccaccctggttcaagca

SEQ ID NO: 570204 - DNA, 414 bp, Homo sapiens
  misc_feature (382)..(382): n is a, c, g, or t
tccagctgcatgatcctcaaactagaacatcagctcctccccagatctccagctgcacaacccttaaactagaagatgagctcctacccgggtctccagctccatgaccctcaaactagaacaacatcagcttctccctgagtctccagctgaaagaccctcaaacaagaacaacatcaggtcctccctgagtcttcagccgcacaaccctcaaactagaacatcagatcttctcagtgtctctagctgcaggacactcataatagaaaaacgccagcgcctcccaggttctaaagctgcacggccctcaaacaaaaacaccagctcctctctgggtctcaagctgcacgaaactcaaattagaacaacaccagctcctctntgggtttccagctccatgaccctcaaaggaga

SEQ ID NO: 570205 - DNA, 80 bp, Homo sapiens
  misc_feature (51)..(51): n is a, c, g, or t
  misc_feature (77)..(77): n is a, c, g, or t
gtcatctatgaagttattactgtaagtagccttcaggagagtggtatcacnaaggtgtgtgttcttttgtgtccttnagc

SEQ ID NO: 570206 - DNA, 589 bp, Homo sapiens
ggaacagcttgccagtgatgggcagcccaacagcacttttcctcttctagatggaccccagcatttaagtgaccttctgatcttggaaaaacagcgtcttccttctttatctatagcaactcatgggtggtagccatcaagcacttcccaggatctgctccaacagaagtatgctaggttttgctacatgacgggttgtgagacttctgttcgatcactgtgaaccaacccccgtctccctagcccaccgcccctaccccaagctccgctctctgtgcattaatctaagtgggacattcaagaaaactctctcccaggagctcggatgaacatactcagacgtgtgacctccatactgggctaaggaagtatcagcgactagaaagtgggcagtcttaatgttgaatgctgctttctgcattagtatcggatttgatgcaacggctcagaaggaatggtgcgtggcttccctgtacccagtagaggcaactaaaccaatcaggagtgatacttgatgcgggtcaccatataccaaaagtggctagtcctcacttctagatctcagcaattctaacatcatatgtaccca

SEQ ID NO: 570207 - DNA, 317 bp, Homo sapiens
tagttcagagattatcacctgattcagtgaagccagctgtcttccattgagtgggtcatttctatgctgtcaccagcaacgttgccacgaatgaacatccttgtacagacacattcttgtacattcaagcccactattgtccccagtgaagagcttcactctatagcttcatggatgcagtttcgactagattttactttcctgtctgtaacgtttgactgtgagcgccaggtgaccatctataccagggttttggagaacacctagtctcctacttcgtgccaacaggtagcgagtaccaactacccaccaagttt

SEQ ID NO: 570208 - DNA, 97 bp, Homo sapiens
  misc_feature (89)..(89): n is a, c, g, or t
ccgattccccctctggagcccttcagacagctgcggaagaggaggaaacgaaaacatttaaagacctgggtgttacggatgtattgtgnttgggaaa

SEQ ID NO: 570209 - DNA, 499 bp, Homo sapiens
atggtgaaatatattttcgtgggtttttcgtaaaagtggtcaatttttattactctctctacaaggttttccctagtgtccaaagagctgttccctctttgggtttaacagttaaatctacaaggggattaagagggttctgggggcaaatttaaagttgaactaagattctatctgggacacccagctatcaccaggctcgggaggtttgtcgcctctacctttaaatcttccccctattttgctccctagacgggtgtgctcttctagctgtccttaggtagctcgcccggttccgggggcctaagcttgggctctccttgcggagttgtctctagtccattcattatgcagaaggtataggggtcagtccttgctatatacatgcttggtaataatgctcaatctttcccttgcggtactatttctattgcgcccggttccaattactatacgcctatactggataagggtaaaatggtttggctaaggttagctg

SEQ ID NO: 570210 - DNA, 187 bp, Homo sapiens
agttgaatttgagagctacattactaattaacatcaccaaaaaagcaacagcatttcatcattttatttagaaattctctttatgacaaaggataatccagcaattaagggctctctatacagattctaaactaaacgccttaaaggatctttgttctcctctattctacttcactgtggtccatat

SEQ ID NO: 570211 - DNA, 229 bp, Homo sapiens
cctctacaaagaaattccagataatggatctgtataagtagtaagggagcagaagagaagacggtgaatgtacttcaatattattgaacatttatagaaataggaatactatgagtcatctattctttcttacagtcttataccatttactatttactatatatctataattcaactgtaatttgctgtgcccattatagggtaaccgagacacgaataacgtaaatac

SEQ ID NO: 570212 - DNA, 1333 bp, Homo sapiens
ttggacgacacgaacgcagccagagctgctgaacgaagcccacggaagggaagtccagggcaggcaggaaacacgaacgcacgaacgctcttctcgtgccactcctgcttccccctgcgcctgctgcccaacgcactgcgcgacagaccttgcgacgccttcccttggcgcaacactcttccctgcgcacggaacgctacacaacgcaccatcgacccccgctgcgctacgcgccccacggctcctgcgcctcacctgcctcccctcctctcgactactcctccccgcctcactgccctccgcctgccctgcgcgcccaccccgccccctgccccctgcacgctcctctccccctgcgcgcgcgcgcactgcacgccacgcgccctgcacctctctcccggcgcctgcctgcacctacccgcacctctccacccccccctgcgcccctgccccacgcacacctgcctccctgccctacccgcaccccccacgccgccctctctccccccccacctcctccccccacccacctccttccgccctaccccttggcgcttgcttttgcacgatttcacctcttctcggctccctcccaaccgcccctctccctctcttggcgttggtacaattggggggccacggcccaccttgccaaccaacccctgcttgccctcgccccccttgccccccgcccgcaacaccgccgccccccaccgcccctaccgccgcgcacgcgccccgcacgcacgcgcgccccaccacccaccgcgcctccccccgcgcgcgcccccccccgcgccccctccccccacccccaacgccctacccccggccctgcccccacccacacccacaccgcagcccacccacacacacccggcctccccctggcccctgcgccgcaccgcggcacccgcgccgcaccccccgcccccaccccgccccctctgcccccccactcccccacgcggcccccccccttcctctgccccctccccaccccaacccccttatctgccttgggttgtccaggccaccttcccgttggacctcccccggtgcacccccaaccccaatcttgcggccagcgcgcttggcgaggccctttcttccgaccctccttcgcttggcggcccgcccccacctgccctcgcccctcctcccccgtcttcctctcacccccgccgacacgcctctcctcctctcccccctctgcacgccccacccccctccttggccacctcggttcccttggccccgcgcctgcggcgcaccgcttcccccccttggtgtcccccccccacgccccgcggcttccaacccttggcgcttc

SEQ ID NO: 570213 - DNA, 366 bp, Homo sapiens
  misc_feature (11)..(11): n is a, c, g, or t
  misc_feature (236)..(236): n is a, c, g, or t
ttagacattgnctttgagcctaaattacttggagctatagacaaaagcaatgtaatcccttgccccttcaatattcaatcctaagaaaaaatagaggctgggcggggtagctcacacctgtaatctcagtactttgggaggcagagcaggcggatcacctgagatcaggagctcgagaccagcctggccaacatggtgaaatcctgtctctactgaaaatacaaaaatcagcccgncgtggtggcgggtgcctataatcccagctactcaggagggtgaggcagaagaattgcttgaacctgggaggcagaggttgcagtgagctgagatcacaccattgcactccagcctgggtgaccaaggcaa

SEQ ID NO: 570214 - DNA, 270 bp, Homo sapiens
gttacaatttaatattccatcctgcccaacccttcctctcccatcctcaaaaaagggccattttatgatgcattgcacaccctctgggcgaaattcgatctttaaacttttgacgacacgtataacggacaaatctggctctggctgctcttacagagctgagcctgaccaccactttcttctactctctgtgctcttctagaactgaacgctcttgacacaaacacacttctactacaagcacactcctcttacatcagttccagaaac

SEQ ID NO: 570215 - DNA, 244 bp, Homo sapiens
  misc_feature (41)..(41): n is a, c, g, or t
  misc_feature (77)..(77): n is a, c, g, or t
ctgggtcgcctctagtggatcccgtgatcggtaacttggtngtctcagttcaatgtcccttatactgggacattggngccatttgctgaaaaaatttccttggatttctccaatatcagtttcaaagtcatttttatttactaagaataaagagttccccagcggtctagtggttaggattcagcaccaccatggcttggggttggttcaagtcctggtctggaaccaaccaagttaccgatca

SEQ ID NO: 570216 - DNA, 1031 bp, Homo sapiens
  misc_feature (777)..(777): n is a, c, g, or t
agcgccttccccgggccccgtgaaccggctgcgggtcgcccttggtggtgcagcggccgcagccccccacctgggccctcggtcctgccctcccggcgctgtccatgaactcagtgtcgcctggcctgcctgcgcagtacctggagcagcagccctggagtgactgctgctgcctgcctgtgccctgatggccctgcatggcctgctgggtgtcccatgatggcgccatgacgccctaatcgtgcgctgtggtgtccttcctgtgatgccatgcggccccgctcttggctctcccggggctggccctgagtgagccggacgaagtggacaagttcaatggccaaggttcctgacatgcctggaacaactgtcaatgtacggttggggtggttaaaatgccggaccagctttagcaatgatctccatgcatccacctctgtggccgccgctaccgtttcgagggcgagggtgacatacagcgtttccaagcgggactttgtgtcccgcctgtggctcacataccgccgggacttcccgccccttcctgggggctgcctgacctcggacttgtggctgggggtgcatgttacggcagcggccagatgatgctggcacatgtgccttctgctgcatttcctgcccagaggaaagccgtggagagctgctccgacgtccccgcctggtggtgtaccgttctcaggacttgccgtgtacaaggcggatttggcacccttgttgccaggccagacccagagcgattggaagtctggggcatcntggttcccgttcgactgggtggccgagactctcagccccgtgttttttgccttgggttactggcccctgcgttgcgactgtcctgtgggtcatggggtgggaagccgggcccttctggtacctcagtgcgtccccggagcgtcctgtgggcctgggccctactatgtcagcccctgtgttttcgccggcggcgtccccggggatccgtggcctctccgaattgtcttaaatgcccgtctcgtgcttttgctagg

SEQ ID NO: 570217 - DNA, 945 bp, Homo sapiens
gcaggccatcaaagaccacgcctttgttacctcgagatgtcccttgagctgggtggaggtgttgctgtgagacaatgaaattatggacgttcttttcgcacttggtgaaaacctttcaatgaaggcatatgatttctccatcgcagcattctcccctgtggggtcctagcccttctaagtgccaacctccatcaggcagatggaaggagctggtattaacagacactgtgcagtggcagcttacactctgctttgagagtttgctttcatttgcaggacataggtgcttatggttgtgagctgacagtcattcatcgaacattatctcattcatgactagaggaagttttttctggttaaaatagggctggaatcatctaacacctatagggctagaactctgtaatcaaacattaatgcattaatgttttggcagcaaaagccatccttattggtattaagagggatttaagaaaatgattgcaagcagcgttcattcgaatggttcagattttgctgtcagttacattttgataccaacttactaggtagcctttgttgtaaaagctttttagctgttatgttctagtaagggtgtgtggatcaggatcggggagtgagctgggtccacgcttcccaggagtgatgaggctatgatttacttgagctggaacatggttaaggattttatttttatcatcgtcactttattttcacatttgccttcatttctattgagtgatgtgatttcctatttatggaagtgacatagctgcctttagaataattttgtttcatagtaaatgccatgcacaagcctcagatggattcttggtgggaaaaactccatctatacagtatatttcttggataactggggaaatttgagtatgtctaatgatcagtatgtctaatgatcattatttaaagatagtttcctgagga

SEQ ID NO: 570218 - DNA, 106 bp, Homo sapiens
aaagtctccttcactggagattgtgcccacggcataagatcatggagatgtcagctaaaggaataaacctgttacctggaactggaggcaaatctccactcatcat

SEQ ID NO: 570219 - DNA, 102 bp, Homo sapiens
agaccgtttgcatgataggtcaggtacttgttcgtagaaggacataaaacacactgtaaggaaatactcggtaggcactgccgttaactgcccattggtttc

SEQ ID NO: 570220 - DNA, 184 bp, Homo sapiens
ccccggcatgccccgcaacgacggggacgttttccaaaagtttggattccacggccacattcctccctcgctaaaggcacaaccggactcggccgtgtcaagctcagactgtgactcacagcctggtccgtggtgccggggtacctgagcctcgaaattctgtaatacgtggatcatacgctgc

SEQ ID NO: 570221 - DNA, 176 bp, Homo sapiens
gggcggcgtgactagcgcacagagctgcgggagcagtgcacagggagtgttgagcctggcggcgggacggcgtggatcggttggagccggagtccgccgagggtgggctggagtgtggagtgggcccggcgatgccgcgatgaagccgagcggcgagtgaccaggctggcgctggc

SEQ ID NO: 570222 - DNA, 285 bp, Homo sapiens
ggtgcgtgcagtaatcccagctactggggaggctgaggcaggaaaattgcttcaacccgggaggcagaggttgcagtgagccgagatcgcgccactgcactccagtgtgggcgacggagtaagactgtcttaaataataaaatgaaatgaaatgaaataaaataaaataagccaggggtggtggctcacgtctgtaatctcttcaggaggccaaggtggaaggatcacttgagcccaggaattcgagaccagcctaagcaacatagtgagagtccgtctctacca

SEQ ID NO: 570223 - DNA, 141 bp, Homo sapiens
tgtgtactcgcgatgttggtgggagactgtgtacttcattcaaaggttctagagagtcttgatattgctgtcttctaccattgtgctttccgtgagctgtttcattgttcatcactccactcagtttctcatccttggaag

SEQ ID NO: 570224 - DNA, 115 bp, Homo sapiens
gttcacactattacacccgccttggcttcccaaagtgctaggattacaggcgtagagccatggtagcccggccttatcttgacatactatacctaaggatatgacttttaaaaat

SEQ ID NO: 570225 - DNA, 288 bp, Homo sapiens
tagccggcccaatttttacatgaggtactgatttaatgaatcttaaaaactgaacttataccagttgtggtacacacacacacacacatacacaccacacacacacatggaatattccaaacagacttcactacctaaaaaaccccaaatatctaactgaactcctcacacacgatagaaccactctctcaccctatacaaaaactcatgtcaatatatagttacatgaaacacactcgcgggggatccctcgagcatgtcgctcatgcgggcatgtgagcgtatgcg

SEQ ID NO: 570226 - DNA, 346 bp, Homo sapiens
tccagagtacgtctctctggtcttgcagtcagggctgcctctcttgtccacagagctctgcccattccgtgtgaggcctgtgagcgcatcgtgaataaggcgcagcactgtgcctggggtgtcatcaatgttaacgcagagggcattgtctttctccggattctggatgatgaagtgggtatccccgtccacatagtagtagggcttgtgaggagtttggaacctggtcagttagaacgtggcgggtctccacggtgtgacttatgcatcttccccaggcttgtcggcaatggccctcttatccttggtgtcctgagctgtggtcaccctcattgaggtcagttcc

SEQ ID NO: 570227 - DNA, 392 bp, Homo sapiens
gagaaggaggatcaggacagaccagagcttgtacagagacctgtcagtcagtaggcgtccttgaggcccaggatgtggaagctgtgtgaatgccctgtggcggtaaggccatttggtttggtaccttctgtccttccattttgccccacctcctgggattgggggtggccacacaattcccactttgcaggtgaataacagatcaaaagcctcacctagctaggcaggtggcagggtggcacatgcctgtagttccagctacttgggaggctgaggtgggaggattgcttgagccttggggtttggggctgcagtgagccgtgatcgcgtcactgcactctagcctgggtgacagaatgagactttgtctcaaacagacaaacacacacaca

SEQ ID NO: 570228 - DNA, 440 bp, Homo sapiens
  misc_feature (32)..(32): n is a, c, g, or t
  misc_feature (34)..(34): n is a, c, g, or t
  misc_feature (297)..(297): n is a, c, g, or t
  misc_feature (335)..(335): n is a, c, g, or t
  misc_feature (351)..(351): n is a, c, g, or t
  misc_feature (388)..(388): n is a, c, g, or t
  misc_feature (411)..(411): n is a, c, g, or t
  misc_feature (432)..(432): n is a, c, g, or t
tttcatagccacctcctattgctattgcagtnanttcaggtgctgcaagtatccacttaaaatgccacgcattttaatcggcactgatcacctctgtttcagcagtttgtctctgtagtaaattgcctaccacagtaaaaggtaatctcttgtggttctcatgtatttttcatcgtgtttaatgcaatactgtaaactttgaataataccataagactcgtataaagtgatgccactagcactagtggatactgggaagtggctcccaagaagaagagaaaagtctggacatttacnagaaaaagttggaattggctgggtatggtaccataganttaatggtcggcagcnggctatttccggccattttcaagaaaaatggaatggnggtccggccatttcagggttaanggaattccgtggtaagggacnattggtta

SEQ ID NO: 570229 - DNA, 356 bp, Homo sapiens
gggccctttttggggggcccccccccggcccccccccggagagtttcccacccgggtgggcccctttttttttccccccccccccggggggtgggggccccggggttacttttttttttttttaaaaaaagggtttttcccctttgcccccgctggtttttttttcccccccccccaccattccccctcccccccccccccccagggtttggtttccggggttggcccccccggccccccccccctaattttttaccccttttttgggccccgggtggggttcccctttggtttaaccctttacgggggttttaaaaaattaaaagggggcccctttttttgccccggggtgggga

SEQ ID NO: 570230 - DNA, 1298 bp, Homo sapiens
cttatacttctctctcccttcttctctctctgacacacacacacacacacacacacacacacacacacatgtaacacattcctcccttacatgctcatgtgtgccttaaaatgtgccttatagtgtaaatccaggatgactgaggaatccctcgtcacgtggagagtattgtgtatatattccttattattattcagactcgcagcttggggtgtgggtgaaaatatttttcatcgtgaagggctcaaaagagtggttctccataaaaatgctgagccatctatcagtagtgttgcactatcagggacgaaacagaatataggggattagctgctccaattagggaaatactcccatgttgcgcagaggatgctgcaacatcagctactcaaaaaacacaacccacgccagggtattaaagagggtatattataatactccatctatagcggacacattatactactagtggaccaacagagcacaccctagtgctactatttgtcgaacatgcattgctaagttgtgtcaccatagtccgttgttgttgcggtaccaaatacgtgcgtaccaggctatctataagaaaccacccagagcagacaacagacatgcatggttgtgtagtatcttgtcagtcttctgtaggtatccaactctttcgtgggggccaccacaaactaattaaatgactacgattctacgcagcgagggatacttgttctcctgtgaatttaatccaacgcctctttcttggcggtccactccattacacggacaagcgtgcaaacgcggcggcattacaattgtaacattcattctcatccctgatgggccaagccaaattcctcaaacgattaacgcggtggttgtgtccacaccctgatcggtcgcttgggctctgtccacataacgactgtctttaagactcacgttctctagtcacacaatgatttccgcttctgtatgcacacgaggtgtacaggtcacgttaaggtaaatttgacgcgagggaaactaaagaagcccagaagggggatgcatagctaataccattcccgtttatttttcaaccccccaataacgacggtaggttgacatttgcaacacgttacagagcaagcgaactcatccgtttgccgatcgctcttcacaactttgacatctggcggacggccaaacttgaactctgtggcgccagtaccataaaatgtctgttgccctgggggaggcaacacatttaaggtgccatttgaccagccccccaggtatagctatctccccctgataccgccatg

SEQ ID NO: 570231 - DNA, 340 bp, Homo sapiens
tggctgttaccctgcacatctgaaactggatgaagccccatccgcgccctcgggtggaggctcgcacacaaccctttctcttgcgtgggaccttatccgctctgcgctactcgagacttgcagaactcccctgttgagcgggccaggggttccctgccaagtgcaactaccaaggatagccagttggcaaaggccttggaaaaaatccttcggcgcggtgcaccccgtatctgaatgacgggcgcttgaccttggacgtccttgaagcggatcgctgttcaaccgacgggtgaaaacgaggtgttggacaacgcgatccaggtcgtcagcgaaattctca

SEQ ID NO: 570232 - DNA, 192 bp, Homo sapiens
gggcaggagaggttgttgtgctagtttctctaagccatccagtgccatactcgtcgctgcagctacaaacggttttgacggcggcattgactgagcagatgacccttcgtggcaccctcaagggccacagacggctgggtaacccggatcgctactatccccgcagtttcccggacatgattctcttacggc

SEQ ID NO: 570233 - DNA, 1017 bp, Homo sapiens
gtccttagaattcccttcctccctcaacaagctgctgtctatgttgatgaccataactgggatgtataatatttacagacaactctaagttacgttcacatggattatgtacatcattgatttttttttttttttttggagaacagagtctggctcgtgtggcccgggctggaggtgcaggggcgcgaatcttcggattcacgtgcaaccttccaccttcccagggttcagtgccatttctcttgtggtcttcagccttcccaagttagcgtgggactacaggcacctgtgccagttacgcctgtggttaattttattatggtattttatagatagagaagtggggtttcacccagtgtttagccgaggagtggctctgtgatctccgtggaccctcggtgactcgtgccgtgcctcgggcctcccaaaggtgcgtgggaattcacgaggcattgaagccaacaagtgccgtgggaatcaatcgatgtgatttagtggtcatgtggtatatccctttctaccggggaagaccttcttcccaatttatccagtttcccgggagagattcagcggtgaagatagtgaactgggtcaaagatcttaaccaggggttgtagatcaagtccctccttatcttatcctgggccactgaataaatcttgggttttcccataatccacagggtgagggagaattactagggctacattattcaagttcctgtacagctaatgcttgtgtcccttttgaaaaaaagcccagggatcttgacaggtctaacagctggtggaacagggttataaataaggcgcccgtaacaaactgaacaatgtgagacacggggcatattccctggacgcaatggcaacaaggcagaaacatcgtccagggaaacacaaggaaagcctagaaacacagtccccaggaaaaggctacacaggacacacaacaacaaggaaagggagatagagaacacgcatagagagcgagggatacaaaaaggagcggacacgcaaa

SEQ ID NO: 570234 - DNA, 600 bp, Homo sapiens
atgacaggtcaccgaagcacctgaaggcttcactccttgctgggtactcagccatggagatgcaagcactagccaggaggtgagttctctttagggcttggttttcattccttttttgttggcttggcaaaccagaattcagcttatctgaattattttcccaaaggaatgctgtcagggagggactgttctgccagcctaacaaaagcaaacgtagccacgtaatagtacccactttctgctctttggagagaacacaggttatcaagttcatctctcttgactactcttatgatagctgatgccacagagcctatgggcaaatgccagacccagggttagacacaaggacctgaagtgacatgacggcgggacaggggaaatgtgactttctaattaggcattttatgttagtcacagtcttgaatgtataaacagcactaagactctcaggtcaggtaccttggtgatcagctactagttcttccagccctcattgaggtaacaagataaagacaaatccacttctttggccaaatcagggtttgagttatgactttccccagagactggatgcgtcagcctgagacactggcaatt

SEQ ID NO: 570235 - DNA, 209 bp, Homo sapiens
  misc_feature (67)..(67): n is a, c, g, or t
gatcaaggatcctgtactgtggtgtacgtgtgtgtgatgtgtgtccccgactctgccatcgggagcnaccttccagctctgtcaggagtggcttcagaacctcatgtgcatgacatcagagagtctttgtccttctgtgtctgactggcttcacttgaagtgatgtcctccagcgagttcctgtttgaggctcaagagctcactgaacc

SEQ ID NO: 570236 - DNA, 783 bp, Homo sapiens
tctccccgcgcacagcatgatgcttcaccagctcgctcccaccttactccaccaactaccggtccctgggctctgtccagagcgcccagctacggcgcccggccggtcagcctcgcgcaggccagccgctctatgtcaagagctgctggggcgtctctgcgttccccggcatctccgctgctcgccgctccaccgagcttacagagggacggcgatgtgggtcctggggcgcccttggcccatccggagattagcccgcgggtgctctggccttgcgcaagtgggacgcgcatccagaacctgcagaacgggagaacacaatagcacacatgctctagaaaaacgacctcggccctaggctctccttatccctagagatcatgcatgtgacgtgacgtcctaggaagaccagagacaccgtgtagggctgtgagagacaacacactccgggaagcatttggcccaagaatgggaccccaggtcagagactggacgccattacttcaagatcatccgagggaccctgagggcctcaaaatcttcggcgaatactggtggcaccatgcccgcatcgttctgcggacttgacaactgcccgtcttgcatgctgatcactaagacgtcagagtatgataacaggagctgtgcatgccccaggtcttgtgcgcgaaccgagtccatggggctccccaagagggccctttggttaccccattattccaccgactgcagctttggacagagatcgggcccccagggggagcgggccctgaaaggacccaa

SEQ ID NO: 570237 - DNA, 955 bp, Homo sapiens
  misc_feature (643)..(643): n is a, c, g, or t
ggtggacctattatatactacacaagtgaactattcccacagattgggctggatctatatattggcgaaaaggtggtcagccgaggattaccaacaaaatccgtcatgagtcgggagatttctgatcaagattgatgacgcctttagaaggatccgaaatgattctgcgctctttaccattacaggaaccactagggaactcagattcagattgcaacattgtatttgcttgctagaacaagtgcttgacacgcaggtggtgcctgtatgttgaaggtattctaatgcaaagatatattcattcttttatttatagtgtgaagcagtattgctggaaaagtttattgggtggaggacctagatgagatgatcctgtataggagtccttgcaatcttggttgcatttttatcgggctcctcggttttaagcaggccctaccaatttccgtctggtgttcatgtgggtgtcctgtcatacgggggtgctgttgagagctccttatggctgttctcccagctttgtacatgtatatagttctctctctcacatcaggtttcgggcgggggagggagggtcgctgccttaactactccttgggacatttctggaacctttcgctgagcgggtgtgagtttatgcttntaacggcctgaggagcgaggtgatggagaatttctctcctcgtttttattgtgccacccctgtggttgggtcaccgttacttagtgggtggcccaggtctggaatggtcactggtcccatgtcccggtgttgaaccacctgtgtgccggatgtatttcttcctgcagaaaacgttccgagttgtacaaatgggaggccgtcgggggcgcattgtgccggcgcattcagggggggcgtccccggccatacagttatattcgccctgcgatggctcttgggggcagaaagggcctttgttcgggaatggggcgc

SEQ ID NO: 570238 - DNA, 135 bp, Homo sapiens
agaattaactttgcaaaggaggaggcaaaagcttaagacccccgaaaccagacggaggttacctaagaaccaagctaaaagagcaacaccccgtctattgtaggcaaaatagttgggaggatttattaggtagga

SEQ ID NO: 570239 - DNA, 408 bp, Homo sapiens
  misc_feature (148)..(148): n is a, c, g, or t
  misc_feature (169)..(170): n is a, c, g, or t
  misc_feature (179)..(179): n is a, c, g, or t
  misc_feature (190)..(190): n is a, c, g, or t
  misc_feature (195)..(195): n is a, c, g, or t
  misc_feature (203)..(203): n is a, c, g, or t
  misc_feature (326)..(326): n is a, c, g, or t
aggccaccagaggcagaggggaagagcaagggcggaagaatagaagtcaagcagcagcagatggaatgtgtgcacggtcaggtgaggcctgacccgagggtgttgtgagcccttggtcagggtgagcccagtgccaagcagagccatncatgaccttagggccaatgtnnggcaccctnactcttccttnataangtctctcntcctgtattcttcctccccctttctcccaccctctttcctactccctatccacttcattcaacagatttttaacttagcttctactatgtgctaggcactgtgttaggagccacagatagtcnctatccttaaggaatgtacacattctcataacagagacagatactaaatctcaaataataaactaaattaaattacttgaaa

SEQ ID NO: 570240 - DNA, 745 bp, Homo sapiens
agcgtgagtgtgctgagctctccgcgtcgactctgtcgcccgcgcctggcctaccgcggcactcccggctgaacgctctgcttggactcgaccatgccggtggacctcagtcgaagctggtccgggcccttgtagcctgcaagaagtggacgagcagccgcagcacccactgcgatgatcaccctacgccgtgggcgtgcggtggacgagctgggcaaatgtgctgacgcccgacccaggtctaagaatagacccgacgcagcatttcgtgggatggtcttgatccacggggaagctctacactcttggtcctgacagaccctgggatgctccctacccaggaaggatccgcaaatagcagagaattgagcagtcattttccgctggtgagtcaacattgaaggggcaagtgacatcaagcagtggcgctacgtcctctccgacttatgtgggctctgcggcctcccaacagggcacaggcctccacacgctagtgtctggctggtttacgacgcaggagcaggccgactgaagtgtagacagagcccatcctcagtcaaccgaatctggagaaccaccgatggcaaagttcaaggttggcgatccttccggttcaagcgtactgaggctcatgggccaccgcgctggctggcatcggtgttaccatgggccgacgtggcgatgactaatgttgcccaaagctgttacgacgccaccgtgtctgaggaaggtagcgcgggtcaag

SEQ ID NO: 570241 - DNA, 201 bp, Homo sapiens
  misc_feature (12)..(12): n is a, c, g, or t
atctcagctcantgctaacctccggctcagatacaagtgattctcctgtcaagcctcccaagtagctggattagaggcatgtgccacacattgggctaattttttggtatttagtagagacagggtttcaccacgttattagtaaggctggtcacaaactcctgacctcaggtgattcacccagctgggcctcccaaagtg

SEQ ID NO: 570242 - DNA, 215 bp, Homo sapiens
atcaagtgtgtggtggtgggagacggagctgtaggtaaaacttgcctactgatcagttacacacccactgcatttcctggagaatatatccctactgtctttgacacttattctgccactgttatggtagatggaaaccggtgaatctgggcttatggatacagctggccaggagattatgacagattacgcacctatcctatccgaaacagatg

SEQ ID NO: 570243 - DNA, 254 bp, Homo sapiens
gctaccatatttatttttcgaagtgagttttttcgacattgcgttaatagcgcatacatgcttttttgtgtttataagagatgatatactaggttacgtcttagtgaacttggtaatcttgttgtcatggtttaaatgttaattttcaattttaaatgttttggggaatcaatgaccggcagaggtgaattaaaaacacttccatgatcacgaggtaggcagtttcactttaatttacacttatagttagtatc

SEQ ID NO: 570244 - DNA, 220 bp, Homo sapiens
tagaggatcctgggaggaggagaatcgctggtcttgtgaggtggaggctgcggtgagccgagatggactactgcactccagttagagtgacagagtgagaccacaagctcaaaaaaaaaacaaaaacatgggatggtctttttatgaattgggactggtgacgactcctttatacggggtgcaagttcatttggcatttggccagtgtcctggcctgtcc

SEQ ID NO: 570245 - DNA, 522 bp, Homo sapiens
ggccacaaaaaaacaattttattagcccaagaagggaaaacccagccccttgggttgccccagccccaccccaaagcccctcaaaagggtggggggggggaagggggaagctggggagggaatggcccctatccctcaaaaaactggggggaagaccacgggctgggcaaatggggccccaaaggggtttgggggggggggtattagacccggataaccggggaaaagggaggggaccgggggggatctgttgaaggcccaggaaaaacagggggagctggggctaaggaaccaaagggggggggaaaaggggggctagaacccaaaagggggggcctttttgaggcagggggggccctggggtccccttaataaccctccttttgccctggaggtttttcctttggggcttcggccccaggaccccgataaacaggctgtttgcaaaaggggcagggtttccgggtttgaaggagcccgggggtcccgcaagggtttggggaggcaatgacacctggggaa

SEQ ID NO: 570246 - DNA, 280 bp, Homo sapiens
actgccaaaacatgagcctaggtgtgcataccgatatggtatggctgcgtccccacccaaatcggagggggaatgtagttcccataatccccatgtgtcgtgagagggacccggtaggaggtaatcgaatcatgggggcaggtttttcccatactgttctcgtgatagtgaatacatctcactaaatctgatggttttataaagggcagtttccctgcacgtgctctcttgcctgctgccatggaagacatacctttttgctccttctttgccttccacc

SEQ ID NO: 570247 - DNA, 886 bp, Homo sapiens
  misc_feature (100)..(100): n is a, c, g, or t
  misc_feature (106)..(106): n is a, c, g, or t
  misc_feature (189)..(189): n is a, c, g, or t
  misc_feature (214)..(214): n is a, c, g, or t
  misc_feature (323)..(323): n is a, c, g, or t
  misc_feature (410)..(410): n is a, c, g, or t
  misc_feature (419)..(420): n is a, c, g, or t
  misc_feature (440)..(440): n is a, c, g, or t
  misc_feature (452)..(452): n is a, c, g, or t
  misc_feature (461)..(461): n is a, c, g, or t
  misc_feature (495)..(495): n is a, c, g, or t
  misc_feature (502)..(502): n is a, c, g, or t
  misc_feature (504)..(504): n is a, c, g, or t
  misc_feature (506)..(506): n is a, c, g, or t
  misc_feature (541)..(541): n is a, c, g, or t
  misc_feature (563)..(563): n is a, c, g, or t
  misc_feature (595)..(595): n is a, c, g, or t
  misc_feature (611)..(611): n is a, c, g, or t
  misc_feature (615)..(615): n is a, c, g, or t
  misc_feature (620)..(623): n is a, c, g, or t
  misc_feature (627)..(630): n is a, c, g, or t
  misc_feature (635)..(635): n is a, c, g, or t
  misc_feature (639)..(639): n is a, c, g, or t
  misc_feature (650)..(650): n is a, c, g, or t
  misc_feature (658)..(659): n is a, c, g, or t
  misc_feature (668)..(668): n is a, c, g, or t
  misc_feature (678)..(678): n is a, c, g, or t
  misc_feature (715)..(715): n is a, c, g, or t
  misc_feature (743)..(743): n is a, c, g, or t
  misc_feature (833)..(833): n is a, c, g, or t
actttccctgtggcctagcttgcctatttccagtgggcgagctagctagatcctcctcccttaaataagccagtgtttttaagacagaatactacttgcntagtgnacaataatatcttaaagaactgagcaggatgaaaagaatttgatagaaagcaggtttgaggagcacatggaggttggcaggtntcgaggctgcttgagaggacttggnccgatctgggctgggcttggacgtgaccctggcacccaggcaggtggatcccagctggggcttccattcacgactttctggtccctggcaggacagagcgggatgccancagcttgtccaaagggaagttccaggagctcctggtgggcatcgttgtggagaatgacgctggccgcggcgagatcaacgagttgangcaggtggnnggggaggcttcgtgcagcanccgcaaaggaangctgatttncttctatgagtggaacatcaaactgggctggaanggcatcntnanagaatctggagtgaagcacaagggattgattcaantacccaatctttctgaggaaantgaagtagatgacactgagaatttacaacggnaatgattttaccagcnaaanctatnnnncccnnnnaattnactntcaaatgaaanctgagtgnnaataccctncaggttcagncctcatctccagtggcactgggtgtaaggattcccantgtggctcttcacatgatggaactgttngacacaactgtagagcagctgtatagcatcttcactgtaaaggagttaacaaataagaagatcatcatgaaatggagatgtgggaactgnccagaagaacactatgccatggttgcactgaattttgtgcctactctagggca

SEQ ID NO: 570248 - DNA, 336 bp, Homo sapiens
ccacacgctcatcccatcatcgtccctcagcgcttgttacagacgcgcatgcccgaggcgtctctcgacccccagttctctcatgtgtcggtggagccaccgcccatgagcccgtctgggcctggcgcgagtccccactagctctttggtggccctgattatggcgcccaatcgctgcagcctccatggtcagcccagcctggttctgttctatgtcctgttaccccatccccactcccctgcgtggcttgattcccactccatggtggccccatcccccagttcctcacgacatggttttcacttccgtggatttaataaaaacttcaccagtta

SEQ ID NO: 570249 - DNA, 161 bp, Homo sapiens
tgtggggaatggaggataagtagtctgggaagtagtcggagatacgcgaggggggtgagactacctattgtagatatgggaccctatgacattggtggtccgtgatcaagaattgggtgtggacgttggccctgttggctttttataaaccaaactctatc

SEQ ID NO: 570250 - DNA, 811 bp, Homo sapiens
gagttaccggcatctgggctcagttccgccatgatctcctatggaaatcagtctggtatgtcctcgctatgtctcatgcgggtagctcggacaggtgctgcagtctcacgacaggaaagcttagaatatacggttgcttgttacctagcctacaacgagcgctgagagcctgccggtcatcgtgtggatgttggtgaaaaggttttccgagagtggaatcaactatgaaatcatagtcatagatgatggaagagcctagatggaagaatgggatgtccgctgaagcacgtaggacgaagatctatggggtcagaacacgaacttcttgctatagtaccccccgaggagacaccagttggagacttacggaacctgacttactattcatcggacatgaaaggcatgccacgaggaatgctatcactcaatttattatggattggtgatgtactctgtaatgatgattcacaaaatgtttatttccttgatactttagttaggaaagcgaaatggagggataacatgtttgactgttggtcactggaatagttcgggtatctaaaggaaactgtgcaggtgtattagtggcctgggaattgtgaaccagatggagatagtcaggcgatggagtgccagattaaggaacgtacagatccttgcttgagaacaggagcatctgattttaacaggaagtttcagattataccgaaaagaagttctagagaaattaatagaaacaatgtgtactaaagggctacgtcttgcagatggagatgattgttcgggcacaggacagttgaattatctatgg

SEQ ID NO: 570251 - DNA, 138 bp, Homo sapiens
ctacagagtgcagcagaagttcgcagtgagacatcactagagtggtggggctcatgaacaagtttgtggaggatacaaagaagggagtgcaccagaaggagggctggcccagcagcgcatacgtgggtgacgacagat

SEQ ID NO: 570252 - DNA, 391 bp, Homo sapiens
  misc_feature (153)..(153): n is a, c, g, or t
cctctcttttcccctccggggaaatgactttttgttatattcttcgcttcccccccccacacatgcacttttggcctttttttttgcggggaaaacataattcccccctccccaccctgtttttataaggataccgaattgacccccggaatnttgccctctccaaaacattcaccccgggggtatttttttgtggttgggtgtggacaccccccatttcctctttatattgggggttggtgccacattttggtctttttgggcccccccccccggggggttgttccggggaaaaaaccttttcggccttttttgtttctgaacatttgccttgaaccaaaagggaatttttccccgggggacccaaataaaagttaaatttttcccccca

SEQ ID NO: 570253 - DNA, 184 bp, Homo sapiens
tgctggaaattcggctaagactgtcgacaggttggagtgcaggggtgtgactagcaactcactgcaacctaccgcctcctgggatcaagtaatcctaccttagcctccccatagttgagactacaggtgtgcaccatcacacccagctaaatttttgtatatttttggtaaagacgaggtttca

SEQ ID NO: 570254 - DNA, 164 bp, Homo sapiens
cttactgtgaaaagggtgtcagcgggcgctgttatatggagagggtaggggggggaggggagcctacgatcagtccccctgttgggatgtctcgggagagtaggagaggtggccctgttccgggtgtccctcatgggtcggtggtatggcggagcggggtgtag

SEQ ID NO: 570255 - DNA, 267 bp, Homo sapiens
cgaaactccccattatattagaaaataaattaaaggttaccataagtcagttccagaaagagacaacatattgccgacctcacggatttttaccacctactacgctctccctgtggccttcgcacactggcatgctggtctaggatcctctacgcagctacgccttgctcgccttcctccgttttggttgcctatagccaagccgcctgtctacctttcttcaccatatttgcactcgcttcctttcctactgattcggggctcggt

SEQ ID NO: 570256 - DNA, 144 bp, Homo sapiens
atcagagtgggaagtctaggtcaggtgatgaggctagtatgagttaaatccttgaatgtatgagttgatgaggtcggggtagtcacataagagcattagtctatatatgggcaggcaaaatagctcacacctgtaatcccagca

SEQ ID NO: 570257 - DNA, 104 bp, Homo sapiens
agacgccgagatgctggtcatggcgccccgaaccgtcctcctgctgctctcggggccctggctgaccgagacctgggcggggtcccactccatgaggtatttct

SEQ ID NO: 570258 - DNA, 256 bp, Homo sapiens
ttagagatcccccccttgagtatcaggccattaggacccgaggagggacagtatagccttgagtatcaggccattagaacccgaggggggacattagagccttgagtatcaggccattaggatccgatggaggtacaatagagccttgagtatcaggccattagaaaccgatggaggtacaatagagccttgactatcaggccattaggacccgatggagggacaatagagccttgagtatcaggccattagaaac

SEQ ID NO: 570259 - DNA, 742 bp, Homo sapiens
  misc_feature (319)..(319): n is a, c, g, or t
  misc_feature (436)..(436): n is a, c, g, or t
  misc_feature (441)..(441): n is a, c, g, or t
  misc_feature (495)..(495): n is a, c, g, or t
  misc_feature (497)..(497): n is a, c, g, or t
  misc_feature (510)..(510): n is a, c, g, or t
agcggatgggctgtcgcgcatgcgccttgagggaagatggcacctgccggctgctgctgctgctgctgcttctggggcggcgctgtggccgccgcggggccgcccggcgtgtcctgctgctgctgctgctgggggtcctgtccgccgggctgcggccaggcgccctggccaccgagcactactcgccgctctccctgctcaagcaggagctgcagcaccggcagcagcaggaggccccggcgggcggcggcggctgcagcccgcagtccggggactggggggaccagtactctgccgagtgcggcgagtcatccttttngaacttccatgactcagactgcgaacccaagggatcatcaccctgtgactccttgctttccctcaacactgagaagattctgagccaggccaagtctattgcagaacagaagagatncccgnttgccactgataatgacagcacaaatgaagagttagctatgcttatgtcttgantngcagtggtctgtntgatgaagcaatacggcatttttcaacaatgcttcagattctgtcccctctgggacgaattactgaagcagtgaatgacctcactaaagctatccaaactgcagcctcagacggctggtacagacatcggggaaccctggaacttcatatcacacggactatgcaacagcccatgaacacttcacgcagtccttagaactgaccaaaaagcagcctatagctacgctatcca

SEQ ID NO: 570260 - DNA, 281 bp, Homo sapiens
agcacaaagatgatggtgaagggcaggtagaccacctcccacttggtgggaaagtctgttcctggctggaactggttcattcattccaagccagcaacagctccaggtttggacgccatttatgaatctacatgccaccagaccagtccctgtcttccacacaccccactctctggagtctggaaaaatggcgggggtggggctagctactagtttttgtttttttttttattttcgagacacagtttcattctgtcatccaggctggagtgcagtggcat

SEQ ID NO: 570261 - DNA, 451 bp, Homo sapiens
atggtctgcaactgactcaaagggacagttctggcttactagcaggtctgatcattcacccaggtacagtgtcctcatctacctgacaccaggcagctctcgggcgctgggacaggatataagacatcctgggcttctatagctgagagttctgagggtcagagttggcagttgtacttccagccaccatgccccacctctagcacccctagaggcgcatagtacccagaaacaaacccaggctttgtgaccctgtcctacgtgggcccacctgactccagacaacttacccattctcggcccagcaggtcggaaacgcctgtggacacaggcctagggactaactggataactgctcgggctgctgttggtcccagggggaaagagtctggactgaacctgtaccttgttaggaaaccgaggcatcaggaccccagctgggacccattcg

SEQ ID NO: 570262 - DNA, 123 bp, Homo sapiens
gacggagatcgtaatcccaaagaagtggggctcaccaagttcaatgctgatgaatctgaagacatggtggctgaaaaggggctcatcccagatgtctgtggggtcacgtacatccccatgtcg

SEQ ID NO: 570263 - DNA, 385 bp, Homo sapiens
agcgccactagctcatcctgcctcagtctcccgagtagctgggattacaggcacctgccaccacgcccagctgatttttggttggtatttttagtagagatagggtttcgctatgttggccatgttggtcttgaactcctgacctcaggcgatctgcccgccttggactcccaaagtgctcggattacaggcgtgagccaccgtgcctggctgaggtctttttttttttactcttagtgaggtgacaagcttggggaaggtttggagcagaagaggggcatagtcggatgaaatcgggcttacttggacctcggtatggagaatgaatgacggcttgggaggtagtgaaaaagggttataaagaatccgggatatatttggagga

SEQ ID NO: 570264 - DNA, 264 bp, Homo sapiens
gctcgacctccattgcattcctttcaattccattgtattccattccattgcacttgattccactccattcccttccactgcattccattcgattccattccattgcattgcattccattccattggattgcattccattcgattccattccattcgaatcaattacatagcaatccattacattcgagtctattctattccgttccattcgatttcgttccaatccattcgatcccattgcattcgattccattccatgtcgac

SEQ ID NO: 570265 - DNA, 816 bp, Homo sapiens
  misc_feature (40)..(40): n is a, c, g, or t
  misc_feature (357)..(357): n is a, c, g, or t
  misc_feature (371)..(372): n is a, c, g, or t
  misc_feature (441)..(441): n is a, c, g, or t
  misc_feature (453)..(453): n is a, c, g, or t
  misc_feature (484)..(484): n is a, c, g, or t
  misc_feature (576)..(576): n is a, c, g, or t
  misc_feature (579)..(579): n is a, c, g, or t
  misc_feature (585)..(586): n is a, c, g, or t
  misc_feature (589)..(589): n is a, c, g, or t
  misc_feature (591)..(591): n is a, c, g, or t
gggggaaaaagtgtcaactcttgttattgaaaacatgttnatttttctgtctttattttaaccttgatagaaccatgcaatatgggggcctttgggaacggactggtatgtaaaagaaaatccattatcgagcagcattttatttacccctcccctatccctaggcacttaaccaagacaaaaagccacaatgaacatccctttttcaatgaattttataatctgcagctctattccgagcccttagcacccattccgaccatagtataatcatatcaaagggtgagaatcatttagcatgtgttgaaaggttttttttcagtgttctttttagaaaaaaagaaaaacaaaaacaanaacaaaaaaaaaanntcacaccatggctcacagaatggcatctcattttggggacctcccatctttctggtttggaaaagtgtncagtagtgcagngttcctgatgtaactttatggttacaatgtngacatgtctcaggtcatgtgtgcgatggtgtgtccgtctcaggtagatggcaaagtgtagggcccaccacatgggaaaaaatactaataaanacnaagcannacngnaattatggattagtgatatgggcagtatctggctagtttccagtggcgttgaagttgtggagttctcgcagggtccttttgagggggagacactgtttgggtgtagaatacaggaggttaggggcaatgtttgtacgggttttctagggggtgggggaggggaaccacagtccggtgggtctggaaaaaaatttttataaaaaaaggcatgggaggcagggaaat

SEQ ID NO: 570266 - DNA, 204 bp, Homo sapiens
  misc_feature (30)..(30): n is a, c, g, or t
aaacaaacacacccaccaccaaagaaaaanaaaaacttattgtaacgccaggctgctctgggaacaaacgaggatccaccgcccttgagcttactgcttcctgctcattgggggaatgtgctgtgtatctcctttcttctgccatagccagacagacttgctggctcttagccaagctgatcctcagtgctgggaatcctcctc

SEQ ID NO: 570267 - DNA, 717 bp, Homo sapiens
cgtagactcgtgcggtcttaactaacgctatctatccagatgcgtgattctagtcacataggaactactactggaccatgacaatatggctattcatactagagatagaggtctatactcctacatctatacatcgaccgatgcatcaccatgactaatccctaacataagagctatcacctttatagtcttacatctaagctacatactatatttcctaccaccaactgcgataccatatactacgtagctacgcgtctaattacagataacacctaattagcccacactcaggaagccgatctcgacacgatatttacacgggctcaccgacccacacaataaacaagtaagtattcctgacctcaagtatagctacgcttagctacactacctcgctgactcccatacactacatacaagacaagacagcaccacgactatcccagataggacaaaacactaaacacctcctattaccttacctccaacccctattgattaactccctacgaggttagcactatttcccttcgacccttaaaatagcaccaagacccaacccaataacacataactcacatgcgggacatccattcaataacaagacactaagacatctaacaaaaacccacatatctatacacactaaactaacctatataacctacacagaatcaacgaatacgactacaccataccatatgtaacgcaaac

SEQ ID NO: 570268 - DNA, 653 bp, Homo sapiens
tctctccttattctactctacagtctttggacagtatccccaaacgaggtgggacacagctccagtccacaccagcataccaggtcttccttcccagggcagtttaaaggaagcctcctttcgtgggcagggttcagggcggctcctcctttccctctctcctttcccctttggtcccagcctcaacgtgactcgtggcgtggtgggagggtggtggagggctcccttaggctctccctccccaaccgtggcctccaccaacacccctaacgaggaggcccgtggagggctcagcctctccgtcgcgcattccctcctccttccgtgcctatcggagggagccagggttccccttaggctgtgacccgtgaattcctcttcctcccttcatggggaggggggcaggaactccagaggagtgatgaagccaggcgggaccactatgggtctggggggctgggacaaacaagctcagggaggaaatgaggaggcggcggctgcagaggaatgcacccctgtggggcacagaccatgcaatcggggggctgggcccgggtggccagcttgggtccgtgtcctccacctgctcaaccggtgcttccaccaaccagaggaacccatttactagttttctaataatcaataattgctcc

SEQ ID NO: 570269 - DNA, 371 bp, Homo sapiens
  misc_feature (371)..(371): n is a, c, g, or t
cgacttgagaggctgaggcaggagaattgcttgaaaccagaaggcagaggttgcagtgagccgagattgcgccactgcactctagcctgggcaataagagcaaaaactccatctcaaaaaaaacaaaaccaaaaccaaaaaaccacaaaactttacttcagtttagcacctttttaaaaatcacttgtattagtctgttctcacactgctataaagatactactcaagactggttagtgtataaacaaaagaggtttaattgacttcacagttccttatggctaggggaggccttcagggaaactttacaatcatgggcaggaaggccaaggagggaaggcaggctttctttctttcacaaggtgggcagn

SEQ ID NO: 570270 - DNA, 104 bp, Homo sapiens
ggatttgctggtgcagtacaactaggcttaatagggacatgtcaaattcacacaacaagttagtaaatataacacaagagaaagttcgacttacaatggcaaaa

SEQ ID NO: 570271 - DNA, 91 bp, Homo sapiens
tctgctaatccatcttcatgaaaagcaccggttatgaggagtgtagtaatcattgataggataatggcaagtgcagttgaaaaaaaaaaag

SEQ ID NO: 570272 - DNA, 244 bp, Homo sapiens
acgatccccccggaaaatgtaatactgtgatgtagtgaagagagggcgggatttcagtggtgccatgctacgttggaaatcacacagaaataacatggctcttgactggcccctatctcaccttgtccccaatatctacatatgaattatggaaataaagctttcagaaaaacactaaggatagtatcttcatggccttcgggtagaccaagatttctcaaatgtttttcaaagtcaagtcgcc

SEQ ID NO: 570273 - DNA, 321 bp, Homo sapiens
caacacttgtaactcgagttagtatcttccaactgtcacgtagcttgagaaacccggtaaccctagggttccttttaatttaacccctttttggtttaacccaaaggtatgtgcccaggttttaaaagacattttaattttttccttaaaaaaaaaatttttttaccagttttttttaccatttttatccaaaaaaaattgggggaaaaaaaccttttttttttcggaaaaaaaaaaattttttaattaaaaatttcttttttctcccccgggggggggggcccccataaaggggaattttttttttggggtttttttttt

SEQ ID NO: 570274 - DNA, 726 bp, Homo sapiens
ctcctttcggactcagcccacctgcacccaggtgaaataagcagccttgttgctcacacaaaacctgtttggtggtctcttcacagcaacgcgaatgaaatttggtgccatcactcggatcaggtgacctcccttgggagatcaatcccctgtcctcctgctctttgctccatgagaaagatccacctacgatctctgctcctcagaccaaccagcccaaggaacatctcaccaattttaaatcggatcttctcagcttagcggctgaagactgatgctgccagatgactttggaagccccctggaccatcacagatgcccagctttggataactcttacagtggaggaagacaggaatatcaggtctctgagcccaagctaagccatcatatcccctgtgacctgcatgtatgcatccagatggcctgaagtaactgaagaatcacaaaagaagtgaaaatggcgcgtgcctgccttaactgatgacattaccttgtgaaattccttctcctggctcatcctggctcaaaagctcccccactgagcaccttgtgacccccactcctgcctaacagagaacaatccccctttgactgtaatttcccactacctacccaaatcctataaaacggccccacccctatctccattcactgactcttttggactcagcccacctgcacccaggtgaaataaacagccttgttgctccaaaacacaaacaa

SEQ ID NO: 570275 - DNA, 384 bp, Homo sapiens
tcactctatagatcagtaatgacaaaaaaaaaaaacaaaacagattggtgaaagggaataaaaagcacaattcttggtatctggggaacgtttcacgggcaacactaactgtttgatacagaggttaccgggaacagtagttatgtttctcttcctatccccaaaagaagcacaataaaaaaaatagacgcaaaatgggaggagggtgtggtttaccagggttatttcaggtgcagcctgtgggagattgattacacggggccacaggtgagcaggtgccctgtggttgtatcccccaggggtcctggtatgtgggtgcaagggtttatatacaagaagggtttgtgacaaaagaagagttaaacttactaagggttttccaag

SEQ ID NO: 570276 - DNA, 105 bp, Homo sapiens
tgtggtgagaaaggaaatatctccataaaaactagacagaagaatctcagaaacttctttgtgatgtgtgtctcaactcacagagttgaacttttcttttgatag

SEQ ID NO: 570277 - DNA, 149 bp, Homo sapiens
  misc_feature (4)..(4): n is a, c, g, or t
aagnagtcaaacaaggaacagctcgcgagaactgcatctgctccagtgaactggggcctagaggtcaagggcccctatgcctgaatccctttcttacgtgagtggatctggcagggacccctaatcatacttcccaagagaagggggag

SEQ ID NO: 570278 - DNA, 248 bp, Homo sapiens
gacccaaccgcgcctcccaaagtgcgggatacaggtgtcagccaccagcccagctcttagttttcttccggtttctagttggttaaggatttctgtcatgacagaatgttagatttggcccatgttttttctgcatctttggagatgatgatgtggtttttatccttggttctactgatatggtttattacattaattgaatttgggatgttaaactaacctggctttcctgagataacatcacattt

SEQ ID NO: 570279 - DNA, 451 bp, Homo sapiens
ctacgagcttttgtataaatcacggaagggatgatttataagaaaaatgaatactattacacttcatttaccaccctctgatctagattttccaacgatatgtacgtagtggtataaggtgagggggtccacagatataacatcgtttaatttagtactaacagagacttttgtcacaactacatataagtgtacaaatatagtacagatatgacacacttgtagcgccaacgcgcatcctacggattgctgacagaaaaaaaggtcacgtgaccagaaaagtcacgtgtaattttgtaactcaccgcattctagcggtccctgtcgtgcacactgcactcaacaccataaaccttagcaacctccaaaggaaatcaccgtataacaaagccacagttttacaacttagtctcttatgaagttacttaccaacgagaaatagaggctcttt

SEQ ID NO: 570280 - DNA, 314 bp, Homo sapiens
tgccggtcagaatgtattaagtgggccaggcgcgagatgactctacgcggtgtaatcccagcactttgggaggccgagacgggcggatcacgaggtcaggagatcgagaccatcctggctaacacggtgaaaccccgtctctactaaaaatacaaaaattagccgggcatggtggcgcgcgcctgtagtcccagctacacgggaggctgaggcaggagaatggcatgaacccgggaggcggagcttgcaagtgagccgagattgtgccactgcagtccggcctgggctaaagagcgggaccccgtctcaaaaaa

SEQ ID NO: 570281 - DNA, 930 bp, Homo sapiens
  misc_feature (7)..(7): n is a, c, g, or t
caatctntccctcccttcgtagtactatacgtgtagtataactcacagccgagagagacaattctgctcgccggctctctgtctttatacttgtcctctcctttgccggactttgtgactcttcccccgttattgttcacgggtgaatatgtttccgcgaaccttgtgttgccaagcggcccatcctataatatggcgccttctcccgttaaattaaggtctatactgggacaaattaccgtttaaaaacacgggttataaagaaaacttgtcaacaaaatgtgttgaaaaacaaaaacagccgtttttcaaaaccatgggaaattttttttggaaaacgtttttcctggccaattaccgaaggccttatatcctgccaaggccttttcctgggcgcgcgcttttaaaatccgggcttcttttcccccccgcatagagctctggcgaattccccctgaaacatttgggtttctccctcatgttgcacagaaacagcgcttttaatccccaactaaaactagtttttgaagtccacacataaacaaaatgtgtttcttaaaatctaagatatgtgacatattctgtcttcgcagcacataaagattgctgtcgtatacaccccgcatcgcgtgtgttaaagaccaccgggtttaatagagtggcaaaaaaaacacgaggtgaaagcagatgttatttgttttgttctaccggcggggccaataagtgagttttgtgatgagatcttgtaacaatgtggagattaaggaaaatcttgcgagtcctactaaggaagattaacgaaaaagctgcgggttccatatcacacaagagcataccaaagaatcgccgtatgtacggcttcctgttttcccataaactaaaatcccacaaattttcaagggctttggcccaaaaacatttaacaaaaca

SEQ ID NO: 570282 - DNA, 475 bp, Homo sapiens
agttcaccatattctgcatattctgcatatctagtaataatatcactgctatgactgatgacatttctaatatttgattcaaaaacattctagcagagacctaagataattggataaattagtctctaagcttttggttttttattttgtcttttagctttaattttgaatgaggaattaaaggatttatatcaatgtatatttagtgcagtactattttggttaatgtaggaatcccgaaatgacttagatttccattgagttttaaggagcataaagaaatgagagaaatgggttattagatacaaaattgcatattctcagctatgtggacatattttttaaggtttccaattgtagagggttacaaaaaggacataacgatatttgggaatcaagaaggataaaaaagtgttggaagagatactgaaaagtggagttgaatgaaattagtagagaatttggaaataaagat

SEQ ID NO: 570283 - DNA, 273 bp, Homo sapiens
atgctggagcttctagcattgtctagcactagtctactaccttgactagggagcttctagatcgtctagtgatctctctcttagctggggcttccaagttggctgtgatctactttaccttgctggggcttctagatcgtctgtgatctctctcttagacatggggcttccaaagttggctagtgactctcatatccttgctaggggcttctagactcggctgcgactctctcgccattgttgggaccttctagactcgagctgcgactctct

SEQ ID NO: 570284 - DNA, 884 bp, Homo sapiens
taaaaaaagaacgcctcttttttcccgtttggtggggaaaaaaaaggggcaaagggggggggtgtgggggggatgacaacaaaaaaaccaatcccacattctctcgtacccggatcccgccggaaggtcctatcgttgggttacacaccttcaatggggggcgcggcagccaacaagacgaggacaaccgagtgggggggcgccgaccacccacgaggggggaagcggacccaacaaagaggcaagagtgaccacctcgcagaaaagaggccgctgaacatttacagacagagggggaagagggtgaaaccgcggctcccagagacaagcggccgggactcgtgtgggatcccccgtgtgaagtacaacacgagggggggtaccggagtgaggccaccggtgtgggggaagccccacaaaaagtctgctatctcttgtcagcccggagggggcccacgcatgggagtccacaaaaactgcggacattttgtagggaccgcggggcgccggcaaaaagcggccaaaacggcgggataacagatccacccgcattgtcgggcccccaagtgtggggctcagcatgaaaaattagaccagcgcgtgctccttcggaaaccccacggggggaggtgtgccccaaaatgggtgggcgcgaaaaacgtctcgaggggcgcaaacaacatctgtggcggcacaaaggagtgtttcacaaaaaacgcggcggggggggggcatccacacccgattaccaagtgaacccacgccgctaacacaaagaaggtctgccctgtgttgggggcgcacagcagcccaacaggagcgttcggaggcgacttgggaaaccccccgggaccgaggccgggactcccagtggcagaaaacag

SEQ ID NO: 570285 - DNA, 200 bp, Homo sapiens
agcagacgagagacctatggagcttaattattaatgcaacagtactacaaccacagttctaactacaactgcataaaattcggttgggcgactcgagcagaccacctcgagcagtacatgctagactcacagtcaagcgactactatactcattgatccatactgaccacgacagtacctgggtacagccatcttctggt

SEQ ID NO: 570286 - DNA, 185 bp, Homo sapiens
atcctccagaggcacaaggaggcctgggggcttacttggctggactgtctctccagcctgtcaagcgcttctggagctcctgcccgtggcctggagcttccgatcccctcctccagccgagacacggcatccgagctgggagtgccactggcctctggtgctgccctcctccttggtgccctggg

SEQ ID NO: 570287 - DNA, 179 bp, Homo sapiens
agaaaatgccatagttaacgttaccggatgtctggagtaaatactggtctgtgattggtgaaatggagaacacacgtgttggtgcttctgggatgcactggtttgcattagtatatgtgtccatgccagagtatgtgtgagcgggcgcatgtgcaccacagagtgcactcgagaggact

SEQ ID NO: 570288 - DNA, 308 bp, Homo sapiens
  misc_feature (293)..(293): n is a, c, g, or t
tgcagaagcagctgcagccgttccaccttgccagcgtggcgcggttttctgtctaccgaagccgtatcccccgggggcttgcacatgcggatctggctctggccctgcagcagggaggctgagggggcagccgtgagcttctcgcaggaggtagttctgggggccaggtcggggcccggtgaggccgtggagcactgggccgtgcgcagcggaagctggggccagcggaagggcgcatgccctggtaatgccgggtggccgttcagggaggtcgttcaaggattctgcagcgnatggtgccgatcgtc

SEQ ID NO: 570289 - DNA, 142 bp, Homo sapiens
ggcgtgccttccccccggcattcttcatttctcttgcatcaatatgccccctctattatctatctctcttatttccccccttgtgtcatgttctagtgtgctcccacggtgtgttgttctgtgttgtgtgtgtctgtccacg

SEQ ID NO: 570290 - DNA, 1097 bp, Homo sapiens
gcctgtgtgctgggtgaggaattcctgacagtgtcctgtgtgcggcttgagagccagctgcgtttgtctcttcgtccagagccattatcctctccaaagggccgtccaggcaacatggtgagtggccctagctcagatgatgcctggcactcctcatgttgctccttcgtggtctgagttgtgggggacatctctgggtgaggccagtggttttgtgccatggcctctagctgacccaccaaactacgaagctgcatgagccctcagtgagaagaaggtgaaccaggctgcacggcgacacggaggcccctcccagaactggtggaagggtatccgcgtggcaggaagtctcccggagccacgagttccgagtgcgcctgagaacgcctagggagcagtcggtggatgacgactccgcggaaacacggagacgccaagtgctacacccaaagcacataacgagatcaggcactctaggtccctgtcacctcttgggatccgcaatttacaccgcactatgcctttcactaacggaattgacctactcggactagttgaccacttatggtcgacttgtagtggcacgctcaggcctctatagtgcagtggtgaagaaggcctaccatgggccccacgggatatggttgtcccggcaatccccaggcgttttgcatcgcgagcgttacactcgatgccctggtgatgatagtccatgagtctcgttgatttcgcatcgaacgagtagaccttgttcagacgaatagagcgctcacagggtaggctagttcctcgcgaatggaaggggcgcaagagagaaagagggcacgcgacaggaacatcagtaattttccggagatgttattaggcgaaccggttattgacgacgtaccccaatcagcggagacccgcgtgcattaaccacacgacgtagtgagtcactaagacaggaagcgagtcatacccaatataaaaaccgaagggggggaataattcgttgaggttgtcagtacatttccccgggggagcaaagggggctacacagttgtaaacctcatcatcgagacaattggaacccgttccttggggtggttagaaga

SEQ ID NO: 570291 - DNA, 162 bp, Homo sapiens
catagataccatcatatcgagcttgcactgactagtccctataatcgtgcccgatatgggttcccgataacacatagctctgactctacctctctctctactctgctcgatctgctatagtggaggcggagcaggacaggtgacagctacctccttagaggg

SEQ ID NO: 570292 - DNA, 187 bp, Homo sapiens
cacatgcggatcttctcagactctgcctgtgcaaagaggatctgcttcacctttatcaccctcggcaatctgctgcatgcggtgggcctcacacggcaatctgtatcttgcgctgcacaacctctatctcaagtctcattcctgccgaatcttcgtgctgtttcacgggcccccgatacagcgatca

SEQ ID NO: 570293 - DNA, 951 bp, Homo sapiens
tggtccagaaaaccccttattttttccccccccctcaaaaaaccgggggggtgaatccgggaaaaaacccaattccaaaaacttgaaaaaaaaagaccccccatttatcggtgaaattactaacgaggtggtaaaaaactgcgaggatttgtgggtaaaataattacaatatcggaaaattttttcccaccgcgtggatcattacaacttcggaacaagtgtgtactccactctatacaaacaccgtgaaggttaacagagggcacccccgtgtgtgtgcacccagcaaagtcccattttaccttatctgtcaggaccccccggggggacaaacaaaagagagctatgaggagaaagtggagtaccccctgtgtggcggaaacagacactgtgcgcgagacaaccgctgagaggtaacacacgccgtgggcctagtgtgctacaaaacggcgccagaggggcgacacactacctagtaggaacgccaaaaagtgcctttggcgacaactagactcaccccagagagagagaaaaaatataacgaacctctatatctacactaatatttctcaacaccactcccagagagagagttccacaaagaaaccagacacaacaagagaggaggacaccacgagagagagtctcacccactgggggtttcccccgcggatatatcccacaagaaataccatcgagtgagggggtaccacccgagaggaaaaccccgcgggggttataagagaggggccaacaaccgctgagacggggtgtatagataaagaggcagacactatccataaacagggtgaggggataaaaattattgaagtggggggccataagcgggtcaatcaatcagacgcaggaacacaccagacgctctaacaacaggtgttgttataaatctaacacacccgcccccccccacatataacacccgctcccgaa

SEQ ID NO: 570294 - DNA, 1747 bp, Homo sapiens
  misc_feature (432)..(432): n is a, c, g, or t
  misc_feature (1168)..(1168): n is a, c, g, or t
  misc_feature (1323)..(1323): n is a, c, g, or t
  misc_feature (1330)..(1330): n is a, c, g, or t
cagagtacctgccttgcgtttcctgactgccgaacatgcatgctgcttcggtgctgctggttgatagcagggcccgtcggatcccggcgcacgctatccatcgtgcaggggactccggaacataggctccgtccagagaaatagcgtgtatagcgacgtgtacactactgtatgcatgtggctagcgaagagaaactataccatgaccttgcttataacagctacagtcatatcacagataggagcatagagagcatcatgacgtgtaggaattagtcacttgcgtgattccccatctgaaagtcagggcagtaattcgtagtgtcgcatgcattggacttacgcctcctcgatattgaatcatgtagtatatgcataacttgaggccagctgactcttataaagactcactagtgtgtggccactggcggntcaatttgacacgcgagccgataagcaatcgggtgccatgcgaaggggcaacagtggattgtcgacagacttaagaagagaagacacacaatgcgcgttagagagagtctcttaagcgtctcccagaagggccttttcacacacagggaggcttaatcgctgccactttggaaaaaaacctctaagaggacacaaccccttatgtcgacttataatacgtttcaacggcgctacgcttgtccgtttttcccgctgggctgttcttgccgggaaacgaggaatgggacactgaacacaacagtttaataattattaacacgccgccagaaacgcggcacggcaattatattgaacggttggacaaacacgacaaggggccgaagcgagaggagtcaagggagtgcttagatctgtggcattggaggaaggaacggggttattcccccgaagtacttcttggtgtgctggggttaagctgggcaaggggggcctttggggttgtacagcagacggacttaccgaggagttggcctctaaagaattcgtaggaagaaagtaggcacccttgcttgttgtgtgaagtgtatacaaatacctgccggcgctttgaaactctttttccggcccaatgtttgtccggtaacgcacgaacgggatggagcctttaccagccataagtgtatggctcggagcgcgattcattccaccaaatgacggtcaaccctgggcacacgcnttctattggggcgccccaaaaacggcgattacatgagagggatcccgatttggcaatactaaaagagccaactccgcttcgcggagacggttttatatctaccaagagtcatgatttccccaattccggggtatacaccctttatttatcggacntcatgtntgggctcattaggagagagaaaaaatacaccgagaaaaggtggggcgcataatgagcggattcgggttggggcgcaccaatattatgaatacgaggtggtccttagggtttaggggcatatgttaaagcggcttttaatggggggatagagggctcacccataaattgtggtaggggcggaacacgagttggagaggtgtctaggggccagcagttgtgaggaaaagcgtgtgagggaaatgctaccatattaggggggtgggtatgaaagaggtccagggaaatacgtacggcataaacattcttggtggggtgtataagaagcaaatagcgctggtgtctccaacaaatttttagggagccgttgttttagctgcgagatatatactcgaggcagtggtacgagtattttaaaac

SEQ ID NO: 570295 - DNA, 171 bp, Homo sapiens
gcggcgatggcatctctcggcgccctggctgcttcctgctgtccagcctctccgctgctcagccgaggcctgcctggagccccagatacccttcctactacacatttctacgctgtatttcactgagaccgtttacattgtggagatctcctgacatgcaagacaggtcca

SEQ ID NO: 570296 - DNA, 421 bp, Homo sapiens
  misc_feature (40)..(40): n is a, c, g, or t
agcatggcctcctaaatgggaattaaatggcaactcctantgggccattcccaggatgggtggttccctttagcctcccatagaattgggtgaaaccccctacccccgttttttgtttcccccctaccacacctgtgttatgggggtcagcctgtgagtccttgaacccttccaaaggggtcccaagggagggtgatccctgcccttccataaaagggttaggaaagccaagtgagaagattcaattaatttgggcaagttatttaacatttgaacctgttttttttttcattgtttattacttcccttgtcccaaaaggttataaaggggaggggtttttttgttccccctttgtactaaatttttcccccacaaaaatttgcccctgagggccccaataaaggtttggtcaagtgatga

SEQ ID NO: 570297 - DNA, 310 bp, Homo sapiens
aggaaggggtagtcttagtgttatgtcagggtgttacagaatgagatgtgaggcgtataataccatagccgcctagttgcaagagtactgcggcacgtcactattgacccagcgatgggggcttcgacatgggctgtagtggagtcataagtggagtccgccacaagaggtcatctttcactatagaagctattgtgtaagctaatcttattaagttgtaggctcaggagttttgatagttcttgggcagtgagagtgagtagtagaattgtttagttgcaggctagggtgtagtgagtgtaaattagtg

SEQ ID NO: 570298 - DNA, 210 bp, Homo sapiens
  misc_feature (50)..(50): n is a, c, g, or t
gagaaggtttcgtaggagttgaggatcagggtttcggtggcttgtcctgngctgactgtgaaaaggtacgacggaggatttggagtagctttaaacatggtcgacattcctgattggagccgccatctgatcgctactaaacgaattagggtggcagctgtacgcaggttagtagaccgggaaatgtcgaagccggcgcgcccgaagacg

SEQ ID NO: 570299 - DNA, 170 bp, Homo sapiens
gtgggaccccggtttttggggggcctttttggttttcccccgggggggggaaatttcccttttttggaccccccctggttttttttggggggggggggggggccccccccccccccccttggttttggggtttggggggttcccccccctttggggtttgggttttccca

SEQ ID NO: 570300 - DNA, 257 bp, Homo sapiens
ttcccccccttttaggggggaaaaaaattccccggggggggtttcccccatttttttaaccctttttttggggggggggggtgggggggcccccctttttgggggattgggaaaaaaggggggggaaaaaaggggggggaaaaaattaaaatttttttaccccgggcctttttttgggggtttaaacaaaaggaaatttgggcacaaaagggtaaggggtttttcccccccccccccaaaggtttaaaaaaaaaggg

SEQ ID NO: 570301 - DNA, 850 bp, Homo sapiens
  misc_feature (275)..(275): n is a, c, g, or t
tcgcaatctgagttatctttgtgcggttcaaggccacccacttttagctaacacagagggttccacaaccgttgttgagccgatcaagttcgtgtgtgtcagcaggacacttgggtgaatctaatggcgtggtaatgccccacccccttggggaatcacaaaagtctggaatggaagaggactgggggagtaccgggttcccacgaaaaaacacgaggtccacaccacgtccaccacgtgggagaatctctccaggagagagacttcctttcagncataccacgagtggagacaagctcttccatagctagcatctcccttaccgtccctaatatagtagattttaagacccaaattttcttttcttgaattttattaaacaataagcttaatcataattagtagttatactaccccctatggagaccttgacacatgtagcttcttctgaaaaaaaattatttgcccctctgagaaatgtgaccccccacgtcctactccttaataaaaaaaagaccaattcggatgtatgatctctctagctttgtcactagttatgtgagattttcccttgtagctaacttttgcacggataataattttatagaaaaagggaacacacttgcacatttagcttctttcccctaagtgaacttcttgaaagtaacttaacaaaacacccttaaactgccgagttaattgctttgttccccgtagttattaaaatccttgggctgtttttgtaaaagatttcctaggatagtcaagtttgcttttccaaaggaattatccccgttatatttagctgttaactggaaattaaggtttattaaaaccaccctgccatgga

SEQ ID NO: 570302 - DNA, 213 bp, Homo sapiens
cctgggtctagccagaggatggagccgcgggcgccgtggatagagcaggagggtccggagatatgggacggggagacacggacgccccaaaacgcatatgactcaccacgctgtctctgaccatgaagccaccctgaaggtgctgggccctgagcttctaccctgcggagatcacactgacctggcagcgggatggggaggactagacccagg

SEQ ID NO: 570303 - DNA, 296 bp, Homo sapiens
ccaacacgagcaccaagtcacgcaaccggccacagtctaggggaccatgtagcagtagctgctgtgttacgctgaggctgcccactgaccaagaatgaggttgccctgcttgaaagtcagctttagctaccaggggtttagtaagatgggcacatggggcagggcctagcgtaagcagagagacgcaggaagcagctactgccgtagtccaggtcagagaggactggggggttcctgagtctcctgtggctttgccagagctagagaaaagatccgtggtctagatgtgtgtgatg

SEQ ID NO: 570304 - DNA, 193 bp, Homo sapiens
gtctgaaagtggaagacgtcagcacttaaggctccacaggggcttactcagcgtgaactctaggttactactctttacttggttcacccatgggggggtgcagtttttttaaaaggttgggagatggccattctaactacggttgaatgtctctgtttggggaaggtataacaagaaataaaaaagaatatat

SEQ ID NO: 570305 - DNA, 860 bp, Homo sapiens
  misc_feature (4)..(4): n is a, c, g, or t
cacnccccctcaagaatagaaataggtagagtaggtgaagagatggaggttgtgtataaatggagaatgtggtagccagtgccattccttgagtccatggcccgttctttgcgtgttggccaggccaaaggtttgtttattttggcacaggtgcccccttaggctgatgtttttctcggtcctagcgcctctctagagtctttcggggtcgcgtggttcgagcaacgtgaccagggagttaaggcccgctgtccacctgcagagaacttggggggcagtgccagtcatctccctggggggccagccttgttgggcccccttttggccccctgcctggagcatttgcgagcccccacacctgcccttgtggggtgtccggctgcccccgtgctgcccagaccggagggcttgggggatccccacagggggagggccatccccttcacccccagttgcccaaccagacccccccccccctggattttccttctccctgccctcccttgacggttttggccttctccccacatgctgtttgatcttttgaatcctcttgggctgaagccggacccgagttctccccccggcgacccccagttgtgggggagccctgtattttttttaaccaccatcccccgttccccccctggtcctccccccttctccctgcgtgcccgacattttaacccgcccattgtgactctgtgcttgtctgtttagattttgtgtataaatgggatagttgtggagatgacccctccctgtgccgcgctggttcctttcccctttcccctggtcaccggctactcatgggagcccggacccgtaaggggccttcgatttaaaaaaaaaaagaccaa

SEQ ID NO: 570306 - DNA, 442 bp, Homo sapiens
acggtcgaatctagaagaatcccctgttgcgcagccggcggagattaacctatgcaggctcaagcgacaacagaccaaaatgtgtgcagattcttggatcctagctaatgaatagcacagctctagcctacagctgtccttggacaggaaatctgagtgctgacctgttacttcctaaccatgacaaccaaagccagatggacctaaccacaaccactttgacagtcttgacaaggtatggcatgggcttggcctggtgtggcaaagccatcgacattacaagaagacgaactgactccactgaacagcctgacgaccagaagagcctgcccctcactgctgggccctcccggtctcagacacccaggctctcacattctactgtgtgctctaagatctctcttcatgttcctctattctgagggcctgtgcatttgaacca

SEQ ID NO: 570307 - DNA, 206 bp, Homo sapiens
cccccctttttttcctttttaaccaccagaaaccagaaaagaaaaccgggttccccttttaggggatgggttatattttttaaataaaaaagggggggggggggggggaaaacaaggggtttttcaaaggttttttttttccaaaccattttggggggggcccgggggggttttttttttttaaaaaaaggcccagggccttttta

SEQ ID NO: 570308 - DNA, 1607 bp, Homo sapiens
  misc_feature (557)..(557): n is a, c, g, or t
  misc_feature (576)..(576): n is a, c, g, or t
  misc_feature (817)..(817): n is a, c, g, or t
  misc_feature (879)..(879): n is a, c, g, or t
gctaaagccatactcataggaaactttatagctttaaacaataaaaaaaaaaaaaagaaaagaaaagaaaactcctaagtattgggaaattggaacagggtacatttaaaagtagctcctcaaagaaagaaaagtggttacgtggaagtttagaaattattatttttcaacttaaatgtgattatgtgaagaaaaagtggctgtgggcacagtgtggcctccgtgccgtggtaagtgccagccaagttcggggaagttcttgaggccaaggtgtggaatctccacttgtgaagcggtctaggaagttctccagaaccaagcctgtggtccagccaagtggtgtgaaacacccaagttcttcttaacttaaaacaagtggcgaaaacatttagctgtgggcgtgtggtgcggcgcccactatctctggtgagagtctctccaccactctaaactccgaggagagggtaaaagcgtgaaagggcgggtcaccacctggagagttctgggggaaaggtgccaaggggcttcacaagtggagatgtcctatgagaatcccngttggccccatctggggcnaccctccgtgggccgtgagggcgcgaaacaaagaagtgtcgagaaccctgtgtgcgtctctcgagggaaaagaaaaacccgcaaagagatacgaatacaaccagacaaaaactctctggggcactatctacggcggcaccaccgagaaaaaaggggtggcacacacgtctacaacagtgcgaccccgcaacaacaaacgcgtgcgtattaatacgtgcgcgtgaaaccgagccccccaaanaggaagaggggcgtggcagtggttacaacgcttatatacgcgtacttgcgaggaaagttccncaggaacatatattgcttctacgagcacacccaacaggcaaaacacgcttttaccttaggcaagacacgttgtaaccgcaagggcacctcactttccctcaataaacaggcggtcattagcagagaacaggcattactaccgtggcgcaacccccgaggaaacgggatataataggtaaattttcttaacgtttaaggaaacctgggcgtttccctgaaattttcccgatgagggctcgccgaacaaagctatttttcacacgggcaacaaaaaatgggggcaggtccagcaggcgggggggcggcaatcatagacacacagcagcatgattcatgtatcactgcgcgagaacagcaggagggggtgcccaaccaattggtgtgcgcacccacaagagtgcgagaaaagtacgggcggggcggtaacaccaacacggagggtacctaaagggaaccccccaaagaacacccacgcgggggggcgcacacagcgagaacgatcctccacacacaaagatgaacgcaccgccacaaatgatactgtggaaaaacacgagggaggtagaaagaaacaacagccagcaagaaaatgactaacaacaatatgacgacgaagagggcgagggaacaacaccgactggatgacacgagcgtgttaccacacgaccgaacgctaagatgaacccaaccgacacaacgccaacgaggcggtggtacataagcagccc

SEQ ID NO: 570309 - DNA, 934 bp, Homo sapiens
  misc_feature (32)..(32): n is a, c, g, or t
  misc_feature (131)..(134): n is a, c, g, or t
  misc_feature (140)..(140): n is a, c, g, or t
  misc_feature (144)..(144): n is a, c, g, or t
  misc_feature (147)..(147): n is a, c, g, or t
  misc_feature (166)..(166): n is a, c, g, or t
  misc_feature (249)..(249): n is a, c, g, or t
  misc_feature (255)..(255): n is a, c, g, or t
  misc_feature (288)..(288): n is a, c, g, or t
  misc_feature (291)..(291): n is a, c, g, or t
  misc_feature (299)..(299): n is a, c, g, or t
  misc_feature (301)..(301): n is a, c, g, or t
  misc_feature (303)..(305): n is a, c, g, or t
  misc_feature (310)..(312): n is a, c, g, or t
  misc_feature (322)..(322): n is a, c, g, or t
  misc_feature (332)..(332): n is a, c, g, or t
  misc_feature (348)..(348): n is a, c, g, or t
  misc_feature (360)..(360): n is a, c, g, or t
  misc_feature (366)..(366): n is a, c, g, or t
  misc_feature (369)..(369): n is a, c, g, or t
  misc_feature (427)..(427): n is a, c, g, or t
  misc_feature (471)..(471): n is a, c, g, or t
  misc_feature (491)..(491): n is a, c, g, or t
  misc_feature (592)..(592): n is a, c, g, or t
  misc_feature (594)..(594): n is a, c, g, or t
  misc_feature (619)..(619): n is a, c, g, or t
  misc_feature (630)..(630): n is a, c, g, or t
  misc_feature (925)..(925): n is a, c, g, or t
tttcaagtttgtatagagaatgtatgccacantttgtattttataaacacaacctatcttattataaatacaaaataagaaaaagtgatacgttagctgttatgaagggtgaaaacattatataaacttcnnnnggctgntttntgnatctgcatctatgtaattncatggttctctaccaatttcatttacagaaataatctctatagtcaaattattgttcactttcatgccccaacatgggaagtngtaggngaatatctgtaggcatacaatttattgtctgcnccnccactcanangnnnccctnnntctgtccagnctacactcgngcctttgtcttcatgngccgccagatcntagagnggngccttacaacttcttgtatcccacagcttaacaatgttatctaaagatcctgaaatcngctgctgttcatgggtaggggaccattttactgatgtcacccanccagtatgtgacgttagggncagcgacaccaaagaaccatctttagttcggggatcccacagtctgatatgcctatctgtgcttccagatgctaaacgtttacaaagtggagaataggaantncaattaaacactttatttcctgtcnaagttgacttnagactgccagactcaacatcccacactctaattgtatggtcccaagatgcactgcagatttcttcagcatctgaccacagaactgaggaaactgcctccatgtggccagagagggtcactatgggagtccttgttagtccaactgttctgtcttctgtttctttcttggtcgattgtggactctccattcatcttcttcatctgtaggactgtagacagatcttagcatctatccaggagcactgcaaattagttctgagcatcaacagctatagaatctacacttccagcatgncctctacag

SEQ ID NO: 570310 - DNA, 586 bp, Homo sapiens
  misc_feature (27)..(27): n is a, c, g, or t
  misc_feature (178)..(178): n is a, c, g, or t
  misc_feature (184)..(184): n is a, c, g, or t
  misc_feature (202)..(202): n is a, c, g, or t
ggcgccgtggggggggggaaaaacaanccccttacgaagggggggaaaaagggggccaagaagaaagggggtgatccattttctaagaaagattggtatgagtggaaagcacctggtatggtcaatataagaaatattggaaaggcgctcggcaccagggggggggggaccaaaattncatctnatgggctcaagggtccgntgtttaaagggaggcttggtgatttgcaaaatgatgaaggtgcatttagaaaattcaaggtggttactggagatggtcaggggaaaaactggctgactaacttccatgggatgggtcttacccgggacaaaatggggtccatgggcaaaaaatgggagacaatggttggagctcacggtggtggcaagactaccggtgggtacttggttcggctggtctggggtgggtttactaaaaaacgcaacaatcagatacgggagacctcttatggtcagcaccaacagggccggcaaatccggaggagggtgatggaatcatgacccgggaggtgcaaacaaatggcttgaaagaggggggcaataaattggttccaggcaggatggg

SEQ ID NO: 570311 - DNA, 504 bp, Homo sapiens
  misc_feature (324)..(324): n is a, c, g, or t
tactcaaacgtatagaacataataaatacactccatacctatcagaacagttaaataaaaaatactgacaacaccaactgttggtgatagagtaactggaactctcatacatcactagtgaaatgtcaagtagtacagccaccgggaaagtttgttataaaattaagcatatatctaaccaaatgttgatggctattgtgataccctggttcttgtcttcttagtttaaaagagaaggatgggccgggcatggtagctcactcctataatcccaacactttgggaggccgaggtgggcaagtcactaggttaggagatcgagancatcctggctaagatggtgaaaccccatctctagtaaaaatacaaaaaattagccgggcgtggtggcacgcacctgtaattcccattacttgggaggctgaggcaggagaattactttaacccgggaggcggagattgcagtgagccaagattgtgccactacactccggcctgggcgac

SEQ ID NO: 570312 - DNA, 565 bp, Homo sapiens
  misc_feature (9)..(9): n is a, c, g, or t
  misc_feature (16)..(16): n is a, c, g, or t
  misc_feature (37)..(37): n is a, c, g, or t
caagtctgnggtcccntccctctctccttggtaagancctctgctctgggggatgtttaaattacctctggactgattattttaagcccatttaattgggaagcaacttagtggggtggtaggggagcttaaaaaaaagagtgtgaaagttgtacctgatttgagtagccctgaattcctggtctgccttggttgtgacctgtaacttgtcattcagcattctcagctttcatccctttatcccataaaatacaataattgggtatgtaagctttaaagattcctcttctttctaaaattcctttattctgtctgacttacctgcccacagagttggaaggaccaaatatgaaaaatagatacagtggaattttagaaagttttttttttaagtatatgggtttttaccatttcaaaagcctcccaaagtgctgggattacaggcgtgagccaccgcgcccggccaggtggatctttttaaaatgtggaatgtattatgcttttattattacaaaaacacatgcttattttataaaatttagaaaacttagaatcttctctccca

SEQ ID NO: 570313 - DNA, 145 bp, Homo sapiens
gaggagaccagcctcaacgcctacaactcactagacaaggtcggggctgaagcgtacggcgcgctaaagccggacgtaccccccaaaccatcctttgctcccactttccacattccatagaatgcccaatagatgcagtgtacat

SEQ ID NO: 570314 - DNA, 174 bp, Homo sapiens
catatttctaccccaaatgtgagttgagtacggttgggctcggtgaatcagtccgtgatacaacactggatagagcggcggacacaagcaggagcgccgctctatccagtgttgaatcagtccgtgatacaacactggatagagcggcggacacaagcaggagcgccaagacca

SEQ ID NO: 570315 - DNA, 694 bp, Homo sapiens
caaccaccaaacactcagaaataaacactagttaaaaaaaaaaaaatgaaacacaagcctgaacccaaaatacccatgctttgactcccaagaaaacagatttttacattccctaataaatacttgttttactatatccccaaggttttagcatcctcattggtatatcaggctaatggtctctaatacaaattctttttggaatttttcttagttaaaataatcttctggtttgggtggtgtattttcaattggtttaagattctggttcttgtggcttgcagtaattctttttattttcttttccaaaaaaaaaaaaagaaaaaaagaaacaaaacaaaacgtttgggggcgcgccgcctgagggccccccagaaaaagctttagtaaaaccaactccgtgtggggggggcgggggccccacagaaggaacgagagaaccaggggcacaagggccggcccccaaaaggaaaagacccggggccaaacgaaaatatgtcggtgggcgattccaccccataaaaaaaaccgcgcgggggggaaacacgcaggctcgtccgggacaacatcccagatggaggtgcacagaaggcacagaggggggcttcatacaacagagagtccccaaaaaagccgcaaaataaaaacccccgctccgtgtaggcaaaaaaagagaagaaagaaaaaaaaacag

SEQ ID NO: 570316 - DNA, 167 bp, Homo sapiens
ccgggcggcgcagcgctgatgaaggcgctccgttagggatggcacctttcggcgggcacagcgtcgaagcttcactccagctagctttctggtaggaggacacaacctgatttccccgatgagctggacacatccttctttgcccgggaaggtatcctccatgaaga

SEQ ID NO: 570317 - DNA, 1646 bp, Homo sapiens
tgcttgggctccgcgcaagcgccgcaggtagcgaccacgcggtccgcggcccagagtgcgctctgtcggccgggatgctatggtcctcggattgagccggctgcgccgctgcggatgtatgatcgtgcgcgagggcagactgagcgtgcgacctcgagacgctggtgtgcatgtcgggtgcttggtgcccaatggctggcgagtgtgacatcaggctctccagaaggagggagccgaagggcagttggctgagaagcgtcacacaggggacgacgcaggtgcacctagagttaccaggaagggagttgaccccaaatagactcagggtgactcctgaaggtccttgtggctgcaacttagcactggggggttgagctgagttcacggaattgggatcccccaatgcaggttgtgggcaacatacccaatgttcactggaggaaatccgggtcacaatggtacctacaaaaattccgtacccataagtggagctccatggtcgcaacacaccacggtggggtgcacagcaggaatccacattcaagcaagagccctcgagggcgcaaactatatttatgccaccacaaaacgcagcaaccgcctaaatggacagccgggtgccttgagtagagcagaagagggatggataggcagacaaatgtacacaagacagcattggacatacaaacaccaacgtaagaattaattgccccttaaacaggggttcaacgcatcgggatatggtacaaatcacgtccattgccgagaaacaggcaatttgcgccgcgcacagcaataagatggcccaacccgcacagtaagggaaagtaagcacggaggcgacggccacacatgtggcaagggggagcactccggaaaacgcacgccacgtaaaccaaagtccaatgcagacgggcacaggaccgcagaccaatgcaggcggggcggtccacgacctaccatggtggacgtagaccacattgatacccgataagacccagcagagttcgcagaacgcattacacgggagaaacagggcagccttaccaaacagcgacacatgccgtactcacacagggccacaagaaaagcaacacatggagcacacgcagtgacaagagcaaaacgcaccaggaagacacagggcactccaccaagtagcacgcaaggacgtcgcacacaacgcgcgacggacgtcgaccacaaatagcgcacaacacgcgacaggggccacacacaaagatcagcgcatccgtggacctcacagtgagcacaccacataaagcagagagcttcaaaaactaaatcaaggactagagagtacaacatggtggaacaactatgccatagacgattcaggccattaacagaggccaaagacgcaaacacaattggagcactggaataggaaaccatacactacatcacaatcttccaacgaataagagtggaagagtaccatatactatctcacaggttctagacacgtatgccccactcagacgttcacaatataagaggcgctccaccttgaatgtgtaactcgcgtcagatatacgtacatacagagaaaccgagaatacaagaataacgacgtgagcatagatcaccaccacggaccatgcagaggaagagaatagtataca

SEQ ID NO: 570318 - DNA, 429 bp, Homo sapiens
catcatggggtacctgggaggcaggaatagttgcctgcttcattcactgttgaacccccagtgcctgaacagtgctggttgtgtaatacgtgctcacttaacatttgtagacgtgaatgatctacatatagtgcaccttaagaaacaaagcaaaggcacgagtctataaacagctgtgtgtacagcatactgaggtgtgtagtgtctagtggcaacaaaggtgtcatgtgtgtagagacgggggatgttgagcaactaggttcaaaatggtagtgatgagtgaaccctgggacaaggtatgggcagcccttgttctaatcctgaaacttttctacagtttagaatctatttatacaataagactttagaaaatcttatatatactaatttttctctcaaataacacctgaggggtggattaattccagg

SEQ ID NO: 570319 - DNA, 796 bp, Homo sapiens
tgggaacaattcattgggaattgggtggcccaaacacgttttcccgttcccgggagttaaaaaagccttttggtattctgttcctttgggcaaagcattaccccagacatttggaatttgaaaagagcatttacgttgagagggttaccgggttgcagactccactcagaaccgttccattcgcaagaaccatccctcctacgaaatttggcttaagctgccaatgagtactaaaccatagtgctcgtgaggtagcatgtagacgactttgcatcagcacttgtaagtcacaatcccgattccctccgttgtcgaatacttgggctcggactctcaaggtcttaatcgaggttcccaagggtccttgtcatatgagcattttggagtcatatctgttcgagcccagcgagcacctaagcagtcctctcaccccagtgatattcctgtggtgtgtctacaatcctagaacgcggacattatgttccaataacactatggcatcccggtgtcactgcacagaatgacctctggatgagcaaatctgctcctcaacagcctgtcatagaaccaggatcctacctatgttaacagccttatagatcatactcacgttccagtagttagcgcactcagtcaatgggcataaggcacctttctgttgaaagaagagtcaattgctttcaactgctctatgggccgaccatcaacaaatgagaaagcaaggatcacgttttgaaacagcaggtccaggtccctttgtatataggatttagctgtattcaataaatctgtttgg

SEQ ID NO: 570320 - DNA, 191 bp, Homo sapiens
atgcagcaatattttaattgtttcaaataaagcaatatatgtatatatatattttttcagaaaaacaccagatgttaaattctacaaaagcgcatggtcctcagcagatcaagttgctgattattaagagatctgaacatacctctaagacaacaatggactgacacacgcacacacaggctacggctctg

SEQ ID NO: 570321 - DNA, 1626 bp, Homo sapiens
ttattggtgttgggtgtttgttggtctgctgttcaggttgtgtcgtctattgtagttagcgttcgatgctcttctcttattgcttccttctctgttgtcactatatctttttgtgttcgtcttgtcttgttctctacttgttctgctcttttgtttgtttttccagcgctttgttgtcatctttgctggttttagcatttagtctgtttccttcaagtttttggttctgtttagtgtttttattctctgatcttatttagttttcttttttctttattcggtttctcttgaccgtgtttcttgttcgggctgtttttgtctgatccagttttctgtttgtttcttccaaggttatgctgttttctgttgcttttcgtgttatataaagcttgttgttgttgagtttcgttgatttggttgttcgttgtttgtttgttgatctttttgttgacttgtgtgtgtttcgcccgcgccgttcgggcgggcgatgggggtggacctcggctaccaacatggtgtgaataaccaagtgtcaacccgcctctgtaagatggggtgagtcaagagaaacaaagcgattgatcgcggagatttttaaaggggttggaacaacaccttaaatatggagaacttctcttggaaaggggagtccccaccccaagaggtgtgtgagtgacaacaaaaaaaaaatccataggcgtctttgggtataaagacccgtctccggcccccaccgttaaaccttatttatatcgcggttctcctctaaaaagtggttattacctcgagagcgccctcttgggtgttggcccgaaaaatttcgggccccccgagagggagaagaaatatagagttttcgccccccacttctcacttggtgattcgagctcaccccccggtattagactattttccgcgcccacacttatggagagagaggtttcacatgggagaccacacacaccggagatctattaactctctcacagagagggagaaacacaccaaaatgggggtctcacattagagatggttcccctctttcacaccccccggcgggagaaaggggcgaacacacagcgtgtgcctataagacacacagagaaattttcgcggagataaaatcttatgtgcccacacatatatgggagcacaaaagagaccaccatccccgcgagatgtgtacacattcgttttgatatatatgtgtgagattcacgagaacttcacatgtttttgtggtggttggccacaagaacacacacgtgtgctctttggcgacatgagatgttatatgagatttcccctgtgagatatatatgccacaaagagaaaaatgagaaccccacaacacataagagacttgtccaagaacactggcccgtaatgaagaaagaaaaagagcctcacaagaaaagcacacgagaaagggaccgcacaagaacacgagaatgaaagaaaagtcacagggggaactgcacaaaggcccaatgttggtgctggccaaaaagtgagagctggagagattggatcacccaccgaaggagataaaggtgctgccatgatgttagctgtggcccctgtggatttttcgccaagaaccattaattaaccttaaaacttcca

SEQ ID NO: 570322 - DNA, 146 bp, Homo sapiens
aatttggtggttttttggtgaacccaaaccatggaaaagggagggaaaagaaggttccaggtggttccgggccctccccttaaaagcccataactgtcttgtttcttgtaactcaggttaggttttggtctctcttgctcccctgc

SEQ ID NO: 570323 - DNA, 845 bp, Homo sapiens
atataggtataggtagatagagtgcctttctgtttcttttcttttcttttttcttttttgttcttccttcctttcttccctcctccccctcatccttccctttctccttcttttccctttttttttttttgggaccgggggagtaataaagttatttttaaaatggcagggtatgcaatcttttattcctctggtctatgggataagagattggtcgggtcaaaagtggcaaaattggttctgaagcttaatattagagacccaagtaagatggtttaagtctggtggaggaattgacatccattttaaaaattgggtgggtctggtagattgggatttcacagcagcaattactggggtaaaattagagtacgggaatcttgtaggtagaaaaaggcacctgtgagatataaacaaaaagctttaaaaaatattttttaggtggtttaaccctacatctagtttcatttcacattctggctggttttgtggactctgcaaccgtgatgtgtgctgtcaatatcagaataggggcatcagggtccggaaacattgtggtggtggtatgaagctttgtatcaagtgttgatcagaagaggtgtaatcgggtttatgacatatttctctattcttggtatttttacattttggaacccagggggtcttaatataaagttaatctcaaaacaaaaaaaaaaaattttggggtgggtagatttaacatttggcggcatgaatgacgggagtggtcagatggtaattggttacaaaccggaggttgaacatgttgttgtaaagcgtatcaccgggaggaggagagagagaagtatacgcaagtagagaga

SEQ ID NO: 570324 - DNA, 722 bp, Homo sapiens
  misc_feature (415)..(416): n is a, c, g, or t
  misc_feature (439)..(439): n is a, c, g, or t
  misc_feature (445)..(445): n is a, c, g, or t
  misc_feature (469)..(469): n is a, c, g, or t
  misc_feature (493)..(493): n is a, c, g, or t
  misc_feature (514)..(514): n is a, c, g, or t
  misc_feature (543)..(543): n is a, c, g, or t
  misc_feature (600)..(600): n is a, c, g, or t
  misc_feature (627)..(627): n is a, c, g, or t
ccagaaacatccaattctcaaactgaagctcgcactctcgcctccagcatgaaagtctctgccgcccttctgtgcctgctgctcatagcagccaccttcattccccaagggctcgctcagccagatgcaatcaatgccccagtcacctgctgctataacttcaccaataggaagatctcagtgcagaggctcgcgagctatagaagaatcaccagcagcaagtgtcccaaagaagctgtgatcttcaagaccattgtggccaaggagatctgtgctgaccccaagcagaagtgggttcaggattccatggaccacctggacaagcaaacccaaactccgaagacttgaacactcactccacaacccaagaatctgcagctaacttattttcccctagctttccccagacaccctnntttattttattataatgaatttnggttgntgatgtaaacattatgccttaagnaatgttaattcttattaaagtatngatgtttaaagttatcttcangtactagtgtttttagatcagagacttgngaaaatgcttttctcttgacccacagtctcccctgggatgttttaggggtcttgcangatcattatccaagaattttttaacantccatgcatgctaaataatattgtggaatgatattttgtacctttcaccaataaattatttttgtcaaaaaaaaaaattcaagtcggctggaaac

SEQ ID NO: 570325 - DNA, 891 bp, Homo sapiens
gcaggagcccagctctcccgggactccctgcagagaggaggttgctaagtgggggtgaggaggaaggcagcccctgtctgccccttctcctggctctgtcaccataggcctcagaggccatgttcctggctggcttttccaggagtgtgactgcctcaccctgaccccagcgttgggagcagggcagagggagggttctctgcagtcgccgtggacacagggacctgccctcagctcctgggagctctccagggagactgcagagaccccggcctcggaggggcccggtggacagcagcccgagctgatggcccacaggcctctgcaggcgtgtgtctgctggcccagctgcccatctccccggctacttcttggctattccttccacttgcaacaagaagcttgccaataattcaagttcctgccctcaaacttgggaggagtgaagctcggagaaagcgccaccctccttggtgagctctgaatctgccaaatggcttctgcttgcaaggtgttgggccaaggatttggaatcaagaagcttgcttttcaaaagcagagcagggttcttggccaggcttagaaccggaaccggcggggacttattccaagctgatttcggctacaccccaggagattctagattccctctacctaaaaaaaaaataaagagaataaagaaaaagagagtttttttagggccagtttcgttgtggtattactggaacggggttaaccgggtgaaaattgggacaattatgtgacaccccctccgggttattaggcccctaactctcttaggccgcctagggtggtggagacacagtgttttttcgcgtaaaaggtgtttcaaaaaagggggtttggttttcaattaagtcaatagccgta

SEQ ID NO: 570326 - DNA, 96 bp, Homo sapiens
ctgtaagccaaaactttttttttgacactggtaccaatttattgtattattctgttctcatgatactaataaagacataccagtgtcaaaaaaaaa

SEQ ID NO: 570327 - DNA, 995 bp, Homo sapiens
taccgctcataaacctagaatgatgatgtgtaaacgtttacccgctcaatgctaaatactacaagcatatagtatgtaaataaaatcctgctgtatcccatttcctttcatagtgatggatacatctacgggtagtctaaaatatatcagttcagcatacatacgactaaaacgcatgcgaacacactctaccgtcaccccgttaggacatatactgggtgtcctgattgacattagttagcttattggatgatatgtcagactgaaggagcaggggcaaagtactaacatatggtcctcattcatcctgactccataattgcgctgatgaggtagcgctcaacagtggcattctggatagtcatagatgccaaatggcttagtgcgtaactgcggtccattccaatgttattctgggacaaaatccatgtgacaatgacccttatccaccgttaaaacagcaatgattaatgcatgtccattgggcactcgctccggaaggcagctatagtctaatttagtaacatcgatgctcctcaatatattaaaaagtaaacccataatttcatacgttcgagaccattattttcgtacttggttgcccctgggcttttaggactgcctgaaacactgggtaattataggccatcacttgcgtatattccttatactttgccatggatttgcattatcgctttgggaggaaccagaaattagtacgatgactaattatactaggacgtaagctctttcccaggaaggtccacgtttaccttctacaacattgttatccttaccatagcaacttgatctgtggttgaacattgtccaccttccttaaatttaatacgatgacaatacgttctaacgaagactaacagggccactcctagagggtactcccggccgaggggacaaaggacgaaaattcggatgtgggatccaagtcacttttgcacactacataaactcggtccgctgctaggggacggagg

SEQ ID NO: 570328 - DNA, 490 bp, Homo sapiens
cctctttttttgtcattttgtgtcaactcacctcattcttcccataaatgtggtttcattgtgtgaagcctgcagtttgcttagttggtcccctatggatgcagctggctttacatttgaggctaggtgttgctgtttagtggattttgttaagagtaaaatctatacgtggtttaaaataaaaaccttcagcagggtctgagggaaaaggaggttctgcacttgctctgcacaccgatggggacgtctgtcctgtggcctctgacgactcggatgcctgttcctctgtccttgcaccctgctgatgtgtaggtgaccagcgggctcttttctgctggtctcccgggtgtgctccttggaaactgtttcctgtgcgtccttgcagaaacattccgtgtgcatatccaagcacaggaagtaagtggatggaaaaactttgtctctataacaaaacccttctgtttcataattaaaactaaagccaaagtca

SEQ ID NO: 570329 - DNA, 989 bp, Homo sapiens
gcttcttctctacggagtgtgtaattgctgcatcagcaccgaatgggttctgatgtctgctcatcgtatcagatcttcgccgctcatgcaggacctcttgtggtagccgtcactacgcttcgctggtcttaagcatgggtgcgcaattatgacctcctattgggcaataagatggtgacccatagtctcccaacctactgaaccccgttaatggtcgtctctgccctgacgccttcttgcctgttcataggtcgtgtcttgccaggtgctgccggagcttggggtcccttttccccatcctggtcgttggttgggtgtcttctggctgcaccggctgctcttgttcactctcgtgatcagtgtgcgtgctactgtgagatccactccttctctctggccgctctgctcgtccctttgtctgcccttccgtattgtcacgctcggtcaaggaacgttgcccgggcgcctgggactcgatggcccgtacgccaggaacgtgacgtcactcgatgattctgggttcctccgatatcggtgagactgttcccgtagactgtgtcccttctgagccaaccggcaatcctcccgggttgccagaactctccatggtggccactggttaagcaaatgcctcctgcctctgcgcttccggctgctggtctcggggaagctgtcttcttcacccgtggtctcaaggtacaacgtttgagctgatcctcttcttggggacctggtctctgtttctcaatgcactggagctcgatgccgagtaccaccgtggggggcacccggtacagtgggccaggcttcaggaccggatctgtggtttgggatcggtaacttcctggtgtgcccctccatcttctattggaaatcccttatgcctcttcagttagtgaggtgtgaacggcggccgggcctctgggccgtgttgtcgcctctttggcgggttatccccctcgagggcaacgggccccacggtaacccca

SEQ ID NO: 570330 - DNA, 438 bp, Homo sapiens
tatttctattattattcatgtatgttatttatttctgaatcacactagtcctgtgaaagtacacctgaaggcagaaagtgttaggattttgcatctaatgttcattatcatggtattgatggacctaaggaaaataaaaattagactaggccccaaataggctgcatgcatttgtacatgattagtagatttgatatatagatgtagtattttgggtatctaggtgttttatcattatgtaaggaattaaagtaaaggactttgtagttgtttttataaatatgcatatagtagagtgcaaaatatagcaaaataaaactaaggtagacagcatttagaatgcttaattagaactgctccaggtgccctcgtatagttgcagcagcaccagtcctggtggtcctctttgtctccctcatgagagctcctcaggttatg

SEQ ID NO: 570331 - DNA, 519 bp, Homo sapiens
cggagtgcgctcggcccggcccgcgcaggcggctgagtcctccgagccccgtggcccggacccctcgcgccggtccctgcccctgcgctggcctcggagcgctgctgcggcccgtcccgtcccggcctcaggccctgccgggccctgcagtgtgagagcgcctgctcgctgtgcccccgggttatgactgatccccaataaaggaaactaggccttgaaggtgaagctgggagccgggtgagaatggtaccagcctgacggatgacggatgctggtgaccatgtcggtgcgggatgctgacccatgcacctgcgtgtggcctgtcccaaggcagcgacgatcgtccagctgaagcacctgccggcgcacgctcgaagaaccgcggctacgctgccactctgccagcgtgacagcgggtgcccgcacgacaggacggacgcttggagaacgcagaacgccggcgcctgcacccacgagtgtggcacaacgcctggcctccagagacaccgccagacatga

SEQ ID NO: 570332 - DNA, 953 bp, Homo sapiens
gagaaacttaatagtgctgggagatataggtattattatcctcattttacagatgtgaaaattgaggctcagagaagtaaagtctattgctcaaggtcatgtggctagaatatggcagagccactgattcagatccaggtctcgctgattcttattccagtgtcctattctagcataccatgtggcctctaaagattgcagctccttatttgactagaaaatggtgcctgcccaatctacatctccaacctcaccccatctttgtcttaagcactatgtcttgtgtctggatcagtattatattcagtggtctctggaatacatgttctagtgcgagttgggaagcaacatctcttttaccagcttgcactcggaccaagcttggaaaccggaaaagcttacactgtcgtgcgctatgtcagcagttataagaagttgtgacagtgtgtagctttaactttcggtcagaaaatctattaacatgggcttaagtgctgacttgaaatgctatttgtacggtttggatgtaagtaatcaaatcgagggtcagcgagcttgtatgagacataggtacctccatgtggccccagtccttgtatctagtacaagttcgagaatgcattccctggatcgaactgcttagaactggtggtgctccttctttacttctacctatagctcatacacggttggtctttcaacattgaccggtgtcccgttgggacccaacgagaagaaaaacgaccaggaccaacgaccgcccgagaggacactaacaatgaccggggtgaccgagaaaacagaacgcgcctacctgacaagcggcccccggtggtccagacagctgttccaccagaaccacgaggttcgctggcaccaaaagggggcaaaaccgcgcgggaccccccaatagggcggcggccacaaatctcaacacccaggttaccccctag

SEQ ID NO: 570333 - DNA, 417 bp, Homo sapiens
agagaagggatgtcaggagagttgggggccaggaagacaagagagaatgatcaaatattgctgcaaacaaaagaatggttaagcattaaggtggatttgttaggtttagccacaaaatgatttgtgattatgaacttggtgagagtggttttaatgctgtggtgtgaggatcagaagccagagattataatgggttaaggagtgatttggaggaaatgggtaagtttcaaaaacaaaacaaaacaacttttagtgagttttactgtggttaggaggggcaggacatggcagtactttcttatagttattttgggggaagataggatactgtaaacaactagtcaggtgtggtggcatgcgcctgtagtcccaaaatagtcccagttactcaggaggctgaggtgggaagatacctga

SEQ ID NO: 570334 - DNA, 351 bp, Homo sapiens
  misc_feature (48)..(48): n is a, c, g, or t
  misc_feature (209)..(209): n is a, c, g, or t
  misc_feature (240)..(240): n is a, c, g, or t
  misc_feature (255)..(255): n is a, c, g, or t
  misc_feature (266)..(266): n is a, c, g, or t
  misc_feature (270)..(270): n is a, c, g, or t
aatctttcaaacaggcacatgctcacaggctgacacacactcaaagantcatacccattcacgtgccgctcacatgtacattcacacacatacactgacattcccagactcacacacaccagcacatgctcacaaacttccccatactcacaaacttccccatactcacactcacactcatagactcatgtccacactgtcacccactnatggacacacgcgcaaactttcacattcacncaacctctcacgggnacacaccttanacantcacacaaagacgccattgccactctggcctgttaatctaacctcatcagaaagagtagggtgtcgtgggtcctcaacccc

SEQ ID NO: 570335 - DNA, 266 bp, Homo sapiens
ggatgagggactatatgccagagagagagagaaaaaccaagccagtccccagcgaggtgccatcgcaggccttgcagacctagtcaagctgctagctgcctcagcgactacagcatacaccacaacgagtagaagaaccacccagctaagccctgcctaacttgctgcgcgatagcacgaagctgatagacgccactacatatgagcggttagatgcagagacagagaaccccaacagcagacacatcgtacataacagactgact

SEQ ID NO: 570336 - DNA, 499 bp, Homo sapiens
cggggctgttctagaggatcccgtgcgtacggacgcaagaaccctcgacgcatgtcgtaggagagttcgcgcaggcactgggcctgcaacccatgcatatgcgccatgagtaaagggttggggtaagcaggatggctgaagtggaactcgaatgggtcccgcttgtgggcgaggaattgagtgagcagtggcgcttgggcaacgtccacgtcgtcaagcaggtcggcaatgccgatatatgccacatgacggtgcccgccccggccaggactctcagcgcctgcgtagtgctcgccatacaggtggcggtagcaaccgacactccattcctccatgcgtgcaaaccatgcactgagcgacgacgggttagcgggtgcgaatgtcaggccggttgccaaggcgctttttttcagccacgcgatatattggctttgcttgcgcaccgagtcgccgctgaccagagcatgcacgccgccattccaggtggcgtccgtagcgg

SEQ ID NO: 570337 - DNA, 172 bp, Homo sapiens
atcggcatgtcccagaaaggtctctggaggacaactcactcagtaaaacataatgtatcatcacgaagaaaactgattctctatgacatgaaatgataaatataatgcattgttataattactacatgtacgctgtctgcagagacattcaataaagtttgctttgattaga

SEQ ID NO: 570338 - DNA, 145 bp, Homo sapiens
gacagacgcttaacatttttttccttacccacccgtatagacttccccatagaaaaagatcagaacaagcttaatgtgactccacattgaatagcagctaattcatgcaagttcgctctgaactggtcgtgaatgggggatccat

SEQ ID NO: 570339 - DNA, 306 bp, Homo sapiens
gggctgcacgtgtggtaaggcctacaagaagcggccttcagctggaccttggctccccgccggacttcgagggtgtaatcgccgcccctgttggggtgaagcgccgcggctgcagcatgcctacacaggaagaaaaagcctttatgagagaagaagaaagctgtgtcttttacacttggtcaccgagccaacgagatcctttagcagcagatgagagtacaccccagaggtgtctattgcccacacaaaattgagacaatgaagaaaggcgagcagacagaggagtatgagtgttcttgatgacga

SEQ ID NO: 570340 - DNA, 467 bp, Homo sapiens
aatcttcagtatctaggcatctgcatgtatacgtgcagtcacagggatgcgatggctggcctgggtcagagcgctgacatacctagcttcttatattaataagacaaataaaacaaaatagtgttgaagtgttggggcagcgaaaatatttggggggtggtatggagagatactgggcgatgtttctcagggctgcttcaaccgggattatttgcggcgtgtgagcctagagtgggagagattaagctgaagggaggtcttgtggtaaggggtgatatcatgggggatgttagaagaaaacatttgtcgtatagaatgattggtgatggcctggatacggttttggatgatttgagaagctaaatggaagataaaaggtccgaataaaaggaggagaaaaatgggtattaaatgtctaagaattgggaggacctaggacatctgattagagagtgcctaaggagatt

SEQ ID NO: 570341 - DNA, 443 bp, Homo sapiens
ccgcagggcaggctgtatacctcatctttcgagtttgcacagccctgtgtttttgttaaacagttgcctggacctattctctgcgcgtcagattgctatgaggaccccttatcccgaagttacggggtcaatttgcctagttccttaaccatgaatctctcaacgccttagtatattctacccgaccacgtgtgtccgtttgcggtacgggtcgcagtaacattaagtttagcggattttctcggaagtatgattacctgcactcaacgcttcccgaaggaagtgttgtactttcgtgtttcagctcaagtggtggatttgcctgccactctcattacctacgcacttaaacgccctattccgtcagtgcgtggcagtgtcactgctccgtctccacatcactgatactgcgagttgcggaatattaaccgcatctgccatcg

SEQ ID NO: 570342 - DNA, 285 bp, Homo sapiens
tccccccccccccccccttttgggggttccgttttgggggttggggcccccccccgggggggaaacccccccccctttgggggaaccaaacctccttgaattaaaccttttgcttttttgggggggggggggggggggccctaaaaccccccctttgtggggaaaaaccccgggggagggtttttttggccctttttttttttttaaaaaaggaccccccggaaagcttgaaaaaaaccctttttttttgggttttttccaaaaaaaaggggtttttttatggga

SEQ ID NO: 570343 - DNA, 241 bp, Homo sapiens
gttcccgagcttggtcagaattcttacacaagagcaggacgcaccctgtagcctttctgtccaaacaacttgaccttactgttttagcctagccctcatgtctgtgtgcagtggctgccgctgctttaatacttttagaggccctgaaaatcacaaactatgctcaactcactctctacatttctcaacttccaaaatctattttcatcctcatctgttacctatctcggcataattctca

SEQ ID NO: 570344 - DNA, 470 bp, Homo sapiens
  misc_feature (431)..(432): n is a, c, g, or t
  misc_feature (450)..(450): n is a, c, g, or t
ggacgctaccattgggacttggctgcatgagctcgtcatctaaaaacgattaatcgacatcctataattagatgaacacggctgcggaatgttggctcaaccgaacaatgtttgtaggagcccggtcacgctacccaaagcgttcatcacgcgtgccaagcaaaagtttagtacgacgacacaacaacttgaccaggattactatgcagtcgcgccggttctgccaatgcgtgaaaccacagacactaacctacgccgcttggacccctcggctagttgatacacccgaagacggtactaaccctacaaaccccgattatagcgcatcgttactgcctgactggctaacctgtaccttcatcaaaagtggtcatcacgtacccggggtttaccctcgggtgggtggtgggggcgggggcggaggggaaagnnggcccggggtttcccccncaaagggtgtggtggggtgc

SEQ ID NO: 570345 - DNA, 116 bp, Homo sapiens
gagaacttgcgctgaatgtacaccgactcatgcatgtatgagtatgccaaggatttcctctggatctggagaccccggagaaacaaagatgctaatcaccaaacaggctgactggg

SEQ ID NO: 570346 - DNA, 472 bp, Homo sapiens
  misc_feature (16)..(17): n is a, c, g, or t
  misc_feature (433)..(434): n is a, c, g, or t
  misc_feature (452)..(452): n is a, c, g, or t
aagcttcctattgggnnctttggctgcaatgaggatttgtgcgaacagctaatcttttgaacctattatgcttggctgtgagtgttgggacatacggttactccaattatatcagtacgctgccgaagttgacctggtggtgtgatgatgcagcccaggggtaggttacatatgtcgtccatagggtttgctatgtcaatttagaagcacccacggtggattggtctaaccacggaatactaatgtggacgagccggcgcttcgtgatcggccgatgggggctcgtcatctagacggtactaaccctacaaaccccgattatagcgcatcgttactgcctgactggctaacctgtaccttcatcaaaagtggtcatcacgtacccggggtttaccctcgggtgggtggtgggggcgggggcggaggggaaagnnggcccggggtttcccccncaaagggtgtggtggggtgc

SEQ ID NO: 570347 - DNA, 418 bp, Homo sapiens
  misc_feature (379)..(380): n is a, c, g, or t
  misc_feature (398)..(398): n is a, c, g, or t
ggacgctaccattgggacttggctgcatgagctcgtcatctaaaaacgattaatcgacatcctataattagatgaacacggctgcggaatgttggctcaaccgaacaatgtttgtaggagcccggtcacgctacccaaagcgttcatcacgcgtgccaagcaaaagtttagtacgacgacacaacaacttgaccaggattactatgcagtcgcgccggttctgccaatgcgtgaaacagacggtactaaccctacaaaccccgattatagcgcatcgttactgcctgactggctaacctgtaccttcatcaaaagtggtcatcacgtacccggggtttaccctcgggtgggtggtgggggcgggggcggaggggaaagnnggcccggggtttcccccncaaagggtgtggtggggtgc

SEQ ID NO: 570348 - DNA, 422 bp, Homo sapiens
  misc_feature (18)..(18): n is a, c, g, or t
  misc_feature (383)..(384): n is a, c, g, or t
  misc_feature (402)..(402): n is a, c, g, or t
aagcttacctttgggaanttggctgcaatgagtgttgggacatacggttactccaattatatcagtacgctgccgaagttgacctggtggtgtgatgatgcagcccaggggtaggttacatatgtcgtccatagggtttgctatgtcaatttagaagcacccacggtggattggtctaaccacggaatactaatgtggacgagccggcgcttcgtgatcggccgatgggggctcgtcatctagacggtactaaccctacaaaccccgattatagcgcatcgttactgcctgactggctaacctgtaccttcatcaaaagtggtcatcacgtacccggggtttaccctcgggtgggtggtgggggcgggggcggaggggaaagnnggcccggggtttcccccncaaagggtgtggtggggtgc

SEQ ID NO: 570349 - DNA, 174 bp, Homo sapiens
ctcagaaacttcaaatgtttctgctcaaacatgaataatttctagggtggctgcacacccatctcaggagtgactcgtcacccagattttagcatcacaaaggaaagtggcactgtgagctgggatctgtggccctccctccgcctccggtggatggagtggtgctgtgatgtg

SEQ ID NO: 570350 - DNA, 749 bp, Homo sapiens
gcaccctttctatcctaaacacagtccataaaaaatgtgcttatcactgtgctccacaagagaaccaataccagacatttctcctgtggagacacagtgataagcggacgcgtgggtccgcgacgcgtgggtccaagatgtcgaccaagaatttccgaggtcagtgacgggcactggattatgcgctgacaagaaaatgtggcacatgtcagactgttgctacgaagaagcagctgtacatcgatgtggtcgggagaacacaactgagggcaacgatgatgaacagctgggggcaactgaacactaggaccagacacttgcgagaaaacgagccgaggcctatttagtgctaatgactggccatgtaaaactctgcagcactcgtgactagggccagcaagcatcagagtgtaatatgtgtaatactccaacagtatgctcaattagaagaaagaacaggatatggttggtggtttctactgaaagacaaatgttgaactatatccaaagagcaagaatctgatggtcgacatatgatgagacaggacgcataaaaacgaacacacataccagagggaaacgcagcaggaaccagcactctacactcaaggcagccgacagaccacgactcagagggagaacaccgaggatgaggacgaagcactccgcaacactactacacaagcagaacgaagacgcccaaaacgacgcagaccaccaaccaaaagcacaacaccaccacaacaacc

SEQ ID NO: 570351 - DNA, 592 bp, Homo sapiens
  misc_feature (149)..(149): n is a, c, g, or t
  misc_feature (553)..(554): n is a, c, g, or t
  misc_feature (572)..(572): n is a, c, g, or t
tgcatacgaatagttgataagaacataaaaaagaagcgacaaccggggctgccgccagcaacacttatggaagaactgggggacaggtggagggcaattatggggaggcgatacaattatgagctagagtacacagtgtgaggcgtctnagagcccaaaagtacgggatagaaaaaggtataagacaatcagcgcgggaacaaatggccgaaaacgcatgagccatacaggaaagagcgcgatatagcggaataagaacaggaaaattagtaataaacgaggggcgggggaggcatgcgaacaaggtattggcgaacgggggggggtataacgggcggcgaagaagcaacaggtaggaaacccccaataccctgtgcgtgataggttaccagaacaggcctgcgcctatttgaaccggaccagcggttcgtaccccgattatagcgcatcgttactgcctgactggctaacctgtaccttcatcaaaagtggtcatcacgtacccggggtttaccctcgggtgggtggtgggggcgggggcggaggggaaagnnggcccggggtttcccccncaaagggtgtggtggggtgc

SEQ ID NO: 570352 - DNA, 1414 bp, Homo sapiens
gcacggactctgtgaaccatgaacatatttgatcgaaagatcaactttgatagcgctttataaaattcttctcatataaccccagtcaacgcagcagcacctggaagaaggtctatgcaagttattgcacctatagtatgtatgtaggcggcatgcaggggcctatgtccatatggtcactcactttcatatcaggctggcctgccctgtctgccctatgggcatcccatgcatcattgcatgcatttaggcctgcatcggccacacaccatccatcagcccatgcacacactagcaacgagcacacacagcactgcggcactatcctctgcctcggcatctcagcaatatcgcattcacccagcgcaggtatggcacttggtggccacatgaccccctgcgacagctatatggctactatggcatagtgcaaacccaccaaagaccataccactatcaccccacctagcctttactacattgggcgccacgagcgagaccggaacaccaacacaaacacaggcccatacacaacaccaatgcaaacggacacagtacatactggcccaagagaaggaccagcaacaaccaccaacacagacataaaacacatgcgcaacgcggtcaatcatacgcacagggctcacaagacacacaatgcaccgacacagcgcaacagcccaaccaaacaggtcccactcaccccccatgggacgcggacacacactcgctccaatcacaacaacacggagacaatacccccataaaaggcgcgagcaaacacacacccaagcagccacacagcaacaccgtgagtacaatagacagccagccacctcgcgctcgacgtacccatcgaatagcacacagcgacaacccgacgaccgaccaccaaggcaccacaccctccccccgcctcgcagtagaatacggacaggacggggccacgtcaacaccctggtgccgccaatcccacccgacaagcaccaactgccagccgcacaccgggccaatacggaccactatgcgtcgcgatcacgacctccgcacagcgaagccacggccacactgcagccccaacaacccaccaatcagcgcacccacaggggacacacaatcacactgatacacacacgaccacaacaacacacgcacccagaccgccacgagaaacacgtcccccggcagacccacacaccacacgaggcccacgaacgcacacgctcggaaacacaccacgcccaacgcacagcggaccgcgacgtcagcagtccagatgctcccccacgtctaacacagcagcagagaacggatacggcaggcacacagacacagacaaaccaaaacaccacaccactgagacacgcgacgaagcaccacagaccgactgacagaacagaccgaacaacaacaa

SEQ ID NO: 570353 - DNA, 496 bp, Homo sapiens
  misc_feature (258)..(258): n is a, c, g, or t
  misc_feature (272)..(272): n is a, c, g, or t
  misc_feature (292)..(292): n is a, c, g, or t
  misc_feature (303)..(303): n is a, c, g, or t
  misc_feature (457)..(458): n is a, c, g, or t
  misc_feature (476)..(476): n is a, c, g, or t
tcgagtactttggctgcaatgatacggggagaatataagacttgtggataatactttacgtggtgaatacacagtatacacgtatgttgtgctaggtgaaccgattatgcggagaaatgaatatgtgtacaagacccacatatgcggcatttggtttggttagtgatttgtgaataattggagttttgttatacttggtgaatttatatacggatggacctgtttagcatatagcgcaagagcccaatgcagagttgngcccataataactnacggtaaagaacatagttgngagaattcatnacagattttattagacggtactaaccctacaaaccccgattatagcgcatcgttactgcctgactggctaacctgtaccttcatcaaaagtggtcatcacgtacccggggtttaccctcgggtgggtggtgggggcgggggcggaggggaaagnnggcccggggtttcccccncaaagggtgtggtggggtgc

SEQ ID NO: 570354 - DNA, 178 bp, Homo sapiens
  misc_feature (19)..(19): n is a, c, g, or t
  misc_feature (68)..(68): n is a, c, g, or t
agagggccttcgctgctgngcccctggggactccttcgcgacggctcccggggagggggctgaggctngcagcgaggaccctgacaccccttcggagaggagttgctgctaggcggctcgcttgctcctggaaagatttggggtttgagagctcttggccaggaggctcgcgctggcc

SEQ ID NO: 570355 - DNA, 302 bp, Homo sapiens
gcatgatacaatcgagctcgtgtacccagtgaatcgactcgggtactggaggatctctagagtctgaccaggctccatgtaaacgagtatttggagcgccgtatgagtagctcactgtgtctacggaacttgtacaggaaggcatgcaccgcagtggtgaatacactgttgacctggctccatgtttgcgttattgggtcgtgagcacggatctcatgtattgaaggatacttgtctagggaggtagtgcacggcagtggtgaatacacgtcgagctggaggcatgaattgaatgatcgggt

SEQ ID NO: 570356 - DNA, 173 bp, Homo sapiens
acacatacacatcatcacacacagacacacaccctgtgtgtatagagcataatgacgctatatgtcactcgagacgcgggagcagcaccagaggctatatatatctggtgtgtgctctgctcgtgtcacctcagttattcttctcattatatagtacagaatgtttataggca

SEQ ID NO: 570357 - DNA, 523 bp, Homo sapiens
  misc_feature (19)..(19): n is a, c, g, or t
  misc_feature (24)..(24): n is a, c, g, or t
  misc_feature (26)..(28): n is a, c, g, or t
  misc_feature (32)..(32): n is a, c, g, or t
  misc_feature (484)..(485): n is a, c, g, or t
  misc_feature (503)..(503): n is a, c, g, or t
aggcggtcctgactgttgngtttntnnngatngcgggcgctagatggatacatggattacattcacattcccttcccacgccaaatttcacaacgcatgggaaggcttctgcctattgtattaccaccactttaattcatggaattaaaggcaaatgctaaactggttgagtattttttccggtttgggcgtaaaccaaatttccggctactttcctcccatgacccggaggtcttcttctgatcttccatcctgatcaaagaccatccggtagtcgtccagatacgatcataatcggttattcgtaaatcaataacgaaggacggggtgaataacctgggactaaatctataccaccagagcccccgattatagcgcatcgttactgcctgactggctaacctgtaccttcatcaaaagtggtcatcacgtacccggggtttaccctcgggtgggtggtgggggcgggggcggaggggaaagnnggcccggggtttcccccncaaagggtgtggtggggtgc

SEQ ID NO: 570358 - DNA, 309 bp, Homo sapiens
  misc_feature (27)..(27): n is a, c, g, or t
  misc_feature (37)..(38): n is a, c, g, or t
  misc_feature (270)..(271): n is a, c, g, or t
  misc_feature (289)..(289): n is a, c, g, or t
ttaggtcctcgctatgcctgccgtgcnggttatttcnncgctgcggccctggggctatctaacgataacgaaaatgcagtcggagtgcgttcacgggctccccttatgtcgattaatacgttaaaacccaaaaggctgccaccagatgcccccgattatagcgcatcgttactgcctgactggctaacctgtaccttcatcaaaagtggtcatcacgtacccggggtttaccctcgggtgggtggtgggggcgggggcggaggggaaagnnggcccggggtttcccccncaaagggtgtggtggggtgc

SEQ ID NO: 570359 - DNA, 160 bp, Homo sapiens
  misc_feature (160)..(160): n is a, c, g, or t
cagggtgacccacgaggagccattgtggctagagctgccctctgtgctcagccctgaggacagatgcctccttcctctttttccttcccaaagcaagcaagaggccgtgctgctgtgggaaatggtactctacaattggctctacttccccatggccctn

SEQ ID NO: 570360 - DNA, 420 bp, Homo sapiens
  misc_feature (9)..(9): n is a, c, g, or t
  misc_feature (114)..(114): n is a, c, g, or t
  misc_feature (381)..(382): n is a, c, g, or t
  misc_feature (400)..(400): n is a, c, g, or t
gagctttgnctgcatgatagtatagttgataaactgcctgtgtatgatgtgctctaggctatctgtacgaaaaaagttacgcagccttagcgggagggtgactagctaaaaganttgcaataggttgggggggagggtttatcaattgtgcggctacttgatggcagaaattatgtctggctggttctgattgaggattaataggagctagattataatggtggagagtatattccgtgagacggtactaaccctacaaaccccgattatagcgcatcgttactgcctgactggctaacctgtaccttcatcaaaagtggtcatcacgtacccggggtttaccctcgggtgggtggtgggggcgggggcggaggggaaagnnggcccggggtttcccccncaaagggtgtggtggggtgc

SEQ ID NO: 570361 - DNA, 396 bp, Homo sapiens
  misc_feature (229)..(229): n is a, c, g, or t
  misc_feature (357)..(358): n is a, c, g, or t
  misc_feature (376)..(376): n is a, c, g, or t
tataggtacgccgaggtgaggttggagtagttggatggagtatgatgaaggaggatgaggacctagagctggaggggtagccggagctttttaaatgtaatacgcatttgcgccaagtttggcctgttttatacgtgattccttactaataatatgtgacgtgggggtagctttttgatatggatgagagttgggatatatttatgtagggtcaggcttaatattatgnatagcgcccccgattatagcgcatcgttactgcctgactggctaacctgtaccttcatcaaaagtggtcatcacgtacccggggtttaccctcgggtgggtggtgggggcgggggcggaggggaaagnnggcccggggtttcccccncaaagggtgtggtggggtgc

SEQ ID NO: 570362 - DNA, 126 bp, Homo sapiens
  misc_feature (13)..(13): n is a, c, g, or t
cccgtcgtccagncatcaaaaaaaaaaaaggcccctccaaaaattttccccacaaagtagggcaatagggcgggattatctcaaattccttaacaaagggagatagtcctagttcagggagttggg

SEQ ID NO: 570363 - DNA, 90 bp, Homo sapiens
gccgcggacacggccatgtattactgtgcgagagcacccgtggtacttccagttgtcatgccctatgcttttgatatctggggccaaggg

SEQ ID NO: 570364 - DNA, 110 bp, Homo sapiens
cactcctcaaaaggtcactggaacgggcgttcagcagatgtggtttcggagattgttctgctggtctcctgcatgtcttgttggactgttatgcgactcgtggattatcg

SEQ ID NO: 570365 - DNA, 660 bp, Homo sapiens
ggcacatgtgtccgtcccatctatcagatataagagacaggagcacgtgaggcccatctttgtgtaactgtagagagctgatcgggtcgtgatgtgccaccgttccctaggtggaggctgtatgtcatactagttccggggcatctatatacccacatatagagcaaacatgattatgagattgaagtatacatataacgggttactttatataccattgtgagctgtatccaagtatcccctcctttgaggcagtatttaatgacttatagtagattattttgcgagaaagagtcttgccctgtcgccaggctggagtgcagtggtgcgatctcggattactgcaacctctgcctcagccccctgagttgccaggattgtaggcgcctgccaccatgcccagctaagatacagtatttttaatagagacgcggtttcaccatgttggccaggctggtcttgaactcctgacctcaagtgatccgcctgcctttgcatcccaaaatgctgggattaaagacgtgagccaccacacccagctttgttttctttcttatttttttggcccagggcattgtttatatattttagtattcaattacaaataagaccactatgaacattcatgtacaagtctttgtgggcctgtgcttcattttg

SEQ ID NO: 570366 - DNA, 205 bp, Homo sapiens
caggccagcctatgagattaaatgcctcagagtagctgattgtgggaagagaaatgggcctacacattaatctatacttttggttatgttgaaaaataacgtgatgcaaatgctaggagtggttaattatagatagtaagagagtaagttgatgttttggttttgttgcgtgtgacacggtccacccaggctgggcgtgcagtgg

SEQ ID NO: 570367 - DNA, 958 bp, Homo sapiens
gttgtgacccccggtcggttgcccagtttgcgggtccgggttttcggttttccatcccgctggagattttctgggagccgacgtttgtcccccatgtgggggtctgctcccgcgggccacctcctttttgggggtttccgcggagattgtgccccccagggggggcaagcctgtccccccgcctgcgtgggaggagccaccctggtgctgttttgtagaggtctctgccctctgggtaatgttgtacgagttactccccctctgggattgtggccacatccctgttgaggaagcacagcgcggggaccctctcaccgaacctcgggctgttgcggacccctcggtcttcaaggggcgtagaccacgtcgtaggccacgtggttccccccaacgtgtgaagttggggcggtccccttttcttacgtggtgccccacgagttgcgactggttacgcgtgttccgtggtattgttctgtaccgccggtggtcacctctggttagatgactcaaccacttttccttgaatgggccgacgacactacttcgactgcaaatatctttggtgtttgtgtattccaccgcagccctacccttagtgaaccaacgtatttttcggttacactctgcatggaaccagcagtttatccctcctctctctccccaagtcgtgatctactgatggcgcacttctgatgtgtcttaattttcagaggtttttccctctgcagtttatcacacacacgcagcagcccaccacacccacatcatcacaatcacacacacacacacacacacacacacaccccacagtacccgtataagcatctgccatctgcttttcccaatgccatgcgtcctggtcaagctcccctcactctgtttcctggtcagcatgtactcccctcatccgattcccctgtagcagtcactgacagttaataaacctttgccaacgtta

SEQ ID NO: 570368 - DNA, 511 bp, Homo sapiens
  misc_feature (426)..(426): n is a, c, g, or t
  misc_feature (428)..(428): n is a, c, g, or t
agcacttgtgagccccttcctgcctgtctggggacgctgggacccttaccgcacggacattgggcctcagcctgccccgagctcctacagcatcagtggactggagggtggtcctgccattgtccagaaatcagccgcagccccggtgagcctccatcctgctcttgcccaccaggtattgggggcctgtggcagcaagatagggggagagagacccagagatgtgagagagagtcagagacagagacagagagagagagagagagacacagagagaggcagagagagagcgagcgagcgcgcggcagccgcggggcgagggcctttgccgttttgctggggcatgctgactgaaagggatttgtgtttttgctttttttccaaaaagatctccagctccacgcatgtttgcggttaaggcggggngncccccccttcccctcccccttcccctcccccttgggacgcgctctaaataattgcaataaaacaaacctttctctgcaaaaaa

SEQ ID NO: 570369 - DNA, 112 bp, Homo sapiens
tgggctaccccatggcccttgatggagtctgagctgctccaaaaaattctcgaggctccggatttctatgtgcagatgaaatgggaatcaccagctgggtgcccttaaactg

SEQ ID NO: 570370 - DNA, 883 bp, Homo sapiens
gcgcggggcggggcttccgggcggggcaggctggcttccggcgttagcggggccgcggattgccgcatacaggccagcgctcggggcttcgctcgcggttgcccgactcttgcccctcgagcgctgttccccgtcgccggcgccccgtctacgttgtcgggcgccgccatggagcccgcgcctcgctggctggcggggctgcgcttcgacgaacctgcgccctgcgctgcgctgccctgtgggaggcgcctgccgccctggtccctgatgggctgcccctgtcctgcgcctgcggccctgtgccctggggcctgcttcaccctgctgtgcagcccacccccgctgcgggcagccgcggcctctgtggcgctgtcaggagccctggccgctggcgcttgcttgggcctgggcgcgcctgccctgcgctgcgagggcctgatggccctgagggccgccgctgtttctttcaggcggggcaaacggcggcctcctgccggggccggccgaggccccggccggcggcacgtggctactgcggggccaccaaattcgggcccagttcgccggggccaagctgggccgacacgggcgccgccaattgtacccttgggcgcaggtgttgcccgggcggaacacggcgagcgcctgggagcttgcaggtccaggggcgccgtggcccaacgccctttcttccagggccgaacgggtcggcaaaggggtccttacggggccaaggcattccggggagattcctaattgcaggcgaaagccaattgttccaccctggggagttcccccaaccaacacgggtcccgtgcgcctgcggtcaacgtcctgagttcccacggtggttgcgcgacgttgttcttatgatggtaatccc

SEQ ID NO: 570371 - DNA, 841 bp, Homo sapiens
  misc_feature (94)..(94): n is a, c, g, or t
  misc_feature (108)..(108): n is a, c, g, or t
  misc_feature (119)..(119): n is a, c, g, or t
  misc_feature (121)..(121): n is a, c, g, or t
  misc_feature (130)..(130): n is a, c, g, or t
  misc_feature (136)..(136): n is a, c, g, or t
  misc_feature (138)..(138): n is a, c, g, or t
  misc_feature (140)..(141): n is a, c, g, or t
  misc_feature (154)..(154): n is a, c, g, or t
  misc_feature (160)..(160): n is a, c, g, or t
  misc_feature (171)..(171): n is a, c, g, or t
  misc_feature (179)..(180): n is a, c, g, or t
  misc_feature (183)..(183): n is a, c, g, or t
  misc_feature (680)..(680): n is a, c, g, or t
  misc_feature (764)..(764): n is a, c, g, or t
  misc_feature (822)..(822): n is a, c, g, or t
attttagatttgacaatcgtttccacatacactcagacaggcttacagaagaatttcaaatatcaaatagagaagctgttaattcacgcacggnatgtactttcagtnaaggcgtccangntgggagtantgcatnancnncgatagaactacntaaacncaataccgtgnttgttgannctntcaatcaactttgttttggaaaaagctgctccaggtgtgaagaccccgcccgccttaggcagatgagaagcatcacttagaagagtcatggctgcctgaaccatagctatgggggtagccacatagccagcctctggtcctttcacctgagtacaaattttgatatttggtttgttcttatctgtaccagtgccttggctgtatccttgaccaaagaatgtcagcgtgaatgaggcagcatcaatctgtttttgtgttgggccttgttttgaaaaatagccaaaggagaagaaccatgggaattttatgagaagttgccttccaattccaaacctcacaaagaacaaaaagaaaagtcctgcaaacatcagcttaataacagaggtgatgcctcccacagttacatacgcaggcatactgaaactggtgattcctctaaaattttcatacaagtaacggttgagtcctccttaacaacagacacatcagatccccantaaaaaggaatggaataacctttgagttccggcataagaattggccacttctcttcattttggacaatgagcggacaggtttanattgatacattcttagtttctcaattactctgatctcaaaacataaattgctgcttcnaggtacatcatgattctca

SEQ ID NO: 570372 - DNA, 338 bp, Homo sapiens
  misc_feature (218)..(218): n is a, c, g, or t
taagatcccgatcacgtgcacttgtgctgtcgcgtgggcaaatttctcacccctgttgtctgggagaaagaaactgcgctgagttgaagttgagaatgtggatacccgctcactcacacacactcattctcagagtgtgaaaaatacctgagcctccttttagcttggaagcatacagtaccatgtgtgcaaaggtacagcgaaaagtgggcttgagnaccagggtccatctttctcctcagtagacaaggccaggctgtcttttacaacaaagcaccacaggtgaacccagtccctcctcctcccccaaatcaggcatttcacaatggcacgtggat

SEQ ID NO: 570373 - DNA, 118 bp, Homo sapiens
tagatcccccaagcggcagttcatcgcgctgccagcctgcgaatccgcctgccagaattgaaacccgctcgacaccgaaataacgcagcatccaccaggcgcgcggggcggagaagag

SEQ ID NO: 570374 - DNA, 187 bp, Homo sapiens
caaaactgcaggaaaataaaacatgaaaactttttatgaaaaaaaaaaaacccccttgagtttcctgtcgtcttcttttgaaactgtagggcatatgttaaaacatgtatatcatttccagtattgagtcgtgtgcccctgctgtacctgatgtatccaatttggattaaacaaattatgtgcccca

SEQ ID NO: 570375 - DNA, 468 bp, Homo sapiens
  misc_feature (27)..(27): n is a, c, g, or t
  misc_feature (159)..(159): n is a, c, g, or t
  misc_feature (161)..(161): n is a, c, g, or t
  misc_feature (262)..(262): n is a, c, g, or t
aaggtgatggtaaatcttatttcggtnttaatgtgattagataatttcatcggggttttggattaacaacaacattgggtccccgttaattttctttcagtaacccacaattattttttagtatagtccattattgtttatctgaattttaattgaacnancaatcctagtttgatactcccagtcttgtcattgccagctgtgttggtagtgctgtgttgaattacggaataatgagttagaactattaaaacagccaaanctccacagtcaatattagtaatttcttgctggttgaaacttgtttattatgtacaaatagattcttataatattatttaaatgactgcatttttaaatacaaggctttatatttttaactttaagatgtttttatgtgctctccaaattttttttactgtttctgattgtatggaaatataaaagtaaatatgaaacatttaaaat

SEQ ID NO: 570376 - DNA, 237 bp, Homo sapiens
gcggttctggttcagggcagtaccgtgatttgccttattatatcacagataagtttcgattcagaattgggacagatactacctccctcattgattgaccccagctctttacgctgcccgctgctgcctcgtgcaatcttgctatggcacgaatgctattcgtgtacccttgctgccccagttgctggccttgaccgtacgatgtgagtatcacaggagcccgactttgtcccgctg

SEQ ID NO: 570377 - DNA, 426 bp, Homo sapiens
  misc_feature (49)..(49): n is a, c, g, or t
  misc_feature (151)..(151): n is a, c, g, or t
  misc_feature (372)..(372): n is a, c, g, or t
  misc_feature (391)..(391): n is a, c, g, or t
aaaatgtgggaaagtttggaacttcctagaggcttgttgaatggctttnacaaagacattgataatgataaggacaatgaaaaccaggctgaggtggtctcagatggagatgaggaacttgatgggagctggagcaaagatgactcttgtnatgttttagcaaagagactgatggcattttgcccctgcctgagagatttctggaactttgaacttgagagagatgattttgggtgtctgatggaaaatatttctaagcagcaaagcattcaagaggtgacttgggtactgttaaaggcattcagttttaaaagagaagcagagcataaaagttttggaaaaatttgcagcctgacctattatgataggaanggaaaaaccccgttttttntggggggggaattcaagctgggctgccagaaattt

SEQ ID NO: 570378 - DNA, 668 bp, Homo sapiens
  misc_feature (27)..(27): n is a, c, g, or t
  misc_feature (159)..(159): n is a, c, g, or t
  misc_feature (161)..(161): n is a, c, g, or t
  misc_feature (262)..(262): n is a, c, g, or t
aaggtgatggtaaatcttatttcggtnttaatgtgattagataatttcatcggggttttggattaacaacaacattgggtccccgttaattttctttcagtaacccacaattattttttagtatagtccattattgtttatctgaattttaattgaacnancaatcctagtttgatactcccagtcttgtcattgccagctgtgttggtagtgctgtgttgaattacggaataatgagttagaactattaaaacagccaaanctccacagtcaatattagtaatttcttgctggttgaaacttgtttattatgtacaaatagattcttataatattatttaaaaatgcagtcatttaaataatattataagaatctatttgtacataatattatttaaatgactgcatttttaaatacaaggctttatatttttaactttaagatgtttttatgtgctctccaaattttttttactgtttctgattgtatggaaatataaaagtaaatatgaaacatttaaaatcttaaaaaactaatatttcttatctttacttatcatcaaccttcaaattgaatttttttgggggggggcccggtccccattttcccttattgtgggtctcattacccccgctcattgccctgtcttttacaaccttttgcactg

SEQ ID NO: 570379 - DNA, 1731 bp, Homo sapiens
  misc_feature (1728)..(1728): n is a, c, g, or t
  misc_feature (1731)..(1731): n is a, c, g, or t
tctcaaaggaatggctttaatggagggtcacaggcatcacagggggtctggctcagcttcctcgccaccagggagaacaagtccttacgtggtgggccatgggggaaagaataatcttggcagaaatcacctcaaaccattcagattggtgtacgccagctcttctttacacaggcaagcctctaatgtggcgctcccgggccctagggtggaggctgggaagaacttctggcgtacacacaatcatgtgtaaagtacgctggcttctttggagcgctatccatggatccaccagggaaagccctctcgggtcttcacagaaagagtctggcacagaagtgtatcactctcgaagtccgcctctggcacgtcaagagtgcgggagaggtgttctgcggagacatgagagtgagactatcccacatagaccacacaagtgtgtggctgagaaaaacaagagacaagaacaaggacgcgaggggagagaataaaggggggaggcaacgtggggcacacccccaaagtgcgagacctgtggggcctctagaggaagagcttacaaaacatttctaaaccaacgtgtccaaggaaccacccctgtggagtatgtggaacacgcagcgacgagtggcttctatcacaaagagattatcgttcgcactacatatatatctctgaagggaagccccgcgttttcacccatcgtagtataacccccctttttcaagaagcaaatacaaaagagcaacaattttagagtgctccaccacacattgttggtgggaaacaccaagggtcaaaaagaggggcacatttctgtgagggcatatctattatctatattcacaggacacaaataattgttcttccacaaggacgattccctgtggaacaaggaggattaacgtggagcatacattgaagcaataagccaccaagatgtgacggcgaacaagagaagatttcccccgtaatcacacagggggaccttttaccacaccgagaggcagagcaggaagcaacgaggaacgtccttgagcatacagaaatagccgaggggggagggcccccaacacgcccgccagccatgagagcaaacagacacagcgcaacgagagacacaccgaccgtgatcaagcacgcgcagacatcaactaaagggagaggaaacaatcatcgttagaggaaagaaagcagaaaacagtgtcatccacagaacaggggtcggctagaagcaagcaacactcttgcgggagtagtcacgagagcacggggcgcatgaacaaccaaacatgtggaaagaaagatacaacctaagagaaacacccggacgaggatgaacaaacgggcgtcaaaccaagagggtacaccgaacaaagagagaacatcgagaaccccacgagtacctctaacgctggtgtacagacaaggggacaacaagggaacgagcatcactagagagtagagacaaagagacagcaacagaacaccagcgcaagacgactacagctggacggagtggcagagaagacgagacagacacagaagtaggctcaaagagggagcaaataacgggactatagatgagacagtagatacatagacaactatgagccaaagtgagagaaacaagacacaaagtcggcttagcagcgatagggcgtagaccgaagacacctaacacgaagctagcacagaacgagatatcacgtcgcgtcttatcgatcnggn

SEQ ID NO: 570380 - DNA, 718 bp, Homo sapiens
tggagtccagccattgacacggggagccaaaaagaagaaaaggaaacaaaaaaagaagaaagaaaaaggcagtgagacagtttcagcccaggtatcagccggtgaaatatgaatctctttgccagcagagatggatccatggaaatacagaaggccattgagctgttctcagtgggtcagggacctgccaaaaccatggagtgatggctagcaagcgaatgctaccagttctgggatacgcagcccgtccccaagctgggcgaagtggtgaacacccatgtgccccgtggagcctgacaaggacaatatccgccaggagccctacaccctgccccagggcttcaccggggatgcttgggacctgggcgatcgtggtgtgctaaaagaactgtacaccctcctgattgagaccttatgtggaagatgatgcacaccttgtcccgattggattatcccccggagttctttggggggctctccggccacccggcgggtccccccagtggccctgtggggtcgacgtggtctcaagtcggaaatgggtggcggttcattagcgcctatcccagaaacatccatttctatgcccagagagcacatggtgagtcacttccgtgttgtcccagagtggcgtccagagggttgcccatctgtccgaaatcccgcggtcccgggggctctcagcgtaccgcgggtgtcacagccgtgcccgttgtcg

SEQ ID NO: 570381 - DNA, 153 bp, Homo sapiens
cccgctgtttcagagctcttcagaaaaggacgacagcagtgcggcaagctggcctgtgcccacaggcctgggcggccagggcgacttgtcggcctgtttcggcctcgtctccggtagtcggcttgatttcgatattgctgtgaacctgattgg

SEQ ID NO: 570382 - DNA, 1412 bp, Homo sapiens
  misc_feature (761)..(761): n is a, c, g, or t
agcgtagggcgcgcctgtcaccgatcgtaactccccctgaagatccctccgtatcagcgccttcaatcgccgtgctcccggacaccccgtacccgaggcacacaagaaaacggagtctgcccgcaattcatcagagggattgtatcagcctcattcaagtcaagaagtccatcgcaatcacattctcgtcccctcaattcctattccttgggtgcatgcacatagcgatactgggaacaagtcccaatgtcgagagttctctcagtaacagatgccatatgtagcaagtgatgggagccctcgatagtatttagggtgtcttacgcactcggatgaagagctacatgacacttgtagcgtatcacacttactcggggcacgtgatgctaagctgctacgttgctttagtcaaaataggtcagacaacatgacaggaccttgcacatgcgaaggagaggattggtcgtacaagatacgccggtgaccagagctaacccgttgcttgtctgtacggcgacagcggagaacgcttgccaatcaccgacttgtcgtcgcttacacttcccatgggtttgtccctgataggggacggcacgagacggacaacatcggttgacagacagaccgttggcaccctcttagaagccagtcatggcgaccacgtttctaagacaacccaagccactggtctcctcccataaacttcacactttggcacaagacgaaggggaacacagaccaaaatacgcgcgcacattccncttgtctcgggcaagctcaacgactttcgcggcgagccaggcgacacagagcgtagggcaaggccgacaacacactccacgataggtaagatttcatcggacacacgcccattcccttttctctcacattgcgagtgtcgtaacccaatagagaatcttttaaaaaacatcgcccctacaccatcgccacttgtggggattcttggccgaatggtgcagcaccacggggtccactcttcctaccgtaaacgaaatccacaaccattcgaaaaatgccaccacaagaggggttacgccgagcaagaacgtgggtaacttgacaagcaacttcactggggagctgctggacgggttttttacgagcgcaccaatgggcccagtgccccatgcggcttcctattgagcacagaacaggtatatgcagcgtaaggcacctgttatgccccttaaccgcatcgcgccgaacgaacgcggccacagtgctgacaccccaaggaaaggcctacccaataccccggcgggaaaaaaatctcacaaacggggacttccacttcctggcacctgcaatcaaaaggggggaccaacaatacccccagtgaaaacacccggaccaaacaaccaaggcactactcaacgagcgacgcaattcaa

SEQ ID NO: 570383 - DNA, 917 bp, Homo sapiens
  misc_feature (802)..(802): n is a, c, g, or t
  misc_feature (813)..(813): n is a, c, g, or t
  misc_feature (843)..(843): n is a, c, g, or t
  misc_feature (849)..(849): n is a, c, g, or t
  misc_feature (884)..(884): n is a, c, g, or t
aaaaaaagaaaaagaaaaactctgaggaagagtcctgcgagttgtgggaaaaccttcaaagtgaaaaagatttttactgaatgtcagtataccacaatagaaacaaatttctatcttttctataaggttggaaaagctctagtcttattcagacataacctacaggaagagagttgtattattgtaagagatctaatgcagaacttatcagatattgtaaaaatcagtgtgggaggtattcagtcaaaagtcagaaggaaatgtattatcgttataatttcaaaccttaagaaagcctaaattaccaattgcatatcaaatttttttgataatgtaaggaaaacttaaatcccctccatatcctaattggcatttataataatatgacacttaaccctgacagctagagtcttactttatgctaatgctagatatctatttttaaattccacgtgtgtaaacatgctatactcttctgatattaaacttactaagtacataattccagtgcccccttttctcagaatttttttttgtttttaattttggggggtatagttttggttttcctagtgcacattagtttgtgcaagttcttgcaatgttcacagcaaatatagatttattttgctttgaataatgcagcccataaactttattggtttgaaagttcttcactaccatttaatcacagcttctaaacatgtgaaacaggatctttaaaaaaattttccatatgtcaaagtgtagagatgtttctagcagcatttatcttgtcatctatagattgaacacccctggnacagagctttnagacccttgaaattcctgagtggtaagagnaattangatgacaagccctttaacacacctgagtttatgtnaatgggttacttttggaaacagaccccaggagg

SEQ ID NO: 570384 - DNA, 501 bp, Homo sapiens
aaaaaaagaaaaagaaaaactctgaggaagagtcctgcgagttgtgggaaaaccttcaaagtgaaaaagatttttactgaatgtcagtataccacaatagaaacaaatttctatcttttctataaggttggaaaagctctagtcttattcagacataacctacaggaagagagttgtattattgtaagagatctaatgcagaacttatcagatattgtaaaaatcagtgtgggaggtattcagtcaaaagtcagaaggaaatgtattatcgttataatttcaaaccttaagaaagcctaaattaccaattgcatatcaaatttttttgataatgtaaggaaaacttaaatcccctccatatcctaattggcatttataataatatgacacttaaccctgacagctagagtcttactttatgctaatgctagatatctatttttaaattccacgtgtgtaaacatgctatactcttctgatattaaacttactaagtacata

SEQ ID NO: 570385 - DNA, 457 bp, Homo sapiens
gaggtgactctgaggatcccgatcacgtgcattgtgtgtgatgttccccttcctgtgtcatgtgtctcattgttcaattcccacctatgagtgagaacatgcggtgtttggttttttttgtccttgtaaaagtatgctgagaatgatggtttccagcttcatccatgtccctacaaacgacatgaactcatcattttttacggctgcatagtattccatggtatatgtgccacattttcttaatccagtctatcattgtcggacatttgggttggttccaagtctttgctattgtgaatagtgccgcagtaaacatacatgtgcgtgtgtctttatagcagcatgatttataatcctttgggtatatacccagtaatgggatggcggggtcaaatggtatttctagttctagatctccgaggaatcaccacactgacttccacaatggcacgtggat

SEQ ID NO: 570386 - DNA, 971 bp, Homo sapiens
  misc_feature (856)..(856): n is a, c, g, or t
  misc_feature (867)..(867): n is a, c, g, or t
  misc_feature (897)..(897): n is a, c, g, or t
  misc_feature (903)..(903): n is a, c, g, or t
  misc_feature (938)..(938): n is a, c, g, or t
aaaaaaagaaaaagaaaaactctgaggaagagtcctgcgagttgtgggaaaaccttcaaagtgaaaaagatttttactgaatgtcagtataccacaatagaaacaaatttctatcttttctataaggttggaaaagctctagtcttattcagacataacctacaggaagagagttgtattattgtaagagatctaatgcagaacttatcagatattgtaaaaatcagtgtgggaggtattcagtcaaaagtcagaaggaaatgtattatcgttataatttcaaaccttaagaaagcctaaattaccaattgcatatcaaatttttttgataatgtaaggaaaacttaaatcccctccatatcctaattggcatttataataatatgacacttaaccctgacagctagagtcttactttatgctaatgctagatatctatttttaaattccacgtgtgtaaacatgctatactcttctgatattaaacttactaagtacataattccagtgcccccttttctcagaatttttttttgtttttaattttggggggtatagttttggttttcctagtgcacattagtttgtgcaagttcttgcaatgttcacagcaaatatagatttattttgctttgaataatgcagcccataaactttattggtttgaaagttcttcactaccatttaatcacagcttctaaacatgtgaaacaggatctttaaaaaaattttccatatgtcaaagtgtagagatgtttctagcagcatttatcttgtcatctatagattgaacaaaaagtggtagctgtgaaattgtgatttataataaatacatatttggtcttcatcccctggnacagagctttnagacccttgaaattcctgagtggtaagagnaattangatgacaagccctttaacacacctgagtttatgtnaatgggttacttttggaaacagaccccaggagg

SEQ ID NO: 570387 - DNA, 444 bp, Homo sapiens
atccgccacactatttcttcacataccgaatcaggattgaaatgtcaagtgatgctcttcctgagaaggcctgtcagttggacagtcgctactggaggataacaaacgctaaaggggatgtggaagaagtccagggacctggagtagtcggtgaatttccaattattagcccaggtcggatatatgaatacacaagctgtaccacattttctacaacatcaggctacatggaagggtattacaccttccattttctgtactttaaggacaaggtctttaatgttgccatcccccgattccacatggcatgtccaacattcagggtgtctatagctcgattggtaagttaattttttctcctagtgctggatatatgactttgttctaagaccaaccatctttgtttcggtagataagtagtttataatgatgtccctcctccaa

SEQ ID NO: 570388 - DNA, 388 bp, Homo sapiens
gaaattggccatttctcacccagaaatgccactcacataaatcttcacagcagctttatttataatcactaaaaactggaagcagctctccctctccctctccctctccctctccctctccccacggtctccctctctttccacggtctccctctcatgcggagccgaagctggacaacatagagaggccctgtctttacaaaaataaaaataaaaaattagctgggcatggtagcatgtgcctgtagtcctaccttcttgggaggctgaggtggaaggattgctgaagcccaggaattgcaggttacagtgagctatgattgcactactgcattccagcccgggagacagagtgagactgtctcaaaaaagaaaaagagaggaagag

SEQ ID NO: 570389 - DNA, 360 bp, Homo sapiens
  misc_feature (74)..(74): n is a, c, g, or t
aggactggcaaaattgacttaaaatacctcttagtctagtcctcagtcttcaggaaaggtagaacggactaatnggtcttttaaaaacacaccctcaccaagctcagccaccaacttaaaaaagactggacaatacttttaccactttcccttctcagaattcaggcctgtccttggaatgctacaagtcatactcctattcaccgttctcagctactcatacatgccctgctcttgtttacactgccggtttacactgtttccccaagccatcacagctgatatctcctggtgctatccccaaaccgccactcttaactcttgaagtaaataaataatctttgctgacaggaaaaaaaa

SEQ ID NO: 570390 - DNA, 326 bp, Homo sapiens
  misc_feature (93)..(93): n is a, c, g, or t
cctagaggacctcgcttttgataggcaatataacagtaatggcagcatatgtctcgatattctaagatcgcagtggtcgctgctttaacaatntctaaagtcttttatccatttgttcactgctatgtgattccaaacccagaatgaccccctagtgccagagattgcacggatctataaaacagacagagataaggaccaacagaaataatcctcggggaatggactccaaagtattggccccggtggaggcttaccttaaaagtcaggaataaccctggcattatagcctgggaataaactttaaagttactggtccctttttt

SEQ ID NO: 570391 - DNA, 1797 bp, Homo sapiens
tcttttgttggtttttcttagttgctgggtgagttttttcactattcgctgtgttttggttgcgtgtcgtgtacctcttggttgtgtgtgcgtcggtgatttactgttgtgtgtcgtctgttttgctctcctctggcttgttgtgcttcctgtgcccccttgtggtcgcttgtctctctgttctcgggtttttcgtgtgttctcttcttggcctttctgttgtttccgcgattggtcctcttttcctgggtgtggcgctgttcttggcttgtttggtctttttgtctgttgatggctagtggtgggttggttctagctatggtatgtggtgtcctagtgcctctcgtttgtgtgctgctattggttggagtgcttgtcgtgtggtccttcttcttgtggtgttagcgtgtcgcaggttggtataattgtgccgctctggctctgttcgtgtgttgggatagccgtttgggtcctttgcggtgactatttcgtactttgttgtttttctgtacctcgtcctctgtggggttgctccagtggtttcgatgtcatgttcccgtgcactcgttttgcctccttgctcttctccatcgtgttgctcgggggtggtcctcttgtggcacgccgtgtttgctcgtaggctccctcgtggctacttgctgttcgtgggtgtgtgtgggtgttgcgcccatcgtggggtcgttgtgtcgatgtgcgttcgtgcgcgtgagggcagctgtgcatggttgtggctcgtttcctcctcctctgtgcatagctgtggccttttctgcggatgttttgttggtcgcttccgggcttgtgccgcttgcttgcgctcctttgcccttgtgtatctatccggccactcgtgtggggtggtcctgctatgtcgtgcgccagggggacttaccccggctggttctcccgtctgtcgcttttgctccgtcggatattgggtctatggccatagggtggctctcaatgtcgtggttctccctctaggctccgtcgtcaagtgcatctcgaactcgtgcctcctgtcgtgccattagttatcaaggtcagtcaaggggaacattatgctatgtctcgaagggtgtatctggcggcctatgtctgtcttgtgcgtgtgtacgggtacgataatatcctgctcaagcgaaccttggatctgtggcctgcctaggctatctggcactagactgtccacggctgttgcggcactatgcgagctcttggtgctggtgcattcgcgcagtttaggacgccagggaccccggtgtacacatgcactagtaccgcgacgctaagtgtcacatgcgcctacacgggcctaggcctgcgctcatagcgcacaacgtacatccgagaccacgtgcgctcagtagggtgcgctgctgtggatgattgacctggcgcatacgacgtgggcactcttacgtgctcagggcatcaggcccgtggtagtctcgctggagctacgatgggtccccttatgaggagcgtgctacactaagtgcacctcgatggggcataccagctccgtgcacagcatacctcttcggaggaagctaggagtcccagagaggcctgcccctagctcaacgagctactctgatggcagaagctccaggcccctagggcctagcgctgggggacctgaagggggctgaggggattgatgtggtggttcaggatagccccacccatggggggtggatgatttgcactttggttgccctgtgtttgatttctcattaatcagtcgactctgttctccgctgtcttgctttg

SEQ ID NO: 570392 - DNA, 209 bp, Homo sapiens
ctagaggtatccccccgcagtctggggcttggttcccccaggcctacccaggctggttgcccgtgaccaccaccgacccagaggcgtgggcgagccttgtaacatgcttcctttcctgctcccgttgggtggcaccaccccaggacctgggcagcgcttgccgagctgcgggggtacccgagctcgaacttccgtaatcgctaagtcat

SEQ ID NO: 570393 - DNA, 194 bp, Homo sapiens
catagtccgtctattacacgtcaaagtaagcaggcctcatggaatcaaactggatcacagtccatggcgtgcatatctcagacagaaaaaaatgacaacggaagaagtgctgaagctactcaggaggccgaggcaacagactcacttaagcccagatcaagggtgcagtgaaatgtgaacacaccactgcacgc

SEQ ID NO: 570394 - DNA, 941 bp, Homo sapiens
catactgctatgaagaaatactggaaactgggtaatttataaagaaaaagaggtttaatgtactcacagttccacaaggctggagaggcctcagaatcatggtggaaggcaaagaaggagcaaaaaggtatgtcttccatggcagcaggcaagagagcacgtgcagggaaactgccctttataaaaccatcagatttagtgagatgtattcactatcacgagaacagtatgggaaaaacctgcccccatgattcgattacctcctaccgggtccctcccacgacacatggggattatgggaactacaattcaagatgaaattgggtggggacgcagccaaaccatatcgggtagcaacaacctagggtcagttttgcaggtggtaaagccatttaccaagatagttgtaggtaaagaagggcagatttattagagaaattgtgaacaatatgttgcagtgggcaagctcagcagagaaggggctacctgccaaagaggcaagggctggaggaaagttttatagggtcctggcttgaagggtgctaccgtgtgggaatgaggtcattgtgccgcaggttgtagtgattagctgtctctaacaatgtgcatacaatatggttcattatggtcctcaagctggggattctcccaaacctggggacccttcccttattggtggttacttatcagggttccaagttaagggtcgcaacttcatcattcattttctcaccaaatggtagtagctgttttaaacctgtgtgacacaatttgtccagccatattctatactctcaaataagggggggtaaaatctgagaacagttcacggtcatatcacgtgaaaggaagaacacaatcaggatagggaaaagcaggcgacaaggagaatgatagcaaggggatcaacacatggttgtctacagaaggtacctaggcca

SEQ ID NO: 570395 - DNA, 826 bp, Homo sapiens
gaagcttcagactttagctggcagctgcctctgttcagccacttgcaacacaattgtttccaagctctctaaccatgttgaacccgtcaaacagaagaagaatgttggatgggactaccgagattagcggatgactgtgactggaccgactgtcttaagaccactggagcgagttattcagtactttagtgttgagcaagaaattcagtctcagagggcaatcgtggtatgtgaatgtgcccattcaagttgcgtgcagctattgctgcttgtcaatgcgattgctaggggcatggtggtttgctggtaaaatgcataacagcagcatatgtacctcttccaatcttactcataacctgtttcctgattctatgacagcaacacagctactggttccaagtagacgatgcaaggaagatatagtcccttatgtatatagcgttaattgcttctctgtgagaacttcatctttgagtctatctcttaatctagatacaaggataaacgaggcgaggatctacggtcatttgtatgcaatttcctgttaccttgaaaaaataaacactgttaacaggaatgcagtgtgctcattctccctaaatagtacatcccactgtatacaaaactgttctctggttctgcctttcaaaatgttcagggtagacacattaattgaactataggaatagcctctaggagaacaaatgtgctttcctgtcaaaaggcagaccagggcatgtaatgttttcaatgtctcagaagctaacttttacacagtgtttacatttcacattcactaatgtgcttattcggctgatggtgagcg

SEQ ID NO: 570396 - DNA, 299 bp, Homo sapiens
gggtcggcagggatagaaagcttggttttgggccaggcgctgtggctcccgcctgagatcccagcacgttgggaggctgaggcaggagaatcgcttgaacacaggaggcagaggttgcagtgagccgagattgcgccactgtactccagcctgggcgagggagcaagactccatttcaaaaaaaaaaaaaaaaggccggtttgacccattgtcccgggcctcattaatggggtttttttttaattgccactctttgtaccacctttgtggccgaccccgggggtactcttcttagagct

SEQ ID NO: 570397 - DNA, 1992 bp, Homo sapiens
acaaaaaaaagccagaaaaagtttacttttctggagtcccaaacgaggtgctgggacggaagaggggtgtgaaggcccagaggctcgagggacttcaagaaccgctagtctaggagtcccacctataccaggccatgtacaggggacacaactggctatgccccacgaagacaaccggaagacccagaccagaagccccatcagcgagagaggcgatcaccccagagagaaccaccagagagggaccaaaagatcacgagccaaccacaggaacgccaagaccacatcccaggcccacaaacacaccaaaggctatccactaattagaccaccccattcacaaacgtggacacacagagataaaacccaagaggcacaccaagaggggaaacacagaagacgcatcagagaggagcccatagaactgattgaaaaaaagggcaaagtacaacccataatagacagaaacaatacaaagagcaaaaaacatcacagagagggacaataccacattgtataaggcaccaaacggagttcagaggcccaattaccacgcccacagttgacaaaaggccccttagacaaacaggcaccacaagtgcaataatgaccttatcaccgttagaagacaaacaaactggcaacgaggcccagccagccaatggaaacgtgagcaacgagcaccaacgagagaaccacaatgcagactcaccatggagagatccccaataacaagcgaaacgagggaacaataatatgacggccccacccacgaacgaaagcaaaatccatagtacagaaaatcacggcacacccgaggagcaactccacctctgacaacgaccacaaaaaacataccaaacgaaacattacacaatccgctcatctcccaacagcaggggatcaatacaccacaacaaacttgtggagagggcacgccgacaagaagattatcaaaagaagacatgacatgtagacgaaggataacaccacgagaccaatgaaacagcccactggagcttgaagacacacatgaaacagtttcccacaggatggacgcacaattaaacagcgacggtgcaaccacagccacacgaaggcacgcgaggcaattgcaaggagcacaacccaaccagagtcgagaggaacagccccatacatcataggaacacacgaatcgtgtgagacaccataaacccacgaggataaccacaaaagatacgaccataaatcacacaaagggcacaagcagcagaacaaagacataaggaagcacccaggcacacataaagcagcccagaaaaaacaaacaaagggacaatacgaggccagacaacagaaacacgagcgagcaagaccccatggccacctcacacaataggaaacaaacaggaaacaacaggcaaccacgatccaagagcacacaacaccaaacaccaagatgaagagcagcgcacaagaagtatcaaacatataagccagcccgcaagagtaaaaacacagcagcaaaacagagagaggagacaataaagctaagagcaagatagaacggacacgacaaagagcacacacacgaaaacaaagagccacaacagacataaacagaaggagactacagaacacacaagtacagcaaacagaaaaacgacaaaaagaggcaagacacactacactatctaacacaccaataacatacacaacaacaatcaaaataacataaacatataaacaaacataaccttaacaccacactccaaaaagaacactaaatcaacaacaactacatacaaacaataacatacaatatacaaaatagacgactacaaacaaaatcactatcatcatccaaactacattaacatataaacaataccacaaacaaacaccaaaacacatatactcatcacactaacacaaatagcaatacaacaaacacacaaacacaataactacatactaaaccataacctaacagcaaacataacgcaaaca

SEQ ID NO: 570398 - DNA, 218 bp, Homo sapiens
cgggaacagggcagtgccgaacagtgaattagcagaacgatttggaaagatcggccatagcgggtgacaggcccgtatgtcgaaaagtgaaatttgtcggacttgagtaggggggggacacgtttaatccttgtctgaacataagggggagcaacctctaaggctaaatactcggtaattcgacccgatagtgaacttggtaccggggggtaggaggt

SEQ ID NO: 570399 - DNA, 299 bp, Homo sapiens
tgaggctctcgaacagctccaaattcagcagttccattcccagatagcagcccagacctccgcttcagttctagcagaagaattacataacagtgattgcagacaaaggataagcagataacacagactgaagattctttagcaagtgaaacgtgatcgtttaacaagtaaagaagaggaacttaaggatatacagaatatgaatttcttattacaagctgaagtgcagacattacaggccctgcaaatgagcaggctgctcctcacaatgaatttggccattaggaagggccataatg

SEQ ID NO: 570400 - DNA, 360 bp, Homo sapiens
  misc_feature (127)..(127): n is a, c, g, or t
  misc_feature (135)..(135): n is a, c, g, or t
tttgtgtactgtaatgtatgcagaatcgagagtaccaggtatgctacaggctgtcttaaggtgtcagggggtaatgaattcaccaagtatcagcagtgcatacatccaccacaatacactctttgtncttctagnctttagactatattgaaaaaggcggtgcttccaaaggtacatggataaggggacactatagctgtcatgggattagacttgagaacttttgctgttcatttttaaatattattttccaggtccttggcttaccaagggaggcccaattcactccaatgttttgagaactgtggttaaatacacgcaagtgaaagaaaaatgttggtaccgagcgtccgggtaccg

SEQ ID NO: 570401 - DNA, 232 bp, Homo sapiens
cgagagacagatgacatatcgcgtggagcgcatgtgaaaagagaggagggaaggcaagcatctggagcagctcacgtcagggcatcccggagtctctaaacaagtctacccctggggatctaggaggaagtcgtccagatggaacctgaagatgctacagaggaacatcgagtggataactaagaactaggagaataggagtctggagactgggagccttcacttcggcctc

SEQ ID NO: 570402 - DNA, 292 bp, Homo sapiens
gcattaccgttcttatgcggcgcatcacctgtgggtcctatgcacagatccaagccgtccttattcttgccgagctgaatcactccgagcaaccttctagtgtaacgaacacatcaatcacgtcatcgtcacagtcgcatgcatctgtaactaatctcctacatagaaatacccatcataatcgtagggttcgtcgagtgactaattcccctaataatcggtgcccccgatatggcgtttccccgcataaacaacataagcttctgactcttacctgccctctctgttatct

SEQ ID NO: 570403 - DNA, 327 bp, Homo sapiens
agtctcatacgccaagtgagtaaggaatgggacagtgatcggacggaacagttctggagttcgagcaacaggtttgctggcagagagaccgagatcatcttccagggtcgtgacttgcacacccctggcgcctcgcagtggtactggcttctccacaacgctccctggtgggcaccccaggcttcacgctgcggggagggcacagaggggagcaggcaggctggcaaagggctgggctccagccacgctgacgtcacacaggcctacctggtgccggtccccacttttacaaaaaggcgttctgtgaagtgttgacgactttgagct

SEQ ID NO: 570404 - DNA, 276 bp, Homo sapiens
tgctggggtgactcagaggatccttttcggtggcctttcccaaataatgttttcgtatgctttgttgaagatcagtggttgttaagtatttgactttatttatgggttctctactctgttccattgatctaagtgctatttttatacaataacatgttggtttttttgggtttgtttcttgtttttcggtttggtttggtttggtttaagaaagagtctcgctctgttttgtaccaataccatgttgtttttttggtttgggttgggttttgggtt

SEQ ID NO: 570405 - DNA, 644 bp, Homo sapiens
ccctgtccatctgcgcaccaaggagcaaagtggccattacagtgcctgctccacagtttgggcaccaccggcaccctcgtgtgtggagagtgggagcttcttcagatgaggagtctggaggcacaacttgtccaccatccagactttccagactcgcaccaacgtgtcacggacatcagagcagtctatcctgcacccgccagccgtggatcctttagccaagtggtccagtggttccggggtgccggtgatggggtctgagatgcccgtggaacccacacagctcacacagagagtcccaatccaaggccatccactggcacccagtgcacccatcaaacagacgcagcacttatcctggtgaggacgtgtgccatgttggggatcgaccggtccattgctcgagtagatagcaagaatggccaatcgacgctgaaagcgaagagtgtgcactattggcgcccttggagtagtgtgccattggcaacgcaatcaagacggcatccctcgccaagggaccacgcatgataagcatgtcaaggtcccacctccacggagcaaaatggacctaggggacttataggaccggaccccgtatcaagataaccactgaagaccagaaaatcacggaagaagaatccaag

SEQ ID NO: 570406 - DNA, 901 bp, Homo sapiens
  misc_feature (120)..(120): n is a, c, g, or t
  misc_feature (130)..(130): n is a, c, g, or t
  misc_feature (169)..(169): n is a, c, g, or t
  misc_feature (185)..(185): n is a, c, g, or t
  misc_feature (901)..(901): n is a, c, g, or t
gagctcaggcggcgggcgcggctgggatggcgaagagcaacggagagaatgggccgcgcgcgcccgggcggggaaagcctgtcgggaacccgggagagcctggcccaggccccgagccgnaaccaccgangaactcagctctctcgggtctgactcggaggccaacggnttcgccgagcgccgantcgacaagtgcggcttcatctgtgggctcgcagggcgccgagggcgcgctggagtgaagtacccctggacggtgcgtgaggctagagggagtccatcggtggctggactatgctctaactaagctgggactaaatggattggcctaggaacgcggcagaagaaggattcggccttgcgggtggccagaagggtgcattcccggccgtgtcatcagtgcgggggccgatgctgtggcatgtaccgttgtcagggagggcaacggctgaacgttgacacgcaggaaccgctgggaaaagttatgaccgagcctggaccatgtcccgctgggggaacccacaaggtggacgtgagacgttgacttgaagcggtgactctgtcagaccggcaaggttccccgatttccagtgacgactggtaagtgatccgcggtggggggccaacgtgccaaggcagtgacgctaattccagtgtggcgtgagagggcctagcagcgactggtacccaggcgccgaaggaagggggctaccttgcacagggcctcagggcaggccacatttgcccgactgatcattgctgcatggcgatattgccatgcttgaggcaaggccgttactgagtgacctgtgtacaagatctggtgagacagtacctggcccgggtactacatgcgacgaaactgggagtgcgatctccagctggaccgggggagattctn

SEQ ID NO: 570407 - DNA, 336 bp, Homo sapiens
ttaagtaacaatgagatcagcagatatgtggtgatacttacgacgatgatttggggacatccatttagctcctaagccaataataggaatctctcattttgcttgctaatgattggcttagaaaaggacatgagaaattttttaaaaaatattttttgccgcagaggtcttgagagatgcttttcctcacttttaaaaagaggcatccagtctggccaacatggggaagccccatctctacaaaaaatacagaaattagccaggcatgttgacaggcacctatagtcccagctactctgcagactaaggcgggaggattgcttgagcccgagaagc

SEQ ID NO: 570408 - DNA, 852 bp, Homo sapiens
aatttaagccattgctgactcattagcctctgtatttgtgtgcatatcatattatccagacctgtatgttcgcttttaagcattcttatatcacactgtctcctcatctaccgaatatggtaaatgttaaaacgccacatttgtctgcttcagggacaagatgcatgggcacacatcctccctcgcctccctctctgactgctcgctcccttcctgtacaggcctgcttgagcgatgtttgttttcgccatttctgatactactactccatgctgaagattcgccatatgactatttggaaagcattgagtgatagaactcctagaaagattatgcaaagaaatgttacatactgtatatcaaactctcagatttctagtgttgaaaaagtagactatactgtgttattatttatactctggtgccataggaaggaaataagtttattcatgacagcatttactatttgatcatataagtaaaagaaaagaagggcggctttttggagttagtcatggtagtcattagtgatatttctgaacagctcttcacttcaaaagtacgttcaaaggaagtataggtcatggctgtagcttgaaggaaatgctccagcaacattggactgtgttaaacgcatcagtacagtaatacgctgtgtatgttatgtgtatttatcatgagaatgtcttggcatcaattggagcatgtgcttcatcaatatactctactttgaggacaaaaattagtttaaagcgtgtcttgtttaaagccaagtgttccatgttggtgtgaaagaatagctctttcaaatactttggaaagtaagttgattgggaaattgttaaggtatgc

SEQ ID NO: 570409 - DNA, 213 bp, Homo sapiens
agatatgaagccagagtcagtatgagggtttcgcagctgggcatgtatgtccgcgttgcgattgaaactgttccctgtgaattagtgcagaactttgaccccctattaccccattatcctgggtggcttgggcaacagtgaaggcaatgttggacacgtgccgatgcatctgaagcaacatcgctggtataagaaaactctcaagatcaccaa

SEQ ID NO: 570410 - DNA, 116 bp, Homo sapiens
ttaaatagggaaaatcgggctctaggggggtgtgtctggcaaatagggtaaaaggcgccctcctagtgggggggtttaaagggggcgtttagaaaaaagtggggggcgcgccccta

SEQ ID NO: 570411 - DNA, 780 bp, Homo sapiens
  misc_feature (112)..(112): n is a, c, g, or t
  misc_feature (548)..(548): n is a, c, g, or t
ataggttgtgtggttgggtgtgaatgagtgatggtagtaggcgctaggatgatttgttgagccgagtgaatataattagagatataagtattagtgatcaggttggcctttntggtgtgaatagctattatttgtttggatgttagttggattaatcattgttggatcgagattgtgcggttattaatgagtcgtttgggtgttgggaatagtaagcttgggaatataataattaaggtgacaataggtagtcctattatcgtgggggcaataaaagaggcaaatagattttcgttcattttatttctcaaggggtgctatgtttttgagttttgagttcggttgattctgggcttgctgggtatgagtagtttgagatttttagttggaataaaataaataatgttataattattgatgtaattgtaatgaatcatgtggatgtatctagttgtggcataccattgaggggagatttaggctcccgatctctaacttaaaaggttagtgctgactagcttctcaatgaacctgttaatattgatgtngaccatttttcgaagtactttaatgggacaagttcaagtacaatgggcatgaagctgtggtttgatccacagatttctgagcactgtccgtaataaaggccaggtcgtgtggatattagagttgtcaggttcagtcgtcctgggatacctctggtttttaaaccgagggatgggacagctcatgagtgtagtacgtcttcagaggacactaatattcggattgttatttcta

SEQ ID NO: 570412 - DNA, 800 bp, Homo sapiens
cgcatcatccttggtacaagggtcacatgtccgcgagcccgccgtggcaccaggtctttcccgcgagggcctcccgcctgcaggtcaccatcgaggccctgagggaccccatatctggagggtctttttcccgcctggaactccttctggggaggactttccctgcctgccccaccccagggctacttcctgacccagagttttccccccgagacgtgggcgcccatggcgagatttgcgtcacacgtgctccaagagggactgacggctgaactgggcatccgacacgtactgctgaccctccagtgcctgctgagtccccccttaccccgagtcttgcactccacgaggaggcgggccccctgcttttggagaactatcgaggagtatttccgctcgggcccctctgctcacccgagaatccccgggggcccccgcgggcccacacggcacgggccgaaacccgtcgggcctggcccatggcaactgaagcgttcctcccccgagccctggggcccccagggggccccggaaagggctgagggtccccatggcccagaagcaatgctggcgagcgcgataaagaagctggcggcccagaaaaagaccggaccagaaagcgggcgctgcggcggctgtagatgggctttcttcctccttcccccgtgacccccacctttcctgtcccctccctcccaatctgtttttaaattatttaaattatggctggggtcggcgggagggtaccacgggggccctgggacctggatttgtttttttaaataaagttgggaaagcca

SEQ ID NO: 570413 - DNA, 428 bp, Homo sapiens
  misc_feature (10)..(11): n is a, c, g, or t
  misc_feature (24)..(24): n is a, c, g, or t
  misc_feature (26)..(26): n is a, c, g, or t
  misc_feature (29)..(29): n is a, c, g, or t
  misc_feature (361)..(361): n is a, c, g, or t
  misc_feature (415)..(415): n is a, c, g, or t
  misc_feature (426)..(426): n is a, c, g, or t
gcctgggtgnnctgtcacccagtngngangcacatggcgcgatcatagctcactgcggtctccaactcctgggctcaagcaatcctcccacctcagcctcctgagtagctgggaccacaggtgcaaccatcatgcctggctaatttttgacttttgtagaggtggagtcttgctatattgtccagggctgctctcaaactcctgagctcaagggatcctcccgccttgacctcctaaagtgctgggattacaggcgtgacattcggcgcaggtcctttaacatcggctttttaataagaagccctgaggagaagcctcctttgggtgagggaggggagcaccgggagagccaccttttgantcccttgagggttcccgttggcaacaacttgccccgagccaggaaccgggcctngggggggccgnaa

SEQ ID NO: 570414 - DNA, 318 bp, Homo sapiens
  misc_feature (25)..(25): n is a, c, g, or t
aagaagcatttgccatttaacaggnaatttgatgtcaatacttcagcaattcaggtcataattgagcatattggaaacttggatcgggcatatgagtttgctgaacgttacaatgaacctgcggtctggagtcaaattgcaacagcacagttgcagaaaggaatagtgaaagaagccattgattcttatatcacagcagatgatccatcctcctacatggaagttgtacaggctgccaatactagtggaaactaggaagaactggtgaagtacttacagatagaccgtaagaaggctcgagagtcctatgtaggagac

SEQ ID NO: 570415 - DNA, 584 bp, Homo sapiens
ccagaggatccccaggcaaagctctactcctccatttacaaaccaaggtatggaatcataatctttaagtcaaccagtttataaatcttcatctttggtgcttccctctccttcacccacacattcagataacttgcgaatatttgttgattctacttctgtgcttgcatatgaccacaacttttaccctggtggagcttttcatcacctcgtctatgctactgcaatagtctcttagttgaacttttggcatcccaatcttgcctccctcatcctcttatatactgtcactagggttctcttaagcacaagttcaaacagatcagtcccttccataaaaaccaccaaggactcctaattctgaaaaatagaatgtaagtaaggatctgacactaagtaaacagagcaaagacttgggctcatctcaccctccaagctctggtgttgccctattcttttttactcgctgattactagtcaggcacttccatgttcatgttttcctcagcctaaaaggttcttctcctgcttcaatcaaactcctatttatacttcaagtctttcttcaaaggtttcccacaaaa

SEQ ID NO: 570416 - DNA, 592 bp, Homo sapiens
ggagaggacgaaaaaaataaccgtccgcgacgccgagagaaatcgcggacccgcaaccaccagtgaacagcaagaggtcaatatcctaagcacgagccaatcctaccctgtgcagcctccgtgggtaatccagtataccctcagaccttgcatcttccgtcaggctccagcctataccgatgctccacctgcctactcagagctctatcgtccgagcgtttgtgcacccaggtgctgccacagtccccacaatccccatggcttattatccagtcggtcccatctatgccacctggtctccacagtgctggatggaaggagggtatgatgcaggtgcccagattgggagctggggctactgctggcgataattcctcctccatctcctggatgctctctcccaagtgctggctcagctttgcagtgcattgcagggtagccaagcggtcctcgtaaactcagcggcacggggagaacttctttcatgggtggttcagactggggggctagaccatctgggtgaaggaaaccaaggtcaacctctgtgccgggaaagacatccaatacctttcagcaactttctcaacaatgt

SEQ ID NO: 570417 - DNA, 173 bp, Homo sapiens
ctctactagccaacttaaactccagcaccacgatcctactactatctcgcgcctgaaacaagctatctacttgaagtgccccctacattttcaggcatttttcccccaataaggtgacagctgctcacaccggataatacaggaaagttgtaagttcaggttggagatacatt

SEQ ID NO: 570418 - DNA, 476 bp, Homo sapiens
agttagcaagctatccggttcaatcaggtatgtagttatatagcacgtgtagaaggctggttgcccaccctaatcttcttatgcagctgggctttcccgttgatctgcgccatcttgtctgctccttacaatacacgtagctggcagagaagggaagatggaactgccatcttgaaaatgtctagtccttagttcctgcaggcattcacctatgcaagctcccagcttgtaggccgctctttgttagaaaatgatttggggctgctttttattaaaaagaaaagccttaccgaggactcccatactcttgctaatctgtctaagtaatttcttcttaaactcctataatcattatgatatactgtccctttgctgcatgaatctctcatgaattcatttctccctttccatttgcgggttaacctaaattcatttaacctttattatctggtcatttggatatttgcgggtaccga

SEQ ID NO: 570419 - DNA, 265 bp, Homo sapiens
aaaaaaaaaaaattttttgggttttttttttctaattccccccccggtgggaaaagatttttttgttttttgccccaatgggagggggggaaatcctccccagggccctttaaaacgggggtttgggtgggtaagggggtttaaattttttcccatgggttggggggatttttataaaagggggttttttttttggagggttttgggaaagggctttttttaaattccaacccccccctaaattcccctttgggtttgggcccga

SEQ ID NO: 570420 - DNA, 325 bp, Homo sapiens
ccggccgggggggggggtttttttttgttatcccccccctttggggggccaggggggggggttcccctggggtcgggggttttggccccccctggcccccctggggaacccccgtttttttttaaaaattcaaaatttccccgggggggggggggcaggccggttttcccccctttttgggggcctgggggggggaaattgttttaccccggggggccgggggtcccgggggccgggttggcctccccccggtcccgccggggggccgggggggggcccccttcccaaaaataaattaattaattaaaatggattttaaaaatta

SEQ ID NO: 570421 - DNA, 770 bp, Homo sapiens
ttcaaggtggaattgagactggatctatcacagaaatgttaggatgaattccgaactggagaagacccagatctgtcatacgctagactgtcacctgccagcttcccattgacctggtggtggagtgtgaacgtgaaatggccatgtacatttgacactgattggtgtacctattagtgccagaactggctgctggcagtgtgcttgaagagtgtattgtgtactactactgtgcagttgatgtccttgtgataattgtatgcatattgctacgagctgttcaaacacagaccaccagacccatagctccttatatcacatgcatcatgccatagatggtacgaaatctattgtactgcacttgcttatttgtagacatgttgccaccctgcccttttacatgaaccatgacctactctgtgtgtcgagggtagatgctttctcagccagggccatgattgcaacttttgcgcccacgtgatttcatagcgggcatgccttccttgcgcacctcggccttgactgacagtactaggcttggtacgccacgtgtgctacactcacttcacaatcctgtgttgtgataagcttcaacatggttggacttgtgcttggcaagcgagaattgattattgcgttgccatgaataccccaaagacagacctaagtatggggagtgagcatactccatctcgcccagtggcattacttccaaacccacgaaacttgtaatccttgagggacatggtaacgactgtgaacaccagtaa

SEQ ID NO: 570422 - DNA, 412 bp, Homo sapiens
cgggcagtacggatgtggagggatttaaagatccagctcggtatacttccgggtggaagccggttaattgctttcgacgtgtggaaaacccagcgggcctttagcaaatatgagaagtctgcagggtgggtcagcaacagccagttcttagtaaaaccacttgatatgatggtggggaagtcagggaatatgttggcttcaaaagcctacattcatcagtacacaaaattgggaatcgaagaagaggactttttagacagtttcacgtcattagagcaggtggtggccagttacggtaatctctgatctggaacaaggggacaagtataccttaaggcatttcgggactaaaatattttcaatactattttctctgtaaagttttcagaagttcccacatccggtactgggc

SEQ ID NO: 570423 - DNA, 581 bp, Homo sapiens
  misc_feature (581)..(581): n is a, c, g, or t
gagatcaacagttactgtgactgagtcggcccattctgtttagaaatatattttaaagtgtttagtaaaaaaaaaaaaaaaaaaaaaaaaaaaaaaaaaaaaaaaaaaaatgtgttgtgtgggcgcgcggcgtggggcgccacgaggaaagaagtttttaaaaacaaatattgtgtgtggggggcggcggggccacaaaaaaaggtaaaaggaaaagcggtgtgacaaaaaaacgtgtggattacacaaagaaagacaaacatcgtgggggtcacaacaaaacaaatgagggcgagagagggaaattcttctctcacacaaaatatataaaaaaaaagagcgcgcgcgcgagggggaacaaaacaacagaagaaatgcgactttctgtgtaaaaaacaacaaccctaccacacagaaatggggagatatttctaggggagaggagatagaaacaaatagaggagggagtaactactatcattaacacaaacgagaggcaagcaatacccaagaaaaagcgagaccaccagcaaaaataaaacaaaaaataatgagcgacacccacaagctccgggaggaan

SEQ ID NO: 570424 - DNA, 127 bp, Homo sapiens
aacccggaccacctttgactcttccttggcttcaaccttagctggggctgcagcagcagcaggagcagctgtggtggcagcagctacaggggcagcagccacaaaggcagatggatcagccaagaag

SEQ ID NO: 570425 - DNA, 1327 bp, Homo sapiens
cccttatggggcacccgccgggggcccgatctatcatacccctttccggatctttttgatccttttggcccccccggggggccgggggtttacccaagtgtgtgacggacgaccggggggaaccatgccgttggtgcgaccacttagggtcgctctatttttatgtcgtggcaacccattattggagcgcacaggtgtgtgttgcccacgaaaatgcctcagatcgtgtggtgtgtacacccgcgtctcccgggaaatcttccccccgggggttttgtgggttttttgtgcgcacacccacaagtccttaggggacttcttttagacgttttttggcccacgactttattgtgtatgggacccaccacgtggtgaacgcttgtttccccggggggagggttatatatggattttacatggggggtgattcctgttggccccaaccgccctcttgtaggggcgcgccataggtagtgcaccaccctgttggtgtgggagactttgggcccctttggacccccggaggttggccacaaggcgccttggcggtcttttgttagatggaatggccccggttacgtgttgcgcgttattttggccgtccaaggtatgtgttaccacgcgcgcaaatgggcacacaagaggagtggcacatatccagccggctctgtggacacccacacatgtgggagagatagtgtatctctggtacatttggtctccggcgtttctccacatccaagaggaccccatttatatggcgacacatgtgctgtgtgtggtctcaaacttgtacaacagagaggcatctgtgtggcgcccacacagacattttttgtggggggatttacaccccgatctcgccggtgttttctcagaggaggggatctcccaaaaatctggggatatccacaagctcagccccaccattttcccatgacaagaccccacattgccatcaggcgcccattctcccaggatgtctaacatgtgtggccctgggacacccctaggggacccgaggcgtacatggcctctcctgccagtgatgtatggggaggtggcccttcttggaagtatcacacggcctgtaaggcctctgagcgtacctcgactttggacagagtaatgactcccccaggagaaccgtctatataagactttacccagcccctgagaggacccggaggagcatcccttgacccttcatttaacattggcgtcaccatttttttctagacattgggtagaaaagcagagccacaaaaattgctttcctttcccgcctttgaaaagaggccttcagttaagagtacagaacatgtga

SEQ ID NO: 570426 - DNA, 145 bp, Homo sapiens
gcaccctttgcgaggaatgctgagacaagaaagcctaggcaaactttacagctagatacaaaagttcacacagtgcaaaggcacgtgactctggggcagactgggaacgtcctcagtcattcctcgccaacagggtgtgactcca

SEQ ID NO: 570427 - DNA, 1294 bp, Homo sapiens
  misc_feature (18)..(18): n is a, c, g, or t
  misc_feature (936)..(936): n is a, c, g, or t
  misc_feature (952)..(952): n is a, c, g, or t
  misc_feature (1031)..(1031): n is a, c, g, or t
  misc_feature (1033)..(1033): n is a, c, g, or t
  misc_feature (1053)..(1053): n is a, c, g, or t
  misc_feature (1057)..(1057): n is a, c, g, or t
  misc_feature (1068)..(1068): n is a, c, g, or t
  misc_feature (1076)..(1076): n is a, c, g, or t
  misc_feature (1094)..(1094): n is a, c, g, or t
  misc_feature (1098)..(1098): n is a, c, g, or t
  misc_feature (1112)..(1112): n is a, c, g, or t
  misc_feature (1290)..(1290): n is a, c, g, or t
gctgagtgcggccgcganggggcgggcggactctcgggcgctcagagctggcctcgggtcctcggagcctggcgctcgaacctcccttccgacctccacccggaccccgaccccgacccggcctggcccggcccccgcccccgccccccgggccgatggactactcctacctcaattcgtacgactcgtgcgtggcggccatggaggcgtccgcctacggcgactttggcgcctgcagccagcccggcggcttccaatacagccccctgcggcccgctttccccgcggcagggccgccctgccccgcgctcggctcctccaactgcgcacttggcgccctacgcgaccaccagcccgcgccctactcggcagtgccctacaagttcttcccagagccatccggcctgcacgagaagcgcaagcagcggcgcatccgcaccacgttcaccagcgcgcactcaaggagctggagcgcgttttcgctgagacccactaccccgacatttacacgcgtgaggagctggcgctcaagatcgacctcactgaggctcgcgtgcaggtctggttccagaaccgccgggccaagttccgcaaacaggagcgcgcggccagcccaagggcgcggcgggcgcggcgggcgccaaaaagggcgaggcgcgctgctcctccgaggacgacgattccaaggagtccacgtgcagccccacgcccgatagcaccgcctcgctgccgccgccgcctgcgcccggcctggccagcccgcgcctgagccccagcccgctgcccgtcgcactgggctccgggccgggacctgggccggggccacagccgctcaagggcgcactgtgggccggtgtggcgggcggtgggggcggcgggcctggcgcgggagcggccgaactacttaaggcttggcagccggcggagtccggcccngggccttctccggggntctgtcctcctttcaccggaagcccggccccgcctgaagaccaatctcttctagctgcggcctctggaggctccgagcntnctcccagagacgtcccttcncctncaggacctganagctcctnccatcctggccacccgcntggnagttcccatccgtntccacttcctactgtttcaccccttggtgttttctccccaactttggagatcaagttagggccactctcgtcctcacccaccctctaccagcagagcggagttctttataccgggacctcctccaggagaaccccggagctccttctagcttggccttctttggatgcggtatcacangagg

SEQ ID NO: 570428 - DNA, 159 bp, Homo sapiens
ctactaggcggagacagcacattataacccccagggtgtgtcctcgttctttgtacccatggactggtctgcagcttcatccacatctcatccatcatttctccagattcagcaacaatcgggcccaagcagttgcgggcagggttgcaatttgcaggc

SEQ ID NO: 570429 - DNA, 319 bp, Homo sapiens
  misc_feature (1)..(1): n is a, c, g, or t
ncagccaatatggggtgcatctttgttgtcttctcattttccactttgttctcacataacatctttgccaagagtcattacaggttaggaatggctggatgggagattatagacaggggagaaaaactgtttcctattctctcaagatatgttttatcaagtgttgattgttttgtttttgttttgtttttgtcttttctagggatgcatctgcagcatacggaagttcccaggctaggggtctaattggagctgtagccgctggcctacgccagagccacaacaactcaggatctgagccgcatctgcgacccacacc

SEQ ID NO: 570430 - DNA, 1278 bp, Homo sapiens
tggagcacctgggggcttcaactgtgagagagacctaagctgcaagaagtaaaccatcaccagtggcacacaagacaggagaaggccttattggagtagtgtctattctgtagtgtttaaagaacagtgggaaaatccacaccacgactactaagtggacagctcagaataatattaggcatatttacctttgcacgacttaaagttcttccaagcatgcagcactgtagtaaatgcagcagcacacagcacttgcattcagcaggcacacacacacacatgtgttcctctcgtggacgtccttgcccgtagctcgacacaggctatcggcagcacatcgtctatcctcaacatacggcggacacctagccgtcaccagacaaagcagcacatcgtctatccgtatcccttcgtggcgatcatagccaccagcgtcaacagtgtggctctcccatatatcatcacaccagacagagggagcagccttagcgtggacccacggctatcatacacaggcggggtgcccataggcagagccacagagcaaggctggtagcgcccgcaggcaacacgaaggcagtagggcgagcggcaagcccacataggccagcacaagcgcaaccaagcctattgggaggagaaaatagcggaaaaactagactagacaaagacgaatagcgcatgacacactgctactcacacataatgtataaacacagaggaatacgaccgcgggaaacagacagcgccccaaaaggagccatagaaacggcaggacacaaacaccacgctatgcgcgcaaaagagcgaccaacgtagcacagtcaacaacgacacaaaaacaaccagtcggggcccacccgcggaccaaccgacacgaaaagcgattaacgaatacaacaatacgacgcaggcgccgacacccgacgcacagttcagaaaacgacaatccaacataacgccgcggcggcaacgacataacaccaaccccacaagtaacaacaccccacagggtgctcagcagcaaccatgcacaacggacaacaaacaactacccaccgggcagcacaacacagagcgaacagcagataccgcacaatatcataaccaccccgcaggagtcaatcctggcgcaccacgaccatatcaccacacagcaccacacagacagcgcaccacaccctagcgggaccaacagtaatcaataagcgcaaaaaacagggcgccgccaatatatagcccgcccgcgcagccaaagtgcaatcaacgagcgagcaa

SEQ ID NO: 570431 - DNA, 291 bp, Homo sapiens
cctagagatccagacgtcgaccaggttgatgataatatgataacgcaggcgccaactcacggagtgggcaatactacacagttgttgtttataacctaagctctgaggaaaatggcttgtccaaggtaacacagctggtaagtgcagcatggtggagaagagcctaagctctggggtctcagcctggcacatcgtacatcataaatattaaataatatttggaggaggttcagtgtggttaagaacatagactcaggccaggcacggtggctcacacctgtaatcctagca

SEQ ID NO: 570432 - DNA, 278 bp, Homo sapiens
tcactgaacgatgggcattcctggggctagtggtataccaggaaatacggtctactcgtcacaaatctcaatcctgatcttatcacaccacatggactttatatcctatttggagtctatgagtcgcatgtacatcgagtgaggattatgtttaataggaaaagaaaatgccttggtacagatggcggatgcaaatcaagctcagctagcaatgaaccatctaagtggtcagagactatatgggaaagtgcttcgtgctacactgtgcaaacatcaag

SEQ ID NO: 570433 - DNA, 298 bp, Homo sapiens
acccgtcagccaatatgcatccatgagcgtttgcatctctcgtagtttaaaaattctacttaagaaagcaaaggtccagacagtgtcattgaaacaaatgagtagaaccctttggtcatctaggtgaaagcgttttgttctgttttttgttttgtttttgttttgtttttgtcttttctagggatgcatctgcagcatacggaagttcccaggctaggggtctaattggagctgtagccgctggcctacgccagagccacaacaactcaggatctgagccgcatctgcgacccacacc

SEQ ID NO: 570434 - DNA, 262 bp, Homo sapiens
  misc_feature (89)..(89): n is a, c, g, or t
  misc_feature (232)..(232): n is a, c, g, or t
  misc_feature (243)..(243): n is a, c, g, or t
cccagatactcaggaggttcagaggggaggattgcttgaccccaggcaccagcctgggaaacactgcaagaccctgtctctacaaaaanttttaaaaattagccgggtgtggtggtgctcacctagtcccagctactcggagggctaaggcaggaagatcacttgagcccaggagctcgaggctgcagtgagttatgatggccccactgcactccagcctaagcaataagangagaccctgtntcaaaaaacgcacggcaca

SEQ ID NO: 570435 - DNA, 377 bp, Homo sapiens
  misc_feature (202)..(202): n is a, c, g, or t
ggtggagggttggtggggggcttggtgtgctgaagacccaagcggcaagaaactgctctgctaacaaggacgctggcagcctccagtgacgcgtgcccttgacttgcccttcacgtggctcccagtgcaggtcctggtagtcttccctgcagataactcacactactcaacatgaacttgctatttaacaaggtgatgtccntgcagcaaagaacggagcgggtgcagggggcgtgtggatttttccttccaccgcatgacataactgaagcagatgatcacccaatgcaccccatactggtcagccctcaagaccccaatattggcatctcacttccttgacatacacgcagatggacacacatgagagacccctg

SEQ ID NO: 570436 - DNA, 286 bp, Homo sapiens
ggtgactctagcaggatccccaaacaccgcaatcttgctctgtacccaggctggaatgcagttgtgtgatcacagctcactgtagcctcgaactcctgggctcatggaatcctccagcctcagtcttctgagtagctaggactacaggcgcaagccaccatgcccagataattcttttatgttttgtagagatgggggtcttgctgtgttgcccaggctggtctcaaactcctggcctcaagtgatcctcctgccttggcctcctaaagtgagattgcggtgtttg

SEQ ID NO: 570437 - DNA, 210 bp, Homo sapiens
cttggctcctaccgatgtgcggtcacgttgggttaagtgatcctccacttagcctcccaaatagccaggactacgggtgcatgccaccacatcagctaatttttttaaattgttgtagagccaggtctcactatgttgcccaggcttgtcttgaactcctgagctgaagtgatcttcccaactcagcctcccaacggtgaccggcgactt

SEQ ID NO: 570438 - DNA, 675 bp, Homo sapiens
aggaggtgtctctgggtgcatttggtgacaccgcaggcagaggggggacgccacagccagctctgcccgcggatgccacgtccatttgcttcagcaggatctgcatcctggaaaccctggttcctgcctctccgggacaccccactgaggtcagcacaccctgcaggtttagaaggggtgtctgggtgcatttggtgacaccgcaggcagaggggggacgccacagccagctctgcccgcggatgccacgtccatttgcttcagcaggatctgcatcctggaaaccctggttcttgcctctccgggacaccccactgaggtcagcacaccctgcaggtttaggaggggtgtctgtgtgcatttggtgacaccgcaggcagaggggggacgccacagccagctcttgcctgaggatgccacgtccattcgctttagcaggatctgtaccctgtaaaccctggttcctgccttttcgggacaccccactgaggtcagcacaccctgcaggtttagaaggggggtctgggtgcatttggtgacaccgcaggcagaggggggacgccacagccagctctgcccaggatgccacgtccattcgcttcagcaggtctgcatcctggccctgcgtcctgcctttccaggacaccccactgaggccagcacacctttcgtttc

SEQ ID NO: 570439 - DNA, 1199 bp, Homo sapiens
ggttgagaagggggtccccctgctaccgccacatcgtggatgaggctgtgaactctggaagtcatcctgccaggcccggacgtgcaggtgtcatccaatggcggtatctccactgcgtggcaaccacaggcatggtgccatgctacgtgagttctatgagtcctcccaatcagtgcagtcagtgatgacatatcatgacacagcggaatgtcagcattggatactaggaggttctaccagaatctgcatagaatgtcatctacggactaacagtatggtgagatagatggtcatcaactcgtcgaggaggatcgcaaagggcgggctcttcgtctaccgccataccatgcgctgtggaagaacactcactaggcaaccgtccttggcggactcctgccatcaaaccaagctgcccctacccgagcaaacgcggccctcgagccctcgacgacggtgccatacaaccgcagcaggccaccgtcctgcatccgctaggctgactggtcaccctgtcaccccgtcctcgtgaagacaccacccgcaccgcatcatgcggctcacacgtgcatgcaaccctcgccaaccataacaaagacccgctccccaggacatgccagccggacaacacccagcgagcgccgcacagctcgaacgccaacggcaacacccacacccacaggtgccctggggcgacccgccagcgcgcaccaacgcatgccagcagccaagtccgagagtgcgaccttacggccccaccaatcggggccgccacgacaggccccgcgcagcacatgccccacgtcgaggagcacccctaaggcccagtgccacacacgcaccgccaaggcctagacggccccagcgcaccgcgttgccaacggcagcccaccacgcggccgcacaccgcgacaactcgccggcgcgcccacccccaccgccgcccgaacactgcaaacaccgccaccccaacggcgggccccgcacgcgcaccgaccacgcagaccccccgcaccccgcagccacacgggcccggcccggcacgacggccccccccaccgccacccgcggccgccccccacccgccccacgccagcacccgccaccagcgcccccacgcggaatgccacccacgggaccccaggccaggcacaccgcgcacagcccagccgccccccacaccgccccacgcgccccccccc

SEQ ID NO: 570440 - DNA, 750 bp, Homo sapiens
gtggtggtgtgtggaccaggacaaaccttcccagcaatttttcttctttgtacatttccaattacttgcagattgatcatctaagcgttcagactgctgagatgaatatatataactttctgagactcaatattttaagctataaaaaacttcctgaagttatccttttctccctactttgaaccaaaggcaagaatttttaaagaactgttttatcaatggcctggctcctggatatagttccggaagttaagaccagttgccttgttaagtgtgttgacagcacagctaccctgtttggctgtgaatccagaatgtgatgaagaacagtcattcccactgaggtctttagccctgttcttggacctctgctcttgcagaaaaggagcacaacgtaggactatggctcacccgtcagagagctcacattctgatagaaagcactgggattgtttaaatatcctagttcaacattaaaaaaaaaaaaaatttaatcccagcactttgggaggccaaggcgggcagatcacgaggtcaggagatcgagaccatcctggctaacacggtgaagccccgtctctactaaaaaaatacaaaaaaattggccatgcgtggtggcgggcacccgtagtcccagctactcgggaggctgaggcaggagaatggcgtgaacctgggaggcggagcttgcagtgagctgagatggcgccactgcactccagcctgggccacagggtgcgactccatctc

SEQ ID NO: 570441 - DNA, 275 bp, Homo sapiens
  misc_feature (2)..(2): n is a, c, g, or t
  misc_feature (80)..(80): n is a, c, g, or t
gntgattctagaggatcccggacagcacgcgctaacaattactactatagccccataaataggagtaaggcttagaaganagacccctataagtcccattactaaaaccacactcaacagaaacaatgcatacattattattcttgcacggactacaagtacgatcattgatataataaaccttcgttgtatttcatagcttcatgataaatcaaaataaacagaaatctcctgatattctaaaattaataaaatatgatttaaatttttttttt

SEQ ID NO: 570442 - DNA, 648 bp, Homo sapiens
gtagagacggggcttcaccgtgttagccaggatggtctcgatctcctgacctcgtgatctgcccgccttggcctcccaaagtgctgggattaaatttttaaagaactgttttatcaatggcctggctcctggatatagttccggaagttaagaccagttgccttgttaagtgtgttgacagcacagctaccctgtttggctgtgaatccagaatgtgatgaagaacagtcattcccactgaggtctttagccctgttcttggacctctgctcttgcagaaaaggagcacaacgtaggactatggctcacccgtcagagagctcacattctgatagaaagcactgggattgtttaaatatcctagttcaacattaaaaaaaaaaaaaatttaatcccagcactttgggaggccaaggcgggcagatcacgaggtcaggagatcgagaccatcctggctaacacggtgaagccccgtctctactaaaaaaatacaaaaaaattggccatgcgtggtggcgggcacccgtagtcccagctactcgggaggctgaggcaggagaatggcgtgaacctgggaggcggagcttgcagtgagctgagatggcgccactgcactccagcctgggccacagggtgcgactccatctc

SEQ ID NO: 570443 - DNA, 1238 bp, Homo sapiens
ggttgggatggagataggaggatctcagtatattagtttcgtagtattcttatttatttggcaaataccaaaggaatgtacaaaagactcaggtgatctagaagtgtttatttgcttcccgttcgcttcccttcactgtcctttacccttttcccgttatccccgttacccaccattgcccgattaaccacgttgcggcgtaaccacttgcgcctggcaatctgatcgtattggcaccagagacgggaatgcaggtgatgcaaccctgtggcatctttgggaaactacggaatcgtccggcgggcttcatatgcgactgacttgccgagccttgcatggccgtccgtggatgtagacttcgcgagagtgtaccatggcgatagtgcgcaagggctagtaggccctggcataaattttgaggtcattgttgaggagacgaccatgatttcctcggcgtcatggtgagctcacgaggcctagggaacgcgttctagggtcgcgttcgccgaacccctccgagccatataatctggcaaaacgcataccgaagccgtctcccaggggggtctatcaaggatgcaatatcgtgccggtggggcatccaaagcccatcatctgccacgttcacgctagcgaggaaaattgacggacgagcgccattacgaagggaccaagaaggacccagattgccgtaaatctctgttgggatcaatttgcttttcattgctgaaaggaaagggaacaaagacgcggtacatacccttcgcccgtggattatgggaactcgacgggggcgtggtggttacctggtgggaccatcttgccacttattagaaacgcctacgaaaaagtgaaaattccctagaacctgaacccctatggagaagcttacgcccaaaaagggtgggcttggggcgcaatccaaagcaaaggcggttcgcaaagccttaatcatacgaagcgcttgggtaacccccaagaaacaggcatggtttgctgctacaactaaatggggaggaaactttatgtcacccttgaagccgcacgatatacctgggatgggcataacgggtgcagttgcgccttataaaatggttcgattgcttcctatattcccaaagaaagacatctcttgaaaattggattgagggacaaactaaacgtataggatgggaattggttacccatatgtgacaaagtaaattgattgaggtacagtaggtgataagttccgtgat

SEQ ID NO: 570444 - DNA, 343 bp, Homo sapiens
actaacatcacttgacttactatcatggaatgtcttattgatcacatgtggaatcgacagacaaactatggcaactcaagcctctctcggtgtgacatctgaacttccacattctggaaaatgggtgcggggtgcgaaatcatcgcactcgagtgtcctttgttgtttccctgataggggtcccagctcttctacaggtcgtctacgaactgtctaagggctaagaccataccggccagatacctgaatctttcaagacaacacacaaactctgccatgtgcacatttgccttttatattgggcagtgaggaaggggagttttctgtttcgttgtgtcctgta

SEQ ID NO: 570445 - DNA, 295 bp, Homo sapiens
gagtctactcaggagctgacatagaataccatgagcacttttgactgctttgtgaagcgtggcatatttatcttatgattatctgctgaaattacatggtactaacgaacatgagtgacataactaggcaactcggtcccgagattcatgccattgtggttgcccctagcaaagtgaagtcagcaccgtaaaaagggtgccttgtgaaagctattagcttgcgagtgcccctgttagccacagtctgatcaattggcacactttgaccgaagttacccaaagtatcactccttga

SEQ ID NO: 570446 - DNA, 123 bp, Homo sapiens
tatccaggatcccaactcagggcgagctgcaactcaggtgcgacctgcaactcaggagcgagctgaaagatcagatgcaaactgcaactcaagtgcaagctgcaactcaagagcgagctgcag

SEQ ID NO: 570447 - DNA, 959 bp, Homo sapiens
ggcatgctcctggccatcctggagaagtgtggggccatccccaaaatccactcggcccgcgtgtcggtgggcgagggcaccgtggctgccggctaccaggacttcatcatctgtgtggagatgttctttgcagccctggccctgcggcacgccttcacctacaaggtctatgctgacaagaggctggacgcacaaggccgctgtgcccccatgaagagcatctccagcagcctcaaggagaccatgaacccgcacgacatcgtgcaggacgccatccacaacttctcacctgcctaccaggagttcatgcagtgggcttcgcccatggagcctgggcccactcgtggcgtggtggcgccctacggccttctcaccggctcctcgactagacctcagtggcgcccgcgacagagcgagaagactctcctggatcgaggtctcgtatgatgaattctaggtagcagggctgcaagctggcggaagtgctggcgccatagccacggtcaaggctgtgctccatctccagactcaccaccaggccaggaggtgagtggtgcagtgctcaggccggctggatctcatggaccagacagcattcacatgtcacttccagaggcagcggggggacaggcaggctccgcccatgggccttcaggactatttctacgtggccatcctgcgtggccgggcaggggccataggacactgggagcatggttcatgcccctgtgccgtccgtgctggggctgctggaacagccgacaggccatggtgtgtgggaccgcgtgggctctaacctgcgccggaatccacagggtgaaacagttccccaccgggaccgtcaaggggtcgagaaacacgcacagcgaggaacacacggcaggtggtggacccagcagagtcagacaaaccaccaacatcagaaggacaagacacacaatccagcgcttgctcgcccg

SEQ ID NO: 570448 - DNA, 124 bp, Homo sapiens
caacatcatgcaggtgcattccacttctttgtcatctttctgcacatggttcactgcaccattttctttttcaatcatcatcacatgcgagttgcgtcacacagttttcatcagtccagcacac

SEQ ID NO: 570449 - DNA, 240 bp, Homo sapiens
tgcaatgaaaataatgatttacaaattttattcaatctaaaacaaatttcacaatgtgtagaacatacacctttcagaaggtatccccccaaaatctgaggttaaatgaataaaaccactgacaagatgcacaatgggggttgccaaaggctggggaaatgagggaatacacagttattgtttaatgaatagagtttcaattgcgtaacatgaaaacatttcagaacatggatggcggcg

SEQ ID NO: 570450 - DNA, 144 bp, Homo sapiens
ccctattggtagagggggcagaaacaaaacaaaaggggggtaatatgaacaaagtattactcaaaactactttccgcttcctcctctaaccaggagaaaagtccagaaagaaaacagtaatttcaggatttggagttcctatct

SEQ ID NO: 570451 - DNA, 668 bp, Homo sapiens
acctgtgactgtatcagatgctgcacggtgcagtacctttatctcggagggggtccgtgggaacgtggttcagaacaagctggatcctactcatctatcctgatgcgtatggtgagaagcgctgatggacaatcccacgctctatctagaagaaatacgtccatgagctgattccagctgtgatgacctgacatcgtgagcagacagttgtgcctgcgaccagagtgtggacaagtcactgggcactccgagacatttggtgtccgcctggttggcccagatctgcaagcatttttagcacaaccactaacaacatccagtcccggatcaccaagaccttcaccaagagctgggtggacgagaagacgccctgagagactcgtgtatggctccatcgcaggcttggatgagctgggacacgagtgttatcaagactctgagttctgccgccggctgcagcaggaaggggagcggatccgcaggtgtgctggacggccctgtgctgagcaatcattgtaccggattggagcagaccatgtgcagagcctcctgctgaaacactgtgctcctgttctggcatagctggcccaccgcctgacaatcaggacgcctatcgggcagaagttcgggtcccttgggccctcgctctgctaccaggtggtcaaggc

SEQ ID NO: 570452 - DNA, 1031 bp, Homo sapiens
  misc_feature (221)..(221): n is a, c, g, or t
tggcaccctgtgtggtgatcttaatggtgtgacctcttgttttttgtctctccccttgtgtctcgcctaccctcgatggggggtccccctgttgtggcgtttaagcgtctggtggtccccccgtagtatcttccctcttggtgtgtttctctgtggtccccccccgtgtttaaatggctctcccctggggctgcttgaaaataatgtgatgtgcccccccntgaaccctctccacacagagggtttaaagtgtggggaaaactcggtagattaatacgcgttccccccggtgacacttaaggagacatttcagcacagttccaaagaattcttacagcaaattgcttaaccgggacagtgtgcgaacgttattcaagcccaaaatgcccaagattggtcccacgtacccccttagggttaagggaatcccgggttggagaaactaacgtgtgtttggttcccccaaattagcgtgaaaatcctggtgaaaacagtgacttccccctttaaaggatctagaaatgggcccaagtgtgaaaatatggcccccttgaaaagtcatgtagtaatagagcatatgcttttttagaaccaggttaaaacctgtttggttatctaatagagtaaaagttactcgaggtccacacgatagaccacggtctggcataaaaaattgcccacgtcataatagtctaattaaagttcttttgacccacacgacagcacttcatcagaggccctaattcgaatgagagttttggctatccaaaaagtgttgattctaaaaattattgaatgagacctgattaaagtctgactttcctggcccccgtgttttgcacggttggctatttcccttatcagcccatcactccataaagttcttagctgcacccagtgattggtgaacaaggacaaccaccaaagcagcataccttgtatggatttatctcaacgctattgtttaatggctgtgtttaatgtgatctatttggaaaatgaggactccgaattaaaagctattactaata

SEQ ID NO: 570453 - DNA, 467 bp, Homo sapiens
ggcataggaggtatacaggatacctgtcttaaaactaaggtctcttatttgcacctgctatggtttgaatgttccctccaaatctcatgttgaaatgtaattgctggaggctgggcacggtggctcacgccagtcctgaacactttgggaggccgaggcaggcaggattgcttgaggtcaggagtctgagaccagtcgggccaacacagtgaaaccccatctctaccaaaattataaaaattagccgggcatggtggcacatgcctgtaatcccagctacttggaaggctgaggcaggagaatcgcttgaacccgggaggtggaggttgcagtgacccaagatcatgccactgcactccagcctgggtgacagagtgagactatgtctcaaaaagaaaaaaggaaaacaaaaaagaaaactaagaacccaattacctctgccacatacatgggctgtctttggttaa

SEQ ID NO: 570454 - DNA, 922 bp, Homo sapiens
ttagttggcgctgtggcggcttcgcctattgtgctctcaccgatcggggccccccaccgaggggcccccgcacacgtggcggcgcctccgcgaatttttcctcccgagagtggggttgatcgcccccggctgcgctccgccatcgccgggggtggattcctgccttgttcggccagactgatcaccgcgccggttgttctttctcacccagagcccgctcttgtcggcgcgtgttttccaccccccccccccgcttgtggtggcgccaccctcttgcgtgtccgcccctgtcgtgtgcgcagctcccaccacatagcctgggtttgtctcctcctcccccgcgtgtcgtcctgctggggagggtagtcagcccccgtggtttgtccaccgcaccccgtcttttccgtgccggctggttcgcccgccccccgtacgtccctacagagtggtgggccaccgcggtgggtcgcctttgtctagtggccgctcgtgtgttggtatggaccgcatagcgtcctgtcttctctaattttgatggtccgccccgcgggtgtgggggtgcgcggtaaaatcactccccgccgcccctctgtgggtggtgcgtggcagtagatagtgtgctccccgctcggcgcacgcactgttggcgggtcggctgggcccctctccccccgcgcccccctgtcggggtagcataaataagtgcacgcagggaggtcttcccccactcggcgaggaggacccgctcctttctcgctgttgcctcctcctcgcacgagtttcgctctggccgatgtttttttttttcatccaccccgaaggggtgcccctctgtccttctcttttccccccccccccatttttttttttttttttttttttttaaaaaacccccgcctttttttttggcccccttttttta

SEQ ID NO: 570455 - DNA, 199 bp, Homo sapiens
cccggcggacagcgacgtcgctgtgctcaggcgggccaggatcaccgccaagctcaacgctttggcaccgaagcacaacggtcgtgctgcctccgatccctcccatccccattacctgagactacaggcgcgcagcaccataccggcctgacatttatatagtatgctcatgtaatccgtaagatcggtatagtgtgtg

SEQ ID NO: 570456 - DNA, 518 bp, Homo sapiens
  misc_feature (505)..(505): n is a, c, g, or t
  misc_feature (513)..(513): n is a, c, g, or t
cttttggggtctttgcttattgaaagaattattttagagttgaagtttttaccacgtcaccttttacatatgtaaaaacatacatataagtaaaacaaaattggctgttactaaaagtacttcacattcagaactttttgactcagattcaacagtatctgtttttaccccacaaagagctgtttaagaacacaagtgacaaagcatttcatagaagaatccacaaaaaagctaatgccgtgagctctagggctggctttgtagtagtgtgcacagctgcttttctcctccaatgctcttcacagtcatttggttcctcaggattcaaagagaaagaaatcctctctcagatttccttccaagccaatgacactcattccacaagttctgatgctaggtttagcattctgcctgtgaaagaacattacaatggccatctggccaatgatatgtgtacctatcctgctttctaaaatgtttaagtatgaaaacaggcaccctacanatcaatgnaatac

SEQ ID NO: 570457 - DNA, 1086 bp, Homo sapiens
ccgccagctcaggctaggtacgaggccttgtgttcaatctggccgcaggctcctcctcctcccgctgctcctgctcccggggcgagcgcgcaggcctgtagcccgtccctcgcctccctggagccctcccccccgtctgctcccatgcgcgcgggtgggtcatgagcacaggccctcgctttctgccctaagaagcagtaagcacagcggcggctggggggcggcgtcggaggctgcggtgcaaccctgcctggaccagcgcgctctctggaagtagctccggcccggcccaggctcgtccccggccggcagcgaccaaagccttttgtgcacgccgtgcccccctctgaccccctgcgccaggcaagccgctgtcaatcaaggtgctgcacgatgctgacggcacgaactggccacaattttgcaccccgagtaccctgcagccccgtgccttccagcggccggtcaggcccatcgagctcgattgccaggaagcagccccgctggcgctgtttggcgccaagacgatgtccgccagcatcgggcaagcccgaacccgtcgccttccttccacacactctcctcggttgcctcccacccggggggcggcgcgcggcctggtcccgtcggctggttcctcgccggtcgcacaggacacccaaattcgggccccctgcaactgagcgaccatcggcttggagggccacgttcgagttccggccgtcactccgagaccccgggactcgggaataagcaaggagccgggcacggcgtgccgtgttggcaggcgggttgccggctgccgtggggccgcggcgggggtatcccggcggacaaggtcgggattcggggaaccgaggtgccacctttcaggcattttactgccctgacaggcacgccggagcacacggccctggcgtcacgtgccccctgtgtttctacacggccgcattacggcgggcgcatacgtggcgttcgcccgctggtctgggcggtgcacgctgtgccgactcgtggactagggccacctgtctgcgggggcgccctcccattggttcggggtgccgtcccccaccgcgagatctt

SEQ ID NO: 570458 - DNA, 151 bp, Homo sapiens
ccggtcacgatgtgaaataggtaggtgataagaagttggcttacttttgcttatagataatgacaaagtctcgattctggttgcccgaggctggaatgcacgggcttgatcatgtctcacgtgcttcgtgtacaagctccgtgggatcaac

SEQ ID NO: 570459 - DNA, 112 bp, Homo sapiens
ttacggatctaaggtggttgtgggtagggtcggtgagtatcctcacaggacaggccgaggagaactgtggtactgattcccagcagagtgtagcatgggctgagggcaggga

SEQ ID NO: 570460 - DNA, 992 bp, Homo sapiens
  misc_feature (495)..(495): n is a, c, g, or t
  misc_feature (573)..(573): n is a, c, g, or t
  misc_feature (645)..(645): n is a, c, g, or t
agcggagggggctgcggcggtgggggtggctgcgcgccgggggtcggtggagctgtgtcttcctgactaccgagcttcggccagtgtccgcctgtggcgcactcggcggtgggcgctggaggaagacctggcggcagccatgggaggagcgacagtggtcgcgtgttgggccaaagacagatggtagcagagatgtgtgcgagagagacagaacggcggtctgggagctatagagattgcggcgtaaaggaggcgttagagaatgattgcctgatgcaccgcgggggacatgacttggcggagaccgacgaaggaagtcggggagatggtcagtgtgaagtagcgtaaattcgcgaaggacagcagtacgatgactgcaggcaaggtgtacactcgtctgggacgagagagttctgctcagtgcaatagtcgcatgggaagagaaagtctacttgagcattggtgccaattccaacaatggagtagagagcagcnttgtacagaacagaggagaggatatacggaccgttgccagatttcacgagtccgccagtgaacaatgcactcggtggnatggcacaggaggaagcaacatgtgacatgttcccgatgcggagtcacagagtgacattgcatagcaagganagagcggattggaagcaccataactggcttgcggcaggagtcacgtagtactggtactctataccgtgtgtcccctcaggggccatcacgaaggtcaagcttcgtggacttgctgggtgcagagtccgaaggtcgtacgcggcagacatgcttcgcgtgcaagcctcgttccgacacagggtggaatgaacgtactacttgacaacttgggtagcctcgatgcaggcacagagtccagggaatctgcgacatgcgcaacgaacgcctagtagtatcgacgcaaatcacaggaataccagaccatgaaacatagcaagcaaagtagacgtacctgaagatacggacta

SEQ ID NO: 570461 - DNA, 214 bp, Homo sapiens
agtgtcggtcgttgtgtctcaggacagcccgtggtgctgtcctgctgctcgttccccagagaccagtccagctcttgcagagtgctctctggggttcatgtttataaacgcagagtgaaccccaggtctagcggccagtgtgcccacttctgtccgtgagatcatttattactagtcacctgaagcgttcccggcctcgtacctcttattcact

SEQ ID NO: 570462 - DNA, 1578 bp, Homo sapiens
  misc_feature (886)..(886): n is a, c, g, or t
  misc_feature (1327)..(1327): n is a, c, g, or t
gtactgacgagtcacggccctccttagtcaggccgccctcagctgagtggccggcgacaatatcttgactgtccgctcgtgcttgtcacgtacgtcagtcgcccagaaactgccccgggagctctcccgtagaggcctcgcataagtaaactaggtatgtacagtgtgccgtgctcacggcgaggggtttggtactgccaccttggaaggcccaggcaatgcgatacgtggcgtctctcactaacgtatagcggggtatatagcctggacacgaggcggtgaggggtgaaccggcaagacgaccacgaagacctgtgatcctgacgtgattagaagcgggaagccgtacggggcttcgcgtggccaggatcacacagaatggccttcacagacacatcggatgatcttccacgccacccacattgacatggatcgcgcctggggggatagtgggtacattggcgaggcgcgatgagccttgaggaagcttcgtgggtcgccctaggaaaaggtcacaaccatgcctggcaaggggcatgatgaaagtgaagtatgcggaccaaacaccatatttgtcattcgtgggtatattctagacagggggggcattgttggaacgaaggacggccccaagaaacccagaggcggtatccccgtggttgacttctagaccaattttttcgacagaatgggttcttaagcacgccccctggggacatatttgcgccacctcgagtggcacctccggggacggagactaggtctccgagaatcacccaattgaaagaacgcaacacagtgggggaaaaacaagattgctttttacacgccaaaaacccattgttgtgtacagaccgtacttctgtaacaccagacaaaaaagggncatatgggttcgcagaatgaatgggcgttggatcctcgcatggcgtagaatatgcaggctctagggatcccggaacaacttgagccccgaatgtgtgcactgggagcgcaggtctcaatcggaatttcggtctctgcgtcaacccacacgtggggcgagtcttatcgtcaggggactttgtaatcgggccacccccattttgaatttgacaccatctaccgtggcattcaatttgcgtaaacgagtagaggcgcctaaaccatatattttcacattgcatggcgtagcatcttttggccaaataattccatacgtttaggttctcactttggacgcggtaaaggttcccttccgagaaaggtgggattagtagttacattgtagctttccttccacaataagcaggaaatggggtggcaaattccaacagcgtcagattgntggaatttcccaattatcacaaaaagggcttggctaggtttggaacacctagaggtgtctcaaagagacccttacaaaggggcgcctaggcatagttgaacgctccgcaatataggggagtttgtacgcgcccgggtggacaacaaggggttagagcaattgagagtgtgccaacgaaggggaagagcaaaacccaagctcggcaatgtcgcaacgacataggacacacataggccctgatagcacgaata

SEQ ID NO: 570463 - DNA, 217 bp, Homo sapiens
  misc_feature (151)..(151): n is a, c, g, or t
  misc_feature (165)..(165): n is a, c, g, or t
  misc_feature (176)..(176): n is a, c, g, or t
tcaagcttctaacgatgtacggggacatgccggacctgtggatctcctgggactccgagcaaggcctgcacgagagaggggctgaaagggctgctggggtctgccacctctgctattcccggcataaggcatctgcccccacagccccttntgaccgttcatctngatggacattntttatacagaaaacaataaagatttccctctcaaaaaaaaa

SEQ ID NO: 570464 - DNA, 337 bp, Homo sapiens
agatggcctgaaggagcagaatcacaaagaactataggacttaaatatgacactaggaccaataggacgtctacagacatcacaagaatatcacattccatcagcacatgaaacatactctaagatcaaccacatgcttggccgtaaagtcagtctcaataaatttaaacaaaatcaaaatcttaccaaccatactcctggaccacagtggaatacaaatggaaatcaataccaggaatactctatgaacaccaccacaattacctggaaactaaacaactagctcctcactgacttttaggtacacactgaaattaaggcagaaatcaaaaaattc

SEQ ID NO: 570465 - DNA, 388 bp, Homo sapiens
  misc_feature (48)..(48): n is a, c, g, or t
  misc_feature (67)..(67): n is a, c, g, or t
  misc_feature (124)..(124): n is a, c, g, or t
tttgtttccttttacctacctttgcaagtcaggcagagatatatttgnccaaagtcatgtattttancttttttattttaaataaatattaagataaactcactaacagcccaggcacgtttgntcacgcctgtaatcccagcactttgggaggctgaggcgggcagatcatgaggtcaggagatcgagaccatcctggccaatgtggtgaaaccccatctctactaaaaatacaaaaaataagctggggttggtggcgggtgcctgtagtcccagccactcaggagggtgaggcaggagaatcgcttgaacccgggaggcggaggttgcagtgagccaagatcgcaccactgcactccagcctggcaacagagcgagactccatctc

SEQ ID NO: 570466 - DNA, 335 bp, Homo sapiens
gcggccgcgactactactactaaattcgcggccgtcgacaaatgtggtatatatacccagtggaatactatttggccattaaaaaaactaaattctgttattctcagcaacatgtatgatcttagaagacattatgttaagtaagccaggcacagaaagataaatactccatgtactgtacttatgtggaaggtaaaaaagatctcatagaagtagagagtggctcatgcctctaatctcggtgctttgggagtctaaggtgggaggatcacttgaggcctggagtttgagaccagcctgagcaacatctctcaaaattaaaaaaaaaagtcgac

SEQ ID NO: 570467 - DNA, 139 bp, Homo sapiens
gaaatgatgcccacctcttcccagagtccccgggatgctgagctcattgctgaggccaagctactgcgtcaacacagggccgcctggggccaggatcaattcggaggaccacaataaacagctgggatcacaattacac

SEQ ID NO: 570468 - DNA, 167 bp, Homo sapiens
gaagtgcagtacagtcgtgatgctcctctgccccccgggcaaagacctcaacgcccctgacctctatatccccaggatggccttcattacttacgtgctcctggctgggatggcacacaggcccagcacctcgggggagaacctttactgaatgccgggtaccgagc

SEQ ID NO: 570469 - DNA, 311 bp, Homo sapiens
  misc_feature (132)..(132): n is a, c, g, or t
  misc_feature (176)..(176): n is a, c, g, or t
  misc_feature (183)..(183): n is a, c, g, or t
  misc_feature (195)..(196): n is a, c, g, or t
gaacacaggaagaactcatcaaagcagacgttggagcagcggggtggcgagtattgagtcgaagtcttgtggtcatcactccacacacgctcggcgtcaccaggtacaccagcacgcggaagatgaagaccnagagacagccatgatgcgcccaaacgtcgtgtggagtacttgtntgacccncgactcaggagnntccctcaaatgataccccagttcatgtgtggacccacgctgtcagttgctactggagtgactaactcctcagctccttcctcagctccgggtaccggagcttcagaattcggtaa

SEQ ID NO: 570470 - DNA, 366 bp, Homo sapiens
ggagggagagaacgaagaaggctattgtattaatctgttttcacattgctataaagaactacctaagactaggtaatttataaagaaaagaggttgaattggctcatggtatcacaggctgcacaggaagcatggctggggagacctcaggaaacttacaatcatggcagaaggtgtaagggaagccagcacatcctacatggctggagcaggatgaatagagggaagggggaggtgctacacatttttaaacaactagatctcaggacaactcacccattataatgagaacagcatgggggaaatccacccccttgatctaatcacctcccacgatgtccattctctctccactcccgggtaccg

SEQ ID NO: 570471 - DNA, 478 bp, Homo sapiens
  misc_feature (290)..(290): n is a, c, g, or t
  misc_feature (298)..(298): n is a, c, g, or t
  misc_feature (388)..(388): n is a, c, g, or t
  misc_feature (422)..(422): n is a, c, g, or t
  misc_feature (444)..(444): n is a, c, g, or t
ttatgtaaaggaggggttgggggaggattattgaataacatgattaaccgttattttgcttctctttgatttctgccagtgttttgcagtcaatacataaagtcgcagttggacgagcctctaaacggcgcagaccaatttcgataccacaggtttcacagaaaccatagtcatcgtttttaatcgcttcaattgattgttcgattttgcggatgagtttacgtccacggtcacgtgtacgtagttcaattgcaaactcttcttcttgtgtcgcgcggtcattcacatcnaggcaaancggtgttttcgtcttgcatggtgttgagtgtgcggtcaacttctgacatcaactctgctttccatgccaacaaaatttggcggaagtgcncaagctgaccttcagacatgtaatccctcaatgnttttcggctggataagggtccnatacccaaataaagcttgcaagtaagaaccaccg

SEQ ID NO: 570472 - DNA, 1262 bp, Homo sapiens
agtgagtcgaggtccagtggaggacccaggtcctatcttgctgatctccgatgacgtcttagactggaaaatgatgactcggagctgtcctccgtcctctgtgctgtcgtcatcaatgttgctattaaagtctctgcagttaaaccctgtggactggtcggccctctaaagagagcgtatgcctgcgtccatcatcgtatagacgggtttgacttgtttcaggtattcatgacttgttggaactcattactctctcattgtgctgttgatctctggacgtgtgcctcatgaagtgtggtggcacctcgtggacagggaggaggtccgcatacctccatgtccttgcatgctgctgcgttttgcacggtaaccagatcgccaagataggtaccttgatctggttgcgtagccactgctgtagcggacttctactcgatattgtcggtctcagatagggcgacatagtcacatctaaagagtttgttcacagtaattctagtatagtaatatagtgcttatccttcgatggctgatagactccacgataggaaggcggatggctactcgaatcgaccattggatttgagctagagttaacattagtcgagtggtactcatctacgatgtaaaggttagagggatggcttggaatagggatcatgctaaagtataggtcgaaagccgtgggctaggccccactatggggcagagcagctcctttctcagtaattcaggtcttcgttggttcgccatctatttaggtcgcacaatctgtggcttccgattggtaccttgccgttgaatgaaatgaaaacccggtatgctaacctcgaagacctcatgtgtgtatgcatagatcatccccaagaaacgatttctatccccaaatttgtccttcgtaatatatggaggactcagtttcccacaaagcacgcagtttggattgaaaagccctttgtgtagccccattcggaccccagtgtcgctaagacaaataaccagtttcgtccttttgctttgcccctaggtttcgctcagcgccgcgggggacataactccgtttgaggtgccactgagggcacttgagtaagttccagaagtccgccattggaggagttatgcgccaacgggattcctatataagccgccaagtctggcaacgtagttccgaagataaacgccctggaagttcgttccgctcgggaagatggggttcgacccggtgtgtgtgtggagagagcagtttgaaactaggcacaggg

SEQ ID NO: 570473 - DNA, 506 bp, Homo sapiens
  misc_feature (1)..(1): n is a, c, g, or t
  misc_feature (481)..(481): n is a, c, g, or t
ngcaaaatacatttttcttgcgcgtcctatgttggtggctgagacccctaaaacaaaagacaaattaacaagagcaaaacatacaagtttctttaatacaagttttacatgacacagcagcctacataaggaaatgaagtcccaaagaaacagttaaagttgtgtatttttatgctaaatttgatgaagtcacagagaaatataaatggacaaagaggatatgatctaatagtaatacactggggcaacttagcaaggcctgtttgttcaagagttttctctgtgactgtgtgtcttcagcaataaagatgttactttcctccaggtatagggagtgcaaatctcacatgagaatcttacgacctgcttcaggggacgttaggaaattcttcctaggttttacaacctgcttcgtggggagatgtgtgggaaaagtccttcctggtttctgctggtttccccaaatggatggagggtgccntaatttggcagtgagtgtgtgtgtc

SEQ ID NO: 570474 - DNA, 138 bp, Homo sapiens
cgcgcattatgaaataagcaggcccctgcttacaaagtctttactcgtttttctgctgcgtaggcaagttatctgccggagtgcaggcgatttctcgaaaaaagtaggaaatctctgtaggcaaggtagcaaatctga

SEQ ID NO: 570475 - DNA, 1109 bp, Homo sapiens
  misc_feature (827)..(827): n is a, c, g, or t
agcgggctgggcaacagagcaacagtccatctcaaaaaaaaaaaaaaaaaaaaaaaaaaaaaacgcacaccagggagcggtttcagggacccccggggggggaacccccccaacccaaaaattttgggcccacccccggggggggggagggaaagggtggccgggggcagggagggaaccaagcaaaactcgactaaacgaaagagaggggttcaccatcgcggaagggtctgtcgccaagagaacttgggacagctggtgggctccaaaagagggaggacatctgcgagcggcggaaccgtgacacagtgacaaccacggtgatgtcgggcgacaggggatggaccctgggggaccgggaaaaaacttctgcacaccgacgcgcagaactaccatatattggacgagagatctatccaccagcggggggcgagcaccccaccgagaaagccggcaatacctgcgcgtgagaagaaaccaacatacgagacacacaatggggggcgcaactactaccaattctgcgtggacacgagcgacaaactggtgttagggcgccgcgtgggaccaccacaatccgggagacagaaaaatcctccgtgtgtccacaagcaggggggacttacacagagaggggaaacacagagtggggcgacagaggtattaatccccgcgcggaaggccaactggttcggcggcactgtgctttcagacaagcagaccgactttttcacgaagattgggcggcgcttaacacccaagaggtggagcatccgaacacaacaccggggaaataatctctttgtaacaatcccccaacggtgagnccaaacaactacgtcggcgcggcagtggggcggctcgccatgaaacccccaactatgggcgacaacagagggacgccagagaccagatgcggccaacgggagcactgatactagagatcaaagacacatgtgcggcacacagaccagccacaagagtggtcatgcaaccaggacgagagacaacagagccgaaggacacgaagcacagaatgagagccgagcgaactagaatcaagacgcagccggagaccagcgacgcaccagcagagtcacgcaacgacg

SEQ ID NO: 570476 - DNA, 117 bp, Homo sapiens
agcctacgttatggatagataacatgcacactactataaccactaaccctgacttccctaattccccccatacatataccaccctacgtaaaccctcaacaaaaaaaactcatacca

SEQ ID NO: 570477 - DNA, 1192 bp, Homo sapiens
aaactaaagtgtcagttgtacacaaagcaggtgtgtaaaacgatggcagtaactataactggtcctaagtgtagctgaggcctgggttgtgtggggacagtcgcccctgtgtgcacacaccctcgtattctcctgcccttccccagccaggcggtgcaccacggcatgtggtgcttgagctaccctcatgtgaaggtgatgatgtgacctgtacctggatctactgaccctgtggtggcatgctgtgccctcagtgagatggcatcctgcagcttttgatgctgcctatgtgaatgtgatgaattccctgtgctgaatgtgaaaaaattgcaaggcgataaagattgttagtgtgtgagctttttggacagagtcccaggatgtgaacgctgaccagtgctccgtgcatcaagtgcagcagtcagctatgtgaatgtgacaactgcagcttgctcccagccagccttcttccctctcttgtggcctaccttacgagccgcccttgtgcttgagctcacatgtgaagatgtgactcaaagtgtacacaggcatcttcccagcaggccccttgcatgccccagttgacaagccaggcaccagtccagagcgcctccatccagtggcagcctcctctgaactttgacgtggtcactcctgaggagcagaattcaccagagacgcagcagccatgccaatgcgatggcgctgggccccctgccccgtgaggacggaacctgatgctgcacctgcagcgcctggagaccacgctgagtgtgtgtgccgcaggagccggaccacggccagctcttcacccacctgggccgcatggccctgcgagttcaaccgaactggcatccaatgttgcacgagaactgagcagcgcaactccattctgcagacccttttgtgaccgcttcgggcacggagcacgacgctcctgacggccccgctgccatacggccctgcacaccccggctcggcctgcccaacgctccccgcacggacaactctggggctacgaagctgcttcatacccacggcacccaaacgcgcgcctctgccgcccggcaccccacttccgcgcctcgccccacgccgtcctgcccacaccgtcctctttaccgcagcaggtcccgcggttccccttccccctccactcgctctccctctccccccccccctcgccgccccc

SEQ ID NO: 570478 - DNA, 202 bp, Homo sapiens
tatctgctatcaggtaagccattagggccatcacagtgtggttgcagaagtgcgcctggttgcgcacccaggcgcactatctgccttccttgagatgtggtagaccgtattctcgggctaccctctaccggcaatcagcaccctgtattccccgatcaccacgtggtcaccatggtcagagcacggcagactaccactcgaa

SEQ ID NO: 570479 - DNA, 878 bp, Homo sapiens
tatgagattagaaacgacattatctctcgatatgtggaaccagtctgccagagttttgccgcatatcttgtaccagtatttggccggtattattcccgaaaattgtttcacggcctcttgaaccaacctggggtttccccactttagaaaggtcacaccctgaccgcgatttctttttaatccccggcggtctaactactaccggcaggtgttaagttccccccccgccctttctggagtcgtccacagaacgctgggccgcaaatttccgccgggtagtccaaccccgatggttaaaccaaaagtgtgggatatattaccagccttaacattttgtgaacctaaaggagtacctgcccccacaaggtcaccgactctttgcaaatactaattatttggtgggtcgtcctccgacaacaaaacacacccggtgggagccccgagcccctgtgcccgcaagttgtgaccctgcgcccttccttccttctcggaagcggtttgctgaaacactctcttgccccgttcaataccctcctccgccccccctctcctggataaatacgatgtatgttccaacttcttcttttaactcacaacgggtatatcatcgcgtttgttaaatatgaaaattggtcaaatagtacacacaagtgtaagcctacgtttccccagaccacaaagctgttcaaaagtatataacgcatgtgcacaggcggtcaatgaagtcccactttccggtttcggtatcggcgctatttttgtagcagcaaatattaccaccacgtatagggattttattttttttttgaggacaccctgtgatctatacgcgtgtttttttccgtttcaaaaaactctaccctttttccccacataac

SEQ ID NO: 570480 - DNA, 113 bp, Homo sapiens
gcgttttgttgactctagagtgatccccccccgagtagagcctgcccccgaaaccacctccatagctggcagaggagctctgcagtgctggggtggtcctggctctggtggtg

SEQ ID NO: 570481 - DNA, 322 bp, Homo sapiens
gggggggggggggtttttttttccaaaaaaccccgcggggggggcccccctagcccccccccccccccctttttttggggccccccccggggggggcccccccccttttttttttttgggggccgttttttcccccccccccccccccccccccccccttgggggggggggggggggccttttgggggggggggggttccgggggtgggggccgggggcccccccccccccccccccccccccccccccggggggggtccccggggggggggggggggtgtttttggggccttttttttttcccccaaaaaaaaaattttta

SEQ ID NO: 570482 - DNA, 700 bp, Homo sapiens
  misc_feature (17)..(17): n is a, c, g, or t
  misc_feature (80)..(80): n is a, c, g, or t
  misc_feature (93)..(93): n is a, c, g, or t
  misc_feature (99)..(99): n is a, c, g, or t
  misc_feature (116)..(116): n is a, c, g, or t
  misc_feature (124)..(124): n is a, c, g, or t
  misc_feature (195)..(195): n is a, c, g, or t
  misc_feature (218)..(218): n is a, c, g, or t
  misc_feature (241)..(241): n is a, c, g, or t
  misc_feature (246)..(248): n is a, c, g, or t
  misc_feature (250)..(250): n is a, c, g, or t
  misc_feature (259)..(259): n is a, c, g, or t
  misc_feature (278)..(279): n is a, c, g, or t
  misc_feature (307)..(307): n is a, c, g, or t
  misc_feature (333)..(333): n is a, c, g, or t
  misc_feature (355)..(355): n is a, c, g, or t
  misc_feature (362)..(363): n is a, c, g, or t
  misc_feature (370)..(370): n is a, c, g, or t
  misc_feature (372)..(372): n is a, c, g, or t
  misc_feature (385)..(385): n is a, c, g, or t
  misc_feature (397)..(397): n is a, c, g, or t
  misc_feature (410)..(410): n is a, c, g, or t
  misc_feature (424)..(424): n is a, c, g, or t
  misc_feature (458)..(458): n is a, c, g, or t
  misc_feature (469)..(469): n is a, c, g, or t
  misc_feature (508)..(508): n is a, c, g, or t
  misc_feature (524)..(524): n is a, c, g, or t
  misc_feature (540)..(540): n is a, c, g, or t
  misc_feature (547)..(547): n is a, c, g, or t
  misc_feature (566)..(567): n is a, c, g, or t
  misc_feature (598)..(598): n is a, c, g, or t
  misc_feature (628)..(628): n is a, c, g, or t
  misc_feature (630)..(630): n is a, c, g, or t
  misc_feature (694)..(694): n is a, c, g, or t
agctatgccttagtatncatgggggattgggttccatgtgactgctaactctctatccctctagttcaccgttctatctnaggatgttcatantctctnatgggcatatggtatancgtttgtncgttatttacgcattccttcctgtataatttaaatcatctctagatttcttataataccaaatactatatntttgctatgttaatttgctatancatattgtttagggattaatggnaagannnanaggtctgtncgtgtttagtaccagtgcnntttcttttttcagatatttcctatccanggcgtgggtggatctaaatgtggtgngccacagtgacggtagcagccngactgtnntggggananctttgggttggangcatttcttagngatggtttatgtnacaccacttcaganagagcaatatgggcatacttctttctactatggntttgtggattnctggtgtttttttttttaatttgatggtttgtggctctnggcttcggtaggcctnttgggctccttttccntcggctnttgtgcacttggcggttcnnttgttgctttttgagtggtagtttatttttnatttagggttggtccgttggtaggattatngnattggcttttagtgggctgcatatgcagtagattgattagattgtcctggtaagtaaaggtgtncgttgc

SEQ ID NO: 570483 - DNA, 290 bp, Homo sapiens
tccattcacgtccattccattctattccatttcattcaactccattccattccattcctctttggttattccattccattccactcgggttgtttccattccattccattccattttattccattccattccattacattacattctataccattccactcgggttgatcccataccattctattccattctattccattaaattccataccattccattccacttgggtagattccattccattccattccactccggtagattccattccattccattcaattccttt

SEQ ID NO: 570484 - DNA, 678 bp, Homo sapiens
agtgcgtaactgacctcgattttaagtttggcggcaacggcaaccgtgacccggagtgtgttccggtcggcttagcctcctaagccctagccactatgctggagagtatctccatccacgtgcgtacaggctgtggaacagactgtctaagtctgctgctagctgtactgcctggaacacggaatccagcctgatggccagatgccaagtgacaggaccattgggggaggtgatgactacttgaacacctgcttaagtgcgacatacgctgttaagctcgtgcccagggctgagattggagactgggtacccactgtcgttggtgaagtttggactggtgcctaccgtcagctcttgcatactgagcagatcagctcaggctggggctatgctgccaatagctatgctcgagggcactgcaccatggcgagggtgatcaatggccatgagttgcaccggattcagacgctggctgaccagagctccgagcgtcaacactgaaaggttcaccactgatctggagaaggacatgattctggactcatctgcctgctcatggagcgtgtgtatgccatgactgcgggtagtacagcctggagtgctcatttaccggtatcacacgtttgccaggttgctcggaccttaagatccttcctgacaaggaaggaactggggtat

SEQ ID NO: 570485 - DNA, 206 bp, Homo sapiens
ccacgtagtccgaggaaggagccgcgggcgccatggactgagcaggcggggccggagatatagggaccgggagacgcagatctccaagaccaacacacagacttaccgagagagcctgcggaacctgcgcggatactacaaccagagcgaggccgggtctcacacttggcagaggatgtatggctttttaactggggcccgaaggg

SEQ ID NO: 570486 - DNA, 938 bp, Homo sapiens
aaaactaaacaagtgtagtgtgtgcacgcctgtattcccagctacttgtggcagtgcttgagcatgggaagatcacttgagcctggtgagtgttgatggctgcattgagctgagatcaagccactgtgcactcccagcctgtggcagaccagcagctgaacacccccatctcaacaaaaacacaagaaagtggatgctgtgctgctcctgccatttggatcatcgcagcattttacttttctctgatatgcgcctttttcctcatctgtgggggctcatgtatatcgtaattccctctccactactagattagtgagcttgtgtgcaatggcaaggttcatcagtttgagtttgctatgtcccaggcacacaacattttgtccattggatagacacatcatcaatcccacttccttctcctctctgcacatttctttcatttacaacaacacacacacagtagcagatggcagtctcactggccttgcccaggctgtgtgtcaacactccctagcgcctcacagtgcatccctccccaccctctacctcacatatcgcacatccattaagccatatgcctaactcatgacatctcgcatactcaatactgcattgacacattcagctcacaggacagtaccgtattcactaactcgggtccatcccgagcctttgcggccatccgtgcacgcggcagacgctcgacacctaccacctcacatacaggcctaatactcacagcaccacttcacctatactaaacctggcctcagcaccacacactttgcaagcataaccaaaccgtggtcccatgcattcccctccacctcctccgacccaacacgtctggctgactccctgcacctgccagtgacatacaccccggtacaacctgcacctggccaaccggccactcggcgcacctactcacgctcatc

SEQ ID NO: 570487 - DNA, 1082 bp, Homo sapiens
gctcggcgctgggcgccctcccggccagcggcggcagcccctcctccccggacgcctcaggaccccccagagacccccggcggcggcagcctgccttgctctgccagtgaaccatgagtgaggcccgcagggacagcacgagcagcctgcagcgcaagaagccaccctggctaaagctggacattacccatctgcggtgcccctgacggcagaagagcccagcttcctgcagcccctgaggcgacaggctttcctgaggagtgtgagtatgccagcacgagacaagccacatctcttcagcacacacatgagactccggacggccggtgctgcaacgccagacgtcatcacacagacacatccgcagggggaccgccgactggttaggagtgaggcaaggacagtgaccagcaccacagaaatggcaggcaagagcatccgtcacttgcagccagcgcatacagggaagctgaagccccaggtactcacgggagctggacctgcccaggcaggacaaacgtgtcagtgacagaaccgagagcaaaccccactcatacgtggggccatgccaagctgggcatgcagaagatcatagaaccaccttggaccgttggactgtgccattccgatgtggcagaatgacacctgcggaaggactgagtgccccaaaagagctcccagtaaagaccagggtcgatgcatccccgtcttgatacatacatcaagactcacagatacagggtttccacaccgggttccagagcggagaggcagccaaagcgaagaaggttcggagagggacccagagaattggaagcatttcccggtgcggggtaccgaccggactcacagagattgaacaagggaccgatacaggtcataggggacattgggacacgttatacgacggaggaaaagggccggtacgaacaacttaaacttcccagcatctagggttaaacccgtgaaaggtgacgaaccaccaaagggattctacccggcactgacgctgggacgcaaatcattacttagacacggcgacagggtctcataccaacgaacacgaatgtgccaagataccc

SEQ ID NO: 570488 - DNA, 148 bp, Homo sapiens
taaaaaaccccaaaaaaaaaaaaaaaagttagttaggcttgggggggggggcccgtagtcccagctacttgggggggtaaggtaaaaaaaaagcttgacccccggaggggggggttgcagtgagccgagatccccccctgcttttcca

SEQ ID NO: 570489 - DNA, 107 bp, Homo sapiens
tctagctcggtaccccacaccacctgagtctataaacaaatatctgaatgaaatccaccctaggagacggagtcaaactaaacttgtggtttttcatttaacttttg

SEQ ID NO: 570490 - DNA, 209 bp, Homo sapiens
actacagcgcatatccatcccgccctctgaaaaaaaaaaataaattcattaaataaaaatatacttagagaggatattgactgttctcaccactaaagaaatgacaagtgtttgggatatggatatgctaattatttcgatttcatcattactcaatgtttacttctttcagaacttcacagtatactctataaatttgcgacagtagt

SEQ ID NO: 570491 - DNA, 259 bp, Homo sapiens
  misc_feature (63)..(63): n is a, c, g, or t
tcccttggacaaacattgtctgtgtttagcttttcctagtattgtgaggtttccaataggggntccatgtaaaaactctttctgctactgaaatgccggcccccttgagtattcatcacccccacagatgggttttcctttctctatgctaacactttttgagccactgacgttcagatcggtggttagtttcttgggcttttatttttccattttatatatatacacatattatatatatatatatatttgggggaaa

SEQ ID NO: 570492 - DNA, 347 bp, Homo sapiens
tatcgtacccgcacggctagccaacgtgtgtgtagctggtagctgggggcgcagaggacatcacctggagtgctgctctcacacatttctgccacgtggtgcccagctctcacccagggccccaaagaacaagcgttctgggccaagaaggaaaatgccctgtccctaggctcacaacttcatccaacacttaaagcccttcgtgcacacaacgacaaactttattccagattgttacaccccaccgcagaataatcttaacaggccaagaaggaaaccaggcaactccaatcacctgacgagccgcgaacttcggttctctggggggcaactgacgaagctgagcc

SEQ ID NO: 570493 - DNA, 403 bp, Homo sapiens
tcaatcacccacatagccctcgtagtaacagccattctcatccaaaccccttgaagcttcaccggcgcagtcattctcataatcgcccacgggcttacatcctcattactattctgcctagcaaactcaaactacgaacgcactcacagtcgcatcataatcctctttcaaggacttcaaactctactcccactaatagctttttgatgacttctagcaagcctcgctaacctcgccttaccccccactattaacctactgggagaactttttgtgctagtaaccacgttttcctgatcaaatatccctttcctacttacaggactcaacatactagtcccagccctatactccctttacatatttaccccaacccaatggggctccctccccccccccatta

SEQ ID NO: 570494 - DNA, 377 bp, Homo sapiens
ggatggtcgaatccgcacggatcaatggtgtttcttgcagtcgaagccgcccaggtcacggtggattgggaagcgagccgctttgagctgatagctcaaacggcgcacttggcggtccgcctgttcggcttcgatcaatcgatcgagccaaagctatggccgcgcaggccgacgtgaggcttcagcaagcagctcttgtaaagcactcgccataccatgcaggtgcaggtttttgagttcagaaatacgatcagtaggcatgctgagtacctcgcagttgctcatagcgtctgccttcgtgaaagggctcaatgcgcaattgcagggcctcgggcaaggtcaactctacgggacgtgctactgaggtaagccgacgc

SEQ ID NO: 570495 - DNA, 281 bp, Homo sapiens
tctccaggatcttcatgatacaccaataaaatgcgggatataatatacctacgctcttagcggttgttgccaggattgagtacaaaagcctgtgagatcagtgcctggtctcatggttaaatgcatgtcggtggtatagacctgataaccatcctcccaggttaaagtgattctcctgcctctagccttactgagtagctgggattacagggagcccaccaccacacccggctaatttttgtatttttagtagagacggggtttcgccatgggtggtatag

SEQ ID NO: 570496 - DNA, 218 bp, Homo sapiens
acatataccttccagaagttacttcagtagcataaagttagaattatttcgttcttgtggagcagaagtgggaatgatggaatatcctcacaggaaaaggcagtgaagttgggagtactgcttacaaaacagaggtcaccagtgcattatgtggcgtgcttcatccccacgccgtgtgtcacgggcctacggcggcgtgctcatccccacaccgtgct

SEQ ID NO: 570497 - DNA, 377 bp, Homo sapiens
gccaagcacggaaaggcagacattacatgttctcacttatttgtgggatctaaaaatctaaacaattgaactcatgaacatagtaagtactagggggctgggggggggggagacagggcacgggtaatgggtacaaaaataggcagaaggaatgaataagacatactatttgacagcacaacagggggactctagtcaataattgtacatttaaaaataactaaaagaatctaattggattgtaacacaaaggaaacatgcttaaagggatggataaccactctccatgatgtgattagttcatgctgcatgcctgtatcaaaacatctcatgcaccccataaatatatatgtttattatatactcacaaaaatgct

SEQ ID NO: 570498 - DNA, 106 bp, Homo sapiens
tgagccggccccccttgggatgtcaaggaaggggctaggctatgtgttttgtcaggtggttgagaatgagtgtgaggcataattataacaagctccatctgcctac

SEQ ID NO: 570499 - DNA, 1092 bp, Homo sapiens
  misc_feature (41)..(41): n is a, c, g, or t
  misc_feature (96)..(96): n is a, c, g, or t
  misc_feature (102)..(102): n is a, c, g, or t
  misc_feature (121)..(121): n is a, c, g, or t
  misc_feature (153)..(153): n is a, c, g, or t
  misc_feature (162)..(162): n is a, c, g, or t
  misc_feature (168)..(168): n is a, c, g, or t
  misc_feature (170)..(172): n is a, c, g, or t
  misc_feature (174)..(174): n is a, c, g, or t
  misc_feature (177)..(178): n is a, c, g, or t
  misc_feature (185)..(185): n is a, c, g, or t
  misc_feature (190)..(191): n is a, c, g, or t
  misc_feature (197)..(197): n is a, c, g, or t
  misc_feature (199)..(199): n is a, c, g, or t
  misc_feature (201)..(201): n is a, c, g, or t
  misc_feature (207)..(207): n is a, c, g, or t
  misc_feature (228)..(228): n is a, c, g, or t
  misc_feature (235)..(235): n is a, c, g, or t
  misc_feature (241)..(241): n is a, c, g, or t
  misc_feature (248)..(248): n is a, c, g, or t
  misc_feature (282)..(282): n is a, c, g, or t
  misc_feature (520)..(520): n is a, c, g, or t
  misc_feature (675)..(675): n is a, c, g, or t
  misc_feature (705)..(705): n is a, c, g, or t
  misc_feature (882)..(882): n is a, c, g, or t
  misc_feature (886)..(886): n is a, c, g, or t
  misc_feature (907)..(907): n is a, c, g, or t
  misc_feature (909)..(909): n is a, c, g, or t
tcaagcaggaggcgccgaccggagcgcaagaggagtgcgcnccacctggagatgccaaccgcgcgcgccacggttggagacgcagcaccggctganccagcngcagctatccgagctgcgngccccaggtggagcacctgccgcaaagccctnccagccgcngggggncnnncngcnncatcccntttgnngcaaangnanctggcngcaacattgccacaacttcangagccanatctgnattgcancagaaagcgggagtacattgaggagctggagccnccccactgacagcagcacagcccggcggatcgaggagctgcagcataacttgcagaagaaggacgcggacttgcgggccatggaggagcgataccgccgctacgtggacaaggcccgcatggtcatgcagaccatggaacccaagcagcggccagctgcgggggcacctccagaactccattccctgaggacacagctccgagaacgggatgtccgcatccgacacctggagatggantttgagaaaagccgaagtcagcgggagcaggaagaaaagctgctcatcagtgcctggtataatatgggcatggccttgcagcagcgagctggggaggagcgggcgcctgcccatgcccagtcattcctggcacagcagcggctggcaaccaattntcgccgtggacccttgggacgcctggcatntttgaaccttcgccccactgacaagcactgacagacctcacaatcaagccagcctgggctccacccaccctggcttcctccagctcacatggcgcccagcactgggcttcagccaggtgctcgagagctttgaggccatgatctctgctcttccctctcccagattggtggggaggnaggncgggaggtagatataggcctntnctttttagcaatgtgattcttgttgttgattctctctcgggagttaatgttctcccaaaggagatcctaattttatatttgagaaaatagaggcgttacaatctcccctcgctgtctctggccacaaggtgagggaaaaaaagggggcccaatatttatcccccttttttttaaaaaaatatt

SEQ ID NO: 570500 - DNA, 127 bp, Homo sapiens
ctcgcacccccgagtctccttcatgtcgggtgtcctgacgggggttcgcggagtcctggatcgtcctggcctgactgttggtattgaagggttgctgggacttgaatgagcgttctacgttctcgat

SEQ ID NO: 570501 - DNA, 173 bp, Homo sapiens
catgcctgaaagtgggctgcctcctctactacgagccctgtacatcgtgatcttccagtttggctgggcctccacactgatctcccacctcagcctcatcccggagctcgtcaccaacaaccataagaaggtggagctcacggcactcagcgtatgcgttcactgtgcgttgg

SEQ ID NO: 570502 - DNA, 416 bp, Homo sapiens
gcagaggttgcggtgggccgaggttgcgccattgcactccagcctaggtaggtgacaagagggaaactccatctcaaaaaataagttaattaaattaaattaaaataaaacatgcgctgggtgcagttgcttacgcctgtaatcccagcactttgggaggccgaggtgggccgatcgcctgggctcgggagttcgagaccagcctggccaacgtggcgaaaccttgtctctactgacggtaaaaaaattagctgggcatggtggagcatgcctgtcgtcccagctacttgggaggctgaggcaggagaattgcttgaacctggggggtggaggttgcagtgagcagagaccgagccactgtactccagcctgggtgacaaagcaagacccacagtaaagcccccacaccccatctc

SEQ ID NO: 570503 - DNA, 332 bp, Homo sapiens
agaggtggacacgggtgcacgaactgtggttgggtagacatgtggttggcgtgttccatggggttgtgccgtgtgtattacagttcactgtccaccgttaaattcgttgctgatgtagcggccattcatctctgagcagatgagcttaaacttccggtcaagcaacggtacctggcatgccagttccgatagcgcagcagtgtgtaaaacctcctcgtatctggccatggtgtccacgcctgtgaaggtcatgcccagttcagagctgctcatcttcaatgcccttctgctgcaggcggtccatgtccacctccaggctctcctgcccgtgg

SEQ ID NO: 570504 - DNA, 172 bp, Homo sapiens
cagtaatctcctgtgatctgtgctagctgtgaggcagctttggaacgtgaaaagctgtttggtttgaaccgtgaacaaaactgtgttttgagtttagctgccattaaaaaaaaaagttcatcccgtgcctgttaatgtaaacctggttattaaaataactatgaaattccca

SEQ ID NO: 570505 - DNA, 399 bp, Homo sapiens
aaatatatttttttaactcttatttcacgttcaaaggtacatgtgcacgtttgttatataggttagtgtgtcttgtgggtttgtggtttggtgtacacattatttcaccacccactaataagcatagtacctaatagagaggttttttggtttggtttggtttggtttggtttgtgacggagtcttgctctgtcgcccacgctggattgcagtggtgcgatctcggttcactgcaacctccgcctcccaggttcgagggattcttctgcctcagcctccctattagctggaattacaggcatgtgccaccatgctgggctaatttttgtattttcagtagagacagagtttcatcatgttggccaggctggtctcgcccctgacctctggtgataccct

SEQ ID NO: 570506 - DNA, 154 bp, Homo sapiens
cttctactattagactttcgcttcgagcgaggcttctcaatcatgaaattattatatactgctgtagagaatgatgagctacagatgataggatgttcatgtgtgtatgcatcgggtagtccgagtaacgtcgggcatccgatagccgagaaag

SEQ ID NO: 570507 - DNA, 147 bp, Homo sapiens
ttgaagtggagataagtccgtggagtgccgtcttagaactgtttcttgtccaggagggtgagcggctgaggaaacagactggggccagtggacaaacggttggcaagagcaagtgccatccattgaatgggttgaacttttcaacag

SEQ ID NO: 570508 - DNA, 800 bp, Homo sapiens
  misc_feature (469)..(469): n is a, c, g, or t
gcgtgctccctccccgaaggtgggggcccccgccgggggttttgggtgccccccctcctggtttccccgccacgaatgttttgtgggccggatttcttgttggcggcgcacccccaccttctttgggcgacgaccaatactgtggcgcggcgacgcacaaggggggttgcgcgacgccgcttttattgtgtcttcgtcgttggttttgttgtgtggggttttctttttgggcgagcgaccccgcgggttttataacctcgtgccgccgtgcagtgaggggcacccccagcgccgtggtgggcaggagcactcccccccccccgtgttctacaattggcgcgcggggcgttggttggtcgaccacccctggtgtgttgttttataataagtctcgtcccccctatagtagcgttggtcgtttgtttctacggagatgcttcctcttcccttctcttaatagccccccccncctcttcttttcttaggaggggtgcggccccccccttctcttcccccgcccccccccacgcggggggtatgaacctccgtgttttcgtagatagtagtaagtgccaccaattttttttttttgccctcatatatgttctattattctgtttatttttcttgaatgagagagatcctctttgccccccccttccccccctctttttggcccccccccgcgagagagagtacttcgtgtggcttgttgctgttccttcgcggggggggggggggccccccgcgggggcccttttcccccttgtggccccccggaaaaaaaagccacccccata

SEQ ID NO: 570509 - DNA, 644 bp, Homo sapiens; identical to SEQ ID NO: 493289
  misc_feature (598)..(598): n is a, c, g, or t
  misc_feature (611)..(611): n is a, c, g, or t

SEQ ID NO: 570510 - DNA, 665 bp, Homo sapiens
atctgtgtgccatctatgtgcatgagttagactttcgtacagaacatcttatgacgtgacttggatcgtaagcttcatacgatgtctacagcagacatgtctcagccgaatgtgatactgcatgtatttgatggaatctatatcaagaattgcagtcagacgatctcctcatagtgcgatcaggcagagcccgttagtacatgtcatgtatgatggattcgtcatttcccactaggcctggcaccttgtagtacttgcagattcgctacaggttgctggtagaattcagcctccatctcattctacagctgttcttgtggcttagccttatactgagtccagcgataagtatcggatgaggcatcaagcaagagcgtgttgagagtagacggctccatgaattccgagttagcctcattgagaagcgccagcgatgctacagtatccatccgtatgggtcaacagtggagagcagagaatcctgcgtctgacactaagagggatgtacgtcttcacaggcaagttcgatggtgtcatggaagaggctgtcttacgcgctcatgagcggagcgccgggtgtcggcgtatacggagcttgcaccagggccagtgccgtaaagagttatgcacagtgcacgcgctctgacaggcgattgccgtcatag

SEQ ID NO: 570511 - DNA, 935 bp, Homo sapiens
gagagcctgcctcagcaagcgtacctgagaatacttttaaaggaaccgtgtgataaactgcaaaacagtggctgctgcaggtgatggaactgtacttggacacaatggggagaagctggtagcttatatggaaggccaaatgatgaccagaagtgttttttcaaactaatccacgggcacagaatcctgcttcaaaaacttgacggttgaattttaacatacttggggcgctcaggaaccccttgggaacaggctacccttgaggtgttttacaaaaccgtgccctgaacccatctgtgcccaaaaacaagttctctgctcattgaggccccacaaggtattgaagcgcagccggaaggcatgcgccaaggggttccttgcccttggtggggacaacaggtgatgtgcttgacccttggcccagaggaagaggagctggggtggaaattgaccttgctgtgttctttgaccacatgttacacatggaacagggaacatggtggggttcacttgtggtcacccccaaaggaaagggttgggccaggactgtgggatggttgggaagaacaatgcttattgcgcccaaaaagatacatctggtgacagccctctgggacgcatttccacaagggaccaagggacttttgggatagaaagtcttaaagcgccaaagaacggatttccaaaaaacacccaccccttttgtgctcggaagtctcccatcctggaacacacggggcactgtgtgtcctgggcccattgattaggacacgcgtgaaaaatgggcggcaccaattgggcacgacacaacaagcaacgggcattgccaggtggggaccctcgaaacattggcggtacgaacattccccaaacccctgatgggagatcccagatcacaggattcaaacccaagggaagccacaaggggattggaa

SEQ ID NO: 570512 - DNA, 1069 bp, Homo sapiens
ctgggtttctgcccacgccggtcctctcgcctcgccgcgttctgccgggcagacgccccgcgttgattgaatcaacccgaggtttccttgccgccgcggcgcgcgcgagtgctcgcggattattgtgcgcgtgatgtgagcgtttctgcctcctgcggcgcgcttcaggaagcccggagcggccgggtcgcttcagaggccgggcaaccagtccgcccgcgcccggaaggtgcctctgccttggaaaacgccccgggcccgtggcctccggaaacttgagaggacggccgtgttcccccgagatccaccaggtgctcgaagcacgatttaaaaaacacactattttggcgccaatgttgccaaaaaacaacacaaaaacaaacctggcggggcactatatggcgggggggggccggacacacacacgcatgttatcttacaacagttgccgcacatggcgccaaaaaccgtgggtccctaagaccccacacgtgtttttgtatcgaaccgagcgtgtgggggaggagacattcgcgccgcgcgccccccccaatataaagaagggaggcgccccagaatttaaaattagcgagataaaacgccagtgtgtgtaaaccccgctcggtataaattagatcactgcacagacacaacctcacgcagctcagatgacacactatcgacatactacctcacctaaccagccatccaatctccacaacacagaacgcaaacacacacaacaccactttaactatacacgcccaactatcacaacttctaacacactaccacatactaaaacaccaatgcacccacaagctccaatcgcctacaacatattcctatacgcctatacttatacccgtacacaaacaccgaaaatacgtaaatcaatacccctaatctctcaccatacgaccacttctctcacaaacataactcacctccactcaaacaatgctatatctgcaaacacagacatcactcattatccttcactcacaccacataccaccaacaacagaaacaaccaacacctaaacatacaacaaaacaccatcacaca

SEQ ID NO: 570513 - DNA, 679 bp, Homo sapiens
tgcgcgggcactcagtgagcccgcgtgccattgtggtgctggtgcggccctagccctggctgcggagctgctgcgcgagcggtgggctggctgaccccgagggacccccatgcgcagcggtgtgcgtgcgatagatccttggagtgagacggcctggactggctgctgtggctgcctggctgatgggacgatgccctgcgtgcttgcagggcttgtgactccactgactgtagatcctagtgctgtgccatgctgcaggagcctgcagtggcccaggattcaccagcaggattgacaagtgagcttgcagattgcggacgtggctgctgagaacctctacagagccaccagctaacaaccgggtgagagagacggtcgccctggaggcttgagctacgtcaactccgaaccttgcagcttgctgacagtgaggagctggaggagctcagcggtggcgtggaccctggccggcatgggagcgaagctgtcactgtccccatgatccccctggtgccttgaaggagaccaaggagctggactggtctacaccgctgaaggagctgatctcagtgcactttggagaggacggcgcctcctacgaggcagaaatcagggagctggaggccctgcggcaggtgttgggttccgaagacagacagaacgggagaatgaagaacaa

SEQ ID NO: 570514 - DNA, 701 bp, Homo sapiens
attccagaagctgacagcattcgacccagagagtatagatgcactgacttagatgtgctcatgctacttactctctgtggaccgtaggctatcaaaagcacttcaaagattcaggtttactgacgtcatgcagcaaagaatgctaagtcacacttactgaattgcgtatgtgtattgggtttcatccatgcgacattgaagttgacctactgaagaatgtccagagatgcagagtggatcaacgagactggtctttaacaatggactcggcttattatcactagttctacactgaattcacccacactgaagaagatgagtatgcctgtcgtgtgaaccatgtgacttggtcacagcccaagatacttaagtgatatcgagacttgcaagcatactgacggatgtaagaagaagccgcattaggaaaggatgactaccaaactgtgcatgcttgctatttaacactgattgcttatacactacacgttatacacaaatgtaggctttaacatgcttcatgacatgatcgtattatactctactatgacagctgctcatgtcgatgctctagcagatgctctcggtactatagaagctggcgattaaagtgatacacaaattcgttatcacataacatgttgtaactgactctcatgcctgcctcttggagaagtcacccgccttggacaccctttctcggt

SEQ ID NO: 570515 - DNA, 116 bp, Homo sapiens
gcacagatgctcaccgctccgagatcacgtctgggaagtcccggtgcggtccttacagctcttggcttgctggacgtgagtgacatcattcggataccaatatacttcttctggtg

SEQ ID NO: 570516 - DNA, 187 bp, Homo sapiens
ttcgccggaagcagatccagaagatggaaaacctgtgatggataaagtcaaggagaaggccaaagaagaagaccgtgaaaagctaggtgcaagcacacatgaatccatccctccatgcttatagatcccgacgacgtcagcgatcagaatagtggaagcctgtcctgctaagtcagtctaaggccac

SEQ ID NO: 570517 - DNA, 375 bp, Homo sapiens
gggcccgggtggaaggcggggaggatgtgtgtgaaaagaatgcaaatatgtgtgctgtgtgtggcaggaggctatgggaagagtgtatcagataggactgctcatattgccctacacgagcaataagttgctcaccagagcgatcccatgcccacatgcaaacgtgctacccctactcactctgggcctggttggcgccctggatcacttagaacctgtggtgcctactgagtctaaatgggatactatgcgcataagacacactaaaaccgcatcttccatgttggactaatggccgtcaggtcagaccaaggatccccgatgtctatcactccacagtagctccagtcaaactgaagcataggcacgcaatct

SEQ ID NO: 570518 - DNA, 221 bp, Homo sapiens
aaaaaaaagaaaagaacatgagtcttaagttaccattcattgtcgtgaataaaaagttggtctcagtgagttttgcgcgttgaccacgaaagatgggtgttcgtgtgtgacagcgactcctggtttctcctccactttaactggcggctcccaccattcaagttttcttctggtggtgcactttctctggctttaacttcatgttggcatcctcccaagta

SEQ ID NO: 570519 - DNA, 280 bp, Homo sapiens
  misc_feature (99)..(99): n is a, c, g, or t
  misc_feature (171)..(171): n is a, c, g, or t
attgtggtcaaatttatattaagtacatggaattaataatttcaatggttggtacataacaaacattcagaatatatgtttcctcttattacctatgtncagagggcaatagatctactttatttgaaagatgtgtcagatcattggtgtataaagtgcaaaacgtgtgtntgtgtgtgtgtgtattattactacagcaaacagaaatggactttggtgaataaatcaataaaaattttaattaaacaattttaggattttataaagttaataaaaatgt

SEQ ID NO: 570520 - DNA, 684 bp, Homo sapiens
acttagggcgcaggccaggaatttgcaagattggacatactataccagtcacatgtattatgcagaggagcctgggcgctgacaggctgtgccatgtattctcatactctaataacatgacgctcatgtagctcccactagcggctgtcgccggtgctacagaaggaagtatagccagatgcaaggtaagctgactgcccggcaaggctattatccgagtcatgacagtacagctgactttattggctcttccctgacacgtcaggatagttcacgtcatgagacaggtcaatgtgcttacatgcgatgtggtactactgctgctaaatctgatcatgatcaaagagtatttttgcatcacacttaaagtcatcatcagatcagtgcgccgcttaccctgcatctagcccttgacagtagaactactttacctgttctgcagcgctagtgacttagctcactactagatactcatagacatccatgctacagaaagactgagaggggaatcaaactagctagcaagtagcttcgattatcttagcatatgagactgtgactcgcgcttgaatactactcttctccatgcagacctaccataaccaactgtaggacacgtagcttgagcaacaccgcgttccctccaggatactaccgacgactgtgcttcccggacagtgctcc

SEQ ID NO: 570521 - DNA, 151 bp, Homo sapiens
agttatgggggcgtccgctcctaaggcaggaagatggtggccgcaaagaagagaattagtcgctggagtcgatcaactctaggctccaactcgattatgaacaagtgggaagtacgcttcttggggtacaacgcagacctctgcaagatga

SEQ ID NO: 570522 - DNA, 235 bp, Homo sapiens
agaaaggcatctaatgaataacactgctaaaaaaagtcgttacttgagtgttttgcgatacctgattacctgaactacaactgaagcgtttggaaatttatggaaaaaaatcatcatcgtctccaaagtagttttgttcctgaagacgcgctaaactttgagtttgcgataacaaatgtcgtcccaacgcagatctaattgagtttgttcaaggacagaacaacaaaattgttcc

SEQ ID NO: 570523 - DNA, 242 bp, Homo sapiens
aattcgggacaggggctgactgaattgctgacacttcaagctctgtgcttatccattacctcaaagccagtccattccattagtaaagtttccaacaaatagaaattaatgaccacctttggtacacctaatatggagattacacttcaattgacaattttacaccatgtcatcctttgaagaacccctcactgtcaccttcccgagaataccctaagaccaataaatacttcagtatttca

SEQ ID NO: 570524 - DNA, 178 bp, Homo sapiens
  misc_feature (34)..(34): n is a, c, g, or t
  misc_feature (138)..(138): n is a, c, g, or t
  misc_feature (149)..(149): n is a, c, g, or t
tctgaggatcccgcccaggtagattcccatcttntgattggctataacttcagtactgggttccattcctactttcttaaggccattcccattttggcatacttagatgggactgaccccctcattgggtagagcttntgtcacttttnggatttttgcttgtcttatttcttgtgcc

SEQ ID NO: 570525 - DNA, 213 bp, Homo sapiens
ttggtcccaagtctttgctattgtgaatagtgctgcaacaaacaatacgtgtgcatgtgtctttatagtagcatgatttataatcctttgggtatacacccagtaatgggatgggtgggtcaaatggtatttttagttttagatcctttgaagaacccctcactgtcaccttcccgagaataccctaagaccaataaatacttcagtatttca

SEQ ID NO: 570526 - DNA, 826 bp, Homo sapiens
gaaaactacccctaagacatgccaacactgggaaaggaacagactcgatatcaacgagttggacgtcatcgcgacacgtagatacgggacaagtccaccgctactgggcatcgtgatctagtagatagtgcaggatgggagtcgagcaaaatgaagctattgaataaatattatgatgaaggaggtgcgtgcttgagattgggaatagggcgtaccttcaagctatgccatggggtctgtggaatagacgtgaaagactgagcgtgaacgtgggtatcatcatttgatattgtccttgtatggaaatttgagaccaggaaagtactattgtgactatcagtgtgattgaccgcacaggacagtagaagaccttgtaatcaaggaagcactgaattagcagggcacattcctacaggactgagcatggtgactgattcgctgattttggttggctggctggatgttattgagcggcacagtttgaaaaggcagggtactgctccaaagcgaaatgggtgcaggaatccccggagtagcagtggcccctttacgtaagggacttaacaaactacctgtggggttgttggaaaaaccaaagcttaaattatgttccgggttggttgatacgccaaaaattggggatttcccaacttgaaggactacccgcgtaacaatgcccaaaaaggcaagatcttgatggcagcgatttgtacctcacggacatgtacaagccaccttagcctttttggccaaacacttggctaacgagcgcccgacacagtttaccatttttgggttggccccaacttttcccgggttgggaaag

SEQ ID NO: 570527 - DNA, 367 bp, Homo sapiens
gtgaagtgaggtacagtaacttcactgcattccaagatagctcgttggttgagctacccttctggttgaaggaatgcagatgttctacttgttgaaatatttccttactttttttctttctttcgtttatttcgagatgagtcacgctcggtcgcccaggctggagtgcagtggcgggatctactggactcactgcaggctccgtgctcccgggttcactccattctcgtggctctagactccctagtgggtgggaccacaggcgcccgtccagcatgcccggataacttttggtgtttttagtagagacggagtttcactgtgttggccaggatggtctcgatctcctgacctcgtgatccacccg

SEQ ID NO: 570528 - DNA, 997 bp, Homo sapiens
ggtgggcagtcacctgaggtcaggagtttgagaccagcctgaccaacatggtgaaaccccgtctctactaaaaatacaaaaattagcttggcatggtggcgggtacctgtaatcccagctgcttgggagtgtgaggcaggagaatcgcttgaacctgggagaccgaggttgcagtgagctgaaaccgtgccattgcactccagcttaggcaacaagagtgaaactctgtctcaatcaatccatcaatcaatcaataaaatagaggtcatgctgaaaaaaaaaaaaaaaaaaaaaacgggggaaataattttttttcccgaggggcacctaggaccgggtctccccggggcccgtggggggccccgttgggtttgtccggtccgcccggggttgccaatcatggggggacggcggcgccaggttcagggtgcctgctggggcccccgggtctcaccaatccctgtcccagccggttcatgtacggtgaaagtgctctctccaggggggagatattggcgccttctttccttccaacaattgggacggaaatatttgggggggggcaagggtttgtcaggtcccggggccctcttagtattcgccccagcccatttgccagtcgtcaggggggagcgcgcgggttggtccaaggggttaactcccggaattggggttcgggaagcgctgtgtagccgcgtgccctcggtaaagtttacggcttcccccgcgacgtgccgggtcggggagttcgctctcgggactttgtccagaaacaagctcttatttcccttggaccacgtttttcccggcagccttcggagaatgtcgttctttggtgtaccccttttacacatcttcctggggtaccctggatctcaggccgcgtctcggccagcaacccactcgggctgggtccccactccttcggagagggctggatcgggggtcccctggaggctctgggtgggccgggcccccctttcgcggctccccacga

SEQ ID NO: 570529 - DNA, 823 bp, Homo sapiens
aattcggggagagatagggcgggaggcaagggcaaggcgggatccaaatcctcatcttactttcccgaccttgaggatgtagctgcctgtcgttgtactgtatcagagtagcttggagcaggggtcatgtgaggccggggcctgatatgctcctacctggggcctatttctagtttcatgtaagtaatatatctggatctgtgagaaatgatttaactaaaggggaacgtgatctttgtgcaaaatgataaatgaaagtaggatgcatgaattgagcaatttttggggcggggttgatgtttcccctgaaaatagcgtgtatcaaagtgacctggcagacgatagaggaggtgacgaggagcccccacgacaggttggaaggagacgaccagtgccgcagagagggcagtgtcccgctggtggtgaagacctccggggactcgggcacctgagggtgcttggtgtatgtttgcctcgccagaaatatataaagacccaggtggggggggtgaagcaaacacgcgctgtgggcttgaggaaagcaaaaaccacgcaattggagaggacacgttcccgaaggggagagaacttcgattcgcgggggacccgccacgcaaataactggggattggcgccagaatgggtccaccgttaaaaatcctaattgataaggcgtcccgggggccgtgattgtggtggatttgagcccggcacaaggttggaaaggaccttttggttaccagcaattgctgtttcaaacttttctttgtaccaaaaatttgtttactttggccttttttccttttgtttgtaacttatcttg

SEQ ID NO: 570530 - DNA, 269 bp, Homo sapiens
ggtcgacggaggtcaggagatcgagaccatcctggccaacatggcgaaaacttgtctctactgaaaatgcaaaaattgattgggcatggtggtgcatgcctgtagtcccaactatttgggaggctgaggtaggagaatcgcttgaaccctggaggcagaggtagcagtgagccgagatcatgctactgcactccagcctggcaacagagcgagactctgtctcaaaaaaaaagaatgagaagaaagaaaaagttgttcccccaagttca

SEQ ID NO: 570531 - DNA, 166 bp, Homo sapiens
  misc_feature (155)..(155): n is a, c, g, or t
ttttcgccagtgtttcccttacacaagaagaaacttccttttcagatagctcaagaaaagtgctctagcatacattgtggacttcaatgaaatgcttattaggctggaaggtggtggtccacacgctatgatcccatgcactttggtgaggccgnagatggcatca

SEQ ID NO: 570532 - DNA, 1089 bp, Homo sapiens
  misc_feature (22)..(22): n is a, c, g, or t
  misc_feature (95)..(95): n is a, c, g, or t
  misc_feature (118)..(118): n is a, c, g, or t
  misc_feature (130)..(130): n is a, c, g, or t
  misc_feature (160)..(160): n is a, c, g, or t
  misc_feature (165)..(165): n is a, c, g, or t
  misc_feature (184)..(186): n is a, c, g, or t
  misc_feature (208)..(208): n is a, c, g, or t
  misc_feature (309)..(309): n is a, c, g, or t
  misc_feature (384)..(384): n is a, c, g, or t
  misc_feature (390)..(390): n is a, c, g, or t
  misc_feature (394)..(394): n is a, c, g, or t
  misc_feature (405)..(406): n is a, c, g, or t
  misc_feature (416)..(416): n is a, c, g, or t
  misc_feature (419)..(419): n is a, c, g, or t
  misc_feature (428)..(428): n is a, c, g, or t
  misc_feature (450)..(450): n is a, c, g, or t
acgcccccggatggaaaccagnccgccgcaaccgtgcggaaagagggcacggcccaaagagtgccgaaagacccgtcaagccgcgcgccagactngaccgagcaaaaaaatgagcaanacggagcagggngacgcctcacaccatgagctagggggaatncattntataacaacaacgcgtacnnngcgctcgatgcctacaacaagngctgccgtgctgcccggtcctatgaggcagttgcagctgcagctgcctccgtgtataattacgcagagcagaccctgtcccagctgccacaagtccagaanacagccatggccagtcacctcacctccacctctctcgatccctacgatagacacctgttgccgacctcaggagcngctgcncacnaggtgctgctnnagcagcagcngcngctgctgtnactgcagcttccacttcatatnacgggcgggatcggagccccctgcttcgcgctacagccccagtccccactgttggagagggctacggtaacgagcatgagagtgagttgtcccaagcttcagcagccgcgcggaattctctgtacgacatggcccggtatggagcgggagcagtatgccgatcgggcgcggaactcagccttttaaagcttgaggtgggatgtgtgtgggctgaaattccgagctgcggttgtgcatgagaatacacccttcgtggtaccccatctccgggacgttctcggctctgtgcgttcagtccctcaggaaccgtggaccttaatttaccttgctaagttcagaccttctcttcctttcctttcctttcctctcctgcccattttcctgttcttctgtccttcaatacttctgtagcttcccattcatgttctcttctcccagcaggcctcattgtgtgcagaaactgtggtgggggctgtgctgtctcctccctgcctcctgcctctgcggctgttggatttgggaatgaccttggtgagagtctcactgctccagggtctctttttggtccaaaggctagacctatagagttggatcactttttttctttccggtgaaataaatggttttctccacttagga

SEQ ID NO: 570533 - DNA, 166 bp, Homo sapiens
acgcttatatcagctagaaaggagggatttaggatctagatttacgaatagaaactgtggttccattatggtaccagctgtttacccttgaacaagtcatttgaggcctttctgggcttctagtttcccaaaggtggactggtgtagggcagggctacatttccag

SEQ ID NO: 570534 - DNA, 722 bp, Homo sapiens
  misc_feature (44)..(44): n is a, c, g, or t
  misc_feature (120)..(120): n is a, c, g, or t
  misc_feature (129)..(129): n is a, c, g, or t
  misc_feature (168)..(168): n is a, c, g, or t
  misc_feature (184)..(184): n is a, c, g, or t
  misc_feature (219)..(219): n is a, c, g, or t
  misc_feature (237)..(237): n is a, c, g, or t
  misc_feature (332)..(332): n is a, c, g, or t
  misc_feature (335)..(335): n is a, c, g, or t
  misc_feature (371)..(371): n is a, c, g, or t
  misc_feature (467)..(467): n is a, c, g, or t
  misc_feature (557)..(557): n is a, c, g, or t
  misc_feature (566)..(566): n is a, c, g, or t
  misc_feature (586)..(586): n is a, c, g, or t
  misc_feature (600)..(600): n is a, c, g, or t
  misc_feature (602)..(602): n is a, c, g, or t
  misc_feature (605)..(606): n is a, c, g, or t
  misc_feature (610)..(610): n is a, c, g, or t
  misc_feature (640)..(640): n is a, c, g, or t
  misc_feature (649)..(649): n is a, c, g, or t
  misc_feature (694)..(694): n is a, c, g, or t
ctgagcgaagttctcaagatatatgttaggtagctggggatctnggaggccagatttcgggccagggcctcagcatcctataaccagggctgcctcccgaagagcagttcagagggcgtnacttcatangggcagggcggctccacaaaggcctggaacacccttctnctcagcccagggagcncatcagggtctgggcctgcttcagttctgccaggnggacctggaacttgtttnctgagagggacatggcaacaggctgggctggggttcctggggcagcggccacctccagccgcagtgcaccaagggctcttccacggattgcagcnggntggagcccagggtgtagtgcacccgccagcgcacanctgccaacctattcatgcgttggctgcagaaccgcaagttcttttgcaaggggctttgcttcttctcaaaacagcggcacaggctggccgcgtgcnctttgggcagctccagctgctgcagttcactggacaaggattcgccatcgacacttttcttggccgcactggagaggatgaaactcagcncttccactntggcctttaaatcgcctganttaaacttggcgtnangtnnagcnttaggatcttcttataatcaatcccctgtnccagccgcncctttagtacctggctgcagagcacgccaacttcacagaggacancttggccagcgtgctgatttctgcaagg

SEQ ID NO: 570535 - DNA, 142 bp, Homo sapiens
aaatgatatgtatcgtaccattgtagagtcacgcagcataggtacgcagtcccaacagtcctctgcgctccacctgttcacctctttaatgacatgtatctaccatagtagtgtcacgcgagcataggttcgctcgtcccaa

SEQ ID NO: 570536 - DNA, 298 bp, Homo sapiens
gcttgagcccaggagttggaggctgctgtgagccgagatggcaccactgcactccagcctgggtgacagagcgagaccctgtcttaaaaataaataaatagaaaagaagagcctgaggcagaggagagaggcagttgcagcctgggacccgcgtctacaccgccaacagcctctaaggctctacgaccggacaacagcctcgggtcccggccgccaccatcccaagggcccccctatctgtcctgggccgtttttgcaggtcgacgagtcagggtgacgctcttccatggatctaagt

SEQ ID NO: 570537 - DNA, 143 bp, Homo sapiens
aatgtttgagcgcttaagtgatagtcaatatatatatataatttattgtgaatgtatgcagttgggatggggagaggacattaggagaaattattttattgctctgataatgaaaacggacgggaaaagtttgcaccacaacg

SEQ ID NO: 570538 - DNA, 113 bp, Homo sapiens
tctatctttgaaaagttcaatgaaactaaataaatttctaaccagagtaatcaaaaaaagagagaagccacaaattacctacattggtaatgaaaaggagacatcagtagttg

SEQ ID NO: 570539 - DNA, 2037 bp, Homo sapiens
  misc_feature (483)..(483): n is a, c, g, or t
  misc_feature (501)..(501): n is a, c, g, or t
  misc_feature (587)..(587): n is a, c, g, or t
  misc_feature (728)..(728): n is a, c, g, or t
ggactccattggagcgcttactgtgttgagtatgacgcagacgagacgatcatgaaatagcaggatatccacatggggctccgtatcttctcgggtctcgtgtccggtgcatcatgaggtccgtgtacccgaccccgtacgtggtgagtgatggttgacccgaggggtgtgcttcttgcgtcccgacgtgaacttccgcgaagcctgcgtggagaggggtctgcttctcgatggtgccgatggcagcgcacgagactgtcggggacactctgggtggtaagctgaagagccgctggactggggtcctctcagtcgagctcagcgggtgggcatccaagcggtcgtaccacgagaacgactgatagatcgatcgcagtggagtcagtgatgcttgcgaatgacgtgatgcctctgagactgtgcatgtctgcagtcaggcagctaagcaggacgtgcgaaggggactagcttcgggcgctacgntagcatagggcacatgtncccacggcagagggaaagacgcggcacgctagagagaccctgctgtctggattggagagacgtagggcttgttcccgtccggacgntcgtgttctcgccccggtgtcgcctcggttacccttccgaagggaaccgtcgcgttccagttgctcccgaagttacactccagttcaattcctacagacagcctgcaggcggaacgagttgctggcgagctgtgtcggcgnccctgggagatgaaaactttcggtgccttctgtaatgggttgtttgttgcttccagtggcgggtgggcggttcgcatgcattaccattgggtaccgccgacttgcgctatttggaggaaagggcaattgcgctcgtggattttcaaggtaccccccggttggataccgttggctttcgattcccacggagattgccaatctagcgtaagggaccgttggtgcctgaggtgaggttgacggattgtggcggccgtggagtacggttctcattgactacgttttctggcacgatgaggcttgaggccaccatatggcacacccaccggatatgtaggcgtagccggtactcagagacagtgtggagatctgggggacactcccctactggggaaaattatgagaccccgcctattccagacggtcggcacacatgcacacatcttgattctcggcatgagaccacaacctttggtagagcaaactccttataagcaagtgcagtatgcaatacaatacaaatgccgttcagaatgttgctcaccgcagccgaagaaaagaatccccgcacacacaaaagactccgtctgtccaacttttgccaatcagaactacctttaccacttcccaacgcccaataagggccgaacgaaacaacaccagccgctttgggcacgcagacggaattttcggagaattcctcgggacggcaagacctctgggcgcttcagctgacacctagcccaccgtccatcgcggcgactacagcccattgctcaacaccagacggcaagcctggacaggttaggcagccacgaacctttcccctccttgcgttagtattttccccggccagcgcgggcaccctcacccccagtcgaaccagcggcccacactgggtcaggaaggaccacacgcagtgcagacgaacgcatagaagaaaagcaccaggcgcgcgtacaccagagaggctagcaaaagggggaacatatcacaaaaaatgaggttatagccaacaccaatgtgggcaacgaacactataaacgaggcgcgtcccaactctgtctatgctgtgacgacaccccctacgtccccacacaaccgctgtgacttgcacacatcacaaacgcaacaacgactgtgcaaattatgcgacgcgacgagcataatcgaaaccgacacttccaaccaagaccatccgaccaaccacgcaaacaatttatccgcctacagacatacctacacgtagtgttatccccgccagaggacagtctcactcgtgcatcatccacagcacaaaagcggccactcg

SEQ ID NO: 570540 - DNA, 305 bp, Homo sapiens
caggtgtgcctataaagcctgagctttggcccgtggaccatatctttacagactgacaaccatccctttctgctgctcgaattgtcattcttgaggcatgagcagcgctctgcagcccctcgtgggatgttttgctcaaacctgctgcgacttccaagggagcctgtgactctgctctcctactcctttcctcccttgtgttggggcactcgtctgagctccttggaaagagccctgcttcctgtgccagagaagtaggacagagcgaggaggcaagactgctaggctaacatcccaggctgccc

SEQ ID NO: 570541 - DNA, 141 bp, Homo sapiens
tcgcagagaggaaacatgactcgtatatgtctcaggtccctgctttgccaagcacctagcctcgctcttggcagggactcagcgaatgaatgctgtatatgtcgggtgcaaagttccctacttcctgtgacttcagctctg

SEQ ID NO: 570542 - DNA, 286 bp, Homo sapiens
gcggccgactaccaccaccaccccccccccggccgcgtcgacgctggatttgctctgcggcaagacccgcgccaccagcggcagtatccagttcgacggccaggaactgaccaaaatgcgcgaatacaacatcgtgcgggccggggtagggcgcaagtttcagaacccgtcgatctacgaaaacctcacggtgtttgaaaaccttgagatgtcttatccggctgggcgcaaggtctggggtgcgctgtttttcaagcgcaatgcccaggtggtggcgcgggtcgag

SEQ ID NO: 570543 - DNA, 353 bp, Homo sapiens
  misc_feature (216)..(216): n is a, c, g, or t
actctctgcggtattcacgacgactccccgacgacgggctgtcccagtactgacactgctgactggtttacgctggggtgtctgacgaccggcttctctgacggacggtgactgtccacacctgacgactacggaccacgacaccttccttatgcaacgactaccggacacgcacgacggactgcacgtacggtactgtgacgaccccacgacggncacggacacgggagcacgtgtttgaccgacgcgggacgttacttgggacacgggcggttgacggttggcgacggttccgcaacggactggagtcccactgcacgacccttgtacggctaccttggacacggacgttt

SEQ ID NO: 570544 - DNA, 520 bp, Homo sapiens
ggctttgtcatactcagtagcattataagtaagcagaaaaaaatgatggcatttgtattggtttagtagactttggttctttgtctataatattaatagtactttgttgtggttttaatcacccttgatctgttaaaaccatttatctggtaatcttcagtctttttttctgtctcagcacagctttgggatgtagcacagtgatttttctaaagtagagtgagggaaggagtatcttctttcagctccctaagagtatttattttatttttatttttattgttcttaccagacagggtctcagtatgttttctgtcttgaagggcagtgggacggtgataattgggtgcagcaggcaaatgctgggcttaaggggtcgtcccatctagccctggtgttttaatattggggcagcgtggatcagcctatcagggcccactagtctgtgcagggagcctctcgaatatgtatgcgttaagtcttgctggtttaaggagggtagcagaggcgccttatgcct

SEQ ID NO: 570545 - DNA, 119 bp, Homo sapiens
cgactagaggatcccggtggcatggggtctgtaaattgcttgagcagaggaaacactctactcccgctcggcatcaagggctgggtgatggagagtcaggccgtggttgccctggggca

SEQ ID NO: 570546 - DNA, 593 bp, Homo sapiens
  misc_feature (139)..(139): n is a, c, g, or t
  misc_feature (344)..(347): n is a, c, g, or t
  misc_feature (385)..(385): n is a, c, g, or t
  misc_feature (401)..(401): n is a, c, g, or t
  misc_feature (440)..(440): n is a, c, g, or t
  misc_feature (451)..(451): n is a, c, g, or t
  misc_feature (487)..(487): n is a, c, g, or t
  misc_feature (491)..(491): n is a, c, g, or t
  misc_feature (495)..(495): n is a, c, g, or t
ggttttttttttttacaggtcaaaaagaacctttattactttttatttttcccacttatgctttcttgccagatgcctttggagctcagcctttctgggctggagctttttgacccttctgagcttttggagcaggcgntggtttctggcctgtggctttctgggcaggaaccttctgggctggagcctttttactcgcggcggtgatcttttttgctggaactttagcagcagcagcagcagcagcagcttttttacccttagtaccaggtgcttttttgggagaagctttcacgagagctgccttttgaagcttcttaacttcattcttgattattctgttnnnnattttctttgccttcataactttaagacgatcaaaatncgtcatcttggctttnctttctctggcttcaatcttcttggcccatcgtggggcngcccattttgnattgatgtctgccttctgccaggcttggaggacatnattntggngggccctgggcggaaacttgaggatgaaatcagtgagctgcatgcacttggaaaggcatggcctggtctcctcacttgagtgcaaggtccatcgaccc

SEQ ID NO: 570547 - DNA, 137 bp, Homo sapiens
ggtcaccagctgagcccagctggtcaacagaccaacagggcctcatcatcagctggcctccagcatatggggagcagtgggggctgggaggtaacctagcagaccccacagtggctctaggcgagaagggggcccag

SEQ ID NO: 570548 - DNA, 1109 bp, Homo sapiens
  misc_feature (371)..(371): n is a, c, g, or t
cagagttgacccctcccacgtttctcaacatcagtgctggccgcaggctgacaggacagggacggatccggaatggggggtggccgacggtgatgactcgactgataccccatcggcggtgctctgtagactaactccgcaatgatgacattcagggtacgtctcatcagccatctatgaaagcttagtccaaggcactcggtccattgtgccctatgtggagatagtaatagcgacgcccgaaagatgacgcttctcgtcctttatccatctaactagaagtgagccactctgatgactggatagattggatggttccttcgctggccctaggcagtatactgggtggtgaatcccttccactagcctcntgtgatagggcaggactcgaccatgtttacgttgtcatcttggccttttgccatgctcgatcaacggaccgtgagaaggtcggacattgaggcctagcaatgatgaggatagccctagcattttgggttgcgcgtcagctaaagagtagtagcgaacgttgcttcatgagggccctctcttctcgccgcaggtcacctcggctcccttctgtaccctgggcgcgtcgtcacctatcgattgcccgactagagtggaagacggggcgtgggcgcgggcgtgcggacgtggggttccacccgtcgccgggcacccctcggtccctgccggtccctcctgtgcttccgatttctggcataaaccgccggaggctgtcccaggtgcatgtgaaaaggcgagacacactttcgaccaggatacctttcccggtataccctgatggcctcagaatggaatgagacccacccaatgggtgacgggccggacccatccatggctccacaaggctgggtgcgcagttttggccgaagggttggcttggaagtcctggggaaaaaccgatccaagcagttggagtaatcaatcacccccaatggatgcgttcccaaacccgtaggggacttcttgacggaagcacagtgaccttcgggatgacaggcgatggcttgcggcagggattgagaagaggcctgttggcgagtgaagaggaattagggcccacaggctatccgtggtcgcca

SEQ ID NO: 570549 - DNA, 291 bp, Homo sapiens
ctcgaggatcccaaacgccatactcaggtatgacgtataacattagtgagaattatattctaagtcacggagattggacgtgttttgcagcccagtatagctattctgactgttactccagggtgggcttttgccaggcatgtctgatgacgtgagagccgccgggaggtttcagggagtaaggggatggatgtaagtggcatgcaagcaggcattttagttagttccgaatagcaggtgcagccctgcagtggggtgaggcaatcagttacaaggcagccagcaattcat

SEQ ID NO: 570550 - DNA, 111 bp, Homo sapiens
ctggagcgagagtaaaaacggggacacagcccgagatcgcaggcgtcatcacccagggcacgaagactccagacatccatggacgatttttgttgaccagcgttctatcgt

SEQ ID NO: 570551 - DNA, 129 bp, Homo sapiens
  misc_feature (121)..(121): n is a, c, g, or t
cctcccagctctgtttcttgtcctcctggtattgggatttgaggtccaggggaccaaacagccccagcaagatgagatgcctagcccgaccttccttcacccaggtgaaggaatctctctnccagttac

SEQ ID NO: 570552 - DNA, 235 bp, Homo sapiens
ccgagtacaggagacaagtatcattaaatctcacagctccaaaacgtcacgagaactcactatcatgaggaaaggattaaggagatgctgtttaactatttgtgagggatcatacccccacccccacttttcacccctcaccgacagcataatccacccatcctccccaatctccatcttgcaacacccagtgccctccatgattaaatcaccttccacttggccccttatcgag

SEQ ID NO: 570553 - DNA, 293 bp, Homo sapiens
agggcccaaccccaacccccccccccccggggggggagggggggggggggccccgtttaaaattttgggccccccaggagggttcccccaaaaactttttggggggggcaaaaggctttggggggggggccccccccaaggggggggggggaaccccccccccccccccaggggggaaaaaatttgggggggggggccccctttacctcccccccggggggggtttccccggggggggttttgggtttttttttttttttttttccaaaaaacccaaaaattggtttttttga

SEQ ID NO: 570554 - DNA, 173 bp, Homo sapiens
tgcaggggtgaagaaagctcatcgttacaggcctggtagtgtggcgctccgtgaaattagagcgtatatcagaagtccactgaacttctgatatcgcaaacttcccttccagcgtctggtgcgaagaaattgctcaggactttcacacagatctgcgcttccagagcgcagct

SEQ ID NO: 570555 - DNA, 607 bp, Homo sapiens
ctttgggaggcctaggcgggtggatcacgaggtcaggaaatcgagaccatcctggctaacacgggtgaaaccccgtctctattaaaaaatagaaaaaattaggcgggcgtggtggtgagcgcctgtagtcccagctactcgagagcctgaggcaggagaatggcatgaacctggaaggcggagcttgcagtgagctgagatggtgccactgcactctaacctgggcgacagagtgagacaccgtctcaaaaaaaaaaacaaaaaacaaaaattatccaggtgtggcggtgggcgcctgtgaggcaggcgaatctcttgaacccgggaggcggaggttgcagtgagccaagatcacaccattgcactccagcctgggcaacaggagtgaaattccatctcaaaaagaaaccaaaaaaaacaaaaaaaaaacatgccgttggagtactgggttttgggtgtggtccaaggaaaattaaaaacctgtagcatgaataatgttgtttttcatttcgaatcttgtgactgttttaaatatatcgctcttaagagacggtgaagttcctatatcaagtttttagtatggttgttttaaagctgtttttaatac

SEQ ID NO: 570556 - DNA, 138 bp, Homo sapiens
cgactgtcaaacaatgacctacagtactcgtgaagaggctgttgctctgcccttgccggtgcctccgtagacggcgtctcgctgctggccctcatgggagtcccccctgttagaccttcagcccgatctctctgtgcc

SEQ ID NO: 570557 - DNA, 367 bp, Homo sapiens
  misc_feature (345)..(345): n is a, c, g, or t
  misc_feature (367)..(367): n is a, c, g, or t
ggcgctgtaggaattctgcacgaggatagagggaggggagattacatccttgagtgtccatggggcgccgccccgccccctgtgcaccctctcgccagactcccgcagaggcaagcgtccgtcttgcattggtgcccctgatgccaagattaccgggacccccgcgaggctggtttatttctagcccacccaccttgcgctttgcggttcacaagaagtgaaccccggccggtgacgccattatgtctcccgaagaggagctggaccgtttccaaccggagacttttgggaagagggcggctgaactggctttcatatacgtgggcgggtacaccccttacaccnccagttgttcccttagttgccn

SEQ ID NO: 570558 - DNA, 383 bp, Homo sapiens
cacggtggctcacgcctataatcccaacactttgggaggccgaggtgggtggatcacgaggtcaggagctcaagaccagcctgaccaacatggtgaaaccccgtttctactaaaaatacaaaaattagctgggcatggtggtgcacacctgtaatcccagctactcaggaggctgaggcagaagaatcacttgaacccaggaggcagaggttgcagtgagccgagattgtgccattgcactccagcctgggtgacagagcaagactccatctcaacaacaagaacaaaaacaacaaaaaaataaaacacttgtataagtgatcatcacttctcactggcgctaaggcaataattaaggcatatgtttaacatgtcctctgact

SEQ ID NO: 570559 - DNA, 197 bp, Homo sapiens
  misc_feature (185)..(185): n is a, c, g, or t
cctaaggacctttgagagacagaagggcagttgcgaatctataatcagtggacttctgataacgtctaatttcacggagcgcacagtacagtcctgtaacgatgaggtttcttcaccctccagtagagggggcactcttgcgagcggctttctgtagcccagttgcttcctggggtgctttaccnacctggtcgatt

SEQ ID NO: 570560 - DNA, 451 bp, Homo sapiens
caagattgaggacattttattttaggttaacctcagtttctcctgtgatttttatgagtattaacattttaacacaagcattgcttttatggttgagttgatttaatggtataatatttcttattcccacagaattatatttaatttttatcctcaagaggtaaaggattggctgggcatggtggctcatgcctgtaatcccagcactttggaaggccgaggtggtagatcacgaggtcaggagatcgagaccatcctggcaaccatggtagactcccatgtttactaaaaatacaaaaggttagccaagtgtggtggcatgcacctgttgtccatgctactttggaggctgaggcaggataaccgcttgaacccgggaggcagaggtcgcagtgagccgagatcataccactacactccagcctgggccacagagtgagactccgtctca

SEQ ID NO: 570561 - DNA, 108 bp, Homo sapiens
tctaatattccgaaagcaagggctatgagcagtccgacaattcggaaaccatagctcgccataatttacacgctctatgcacatattaaaatacatttaaacagtact

SEQ ID NO: 570562 - DNA, 150 bp, Homo sapiens
tgacgcactggaggtggagtgcagtggcacgatcttagctcactgcagcctcaaactcccgggatcaagcaattatcccacctaagtctccctagtagctaggactacaagttgcactccaacatgcacggctcattttttttttttttt

SEQ ID NO: 570563 - DNA, 111 bp, Homo sapiens
aacccgggcgggggggcaagcccgaaaggcgcccttttttttcccctttggttttttccctaaatccggggtccctttttttaatgaaaatttaaagggttccctttttta

SEQ ID NO: 570564 - DNA, 155 bp, Homo sapiens
  misc_feature (1)..(1): n is a, c, g, or t
nccctaatcgctttcggcttgtaaagatcagatggtatgtatgatacgcggcattatttctgagggctctgttctgttccattggtctatatgtctgtcttggtaccagtaccatgctgttttggttactgtagccttgtagtatagtttgaagt

SEQ ID NO: 570565 - DNA, 187 bp, Homo sapiens
ccccctgggttttagtttcagggcccccaggactccaaaaaatcccctttgtcagtgtggtatccaaggcaaagtttaggggccagggaggaccagaacccatctaaatggtcaaagggcctgcaaaaggagatgtggcccttcctccccctcattgaggacttaataaattgggtttatcccccca

SEQ ID NO: 570566 - DNA, 759 bp, Homo sapiens
ttatcctgatcttctggtagaatgcttgcacattctatgcctacaactaagagacaggggccactatacatttgcctagacctacagcgatgccttttctcaaaacagaaaagccaaacaaataaatctcattcacctgagcatatattaccttttcaccacataacatgatctcatagattccctgagtgaaagcagcaaagaggcaggtggcgggaaaacaacctgaaccttccaaagatggctaaaaaaaattgatgctttcggtctggattccctgaggagactagcctggcgaacatcatcccttggtctgtggggaatttgaggaatccctagtaatagcttcataacagatttgagattagtgaggaacaagccatatctgttcacataagggcgaaattcctgatcccccctcatgcaggggaaggcccagaatataaattctgtaaccacccgtcacccaagcgcaaataccagcctgatggccaagttgcaggcacagaaccattggctccaccaccttaccaatcatctaaatactgccaccttaaatcaagttggtgcaaacccacctgaactatataaatgcaatgcatctcccccagaaaacatcgttggggttatgtgagtccaatcttgcgagtaaaagaatccccactggcctttttacttagggggagcggtgcggaaaattaaaaggaaagcccgaagggacattatttagaggattgcccgtcgataaaaattaggctg

SEQ ID NO: 570567 - DNA, 1176 bp, Homo sapiens
ggccgccgttcggtcaaagtgaccgaagcaggaggcaagggatgggtccctgagattgagtaatgggagccctgctgtgatcgtgcgtcagacgtcggggctgagaacagacccggaccagggatagattaccgggacggtctaccggaggccgaggatacgcaggagggtccacacagacaggaagaaaacccacgaggaagaaacctcagacagatacgccgaggggaggccagacgcagggatcccagcacatcacggagtgcgccggacggtagtgcaggatacccaaaggtgcgaaaaggaaagacaggccgaagggaagaaggtagagtgcaccaaccattgcaacgtccagacacaagccacgagaccaactgaacagtagagtgacatcagtccactatgacgacaataggcacacggacaggacatatgagcaaataggacaggacaatacacaagcacacaaacacggacactcaagagaagagagcgaacaaaaagaggcccagaagaaatacatacggaaagataagagaggagagaagcaggacgaaaccacataatacaaccacgaccaacgacaacgcgccccagccactagaacaacaacatacgtcaagaaacaaggcaagcggaacataagaaccgaagccgaaacgacggcacagacaagcagatagaggagctaagagaagaagataggcaaaaagcacacacgacgccagccacacgcaaacagcagacagagaaaaaacaaaacaggacgaaccacgaaaagacaccaacgcgaacatgaaaaccagaacacacgcacaaacgcagaaacaacaaccagcataaaaacacacaacgaaaccaaacaaaaaaaacccacatcccaaaacccagaaggtggccataacgaagaaacagatacacaacaaaacgacacaccaaccgcaccgcacccaacacagaaccaccgaccgaacaaaaccatgaacaagacgactgaacacatgaccaaacgacgcacacacccagctcaacgcacatcagcaaaacaaaggacaacgaacatgagacgcgtgaaccagccagaacagaaagaagaaagaccacgccacaccgatcacagtacacgacagactagaaatacaaaagcaagaaagacacaacgcaacgaacaaa

SEQ ID NO: 570568 - DNA, 378 bp, Homo sapiens
tcggtgcacagccgggcagagcggttcctgtgcctcgtagccaccccgtagcagcccatcctgctggcggaagaaggtgggcccagggacaccatgatgtcgttgaggagcaggtcccccggggcagggccggcctgagataagactgtcacgctgcccattgctggagttttgggggcagtggctgtctcacgtgcgggctccagaggcactggcagagtgtgcacaatggccatggtggcagaggctcaggtctgccaggggctccggggcaacctgtgagcagggcattggtgtcagagtccctgcaccttgaggatcctccccctataagccttctcctgaccccctcctccagatagaacattccccatttag

SEQ ID NO: 570569 - DNA, 823 bp, Homo sapiens
  misc_feature (288)..(288): n is a, c, g, or t
  misc_feature (495)..(495): n is a, c, g, or t
ttgctatgcgccatatggttatcgtagttccactagtgtcacatgttgcaattcgcaccagtgtccgcatttgtggtggctcgtagttttgcttcgtgtgaggtgcacccatgcgcaacgtgctctgtcagtatggtagtcacacattgcctcagtctgtgcgagtggacaaaacgtacacaaactacttatgaataattctgactcacacactcctcacgttgtggcacaccgattgagactaccacaaatcttgggtgtacttagtacacacactatgtcagcgtntaacttgtgcgctcatgggtgcgatgagtcctacgttggcgcgtacatgagtgagatattggggctagcagactttcaccatgttcgagtacctagtgctatgttagtccgtgacaccatgtggtcatgttgggagacgtcttcccgctgcaaggttcattgcgcacatctagttaactgagccgcgatcagtctacgtggtcatcncacactggttcaatgggtcgattcccacgatctatgaatcgtgcagggatgcactacctggcagctccacattggtagtgcgtgacccgggacacttacctggatcggttgccgcaccgtggcctccagctgggcgaactaccggtgcgaggcctgtggttgtgactacccgcgtataacttatggttactccagagtaggtacagggacactcacacagcgcaatcacagacacatagacgcccggtgacatctacaagcccgacgggcgtaggtaggcgtactctggcagttgtcagtcacgccggcacgtgtcataaccggtctc

SEQ ID NO: 570570 - DNA, 748 bp, Homo sapiens
ttaaacaacatgatcctgaaaaactttgggtaaataatgaaattaaggcagaaatcaataagttctctgacaataatgagaacaaaggtaccacataccagaatctctggggcacagataaggcagtgttaagaggaaaattcatagcactaaatgctcagattaaaaaatcagatctcaaattaacaacctatgttcatgactgaaagaattagagaagcaaggacaggtcagccccaaggctcacaggagataagaaatatcaaaaataagagctgaactgaaggaaacatgagcatgtgaaaaaccattcaaaagctcaatgacatctaggagttggtttttcttgacacaaaacaacttgaacaacaggccattacggtagactaactaacacacacacaggaaaggagacgaacgatccaaatacacacaacttagaaactgctgacacaccgacatattactaccatcagaaatataccatagcaactgttcagaaaactaactatagagacaccttcttatggtaaacgaaaggttaagaaaaaccctagcgagatcataggactacatttccgtggtacacattaccaccctgccaaaggctggatgccagcgaacgaaactcgattaccatgaacagaaccactaacaaagcttctaacaattggcatcaggccatcaactcgcctacaaccaacacaagctgggacctatggatcccagtcactccaccaatgctccc

SEQ ID NO: 570571 - DNA, 120 bp, Homo sapiens
cagctcggtcctgtttttcatgcgtggcattacccctttattagagcatggcttggcaacctcctggcccggcagtttgaaggtcgacactcaaagtggggtggcactgacagcccaaaa

SEQ ID NO: 570572 - DNA, 449 bp, Homo sapiens
tacttttccagggcacttccaccctcttagtgtgtctgctgggcctgacaactacatggacagtaatgagaggttcccaggagaaagctactccagacttctcttactttttactgccgcagcagagaagccatttgattcatgcctactttagcatcattaatcacataccacacgacatcactttggaaagtcacttgcgactactgggactgggatttcacgtgtattatgatgaatttgaagcatcagtgtcatgtctgacattggagttcccataggaaaaggaagatccaaagaagcaggtggaactgaatgcttatatatgaagttggacaaaaagtaaattgtgaaaacgtgaccagacaaaggagcatgggctagggcagttagttgtggagaagtgactaggaagataaggattcgttcagcaaggtttgtttatggag

SEQ ID NO: 570573 - DNA, 785 bp, Homo sapiens
tttttttttattttgagacggtcttgctctgtcatccaggctggagtacagtggcgcattcatggcttactgcagcctcaacttcccagactcaagtgttcctcccacctcagcctcctgagcagttgggactacaggcgcatgcaccacacccgtctaattattttatttttttgtaaagacacggtctctctatgttgcctaggctggtgttgaacttctggccttaagtgatcctcccgcctcagcctcctaaagtgctagggttacaggtgtgaatcactacatctggcctaaatttaaaaaagtttttagtctacatccagtgacctatcagggatgcttgttattttatacaagctgctttgttatcatatcagcattctcttcagccagctccaaggcagatagtcacccctctctctgtgtggttggggtgggagcaggccccgtggagggagcggtgctgaggacatgtccctggcgttccgatgctgctccatcgaggaccccctggcctcaggaggaaggagcaggcgatgcagccccttagtgtggtcgtgttgactgacaggtggctgatgcctgagcgcgccctcttcttccatcttaggagacaccgtggtgaagaggaagcctgcttctctgatggcccctctgaagcggaaggaggagttctccttgttcaaggtgtctgatgatgaatataaagtaacaatctcgcctcagctgctcttggccacccagcgcttcctgtcccgaggtgaggcgggagggtggtccct

SEQ ID NO: 570574 - DNA, 166 bp, Homo sapiens
agtctttggtgtgagctctcttcaggagtgatctcgtgctgccactttctgtttaatatactcggctcagactgtacgaagcatagatataagtccctaccaagagggctgcagaggatgagtcacagagtcaggccgaagcaagttgaagtcaggttctctgcag

SEQ ID NO: 570575 - DNA, 485 bp, Homo sapiens
  misc_feature (85)..(85): n is a, c, g, or t
  misc_feature (126)..(126): n is a, c, g, or t
cctttagccgactttgtgtcaccgggggctagaccagctggtctgagactgcccggaacaaggccttccactcatcctgaggganacagacctttgcacccagtttccaagcaaggtcttaaaaanacttgactcagttgctcttctctgcccttaactagcttaaagttgtgcctctgtcctcttcgggcacggtgtcacctttcctgcctaccttctgcatctcgcttcaccaattgggtcccagtaacgctgtcatcctccaggttacgcgactgcagtacctcaatgcactcctggctacccgagcccagaacctgccacagtcccctgagaacaccgacctgcaggttattccaggcagccagaccaggctccttggtgagaagaccaccacagcggcaggtgagtgccaagtggtacatcgtgcatggtgtctggacctgagggccgtgagctcacacacacagacttgcactctcgcc

SEQ ID NO: 570576 - DNA, 390 bp, Homo sapiens
tccagcactgtttcatttcctgaattccttcttcctaactgtccattagcggctttgacaatagtgttagccagatagtctcctttctacacatataaggtgcaaaaataaaagattttaaactgcagcttgaaggaacaaagtattgttatgttggtcaggttttctatggattagacgttaaaaaacagtggcaatagaaatattggtactcttctctgtgagttgatatgaaggctggaaatcagccgcctaagatgatcatttaaaggtaggggatggggccaggcgccgtggctcacgcctgtaatcccagcactttggggggccaaggcaggcagaccacttgaggtcaggagttcgagaccagcctgaccaacgtgctgaaac

SEQ ID NO: 570577 - DNA, 239 bp, Homo sapiens
cccggggtttgaaatgaactcccccctgttgggggcatcccgggccccctggaaagtttttttttttaaaataaaacgggcaacgccccccccaaattaggggccccccttttcccccccccccccccggggacgctaaaaagtttccccccacccaagggccctttttttaaaaaaaaaatgttccccccccaaaagaggaacccccttttttttttaaaaggccaaaaggccgggga

SEQ ID NO: 570578 - DNA, 3945 bp, Homo sapiens
  misc_feature (3934)..(3934): n is a, c, g, or t
cggcacgaggggcagctgctggagctggcggcgcggcccgggcggctgcgggagcgggtgctggagctggcgcgcggcggcggcgacccctacagcgatctcagcaagggcgtgctgatctgatggaccgtgccaggacgtgctcacgcccctcgaagactgcttcatgctggacgccagcaccgtgctggacttcggtgtcctggccagcatcatgcagagcggccacacgcgcatcccggtgtacgaggaggagcgctccaacatcgtggacatgctctacctcaaggacttggccttcgtggatcccgaagactgcacgccgctcagcaccatcactcgtttctacaaccatccgctccacttcgtcttcaacgacaccaagctggacgctgtcctggaggaattcaagcgaggagacaccgtggtgaagaggaagcctgcttctctgatggcccctctgaagcggaaggaggagttctccttgttcaaggtgtctgatgatgaatataaagtaacaatctcgcctcagctgctcttggccacccagcgcttcctgtcccgagaagtggatgtattcagcccgctgcgcatctctgagaaggtcctgctgcacctgttgaagcatcccagtgtcaaccaggaagtgaggtttgacgagagcaaccggctggccacacaccactacctgtaccagcgcagccagccggtggattacttcattctcatcctgcagggcagggttgaagtggagatcgggaaagagggtctgaagtttgagaatggggccttcacgtactatggagtgtcggccctaactgtgccatcctcggttcaccagtccccggtgtcctcgctccagcccatccgccatgacctgcagcccgacccaggtgacggcacgcattcatctgcgtattgtcccgactacaccgtgagggcgctctctgatctgcagctcatcaaggttacgcgactgcagtacctcaatgcactcctggctacccgagcccagaacctgccacagtcccctgagaacaccgacctgcaggttattccaggcagccagaccaggctccttggtgagaagaccaccacagcggcagggtccagccacagcaggcccggcgtcccggtggaaggcagccctgggcggaacccaggcgtttaacggctcactaggcagccccagatctggggaacagatgagcacgtggggagctggagtgagctgagcagaagttttgtgcccgcctgcccccatcccctccaggccacgttttagatggcccttgtagttgcgggtcctgggtgtcctcagaactagacatcaatgcctggatccttcagccggccctgccctcctttaggagacaggagtcaccagggcacagccctccaggcccgcctcaggaaggaatgaaaggaatgccatcatctctagttcccagggcccagccttccccttctcccccggggcagggacagtgcggcatattcagattcagacctctttgggctgagccaccttgtgagtgcagttactgcctttgtgtggccgtgacctctatttgtttgcttttaatttgccaacctatcgctgctggcagcactttttgagcaagccgagagcacccattttggctgggggttcagatcgatggccttgtccatgttgtcctttctggcttccctgatggtgtcatgtttcagcgcatgcgccccagcctttcccatgtgccaaaccagaagctccactgcccgtaggctgtccctgtagccctgctccctccctggaggctgctcttctgattctgagagctggcctagtggtgctgagggcccctttctgcttctctgcccacctgctgagttgccactcgcagtgttgtcagttcccgtgttctgagaagaggtcatgcctgggaggaagggatcgtcatgctgcatcgaatcctctctccgccgtgtggcccccaggagagtagctgcctgttgcacctgctccacacctccccacagcctccctgcaggtgctgtgtggccgtgatgtgcagagagcagtgagggagggttcatgaaccaggtggatcctctttaaaaaaaaaaaagtttttgttatatctctagaacatttcaagtcttttcctttttttctgttcctagctatggggttttagagaagtgggaacaggaaggcatttgtctttttcttctagtttactacattttccttccgtagttcttcagctgtgtggaaacgggcatcacaaggacataggatcatagattgggtagggagggaggaggatttctggaacttttctcaaaggaatttggacccttataaatgggactgaaggtcaaaacaacagtgatatccttgcttagaaattgtcctcaaggaataaactctgagagcaagcccgggttggaaacagatgctttaaaatcctctctccagaacagtggttttttgtttgtttatttgagatggagtctcactctgtcacccaggctggagtgcagtggtgagatcttggctcactgcaacctccacctcccaggttcaagccattctcctgtctcagccccctgagtagctgggattacaggtgcccaccaccacacccggctaatttttgtatttttagtagagatggggtttcaccatgttggccaggctgatcttgaactcctgacctcaggtgatctgcctgccttggcctcccaaagtgctgggattataggtgtgagctaagatcagggattcttaaccttggctgcacaccagaatcacctggcaaattaaaaatacgtggacctgccaccagagcttgtgatttaatcagagtcggcatcagagttttcaattttttatttatttattattattattattattattattattattgagacaagatcttgctctgtcgcccagactggagtgcagtggtgtgatcacggcttgctgcagcctcgacctccctggttcaggccatcctgccacctcagcctcctgagtagtagggactacaggtaggcaccaccacacccagctaatacttttaatttttttttgtagagatagggtctcattatgttgcctggggtagtctcgaactcctaggctcaagcgatcctcctgcctcggcctcccaaagtgttgagattataggcgtgagccaccgtgcccagattcacagaagtttcatacacctttcacccaggttcccctaatgttaacagcttacatataaccttggtacatttatcaaaactaaaggtgcaatcatactaatagctagagtttatttggattttaccatttttcccaatgtcccttttctgctgcagcagccaatccaggatgccatactgcacttagagctgttgctttcttttttcctaactttatattttgaaataatttcagatgataggaagttgtaaaggtaagggccccacgcacccttcatctagtttccctccatggttacatcttatatggttgtaatgcagtattccaacaaagactctgacactggtgcgatgtgggtggacagtccaaatcatttgtcacatgtacatctgtgtaactaccactgcaatcaggataaagaagtcccatccccacaaggatctccctccccaccttccctaactcctggtaaccactaatcgttcatctcttcttattttgtcatttcaagaatgttgtataaatgggagcatagtgtgtaagcattcgggattgtcttttttcactcggcgtcattctcgggagatcatccaggcattgcatgtgtcaacagtttgctcctttttattgctgagtggtattccgtggtgtatgcattggccccctgaaggacacctgggatgtttccagtttggggctattccaaataaagctgctacgactatcttngagaaaaaaaa

SEQ ID NO: 570579 - DNA, 317 bp, Homo sapiens
tgctgtgagacacttggttttgtgcttgtgtctggtccaggtcgggatggactatttgtgtgctgatcttagaatgcttgcctgtctcttccatcctagcttgctctctctggctatcttcttcttttctacttcttatccacttgcaacatcactttcctatgagagaaaagagataaagtcatttccaagtaaagaggcagcatttattgccctgcaccctgtatttgcccttagcatttaccaacggaaatggaagtgattcagtcttctctcacatcacagaactatagtgtgatgtgagagtctccgtcaaa

SEQ ID NO: 570580 - DNA, 405 bp, Homo sapiens
cattcagtccgtcaggaaaactgtggtatgtctgtgtgttatggtaaaatatttatcctgggcggaagacggtataaggtagtactctcagactctattctctgtttttatcctgcaacaagtatcatcacaggggtagttgcaatgctcatgccattgtcctatcatggttgtgtgtactattcatagatacattgagaaatgctttaaacttgtaagacaggatacctcaccgatgaagccacactgattctagatgggaggtttttaaaactctacagtgggatctttacatatctcctttgtgccatatgtcaaaaaatataattaataattattttgtccttctcctcactaatatctatctttctatactttaattaatcttttcctataattgaaaaa

SEQ ID NO: 570581 - DNA, 269 bp, Homo sapiens
ggtccccaggcccccagggccatgccagggaaaggaaaagctcccctgaatcccgaggacccagtcccctgggtacttgctcatgggatgttgcaaaaaacacaaagtgggccttaaacatttttcaagtcatcagggtcccccttccagaatgttcaggtccccccccatttttgggtaatgtaatgaataaggcttttttcatttgtttttgaacccttgggaatttttatgcagggctttaaaaaaaaataagtgattcaatttta

SEQ ID NO: 570582 - DNA, 3615 bp, Homo sapiens
  misc_feature (3604)..(3604): n is a, c, g, or t
cggcacgaggggcagctgctggagctggcggcgcggcccgggcggctgcgggagcgggtgctggagctggcgcgcggcggcggcgacccctacagcgatctcagcaagggcgtgctgatctgatggaccgtgccaggacgtgctcacgcccctcgaagactgcttcatgctggacgccagcaccgtgctggacttcggtgtcctggccagcatcatgcagagcggccacacgcgcatcccggtgtacgaggaggagcgctccaacatcgtggacatgctctacctcaaggacttggccttcgtggatcccgaagactgcacgccgctcagcaccatcactcgtttctacaaccatccgctccacttcgtcttcaacgacaccaagctggacgctgtcctggaggaattcaagcgaggagacaccgtggtgaagaggaagcctgcttctctgatggcccctctgaagcggaaggaggagttctccttgttcaaggtgtctgatgatgaatataaagtaacaatctcgcctcagctgctcttggccacccagcgcttcctgtcccgagaagtggatgtattcagcccgctgcgcatctctgagaaggtcctgctgcacctgttgaagcatcccagtgtcaaccaggaagtgaggtttgacgagagcaaccggctggccacacaccactacctgtaccagcgcagccagccggtggattacttcattctcatcctgcagggcagggttgaagtggagatcgggaaagagggtctgaagtttgagaatggggccttcacgtactatggagtgtcggccctaactgtgccatcctcggttcaccagtccccggtgtcctcgctccagcccatccgccatgacctgcagcccgacccaggtgacggcacgcattcatctgcgtattgtcccgactacaccgtgagggcgctctctgatctgcagctcatcaaggttacgcgactgcagtacctcaatgcactcctggctacccgagcccagaacctgccacagtcccctgagaacaccgacctgcaggttattccaggcagccagaccaggctccttggtgagaagaccaccacagcggcagggtccagccacagcaggcccagccttccccttctcccccggggcagggacagtgcggcatattcagattcagacctctttgggctgagccaccttgtgagtgcagttactgcctttgtgtggccgtgacctctatttgtttgcttttaatttgccaacctatcgctgctggcagcactttttgagcaagccgagagcacccattttggctgggggttcagatcgatggccttgtccatgttgtcctttctggcttccctgatggtgtcatgtttcagcgcatgcgccccagcctttcccatgtgccaaaccagaagctccactgcccgtaggctgtccctgtagccctgctccctccctggaggctgctcttctgattctgagagctggcctagtggtgctgagggcccctttctgcttctctgcccacctgctgagttgccactcgcagtgttgtcagttcccgtgttctgagaagaggtcatgcctgggaggaagggatcgtcatgctgcatcgaatcctctctccgccgtgtggcccccaggagagtagctgcctgttgcacctgctccacacctccccacagcctccctgcaggtgctgtgtggccgtgatgtgcagagagcagtgagggagggttcatgaaccaggtggatcctctttaaaaaaaaaaaagtttttgttatatctctagaacatttcaagtcttttcctttttttctgttcctagctatggggttttagagaagtgggaacaggaaggcatttgtctttttcttctagtttactacattttccttccgtagttcttcagctgtgtggaaacgggcatcacaaggacataggatcatagattgggtagggagggaggaggatttctggaacttttctcaaaggaatttggacccttataaatgggactgaaggtcaaaacaacagtgatatccttgcttagaaattgtcctcaaggaataaactctgagagcaagcccgggttggaaacagatgctttaaaatcctctctccagaacagtggttttttgtttgtttatttgagatggagtctcactctgtcacccaggctggagtgcagtggtgagatcttggctcactgcaacctccacctcccaggttcaagccattctcctgtctcagccccctgagtagctgggattacaggtgcccaccaccacacccggctaatttttgtatttttagtagagatggggtttcaccatgttggccaggctgatcttgaactcctgacctcaggtgatctgcctgccttggcctcccaaagtgctgggattataggtgtgagctaagatcagggattcttaaccttggctgcacaccagaatcacctggcaaattaaaaatacgtggacctgccaccagagcttgtgatttaatcagagtcggcatcagagttttcaattttttatttatttattattattattattattattattattattgagacaagatcttgctctgtcgcccagactggagtgcagtggtgtgatcacggcttgctgcagcctcgacctccctggttcaggccatcctgccacctcagcctcctgagtagtagggactacaggtaggcaccaccacacccagctaatacttttaatttttttttgtagagatagggtctcattatgttgcctggggtagtctcgaactcctaggctcaagcgatcctcctgcctcggcctcccaaagtgttgagattataggcgtgagccaccgtgcccagattcacagaagtttcatacacctttcacccaggttcccctaatgttaacagcttacatataaccttggtacatttatcaaaactaaaggtgcaatcatactaatagctagagtttatttggattttaccatttttcccaatgtcccttttctgctgcagcagccaatccaggatgccatactgcacttagagctgttgctttcttttttcctaactttatattttgaaataatttcagatgataggaagttgtaaaggtaagggccccacgcacccttcatctagtttccctccatggttacatcttatatggttgtaatgcagtattccaacaaagactctgacactggtgcgatgtgggtggacagtccaaatcatttgtcacatgtacatctgtgtaactaccactgcaatcaggataaagaagtcccatccccacaaggatctccctccccaccttccctaactcctggtaaccactaatcgttcatctcttcttattttgtcatttcaagaatgttgtataaatgggagcatagtgtgtaagcattcgggattgtcttttttcactcggcgtcattctcgggagatcatccaggcattgcatgtgtcaacagtttgctcctttttattgctgagtggtattccgtggtgtatgcattggccccctgaaggacacctgggatgtttccagtttggggctattccaaataaagctgctacgactatcttngagaaaaaaaa

SEQ ID NO: 570583 - DNA, 670 bp, Homo sapiens
  misc_feature (263)..(263): n is a, c, g, or t
ggacgagcgtggtgaagatggcgtaccagatgttgtggggtggagtacctgcagaatccgaccggcttaagcgacgctgtacaccatcgtggctgtatcctcacgcaccggctgctcggtgcgagtttggaattgatcacatgcttattcgagttgtacattgcaatccgtgagttattctttatactgactttgaaactatggagattaattcaccacacttctcatgtgtggggccagtcggatccgattctcggatatanacagtgagtctggactatagtcgatatactgtacggaaatgctatagagagaggctctgtctctcgaggatctgaatcagcagtactgtgtatttatgttccttttgggtggtattctttaactgacccttgttggtctgtaagtgagctgagacaacgggggccaggcctttacaataatgctcgtctatgtgtggagccgagaggaacccctatgtccgcatgaacttcttcggccttctcaacttccaggccccctttctgccctgggtgctcatgggattttccttgtagtggggaactcaatcattgtggaccttttgggtattgcagttggacacatatagtattcttggaagatgtatttcccaatcaagctggtggaataagaattctgaaaacaccat

SEQ ID NO: 570584 - DNA, 4142 bp, Homo sapiens
  misc_feature (4131)..(4131): n is a, c, g, or t
tttttttttattttgagacggtcttgctctgtcatccaggctggagtacagtggcgcattcatggcttactgcagcctcaacttcccagactcaagtgttcctcccacctcagcctcctgagcagttgggactacaggcgcatgcaccacacccgtctaattattttatttttttgtaaagacacggtctctctatgttgcctaggctggtgttgaacttctggccttaagtgatcctcccgcctcagcctcctaaagtgctagggttacaggtgtgaatcactacatctggcctaaatttaaaaaagtttttagtctacatccagtgacctatcagggatgcttgttattttatacaagctgctttgttatcatatcagcattctcttcagccagctccaaggcagatagtcacccctctctctgtgtggttggggtgggagcaggccccgtggagggagcggtgctgaggacatgtccctggcgttccgatgctgctccatcgaggaccccctggcctcaggaggaaggagcaggcgatgcagccccttagtgtggtcgtgttgactgacaggtggctgatgcctgagcgcgccctcttcttccatcttaggagacaccgtggtgaagaggaagcctgcttctctgatggcccctctgaagcggaaggaggagttctccttgttcaaggtgtctgatgatgaatataaagtaacaatctcgcctcagctgctcttggccacccagcgcttcctgtcccgagaagtggatgtattcagcccgctgcgcatctctgagaaggtcctgctgcacctgttgaagcatcccagtgtcaaccaggaagtgaggtttgacgagagcaaccggctggccacacaccactacctgtaccagcgcagccagccggtggattacttcattctcatcctgcagggcagggttgaagtggagatcgggaaagagggtctgaagtttgagaatggggccttcacgtactatggagtgtcggccctaactgtgccatcctcggttcaccagtccccggtgtcctcgctccagcccatccgccatgacctgcagcccgacccaggtgacggcacgcattcatctgcgtattgtcccgactacaccgtgagggcgctctctgatctgcagctcatcaaggttacgcgactgcagtacctcaatgcactcctggctacccgagcccagaacctgccacagtcccctgagaacaccgacctgcaggttattccaggcagccagaccaggctccttggtgagaagaccaccacagcggcagggtccagccacagcaggcccggcgtcccggtggaaggcagccctgggcggaacccaggcgtttaacggctcactaggcagccccagatctggggaacagatgagcacgtggggagctggagtgagctgagcagaagttttgtgcccgcctgcccccatcccctccaggccacgttttagatggcccttgtagttgcgggtcctgggtgtcctcagaactagacatcaatgcctggatccttcagccggccctgccctcctttaggagacaggagtcaccagggcacagccctccaggcccgcctcaggaaggaatgaaaggaatgccatcatctctagttcccagggcccagccttccccttctcccccggggcagggacagtgcggcatattcagattcagacctctttgggctgagccaccttgtgagtgcagttactgcctttgtgtggccgtgacctctatttgtttgcttttaatttgccaacctatcgctgctggcagcactttttgagcaagccgagagcacccattttggctgggggttcagatcgatggccttgtccatgttgtcctttctggcttccctgatggtgtcatgtttcagcgcatgcgccccagcctttcccatgtgccaaaccagaagctccactgcccgtaggctgtccctgtagccctgctccctccctggaggctgctcttctgattctgagagctggcctagtggtgctgagggcccctttctgcttctctgcccacctgctgagttgccactcgcagtgttgtcagttcccgtgttctgagaagaggtcatgcctgggaggaagggatcgtcatgctgcatcgaatcctctctccgccgtgtggcccccaggagagtagctgcctgttgcacctgctccacacctccccacagcctccctgcaggtgctgtgtggccgtgatgtgcagagagcagtgagggagggttcatgaaccaggtggatcctctttaaaaaaaaaaaagtttttgttatatctctagaacatttcaagtcttttcctttttttctgttcctagctatggggttttagagaagtgggaacaggaaggcatttgtctttttcttctagtttactacattttccttccgtagttcttcagctgtgtggaaacgggcatcacaaggacataggatcatagattgggtagggagggaggaggatttctggaacttttctcaaaggaatttggacccttataaatgggactgaaggtcaaaacaacagtgatatccttgcttagaaattgtcctcaaggaataaactctgagagcaagcccgggttggaaacagatgctttaaaatcctctctccagaacagtggttttttgtttgtttatttgagatggagtctcactctgtcacccaggctggagtgcagtggtgagatcttggctcactgcaacctccacctcccaggttcaagccattctcctgtctcagccccctgagtagctgggattacaggtgcccaccaccacacccggctaatttttgtatttttagtagagatggggtttcaccatgttggccaggctgatcttgaactcctgacctcaggtgatctgcctgccttggcctcccaaagtgctgggattataggtgtgagctaagatcagggattcttaaccttggctgcacaccagaatcacctggcaaattaaaaatacgtggacctgccaccagagcttgtgatttaatcagagtcggcatcagagttttcaattttttatttatttattattattattattattattattattattgagacaagatcttgctctgtcgcccagactggagtgcagtggtgtgatcacggcttgctgcagcctcgacctccctggttcaggccatcctgccacctcagcctcctgagtagtagggactacaggtaggcaccaccacacccagctaatacttttaatttttttttgtagagatagggtctcattatgttgcctggggtagtctcgaactcctaggctcaagcgatcctcctgcctcggcctcccaaagtgttgagattataggcgtgagccaccgtgcccagattcacagaagtttcatacacctttcacccaggttcccctaatgttaacagcttacatataaccttggtacatttatcaaaactaaaggtgcaatcatactaatagctagagtttatttggattttaccatttttcccaatgtcccttttctgctgcagcagccaatccaggatgccatactgcacttagagctgttgctttcttttttcctaactttatattttgaaataatttcagatgataggaagttgtaaaggtaagggccccacgcacccttcatctagtttccctccatggttacatcttatatggttgtaatgcagtattccaacaaagactctgacactggtgcgatgtgggtggacagtccaaatcatttgtcacatgtacatctgtgtaactaccactgcaatcaggataaagaagtcccatccccacaaggatctccctccccaccttccctaactcctggtaaccactaatcgttcatctcttcttattttgtcatttcaagaatgttgtataaatgggagcatagtgtgtaagcattcgggattgtcttttttcactcggcgtcattctcgggagatcatccaggcattgcatgtgtcaacagtttgctcctttttattgctgagtggtattccgtggtgtatgcattggccccctgaaggacacctgggatgtttccagtttggggctattccaaataaagctgctacgactatcttngagaaaaaaaa

SEQ ID NO: 570585 - DNA, 216 bp, Homo sapiens
agcggacaatcacttgagcacaggaggcggaggctacagtgagctgagatcctccactgcactccagcctggaagacagagtgagagtgcagtggcgcaaactcagctcacagcaacctccctttctttctttttttttttggaaagggattctggctctgtggccaaggtggaattgcaggggtgcaatcttggttcatggaaacttctctctct

SEQ ID NO: 570586 - DNA, 2348 bp, Homo sapiens
cggcacgaggggcagctgctggagctggcggcgcggcccgggcggctgcgggagcgggtgctggagctggcgcgcggcggcggcgacccctacagcgatctcagcaagggcgtgctgatctgatggaccgtgccaggacgtgctcacgcccctcgaagactgcttcatgctggacgccagcaccgtgctggacttcggtgtcctggccagcatcatgcagagcggccacacgcgcatcccggtgtacgaggaggagcgctccaacatcgtggacatgctctacctcaaggacttggccttcgtggatcccgaagactgcacgccgctcagcaccatcactcgtttctacaaccatccgctccacttcgtcttcaacgacaccaagctggacgctgtcctggaggaattcaagcgaggagacaccgtggtgaagaggaagcctgcttctctgatggcccctctgaagcggaaggaggagttctccttgttcaaggtgtctgatgatgaatataaagtaacaatctcgcctcagctgctcttggccacccagcgcttcctgtcccgagaagtggatgtattcagcccgctgcgcatctctgagaaggtcctgctgcacctgttgaagcatcccagtgtcaaccaggaagtgaggtttgacgagagcaaccggctggccacacaccactacctgtaccagcgcagccagccggtggattacttcattctcatcctgcagggcagggttgaagtggagatcgggaaagagggtctgaagtttgagaatggggccttcacgtactatggagtgtcggccctaactgtgccatcctcggttcaccagtccccggtgtcctcgctccagcccatccgccatgacctgcagcccgacccaggtgacggcacgcattcatctgcgtattgtcccgactacaccgtgagggcgctctctgatctgcagctcatcaaggttacgcgactgcagtacctcaatgcactcctggctacccgagcccagaacctgccacagtcccctgagaacaccgacctgcaggttattccaggcagccagaccaggctccttggtgagaagaccaccacagcggcagggtccagccacagcaggcccggcgtcccggtggaaggcagccctgggcggaacccaggcgtttaacggctcactaggcagccccagatctggggaacagatgagcacgtggggagctggagtgagctgagcagaagttttgtgcccgcctgcccccatcccctccaggccacgttttagatggcccttgtagttgcgggtcctgggtgtcctcagaactagacatcaatgcctggatccttcagccggccctgccctcctttaggagacaggagtcaccagggcacagccctccaggcccgcctcaggaaggaatgaaaggaatgccatcatctctagttcccagggcccagccttccccttctcccccggggcagggacagtgcggcatattcagattcagacctctttgggctgagccaccttgtgagtgcagttactgcctttgtgtggccgtgacctctatttgtttgcttttaatttgccaacctatcgctgctggcagcactttttgagcaagccgagagcacccattttggctgggggttcagatcgatggccttgtccatgttgtcctttctggcttccctgatggtgtcatgtttcagcgcatgcgccccagcctttcccatgtgccaaaccagaagctccactgcccgtaggctgtccctgtagccctgctccctccctggaggctgctcttctgattctgagagctggcctagtggtgctgagggcccctttctgcttctctgcccacctgctgagttgccactcgcagtgttgtcagttcccgtgttctgagaagaggtcatgcctgggaggaagggatcgtcatgctgcatcgaatcctctctccgccgtgtggcccccaggagagtagctgcctgttgcacctgctccacacctccccacagcctccctgcaggtgctgtgtggccgtgatgtgcagagagcagtgagggagggttcatgaaccaggtggatcctctttaaaaaaaaaaaagtttttgttatatctctaacacccacccccccctctacccccccactccccctccccttcccctcctcccctactctcctcctcctcttccgcccccactcctctcctactcccaccacactgggggcccgccttggcccaatcctctctaacttcccccagtctttcctctgcccccaatctagctcacttgcccttcccctctatccggcgcgcattccatctcctggccgggct

SEQ ID NO: 570587 - DNA, 2164 bp, Homo sapiens
cggcacgaggggcagctgctggagctggcggcgcggcccgggcggctgcgggagcgggtgctggagctggcgcgcggcggcggcgacccctacagcgatctcagcaagggcgtgctgatctgatggaccgtgccaggacgtgctcacgcccctcgaagactgcttcatgctggacgccagcaccgtgctggacttcggtgtcctggccagcatcatgcagagcggccacacgcgcatcccggtgtacgaggaggagcgctccaacatcgtggacatgctctacctcaaggacttggccttcgtggatcccgaagactgcacgccgctcagcaccatcactcgtttctacaaccatccgctccacttcgtcttcaacgacaccaagctggacgctgtcctggaggaattcaagcgaggagacaccgtggtgaagaggaagcctgcttctctgatggcccctctgaagcggaaggaggagttctccttgttcaaggtgtctgatgatgaatataaagtaacaatctcgcctcagctgctcttggccacccagcgcttcctgtcccgagaagtggatgtattcagcccgctgcgcatctctgagaaggtcctgctgcacctgttgaagcatcccagtgtcaaccaggaagtgaggtttgacgagagcaaccggctggccacacaccactacctgtaccagcgcagccagccggtggattacttcattctcatcctgcagggcagggttgaagtggagatcgggaaagagggtctgaagtttgagaatggggccttcacgtactatggagtgtcggccctaactgtgccatcctcggttcaccagtccccggtgtcctcgctccagcccatccgccatgacctgcagcccgacccaggtgacggcacgcattcatctgcgtattgtcccgactacaccgtgagggcgctctctgatctgcagctcatcaaggttacgcgactgcagtacctcaatgcactcctggctacccgagcccagaacctgccacagtcccctgagaacaccgacctgcaggttattccaggcagccagaccaggctccttggtgagaagaccaccacagcggcagggtccagccacagcaggcccggcgtcccggtggaaggcagccctgggcggaacccaggcgtttaacggctcactaggcagccccagatctggggaacagatgagcacgtggggagctggagtgagctgagcagaagttttgtgcccgcctgcccccatcccctccaggccacgttttagatggcccttgtagttgcgggtcctgggtgtcctcagaactagacatcaatgcctggatccttcagccggccctgccctcctttaggagacaggagtcaccagggcacagccctccaggcccgcctcaggaaggaatgaaaggaatgccatcatctctagttcccagggcccagccttccccttctcccccggggcagggacagtgcggcatattcagattcagacctctttgggctgagccaccttgtgagtgcagttactgcctttgtgtggccgtgacctctatttgtttgcttttaatttgccaacctatcgctgctggcagcactttttgagcaagccgagagcacccattttggctgggggttcagatcgatggccttgtccatgttgtcctttctggcttccctgatggtgtcatgtttcagcgcatgcgccccagcctttcccatgtgccaaaccagaagctccactgcccgtaggctgtccctgtagccctgctccctccctggaggctgctcttctgattctgagagctggcctagtggtgctgagggcccctttctgcttctctgcccacctgctgagttgccactcgcagtgttgtcagttcccgtgttctgagaagaggtcatgcctgggaggaagggatcgtcatgctgcatcgaatcctctctccgccgtgtggcccccaggagagtagctgcctgttgcacctgctccacacctccccacagcctccctgcaggtgctgtgtggccgtgatgtgcagagagcagtgagggagggttcatgaaccaggtggatcctctttaaaaaaaaaaagtcggatacaattcactggcccgcgtttaccgtcgtgactggccctggcgtccc

SEQ ID NO: 570588 - DNA, 3833 bp, Homo sapiens
  misc_feature (3822)..(3822): n is a, c, g, or t
tttttttttaaagatagggtctcgctctgtcacccaggctggagtgcagtggcacgatgttggctcactgcaacctccgccttctgggttcaagtgattctcctgcctcagcctcccaagtagctgggattacaggcgtgtatcaccacgcccagctaatttttgtatttttagtagaggcggggttttgccatattggccaggctggtctccaactcctgactgcaggtgatccacctgcctcagcctccgaaagtgttgggattaaggcgtgagccaccgcacctggcccctgcctagttctcttgtgttgaggtgttaggggcagctgctcacaggccacccgggagatccctggtgggcacaataactttaaattgcctacagtgttgggtgtggttccactggccactaggccccagtggacactgtcccttttttccaccacgtgcagaagtggatgtattcagcccgctgcgcatctctgagaaggtcctgctgcacctgttgaagcatcccagtgtcaaccaggaagtgaggtttgacgagagcaaccggctggccacacaccactacctgtaccagcgcagccagccggtggattacttcattctcatcctgcagggcagggttgaagtggagatcgggaaagagggtctgaagtttgagaatggggccttcacgtactatggagtgtcggccctaactgtgccatcctcggttcaccagtccccggtgtcctcgctccagcccatccgccatgacctgcagcccgacccaggtgacggcacgcattcatctgcgtattgtcccgactacaccgtgagggcgctctctgatctgcagctcatcaaggttacgcgactgcagtacctcaatgcactcctggctacccgagcccagaacctgccacagtcccctgagaacaccgacctgcaggttattccaggcagccagaccaggctccttggtgagaagaccaccacagcggcagggtccagccacagcaggcccggcgtcccggtggaaggcagccctgggcggaacccaggcgtttaacggctcactaggcagccccagatctggggaacagatgagcacgtggggagctggagtgagctgagcagaagttttgtgcccgcctgcccccatcccctccaggccacgttttagatggcccttgtagttgcgggtcctgggtgtcctcagaactagacatcaatgcctggatccttcagccggccctgccctcctttaggagacaggagtcaccagggcacagccctccaggcccgcctcaggaaggaatgaaaggaatgccatcatctctagttcccagggcccagccttccccttctcccccggggcagggacagtgcggcatattcagattcagacctctttgggctgagccaccttgtgagtgcagttactgcctttgtgtggccgtgacctctatttgtttgcttttaatttgccaacctatcgctgctggcagcactttttgagcaagccgagagcacccattttggctgggggttcagatcgatggccttgtccatgttgtcctttctggcttccctgatggtgtcatgtttcagcgcatgcgccccagcctttcccatgtgccaaaccagaagctccactgcccgtaggctgtccctgtagccctgctccctccctggaggctgctcttctgattctgagagctggcctagtggtgctgagggcccctttctgcttctctgcccacctgctgagttgccactcgcagtgttgtcagttcccgtgttctgagaagaggtcatgcctgggaggaagggatcgtcatgctgcatcgaatcctctctccgccgtgtggcccccaggagagtagctgcctgttgcacctgctccacacctccccacagcctccctgcaggtgctgtgtggccgtgatgtgcagagagcagtgagggagggttcatgaaccaggtggatcctctttaaaaaaaaaaaagtttttgttatatctctagaacatttcaagtcttttcctttttttctgttcctagctatggggttttagagaagtgggaacaggaaggcatttgtctttttcttctagtttactacattttccttccgtagttcttcagctgtgtggaaacgggcatcacaaggacataggatcatagattgggtagggagggaggaggatttctggaacttttctcaaaggaatttggacccttataaatgggactgaaggtcaaaacaacagtgatatccttgcttagaaattgtcctcaaggaataaactctgagagcaagcccgggttggaaacagatgctttaaaatcctctctccagaacagtggttttttgtttgtttatttgagatggagtctcactctgtcacccaggctggagtgcagtggtgagatcttggctcactgcaacctccacctcccaggttcaagccattctcctgtctcagccccctgagtagctgggattacaggtgcccaccaccacacccggctaatttttgtatttttagtagagatggggtttcaccatgttggccaggctgatcttgaactcctgacctcaggtgatctgcctgccttggcctcccaaagtgctgggattataggtgtgagctaagatcagggattcttaaccttggctgcacaccagaatcacctggcaaattaaaaatacgtggacctgccaccagagcttgtgatttaatcagagtcggcatcagagttttcaattttttatttatttattattattattattattattattattattgagacaagatcttgctctgtcgcccagactggagtgcagtggtgtgatcacggcttgctgcagcctcgacctccctggttcaggccatcctgccacctcagcctcctgagtagtagggactacaggtaggcaccaccacacccagctaatacttttaatttttttttgtagagatagggtctcattatgttgcctggggtagtctcgaactcctaggctcaagcgatcctcctgcctcggcctcccaaagtgttgagattataggcgtgagccaccgtgcccagattcacagaagtttcatacacctttcacccaggttcccctaatgttaacagcttacatataaccttggtacatttatcaaaactaaaggtgcaatcatactaatagctagagtttatttggattttaccatttttcccaatgtcccttttctgctgcagcagccaatccaggatgccatactgcacttagagctgttgctttcttttttcctaactttatattttgaaataatttcagatgataggaagttgtaaaggtaagggccccacgcacccttcatctagtttccctccatggttacatcttatatggttgtaatgcagtattccaacaaagactctgacactggtgcgatgtgggtggacagtccaaatcatttgtcacatgtacatctgtgtaactaccactgcaatcaggataaagaagtcccatccccacaaggatctccctccccaccttccctaactcctggtaaccactaatcgttcatctcttcttattttgtcatttcaagaatgttgtataaatgggagcatagtgtgtaagcattcgggattgtcttttttcactcggcgtcattctcgggagatcatccaggcattgcatgtgtcaacagtttgctcctttttattgctgagtggtattccgtggtgtatgcattggccccctgaaggacacctgggatgtttccagtttggggctattccaaataaagctgctacgactatcttngagaaaaaaaa

SEQ ID NO: 570589 - DNA, 735 bp, Homo sapiens
gaagactgttccggagccagttatcgcagaggagctaggaagcctttcccgtctgctgtcttccttttgactcagacacgtcctccagagctggcgtgcttgtgcattccctctgctttccttggacagtcccctcctttccatctacagagtgggagctttgaagaagtactcacagatcactagctgcacgagaagaaccatgcaagagaccggcttccaacctcagattgcagcaagctaggattgttggccacgggaatagaacgatagaagcttcaagcccacccacgttattatactgagaggacgacacagcacttcatctggtaaactacagcaatagagactgagaaggtatgctttgagctctgtactgaggccacgttaggggatggaaacgggtgaggctaaggcagggttacaggaacgtggaagagaaggtctgggagagaggaaaagtgtgaggctaggcaggcggctcatgcctgtagatcccaaggatctctgggaagcccaaagggcaggaggagtcattttggagtccagggagtgtagaacccgcagtccctggcgtgacaatagatgagaactttgtcgtctactacatgagggaaagaagcaccggttacaaacacggcttaggacgggaatggttgcgggggggagccattgcccagaccgggcaccccgtgacggaatgaccagggaggtgccgggggggggggcggcagg

SEQ ID NO: 570590 - DNA, 3695 bp, Homo sapiens
  misc_feature (3684)..(3684): n is a, c, g, or t
tttttttttaaagatagggtctcgctctgtcacccaggctggagtgcagtggcacgatgttggctcactgcaacctccgccttctgggttcaagtgattctcctgcctcagcctcccaagtagctgggattacaggcgtgaccgcacctggcccctgcctagttctcttgtgttgaggtgttaggggcagctgctcacaggccacccgggagatccctggtgggcacaataactttaaattgcctacagtgttgggtgtggttccactggccactaggccccagtggacactgtcccttttttccaccacgtgcagaagtggatgtattcagcccgctgcgcatctctgagaaggtcctgctgcacctgttgaagcatcccagtgtcaaccaggaagtgaggtttgacgagagcaaccggctggccacacaccactacctgtaccagcgcagccagccggtggattacttcattctcatcctgcagggcagggttgaagtggagatcgggaaagagggtctgaagtttgagaatggggccttcacgtactatggagtgtcggccctaactgtgccatcctcggttcaccagtccccggtgtcctcgctccagcccatccgccatgacctgcagcccgacccaggtgacggcacgcattcatctgcgtattgtcccgactacaccgtgagggcgctctctgatctgcagctcatcaaggttacgcgactgcagtacctcaatgcactcctggctacccgagcccagaacctgccacagtcccctgagaacaccgacctgcaggttattccaggcagccagaccaggctccttggtgagaagaccaccacagcggcagggtccagccacagcaggcccggcgtcccggtggaaggcagccctgggcggaacccaggcgtttaacggctcactaggcagccccagatctggggaacagatgagcacgtggggagctggagtgagctgagcagaagttttgtgcccgcctgcccccatcccctccaggccacgttttagatggcccttgtagttgcgggtcctgggtgtcctcagaactagacatcaatgcctggatccttcagccggccctgccctcctttaggagacaggagtcaccagggcacagccctccaggcccgcctcaggaaggaatgaaaggaatgccatcatctctagttcccagggcccagccttccccttctcccccggggcagggacagtgcggcatattcagattcagacctctttgggctgagccaccttgtgagtgcagttactgcctttgtgtggccgtgacctctatttgtttgcttttaatttgccaacctatcgctgctggcagcactttttgagcaagccgagagcacccattttggctgggggttcagatcgatggccttgtccatgttgtcctttctggcttccctgatggtgtcatgtttcagcgcatgcgccccagcctttcccatgtgccaaaccagaagctccactgcccgtaggctgtccctgtagccctgctccctccctggaggctgctcttctgattctgagagctggcctagtggtgctgagggcccctttctgcttctctgcccacctgctgagttgccactcgcagtgttgtcagttcccgtgttctgagaagaggtcatgcctgggaggaagggatcgtcatgctgcatcgaatcctctctccgccgtgtggcccccaggagagtagctgcctgttgcacctgctccacacctccccacagcctccctgcaggtgctgtgtggccgtgatgtgcagagagcagtgagggagggttcatgaaccaggtggatcctctttaaaaaaaaaaaagtttttgttatatctctagaacatttcaagtcttttcctttttttctgttcctagctatggggttttagagaagtgggaacaggaaggcatttgtctttttcttctagtttactacattttccttccgtagttcttcagctgtgtggaaacgggcatcacaaggacataggatcatagattgggtagggagggaggaggatttctggaacttttctcaaaggaatttggacccttataaatgggactgaaggtcaaaacaacagtgatatccttgcttagaaattgtcctcaaggaataaactctgagagcaagcccgggttggaaacagatgctttaaaatcctctctccagaacagtggttttttgtttgtttatttgagatggagtctcactctgtcacccaggctggagtgcagtggtgagatcttggctcactgcaacctccacctcccaggttcaagccattctcctgtctcagccccctgagtagctgggattacaggtgcccaccaccacacccggctaatttttgtatttttagtagagatggggtttcaccatgttggccaggctgatcttgaactcctgacctcaggtgatctgcctgccttggcctcccaaagtgctgggattataggtgtgagctaagatcagggattcttaaccttggctgcacaccagaatcacctggcaaattaaaaatacgtggacctgccaccagagcttgtgatttaatcagagtcggcatcagagttttcaattttttatttatttattattattattattattattattattattgagacaagatcttgctctgtcgcccagactggagtgcagtggtgtgatcacggcttgctgcagcctcgacctccctggttcaggccatcctgccacctcagcctcctgagtagtagggactacaggtaggcaccaccacacccagctaatacttttaatttttttttgtagagatagggtctcattatgttgcctggggtagtctcgaactcctaggctcaagcgatcctcctgcctcggcctcccaaagtgttgagattataggcgtgagccaccgtgcccagattcacagaagtttcatacacctttcacccaggttcccctaatgttaacagcttacatataaccttggtacatttatcaaaactaaaggtgcaatcatactaatagctagagtttatttggattttaccatttttcccaatgtcccttttctgctgcagcagccaatccaggatgccatactgcacttagagctgttgctttcttttttcctaactttatattttgaaataatttcagatgataggaagttgtaaaggtaagggccccacgcacccttcatctagtttccctccatggttacatcttatatggttgtaatgcagtattccaacaaagactctgacactggtgcgatgtgggtggacagtccaaatcatttgtcacatgtacatctgtgtaactaccactgcaatcaggataaagaagtcccatccccacaaggatctccctccccaccttccctaactcctggtaaccactaatcgttcatctcttcttattttgtcatttcaagaatgttgtataaatgggagcatagtgtgtaagcattcgggattgtcttttttcactcggcgtcattctcgggagatcatccaggcattgcatgtgtcaacagtttgctcctttttattgctgagtggtattccgtggtgtatgcattggccccctgaaggacacctgggatgtttccagtttggggctattccaaataaagctgctacgactatcttngagaaaaaaaa

SEQ ID NO: 570591 - DNA, 207 bp, Homo sapiens
agcagcatcagtgtagagcaaggaacggtccagggtatggcagggcagggacagggaggtccagggccagagtcaggtccaggacatgtacagggcagggccagaaacatgtcaggaccagaaaggggacagggcaagggcaaggccagagaaggaccatgttaaaaacatggccagggagggtccaggtcaagggcgagtccaggg

SEQ ID NO: 570592 - DNA, 3244 bp, Homo sapiens
  misc_feature (85)..(85): n is a, c, g, or t
  misc_feature (126)..(126): n is a, c, g, or t
  misc_feature (3233)..(3233): n is a, c, g, or t
cctttagccgactttgtgtcaccgggggctagaccagctggtctgagactgcccggaacaaggccttccactcatcctgaggganacagacctttgcacccagtttccaagcaaggtcttaaaaanacttgactcagttgctcttctctgcccttaactagcttaaagttgtgcctctgtcctcttcgggcacggtgtcacctttcctgcctaccttctgcatctcgcttcaccaattgggtcccagtaacgctgtcatcctccaggttacgcgactgcagtacctcaatgcactcctggctacccgagcccagaacctgccacagtcccctgagaacaccgacctgcaggttattccaggcagccagaccaggctccttggtgagaagaccaccacagcggcagggtccagccacagcaggcccggcgtcccggtggaaggcagccctgggcggaacccaggcgtttaacggctcactaggcagccccagatctggggaacagatgagcacgtggggagctggagtgagctgagcagaagttttgtgcccgcctgcccccatcccctccaggccacgttttagatggcccttgtagttgcgggtcctgggtgtcctcagaactagacatcaatgcctggatccttcagccggccctgccctcctttaggagacaggagtcaccagggcacagccctccaggcccgcctcaggaaggaatgaaaggaatgccatcatctctagttcccagggcccagccttccccttctcccccggggcagggacagtgcggcatattcagattcagacctctttgggctgagccaccttgtgagtgcagttactgcctttgtgtggccgtgacctctatttgtttgcttttaatttgccaacctatcgctgctggcagcactttttgagcaagccgagagcacccattttggctgggggttcagatcgatggccttgtccatgttgtcctttctggcttccctgatggtgtcatgtttcagcgcatgcgccccagcctttcccatgtgccaaaccagaagctccactgcccgtaggctgtccctgtagccctgctccctccctggaggctgctcttctgattctgagagctggcctagtggtgctgagggcccctttctgcttctctgcccacctgctgagttgccactcgcagtgttgtcagttcccgtgttctgagaagaggtcatgcctgggaggaagggatcgtcatgctgcatcgaatcctctctccgccgtgtggcccccaggagagtagctgcctgttgcacctgctccacacctccccacagcctccctgcaggtgctgtgtggccgtgatgtgcagagagcagtgagggagggttcatgaaccaggtggatcctctttaaaaaaaaaaaagtttttgttatatctctagaacatttcaagtcttttcctttttttctgttcctagctatggggttttagagaagtgggaacaggaaggcatttgtctttttcttctagtttactacattttccttccgtagttcttcagctgtgtggaaacgggcatcacaaggacataggatcatagattgggtagggagggaggaggatttctggaacttttctcaaaggaatttggacccttataaatgggactgaaggtcaaaacaacagtgatatccttgcttagaaattgtcctcaaggaataaactctgagagcaagcccgggttggaaacagatgctttaaaatcctctctccagaacagtggttttttgtttgtttatttgagatggagtctcactctgtcacccaggctggagtgcagtggtgagatcttggctcactgcaacctccacctcccaggttcaagccattctcctgtctcagccccctgagtagctgggattacaggtgcccaccaccacacccggctaatttttgtatttttagtagagatggggtttcaccatgttggccaggctgatcttgaactcctgacctcaggtgatctgcctgccttggcctcccaaagtgctgggattataggtgtgagctaagatcagggattcttaaccttggctgcacaccagaatcacctggcaaattaaaaatacgtggacctgccaccagagcttgtgatttaatcagagtcggcatcagagttttcaattttttatttatttattattattattattattattattattattgagacaagatcttgctctgtcgcccagactggagtgcagtggtgtgatcacggcttgctgcagcctcgacctccctggttcaggccatcctgccacctcagcctcctgagtagtagggactacaggtaggcaccaccacacccagctaatacttttaatttttttttgtagagatagggtctcattatgttgcctggggtagtctcgaactcctaggctcaagcgatcctcctgcctcggcctcccaaagtgttgagattataggcgtgagccaccgtgcccagattcacagaagtttcatacacctttcacccaggttcccctaatgttaacagcttacatataaccttggtacatttatcaaaactaaaggtgcaatcatactaatagctagagtttatttggattttaccatttttcccaatgtcccttttctgctgcagcagccaatccaggatgccatactgcacttagagctgttgctttcttttttcctaactttatattttgaaataatttcagatgataggaagttgtaaaggtaagggccccacgcacccttcatctagtttccctccatggttacatcttatatggttgtaatgcagtattccaacaaagactctgacactggtgcgatgtgggtggacagtccaaatcatttgtcacatgtacatctgtgtaactaccactgcaatcaggataaagaagtcccatccccacaaggatctccctccccaccttccctaactcctggtaaccactaatcgttcatctcttcttattttgtcatttcaagaatgttgtataaatgggagcatagtgtgtaagcattcgggattgtcttttttcactcggcgtcattctcgggagatcatccaggcattgcatgtgtcaacagtttgctcctttttattgctgagtggtattccgtggtgtatgcattggccccctgaaggacacctgggatgtttccagtttggggctattccaaataaagctgctacgactatcttngagaaaaaaaa

SEQ ID NO: 570593 - DNA, 401 bp, Homo sapiens
  misc_feature (56)..(56): n is a, c, g, or t
atgagctgccgcagcacttgcaatcccagttgggcagctggtccgggaagatatgnaggccagtaatgtaccagaaccccggttgcccgggggaagatgtcccccgagggctagaagagccccccgcccctgcagctaggaaaccccgcagtgaaaaggttggggccttccgtgaacggtgagcggcacctgagcgagaaccgcggggcctcgagccagcagcagcggaaccggcgcggcgagggcccttcacatgcatggagtgcggcaagagcttccgcctgaagatcaacctcatcatccaccagcgcaaccacatcaaggaggggccctacgagtgcgccgaatgcgagatcagcttccgggaaaagcaacagctccaggtgcaccagcgcatccac

SEQ ID NO: 570594 - DNA, 1052 bp, Homo sapiens
atctgtatgcagtcataactttgtaatcctcatctccaattataccatggatccggagccccggttggtactaagattagatcctcagtgacgctacttcctagatgatagatcagtgaccgcagcgcgaggggtcgaggatccgattgtacctgcgtctgagcgaaagatatgaactgctgatgaactatggattgctggtcgaactaagcctcgagccgtgtcactcgggggggtaatgttggatatctcttacactcaagattcgacctgtggctttgcatagattgcgccctgattccatcccattgtttcattattcttctgttcatcgtttctgttttatgttagcccattctggtggtccaagttacgcatcagcctctgtagattcgatctacatctatcgctacttctgctcatctgcatcgtaagagtgtgcattggataccctaacattgctttggtccctgatagatatattgggatgatccctgctcactagtaaaagcacactgtgctcgtatagacttgtctgttttgactgggagactttattctattcccttcgagtttggcaggaatcacttgatgttgactgattgggctaagtaatgctgtttaaagattgcgcttggtaaggattgatttggacaggcgggcctcccggccaccaaaagaggtcccccaccgaggaggccgcaaagtgagattctgaccctgatcctgttgttgccaactgtgggccgtgtgttgggatcggattataaccccaatgagattgcgcgtttagctgcacaacggacgatcctgcaacacgtgttccttcggaccctgtgtaaggaccctatgtttcggtcgtttgcatgttggacaactcccccttgagatattaagtcttaggtaaaattgctcggcggtaatttgttgcctacggttaccttggttgcaattacgcctgggtataactacgactctaccagactgcattcaaaatcaccagcatatcaacgcagcaaccgtatacgcccggcgaccatgtgatatattac

SEQ ID NO: 570595 - DNA, 504 bp, Homo sapiens
  misc_feature (11)..(11): n is a, c, g, or t
gtgactctganatcccggacgctcggagagaggatagggctagctcgcctttgcagaaaaggagtacaggagagaaaaagagaagaaacactttccagagttcctgcaaccgtgcttatgcgatagttactattatgaagatggaggaatgaagccaagagtgatgaaagaagctgtatctactccatcacgaatgggccaccaggatcaggaatggtatgatgctgaaattgccagaaaactgcaagatgaagaacttttggctgcccaggtggacatgagagccgctcaagtagctcaagatgaagaaatcgctcgacttctaatggctgaagaaaagaaagcttacaaaaaagccaagggagcgggagacatcatctttggacaaaagaaagcaagcacccgagtgggagccaaaaacagctaaagcagcaaattccaagtcaaaagagagtggtgaacctcaccattctaagaatgaaaggccagcacgggcaccaccac

SEQ ID NO: 570596 - DNA, 214 bp, Homo sapiens
ctctcagcttcagggcaaagagcaataaattttcagcattcatcagcaaccatggcattccaaagtgcactggaacaaattggctgacaccttactggtaacctgctattcttctggtgttacccttcaggctagttccactcacaatttacttttccaaaaatttacttcacattattctcatgtaagtgatgacttgtcagtgttcccggtg

SEQ ID NO: 570597 - DNA, 878 bp, Homo sapiens
cagtgaaggaaaattaacccgggtgggcagaacttcgagcagtgcacctgggatgtgcactttgcatggaaggagaaatgaccagtatgtgtgatgtcatatactgcattaatatggttgtagaccacatggtcttgagctggtatagatcagggaacttttggtaaggaagcatgatgttggtggaaagttggctgacagaagcaaaatttggggaacgagtggcatgtgaggtgatgcgatgcatcgtctggagatggtcacaaaaccatggaagaatattttgctagtccccatgctggaggtgctgcaccctaacgggttgaccctgctgtacgatggagggatgtgttacttatactcaatctgggataggagtgacctgtgcgtgtggacattcaaccgcaggtagctcttttccccagatgcagcaccgtgttccattgcaccagatgggccccataaaagcataagctgtgtccatgtgctcggtcaaaaggaattggctctgtttgactgcgagtgtggcggctcaggtaacatgtggatcgttccatcttcacacaatggcgtagaatccgtgggctttgttgcgctccacctgcatggatatgtcgctcaatatattgtctcatgttagacgataaggacactagatcaactgtaggccccatcggactaatggaccaatgccagttttcgcttgtgggggggttgaattccacggttcccaaagactaagcctttagtggattgcaacaaggtggtttgaagtcgaaatgggtatggcgaagccattcctttttctccacaattccaaatggggagagaacaagggggggccaatggaacgcggttttttggggtgccccttttcc

SEQ ID NO: 570598 - DNA, 162 bp, Homo sapiens
gatctgatggccgagcttgtcacagggcttatactgaagcatctctcagaaatcataaagctattatcttaaagaaagccatttttttaacttactagggagagggcatggtgaaaaatgcattggcagtttagcctcataatccaaagttcaattgaattc

SEQ ID NO: 570599 - DNA, 951 bp, Homo sapiens
  misc_feature (503)..(503): n is a, c, g, or t
  misc_feature (512)..(512): n is a, c, g, or t
  misc_feature (525)..(525): n is a, c, g, or t
actcaccggcctgggccctgtcacttctctgatagctcccagctcgctctctgcagccatgattgccagacagcagtgtgtccgaggcgggccccggggcttcagctgtggctcggccattgtaggcggtggcaagagaggtgccttcagctcagtctccatgtctggaggtgctggccgatgctcttctgggggatttggcagcagaagcctctacaacctcagggggaacaaaagcatctccatgagtgtggctgggtcacgacaaggtgcctgctttgggggtgctggaggctttggcactggtggctttggtgccggcggcttcggagctggtttcggcactggtggctttggtggtggatttgggggctccttcagtggtaagggtggccctggcttccccgtctgccccgctgggggaattcaggaggtcaccatcaaccagagcttgctcacccccctccacgtggagattgaccctgagatccagaaagtccggncggaagagngcgaacagatcangctcctcaacaaaagtttgcctcttcatcgacaaggtcagttcttagagcaacagaataaggtcctggagaccaaatggaacctgctccagcagcagacgaccaccaccttcagcaaaaaccttgagcccctctttgagacctacctcagtgtcctgaggaaacagctagaatacccttgggcaatgaccaaagggcgcccttgggtctggggctgaagaccatgccaggaccagtggagacctcccgctaagttttgacaccgcgatcacgaacgccctgagcgcaatgaatggggccaagagggtggaggccaactaccaggggtcgggcacgtgacgcaaagggggaacatctgagggccatacgtgggccgatagcccacgacctgttccaagaacagcgcgcgcaatatgtcgcgccaaac

SEQ ID NO: 570600 - DNA, 531 bp, Homo sapiens
tttttttttgtgcccccccgggttttttaaaaggggggaaaaaaaaaattttcccggggggacaaggaaaaaaaaaaacccctttttgggggggggggtttttaaaaaaaaggggtttttaaaggggtgccctttccaaaatggggtttccttttgggggccccttcttttatataccccaaaaaaaaaatatttttgcccagttggggttttttgcccccccccttgtttggggcccctaaaaaccccaagtagggtttttaaagggggggaccaaaaattaaagtgaaaacccctttccggggaaaatttcccggggtaaaaaaaaaagggtttttttgggtttgttccaggttttttttaacccctttgcttttccccccaaaattttttggggggtaaaccaaatttttagaaaaaccttttttggtttgtttaaaagtttcaaatgttccccggtttaaattgggggtccaaaatttaaccattttttaaaaggtttgttccccttaaaattttaatcccaaacca

SEQ ID NO: 570601 - DNA, 201 bp, Homo sapiens
atcctctgttcccaaatgggggtggcgacttttcctgaagtcgccaatgatttccctttgaaactacttttttttactaatttaaactattttggactgaggtagccctgaggtagttcatgaaaatgctgggccctccttccatggaataaatgttggaaagctgatcttttttgatataaaatgttgaatgattttaca

SEQ ID NO: 570602 - DNA, 1084 bp, Homo sapiens
ctgcgttttgtgttcgtgttgtgctgtgcgttgtcgtttcgtgtgttctgctgtgttgttttgtttttttgtgtcttctgtgacacacagataaaatacgtgtccaagaggtggggccaatgacggggacacaagttcgcacaacggggtttttcccgcggccgttattcccgttcttgagtacgcctggccaatcccagggcccaagtaaagccccggaaaaagggtccgccccccttcgtgagacccgagtctaaaaaggggaacccctggtgagaaaaggcctaagatttggccatgcacaggacatcccccttaggccctcccccgcttgggaatggccccctatatcagggtcagcggccgagctccttcctctattaccggctgtaagtgcctctgcggattaccacggtcacccacggccctgggccgccctacagctatctcagctgcttaaactggccccaccagtaccagacccgaggaccaaacgccagagaagtaagccgagactgttggccccgggcccgagaagaaggcttctgcgccaaaggggaccgtccccacgaagagacccccctgtccttcggacccaggagtttaccacccgtccaccccccttggtggagacaccaaggaagcgtccaacctggtggtgattgccaccaccgacagtggatctcccatctgagcctggttgtctttctttgcctgccctgtgtctgtaaaatgggggtccccttactgccattatccagggaaaggccagaactgggaccgtttagtcccccaggaagacctgccacccactgtctcgcccttccaacaccaggtgaactcggaagcaccaaggccgctttggctaagcttggtggaagcttatccaggacccaattcaccaatgcaccagataccgatgagatccccccgtcaactggggtggccaatagtcctgggtcctaagatctgtggctctgtatcccccagctcgaaaaggccaagggcttaagaacttgccccttaactgggtttaaagtaccctgttgagttttctgtaccattaaaataattgaaataatta

SEQ ID NO: 570603 - DNA, 152 bp, Homo sapiens
gaggatcgcgtttctatacggtcctcctcctgttctctggaaaattccaagtgccttccttggaaaggcccttttgacccctggtccctcatcagtcacacacacacactctcttattagacccctatcgcagtgactataattgggtttca

SEQ ID NO: 570604 - DNA, 160 bp, Homo sapiens
ggagtagctatcgatgggcagtgaggggcgatatgatctaggcataaatatcggagtatacgtagccggtaatgtaacacctgtacctctagaatatagtagcatggcaaattaaagcgtgatatcgatcgcgcgcagatctgtcatgatgatcattgca

SEQ ID NO: 570605 - DNA, 184 bp, Homo sapiens
atcatctttagtgggtgactcctggtggccctcccagctctggtggtgctgtggggacctgcctgtggagatgccctgtggtaactgagtaacctgttcggtgtgacccaggcccatggagcctgaggcaacaagggcctgctgcgggtcaaggatgtgtgcagggatagggcaagctggtgtt

SEQ ID NO: 570606 - DNA, 176 bp, Homo sapiens
  misc_feature (16)..(16): n is a, c, g, or t
  misc_feature (53)..(53): n is a, c, g, or t
acaaagaaatattttnaaaagcgacctttgtcctaaaatctgccaccattgantccagcaagtatgagcagagaccccgtgcagttcattcagacaccccgcacagcaggactctttggaaattgacacgtgccaccgcctggcgttctgtttgtggcagttactaactttctaca

SEQ ID NO: 570607 - DNA, 126 bp, Homo sapiens
cgtacctgcagctctctctgatgttggcaggactcatggctgccacttgagcagccatgtcaggctgaagtctccatagccactgtctgggcctggccctcgagcactcagaactggtgactgcac

SEQ ID NO: 570608 - DNA, 125 bp, Homo sapiens
gtagcggttctcttacatactagattctgacacgttacgcaactacacacaacaaatatttgcaaaatgtcactgaaaacataggataaagctatttcaaagatccaccatagtcaatatttatc

SEQ ID NO: 570609 - DNA, 438 bp, Homo sapiens
  misc_feature (53)..(53): n is a, c, g, or t
  misc_feature (66)..(66): n is a, c, g, or t
ttggccccattttcattgagggcggagagttttggggacccctccagcccccntgaggcccagganttgagtagcagggtttgtaaagaggggaagatgcccagaggagggtttctggagagggaggggtgccccaaggggccaggtaagaatcagcccgcgggtgcccccgccgccccggccgcagaaaagttcaaaccccggggggggggggggggcaaagacattgtttcatcccccctgcccaggcccaacagagaggggcctgtgggcagccggacgcccgtggcccagagaggttagctgcctttccccggggggggttgccaagccaaccccccagaataaaggcggcgggtgtttcttccccttatgggggggggtctgccaaagcttcccgattaactggaataaaaaaaatttttttttctttccgga

SEQ ID NO: 570610 - DNA, 223 bp, Homo sapiens
  misc_feature (31)..(31): n is a, c, g, or t
  misc_feature (34)..(34): n is a, c, g, or t
  misc_feature (44)..(44): n is a, c, g, or t
cagagtccaaacagtgcccagatcaaacagngcncagagtccanacagtgcccagagtccaaacagtgcccagagtccaaacagtgctcagagtccaaacagtgcccagagtccaaacagtgctcagagtccaaacagtgccccagctgaaagtactccggaggaagcacagttcacaacagcatcataatgcgaggtacagcccttaaccacagcgcctagt

SEQ ID NO: 570611 - DNA, 453 bp, Homo sapiens
aggtgctaaaatgacgccagtgaatacagtatgtctgttgttacccgtcttgaatgttacaagcccttgcatggataccaaggccaagcccaacatgatgaagcagttgatagggaggaaggttccaaaaaagaaaggagaaaaagaatgatgcaatctccattttggtttcttcctcacctagttgaattctatagcaactttagcagaaacactagatccaagctcaggattcccagttgtggtggtggaagaggtgcccccaggaagtatggtaggactcctggaagtatacacagggctattgctaggctgcagttcagcagcatgcggcaaggaccagcagcagttctgattggttggggccaacgcgatctggggcgtaactatttccaatatgtctagatgtatgctgatattaaatatttacataaacattttatatgtggaaaa

SEQ ID NO: 570612 - DNA, 198 bp, Homo sapiens
  misc_feature (31)..(31): n is a, c, g, or t
  misc_feature (34)..(34): n is a, c, g, or t
  misc_feature (44)..(44): n is a, c, g, or t
  misc_feature (193)..(193): n is a, c, g, or t
cagagtccaaacagtgcccagatcaaacagngcncagagtccanacagtgcccagagtccaaacagtgcccagagtccaaacagtgctcagagtccaaacagtgcccagagtccaaacagtgcccagagtccaaacagtgctcagagtccaaacagtgcccagagtccaaacagtgccttactagaggggtanccgag

SEQ ID NO: 570613 - DNA, 465 bp, Homo sapiens
  misc_feature (32)..(33): n is a, c, g, or t
  misc_feature (84)..(84): n is a, c, g, or t
  misc_feature (97)..(97): n is a, c, g, or t
atacagcgcggagaatcccatagaaaaccaanntgcgtgccttactttttgcaaaccatataggattcagctcatttgtctcgnatgaccgtacctnatgctataaggaagtctagtaaccacataattctaattgaataaattgcgacagccaattcacagtatgacaacaaacaagtaggacattcacagaactccatcttcctgatttcctacctcatcagacatcagggtggcaatggctctgccaatctcatggtaggacttggctttccccttaggacctaagagaatgaacaagaacctaatggaaaaggaaagaagcaaaggctataacacacatttcatcaaactcaacatacataaaactgagaaatgtttaacttaggtcataaaaaggttaggtctagaattcacctttaaaacaaaggtaatatattattggtagtacagaatatactcttt

SEQ ID NO: 570614 - DNA, 278 bp, Homo sapiens
  misc_feature (178)..(178): n is a, c, g, or t
agaatcgagccggtaccgtcattctgcatcgcattaaaatttcggtggggcgactcggagcagaacccaacctccgagcagtacatgctaagacttcaccagtcaaagcgaactactatactcaattgatccaactaacttgaccaagcggaacaagttaccctacgggataacagcngcaatcctgattctacgagtccatactcaacacagtagggtttacagacctcagatagttggatcagagacatcccggatggtgcagccggctattaaac

SEQ ID NO: 570615 - DNA, 405 bp, Homo sapiens
atcacagacatctcgcatcgccggtactaccctggtacatacaaacgaacagagcgtataatacgacctgtcacaccaatttcaaaactgctgggctaaccatagcagctactttgagtggttcggtgttttacataacagtgggtgatgaagtgctaatgacagtgtgcagtatccagaaaagaacagcaatttctctttagcaaaaactcgatgtaatcaaacactaaatgcctgtaatgtccgaattttataagctccagatattaacttaaaagcaccttaattccacagggtcactaacttaagtgagggtctgcaactctccatttaatctctttacccattaacccaattattttataatgtactttcttagaaatacaacaatcttgtaatcaacag

SEQ ID NO: 570616 - DNA, 114 bp, Homo sapiens
atactaaagggatcacttcctcacctggatttacagacactggaacaatgactacggtagaggtcaacataatccaatcgacgatttgcagtgacctttccaaggctggtcaga

SEQ ID NO: 570617 - DNA, 366 bp, Homo sapiens
  misc_feature (363)..(363): n is a, c, g, or t
ggttgaatctttccggaggtctgtcaagccattccagcggaacaccagttgcattgctgcgaattcatggtactaataagctgccatgtgcataaatagcgaaggatgaccatacatcgctggttaacgaataagatactggccagatgtgtcggttcacagcctgtacatcctagcgtttcgcggaggctgatgccgtggcatggtattacttgaggcctatgagttttgagaccatgccttgcgtgctaactatatcctagatcccatctctacgatacagtgaaaaagttaagctgaacacactgtcggcatgcggcatgctagctccagaccggcgtgaagtggagaatgatcacttanagt

SEQ ID NO: 570618 - DNA, 88 bp, Homo sapiens
cttgatgtatttaaatgcaattgttgcagtttcttcatttgtgaaaatgcattgccttgtaaagacatgattgcgttgtcagtcaggt

SEQ ID NO: 570619 - DNA, 509 bp, Homo sapiens
aagccagttaatacagactcaaaaaagaaaaaaaaaagaaaatcctgcagtatgggacaatatagatgacccttgaggacattatgttaaggtgaaatacatcggtcacgagaaggacaaatactgcttaattctacttatatcaggtactaaagtagtcaaactcatagaatcagaaagcagaattgttgccaggagctaggtgaaggggaaaattgaggaactgctaatcggtgagcatggtttcaattatgcaagataaactagtcctagagatctgtaaaacattgcccctgtagttaacaatactatattggtgcacttaaaaatctgttaaggaggtagagctcatgtcaggtgtcttgccacacacacacacacacacacacacgcgatcataaaaaagtgtatgctcttaaagaagaaaagtaaaatatctcaaaggacggttacaccaccgccctttattgaatcaatttatctacattacagagcaagtgtagatactg

SEQ ID NO: 570620 - DNA, 192 bp, Homo sapiens
gggcttagctcctttttgaattgtgatgggagagtagagttgggttttccagttttgctctgtgtgtgtgagagattttcttaaaggcttttggttgtcttcgccttgcttagctttaagggtcgtagcatgagtgtccagtcgtgtgcatgaattcaccccactgtgactctactatgacgctccccagta

SEQ ID NO: 570621 - DNA, 188 bp, Homo sapiens
tgcaggtacatgagaggcaaagtgatggcagaagcactcttcatcactgtgattacggggctgactggatgatacaaaaaggggggcgtgaactctggagtattggcatgaaataagaggtggtggcccagattgtgggagcacctcctcttcctcctcccaaagacccccaatatcagagactcgtg

SEQ ID NO: 570622 - DNA, 1070 bp, Homo sapiens
ggagagaactgtctcggttttttcgagagtggatgtttataattaattccattttaaatcctctgtccaaaatttctcaatctatgaaaatacaggttggcaaagggcaaagttagcacaggaccctctcaggttcaggaggcataagcacgctgacctaccgcttagtgttacacgttcttcgtcttcccagcgaagggaaaagagaaggccctcgtgggcgcaaagcccgtgttggaagctccgggaaaagccaagtgtgggtcttctccgctcagccacgagggaaagatgtgttaacccctctcctatgttcccgtgtataccacgagggacggaaaagaaggcacatataagggtgcctgtgacagaaccaacggaggggggggccccccacaaatagtggctctcggcccccctggaaaagtggtgccccgcgacacagggggccacaccgagaaagcgctcaaagagacacccaactaaagtgggcgcgccgcgagacacataagagggggtctccagagacactgcggggccccccctatgcgagggccacctatcacaccgcgtggacaaagagcaaccaccatacgcacaaggcgcaggagaagcggtctacaaaacacctgtgtgtgcaacagaggggccccaaagaagcgctctctgcgtgtgccccatgaggcctcctatgcagcggccccctttacaaagaggtcttactctatagagcacaagggtacccaagacaatggtgtgacacgcgggggacaccacacaagagtgtgtggcgctctaaacagaaacaaaccatgggaggtggtgttcgcacttagaaagtgtccccccggagggtagaacccacgcaggggggggtattacttataactgctctgtttgtagcaaacgtttttgaaccccatgtgcgtgtggcacacacccatgactacacggagccagcgcacaaatttcatttctacctatctataggcggagcagtttctactggcccatagtacagctgtgagggctccccacaaatattgcgggctctctctagagaaagcacc

SEQ ID NO: 570623 - DNA, 526 bp, Homo sapiens
  misc_feature (26)..(26): n is a, c, g, or t
ctgtgggccttccaatgtgttctccnccaggtggaataaaaaaaaagccaccccttttgtagaaggtggagatgctggcaacagggaggcccagatccacaggcttattaaaagaattaactaaggtgagaggcctcatccttagaaagggtgagttaatgttaaaggataagtggtgggaatcttgaaaacctttccccttaaaaaatgatggggggttgaattttaaacagggcctttgtggggagtggggggccaccattttaaaaaatacagttgggttgtttactgccttttagggcccttttggaggaaaagaaaaacccgttttggggagtctttaaaaatggaaattggggggtcttaaaaaagtaaaccccatcctttctttaaaaccgcccaggttatgttaaatggtaaccgcccaaaggggtttttaaagggtttcttttttcccttcaggggtctacccagattatttttttaaacggggtgggtaataaacaggacccgctctccaatttga

SEQ ID NO: 570624 - DNA, 668 bp, Homo sapiens
gctgtgtaatgactgcagaggcgtggcaaggccgtgactgtcgtccgtccacagaagccctctcacaggcatggccacctccagttcggcattctggtcggttggggaaacggcctcctagagtcggtcccaggttacaagcctgttctgccccccaaaggcctgcatctcattgttaagcgtgtgcattctccccgactgaaaccattccagcagatctgttaggcctcctgcttctacggtgaatcgtgcgatggacggtgagaccatgtggacacgtgatggaccacaagcttatcggcacatctgtcttgttcctcatgaaatcaagtgccctggtacttacaagtgtctatttgtcggacatgcccacaggacgaggccgacatagcagcgccaaggcatggcatgctgtgcgagcgtacgaatgcctgcagagtgacccgtacctttgagtgatccatccctgctaaggactgggctctcgcacaaaaggcacgccgtgtgctctgcctgcttcctggaggctggctgccctccccacagggggtggtgccacatcagggctcagacaccatcctcgctgttggaaagatgggcgcccagctgtccatgctgctggaagggtctggtgcgaggtgaataggctacggagcctgtgtggcaca

SEQ ID NO: 570625 - DNA, 100 bp, Homo sapiens
acaggtgcaggaggggggaatttaggaagtcaatatttagaaggagtactatagaagttactttttcaatcttaatatattaacagacttgcgaccagga

SEQ ID NO: 570626 - DNA, 100 bp, Homo sapiens
cgaccagtagcatgtgaaggtgttcagtgctggtacgtagccaaccactctcatttagtttttattggctgggctccatggtgcgcatctgtagtcctag

SEQ ID NO: 570627 - DNA, 935 bp, Homo sapiens
gcatcctgcccaggctggttccagccttgcaccctgagctgctaggataggctctggccacctgctaccctgaactggaataagcaggtaaataatgatcttgtttttattaatctttcttaaatataaaatatatgtatagctcacatttattttatttatttattttgagacggagtcttgccctgtcacctgggctggagtgccgtggcgcgatcttggctcactgcagcctctgcctcccaggttcaagtgattctcctgcctcagcctcccaagtagccaggattgcaggcacccgccaccacgccgggtcgtgtgaagatggttgctccgcctttgccttccaccttgattaaaagctccctgaggcctcctcagtcatgcttcctgtacagcctgtggaacgatgagccaactaaacctttttctttgtaaattacccagtctcaggtatgtctttatagcagtgtgagaatgaaccaacacaatattgttcagccgtaaaaaggaataacatcttgatacgtgctgccacatggatcaaccttgaaaattatgcttagtcaagccagagaccaaaggacaaatattgtatgattccacttataggaggtacctagaataggcaaatatagagacagaaagtagaacagaggttaccaagggttgggggaaagagggagttactgtttcctgagtacgagatttcgtcgggatgatgaaactgtctccggtctagatagtggtgatggtaccatatctgtgattttttactgccctgggtgccctgcaatggttaaggtaattacgttattttttcccataagtttcccaaaaaaagggggcgcaaattccccggcctcggccttgaaggccacaggggtaaccggggacaacgggaagggtggcccctggcccccaattctctggaa

SEQ ID NO: 570628 - DNA, 337 bp, Homo sapiens
ggtccaggttgtgctagtgactagtatgttagagtcctgtaagtaggagagtgatatttgatcaggagaacgtggttactagcacagagagttctcccagtaggttaatagtggggggtaaggcgaggttcagcgaggcttgctagacagtcatcaaaaagctattagtgggcagtcagcagtttgcaagtccttgcacagcaggcattatgcatgcgcactgtgagtgcgttcgtcagtttgcagtttgctaggcagaatcagtaatgcaggatgtaagtccgtgggcgcattcatgcagaatgcactgcgccggtgaagcttcagggtcttggtg

SEQ ID NO: 570629 - DNA, 1299 bp, Homo sapiens
gagccggtgcgccgcgcgcttcgtgcccgcccgagggctgctgcggaccaccggcctgcgacctgctatctgcagcttcatgatttgagtgatgatcctcacggagccaccctgggcccaatggtgctgcctgtgccctgcagcctgcctgctgcctgctggctgggctgatgctgcgtgaatgttctggctgtgcagtgctgcgttgctcggctggctgctggctccttccacatgccacctgtgcctgtgcttgaatggcctgagcatgtgctggctggtgttcaatgttcccacttgtgcgcctgctgggcttgttcagtggctgatgcttcttgctgttgcatgtgctggcatgtggcacctggtgcctgcccctgtgctgcccagctgagtgtgcagccaacacctgaccggctcgcatgtttgcatggctcctggccgcggaagcgcttgggacgggctgagcatgtgccctgtggtgacgccatggcaaccaaacgccacacgacacggggcagtcaggacgcctgcactggtagtaacacccgagactgcacggctgatggggccttggacgaaaccgctatccgacgcaacgcaagaacgtaacctatttccactgccggaaccagacactagcatccttggctgagctcacccttggggccttgaagcccagcttcggccagggtgacacgacggtgggatacacaggaaatacgggacgcgactgcacacgttgcgaacgaacagatttgaattgtgcttgccagtggtcctgagcgagcaccatggaagcatacttcccgagccaagagcccccacagtgggctgggacccccaaaaggaaaggacactccacatatccaaaccgaagccgaaagcaaggcatacattggaggcaggcgatccagacggcccaagcggcatgcaagcagaaaaccagagcgcgaaggcgtgtaccgggcagacaacccaaacagaaacagggcagcccggcgacgcaaccttggacgcgtcaagcgaacaaacgcggcggcttgagggcccagcggaaatgtacccagcgccaaaaccaagagaagcccgcacaccaacagcgagcgacaacagcccgtgcgaccaggagaccatacccgaggcacgcacgagaaggaaaataacacacgaccaacaaacaagcagaacaagaacaagacagccacatcggggcaacaaacaacagtagcgcacaaaaaccccacaaagacaacacaaagacaaccgagagagtgggattaaaaccggcagacccgc

SEQ ID NO: 570630 - DNA, 587 bp, Homo sapiens
  misc_feature (369)..(369): n is a, c, g, or t
  misc_feature (383)..(383): n is a, c, g, or t
  misc_feature (394)..(394): n is a, c, g, or t
  misc_feature (554)..(554): n is a, c, g, or t
  misc_feature (570)..(570): n is a, c, g, or t
tcagtgtaactcactcatctaatatgttctacagtgtggtttttatcattttccatgtttttcattgtaactcattgatatacactgttctacaatgccggtttccaacgaatgtgtttttcagtgtaactcactcatctaatatgttctacagtgtggtttttatcattttccatgtttctcattgtaactcattgatatacactgttctacaaatcccgtttccaacgaatgtgtttttcagtgtaactcactcatctaatatgttctacagtgtggtttttatcattttccatgtttttcattgtaactcattgatatacactgttctacaaatcccgtttccaacgaatgtgtttttcattgtanctcacacatctaanatgttctacantgtggtttttatcattttccatgtttctcattgtaactcattgatatacactgttctacaatgccagtttccaacgaatgtgtttttcagtgtaactcgctcatctaatatgttctacagtgtggtttttatcattttccatgtttttcattgtaactcngtcgacgcggccgcgnatttagtagtagtaggc

SEQ ID NO: 570631 - DNA, 859 bp, Homo sapiens
gaaggatgtatcaaaaataacacaccttggaagcaatattttcctctggctgaaaccgaccagaaacacaaaaccaggaacccgagagatgcagctcgtagaggagagaaaacaagagtggactgggatgaccattgggtggatgaggaatcaatagagaaacaaacagttccatctgccgtttatgggtaaaagagagcagatgaagaagacatggttacctatggcttggtgatttggccacttcccttttctgggacaaactcagattgtcaattttgtgaacaaagaacagtttttattctacctgcatcatgagagccacatggagggacagctccatttgcccctggaagaatctggcagacactgggaagtcagcgagaagggaggtcactaccaggatatacagccatggagttcatcaaggaaaacagactgactgcctgccgtcttggattgtaatggcacttgtggatggctcagagctaagtgatgacaaactggagatgagaggcagagacacggacagaaagtcaatcctcttatggtggaatcagttcttttgtagaccccgctgtccttggttcctgcaacagctaaacaaggtgatttctgaagagaaaccccttacctttttaaccctttggggttaatgatacgggaatgcaacaacgtttgaggccacatacgacacttgggcactacaacatgtgggacccatgtattaccctttcttaacaagggacaccattatgtggcagaaccgcgttgttaaaagcaaaaaccaacactttgcacaaacagcacctttccgcaaaaaggtgggtgggaacacgcaaaaaatgcgttcatgtgg

SEQ ID NO: 570632 - DNA, 532 bp, Homo sapiens
  misc_feature (499)..(499): n is a, c, g, or t
  misc_feature (515)..(515): n is a, c, g, or t
ctaaattcgcggccgcgtcgacatacactattctacaatgccggtttccaacgtatgtgtttttcagtgtaactcagtcatctaaaatgttctacagtgtggtttttatcattttccatgtttttcattgtaactcattgatatacactgttctacaatgccggtttccaacgaatgtgtttttcagtgtaactcactcatctaatatgttctacagtgtggtttttatcattttccatgtttctcattgtaactcattgatatacactgttctacaaatcccgtttccaacgaatgtgtttttcagtgtaactcactcatctaatatgttctacagtgtggtttttatcattttccatgtttttcattgtaactcattgatatacactgttctacaaatcccgtttccaacgaatgtgtttttcctcatttatttataaatcccatgtaactgccatttttcttatgtgggcaaacttctcacacacttgtcttctcngtcgacgcggccgcgnatttagtagtagtaggc

SEQ ID NO: 570633 - DNA, 294 bp, Homo sapiens
tttttttttttatcctactaaagaaattaattaggcatgtgcaaggcttgggaaagggaagaaccatcacagaatgtttaatttgcattcatagattatttacttacctttagaatctagttttctattaagataatgagctatgaataaggttaattttgcaattattgtgattaaattgaaataggaattttacaatgacaaaattaagtgtcaaaaatcaaagacttataaaggaacttgtatactcctccttacaaagctatatacgtataagaatgcataagtcatacg

SEQ ID NO: 570634 - DNA, 670 bp, Homo sapiens
  misc_feature (452)..(452): n is a, c, g, or t
  misc_feature (466)..(466): n is a, c, g, or t
  misc_feature (477)..(477): n is a, c, g, or t
  misc_feature (637)..(637): n is a, c, g, or t
  misc_feature (653)..(653): n is a, c, g, or t
tcagtgtaactcactcatctaatatgttctacagtgtggtttttatcattttccatgtttttcattgtaactcattgatatacactgttctacaatgccggtttccaacgaatgtgtttttcagtgtaactcactcagataatatgttctacagtgtggtttttatctttttccatgcttctcattgtaactcattgatattttcagtgtaactcacaaatctaatatgttctacagtgtggtttttatcattttccatgtttctcattgtaactcattgatatacactgttctacaaatcccgtttccaacgaatgtgtttttcagtgtaactcactcatctaatatgttctacagtgtggtttttatcattttccatgtttttcattgtaactcattgatatacactgttctacaaatcccgtttccaacgaatgtgtttttcattgtanctcacacatctaanatgttctacantgtggtttttatcattttccatgtttctcattgtaactcattgatatacactgttctacaatgccagtttccaacgaatgtgtttttcagtgtaactcgctcatctaatatgttctacagtgtggtttttatcattttccatgtttttcattgtaactcngtcgacgcggccgcgnatttagtagtagtaggc

SEQ ID NO: 570635 - DNA, 944 bp, Homo sapiens
gggagtgagtagctgctttcggtccggcggacacatccggacagatagacgtgcggacggcccaccaccccatccctccaactagtcagcctgtcgcctggcgcctcccctctcctagtgtccatccagcctatgtggcccctgtgagcgctctcggtgtctctgctggcctctgatccaggccctgtcctttgcagcagaggaggcttctgggacttcaccctggacgatgggccattcatgatgaacgatgaggaagcttcagggcgctgacacctcaggcgtcctgagacccggattctgtcatacccaccttacagcgaccatgtgtactattcggctgccacatgccaccatgctgggatggttcagtgcatccgacacatgggtctgaagtctgtgcccaaagagatctcccctgacaccacgctgctggacctgcagatacatcagacattctcctgagctccgcaaggatgacttgcaagggtctccaggcacctcatacgccctcgtcctggtgaacaacaagatctccaagatgcatgagaaggccttcaggaccacctgtggaagctgcgagaagctctacatctccaagaaccaccgtggtggagatcccggccaagactacaccagctccctggtggagctccgacattcatgacaacctgcaatccgcaaggtgcccaagggagtcgttcagcgggctccggaacatgaactgcatcgagatggggcgggaaccacgtgttagaacagtggcttccgaacctggagcctttcgatgtgcctgaagctcaactacgctgcgcatctcagtagggccaggctgactgggatccgcggaagactccctgagacgtggaatgacctccagccgtagatcaccaacgaccatccctgcctccggccttgggaggcctgggtcggttagtcaaggt

SEQ ID NO: 570636 - DNA, 425 bp, Homo sapiens
  misc_feature (31)..(31): n is a, c, g, or t
  misc_feature (151)..(151): n is a, c, g, or t
aagaatcatagatatgtttgaatacttaatncatatttgccccagatagaaaatgtttgttaatcaaaaggcaaaagttataatgaggaagataatattgcctggggcaatgttgagacaaataaggtgaagatcaaccaaacgccctgangtcctttggcccaaatccctgctggggacccaaatacttttgatatagcatcttgctacctgaggaacgcaaggagaataatactcataagcagagcctctgttttcccataggactgactctaactatgtgaagaactgctacatattctacagtgcttaataggcggtgcctatctaacaggagctgtttggcttgtggatagcagttccaagatgaacaaatgacattgtgtttgaaagccactgctcttattaaagaagagtcaagcaaa

SEQ ID NO: 570637 - DNA, 320 bp, Homo sapiens
gccgaccttccgctggatgtccgtcgcagtgaagtactcgacgccatcgatctcgatcggcattatactgttcggatgtataggttgcacgtcgtaaccattcgtctcgcttgttgctgatcgggtgcaacctatctctcaccgtcgcctagcgtcaagtatggtcacgcattgtcacgtcatgaccccgcgaggaggcacgcagcgctgaccaccgcgtcgtggctcgccccaccacccgcggcgaaccagcgccctaagctcgatcacagagcccgcgccgaggccccgcgcgggcaactcgtcttcgccgagacggt

SEQ ID NO: 570638 - DNA, 626 bp, Homo sapiens
  misc_feature (4)..(4): n is a, c, g, or t
  misc_feature (10)..(10): n is a, c, g, or t
  misc_feature (106)..(106): n is a, c, g, or t
  misc_feature (243)..(244): n is a, c, g, or t
  misc_feature (251)..(251): n is a, c, g, or t
  misc_feature (308)..(308): n is a, c, g, or t
  misc_feature (389)..(389): n is a, c, g, or t
  misc_feature (421)..(421): n is a, c, g, or t
  misc_feature (475)..(475): n is a, c, g, or t
  misc_feature (519)..(519): n is a, c, g, or t
  misc_feature (623)..(623): n is a, c, g, or t
taantaaaanggtcacttttaatggggacccgaggttttgttacaatttcatagtccgacacaaaaaaacccttgggtgaatcaggaattggggggttaccaaatnacgggggtaaccctgggtacaggacaaaaagctgttcccgaacctggggggccaggctttttttttcggcctctccctgcggtcctgtctgtgctcccccctgggttccctcttgcccgggcccaagccccctctgnnccccccnccccggccccctcgggggcctccccggtccccgccgcggccccggtggccgcctcgntctttgcctcctctgcccccccggcggtcttccccgttgtttccccccctgtgggagccccctggtccccctcctgggccntctggttttggggcctttccctggttgctttntttcctcccaggggagttctttttctccccggtggggtttgggcccttcccgtnccccgctcgctgctgttctcccccgcccccccctcccctggggnttcctcctcggccccccccccccctgccaccccctcctttgcctccccggcccctgggtcctcctcgccctcggcctcctcggcctttgcctcccccccggttnaaa

SEQ ID NO: 570639 - DNA, 167 bp, Homo sapiens
tctgggtgcctttccaatgcaggaggtggtctcttcgtgcaccacttggtgctggacccctctcagcaatggcaccggctggtgcacatgacttccccctggggcggcagctccccagcaggacatacccgaccctgggtcttagaggaagtgctgagcagcaggga

SEQ ID NO: 570640 - DNA, 544 bp, Homo sapiens
ggacgcgtgggcaggagctgcatggtcatgggtttggaaaggagaatggacaaatagaagaaggtcggcgggcttggtggttaagcctgtaaccccagcactttgggaggccgaggtgggcggatcacctgaggtcaggagttcgggacagcctggaaacaccccatctctataagcgaatacccatctctactaaaattacaacacacttagctgggcatggttgcgcatgcctgtaatcccagcctactttggaggctgaggtggggagcaattgcttgcacctgggaggtgcaggtcgcatgtgagcccaggtcgacgacacgtgcacctccaggcctggagtgaccacgcagtgacactccatctcaacagaagggacacaacacggcaaactcggagaaggcaggcccactggcgtgacacgagacgaagtccccctcaatagcctgcatgcgaccatccaatccaaacagtggcaactcacatggccacagcaagaccaatattcacgaccatccaagacggcggaccagcgtcgaca

SEQ ID NO: 570641 - DNA, 107 bp, Homo sapiens
aacttgggacccattgaccccccttcccttccttcccctctcccctccccagtttttgggaacccctgttttgttccctatgagataaactttttttgttttccata

SEQ ID NO: 570642 - DNA, 636 bp, Homo sapiens
gggtgctgtatccactgaacagactgatgcatcttcactctactccattgtattagtatggcatcaggctacataggctgtgtgctcgagtacggtcgactatggactggccgggcactcatacattacattctctctatacggtcaactatacttgctgtcaggcacacgtccaatgcttctctcatcggctactcagttcgagaaatcttccataacacgactgtatacctctcaagcaatgttaatcttgaatattagtgtcctattcgcactgcatctgctagaactgccctaatagctataggtcaaattctctagatgactctaccattgcgatatacgatacgacattgtcactactcacactgagacattctttgctgaattctcatgctcatgtgacttgtgtcattaacgcttgactcaccagagctcctaggctgatcagactattgtacactagtcgtcccctgatatagccatttaagatcaaggccgatgctattgcctgttccacacactattcacagatcgcgcactaacaatctgtaggtgtacgacacgtattatatacatgctagctaagtctcatcctcatctacactgatcagacactaaccatattgctcttct

SEQ ID NO: 570643 - DNA, 418 bp, Homo sapiens
tctaataaagttgaatgcccgcatgaaaaacagccagctcgccaccggagcccagagccacagcaggcccttccctacaggcccggtgaacgataatagagagagctcaggccttgccatccaatctgtcgatcagcttgatttgatcgatacatgcccgcaactgcccacatggcaaatatatactgcaaccactccagctgaaggcacacattgcccagccgaactgcacgtgactatccaccaccagctagcaaacgcagaacttccgacacaggggaagcattcccaaaacgagattctttctttccttggggggcgtttacagcttgaggtgaagtgtagccaggcgcaggagtgaggttttgcgggaatgagaaggtgagcatgttgagccctgcgcaaacctgggcccaac

SEQ ID NO: 570644 - DNA, 695 bp, Homo sapiens
accaaatctcagcccgcgtttcctcatcgttcagccgatgtcgaccaccagcccttatgctgacacacacggaatagctatgggtgtgctacgtatctacccctatactcgcagatctcggtgatgttgttaaatatgccagtgacagataactcaaactctgagtttcccattgaaaagggtgttataaactgaggaacacacacaagcgtatactcgtggggacgcatatatagggtgagggatgagcaccctcggtccataacgatagctgctgctaggatgatgtaccagcatgatcatgtaacatgcttgaagatgacaatgtcttaggtacaactgcaaggtggaatgcggaactcctctgggaacccccaggcaacctctcctcctccagccccaatcggtcatgcggatgactatcgtgcacatttcacatcccccaggcacacaggtcacaacacccccaggaaggtgcagatcacagtccgtcttgtaattccttcttgcccagagcacagatgaactcaacttgtccaggactccctctcgagaaagcactaattgattgccagatagagatgctgacctacatatgcactgggtttgaatcagacataatgaacatggcgtacagctgttgcaaagggtgttgccggacccggtggggcaaaatcggtaggagaaattgtggg

SEQ ID NO: 570645 - DNA, 124 bp, Homo sapiens
ccgtctatgtagttgcggatcagacctgcaccacagtcaggaggaatttggaccatctttacaaaactgtttcagttcagaaatattcttaggatgtttaaactctagaggtcatcttgtacaa

SEQ ID NO: 570646 - DNA, 362 bp, Homo sapiens
  misc_feature (31)..(31): n is a, c, g, or t
  misc_feature (76)..(76): n is a, c, g, or t
aacgcgctgatagcctcccaaagtgctctgngattacaggtgtgagccactgtgcccggcctgttaaatcgttttnctaaggtaacatagctgatgaggtacagccagtatgactccagagagcacactcgtaactagtgcacaaaaatgtcttggtttgtttgaacattgattgaaaaacacaacatcagggcatctgtggggtatacttcctggaatgtgtttcaagggagccctggaaacagcgaatgttcataaggcagagaaatgcctggctgtgtggggtagttagaagcatccagggtctagcacatgaatatttgaaggttatgctagggaagggcggaggctatcagcgcgtt

SEQ ID NO: 570647 - DNA, 92 bp, Homo sapiens
taaaattggccaaaaatgttaattctggtggtcttctcgcagtataaggcagggaataaaatctgggaaaaagggccgggtggtgggagtgt

SEQ ID NO: 570648 - DNA, 311 bp, Homo sapiens
  misc_feature (34)..(34): n is a, c, g, or t
  misc_feature (85)..(85): n is a, c, g, or t
  misc_feature (125)..(125): n is a, c, g, or t
tatatgtgttcatcttctattctggagatctaanatgtatagtatagtgactatagttaatagtactgtattgtatacttgaaanattgctaacagagttagatcttaaagtgttgttaccacantcaaaaaaggataactgaggtgatgaatgttaataacttgattgtggtaatcttcatgatatatatgtacatcaaatcatcacattgtataccttaaatatatacaaccatcatattgtatactttaatgtatactatttttgttagtcaattatacttcaataaagctggagaaaataaaagtat

SEQ ID NO: 570649 - DNA, 310 bp, Homo sapiens
  misc_feature (31)..(31): n is a, c, g, or t
  misc_feature (76)..(76): n is a, c, g, or t
aacgcgctgatagcctcccaaagtgctctgngattacaggtgtgagccactgtgcccggcctgttaaatcgttttnctaaggtaacatagctgatgaggtacagccagtatgactccagagagcacactcgtaactagtgcacaaaaatgtcttggtttgtttgaacattgattgaaaaacacaacatcaggtttgccctttcgcatggtcattctggctggtgtgaggtggatgcatgaaggaggccaagactgtagatggagagatgagctggcaggtgaggctaaaggtgaggcaggaggctatcag

SEQ ID NO: 570650 - DNA, 1017 bp, Homo sapiens
tccgaattcttggatagcgcctgccttggcccccaaagtgccgagattgcagcctctgcccagctgccaccccgtctgggaagtgaggagcgtcgtctgcctggccccccatcgtctgggatatgaggagcctctctgcctggctgcccagtctggaaagtgaggagcgtctctgcccggacgacatcccatctaggaagcgaggagcgccgtctatccccgccgccagtcccatctatggaagtgaggagcgtctctgcccggacgcccatcgtctgagatgtggggagcacctctgccccgccgccctatctgggatgtgaggagcgcctctgctgggccgcaagcccttgggtctgggaggtgaggagacgatctcagtgaaccagacagcgaccaccgctcgtgagaaggtgaggacaaacccatcgtgacctggcgaaacgccccgatagcgtgagaaggtgacggagacccctcacgtacacggacagtcacaaccaccggtactggagaaagctgaagcgacgcagatcaacaaggacacgggaaaggcaaagacacagggacacgagagcaggcgaagcgttgagagcaggagaggacaagggaaccagcacagaacacgggacgaagagccggagcgacgaaaccacgcacaaggggactgaagcggagcggccgaccacatcgtaggacgccgcgaagcagcccaacagtaaaaatgacggaacaggacgacgacgcacagccccacaaataggccacgggggtccaagccaggccacgacaagaacaccaaggaaacgacaaaagagaggggtagacggaggcaggatgactcgaggcacaacacagtggacccaccaagagaaccaaggaaaaggaaaaagagacgcggggaaatagagcgacatcaaaacacgtcagcacacgaaccgaatgacccacgcaacaagtataggcagaaacagaaatacagagagagacaatcctagacacaggagcaccgaccca

SEQ ID NO: 570651 - DNA, 930 bp, Homo sapiens
  misc_feature (1)..(1): n is a, c, g, or t
nttcgcccgcgtcgcggcgggggttaataaaccaaagcgccgccctttgtttggcccgcgcccgagtttctcccctggggaacggcacccctcccaccccgtggtgttggccgccccccacattagtgtaagccccccggggggcgcattatcacccacctctccgcgcggttttttatccctttatcgtcctccgcggcgccgcggcataacacactttttctaccaccacgggacaaccaccccttttgccccactacaggcgccccttttatgtggggcgcaccacacatataggaacagacagatggtggtacaccaaacaagagcacccggcgcgtgtgggtcccccggctcttccgcgagattttccccgagggtgattttgtttctacagctcaacccggtgttcgcccccacaccagctggtgggctggccaccaccattgcgtgctcgcgccgccgcgagcacacaagcgcgggcgtgtgtccgaggagggggagaggctcccccccacttctctccccccccccccaaatgttgctgcccccgaaaagatatacccggttgttgttccccccatttgtgggaacacatatctactagggagcccccctctagaagagagattttcccccccacccccccccggaaggagaggagagagaagaaaaaagaaggaagaccaataatatgttccctgataggttgtttccaacctcgtagaaaacggacgacgaattattttgatgatggagtttccctccacactcaaggagataatttgaaagctttttgagatgcgcgccgagacttttcccccccctcgggccccccccccccccggggggggattccaaacccccgggggcgcccttttttattttttttttttggggttttttttttcaaaaaattgggggccccca

SEQ ID NO: 570652 - DNA, 790 bp, Homo sapiens
  misc_feature (194)..(194): n is a, c, g, or t
  misc_feature (218)..(218): n is a, c, g, or t
aatcgtcctcgctataggccaattggggccctggccccttctcaagggcttcatttagtcttgtaatattgtccacttgaggtcaatagcatcattcctttgtagaaacatagaagtattcccacctaaccatcattgtattcaggctaagtgcctcgaacgcacattattgttgttaacgaatacgctgttcntcaaatccattcatgagctaggcntaactagctagtgcctatagttcattgactatggctgcatatcccaattatactatcgagctcttcagttatggtatacggttcagcgtttcgcaatgtctctagtatgtctttccgatactgagggcaagtattcgctctctgtccatcgagtgacatctgcgtgcagctgtatgtaattatgcagggtactctttgtcagagatagataatatatagatataacacatatcaggtacttccctggtatccatatatgtacagcaatcttgtcttgtccaactataatgtgcatatggttcctcataacattcattgcttcgtgtccctttactacttgccctctcattcttttcagttgctcttatcaggaatcctctactagcatctacctatgcgctactatttcaagggtcaggtcacctactatctctttactaaaggacaaagtcttcccttactattctactctacagtaatatatgctctggcattctttagcctttatcatgcatctggcactaatgtctgtgctgcttaatactgctaattagcttttcacaggttttgac

SEQ ID NO: 570653 - DNA, 434 bp, Homo sapiens
  misc_feature (59)..(59): n is a, c, g, or t
gaggacccgacggcttcaacggaacttggggaggctgttcctcccctcttccagctgcngggggctccaggagctccggggcctgtgggtgcctcgctctggtctctgccgcgtcgcccgtgatgttcccccgtgtctctgttcctatctccctcttagaagaacactctctctattccagggtgacgtcatcttaattatatctttaatgaccgtatttccaaataagatctcatcagaggcaccgggagttaggggttcatgtgtcattgggcgaggggcacaattcagtgcatgacaattggccccagggtgggcccctcccacgcgcaagtgacagccccagtgtccccaaaagccttcaccatttcagcatcaactcaagtccaaaatctcatctaactaccatccacaaaaagttccgtggaagccgt

SEQ ID NO: 570654 - DNA, 253 bp, Homo sapiens
tgtcacaataagaactaattaatactaacatctcagacgctcaggaaatagagaccgtctgaattatcctgccctgcatcatcctagtcctcatcgctctcccatccatacgcatcctttagctgacagacgagtacagttatccctccgttatcatcgaatcaattggccaccaggtggtactgaacctacgagtgctagccgattacgggggactactcttaaactcctaacatacgcgccaggttaggcg

SEQ ID NO: 570655 - DNA, 452 bp, Homo sapiens
  misc_feature (364)..(364): n is a, c, g, or t
ttacctgctggagcgggggcaggtcctgggggaccagacggtctcagacaatgagctccaggcaatgtccaaacaggaaagaaaggacggcaatcaggaaaagcaaaaagcggcaacggggtgaacagataaagactctcatggaagaaacaaacgaagagcgcaagacactgctcagcaacctagaagaagccaagaagaagaaagaggatgccctagatgagaccagggaatcagagacaaagctgaagtagctcccaggagtgtgcaatgagaccatgatggccctctgggaagagtgtaagccctgcctgaaacagacctgcatgaagttctacgcacgcgtctgcagaagtggctcagngcctggtggccgccagcttgaggagttcctgaaccagagctcgcccttctacttctggatgaatggtgaccgcatcgactccctgctg

SEQ ID NO: 570656 - DNA, 159 bp, Homo sapiens
ttgctgaagacttgaaactgaatcgcatatatcatgacacttattggagtgtcattaatgggcaggataccctattgaagagtggataccgtatgttcttcatagagagtgtttttcagattcttcaatgggatattaaaatattagccaaatttccca

SEQ ID NO: 570657 - DNA, 764 bp, Homo sapiens
  misc_feature (6)..(6): n is a, c, g, or t
  misc_feature (40)..(40): n is a, c, g, or t
  misc_feature (75)..(75): n is a, c, g, or t
  misc_feature (85)..(85): n is a, c, g, or t
  misc_feature (92)..(92): n is a, c, g, or t
  misc_feature (106)..(106): n is a, c, g, or t
  misc_feature (111)..(111): n is a, c, g, or t
  misc_feature (148)..(148): n is a, c, g, or t
  misc_feature (228)..(228): n is a, c, g, or t
  misc_feature (292)..(292): n is a, c, g, or t
  misc_feature (360)..(360): n is a, c, g, or t
  misc_feature (362)..(362): n is a, c, g, or t
  misc_feature (371)..(371): n is a, c, g, or t
  misc_feature (493)..(493): n is a, c, g, or t
  misc_feature (516)..(516): n is a, c, g, or t
  misc_feature (528)..(528): n is a, c, g, or t
  misc_feature (567)..(567): n is a, c, g, or t
  misc_feature (618)..(618): n is a, c, g, or t
  misc_feature (655)..(655): n is a, c, g, or t
  misc_feature (661)..(661): n is a, c, g, or t
  misc_feature (671)..(671): n is a, c, g, or t
  misc_feature (673)..(673): n is a, c, g, or t
  misc_feature (715)..(715): n is a, c, g, or t
  misc_feature (758)..(758): n is a, c, g, or t
ttaagntgtacaggtaggtgaaaggggaggaagtgcagancccgggcacttccactgtgggtgagtgggccagcncaggggaggnggggcanctgagaaaggcaancaggnacacagggcaggaggggacgatggaaccactggagtnattctgcatgtgctgggaaggtgcagaaagaacctggaccccacgttctctgtgggtggtgccaaaaagctcagcatggncccgggccccaagagtcccctgcccggactccccctgtccagctcagtgcagcttcaaccaggnagtgatggctgcttgctgccattaagtttcccaacaagatctcaggttgaggggcggcaaggagagcnanatgcctgcnacccacgctttccacacagccatgctcaggcctccgggcactgcaggcctgcaggggcctccccacctgggatctgaggtgctctccaggtgcgagctgggctcctgagcattgcaggtgcnggccccctggggcttcaggatancgggctgctgantggagggaaacgggaggggggcagaggtcttcatgcttncttcccacggccaggctcagtgctggtgctcaggctccgacttccccaggnattccctcagtatccgtggcagctcagggctcttgtnaatgtntttgtgcctntngccaaggtctgaatgaaagggcacaaactgaactttgaagtntcggaagcttcgagctggtgcggcgatgctatagagctttctnccaagc

SEQ ID NO: 570658 - DNA, 108 bp, Homo sapiens
agtatatgtaacgataagtgctgtctgtataaaaaccaaattatttttctatttacaattttagaaaaggttaatgtaaaaatatttttcttctttatatatttccct

SEQ ID NO: 570659 - DNA, 104 bp, Homo sapiens
ggtggtgtctagaggatcccttccgggttggtgcatctgcgggtggcttgaaaatcaacgacaacttgagcacagtgagcatgttttggaacacattaacaccg

SEQ ID NO: 570660 - DNA, 324 bp, Homo sapiens
caaacccactccaccttaactaccaagaacaaccttaggccaaagctatttagcccaaaataaagtataggcggatagaaaattgaaacctcggcgcaatagatatagtaccgcaagggtaaagatggaaaaattataacccaagcataattagcgaaggactaccccgtataaccctctcgcaaaaatggaattaacctaggaaataacctttgccaagggggaacccaaagcttaagcccccctgaacccagacggggatacctaagaaccagctaaagggccccacccgtcttatgtggcaaaatagtggggaggtttaat

SEQ ID NO: 570661 - DNA, 116 bp, Homo sapiens
aggatccccattacagagtttgacagcaagaaggtagctgattggattttaaaaggattttaatggtctctcagtgaccactggatatgcccagcatggtctcagtgatgggaatg

SEQ ID NO: 570662 - DNA, 709 bp, Homo sapiens
aatgagatcacaatcaccaatgaccagaatctgcctgacacctgcaatgaaatctgaaacggatggttaatgattgctgagaatgtttgctgagtgaagacaaaaagctcaaggagcgcattgatactagaaatgagttggaaagctatgcctattctctaaagaatcacgattggagatatgagaaaagctgggaggtaatactttgcactctgaatgataatggagatacattggtaataattgctgtcagaatgaaatatgattgaatgtgactggaaatcgcaacaagatgctgacattgaaggacctctaacagcgtcagaatgaagtgatactgcgatagaacaatggttcattccccactttatcagcgaagacgtcatatggaaagctgcgggatccgtcctcctcaaaatgtgctgaagtaggaatacagcagatataatatgactgagtggtagacacttagatctgttagttgcctcgataacttaaggctgtataattacggtagagaactacacagacaactatctcgatttcggacacaaatatctgcctgggaaacgttacaggtcctacagacagtgttaacatgtgaacttgcaaggaccatccataagttcggtaggtcgcaaacttggcggaatggcggctaaccgctagcagattattctagccattttaatctttccccttctgacac

SEQ ID NO: 570663 - DNA, 388 bp, Homo sapiens
ctacaggttggcagcgtcagagcctaaaatagaacaagacctctcctccctgggtcgcagctatctgaccctcgaactacagcactgttgcttctgcctgggtctgcggtccatgaccctcaaagtagaacagcagcaccaggtgctacctggacttccagctccagtgactctcagacttcaaaggcagcaacgggtccaacccctagggtccagctccaacaccctcagatctgagcagcggcagcccctgctcctttcggggtctactgtaccacgatccttaagttagaccagcagccacatcttcacccggggtctccagctccatgaaactcaagctagaatagctgcaccggctcctctgggatctacagctccaggaccc

SEQ ID NO: 570664 - DNA, 104 bp, Homo sapiens
attggtgtgggctgaagatatgctcatgtggtgtaggacaagcagagattgacctcaccaagagggcgggagaactcactgagtgatgatgtggaacgtgtgat

SEQ ID NO: 570665 - DNA, 299 bp, Homo sapiens
  misc_feature (6)..(6): n is a, c, g, or t
  misc_feature (14)..(14): n is a, c, g, or t
  misc_feature (16)..(16): n is a, c, g, or t
  misc_feature (22)..(22): n is a, c, g, or t
  misc_feature (25)..(25): n is a, c, g, or t
  misc_feature (33)..(33): n is a, c, g, or t
  misc_feature (68)..(68): n is a, c, g, or t
  misc_feature (79)..(79): n is a, c, g, or t
  misc_feature (96)..(96): n is a, c, g, or t
  misc_feature (100)..(100): n is a, c, g, or t
  misc_feature (104)..(104): n is a, c, g, or t
  misc_feature (120)..(120): n is a, c, g, or t
  misc_feature (134)..(134): n is a, c, g, or t
  misc_feature (140)..(140): n is a, c, g, or t
  misc_feature (150)..(150): n is a, c, g, or t
  misc_feature (167)..(167): n is a, c, g, or t
  misc_feature (176)..(176): n is a, c, g, or t
  misc_feature (211)..(211): n is a, c, g, or t
  misc_feature (227)..(229): n is a, c, g, or t
  misc_feature (238)..(238): n is a, c, g, or t
  misc_feature (248)..(248): n is a, c, g, or t
  misc_feature (263)..(263): n is a, c, g, or t
  misc_feature (290)..(290): n is a, c, g, or t
ggagtntggtactncncctcanctngcagtcanggcttcataccgttattcgtcctggcccgttagangcaggccagcngggtacacgaattggantttngganacgagggagtcaccanctgcgaccctcccnagacangccaccgtgncacgaccactcctacanaccctttcngattctccctgaccgacgtttactttgttgggccnacaacccccggctttnnnttgaacccncggactgaanttgccgcggtgcttnggaacgtagaactactatatactaccncactacacc

SEQ ID NO: 570666 - DNA, 389 bp, Homo sapiens
cagcttcagcgatgttacttacgtttgatgctacttaaagtaatgaatgaccttttaaggaatccctaaccctactatcagaaaaggagtttgttaaagagccttctcttgtgtgttacgcatgaactttggcctgtaggtgttaaatggaacctttccatgtgtatatagaattttcttgtgtaaagcactttactacctaccacttgtgttgagaacgatcggtgacagctgttgaaagaaggaattgggtccgggagaaagcctactgaagcagtcgcactgtcactacatgtggacaaaagtgaccatataaaagaagccgtgctatttaactctgaatactcggagaaactatgtgaagatgcttccggaaacgagaatatgta

SEQ ID NO: 570667 - DNA, 294 bp, Homo sapiens
catctgctcccatcagatgtttcatacggttattggggctgtgccatcggcaaagccaggcaagctgcaaagacggaaatagagaagcttcagcatgaaagaaatgacctgccgtgatatcgttaagagaagttgcaaaagataatttacattagtacatgacgtaagttaagggataaacgcttttgaactcagaactcagcgtgggattggtgacattaactaagtggaagacatgaacattgttccaagaagatataagagcaagaagcagagaaatatgctaaggaatct

SEQ ID NO: 570668 - DNA, 795 bp, Homo sapiens
  misc_feature (119)..(119): n is a, c, g, or t
  misc_feature (129)..(129): n is a, c, g, or t
  misc_feature (607)..(607): n is a, c, g, or t
ataaaaataaataagttataacaatacctctgaaggaaccaaagatgatagcgagaagatctgtatcgcgttcattgcattgcaccccacgaaatccgtatggaccttaccgcggccgncagttactgnatcattcttagttgtcccctctctattggatccccacctgccaaatatctcatcaacgaaccggagctaattatcatccaacaatgaactaatcaaactaacctcaaaatagatgtatagccatacagaacacgtaaacggacgagcctgatctcttagtacgtagtttccgttaatcattttgtcttgccgacaacttaaccatcctctggacgtccttacgcttcacgtcgagtttacgactcagagccatcccaactatctatggaccttagtccatggcctatccccttatgagcgggtcgcagtgagttataggctttctgctctatagattaaaaatgctcctagcccacttcttaccacaaggcacacctacaccccttatccccatactagttattatcgaaaccatcagcctactcattcaaccaatagccctggccgtacgcctaaccgctaacattactgcaggccnactactcatgcacctaattggaagcgccacctagcaatatcaaccattaaccttccctctacacttatcatcttcacaattctaattctactgagtatctaagaaattcgctgtcgcctttaatcccaagcctacgtttttcacacttctagttaagctctacctggacgaaacactttacaacacgg

SEQ ID NO: 570669 - DNA, 1243 bp, Homo sapiens
ggcagcagtgtgctagctgtgtgcttttgtggcagctgcccagcagtcaacagccaacagcagcaacaggcacagccaggccacgttggcacagtggtctgtgcaccacaccgcccagacacaataagtaggcagcacagccttaggtgtgcattgcaccttaggcttctcatggatctcacatcgcccatctgagagcaggcacacccagcacgcagcccagtgcactccaacaagctccattcatcgtcacagccaaccaccccagcacttggcagcatcaagcagatccaagcatcccaatgctcaacactccacattggttccagtgcactagttggttagctccttctatcaagaccagactgcatcacctggtagcatcacctgccaggcccatctcaacatctcagcacagcaccctgccgcagtaacaactgcaagcaacgcacaggcatcattcctcacatcattatcattcatcatcgctcgtcccaatcccatccaaggcacatcatcttcctccgcatatcaacacatcacaccaaccatctcacaggccatcacacggtcgcccagcagcccaatcattccctggattcaatcccaaaccacagcacagccaacacaacgacagacagcattgtccttgggcagctcttcctcacacatgtgccaacacgacacacaggcatgaactatccgtccatcattcttgaactacgcatggtcgggcccggacattgttcatcattccatctagggaagaggccttattaacaccttccctaagctcattccccataatggtcaggcaagcacagcccattgacaggcatggccgttacctggcggacacacgcaacacccggtgggacaaccgggacacacatacaaacgaccatcctccagacagcaccgaccgaacaccacaggcaaacccccgagacacacatcaggggaccaacacagtgacgaggacaatccacacccaactgaatgcatacctaccaaccatagcacatccaaacacacccacaaccacaagcaaccagacatacaagcccgacaaacacacgggcaacaacatccaaagaacacccatagtggcgccgccaagaccgattcatcgcacgcagaaactagcaaaacaccaatgaacaccgccaagcaatgcaacacaacaccaacgcacggaaccacacacaagaacacaaaaaaacaacaaaacagcagacaacag

SEQ ID NO: 570670 - DNA, 1211 bp, Homo sapiens
gtgcccttcctgcggagtctctcactctgaacgtggcatgctttcacccagtgtactaggcttttagcgcgtggctagctctctcttgtgtggctggatcctgcgagcacctcgtggcccattccttggatgcctggtggtcactcgtcaactcgttctttcccacgtgtccgcacagaatgtagtgctgcttctggtcacccgtcgcggtagcgcggtgtcgcgccgtcagtcccctagttgtctccagaggtgcaaacgtacaatagtcactcatcgaagagatggtccaaggattgcatgtgacatataccattggtgcaacgtgctctcgctcgatgatccgagcacgaagggctgtggtaggatcagactgtaagcaggatacttggtcgacgtagaagtactacttttcgaagccaccaagaccagtcgccgataagtttccactcatatgcagtgcccgcagagattggcgcaattagtggaaaattctcggtgcgttcaaaccaaaggcgaacaacgtcaaagggaagttcacaacattgggataaccaccagggcgccggtagacaaacccgttgcgagcatagtacccattggtgccaactcacaggcggaaagacaaccaggacattcgcaccattgtgcagtctcactgcgttgtacaacgcttagtcgactacgccatgagtgacctcgcggcatcttaactggacacctgtaagtgtcccaattgtaaaatcgaggcacgatcatatggcgagggaagttgaattaaaataaaactgactggtcgaacacaatacatcggcatgagggcaccatggaccccaatatagggcgcacccagaatagggaggcgacacacgcgcttattcaaccgtcctacatgtcgcccaaaaaacgtgacaagttacctttgtggggattggcaccacatttggcgcatgatacttagccatcccgaatctgagacgcacgatatttccccacttccggtgaaacagccaggcatctctaaaccattaagggagagcgaagaacttctgtggacaagcatataacataccgttgcaatatcggtgttggcaaagccaagccgacgcacaaggtcttgtggagacacacacgccgatcacgattgcacaagtgggcaagaagaaattggcaatacaatggaggagagagtagctaagggacttgaccag

SEQ ID NO: 570671 - DNA, 236 bp, Homo sapiens
cgtccgcgtttctacgaacccgacgtacacaccatggccgcgccgctgcaggcgctgttcgatgccgtcaatgtccgcttcgtgcaaggcaccgcctgccatattgatgaaggggcgcgccgagtcagctatcgcacccccagcggcacgttgtgcgccctgccctacgaccgcctgatcatggcctgtggcagcgagctgaaccggcctgacagggtcggtatcgaacatgcctt

SEQ ID NO: 570672 - DNA, 157 bp, Homo sapiens
tagagtttaaggtaactctccaaggatgcaacattcccccaacctactgtcacacacaaatgtgtgaccttccacttattcaagtaaaagaaccagaaggaaggatgtcattcccttttttttttttttttttttttgggcccaggggtttttcaac

SEQ ID NO: 570673 - DNA, 173 bp, Homo sapiens
atcgctatacccaccggttcaagtatttagctgactcgctacactccacggaagcaatatgaaatgatctgctgcagtgttctgagccctaggatacatctttctatttcaccgtaggtggcctgactgggctattgtatatgagcaaaactcctccactagacatcgtacta

SEQ ID NO: 570674 - DNA, 117 bp, Homo sapiens
tgtactgctgaacgaaccttatagtgtgtcagagtcttctggttcttattttagtcgttattcttagttgtgctttgatgactcattccctctgcctggaatttcctccctatcttc

SEQ ID NO: 570675 - DNA, 132 bp, Homo sapiens
  misc_feature (14)..(15): n is a, c, g, or t
  misc_feature (48)..(48): n is a, c, g, or t
aaaaaaaaaaaaannccccttttttccccccccccttttaaaggtttncttgggggggggaagacagccaataatcacataactgctctaatcaaatatttcaccaaaataaagtattagccacctcctaga

SEQ ID NO: 570676 - DNA, 220 bp, Homo sapiens
gcggctcacggaactttcttcaaaatgtttgcaactgttgcgttagttgatgttggccccactgttacgtggtcatgacttctgttttagctgtgccacctgtccctgagcttgttggccgtggacgccagctccgagttctgagctttcaaggttttcactttttcctccagccgggcgattctctccacttcggccttcaaagttccgttgaagccgt

SEQ ID NO: 570677 - DNA, 382 bp, Homo sapiens
gtatagtggtccggaatgacacgtagttagattccttgctactcgacgacaatcgattgcatattatgcccggataccgaccgatggatgtaacgtggcaattaagataaacttattttcgcttatgtcgaccgcagttattcaacaggcgtgtttaaaaggcacttttcgaagaaagtgaagagttataatataagggatttgtaatattcgttgattcgatgcatatttttatttataaaacaaatggtgtggtgactgcttgaacaaatctgctgttggatgttattcctagcttcaaaagccagcttgtaagggagaaatcgcacaattttagaactaatctgtatatatattattccattcactccaccagtaatca

SEQ ID NO: 570678 - DNA, 316 bp, Homo sapiens
  misc_feature (283)..(283): n is a, c, g, or t
  misc_feature (313)..(313): n is a, c, g, or t
gttgcttaccaaatatgtatcctatgttaattatacttatattaatgaggtttgaaatgttgaatgagagtaacgtatttaatcttcctatttagttcagtatttggctcagactttcttatttatagaactctgtaacatagctctaattattttacttttgcagcagagtaccatatctgtttcttatctgcagagatctgttttcaatgcagttttattctacttcttattctgatttaagatgggatgatagttttgacttgaacttatttttttctgngtctgattttttcatttactgtagggctgntgg

SEQ ID NO: 570679 - DNA, 1864 bp, Homo sapiens
  misc_feature (255)..(255): n is a, c, g, or t
  misc_feature (266)..(266): n is a, c, g, or t
  misc_feature (470)..(470): n is a, c, g, or t
  misc_feature (492)..(492): n is a, c, g, or t
  misc_feature (526)..(526): n is a, c, g, or t
  misc_feature (847)..(847): n is a, c, g, or t
gtgtttttgtgttatttttttgtgttgttgttggttagtatgtttgtttgtgttgttttggtttgtatttttatattgttgttgtttagtgttttggttatggtttgtattgtgtgatgatttaagaggaggaggagaggagagagagaaaagaaacgaaatacactagatgcactctaatcctaccgtcacgcctatgcgttgtgggggtcttctctcaggtcatgcacacacacaaacaatgtattgatagtnatgtgtgttgntgtgacgcatcaccagataatgaggtgtcgcgccgcatgtgtcccctacagcggatcactcgcgtgcttctctgtgtattataaattacgggtgactggaccaaactaccacgactgcggtgttttatgagtatgcgattctcatcacacatagcgttgtggtggactcaccacagcgcatcgatgtgtgtgttgtatgtaacnggctgcgtctcccctcctcggnggaaggagttgtcttcttcgtcggaggtagggantgtctgttcggttgtactcatctcacccccgttcttcttcctgtgatgatcaatctactgagatggtgtgtgttgtgttgtgccttctggacgccacacacacagatggggggcatcggtttgtttagagagacgcggtgggtgtaacaccacctgatggaggcaccaaaccacatgtttgtgggagcgccactcataccactcttttctgtgtgtggttcaactatggtgggcagcttaaaactacatccttgctactctgatggtggtgccttctggttggtgtggtccgccctcccttgttgttggtaacacccattngcggtgggggtgttagtatatagagggtggtgcgtcgtcgctctagttatgtggtgtgtatgtctacacatacgtttgcttacctacacacaaagatgttgtgttgggtggtgtccacctcaataacacctcttgtggttggtggggagaccacctctcgctgtgtttgcccaataccgcgtgccggagtgtgttgtttcatatacacctcgggtcgccacgcggggggagtgagtggccgctcgcaccctcgttggttgcacccacacgcgctctgtgcgggagagagaaggtcgtgtctcgtgctcacgagagtcactccctcaacacactcgcgggggtggcacacgcgtctgctgttttgtctcactcactcccacaggtcgtggcgtccaccacaccctcagcgctgggactcctcagcgtggtagtatataataccatccctctgcgagcagagagagagatatgtgtgtgctgtctctcagctgagtgggtgggcgcacacacacacagcagagagacacacacacagagtgggctgtcgttgggagagagatatatgctgtgctgtgtcagtcagcggagagtactcactcacactagcgtgtgtgctcccaagctgagatagcaccgcgtgagatagtggagagcgaggatggtcggtgacacacataatacaggaagggtgtgtcataacaaacacagaaagaagtgtgtagaagatgaggaacactaaccctcgagagaggtgggaggaacaccaagctagggtcgtcaccccccccaccccagcggaggatggattagtacgccaccactcgggtgtgtgtcgtagggattgttgcgttggtgtgtggtgatctcaattgtggtctcacgactcaccactattttatgatagattgtgtgtgtgtgtgtgtgtgtgtgttgagtggatgtgtgtgcgcctcataatacatcatttccaccccctcctcgtgtgttttcggtgggcggtgtggtgtgtctcaaata

SEQ ID NO: 570680 - DNA, 959 bp, Homo sapiens
gctagtgtggtagtggtagatagagtgaatgtcctccaggcatctggtacagtagaggtccgctgctcacaactccgcctgtcagaggtgcgatgcctgatgctcacgggacgggatatcactgtgtttgactttcatgtaatctttgtggtgttgcttgtttcacccatgttgagtcttggctttgagtgcctctcacaggggtatcatcgccttatcaggtgactaggcgtcatcatggaatggtaagacacacacctgcgaaatgcccaaggtgactaggttgcgtgtcgtggtggcagtcctcactgtcctgtcatcgtcagacatgggggtctcatacaaggctatagggaacacgaggtaggtactggggaccccgaatgcagacctatacctttggtgtatgcgagtaccctggatggtgcacccctagtgtgcttgcaggcattttacttggggggtctctaaattgctcgcagtgaaacggacatcttcgtctcatggggcctgtgtaacagtcatggaatggcactaacgcggttaattctatcgggtcacgcactccagctgttacaagtgaccgtccccgctgcttgggggccgcctcttgttgcgagtgagcacgtgtctgatgactaggtcccaggccttgtcccagtttacaatggaagagaccacgatggggggaatctgttgcccagctgcggtggcaggggccttggcggttgagtaccgactcgattcctgcatgttcacccagggagcgaggcgctcttgtctcccaggccgacggtgagcgcggggcgtgtttttcagtgccccggcctggggatggcggcagtcctttcatgccctgatcgtcttctgctatttctttcttcccctgccttctagcccggcctcggcttcgccgcttgcgtggtcttcacaggccgcttcttcggcttgtgcctctt

SEQ ID NO: 570681 - DNA, 579 bp, Homo sapiens
gctgctctctgccacctgcagagctacttatctgcaggttttcccaataatcaaacaatgagcagatcccgcctcatcttttcacaagttgtggaacatgattcagtaaaactcagcttcgtttaacttacaaaggatggcctggcccccagtaaacgccgattcctgctcgcggccttctacgcccattactggagcagcagccatcagtgtagacgacgacgaagtctcctgtgggaaaaggaagtacatgctgctgggctgaccttactaaaaactgaaattcacctcaaaaatccactaggtcgacttagcattttaaaccgagagggtattttacaacgctgcagacgttttctctctaggaaaacatgctccattccttacaagggggcacctaacatttatgcttggaatccacttacattttgatcttgcaggccaggcaagttcggggtgaaggcaatcaccttgtaaaactagagcctgctgcagtaaaactactgttcacatcccacactgtgggttcagaggacaatggcgctgtctccacggcagggtcaccttcactcccaggga

SEQ ID NO: 570682 - DNA, 405 bp, Homo sapiens
ctctaaatctcctctcctggctttcctgcagtcactgtgctttgcaggccagctgcctctaggactcttagaatacaatggtgctttcgtacaaccttgattttgagcatgtggttcctcctttgactcagctgaaaaatttctaaagcagttaactatatgttactggattatacttagatttctactacaacattattttgtcaaaactcgtactctcacgtgtgagaagcattgtgtcaaacaaaatggagtacattttttcaataacaacttcttagagcaaacctgtactgagaagaaagtatagttgccaaatgtatgtggtgatcagaaatctggaagaacccttattaatgtcttgtattacttgaaaatgctgataaaatatgttagcctgcttat

SEQ ID NO: 570683 - DNA, 133 bp, Homo sapiens
tgtaaggggatcgcaaggaattcaactgccctgttcatggtccctctcccaggctcaatcgggacctcgagcgccgtcccaattagcgccctgtgaatgctgatctacgggacagcggggctatcgagcagga

SEQ ID NO: 570684 - DNA, 118 bp, Homo sapiens
tttccatcccccttcgtccggcatgtaggtcagctggcggcacggtgagcggctgaccgtggtgctaggagatgatccgggaagggagattgccggtcgtgcagtccttacttgctgg

SEQ ID NO: 570685 - DNA, 212 bp, Homo sapiens
gcaagctgtactactattggataactaaacgggaaagttaaaaataagctttgacaatatcctcatacttcaaggcacagtaccaaagttagctattccaaaaatattccttgcgtactgtagccagaagtatcctttctggctcctgtgtatagtccctgccttttttatttatttatttttttttgggaaccttatgcccttgggcttgg

SEQ ID NO: 570686 - DNA, 167 bp, Homo sapiens
tgcacgggcgtacttctcattctccgcgtggaagcctatccgccctggatggcctgagcgccggtcgcttgctctgcggcaatcaccgcatcgatccgcaggtagctgtcggacgcggcggcgcctccactctcgatggattcgcctatcatcttcacatgcaatcc

SEQ ID NO: 570687 - DNA, 274 bp, Homo sapiens
  misc_feature (157)..(157): n is a, c, g, or t
cctttaaagaacggatgtcattcgagagtatcgcgtatataatgtacgttataagaagtagcaatactacgtgacatactcaatgtattgaatagcatatcgtctttacaaggtcaaagtagaagtccgacctatagtcctgagtggaggccacaangggcgtaccaaggaaaaatgccttggcatgaactgaacacgttgacacattggtcatggacgaaattcaacgaagccacagcgcgtcaatgtgtgttatgcgtactctgcatgcctc

SEQ ID NO: 570688 - DNA, 516 bp, Homo sapiens
  misc_feature (412)..(412): n is a, c, g, or t
ctcagcagtggtgctttcagcggtgaaagtcctaatgaagtttctagaatagttacgtaaggatgctgactactacaatatgctgctgaagaagttagcccctccacttgtcacttggctgtctggggagccagagagtgcagtatgtcgaccctggaggaacatcagacttaagttgtcgcaggaaagaggcctggaagatcgtgtgaagcgaggaagatcaagagtctgtctttggtgacagtacagatgactcccagtctattgttaagactgagagagagcttggacagtcactgattgcgtttgggcagtcatcaagccgaacattggctcagggttcctggcagaagctgaaacggaagtatgctagcagaggtggacggttgacatttgttcgagaaggctgtgncgggcgcattgggacggtgtgccagtcaatggtggagcaatctgcagagcggctagtgtacagcacactagcttgagtctaatccgagaccaaaggtgagatta

SEQ ID NO: 570689 - DNA, 802 bp, Homo sapiens
caagttccgcccagaaaatgaggaagacatccatggttgttaccacgtcaggggagaggtggaagaggattgatgcatgctacctagacaatgggagctttgacaggtgacaaaccaggcagcatgaagtgacagcttgtatcatgcgcgtccagacagcagacactccagcaccatgcaggctgcagtctcccaatacagcaagccaagggaggcagctagcaacaccacgcctagcaagagaccgatcgacataacggaacgattcggacagctcgaatagctgtagacagaaacgaggacaggacgtgactcggcgagacaagcagcgtagcgtgtctaagctgtaatatgaaacatagaaccaagaatgatgatcctccaggagaagaatgaaggaacgccatgcggacactcacgaagatggcagtcatgcttcgatggcccagcctgtcatcctcgaagatgcaacatggaaagtggagaatctgtgttcagggtagatcaagattggacagagcagttagagcagctgacatagggatatgagcgcatcctctttctcagtgttaagctagaacacgaggcaccggaccagaaaggaagctcgagcgagacctggggcagcaattgaacgcccgaagtgaaactactgcaatgaagaatcaggcagtgaacttaatggcatgaccatacttgaccgtgtcctatacgactgagtgtgaacgacgttatgtgtgatgctctggttgagcacgggtagagagattgggaggggacaggtgatctttggaagaagggc

SEQ ID NO: 570690 - DNA, 713 bp, Homo sapiens
cggcgttcataaactgtcctccatggtgtctagctgtgcatcgatcgtttgatcttcccccaatgccttgtaggcctacatccatcgagctggcaggacagcacgcgctagcaacccaggcatagtcttaacctttgtgcttaccacggagcagttgcacttaggcaagattgaggagcttctcagtggagagaacagggggcccatactgctcccctaccagttccggatggaggagatcgagggcttccgctatcgctgcagggatgccatgcgctcagtgactaagcaggccattcgggaggcaagattgaaggagatcaaggaagagcttctgcattctgaggaagcttaagacatactttgaagacaaccctagggacctccagctgctgcggcatgacctacctttgcaccccgcagtggtgaagcccaacctgggccatgttcctgactacctggttcctcctgctctccgtggcctggtacagccctcacaagaagcggaagaagctgtcttcctcttgtaggaaggccaagagagcaaaatcccagaacccactgggcagcttcaagcacaaaggaaagaaattcagacccacagccaagccctcctgaggttgttgggcctctctggagctgagccattgtggagacaggctacaccctcgtggacggcgaggtctgtgctactgacggctgaacgacgtctg

SEQ ID NO: 570691 - DNA, 392 bp, Homo sapiens
atgtctatacatgagtataaatcaataactaccagacagctccaacaatctgacttaccattatgctgtgcacaacaaaaacaaagacaaaaacaacaaacaacaaaaaagtcaaaccttgaacaacctacattctatgtgaatatcctgactaaaatattggttgtgctacccaattccacttacagttgcagaaatgcattgatttcactgtaccgtagtcgtcggcttaaaaagtgtatttagcacttctgtcactaagcatggccttgctttgaacagatgcatcatttgctaccaaatcacaaatcatcacaaatacatatgagtttggtctgaataacatccagcataaatgtataattttattctggggtatactggctcggagt

SEQ ID NO: 570692 - DNA, 375 bp, Homo sapiens
acgttgacctaggaattagagaccagctgggcaacacagtgagaccttgtctttacagaaaaatttaaaatgagctgggcggctgggcacggtgactcacacctgtagtcccagcactttgggaggtcagggcgggcggatcatctgaggtcaggagtttgagaccagcctgactagcgtggtgaaaccccgtctctgctaggggtacaaaggttggccggatgtggtggcgcacgcctgtagtcccagctattcgggaggctgaggcgggagaatcgcttgaacccggggggtggagtttgcggtgagccgagattgtgccattgcattccagcctgggtgacagaatgagactgtctcaaaaaaaattaacaa

SEQ ID NO: 570693 - DNA, 298 bp, Homo sapiens
aagtggaggatgggggtggtgagatccagcgttgggcgacaatcgggctcgttcatatctctgccgttgtgtgagccatatggatcagaccctggtctccataactcctttacgcgttgggtcagcaaatatgttactgccatttctatttgggcttaagagaaatgaccaaaagatatttgtgtacagactgtgtttctggaagcttgccctgggactgagtgctgaccacatgatgtggagaatagcgaggcctggcatggggcaaacttgtagcgggccaatgggtgtgtgctgt

SEQ ID NO: 570694 - DNA, 513 bp, Homo sapiens
ggttttaagccagtgaggcccacacctgggactgtgggcacatgtacttcatgggaagggagatcccagttgaaatcagcaatgaggagcgatgctgggcagaaaacccatagcgccgtgtccttggggagtccttggaccatctgtttgactgaagcctcggtttttttctgctccaccacacactggctggggtgagacaatgcgtgcgggaccctggcctccaggaagggtccctgccctggctgcagggcctgatgtgccatgttcggctcaggcctgctgaacagcaccatttccagcttctgccttttaccaggcctcttagggagggtctcctaagcctctcattcctgtggcccatgtcgctgaagggatgaactgaagccccttccacagcagtgattccagggattgagacttcactccatcagagccacaaggtcagagttcaactaggagtttagggaaggagatctttttgtagattttgccacaaaagaaagaataatt

SEQ ID NO: 570695 - DNA, 195 bp, Homo sapiens
ggcagtgcgtgcttcatccctttatgaagaacagaaaattatgactactctacaaggtggataatacttcggtaccttgcttgccacagccctgttcctcaaagctgaattgataaatttctctttgacttccaagacctagcagttataaggcgccttgaataaagtttgtgcctgaaaatgtggagcaatgct

SEQ ID NO: 570696 - DNA, 375 bp, Homo sapiens
tactactaaattcgcgggcgagtcgacgggcgtctgtagtcccagctgctgcagagcctgaggcaggagaatggcgtgaacctgggaggtggggcttgcagtgagctgagatggggtcactgtgctccagcctgagtgacagagcaagactccaccaccacgcccggctaacttttttgtattttcagtagagacagagtttcaccgtgttagccaggatgggcttcatctgctgacctcgggatccacctgcctcgggctcccaaagtggtgagattacaggcatgagccaccatgcccagcgcaattatactttttattatttactcaaacgagttgataacttacgttcggacaaaaacctgcacatggatt

SEQ ID NO: 570697 - DNA, 198 bp, Homo sapiens
gagtggagattcaacttgaccattctggctaaaaattaaaaagcacttttttatatctgtggttgtcatgtgtttcaaagcatttggtaaatctattgttcttaaaagtatgtatgcctgttctagcttgggacctaggtcatctatgaaccctcgttgtgtttaatgaacatatcgtgtaacggcatgtaaacctga

SEQ ID NO: 570698 - DNA, 152 bp, Homo sapiens
ccatttgccaaaactgagtctaagtgcatttactctctgcctggatgtgattggtggtaccagtggccattgctatgtagttgatttttccctatcaatttatgggcaattatcaccaaactgtgtcaccagaatgttaactgccctgaaag

SEQ ID NO: 570699 - DNA, 127 bp, Homo sapiens
tgcgtgtgatctagaggatcccaagctctggaaaaggggagaggcaaacagttggcctgacagtgcccatctgccagtctatgaggcactgccttagcagctccgcctcatgggaccactactcacc

SEQ ID NO: 570700 - DNA, 1304 bp, Homo sapiens
gcgcttgctccgagatacacgagtgattgctgttgagttgtgctatttgcgactgactgaattacctggtgagcatctaataagtagctaatacgaagcgctactccaccaccctaactaggcatcttcatgatgacgagccccggtgctcatcgtttcgatgatatcctgcttgtttcgtgccctggtggtgcagtcgatctgtcgactgctggcattcctgatggactctgcatctatctgactctgtaccttggactcctcctggtcttacagatgtccctgctgggtgggcttcttcccagtgtgacacccgtacgctggacgtgtctggagtagttggtgcattgagggcattttgcgtcgcctgtactcgggcctgaataagtccttgggcttttactgtacccactcgacaaactgttagcctcatttgactctaccgagggcacaccagactatctcgagctagcttgatcataacctttctaatatcgaggcatccactatctatcaagaacgcctcccgtgatcacgtaccatacccgcaaccaaggaaatccttgcagttgtgcacgcgacacatgtatatcatagcacgtgccgagaggtcccttggcacttgtcgaacactcttcctgaatatgttcgcccaatttcgacacagaaacaacaagggcgccgagaacgtggagcttggatgcaactcctttggcgtgtgcgcattcaactcctccacttcacagggcgtcaactatctatgtgagttatacccgcattccatggacgcacgcggggagggtaccctcatctagcaacacttggtacggtctcaatgcgcgattaattcacccacgttacgtctgacacttaccggaagtgaggcaaacgtccccctgtgttgcccgagatggaaaccccccctcctctacgcatccgtcttatatccatactatgtttgaccacacgctcccgtctcacagcacggcactgattttccttcttccgagacaagacgtttgcaaacgcacttccggcactactggccttgtcgcccatgaagtcctccttgcgatagctaggcacttaataggggatcttgccgccatcgctttacaagtggatcgcttcgcccaacacacacccactccggcgactgcaggggtccttggggggggcacggtcacccaactgctagggactttgtcccccttgggacttgggcccagatctcacagccaagcacctcggcgttgggcaataagctcggtcacgcgcctaggtcaggacacactcttcaccat

SEQ ID NO: 570701 - DNA, 322 bp, Homo sapiens
cttttgtagagacaggatcttgttatgttgcccatgctggtcttgaactggcctcaagcaatactcctgcctcagcctcccaaaatgctgggattacaggcataagccaccaccctcagtgaactattaacccattaataaagaggcaggatggtggaagaaacatgggaaccggattcatacaactgattttggtttccatctcctccacttactaactgtatgaaccgcacgagaacaccaaccaccttctggtctaatactactatcttacaggggaggcacatggggaaaacagcatcatttaatgagaaggtctttt

SEQ ID NO: 570702 - DNA, 182 bp, Homo sapiens
agcccgtctcagtttgtcatgtgagctacctacagtgccaaagccgttaaacgttcgagactacgctcaggaagaactggtagtactgaattctcggtggaggcgggtcatatcgaatacataatgcgcgggtgcgatcctcgtcacgggccgtggttgcactaccgtcttgagctgtgacc

SEQ ID NO: 570703 - DNA, 305 bp, Homo sapiens
aaaatggcactttcaatttttccaccctacaagatctaaataattcttggcgtaaaatgggcaaatggtgtgaggtgcctgacgtccaggcattcttttacacatcagtcccttcctagtctctgtgcccagtgcaactcgtcccaaatcttccttctttccctcccgcctgtcccctcagtaccaaccccaagcgtcactgagtctttctaatcttccttttctacagacccatctgacctctcccttcctccccaggctgctccttgccaggccgagctaggtcccaattcttcctcagcctc

SEQ ID NO: 570704 - DNA, 249 bp, Homo sapiens
agaatcggtaattaagaatagctactcgaaggtgcagaactgacacacaggacagaattcctttcccagtttgttaccctagcaaggctagggagggcatgaacacaaacatagaactggtcttctacactttctctgaatcatataggtttaagatgtaggtgaaccattctttctttctgccatgaaacaaagttttggatgagcttttatgtatggaacttactccaacaggactgagggaccaag

SEQ ID NO: 570705 - DNA, 146 bp, Homo sapiens
  misc_feature (41)..(41): n is a, c, g, or t
gcaggagaaggaaaagacagcaactcatcccagaattgccnaatgaagatgaggagaatcccctcaaagggatctgtgtgcttacagtggtgacagtgacaatgaggaggactgatgagagactcaagagtgaggaagagagctag

SEQ ID NO: 570706 - DNA, 584 bp, Homo sapiens
  misc_feature (269)..(270): n is a, c, g, or t
  misc_feature (275)..(276): n is a, c, g, or t
  misc_feature (281)..(281): n is a, c, g, or t
  misc_feature (284)..(284): n is a, c, g, or t
  misc_feature (286)..(286): n is a, c, g, or t
  misc_feature (290)..(291): n is a, c, g, or t
gcccagctccacattctgtaaggtgtacaccataaccccactgctcagcgacaaccgggagaagcggggtctcgccctggatgcggacaactccaacgccactgacgggcacaccaacagcctgtgctgtcccagcacatcgtgaaggagggtgcaacaaggaggtgctgggaatcctggtgtcctacagggtcaaggtgaagctggtggtgtctcgaggcggggatgtctctgtggagctgccttttgttcttatgcaccccaagccnnacacnnccctnccngncccnncagcgctccggagacagatgtccctgtggacaccaacctcattgaatttgataccaactatgccacagatgatgacattgtgtttgaggactttgcccggcttcggctgaaggggatgaaggatgacgactatgatgatcaactctgctaggaagcggggtgggaagaagggaggggatggggttgggagaggtgagggcaggattaagatccccactgtcaatgggggattgtcccagcccctcttcccttcccctcacctggaagcttcttcaaccaatcccttcacactt

SEQ ID NO: 570707 - DNA, 221 bp, Homo sapiens
agattcaccggcagcacaggagaagtgagtatgaacagcaggaggagtaactcatagttactgctggccctggcagcgatatctcatcacctgatcttacagatcttacatcctcaagcaaactccccagggcacattcttagttggccagccatcaccccagacttctggaaaacaactcaccactgggtcagtggtccaaggaacactgggagtcagca

SEQ ID NO: 570708 - DNA, 321 bp, Homo sapiens
gcccagctccacattctgtaaggtgtacaccataaccccactgctcagcgacaaccgggagaagcggggtctcgccctggatgcggacaactccaacgccactgacgggcacaccaacagcctgtgctgtcccagcacatcgtgaaggagggtgcaacaaggaggtgctgggaatcctggtgtcctacagggtcaaggtgaagctggtggtgtctcgaggcggggatgtctctgtggagctgccttttgttcttatgcaccccaagccccacgaccacaccccctcctcctctggcctcctctgtgcttccggaccgctat

SEQ ID NO: 570709 - DNA, 1181 bp, Homo sapiens
  misc_feature (887)..(887): n is a, c, g, or t
ggtacggcacccgatggctattcgagctctcgatctcggagactggagcgggccattcagaggcgcggggccgggcccggcggacgcttgttgttgtccggccgggggaggcggaggtcgctcgctcgctcgctcggctcgctgactcgccggagcgctctgtggcggtcggcggcaggtcggtcgcgagagcgggctctgtggaagggggcgatggctatgtcgcggtggcagcccggatgggccggcatgggccgggagtaacgggacgtcgccgcggagcgttcttcccccggatacagtgcggcccgagcggatggccgcggcgccgccctccgatcttgaagagccgcgctgcgcggagccccgtcccctgctgcgcaccggagaggagcggagcgacgagccagccagaccgggccggcgcggctgatctaagccaggcaggcaggcgaatactaggccctctggagcacggagctccttccccaaagaccatgaacgctattggagaactccgagctttgaagcccatcaactcacagctgacttgtggagaccggagatgcccacattcatttggcaggattgagagctactccatgtaagatggccaggagaacgacgaacacttgttcaagcagttctgccaggagggcagccccacgttgtggaggcactttctccgaccccagacttcagggactgagccccaggcagaactcagcaaaatgccaggcgggtgaggaaggaggtcccccttcgttggcagttgacgcccgagaacctctttttacctgattggggcgcctcactgagtccttcaggcctcgactatagcattcgcgcaaggccgcaggcatggttcagccggaggccacggcctnctcgggtgggtggaactgccgggccaactggcgggtcttgttcaccactgtggacggaggagagttccccggaggtcttgaagccccccccttttgggactgcacggtgtgcacgtgagaactctctgcgcgtcgaattgaattctccacgtattaaccgacagtgtaggtaccaacactcctcgggagggaggggacgtccggctgtgataagagacagtctttctaagaccgggaggagagacgagtgcttatgtaagtgagagcacgcatgagggaccaagcacgcctcag

SEQ ID NO: 570710 - DNA, 161 bp, Homo sapiens
cacatctcagcccccatgacgctgctggggaatgtggactgttctagctctgagacgttaactgagagacagagaattcgtacacatgccgatacgtgcagccctgtgtacagttttcttccttaaccagtttaatcaggagtttcttggcccttatcgag

SEQ ID NO: 570711 - DNA, 595 bp, Homo sapiens
  misc_feature (269)..(270): n is a, c, g, or t
  misc_feature (275)..(276): n is a, c, g, or t
  misc_feature (281)..(281): n is a, c, g, or t
  misc_feature (284)..(284): n is a, c, g, or t
  misc_feature (286)..(286): n is a, c, g, or t
  misc_feature (290)..(291): n is a, c, g, or t
gcccagctccacattctgtaaggtgtacaccataaccccactgctcagcgacaaccgggagaagcggggtctcgccctggatgcggacaactccaacgccactgacgggcacaccaacagcctgtgctgtcccagcacatcgtgaaggagggtgcaacaaggaggtgctgggaatcctggtgtcctacagggtcaaggtgaagctggtggtgtctcgaggcggggatgtctctgtggagctgccttttgttcttatgcaccccaagccnnacacnnccctnccngncccnncagcgctccggagacagatgtccctgtggacaccaacctcattgaatttgataccaagtaagaaactcattcccctacttgaccctcttgggacaaagattcctataacattcaaatctgccctcatacctcttccttgcttttggtggggagaagcggattgtagcatcaaatcaagatgccttagccttgtgaggctgcctcttgctgccttttctttgtcccttcctgtaaatacctctggtcccactgctgttcgaacgcctctgtcccagaggcctagcttcggggagggcagggagtg

SEQ ID NO: 570712 - DNA, 206 bp, Homo sapiens
accaattatttctcccagcgcttaaataatattctcctcgtcactcttcgcgtctctcttccatgcattaccccatattctttgaaattaccttgaaagaaccccttctaattgatatctgcagttccaatcctcctgttatctcctgaacccagtccattcaggcttgcaatccctatactctaccacccctgtgtcaatgatca

SEQ ID NO: 570713 - DNA, 1060 bp, Homo sapiens
gcctgaccaacatggccaagaccctgtctgctactaaaaatactaaattagaccacgggcgtggtggtgcatgcctgtaaatccagactacttgcgtgaggctgaggcagcgaaaatggcttgaacccgggcaggtggaagtggcagctgagctgagattgcgccactaggcactccagacctgggctacaagagcgaatgctctcggtctcaacaaaaacaaatattgcccagggactgccgtgtaggccaagatgcacgtgttggatcctcgggccaaccttttggggaggactcggaggactagtggtgggagtctagcacaggctcaggggatcatagtaagcacgcgatccatttggcgtatcaatggtgacaacacccgatctacttactagaagtgtacgatgaaagatgaagagaggaagctaggggacatcttttaagtgttcggggactggaggtacaaatgaacgcggtaggtcaagacacttggagccaactggtggggcaccgcctaggcttggattcctcggtagcaccacccgcgtttgttaatgttttactgacccataagcccgtgggataacaatcgtccgcggaggtagccccctgtatgtattcggggggacgaagttattcagtacttggccagcaagaaagggcgcaagacggattgaacccggtagcagtaaaaagagacacattccgccgaaagaacccggtgctaggcgtcgaattgcacagcatgacacatgcagcagtatggagtggaagcccaactcagggatgtgaaagaaggacatatgaccacttttatataactttgcccattatacaaagttaccaatgtggccaccatgaaaaaaccacaagttgacagaaggcggaacagtgaaaatcgaagccactccccgcgtgaggatagtggataagactggttacccaagttttacatagacacgttgtcccacccaggaacggtacaccgtttttaccaaagaattcacacaagagcagagtacatcaagagacatcaacttccagaaaggaagcaccc

SEQ ID NO: 570714 - DNA, 240 bp, Homo sapiens
tgtaaacgtgttccctgataacacatggtgtagtagtttcttataacgttcatgtttcttcatacgataaaaccgcctttcgtatgtaacttcatgggcaattaagtcacgacgcaacgtgttgatattgatatgtgtcgtttgcgaatttttaacacgttcttgtcgccagtatctgctagatacttcttcaacatgtttctgcgtgtccgtaactcttgtttctgttgatcgtgcttt

SEQ ID NO: 570715 - DNA, 90 bp, Homo sapiens
ggttcagcatgatgaagaggtttgtcttgatgaaatgagggatgcccttaaggagaagtcatcaaagcagttgtgccctccaattccttg

SEQ ID NO: 570716 - DNA, 585 bp, Homo sapiens
agcggctctttccctccccgcctccccggcgcgcacccctcccctcgcgcccctcccgcgccctacatccgaccgcccggcggagggggctcagtccgcaacggcgacgccacacgacgacgccatcggccatcgggtgcaggacagcggacgaccgacagacgagaacagcgtgcgcggggcgaagcagtccaccactgcagacaccatatggaaagaattgtagtatcaagcgcgaatatccaagcacatggtgaccaagaaactacgataccgtaagtcgatgcacaccacgatccaagacggtcgaaggtcgcctcacaggcgtacacaggattggagacacacattgtgcgagaagacacagtctcgcaccgtgcacaacatacctgacaagaaggaagtccacttgacacgggcgcaagaacgtactgctgcagaccaagagataggcacacccaaatgactagccgtgaacactgctttatgaacaagattcctgctgccgaagcaacacatgctggcagagaacagcccggaaaggacccacatcagcgtgcgggacctaccgaagagagggagcaa

SEQ ID NO: 570717 - DNA, 756 bp, Homo sapiens
  misc_feature (7)..(7): n is a, c, g, or t
  misc_feature (64)..(64): n is a, c, g, or t
  misc_feature (97)..(97): n is a, c, g, or t
  misc_feature (110)..(110): n is a, c, g, or t
  misc_feature (133)..(133): n is a, c, g, or t
  misc_feature (143)..(143): n is a, c, g, or t
  misc_feature (148)..(151): n is a, c, g, or t
  misc_feature (177)..(177): n is a, c, g, or t
  misc_feature (182)..(182): n is a, c, g, or t
  misc_feature (190)..(190): n is a, c, g, or t
  misc_feature (204)..(204): n is a, c, g, or t
  misc_feature (210)..(210): n is a, c, g, or t
  misc_feature (213)..(213): n is a, c, g, or t
  misc_feature (276)..(276): n is a, c, g, or t
  misc_feature (290)..(290): n is a, c, g, or t
  misc_feature (332)..(332): n is a, c, g, or t
  misc_feature (340)..(340): n is a, c, g, or t
  misc_feature (454)..(454): n is a, c, g, or t
  misc_feature (462)..(462): n is a, c, g, or t
  misc_feature (746)..(746): n is a, c, g, or t
ggaattnggtttcccgcatttatatatttttacccaactttctatagaaagataaaaaatgttnccaaccttgttttttattattttttaaaaaatnttttaaattttcnttaaaataaatggaaagtaaaanaaagtaaggnttttnnnngtccttttcccctttttatgtactgnatgtncgaggaanaaggaaggaaaaanaattcnatnagagtactagtaatcctagtaccctggggattactgctggatcctcccaggtatacccctatnattgaagccctgangcacccctgcactgaggaacctgagaagggtaagtactaaanagtctgtnatagccacgtgggactgtcacagcacaggtgggactgggagtcgcccagttcttctcggtgctcacaggagtaacaaaggaactaggactaaaccataacaagaggtctcccangtggtacnacagtaccacacgttcacttttgtggcccttacaaatgcacatttatagacccaatgtatttacaggaaaaaaaaaaaaaaaaatgcctttactaatttctgtatcaaattattagaatgaaaataaaagcatttgtctgataaaacacactttctatgttagatgaaaataactcccttgcaagataagcttggtaatgtgtatttgtcactatttatatatttttgcttagtacacacatttctttaatagcatcatctgaacagctttgtcattttttcanacctgtagtt

SEQ ID NO: 570718 - DNA, 255 bp, Homo sapiens
  misc_feature (72)..(74): n is a, c, g, or t
ctcaatccaaagcagggggccaaagcacaggagcacggttgtccaaggaaatttgtagatagttttaccaannnaaggggggttaatgtagatggtaaatcagaaaaaatgtccactacactgtcacttaactaaatagcagttattattgtgttttgtgcccactacagatccctattaaccctactactacaatttaaaaatcgctcttattcaacaactttattcagaatatatttgagctaccagtagggg

SEQ ID NO: 570719 - DNA, 392 bp, Homo sapiens
  misc_feature (202)..(202): n is a, c, g, or t
  misc_feature (255)..(255): n is a, c, g, or t
  misc_feature (268)..(268): n is a, c, g, or t
  misc_feature (280)..(280): n is a, c, g, or t
  misc_feature (299)..(299): n is a, c, g, or t
  misc_feature (315)..(315): n is a, c, g, or t
  misc_feature (331)..(331): n is a, c, g, or t
  misc_feature (363)..(363): n is a, c, g, or t
  misc_feature (366)..(366): n is a, c, g, or t
gtcccgcgccacagcaggcagcgccacagtagatttatgttccacccaaatggtctctttactccctggagagcccccacaaaagatcctagaggggtatatggcccgctgccagaagggagggtaggccttattttagggagatcaagtctaaatttgaaggagtccaaattcatactggggtaatttattcaagattatnaaaggggggaaattcaagttagtggatcaagcttccctggttccctgggagtngccaatccaggtnaatagaaattgnttcaaattacttggttttngccttaatggttaaanattggggccaaactgnggaccaggaaggtttggaaggacccacccttnacncggtcctttttcagggaggggttggg

SEQ ID NO: 570720 - DNA, 312 bp, Homo sapiens
  misc_feature (5)..(5): n is a, c, g, or t
  misc_feature (116)..(116): n is a, c, g, or t
  misc_feature (119)..(119): n is a, c, g, or t
  misc_feature (130)..(130): n is a, c, g, or t
  misc_feature (175)..(175): n is a, c, g, or t
  misc_feature (296)..(296): n is a, c, g, or t
  misc_feature (298)..(298): n is a, c, g, or t
tttgntcttaactgcggagactgggggttcggaagaggttggaacgtgattttgaggtttaggggtgcattctgggtggattcccttggcatgggtggtcggcccttagcaactgnagncctaatttggntatgttaccctgggctgccaggacacaagtttttccatgcttttnccagtgcttgacttggcactccctgcagcaataccacttattttggtattgtgagcagcgcttagaagcttttgtattgtagttagtacagcggggccgctctggagccactgcctctagnanattcagcttgtagg

SEQ ID NO: 570721 - DNA, 1773 bp, Homo sapiens
atggtcgcggcgatgcatcactagtgaggaagtgggtcccgaaggggatggtaggtactctcgtggggggaggttcactgcagtagagggaggtgacaccaccgagtgagtggtggtccaccccgcggggagtgtggtgccatcctagaggagtaggtatacgattgacgatgggggggaccaccacacaatgtaccgggcatgctggggtgggtgaaactatacgagctgtagcgagtgagcctttgtgagattggatccaaacacacacaaaggtggggtccattgtgtggggggggaaacaccaccacaacggttggagtcgcacacatgtgttcgtctacactggtgagaactcactgttctacatggtgtgattcggtgtggttataggatgatgtgttgtgtggggccacatcagtgatagaaaaatatgagggcggggggttagatatataggttatcaccactgtgtgattcccaccattacctcttggtaagagaggtgtgtgtacggctgatgggtcgtgttggtggtaatacccccacagcgggtagtgccgctcgtgattaaaatattgtggaattgggggattgattcactacatgtggcatattgtgcggaatgacacctgtgactgtctggtagtaaggttcgcagctgtgtatgaacagtcgacggatcgtgtcgtcacgggatgtatagtggtgtgtggggaaccacaccacagacagtggtggagggttctactatctgtggtggtagtatagcccaaccactgcgtgctacaaggagatgtggtgcggcactccacagcagaatactggtgcctcccgcccccgccagtggggggttaatgccgtgcacaatagcagaagacggatacagtataagcagctccctgtgatgaatatgtgtggtggggccgttgcacaggagggtagactcctgtcggtgatcggaggtgaaccacacgactgatggggcccacccaacaggtgtgtgcccctgcgtccacacgggcgtacgtcgcggaggtgtctccaaaatacaggtgggggggagcagtcgccgcgttgcgctgccgcgatcgacagaagtggtgtttggcatcgtccacgaggaaaacacacggatgaggggggggtgaatgtgtgtccaccgcacagcgtcggtgcaacagtgacatcgacagcagtgcatatggtgtgccccaaaagatgtgagcacagtgtgggggagtacaaccaacagaggatgcagaccacacaatacgacagagggtgtagtagtagtaaacaactgcggtgtgctgccacaaagagagaagaaatagtagaggggtgtcgcgcacaccgtagtgtgcgcgtgcaccacgcgcgcccaacaacgggcgccaagcgacgattcccgccgtctcgatagagtgtgtatgtgaacccctgtggggcacacacagtgtgtgtgtgtcttgataagttctcctggagatgtgtcacatacaggagtgctcacagtggagaaacacagtggcgcatgctgtgctcacagaggcaagagtgccacccacaccacagtgagcccagcgcggagagtggagagggcgtcacaggcgacagtgtcctgtcctacagtgacccgaaccacgccacgaccaacccacggagtggtggtaagagaatgtgagggcgcctgtagcgcgcacagtcaccataacgggggttcacccggtagtgggtggcgcggcaaagtaaagaaaggtgacgtccaaa

SEQ ID NO: 570722 - DNA, 231 bp, Homo sapiens
  misc_feature (70)..(70): n is a, c, g, or t
  misc_feature (76)..(77): n is a, c, g, or t
  misc_feature (83)..(83): n is a, c, g, or t
  misc_feature (91)..(91): n is a, c, g, or t
  misc_feature (94)..(94): n is a, c, g, or t
  misc_feature (101)..(102): n is a, c, g, or t
  misc_feature (104)..(104): n is a, c, g, or t
  misc_feature (140)..(140): n is a, c, g, or t
acatgtgacgagtcctgctcgacactatcagggaatgagatcgcgggtgcatcgagaaggctacgagaanatcctnncactgnggccaccnggntcctctnntncaacacacccaaaaagatgacagactacgccaagangcgagggtgggtcctgggccccaacaactactacagtttagccagccagcagcagaagccggaagacaccaccattccctattagaactgg

SEQ ID NO: 570723 - DNA, 548 bp, Homo sapiens
  misc_feature (52)..(52): n is a, c, g, or t
  misc_feature (171)..(171): n is a, c, g, or t
  misc_feature (173)..(173): n is a, c, g, or t
  misc_feature (176)..(179): n is a, c, g, or t
  misc_feature (189)..(189): n is a, c, g, or t
  misc_feature (191)..(191): n is a, c, g, or t
  misc_feature (200)..(201): n is a, c, g, or t
  misc_feature (203)..(203): n is a, c, g, or t
  misc_feature (214)..(214): n is a, c, g, or t
  misc_feature (222)..(222): n is a, c, g, or t
  misc_feature (238)..(238): n is a, c, g, or t
  misc_feature (244)..(244): n is a, c, g, or t
  misc_feature (263)..(264): n is a, c, g, or t
  misc_feature (269)..(269): n is a, c, g, or t
  misc_feature (273)..(273): n is a, c, g, or t
  misc_feature (275)..(275): n is a, c, g, or t
  misc_feature (278)..(278): n is a, c, g, or t
  misc_feature (298)..(298): n is a, c, g, or t
  misc_feature (306)..(306): n is a, c, g, or t
  misc_feature (308)..(308): n is a, c, g, or t
  misc_feature (311)..(312): n is a, c, g, or t
  misc_feature (314)..(314): n is a, c, g, or t
  misc_feature (316)..(318): n is a, c, g, or t
  misc_feature (322)..(322): n is a, c, g, or t
  misc_feature (324)..(324): n is a, c, g, or t
  misc_feature (326)..(326): n is a, c, g, or t
  misc_feature (335)..(335): n is a, c, g, or t
  misc_feature (342)..(342): n is a, c, g, or t
  misc_feature (346)..(346): n is a, c, g, or t
  misc_feature (364)..(364): n is a, c, g, or t
  misc_feature (461)..(461): n is a, c, g, or t
  misc_feature (546)..(546): n is a, c, g, or t
gtccagttaaaatctacttcctcttgaaaaacaaaaatacactgaaggaagntgggaagaggtaaaagtggtatcatgattccacagcagtgattgtaagactagtgagccacagggaaatgggaaaacgtgaaaagaaacaagtatcaggaccaaattagagaagatatnanatnnnnccatcaatanangtgaaaatnnanaaacctaaganaaccagtnttggcatgaatatatncaagtngaaaataaatctgtagagnntcganatananggncctagatttaactccaagtntttgattngngannanannnaganananaatttatanaaatatnactntaataagaagcctaaaanataagattattagcctagatcatgtaaagtctagaagttcctttatttgctcatcacctttcctttttctataagactattaagcagaaggtcagtnacagaaaatttaccctttcctctcctctcttggtttaaattttaataaggaatctgaagaggctatggatcagttggcattacantt

SEQ ID NO: 570724 - DNA, 793 bp, Homo sapiens
tagcggcacattatcggccggggcgatcgtactattccgcgcgcagtcttattataagtaccaccctaggtcgggagagtccttatgcatgaggcacatatgcacacacgcgccgcgcaaccatccaacctggaaaatctatatgtcccaagacgtcccataactacatcgcatatctaacaaatgcacaaacgactaagtcaccagaagacacacagcaatggtaacctctatgcacatcagtccaccgctcttggatggcccacaatcacgaataccctatccatgttacctccaccatgcactcgtccacacatagttcgacaacgccacgacgcaccctttaacaatgctgaacattcatcacaacgcccaccttgcaccatcacctcccactcgccacgatgactcgaccatcgctatacagagactaccaactcgacttcagctcatctcatgacactcaaatgtccacccagactatcatcacaagtctactcatcgcgcatccccacgcagacccaatacctaacacttcatccacccaattcattaccacgcatccacgactaaccctatacaagatccccagcatacaatgcatcacatcgcacagtcacaccacaaatccccaatcgactcccaaccaaccggccccctacatacgcactacgctacacacacaatatcacacctatcctcctctccaacagacaccaactcgtacacgacaatccaaacgtctcaaaccatcctactcaacgaacatctatacccaccccacaaacctccg

SEQ ID NO: 570725 - DNA, 506 bp, Homo sapiens
ctgaaacaagaacagaaaccctcaccactcctcccacagcctacacttcagactctttcacctccctccttgcagtgtggggatggggttccatatcccacaacctttagttcgatttgcaaaatttcttccaacacaatcttcctgctcgcagtggagcactggatgggccacgcttaaatattagtatgaactgaccaaactcttcacaaatgcccttctagtgtctaggatggtgtctgccagccacacaccctctaagccagggccactgctgactcaaagtgacctaaacttaatcttaaatggccaaaagagtgtctgaactaaaacttattcccacttcccaacaaatctctgattaagtcaatccattctaagacgtccttgagagaaataccgacttactatactctactctaaataccagttagtctatagtttggtgtcatccatgctattaaagacagcaagaagttcaagttgaataatgaattaaaaaaaaa

SEQ ID NO: 570726 - DNA, 655 bp, Homo sapiens
agcggaggtggctcgcggggccgcgagcggagtgtaccagtgctgctctagtcgctgccatactgcccgaaggtcggcagcagctcgaccagcatgagccgtgccaggggtctgctgtggaccgctagtgacagtgctgctcagaccagcctatgagaaagagtgcagcagtcacagcagcggagatcgggaagctgcgcgacgtagactgagtctacccttaccactgcttgtgcaccatcttgacccataatgggtgacatgacaaaccagatcaagagcgtgatacaacataaattagacatgaggttgccacgtaggaagacacagacaacagggttacagaaggacacactgaattacaaaagggagataataaaacgcaaagggaagaaacttatataaaaaccacaagacgaaagagcacacaagggaacacgccaatacgaccgaaaacacaagcgaaagcacacagtccaacaagcgacagccacggctggacacacgcaccagccaggaagacgccaagaaaccgactagaggaccacagagcgtacacagcacacataacgagggaagacgcagacacaagacagcaacaaaaagcaaaaaaggaaagaaaaaacgaagcgcgaaagaggcacacaagaagcgg

SEQ ID NO: 570727 - DNA, 911 bp, Homo sapiens
cgacttggactggagcctgagctgaggctcggcttccgtgctgatgtgtcagtgattttggcaaatccccggtgtgagaggggtagggagtgctccctggctggcgacggggccgagttcaccagccgccggggcagtagtcgaagtgcccgggcgctggcatgtcctgggtgcctgcgtgtgcgtggcagtgaacagcgcgccagtggctgtgtgatgggcctgtgcagccttgtgcgccaagagctggtacctgggctccgatacccgttgtactgcgcttcagagtcgaccccagcacttgagcttgctcatcgcatgcagatggctggaggagtgcagcacgccaaggacaagtgcataaacgaatgtggctgtgcacattactagcagctaagacgctgattaaatgggcagctatgagtagcactccatttgcatagcactacccaatgacaacagagacacgggaccaccaatgaacattagaaacatggcataggatgacaatccattgcatgcaagggccaaacagaatagccccaactagtccagcatcccattgcaagcattcccaggaggcaacaatacaaaacaagcaagtgcgacaaacaaattggcaagaaagaaagggccggggatatccaaaggggatgccacgtgaggccctcaggaaccaaaacgtgaaagatagaagcaaagaccacaagagaaaggaagaaagacaaaattgttagataaggcgagaaaaaaacaaaagagaacagaagaatgagcaaagaaacatacaggtgaagaaggaaatattatgaaaagagagatgcagaacagaaagaaataagatccagaatacagactagaaggaaagtaggtgtagtataaaacaaaagataaaatccctgcattgacaa

SEQ ID NO: 570728 - DNA, 289 bp, Homo sapiens
aaacccctgccaatattttcattccaacacaaacgatgccagacttctcggcgctaggcaaagtatattgaggcggaagaggtgcctgtaaccttcagggaggaaatgtgctcctggaatgattctctacaaaatacaaggctatctcaggatccaatagctttggtatccctgcattaacgaaaacccaattaaattaatttctttaaaaagaaaaagtaggctggccagggtggctcacacctgtattccctgcactttggaaggccgaggccgttagatcatttga

SEQ ID NO: 570729 - DNA, 913 bp, Homo sapiens
  misc_feature (440)..(440): n is a, c, g, or t
ttgtcctctgtgtgaccttaggcagagggtttgatgctactgagcctctgttttcttatctgcagaatgggtatgcactcagactcaggcccttatggcgataagggttcacgcatgtaataccctccacatggcatctggaccctggaggtgggggcagtgtcacctcagcaatggtcctcaggcacgattgttagtagcagtaggaggtgaagccacccaggtaagtgggcacaaggtcaaagagggtttgggtctcagggtaaatgcctttggttgaactagtggtgtattgagcttcccacactgacattttctgagcagaggaattatcggttagcgcagggatttaggtcattaatttggagcaggtagaagtgcctggaaatggaaggactaacggctgaggcttctatggtccaagtgagtgatcacagggngctgggagtaggaagcacggctgaagggccatctcaaaggcactgtaccaattgggatggtgacatccactactgacggcaccacagagctggggtatatgtatgcttatgtgtaactttcccattttacaggaaaaggaagccggggctccaagaggttaggtgactgtccaaggttcacccaccttaagttatggccccgtgttggtacccatcataatttaaccattttgtgctgttcctaactgaaggatggtctcggcaaaggggcaggtcaaggcagacacccccaatgtccggaacggttaattgctgtggtccccctcggggagcggggggcaacccccacggaagggtggcacattttaacatgttgcggttggcaacgggggtcaacccaacttatatttttatatgcacacgttgtgggcacccttcaccagaggttgccaacacatttagaagcgcaacta

SEQ ID NO: 570730 - DNA, 130 bp, Homo sapiens
ccgcgtcgtaatgatgatactatttcctcgtataaccaccattccaatattgcgctggagtcactagtcgccatctccacacattcatctatcacaaggttcataaagggatcaaatcccctcaatattc

SEQ ID NO: 570731 - DNA, 217 bp, Homo sapiens
attctcagtcgggtgctgtccccagcagcatcgcgccagcttgaggaaggagtctcaggatgccctccagcgagagacaggtcggcctcactccttgaacttccattcctggcgacacatggggcagtgctgctgcccttgctgtgcttacagcacaattgaggatgcagtgcttgtggaaccagtgtgagcactgggcccaaaccagcgggcagtc

SEQ ID NO: 570732 - DNA, 607 bp, Homo sapiens
gggagcctcacaattcggaggaagccacaggacagtgaacaggagatcaatcggctctccatcctggcccttcccccccagtgccggctccatcctccggcgggcagtcgtgaggaatgacctccgcacccccctaagagatccttcagcagcatgtcagacatcacagggagtgtgacacttaagctcctggtcccctgggcctctcttcgtcctcgatcctctgaccagcgtgtggcctttgggaaagccaggaaggccatccgtggctcggggctgtggcctggacttcctcaatgaggtctctggctattcggcgtgtctggcccggagccccccagggggcccagagccgtacggacaagggaccagatggactgtcgttgttatggggacgaggatggtctggggctgtggtcgcgcagggtgctgtctgttggcctgggtccgccatggatggatccgaagagagcaccagtggtgctgacgctgctggtctggagcggggcgttgcctggacctgcgacgtccccacttatggaaccttgctgctgcgaatcaggggtccttccctcccgtccctggatggtcctccatgggcctgccg

SEQ ID NO: 570733 - DNA, 859 bp, Homo sapiens
caatgactgaccagcagcgtgaagacatcacatccagtgcacagtttgcattgagactccttgcattccgccagatacacaaagttctaggcatggatccattaccgcaaatgagccgacgttttaacatccacaacaacaggaaacgcaagaagagatagtgatggagttgatggatttgaagctgcaggggcaacacaaagcaacaaaaaagattatgataacttttcacacaagtgtctggtaaatcttcagtgttcacaacaaacagatgcccatttgtggctgtttttcattcataataatgtctacatctgacacacctctcatcaccgactttacaggatttcatggaagaaccaagtttttctatgatattaacaaaattgtacagtgttaggtattattgacatggaaagacacccaatcaacaacaattgtgctccgactagggcggcaaaccacgcacgtccgattttttcccattatttaatctcattttctggttgccctagttttccccccctatattcggtctccattcacctacgtgcatgcgtcttattacaactcttccctgtcttcaactggccgcaatgttgtgcttccagtgctccggggcacttcggccactccacctctcagaccccttcgcctgcctcctccgcacttccgtttgcacgctgccctcgctcatccgatgggactcctttacccccttcctaatcattctacaggcgacccgttctcggcccgtgaccctgccgcgcttggttcccatatgtgcaggcctcccaccccacaggtatcccgcctccgcggccacatgcgtttgccacctgggctgcgcccgggctta

SEQ ID NO: 570734 - DNA, 162 bp, Homo sapiens
acgggtgaggacagctcgaaaggcgccgacaggtccaggtactcgtctggtggacgttactggtaaggacacggtccagtgtcctccaccagctgcttgaaggtgggccaccgcatggacaagcccgccaactgcacacacgacctgtacatgatcatgcgg

SEQ ID NO: 570735 - DNA, 416 bp, Homo sapiens
tagagttgcagtggtacaatcacagctcactgcaacctccaacttctggactctagctatcctcccacctcagcctcctgaacagccgggactgcaggcatgcaccaccactcccggctgatttttgaattttttgtagagatggagtcccactacgttgcccaggctggtctcgaactcctggggtcaagtgagcctcccactttggcctcccaaatttctcccacgcccagcccaattttctccattacatacacctccctgaagctgtcatctttcaccagtccattttcctccacactcagtgaatgtgatctttttacttaaccgcatcactccctaactttaaacactttattaccatcaaataagtccacgtttgcaaatatggcttacagggactttcctgatctggt

SEQ ID NO: 570736 - DNA, 480 bp, Homo sapiens
ctgtgcaccaatattactgcaaactttgtggcttgagacagcacacagttatcactatgtggtttctgtgggtcaggaatccaggcgtgactcagctgggttcagtgcaaggctacaaccataatgtcagccagggctcagttctcatctggaggcttgactggtgattgatctgcttccaggctcatctggttgttggcagcattcagttccttgcaggctgctggactcagggccccaggttcttgctgtcctcagcttcttgccacatgggcctctccatctggccactcatgacatggcagctcacatcttcaaagccagcaagataacctcctagcaagacaacttaacatcctatctaacataatcactacatcccatcacctctgccatattctcttggttataagaaagtcattggtccctttgtcagatgagttgattgcaaagttaccattctgatgttggagcggccgc

SEQ ID NO: 570737 - DNA, 1126 bp, Homo sapiens
  misc_feature (505)..(505): n is a, c, g, or t
  misc_feature (512)..(512): n is a, c, g, or t
gggatgatgcattcgccggcgctcgtccgtcggacaacggcgtccggcagtgtgcaagggctggcttcgcgggtcgacgatgccccccgggtccgtcttcccctccatcgtggggcgtccccaggcaccaggtccgtgactggtgagcatgggtcagaaggattccgtatgatggtgcgacgaggcccagagcaagatgaggcatcgctctagccctgtaagtaccccagtcgagcacggctatcgtcaaccaagactggtgacgatcactggagaaaatcttggatactcactaactcttcttacataatgtaagcgtggcgttgttggcatccactgagggtatgcaatcccctggtggcgtggctgatcctgcaagaggcactcgcacgtgtataccgcacaagaaggtcactagaaccaggctggacgaaaagaatgacgacccagggattcactggttctagaggacacttatacgagaatacacaccgaagaccaatgntagcggntaagtcgtagtgccagtgactggtggcataatcgcctatggtacgtcgcgtctgtgtgtaccgtatgaccctacatgggccagtcgtgtgactggcagctccaggctgaacgggggctaacaccacatcgtgatacgccatttctaacgaaggggtagttgccctacacacccatagctcagtgcctagcgtactaggtaccctgaggcctggaccgaggagtcttgatctggaacttagctcgtacatggaaacgaattcctacaactcgagtcggctgggttaaccaggcttacaaccaatgcaacaggggcacggaggccggggtaaagattctgctggcggttgaccatatataggtggaggaaagctagttgcctacttgtactggaccctgggggaacgttcctaaagaccaaaaatggattgagcccaactgtgaaattgcctttgcccaagtcttcactttcgccttgggaacaaaaggaacgcatatcaggaagactggacgtgaacagggcccaggagtcaattcaacccattagggacacatagaagcgggattccctgatgcccctagaagggccagatctttgaaagacctgtaccttacc

SEQ ID NO: 570738 - DNA, 692 bp, Homo sapiens
ggcccagcgaccctcaaaaaaaaaaaacgggtttcctgcccttaaacaaatttgaatattttggttcccccattttgtttggggccggatctagaaaaatggttgccccccccccaaatttgtgggggttaaggttccttccacctttatctccacaccatgaaactcaatccgtgggtaggaaattcaggggtatttcctattcccggtcttggggcccccattttaaatgaggtgccccggcagaggatatcacccttaatgagatgcacctgatttctggtctttcttttctgtgcaacgtaaaccgccttgggaaaggcccgccaccctgtcttttgaccccacagaagaagggattttttcataggggtgccaactctcagatgttctggtagtgaagggcaatgaggtagcttagtggaccaccctgtttcaatttgggcagcgcacaagcctccccattccaaactcaaagaactgtggattttgatcaagctggccatgtgagcctgcaggagctcacaatgcggttttttgttatagcttttacaggtgcagaaggcatcttaccatgcttgggcaattgtcttgtgtcacgcggcaagtcccagcgcccttgaagtcgcaggtgggttattcgcgtccgcacctttgtgaacacagcctctcttcaggccaaaacctcgtct

SEQ ID NO: 570739 - DNA, 640 bp, Homo sapiens
gagaggctggctgtggatagtaaatactgatttaatgattatatattctgtgcatttaacaaaatttcacatgtaccccatgaatacgtataaatataatgaatcaggaaaaaaaaagaaggaaaagaaaaaaaaccttaaaggtaaagttggctaacttggagaattttttttttttcttgagaacggagtctcactctgtggctcaggctgtagtgcaggggcaccatctcagctcactgcaacctctgcctcctcggttcaagcgattcttctgcctcagttaccaagtagctggggctataggcgcgtgccaccatgccgtggttaattttggtatttggagtagagatggggttccaccaagttgggccaggctggtctccaattcctgacctcaggtgatctggtccgcctcagcctcccaaagtgctgggattacagatgtgagccaccgagcctggctgaacatttcctaatctggcctctaaggagtagtttggacagcgcggagaatacttggatgagtcgatacggaggaaacccgcaggtagcacctccaatggtccttatcctgaaatgcactctctgtaacaccgctctcctccgcagtcaccggatcacacccttccacaagtgt

SEQ ID NO: 570740 - DNA, 1051 bp, Homo sapiens
  misc_feature (26)..(26): n is a, c, g, or t
atatcaaattgtattgagtgcgtganccgttggttattcaatgcaacgagggggggatgactgctaatcccttcgagatggcctcttctggattctgttcctttttcctggcagtgaattatgcaaagggggccggcaaaggaagggtaggtgggggaaagccaggtggaagcttgaaagactgggggactgggcctgtaaggaaggagccatcccagtccccctccgccctgctcccggcgctgagtcatggggtcgtggagaagggggcggggtggcctgattttggctcgcctgcccctgggggcagtagaaggggcccctgcccaagctagggtgaagccgctccgttccactcccctcgctagccctccctccccagggcctgggcagggaatgtcttgttcccgcttgtccctccccggggcagagggcaggggggcctggggggttctagcctcttctcctcctccccatctcctcccgccaggtgcgagccggatgccgccgctagcgctgctgtcccatggatcacgccgccccgggctgtcgcagcgaagggtgtgggacagggtaaggggttggagagccttgtggacgagcggcgtgagccgtggctgccatctggcggcgttgtctgcagtgtgcgagtcgcccgccggtgcctggagcgagctgtcttcggctctcatccgaacccaggtggtgagcggctggccccatgacaaggtgagacggggaacaggaaacttgtgactgggccgcaggggaaggttgatgcggagcctgtggtataagctatcccctttgcatgaatcttgcccgccgggcatacctggcatggcatggggaagattaatcccatagtcaggccatagagttgataccaaccgcattgtggtacatagccgcgtctgagggagaaggtgaaacatagatcgagaagtgtaaacaagttgttgcgagtggggcacaccacacgtacagcatgagcgggacctttcgttcgggatgcgtcgtaatatcatatgagggagtgctcacaccaatg

SEQ ID NO: 570741 - DNA, 362 bp, Homo sapiens
  misc_feature (82)..(82): n is a, c, g, or t
  misc_feature (100)..(100): n is a, c, g, or t
cagtgtcattgcaaggtattcgttattgcaatatggtcgagggcatctgaagcccgcacaaagggcgatcgtttttcttcgngactacggccctacggcntggcggcatgtatcgtatgcgcatgttggcttcgcagtttcgacgaagtcatctttcatggctgcgccgccttacgaatccatcgcatatacccatcgatgtccctttgcacaatgcttggagcagtcataccgtcgtttggagtgccatcatccgtgcatatgcccttaatggtgatttagttaggtctcgcatctggcttgaatggcttcgcgtcacgcaaaagtcgacgcggccgcgaatttagtagtagtaggcggcc

SEQ ID NO: 570742 - DNA, 404 bp, Homo sapiens
ggcgtcgtacagcgctcgagcatgtagaaggtctcggggtgctgcaggtcctggtgcaggtcgtactgctcgcgaccggcttccaggcgggtcggttccagcaggccgcgcagcagggtttccagggtggcgtgctggccgggtttggcgatcagcgtggcgatgacattaaaagcggtggacatagtcgactccgggcacgggctaacgggatgggcagatgattggctattttccacgccgatcaaagcggctaaaacagcaggctgtttcaaccaaatattgataatgagcggaaatgcatgctgcgttttgatgatttgcagttgtttgtgcgggccgccgacttgggtagcctgtcgcctgcgccgcgcgtctcatggccctgtatatgcggtgctcag

SEQ ID NO: 570743 - DNA, 158 bp, Homo sapiens
caattgaagtttaaaatggaagtttccaattgaagtaaaaaatggtcatactcttcctattattattattattatttgagatggagttttgtgtccagtgagctgagacggggccattgcactccagcctgggtaacagagcaagagtttgtttcaga

SEQ ID NO: 570744 - DNA, 301 bp, Homo sapiens
ctataatgaggataatggtatcatcaaggacatcagaaacatccctggcattacactgcttaatgtaagcaagctgaacatatagaagcttgctcctggtgggcatgtgggacgtaactgcattaggactgaaagtgcttaccggaagttagatgaatagtacggcacttggagtaaagccgattccctcaagagtaactacaatcttcccatgcacaagatgattaatacagatcttagcagaatcttgacaagcccagagatccacagagcccttcgagcaccacgcaagaagatccat

SEQ ID NO: 570745 - DNA, 793 bp, Homo sapiens
cagggtcaggggtcagaaatgcaggcacgtcagcacgatgatacgcgtcgttctggtcagtggtgcctgccgttctcgtgtgttcgtgtttagattgttccttgctacgtagcacagttccatgggagattccatgatagggctattgtctcgatgacagggggtttggatggggtgtcggttgtcatatgcgcctggagcgtaagccattagtcaaagtaattgcacgatctgtgtgagtcccgttaggcttccagatagatgtgaggccgggaggacccgtcaagggactcttggtgacgcacctccttactgctgagaggcttcagcgcattcccccaagagtcaaccaatcaagcctactgtagactagtatgtgactggctgtgttgtgcacccacgttggcgctgcaagtcgcctgggattcctcataataggccagaccccgttgtagagggctggccgggaggcaaccagatttggcccgggtgcttgggacccatattgtaaggggctgacagggattatggccgcaaaaatactgttcacttaagcactgggtgaccaaaaacgagggtgcgccctgttaaggttccccaagtgggcctttttgaggcaaggggggcgtgggaactggtaggccagcccattgggcccggatggttttcaacgaatgagccatggtgtgccgaaccaaaattgggcttaaaactccggtggtgccacaacggcgcaccgtcgatgtcaaaaatgacgatgcgctgcgacaatacttcccattagcaaaaaatc

SEQ ID NO: 570746 - DNA, 887 bp, Homo sapiens
agtgtccaaactggaggttgacatccctttggtgaaatcctatttagcacagttgcagctcgtgccatcatttcagagctggtgagcatttcagaactagctcaacgcactagaaagtggcacccattattcctctcttcctacttgtcttcagcagttagctaaactacaagatcgagaatggttaacagaactttttcaacaaagcaaggtcaatatgcagaaaatgctcccagacatgatcagaataaggaccgcatgctggagatctcggcaacggaaagggactgagttctcttattcccactcctcaaatcggagaaggaactgttgaagcaaactaacgctggatccatcccctcaaaccatatataacatggacttagaagataacatctctcccaaacctcatgtagatacaacggctccgtgaacatcttaactgactagcttcttacagatacatatctacgtgaagtaaacccacccagcgatgcaaacagattcatcctctggctccttccaaagcaaacagtctcagagcacggaaaaacaactactactatctttcaagccagtaatgcagaaatctgcttcatgatcacgtcgatctacaagtcagtgccctgtactgctctccacggtgccaccctactaacagcaacattcccacagcggcatgtcacttcgcttacacgtgcactcctactcacatgcgacaatcactgaagaagcaaagggtacctcgggatggcaacacacgcatataacccgccagcagccaccgagcaaacagcgcaggcctatgacccaggcccactcacgggacaccgggcaagcacctgctgaagaaccagcatcgcgccagaaatcggaacgcacgccag

SEQ ID NO: 570747 - DNA, 138 bp, Homo sapiens
atatgaatgacccacgccaaacactgaatgtacctgtctgccgctcggccaccttgcggccgtgtatgactcaactcagctcctttaacgctaatatatccggcaaaatcccatgcttgggtttagtctttaaccttg

SEQ ID NO: 570748 - DNA, 274 bp, Homo sapiens
tgatcgagctcggtacctatgctgctcaggacatgtgggtgctggttcaggaaggtcagcacctccaggcaggacgccgatgctgctggtggcagcgtgccactgacgatcgtgtcgttggtgctcatcgtctccaccaaaatgcccacgtcgccgatggcgccccactgcacggtcaggcctgggaggccttcgtgccggctgtttctcacatatacgctccatggcggaattggcaaagccgtagttgctctgtcccgtcttccacattcta

SEQ ID NO: 570749 - DNA, 127 bp, Homo sapiens
gccaaggtaaagatctaacccccaagccaggtgtggtggctcacggctgtggtcccggcactttgggaggctgagatgggcggttcacctgaggtcagcttgggcgacagagggagactccttttca

SEQ ID NO: 570750 - DNA, 105 bp, Homo sapiens
  misc_feature (2)..(2): n is a, c, g, or t
gnaaaggacgagctgtacaaggggtctggccaagactctcgaaacgtccatcaacagcatgatgatgggtctgccaggggggtcgatttcgagagtcttggccaa

SEQ ID NO: 570751 - DNA, 156 bp, Homo sapiens
aacgatgaggctgctgacaattgtggtgaaggctctatttagctagtcactcaagcagaggaaggagccaggcttgaaggcttaccaaatcactgctgaacagataccgccgtaggagggacgagtacccgaccctgacagttaccaactactaca

SEQ ID NO: 570752 - DNA, 291 bp, Homo sapiens
tcccaggtccaagcaattctcctgcctcagcctcctgagtagctgggactcacacatgccactacgctcagctaatttttatatttctagtagagacgtggttacaccatgtgggccaggctggtctcaaactcctgaccttcggtgatcccacccacctcggcctcccaaagtgctgggatgacaggcatgcgccgctgcacccagcctcaaagtgtatagtcaatatctaagcaaatgaaagggacaagatatagaaggaatcttaggatcagctgagagataattgat

SEQ ID NO: 570753 - DNA, 439 bp, Homo sapiens
  misc_feature (14)..(14): n is a, c, g, or t
  misc_feature (23)..(23): n is a, c, g, or t
  misc_feature (27)..(27): n is a, c, g, or t
  misc_feature (222)..(222): n is a, c, g, or t
  misc_feature (254)..(254): n is a, c, g, or t
  misc_feature (262)..(262): n is a, c, g, or t
aggaaaagaagaanaataaaganacanactacagaaatgaatgaatttaacaaagtcacatgatacgagatcaatatacaacagctaattgtacttctatatacttgcaacaaataagtggaaaattaaaaaatcatttataatagcatcccaaaccacaaaatatgtaggaataaatttaacaaaatgtgtgcaaaaccaatacgttgaaaactacaaganaatataggatgagactgatctaaataaatggngccacacncacatggcactggattggaggactcagtttgcctaagatggcacttcttcccaaattaatttagaaattcaagtagttccaatgaaaatgtttctagaaactgacaagctgattctgaaattcataaggaaatgcaaaggggtcctaggatagccaaaacaattttggaaaaaagaa

SEQ ID NO: 570754 - DNA, 767 bp, Homo sapiens
  misc_feature (48)..(48): n is a, c, g, or t
  misc_feature (51)..(51): n is a, c, g, or t
  misc_feature (147)..(147): n is a, c, g, or t
  misc_feature (197)..(197): n is a, c, g, or t
  misc_feature (280)..(280): n is a, c, g, or t
  misc_feature (320)..(320): n is a, c, g, or t
  misc_feature (328)..(328): n is a, c, g, or t
  misc_feature (367)..(367): n is a, c, g, or t
  misc_feature (387)..(387): n is a, c, g, or t
  misc_feature (390)..(390): n is a, c, g, or t
  misc_feature (394)..(394): n is a, c, g, or t
  misc_feature (410)..(410): n is a, c, g, or t
  misc_feature (418)..(418): n is a, c, g, or t
  misc_feature (425)..(425): n is a, c, g, or t
  misc_feature (432)..(432): n is a, c, g, or t
  misc_feature (442)..(444): n is a, c, g, or t
  misc_feature (475)..(475): n is a, c, g, or t
  misc_feature (477)..(477): n is a, c, g, or t
  misc_feature (507)..(508): n is a, c, g, or t
  misc_feature (541)..(541): n is a, c, g, or t
  misc_feature (582)..(582): n is a, c, g, or t
  misc_feature (590)..(590): n is a, c, g, or t
taataccaatatagttctctcttaaataccgggtttcccaggacaaangcnggggcaggctctgggcagaaagagtaaaagggaaatgtggaacaaaagggaagggatggcccaggcccagggtccctgcctggggcactagggacnggggctgcctcggggatgggggagtgacagcagctcccccgggtccagtnatggcagaggcgtcgggggctcccctccctccccaggcctgaaacatttctcaggattacttctgaccttcagccccagcagngccagggccggggctcctcgggtctaggatgggccccttngcccaaangggcctgcagcaaggcgtggggtggggcggggagccccntggacaggcccggtgctctnagnaggngctcgtgggggcccgngaggatgnaaaggtngctgtgngcctcggggnnngtcagggggaatgctctccaggatgatgtcncngggggccccaagcactcggaagatcctggnncatcggggatctccggggatcacctcatgggantccaggcttcggccttgcatcccagggctccaaaaggccancacacggncctgcaggcacaccacagtctcgacgggggacatcaagggtcagccacaggggacaagggtggccggtgggctcgcccgtgatgttgacaatcctcaaaaagagtacaagctgactaggatggtggtccagtaccaacgggatcacctgatgggcgaactgggatcccatcaggagc

SEQ ID NO: 570755 - DNA, 895 bp, Homo sapiens
  misc_feature (10)..(10): n is a, c, g, or t
  misc_feature (247)..(247): n is a, c, g, or t
  misc_feature (807)..(807): n is a, c, g, or t
  misc_feature (809)..(809): n is a, c, g, or t
  misc_feature (813)..(813): n is a, c, g, or t
  misc_feature (816)..(816): n is a, c, g, or t
  misc_feature (818)..(818): n is a, c, g, or t
  misc_feature (821)..(821): n is a, c, g, or t
gtcatgcgtnactgactctcttaattaccaccgctacaggaaactttttgggaaagttccccaaaactttggggaactgtgttcccctgaagtttggagggtgaggagtgaaagaggttgagaagaatgagctggctgggttggacattcagaggtgacaatggccagatcaaccttgatggagtcttgttctgtcaccaggctggagtgcagtggtgcgatctcagctcactacaacctccacctnctgggttcaagtgaatcccctgcctcagcctccctagtagctgggactacaggcacacaccaccacacctggctaattttttgtattttttagtagagacggggtttcaccatgttggccaggatggtctcaatctcttgacctcatgatctgcccaccccaccctcccaaagttctgggattacaggcctgagccactgcacctggctgctagttcttaagagggaggtatgagacgtatgtatagactaagtgaaaggaaaatatcttgggcccccaaaatcactaagctaaaaggaaaattcaagctggaaactgctcagagcaaacctgcttcccattctattcaaagtcatccctctgctcactgaggtaaatgcatattctgattggctcctttgtaaaagctaattagaaactcaaaagaatgcaactatttgtctctcacctacttgtgacctggaagacccctccctgcttaagttctcccacctttttggacaaaccagggacttttactggattggataatggcttgggctccctaagggataaaccantntggnctngnccntgggcacagaataagaatttctagcgtggtctggctgcccccacctggaaaagaaccgatgggcggtgcttaag

SEQ ID NO: 570756 - DNA, 422 bp, Homo sapiens
tatgtttaatgttggggaaaagattttctgaggacacaccatacaattgttgaggacagatactttttacaactaactgtcttagcctgttttgtattgctataacaaaacatccgagactgtgtaatttataataaaattaaatttttttggttcatggttctggaggctgggaagtccacaatcaaggggccacaactggggaaggccttcttactgtgtcattccatggcagaaggcagaagggcaaaacagagcaagaacaacagagagcaagaggggatcacacttacttttataggaaactcactgccacaataatgacattagtccttttcatgagggtagatccctcatgacctcagttcccactaggccccactttcctactgcatttggaattaagttttcaagtctgctct

SEQ ID NO: 570757 - DNA, 875 bp, Homo sapiens
  misc_feature (10)..(10): n is a, c, g, or t
  misc_feature (208)..(208): n is a, c, g, or t
  misc_feature (795)..(796): n is a, c, g, or t
  misc_feature (800)..(801): n is a, c, g, or t
  misc_feature (832)..(832): n is a, c, g, or t
  misc_feature (861)..(862): n is a, c, g, or t
  misc_feature (875)..(875): n is a, c, g, or t
gtcatgcgtnactgactctcttaattaccaccgctacaggaaactttttgggaaagttccccaaaactttggggaactgtgttcccctgaagtttggagggtgaggagtgaaagaggttgagaagaatgagctggctggatggagtcttgttctgtcaccaggctggagtgcagtggtgcgatctcagctcactacaacctccacctnctgggttcaagtgaatcccctgcctcagcctccctagtagctgggactacaggcacacaccaccacacctggctaattttttgtattttttagtagagacggggtttcaccatgttggccaggatggtctcaatctcttgacctcatgatctgcccaccccaccctcccaaagttctgggattacaggcctgagccactgcacctggctgctagttcttaagagggaggtatgagacgtatgtatagactaagtgaaaggaaaatatcttgggcccccaaaatcactaagctaaaaggaaaattcaagctggaaactgctcagagcaaacctgcttcccattctattcaaagtcatccctctgctcactgaggtaaatgcatattctgattggctcctttgtaaaagctaattagaaactcaaaagaatgcaactatttgtctctcacctacttgtgacctggaagacccctccctgcttaagttctcccacctttttggacaaaaccagtgtacttcttactgtattgattaatgtcttgtgtctccctaaagtgtataaaaccaagttgtgccctgaccaccttnngcannggtcatcaggattcctaggctgtgtcatggncatggtcctcacccttggcaaaataaacnncgatcggccgaan

SEQ ID NO: 570758 - DNA, 415 bp, Homo sapiens
aaattataccactgtgtcgtaaaaattattatgacctgaagacatttgagaatcaacagatgcagaaagaggctttgtctgaatactcccttatctgactaaaagcagaaacttctgggagtgagacttccactagccccctttctggaggagtttcacggctgtgaagaagatgaagaagaccacaaacaaacatgatgaagaaccatcttgtctcctggtttgttctcctaaaaatacatttgtctttcctaaataaacccatttgttcttccagtagaagccttttcctccctgctcctttacccttattaaggtaggcttgtaaatccctgtctttagttatggataaagtcattttctttgtgggttcctagtatgtgaataaactttatcttttcttttgttaaaaaaa

SEQ ID NO: 570759 - DNA, 708 bp, Homo sapiens
tactcaggtaaattgtataattaagattaatatacactcttattatttttggaatcatgatatttaaaacttaatttttagtatttttgattcatggtctgagtacagaggcctttctaatgaagtcatttcatgcatcaaggatgttcatgggggtgagagtagttctaattatctattgctgccttttgaagtacctaaatactaaattgcttaaaacaacaattttaatttgctcacaattttgagtttcatttttggagatgtacttgtctgggtgcttcatctctaatccatatggaatggttggggatggaatgattaagatccactcccaagatatcaccttttctcacatatctgtcagcttggtgcttgttctctctttctcttcacaggacccttcattttttagggagtctcaatatagcttgggtttctcttgcattaattgatcaaggccctacacctagaagtggcatgggtagaaattttatgtcagaccctctatcttcactctcaaagtcacccataactgttctacatgttgcttttcttcacaaagctttacattaaaatcaaatgaataagcccaaatattgctaaaatattctataaatactcttttacctaacatggcaaataatagtatcttggttaatataacaattatcatatagcaagatgcatagcactgttagtatattc

SEQ ID NO: 570760 - DNA, 225 bp, Homo sapiens
gttctagtggtaactgctgcttctggaaaatatttagagaaaccaacggtaaaaaaaaaaataataattaataccgttggtttctacatacactctcaatatttgcacgagtaaagcgtagcaagtttaacacaacttatgtaaacttggaaaattttccgaaattttattgacttttctcggtctctcctatctttatatacacatctctcatgcacacacgcg

SEQ ID NO: 570761 - DNA, 370 bp, Homo sapiens
ttggcgctccatacaggtgatacaggccacggggccccgtggaggacgcggcagatggcctacgtctggccgagaggcacgggaagggggctccaccaccggcattctcgagggagaagatccacagagacatcaggggagccaaccttctcctcactctccagggagatgtcaaacgggctgacttgggggtgtcaggcgagctgacagcgtcggtggccaagaggaggtcttgcatggggactccctagggcgccctgatgctcatgtcgaagagcagcttccagccgcccaaacggagagataagactcgcgggacccagaatttccaccattttctcaaacgggcccggaatgggagcccaaaggg

SEQ ID NO: 570762 - DNA, 110 bp, Homo sapiens
tagctcggtaccaacttcttcttcatttctggccaatcatccatgctcatctgattgggaagttcatcagactttagtccaagtcctttgatcagcagctcgtagaactg

SEQ ID NO: 570763 - DNA, 516 bp, Homo sapiens
tcctattaataatttcttttttatgtttcttttttctttttttaaaattgagatagggtcttgctctgttgcccaggctggtctcaaactcctggactcaagtgatcctcccacctcagtgggagccacggtgccctgctccatgtttcttatcttttctcttctattttcctatatcctgttttgctacagacagttccagggttacaggcatgagccaccacgcccggccaggttaagtgtattaaatgcattttccaattatgatattttcaacttctgatgggtttattggaacataacgccatcataagtcaggaaacatctgtactttgtagatgatctcaactttgtcttctaatactactaatgaagttttgatcaatgtcatattttatttactttttatttaattattaatttgtgagacaagtcttgctctgtcaccaaggctggggttgcagtgagctgagattgtgccactgcactctatcctgggcaacagagtgagactca

SEQ ID NO: 570764 - DNA, 1011 bp, Homo sapiens
  misc_feature (279)..(279): n is a, c, g, or t
  misc_feature (395)..(395): n is a, c, g, or t
agcggcttgttgtccgacgaaacaccaaactgggggatgacgccggtgtgcagtgggggggcccgggggccctggtggcccctggggatggcgcgaagccagctgggtgcgacgttccccgtggagcgctctggtcgcgcccgtctggctactccggggggcacgaggggatcggcaggacacgtggagcggggcacggcgagccgaggccagcgcgaggctcgcggaggcataagcctaggactaaaggacgatggattgcctcgtataacctagagnttggggcagcgtggttctatacggacattggaaggatcaatgtgctccgtggacggagattcttatcgtgcatctgcgtaccgctggctcgatttcatcggacatcagaatgatcnattgactttcttgcctggggggtgcgtcttcatcataggatagaaggttcttgaaagattgatgttcagatgacacgtagacgcagactcgggtgccagtgaccaaggggcaccgatggttgcatatgccactgtgtgtttgctcactcagagggacatactaggatggcgcacgatcaggtactaggggtgtttaacgtgctccaagggaggtggcctacccggctatgcgtggggtcgtcatcctggtcaagctctccatggtgcaacggatggtggcaataaggtttactgggagggaaacaagaatgccggtaaggactcgggacaactgtacccctttgccataggtgacaggccggagtgggttccgttggtgttaacgaccttcgatgccttgcacccaggggtcctcttggcatcgttttccgaagcctgtggctaaggaaggatggctcagtaggatggagggtactttgaatgtactgagtaaacctcaagtcccgggggggggacatgtcaccctgggtaacttctgcaaggccacctttgatgcatttctaagacttaaagtactgaaccccgaccttgggggacggtttcccaatttcctatg

SEQ ID NO: 570765 - DNA, 163 bp, Homo sapiens
tatgacaagtaacatcgcacctgatgagtgggcctggctgtcgttcggtatcaagcagaaggatatcgacaaggatcttgtgatctagaatccactccttccacagtaccggagttctctctttaacgcctccccttcgtgtttcccccgagtacagcgacca

SEQ ID NO: 570766 - DNA, 550 bp, Homo sapiens
gagatcacttctttgatagggggtactatgaagttactcctccaacattagtgcaaacacaagtagaaggtggtgccacactcttcaagcttgactattttggggaagaggcatttgttgactcaatcctctcagtgtacgttggagacctgcagtcaatgaactcgggagatgtgaatggtatgctctagtcataccgggcagagcaggtccagaacacgaaggcacctggcgtgagtacaggtcacttgagaagcgtgagtgtcgctattcctgagctgtcttcgagcgaccctctctgaaccgagtttggacggaccttgagtaacgtgatgtggtagactcgaattatggaagggtcacctgtgtggactgagttggagcctatgacaagacaggccgcagaaagcctgagtgcgactccggagcgcgtgcagtgctcagaggaggaagaggcgagctagaagatgcgtgatccgtgcgcgtaaggagaaaccatgcatgacccaaaatacaccaaggagagggagggactagggactggggatga

SEQ ID NO: 570767 - DNA, 133 bp, Homo sapiens
aggatcgatgtctgtgcagctccagtgaagctggtgatgagcttgtgctgattgcttccacatcactgctggtgtgcccatgactgcactctgcgtgagtggggtgggagaagcccgtcgcaagcctggagca

SEQ ID NO: 570768 - DNA, 325 bp, Homo sapiens
tttaaaaagttgcgcaaattcctctggccccgggattgttaatttcttgcaatttgaaggggcgaggagaggtttaaagaaaaatcagtttttgtttttaaaaaagcctttaagttgtaaacgtccttttaagcccttgaagggcccctgattttatgtaacttgttgcagactggggttaatgagtatatgtccccgtttaaaaaaaaaagttggttttttataagccccccccattttaatgggaacttttgtagttttatgaataaacataaattgtaatttggggacataaaaactcctgaataaatcatgtggcctaata

SEQ ID NO: 570769 - DNA, 681 bp, Homo sapiens
ggttactagcgtttttcagacggagaccattgggacaaattaagcggtttatcatgctaatgcccgggtcacagagcaagcaatgaacatcactgtcacactagaatcgtcatggaccgtaaatacattcgcaactacattgtgtactacagttgccaaggctttcacggggttaccaccgactacgcacaacgcgcgtatcggcatcaggtcgcttgtactccgttcagcggactatacactttctcacgcagaattcatttaagctcgtcatggcgtctataaccgggttcggcacttgtcaggttcccaactttccgcattgttccgaaatcctacttcattcaatttgccgacttgaatgcgattttcagccgattaggattgtttcacaacaccgccgttcgtcgtattgcgcctttttccatatggcgcaatctctggacctaatgtatgggggcttctacagttcgtatttcgctaaaaggtagctgtaagtggccgcatttcttacaaatggcgcttttccctaacttcatcattaaaaaactttctctacctagacctggtgaatagcataaggttttgtcatacattcctacagcactcctggaagcgtcttgtttaaccatcgcacttcttcgctgtaataatcattctcccatatttggggtaacagtc

SEQ ID NO: 570770 - DNA, 142 bp, Homo sapiens
aacgggtggggtagtagctttgagggaagtacgcttatatttttattttttgggtcttgggtttttttttttcctttttctggggaaaaggggttcctcgttttttggcccaggagggttctcgaaactctcgggggcctct

SEQ ID NO: 570771 - DNA, 714 bp, Homo sapiens
ccgattcccacggaagctctttcttcccccttaagtgcctccgcccttcatattcccgtaatctttgtctccaaagaccatgcccactcatccttgtggtaaccaacatgggtgagatttataactctttacgcgaaacttgttattgtctaacgaattattctttgatgaaattacgcccgcagttaacacatatcttggtgccagcgtgctcgagacacaacatttacgagaaagaccaattgttacaaaacgctacacatctcgtcttacatatataaatacagagtaaatagataatttattcaagccactactcacacgctccacacgggtacatactgtgaaacaccgcttttctaaaatacgcagtagttgtcttgtccacatatatctttttctccacacaacggaaatatgttacaacccacgcttgtaaccctgtatacccacacttacccttcactacatatgtgtaccttatgtgttatacatgtgcactttatctgtgacccacatctcgtgcattatgtgcccgaaccccgattacccctcacctctatatgaaaataagcacagtagcgctataccacacacctttctgtaaatttcttttgttctaaattcaagcaatttccaccctccctgcgctgattcaccactcgggactacatctactttttattctctaaatcaactcgatccccagcaaac

SEQ ID NO: 570772 - DNA, 244 bp, Homo sapiens
gtcagcggacctttatacatcattcttgtccgggatgtagttgctgagatccttctccccagaggatccgactgcattataaagaagtcagcaaatacaaatcccaggacaaagaaatgatgttataaaacattggtttccacttctcacctccaaaggacttatagaatctggcagcaacacatagcctggaggggtgcccaggctggcaaacaaaacaacaatgcagctggcaacacacaat

SEQ ID NO: 570773 - DNA, 367 bp, Homo sapiens
  misc_feature (270)..(270): n is a, c, g, or t
  misc_feature (276)..(276): n is a, c, g, or t
ttcccgttcccccaaggcaaatgcttcccctgctgaatgcctcagcaagccagtgaaagaatgcagcacgccccagcccataaacactaatgaaatcatgttcttcgcctctgacatggatgtagctggcggtcattatcctaagcaaattaaccccaggaacagaaaaccaaggactgcgtgttctcacttataaatgagatctaaacattgagtacacattgcctgggtgcggtggctcacacctgtaatcccagcactttgggaggntgaggnaggtggatcatctgaggtcaggagttcaagatcagcctggccaatatggcgaaaccctgtctctacaaaaatacaaaaattagccaggcat

SEQ ID NO: 570774 - DNA, 284 bp, Homo sapiens
cctttattaggggttcccagactcgctgcatatcggcgtcactggcacatccactgcgtccgcgatttgcagctcccccatgttcttggtttcaagtgccttgtggtgactcgtcatccaagagcgtgttcctcttggctttccccacctccctgctttatgctctaatctctgcctgaaccatcatttctcatgactcctgcgcttcctccttcccatggggtaaagtccacacttttaatgtggcctccagccctttgcagtctgtcctcactacatgccat

SEQ ID NO: 570775 - DNA, 282 bp, Homo sapiens
  misc_feature (85)..(85): n is a, c, g, or t
tcagggctagcaaccccggtcccagcggaggcgcccgcacgcgccgacacttcagcaccagtcgcggtgccaccactgtgcgcgnagatggctgcgacgcgtgcgcagggaaatttgtgcacagagacaacacaggggatatgccatatgaagatgaaggcagaattctacaagcccaggaatgccaaagattgccagcaaaccaccagaagctaggagagaagtgtggattagattctttctcacagccctcagagggaaccagccctgccaagaacttga

SEQ ID NO: 570776 - DNA, 812 bp, Homo sapiens
  misc_feature (812)..(812): n is a, c, g, or t
atttttggtattttatagtagagacggggtttcaccgtgttagccaggatgttctcgatctcctgacctcatgatccgcccgcctcggctcccaaagtgctgggattacaggcgtgagcaccgtgcccggcctaaaatgaaattatttatgtgggttctgaaacagcctcttagcattcagatggttttaaatacttaaacacaccaatgtgtagaaggcaaccctttatttttagcaggtgggtttactcttctcccatgagatttggtctttctacattaactagtaggacataaagattgggaaactggaacctatattatactttttaaccaatctctgtggcttcacctcatgaaatttaacttcagttaaatatgagacgtgggggttaatgtgtgtaacctaatatgcaaaaatgtgtttgtataatttgggggatttcgtaagtgtcaagtgaatgtgattcttatttcacgtgatactattaatcatgcgttgtacactttcaaaatcatgcatggtttcacgttaagactgggtttggagaacctcgactttatgtgatcatggtatgggaatacatgtggggtggaggaacttaatttttcaattggtcacaataggtatattacctgcagggtttcggaaaaagtggtgaacgatttttaatgtatataaaggcccagatttggcacgggtttacacgcacattgtgacctggaatattttcaaggatcacagttgtggaccagggctttagcggttgaatataaatatagaggccaaatattcccaggaagaaaaaagn

SEQ ID NO: 570777 - DNA, 200 bp, Homo sapiens
  misc_feature (199)..(199): n is a, c, g, or t
tcgtatggatcaaccagatcctctggtcaagttgtatgtgcactgaactaatcaggcaggaaagaagcccagccactgtctcacagagtgttgttttgtatatggtagcaaaatcctgaaacaatggggtccttccagtctcatcatacaaagatggcaatcgttggctagggtgcggtgagtatcagcggtggtatang

SEQ ID NO: 570778 - DNA, 115 bp, Homo sapiens
  misc_feature (12)..(12): n is a, c, g, or t
tcccatgcacangttgcttagacaggcttctcacttcctacagacctgaatcaaatttggatagtctgagttcttaagttcccaaagaacacactgttatttcttgtgtatattt

SEQ ID NO: 570779 - DNA, 462 bp, Homo sapiens
ctgagttggagcttcaagtgcttggcctccagttccaactcctgtcgggtttcatgtccctttctatctggcagtgggaaaaatgtttttagtgaaccctgttctctgggggcccatacgtaaagaactgaaaaaaaaaaaaaagtggggtttagaaatctctttgggttctggtcctgaaaaaaaggtaatttccccccctccaaaagaccgccctttagaaaaaaagcttaaatgtccgggaccaaaaaaagaacccctgcaggaaggggtgccccggaaggagcccccgggggccccgtaacaacggctcagtgggtggccctcgatttgggccgtcccctgcccccttgctccccgtgagccctggggaccaacatcccaaagttcccccacccccaaactgtgtgtttcctggtatgtaactctttaaaccaataaatgaactgacttccactggga

SEQ ID NO: 570780 - DNA, 117 bp, Homo sapiens
cagagaactcatcaaatgaggaggaaacgtcaagtgaaggcaacatgagggtgcatgctgtggattcttgcatgagcttccagtgtaaaagaggccacagcatgcaccctcatgttg

SEQ ID NO: 570781 - DNA, 134 bp, Homo sapiens
tatataaaacgctgtctccaagtcctttttccaccagatcagatagcacagacttaagataagagaatgaaaattaagtaaaatgccttactaatgtgtaattcacataataaataattcatacatttgagtaa

SEQ ID NO: 570782 - DNA, 1749 bp, Homo sapiens
cggtcgtatcaccttgcacccgcaagtcaagccgccccttgtagaaaaatccctccaccttccgttccaccgctagtgtcaaccccactgtagacaggaaagccaggccaggagagtccgaatgagaatttatttgcgcactcgattcccaatgactcccttccgggtacaagtggtacatgggacagggaggatgcaacggccccagtgcgacaacgctctgcagcgttcctccgaatcccgtcggcttctcgacccacgcagagaagccccgggcttggcggctctagccccagcgccaaaggagacccgccccagggaccgggctatggacatcctgactacacagggcctaggactgcagatctgcgtggccaggtgcgtgcgcgcgcttctgggaaaacagtacccgccgtgcaacaggaaaggggcaaaatggcacctaacgcatcagcatggaagctttactcttctgattccgtaccatccccctgctaccccatacttaatcagtccccattcaatttgtagactcttgctcctgcttctacatgatcatgcaaggcggacattccagtagaagataaacgctttgaacagaggcatgcgagacactgggcaagaggaacaggcaaccatcggccggcgacggccacgctcgtccacacgcggccaccatatggcagcgcccgcggcgcggccgggcgacagcaaggcacaaaaccccacacgcgcgcgcggcacaacaacacgaacggaacaaaccataatcctccccagacacaacaacaccaacacaccacaacgcacaacacacacacacgcaacacaaagggggcgcccaaacaccgcacacacagccatactacaaacccacacacagcgcacgcacacgccacaccgtgctaacatgttcataattactacgattgcaccaaacacacagcaacacaacacgaacgccacactaaccacacaagccaccgcgagcacacaacagaacacacacacagcaacccacccaccacaacacaaccacccacacaagaaaaaaccacacaccccaacaccgcacgaaaacaaagacgacaacgagagacggcggacaacacaaagagaacgacagcagagaccaacgagaagggaaacaagcagaagaaaccagaaaccaaaaagcagcaaaaggaacagaagcaaccacgagagagacgacagagagaaaaacaagagcaacaagaaaagaccaagaaccgagaaaacaagaagcaacgagacaacacagaagacaggaggacagggggaagacacacgagagcgaagaaggcgagagcgacacaaacgaccacaaaaaacagagaaccaaacagagccgacaggcaccagacgaaacgacgcgacacgcgaagaacaagagaagacacagcaagaagaggagggacaagagagaaggaagcggaggcgggacccagagcaggggaagcgacacaggagaaaacagcaggagcgaggcgaccagcaagacgagacaggaccgagagggacagaaggaagcgagcaaagaaagagcggaagagagagagacgagagcggacacgaccagaagacgagcacagacaaagagagcaagacaacagagcgagaagggacgcagacacaaaagagcgagagcgaagagagaggaggaaacgaaaagcagcaacgaaaagcacgagagggacccaaagacagccgcaggagaacacaagagac

SEQ ID NO: 570783 - DNA, 232 bp, Homo sapiens
agctctaatttcgttgagtgtgggtttacgtagtggccttagctcatcatgtaggtgtctcgacataggtatacgtgtcccgagtcactctgcctggcacactgctagcctgacccctgtcccactggaagcagtccccatctgtgccgatcgccatggccccttgtcccattcatgaccaggggaaggccaaccccgaccatcccgacaaggttccatgctaggcgggtgc

SEQ ID NO: 570784 - DNA, 107 bp, Homo sapiens
aaactcatatacacttggaaaaaaaaaaagtgacagaagacatggaaaaggggtcaggtggcacactccttggacagggctggtcccaagcttcctatgaaagcaga

SEQ ID NO: 570785 - DNA, 857 bp, Homo sapiens
ctgagccctacggtcccgacctcgcgggctgaggccgggtactggtctggatcggagctatcgggcgatgggcagcgccctatgcaggcccggagctgattgcagccttgatgaccccgggaaccggggtccccacccgcgcctggtgacttctccggtggaagggagccagggacttcccgacccttcgccagagcctcaagcagctcccggattctgatccgcatgaagcgagatggaggccgcctgagcgaagcggacttcaggggcttcgtggccgctgtggtgaatgggatgcgcgcagtggcgcgcagatctggggcctatgcttgatggccgatccgacgttcggggcattggctctggaggagacctctggtgctgacccatggtcctggctcagtcgggaccgcagctggagtggccagatggccttgctgccagccagcttgtggtcctacgctttccacagggcggtgtgggtgcacaaggtcaggcctggtcctcgcgaccttgccctgggcggcaatgtggcttgcaaggtgccaattgatcagagagacgtggtcttggggcaacacaaggatggccacctatggcataagcctgcgagtctaattcctgggattcaaatgtcattccagatggcccagaagcatgattgcacagtgcatggcttggcagccaagtgcggggctagcgtgtaatcgcatgcggtcacgaagtgacgcaggcttgcgtcccctgcaggaccggaaatcgctatacttgccaggccacagagacttgtgcacaagcacaacgcgtgcacaggacttgcccacttccacatcacaagggctgaccctgaaatccaa

SEQ ID NO: 570786 - DNA, 211 bp, Homo sapiens
tactctctctacccttacctacctcacttgatataacaatgacatcgccctcacctgctgcgcgtacgtggttacacctgataatccctgcaattgggacggctgacggtggaaagactgcttgaggtcaggacgttcaggagcagcctacacaacaacacgagatcctctctaccaaatgaaaggatgaaaatgggcaccctttatggag

SEQ ID NO: 570787 - DNA, 565 bp, Homo sapiens
caaggagcatggcacaagccagcacatgatgctggatggcttccttgtggaatagatgctttccctacaagcgcgaattccagtggacatagatcaattgctcaaaacaatgagccccaatcacatcgttcacctacccttccatgaccaagtccagggacctaatgcagcaccagaagcgccagtacactgaccctttacctgcatatgcgtgcggatggtgtcatctgctccatcaggtggcctcactacatactgtagtcttcgtcctactgttcaaaagtctgtgaagccctgtaaatgcgacgagggaactcacggccaatcaccttactccacattaacatataatgtgttggaacataaacgtcaccaaggtggcttctaccttgatctgagagaatggaaggcagtggtgggatttagctcactgggtatccaagcgccctaatcgtagggcagaagagaaactcatcctctacccgtgtcattacacgcgtgaaggtccaagatccccatcatgaagagcaggagtgctagcccataaccacgggggccggcctct

SEQ ID NO: 570788 - DNA, 253 bp, Homo sapiens
  misc_feature (40)..(40): n is a, c, g, or t
  misc_feature (121)..(121): n is a, c, g, or t
  misc_feature (129)..(129): n is a, c, g, or t
  misc_feature (208)..(208): n is a, c, g, or t
aaaatgggcataatcattcctgcctcccatgacgggtttntgaattagagatacataaaacattctaggcatggggctgggaacagtggctcacgcctgtaatccttgcactttgggaggncaaggcgngcggttcacttaaggccaggagttcgagaccagcctggctaatatggcaaaaccccatctttactaaaaatacaaaganttagccaggagtggggatgcgcacctgtaattccagctacttggg

SEQ ID NO: 570789 - DNA, 341 bp, Homo sapiens
  misc_feature (269)..(269): n is a, c, g, or t
  misc_feature (294)..(294): n is a, c, g, or t
aaggtcacagtcagactgtggagaacttggagattcagggcggtggagtcatctcagcagaacggtgctaaggaagaggatggggatgaagtgttgccatccaagagcaaggccccaggatcccctttgtccagtgagggagcaacgggagaaggagtgagaaccctgggacctgctgaaaagcctcctctgaggaggtcacccagcaggacaaagaagcaagaaggggacagggccaccgaagaagcccagaacggtgaaaagggcangccggagtcaaaagaagttgacggnccacaacccggcccaaaaggaggtcccggaatcgcctaagttgatag

SEQ ID NO: 570790 - DNA, 747 bp, Homo sapiens
  misc_feature (135)..(135): n is a, c, g, or t
gacgacatcctggactactggatagggcgtgtcggcccatcacaagtcctgagccccccaagacggcgatgcccactggaacaaaaaggatgctggatccaccgcagagactcatggaccaaatccgcaaacaanctacctgacaccggccgactcataggcaagcatgtgacaagctgtgggggcctccttgccaaaggcatggtccgaaatggtggggatgcagacgtgagcgtgagctacgtacctaagcgcggcgaacacttgtccccagacgactccccttgttgtgtcccagaggtccatgggtagtgcgcatgtgatcgcacccgtgtgatgggcacgtgttccagcatgaacaacaacatctggacatcgacatgagcatcatcgagcagcatggcgatggcaacatctcgcgtgaaaatggtgatgctcatctagtgagactcgagtgagtgtcgcaggatgcgggcgtattctcctttgtaatgccgatataatgcgtcttctcctcctttttactgcacgtcttcccttttcggtgggctcttttgctcccccgtctttccgccgtacggtccctcatcggtcggtctttaacttttttcggttccctcggtatttgtgtttcaacaacacatattccagtacatttttcattatccagataatgcgccccaaaaggttgttcaggtatattggggaaagccacaaggggaacttccataagacctggtccctaag

SEQ ID NO: 570791 - DNA, 288 bp, Homo sapiens
atgcatgtcataaacagtatcacaaaggtcagagagtcatagaaccgtgatcctggaatgagaggactggaggaggacttagagaccatagattctctagtttagtagaaacctaagctctcaagaatccagatgacttgctaacaaccccctccccccgcataagttagagacacagcagggccaaaacctgtatctaatttatcagccagtgttcactacagagtatcctatatctccagtccttgtgaagttatttttcagtcctttacttagcttccggtcgaa

SEQ ID NO: 570792 - DNA, 318 bp, Homo sapiens
  misc_feature (6)..(6): n is a, c, g, or t
  misc_feature (81)..(81): n is a, c, g, or t
  misc_feature (83)..(83): n is a, c, g, or t
  misc_feature (85)..(85): n is a, c, g, or t
  misc_feature (87)..(87): n is a, c, g, or t
  misc_feature (89)..(89): n is a, c, g, or t
  misc_feature (97)..(97): n is a, c, g, or t
  misc_feature (100)..(100): n is a, c, g, or t
  misc_feature (102)..(102): n is a, c, g, or t
  misc_feature (177)..(177): n is a, c, g, or t
  misc_feature (183)..(184): n is a, c, g, or t
  misc_feature (190)..(190): n is a, c, g, or t
  misc_feature (206)..(206): n is a, c, g, or t
  misc_feature (211)..(211): n is a, c, g, or t
  misc_feature (225)..(225): n is a, c, g, or t
  misc_feature (231)..(231): n is a, c, g, or t
  misc_feature (235)..(235): n is a, c, g, or t
  misc_feature (292)..(292): n is a, c, g, or t
tttttnaaaatagttccaagcttggagaaagcaatgagctccacctactcagcagaacccacggctcgtcccccgtggacntnantnancagtgacnttncntgccccgttcctcagccgcccatcccactgccttgactgaggggaccctgcttttgctcctggggggtaggattnggggtnntagttntttttttttttggttntattnagagaaaagttgtntttgangganttatccccattccccaaattccaagctcctgctggtgggctgaaggcactgacagantccctgggacacccccaggtagccac

SEQ ID NO: 570793 - DNA, 615 bp, Homo sapiens
cacttaggagatttcaacttaactgaaccgctcgaacctaaaaaaaaaaaaaaaaaaaaaaaaaaaaacactggttcgggcgcgcccttgggccccgccgagagagagagacttttctctagagacaccacttcgcgttgtggggcgcgcggcgggcccccagttgggtctaggcgtgaacacggtggcccaaaggcgcgtgtgttccctagagggagacaccgcggggccaggaacgaagggggcggggaattctcttcaccagatataaagaaaggcccgggggggcaaaccgcggagcgggttctcgtggaaccaaaatctccagaagggagagcgccgcggaggccccactaaggggagctctctacaacacaggggggaggctccccacagggggagaaggccctcgggaaatatctaacaaatttataacgcgcccccacgagcactgtgggagcaccacctcataatctcgggaagagagcaacgtagagaggtggagaagaacctacctaattataaaaggcaattcctagcgggggacgagaactaccgtgggaagaagagccgactaatcacaacaaaacacgggggggactggagactagaccg

SEQ ID NO: 570794 - DNA, 284 bp, Homo sapiens
  misc_feature (152)..(152): n is a, c, g, or t
  misc_feature (183)..(183): n is a, c, g, or t
  misc_feature (260)..(260): n is a, c, g, or t
tctagaggcatccggccaaggagctcagggcgctttgggacgctacaactctgcttttgcagttcaggaaacaggcccgacgaggaggcttgttagtggtgagcttagtagacttaaccaggcaccagacttttaaagcttctgacatttcnatgtcagcttactgaagatgccaaaggctgnggtttatctacacgctcctctagaagctatttatacatgacaaggagcgcgctgccagaaaccatgcagtttaaccntcttaggtcaccttttgttgccag

SEQ ID NO: 570795 - DNA, 128 bp, Homo sapiens
gcacagtcaatttccctttttatatgtcaagtactcttggtaaatgttatctcacaatttattataattcattactattattttttttccaggttgcatggcctgaataagaacggtttcacactgtt

SEQ ID NO: 570796 - DNA, 247 bp, Homo sapiens
ggtacccatccactcttttctcctctttaaatagaatctcagccaagctttcagcaattagtttagcatttgtctcatatttcttttatacaaggcgggggggtttccttcttttgtttcaaaattctcagtttatttccagtttcgttaattcagtaaacaagtcaagataccaattatacacatttattggcaacaaaagcaccacaattcagaaatttataactcaaacaactttcgataaaca

SEQ ID NO: 570797 - DNA, 261 bp, Homo sapiens
aagatcgtacttgtaaaacttcaagagaattgtcttgatcttgttgggcgtattggtgacaggggagctgaatatgtatctagcaatagagtggatgaggatttgctttgagcttttaaagctcttaaaaccccacaaaaaggctattcgtagagccacagtcatcacatttggttatattgcaaaggccattggcccttatgatatattggctacacttttgaggaactttaaagtttaagaaaggtagaacaaaatttg

SEQ ID NO: 570798 - DNA, 3444 bp, Homo sapiens
  misc_feature (537)..(537): n is a, c, g, or t
  misc_feature (743)..(743): n is a, c, g, or t
  misc_feature (812)..(812): n is a, c, g, or t
  misc_feature (1196)..(1196): n is a, c, g, or t
  misc_feature (1635)..(1635): n is a, c, g, or t
  misc_feature (1919)..(1919): n is a, c, g, or t
  misc_feature (2191)..(2191): n is a, c, g, or t
  misc_feature (2403)..(2403): n is a, c, g, or t
  misc_feature (2457)..(2457): n is a, c, g, or t
  misc_feature (2809)..(2809): n is a, c, g, or t
  misc_feature (2817)..(2817): n is a, c, g, or t
  misc_feature (2868)..(2868): n is a, c, g, or t
  misc_feature (2892)..(2892): n is a, c, g, or t
  misc_feature (3006)..(3006): n is a, c, g, or t
  misc_feature (3023)..(3023): n is a, c, g, or t
  misc_feature (3027)..(3027): n is a, c, g, or t
  misc_feature (3070)..(3070): n is a, c, g, or t
  misc_feature (3226)..(3226): n is a, c, g, or t
  misc_feature (3385)..(3385): n is a, c, g, or t
atggcttgcccctggaagtttctcttcagagtcaaatcctaccaaggtgacctgaaagaggaaaaggacattaacaacaacgtggagaaaaccccaggtgctattcccagcccaacaacacaggatgaccctaagagtcacaagcatcaaaatggtttcccccagttcctcactgggactgcacagaatgttccagaatccctggacaagctgcatgtgactccatcgacccgcccacagcacgtgaggatcaaaaactggggcaatggagagatttttcacgacacccttcaccacaaggccacctcggatatctcttgcaagtccaaattatgcatggggtccatcatgaactccaagagtttgaccagaggacccagagacaagcccaccccagtggaggagcttctgcctcaagccattgaattcattaaccagtattatggctccttcaaagaggcaaaaatagaggaacatctggccaggctggaagccgtaacaaaggaaatagaaacaacaggaacctaccagctcacnctggatgagctcatctttgccaccaagatggcctggaggaacgcccctcgctgcatcggcaggattcagtggtccaacctgcaggtcttcgatgcccggagctgtagcactgcatcagaaatgttccagcatatctgcagacacatactttacgccactaacagtggcaacatcaggtcggccattactgtgttcccccagcggancgatgggaagcatgacttccggatctggaattcccagctcatccggtacgctggctaccagatgcccgntggcaccatcagaggggatcctgccaccttggagttcacccagttgtgcatcgacctgggctggaagccccgctatggccgcttcgatgtgctgcctctggtcctgcaggctcacggtcaagatccagaggtctttgaaatccctcctgatcttgtgctggaggtgaccatggagcatcccaagtacgagtggttccaggagctcgggctgaagtggtatgcgctgcctgccgtggccaacatgctcctggaggtgggtggcctcgagttcccagcctgccccttcaatggttggtacatgggcaccgagattggagtccgagacctctgtgacacacagcgctacaacatcctggaggaagtgggcaggaggatgggcctggngacccacacactggcctccctctggaaagaccgggctgtcaccgagatcaatgcagctgtgctccatagttttcagaagcagaatgtgaccatcatggaccaccacacagcctcagagtccttcatgaagcacatgcagaatgagtaccgggcccgaggaggctgccctgcagactggatttggctggtccctccggtgtccgggagcatcacccctgtgttccaccaggagatgttgaactacgtcctatctccattctactactaccagatcgagccctggaagacccacatctggcaggatgagaagctgaggcccaggaggagagagatccggttcacagtcttggtgaaagcggtgttctttgcttctgtgctaatgcggaaggtcatggcttcccgcgtcagagccacagtcctctttgctactgagacaggnaagtcggaagcgctagccagggacctggctgccttgttcacgtacgccttcaacaccaaggttgtctgcatggaacagtataaggcaaacaccttggaagaggaacaactactgctggtggtgacaagcacatttggcaatggagactgccccagcaatgggcagactctgaagaaatctctgttcatgatgaaagaactcgggcataccttcaggtatgcggtatttggcctgggctccagcatgtaccctcagttctgtgcctttgctcatgacatcgaccngaaactgtctcacctgggagcctcccagcttgccccaaccggagaaggggacgaactcagcgggcaggaggacgccttccgcagctgggctgtgcaaaccttccgggcagcctgtgagacgttcgatgttcgaagcaaacattgcattcagatcccgaaacgctacacttccaacgcaacatgggagccagagcagtacaagctcacccagagcccagagcctctagacctcaacaaagctctcagcagcatccacgccaagaacgtgttcnccatgaggctgaaatccctccagaatctgcagagtgagaagtccagccgcaccaccctccttgttcaactcaccttcgagggcagccgaggccccagctacctacctggggaacacctggggattttcccaggcaaccagacggccctggtgcaagggatcttggagcgagttgtggattgttcttcgccagaccaaactgtgtgcctggangttctagatgagagtggcagctactgggtcaaagacaagaggcttcccccctgntcactcaggcaagccctcacctacttcctggacatcactacccctcccacccagctgcagctccacaagctggcccgctttgccacggaagagacgcacaggcagaggttggaggccttgtgtcagccctcagagtacaacgattggaagttcagcaacaaccccacgttcctggaggtgctggaagagttcccatcattgcgtgtgcctgctgccttcctgctgtcgcagctccccattctgaagccccgctactactccatcagctcctcccaggaccacaccccctcggaggtccacctcactgtggctgtggtcacctatcgcacccgagatggtcagggtcccctgnaccatggngtctgcagcacttggatcaataacctgaagcccgaagacccagtgccctgntttgtgcggagtgtcagtggcttncagctccctgaggacccctcccagccctgcatcctcattgggcccggtacaggcattgcccccttccgaagtttctggcagcagcggctccatgactctcagcgcagagggctnaaaggaggccgcatgancttngtgtttgggtgcagacacccagaggaggaccacctctatcagnaagaaatgcaggagatggtccgcaagggagtgttgttccaggtgcacacaggctactcccggctgcccggaaaacccaaggtctacgttcaagacatcctgcagaaagagctggccgacgaggtgttcagcgtgctccacggggagcagggccacntctatgtttgtggcgatgtgcgcatggctcgggatgtggctaccactttgaagaagctggtggccgccaagctgaacttgagtgaggagcaggttgaggattacttcttccagctcaagagccagaaacgttatcatgaggatatcttcggtgcggtcntttcctatggagtgaaaaagggcaacgccttggaggagcccaaaggcacaagactctga

SEQ ID NO: 570799 - DNA, 478 bp, Homo sapiens
gaactttattacatactgattctggaacaaaacagttgtaaaaactttaaaaaaaaaaaaaccgacaaagttacgaggccatcatgctatttatcttctgagttcccagcaatgactcaggcatcagagatgatgctgcagtggaaaacctgactctgtgtgtctgcaactgaatgttgtgcgagtaatttattaactgtctttctaaaggtttgctgcttttaagatgcactataattcgggatgtaatccttacattgcttttccaaggaagggaacaaaagtctagtgattagtatgccaactgccactactcctggctccttttgaaggagtagtggcagttggcatactaatcactagacttttgagaggactggctaaagtgaagtgtgcacagtgtgaagtttaatgctgttgtcaagaggcctaaacccacattttctcttttaatattttatgattgccatcaaaaaaa

SEQ ID NO: 570800 - DNA, 305 bp, Homo sapiens
ggtcgaccgccgaataccctggcggattttaccgagcacctcatgaagtgtttgccgaatgcaacaccggtgcagcgtcaggtactggagcagtggcaggactatgcacactctttgtgcgcacgctttaacgtgacggtcggttaaacacgccgacgattaaattgcggacaataaaaaaacgccagtgtaactggcgtttatttgtaggtcgcgaatagcgtccgtgaccggcttggcttagcccagcagggtagcccagctttcaaccacgtcgccgccccacttggctttccacgtcgacg

SEQ ID NO: 570801 - DNA, 644 bp, Homo sapiens
tggcccccttggagttttgggtttcaaattggggaaaaagtgggttatacggataggatgggggggaagtttgcgggttgcactggcccaaggagggaaaggggtccctaaggggtggccccccgatcccggtaaaaggaggaggccggcggaataggagccaaacaaggggactgggcttaaggggcgcgaaacaatacagcccctgggcgcgcgcagatacttgcgcgggcagtggcggcactaaccgcacgcgcaacgaggacgtgcactcgcaaaataggggaaaggacgcccccacagatggccagagcacacgggcacccggacacaacatcgtgttgcgcagaatagggaaaacacctctccgcggcctagaagtggtggcgaaaggggctatgtcccaagaggggggttcgcccaacgggctcaaaaatggtcgcggggctccgcccataagcaagcaccgggtcggacaacatcagggtacaagcgctccctcaaaggcgcgcacccgcgcagacccaccacaccgcccgaaggggcgtcctaggaaacgggtccccgcacggggtgggccccgcggctccacccgaacagggacccggagcccagcgagtgcggaccccacgcgcccaccacag

SEQ ID NO: 570802 - DNA, 1578 bp, Homo sapiens
ctcagttaaaatattactccttcatggccaagtgtggtggctcacacctgtaatcctcggccttccaaagtgctgggattacaggcgtgagccaccgtgcctggccagaataggttttttctttcaacttgatcagtagaaaatggacatcaagtttgaacagataaatcatggacagccttattgtgattgaaatgcttgtaggttctgtgccaattttccaccactgtgtactttgttgctatttaaaactgtatcaactctaacggaagaataaattatttgtgattttaaaaaaaaaaaaaaaaaaaaaaaaaaaaaaaaaaaaaaaaaaaaaaaaaaaaaaaaaaaaaaaaaaaaaagaaaaaaaaaaaaaaaagaaaaaaaaaaaaaaaaaaaaaaaagaggagcgagcggcgcgcgctacgcaagcatcaaaagaagacccccaccccccccaccacaactccgacaccacgacaaggagaagaccgccggcaacaaagaaaagaaaagaagaaggtcagcaggaggacaccctctcaaagacacgagaggaaaaaaaagaaaaaagaaacagaaagaaaagataagagcccaacccccccagagaagaagaaatcgagaagaagcagacacaacggaaggaaacagagaaaacaacgagtagaaggagaacgaaagacagaaaagaaaacacaccaacaggagaaggcaggaaaaaacaaagacaaacaaaagaaaacaaaaaaaaaaaacagagaaagaacgagcaaaaaaacacaagcaagacacaagacagtagaaaaaaagaaaaaatagagaagaagaaaaacaaaacagagaaaaaaagagacaaggcacacacaaaaaacagaacaagagaaaaaaaaaacaaaaaagacaaacaagacaaacaaggagacagaacaaagaagacagaacagagataaaagaagaacgacaaacacaaagaacaaaagagaaagagcgatcacacacgacgaagaaaatcactaaccataaaaaaaaaagcacagagaaagcaagaacaacaagaaaagagagaaggaaaaagaaaaagacaaacaacaacacaacaacaaggaaaagaagaaagaaaagaaccacaaaatagaaccacacaacaaaacaacacaacaacagcaatagagggacagcgacgaaaaagagaaagacggaagaagaacgaaacagaacacaatggccgagaacacagacaagaaggaggcgaaggagcaaacaagacaacaaaaaaacaacacaaaagcgagaaggaagagtaaacgaagaaaaacgacgacacaaagacgacagcgagacgagaggagcgagcaggaaagagaaagcacgacacgcacaaacgccacgcgaacccgaacaccaacgagagcaagacaccacgcacagatcgcgagcgcggagcggatggatggagaggacgcgaaagaaacaacaacacgagagagaaggagcaagacggagcgatgagcgaaacgacacaaagaaaagagaaagagagagagagagatgcaaagacaaccgaacgacgaaacg

SEQ ID NO: 570803 - DNA, 313 bp, Homo sapiens
tccctccccggctttttgttggtattccccgtattcctgccttaatatttcaccccccaacccgtttttccggggggtttaaacaagggccccgttttatttttttgggataccgaaggttttgaaattcccctatttttcattttcagtttttttttccaattttttgctttttcaacatgggggacctattttttttttttgacttttaacatcaaaatttgatttttgtcaaaccttcctttttaagggaagaatgaccgttttttttgggggaaataatggatttactaatttaaccttttggatttta

SEQ ID NO: 570804 - DNA, 335 bp, Homo sapiens
tgtgaagcacaccccagttttggggagacctcaggaagcttacaatcatggcagaaggcaaagtaggaacagacatgtcacatagtgaaagcaggagcaaggagcgagagagagagagagggagagagtggagaggagagggtcggggagttgccacacacttttaaatgaccagaggtggggggaagtgccacacacttttaaatgattggatctcatgaggacagcaccaagggatggtgcaaaccattcataagaaatccacccccatgatccaatcgcctcccactaggtcccacctccagtactggtgattatgattcaacattagatgt

SEQ ID NO: 570805 - DNA, 578 bp, Homo sapiens
aattatcatatcaatacaatcttttctacattattaactgaagaaaaatggtgaccttaatgatgtataaagattaggaaacacaaagaaatcagaagcaccaaattaggactgtaaagtggatgcctaatgatttcccatcataactctaacagaattgccattgtctgataagaggaatgacttaggagcatatttctggtggaatatcactctctgttgaagctttcctgtgcatttttgtgctaaaactttgggtaactttctcagaacattcatcacaagtattagccaggtgtggtggcacatgcctctagtctctagttccagctacttgggaggctgaggcatgagaataacttgaacctgggaggtagaggttgcagtgagccaagatcacaccactgcacgccagcctgggtgacagagcaacactctgtccccaaaaataagaaaaattaaaaacactctcacaataagcagatgttggcattctctggccttcctgaaaatccgcaagcggaatgccttcagcatccctaaaaactgttggcatgacctttggttttgacccgtct

SEQ ID NO: 570806 - DNA, 161 bp, Homo sapiens
cctacccagaggtgtacctcagattgagtcacttttgacattgatgccaattggtatactcaagtgtctctgctagtgaacaagaagtacgggaaaagagaacacgattactatcactaatgacaagggccgtttgagacaaggaagacattgatacgtat

SEQ ID NO: 570807 - DNA, 646 bp, Homo sapiens
tctgcctacgtgtgcccccttgcatgccgtgctgcgttctgtggatgaaccgccgccggcggttgccggagttcttccctgctggtgcggcccgcccgttgtgctggtttgcgctccggtcttgtgctacccctcgcttcttcgcgtgattggcccccccgcggtgacgtcaactgggcaatgacaacgggtaatgcttgtggaccgtgctgcacgccattttgtgctagacagtaaggcccccctcgtcttaccccgtgcggagtttccttaatgatagaggcgcaatattttggggagacccacgcaggacgtttccccacattggagttgagaattccaaatagagaggacaggagaatagaaatgcctcggtgacaggttagaagagcggagagagtgaggataggagaagaaatggttatgttttgttcgagaggatagagacgaggtgtagcttgaatggaaagaattgataggatatactctttgagtcaccgcggcgggcgcaccgaggcagacgcgagacaggatgagacggagggaacgagcgagtctcggagccccagatgaccaccacactcccgcgaagtgagcgatttcacacccccaccaaaaaggagaaaaggtccaacaaaagaacgaa

SEQ ID NO: 570808 - DNA, 1473 bp, Homo sapiens
tccctaagtgcccggttaatcccccccctgggggggtccacttacccagccaaaaggccggggcaccatggggaaagggcagaactctcctgtgcctttctgtgaggggattcttgggcctctcagggtgtgataaaaagggaaaggagtggtttctctcttctttgcccctcacatagggccataggagaacccaggagcaaattccccacccacgccttctccctatttcttcacaccgcgagaggagagaaaccccacctgtgtgggtgcacggttaaagatctcccacaccctatttaatcagttcaagtgtgcgaaacagagggatatagggcctgtggtctcccaccacacctattcacgcggcgggacacacataatatattacaaccagtcacacaagagacatagatataaacagttgtggcgtagtgagagcgcgccccgcagaaaaagagaagcacaatagtgaaccaccacctaccaaaaagaccttatattgcgcagggagaaaaagggcgcagctaaacggggggatctactgatgtgggagcgggctctaatacaccccccgcgtgccttgtgtgcaagagacaaggcgcatcagcggacacaatagagggaagtgaggagcacctcacatgtgggtgtcgggcactctgtgaatcgtatttctccccacgacaaatatcatgggcgcttatgaggagaggaaaaagacaccccgcacccgcaacacaagcagggaaaaggcgcaactctccacaatatatacaggcgtgagtgcagtggcgcccgagacctccctatgttgaacgagatgtgccgccccaaaggttaacactaaaacgactctctcccatataaacacttgcaacaagaggagggtgccctcttataatgccccacccgggaatatcaaagcaaacaccgttgtaggcatctcatcaagacacacatcccctgcgagaacgcgtactccaacgagtaataaccacccctcgggaggccaccatgaataagacgggtaaattatgaacacacactattgaccacgaaaaaaccacaaatgtggggtcccccaccacaaggcggtaacataataagagccccagagaggacatcacccgttgtgctcctaccgatctacattaaccaggaaatactccacgcgaaaaagagacccctttgatgtagggctcccaaacaaacacaccgtctctctcagaagaaatgcaccaacatctccccctgataactatattaagcgtattctccccccaaaaagcaggagcggaactaacctcaggcaaagccgctccgttccgcaacaatgcggtgcgccacatcttttgccacaaatgagtgtctatgaacatcccccaaagaaagagtcgtctctatattaagagagccccaataaccacccacagtagtctgcgaaattatgagataccacggagggaggat

SEQ ID NO: 570809 - DNA, 712 bp, Homo sapiens
taaattcttattactcagtcatactggtgggactattatggttaagagaactgtcttagatatgttcttaaaatgtgcccatattttcagaaacatgcggtattattggtatgattgaatgtcgtaccgtgtgagcataagatctttgaggcagttgatgtattggtgaattagcaatttatacaagaagctgtccataactgattagtgcttatgtacttatcttacagcatttttaagctttatgagcagcctaaatattctgggggaagtggggtataatatttaacgaatcatgattcagattgtaccattacatgtttcagtgcatgcatgtgttgactaacgctatgtcagacttaatattaaaatcagaaaatttaaatgctgggtgctggtcagagtttcctgtaagattctcgtcatttaaaaacaaagtagctgtttgtttaaagcatgcataaaaatttcatgtattgaaatatacttaagaaactttcaagatgcttcccatgtgtgttgtaactatttacctggtatggactcgtaccttagggttgtcttaacgttgactttgacgtcttccaaggtctccatgtgaaaccaaggcacccaaagagaactcatctgtgagtggttgtaattgttgtgactctaagtgttcaagatggaggtgaaaattttggcattatttaaactttttccattcata

SEQ ID NO: 570810 - DNA, 1091 bp, Homo sapiens
  misc_feature (196)..(196): n is a, c, g, or t
  misc_feature (524)..(524): n is a, c, g, or t
ggttacagactctttagcatttaacagaacagatgtagctgttatgaaagtgtaatgtaaaaatatgtgcccgtgatcttctatatcagagacatggcctttaatttcatatcgcttttcagaacatttcagtcgactacaaaactgcgaacccttcggatttcttatgtgactcagagaatagtgccgattcccncttaagtggaaatagattttgagtcttttggtcattgtaacccccaaatgagaatcatcgtaccctgatctcttggtaccaacaacaaaacattctatttctgcagtgctatgttatgtatattgtgttgagaaggaggggttctcgtgtcagcagcgagaacggggagtcgcaggggggcacggatgctgtaagctcgacttgagcaactgtgctgacctgcccgaggggcttcagagcaaagttcatccgtgggcatcataaccgcatcgcgggaggtagccgtggcgaagtaacgaggggcatgtgtccactcaccgacgccgcncgagactgtaagttccgtgaggctattgtgtgtgtagtgtagacaggcacaggggctcttcgacacattgtgtgtggccccgaggcctgtgggtccccagaaagaacctcgcgtgagacccgctcagaggggggtgaaagtcccaaccgccgacgctttgcgggggccgctcccccaaaaaggagggggcctgtgggggaaaattcacatcacggaggtggcgcgagaagacccaaaatgggggccggccccaaagcgctgtcacgaagagtcaaagtctttttcaaattggttcaacacggacggtgggtacacgaggctacaccttgtcaaggaagaagatgctttaagacggaaaaaaaattgggcctggggaggtatgaaggaagctttgtgttacattatgggaaggcgaacttacgggttttcttccaaaaagtggggtgtctcaccacgccgggcacagagatatttgggtggcgagggagggatggtaagagcgttgggcgaaataggaagccctcgaagtgtgtggcccaaagaggatagggagtgtgcggtaatata

SEQ ID NO: 570811 - DNA, 132 bp, Homo sapiens
cgtagacacttcctgtacctggaactgtttatcttttgtaactgcttctattaccaattaattttttagaacgttgttgtctattctgcttctgtaaaattgctgtcagttgatactcccccgctcccctgt

SEQ ID NO: 570812 - DNA, 1196 bp, Homo sapiens
agcggacagccgctccctcgctctgctggggcctccggacgcgcttcccacgcgggtctctggaacactcggtccgaacgcacgcctgcttgcactcacactgcggttcacacccgcaggcgctctcgcacccacactgccgctcacgcgcgctcacactcccccacgcgcgctccgctccggctccagccccgcgccccgcgaaggcgcaggcactgctgccgagagcgccgaggggccccgcggccttcccatggcggacctgagcttcatcgaagataccgtcgccttccccgagaaggaagaggatgaggaggaagaagaggagggtgtggagtggggctacgaggaaggtgttgagtggggtctggtgtttcctgatgctaatggggaataccagtctcctattaacctaaactcaagagaggctaggtatgacccctcgctgttggatgtccgcctctccccaaattatgtggtgtgccgagactgtgaagtcaccaatgatggacataccattcaggttatcctgaagtcaaaatcagttctttcgggaggaccattgcctcaagggcatgagtttgaactgtacgaagtgagatttcactggggaagagaaaaccagcgtggttctgagcacacggttaatttcaaagcttttcccatggagctccatctgatccactggaactccactctgtttggcagcattgatgaggctgtggggaagccgcacggaatcgccatcattgctctgtttgttcagataggaaaggaacatgttggcttgaaggctgtgactgaaatcctccaagatattcagtataaggggaagtccaaaacaataccttgctttaatcctaacactttattaccagaccctctgctgcgggattactgggtgtatgaaggctctctcaccatcccaccttgcagtgaaggtgtcacctggatattattccgataccctttaactatatcccagctacagatagaagaatttcgaaggctgaggacacatgttaagggggcagaacttgtggaaggctgtgatgggattttgggagacaactttcggcccactcagcctcttagtgacagagtcattagagctgcatttcagtagccaaagaggacaggaacaagtctgtcttcatgagggaggaagacaatggtctataatgcccttggataag

SEQ ID NO: 570813 - DNA, 1772 bp, Homo sapiens
agcggacagccgctccctcgctctgctggggcctccggacgcgcttcccacgcgggtctctggaacactcggtccgaacgcacgcctgcttgcactcacactgcggttcacacccgcaggcgctctcgcacccacactgccgctcacgcgcgctcacactcccccacgcgcgctccgctccggctccagccccgcgccccgcgaaggcgcaggcactgctgccgagagcgccgaggggccccgcggccttcccatggcggacctgagcttcatcgaagataccgtcgccttccccgagaaggaagaggatgaggaggaagaagaggagggtgtggagtggggctacgaggaaggtgttgagtggggtctggtgtttcctgatgctaatggggaataccagtctcctattaacctaaactcaagagaggctaggtatgacccctcgctgttggatgtccgcctctccccaaattatgtggtgtgccgagactgtgaagtcaccaatgatggacataccattcaggttatcctgaagtcaaaatcagttctttcgggaggaccattgcctcaagggcatgagtttgaactgtacgaagtgagatttcactggggaagagaaaaccagcgtggttctgagcacacggttaatttcaaagcttttcccatggaggtaagaataacaaatcatcttgtaaaaatcttgttttctgaataaagtattcagcgatttactgaaaatgatttagtttaaaagtagatgcatagctcttgaattttatcagtttatactaaaatttaaaaaatgcttaatgcaatggaagcctagggcagcacatgaaacctcctgtctactctcgtggcttggcgtgtgcgcatgagcacatggccagaaaggcaatctacagtattaaatttcaccctagtgttactattcttgtaaaaattctgcctctgcaaattcagtaggtcatttttgtggatgctttggataggtgacgagctgaagacaagcaaccgttggagaaacctcaacagtaatgaaaagtgtaggtttgctagtttaaaattggtgggttggttttattcaccccaagccacttggggagggagggagaaagagagattttttgagagtgattcttttgtccaaagaattccctccccgacttacgttcttagttaacttctgctgtttctttgatacgcagttgaaatcttatgtcttctgtgggacttttctctagttttttccctaggcagaattcatctctctctctctgctccctgtatgcttgatagggcactgccatggcgctggccccatgggttgtaccatttagtctccacagcgtctttcttgctgcctgtgagctcctgaggaccgaagctccctctcaccccctttttactcccatcatttgcccactgccaggcacagtggagatagacagttcacactggtgaaagtgaggggatgttggattcagtccaggtcttgatgttatttctagaaggaacctcagtttaccccagaaaatagccctttggtgtcatgtaagagtatgttctgggggctgctggtcttccagtcttttttttttgacattcacaactgtgcatgtgcttaatattaaatataaaattgctcatgaccagatgcaatatccagtaccacttcagtggctggaaatcatggctgtataattctatgtcagtgatacatgtattttagagtattctgttgaagtgtttgacagcattactgtaattat

SEQ ID NO: 570814 - DNA, 546 bp, Homo sapiens
gtggtacatgacattgggttacatcataacgttgcttccagattcatatgtgttcagtgtcctctgaagtaactgcctgttgcctctgctgcacctttgaaccacgtgtacagtcgccagataggtgaccggcggaacatctgattccaaacatgtaggatggggttcttgtcctctttacatgtggtttaattgccaagtgtctagagcttaatatgccgtgctatgtaaatatcatggattggatatagaactaagggtcatattttgatgtcgaacatgagtttagagggataaaatggtaccggtcgaacgatcaagtgacttgatagctgcgaagaaatgtggtatgaggatgaagttctgtatgtgaggaaggaaggaaatgcaaaataaaagtgtgtcggaagaatattatctggggttctatcgtaaaatgtatttcgtacatgctgagattagctctcgaatcttcatggattacgacgcacagaacttgtgtttggtgaaaaaccatgctaagcttacacccctcaccgacggggg

SEQ ID NO: 570815 - DNA, 435 bp, Homo sapiens
agaatctgtccaattgacatcccctaggcacaaagagcgtctaataaaaaggtgaccgtggtcggacttggagggcctatggtctggacccatactcagtggctcccatctttcagcagcgatgccaggctagcacccccgtcattcctgcccctggggcccaaggacaaccttcaggtgcaaattcaaggaaaccaggtccccccccttggctgggtattgctttaaaaggatcagctcccttgaaaacccatccaaggtttaaaaaaggccctccaacctggcaaaaaaaaatgacaaacttttttgtttcacgtggtggatccggtggaaatccaaactttgggctggtaatttttatgagccttttcagcttttgccaaaacaaaaaaaaatttcttttccaaaaataaatttttttttctaatctaaaaa

SEQ ID NO: 570816 - DNA, 715 bp, Homo sapiens
gaaagataactgaatcaatgtgaagtctgtgagtccctccagttgtcttcctcctcatcaggactaaaactggacttaagaggcagcgatccactaagcactgcttctgttcagaaataagaaggaaggaattcatacagagaactcgtattaagccagtagtttgtgtctacttgtgatcctcttgtgctccatctgatccactggaactccactctgtttggcagcattgatgaggctgtggggaagccgcacggaatcgccatcattgctctgtttgttcagataggaaaggaacatgttggcttgaaggctgtgactgaaatcctccaagatattcagtataaggggaagtccaaaacaataccttgctttaatcctaacactttattaccagaccctctgctgcgggattactgggtgtatgaaggctctctcaccatcccaccttgcagtgaaggtgtcacctggatattattccgataccctttaactatatcccagctacagatagaagaatttcgaaggctgaggacacatgttaagggggcagaacttgtggaaggctgtgatgggattttgggagacaactttcggcccactcagcctcttagtgacagagtcattagagctgcatttcagtagccaaagaggacaggaacaagtctgtcttcatgagggaggaagacaatggtctataatgcccttggataag

SEQ ID NO: 570817 - DNA, 150 bp, Homo sapiens
gtttctctcgtacttgagcaggattaccatggcaacaacacatcatcagtagggtaaaactaacctgtctcactctgtcacgcagcctggagtgcagtggcatgatcataactcattgtaatctcaaactcctggccttaagcaatcctc

SEQ ID NO: 570818 - DNA, 367 bp, Homo sapiens
ctgcagcctctttgcagaatggccaccttctcactgtgtctcacggggtctttcttctgtgcctgtccctcgcagacagtctctcccggctctcttttgaaggagattggagtgccgaattggctagtctgaggtttcagtgtgcacgacgtagtcagatggctcagatttggacccctggtagtaatgtattatactttgtccgatggcattgggcgggttgagccagcctgcagtcaggatttccttgtaccgttcacccgggagtacagaatcgcactctggctgaaagtacagcacgagcaccattgtcagccttgatggcctgtctagccggaccaagcaaaaagcttagtaactttctggg

SEQ ID NO: 570819 - DNA, 354 bp, Homo sapiens
cccctgatatactggtatatctgtgacacacaaatttaaaatgtaataaaatattacctttacttagcaaaaagtacataagtcagattatcctttcatgtattaaatgaagcttcttctaaagaagtccttatatacacagttgcaaattactttttaacacatacaatgtatactacatgctggaatcaaacacctgaaggagctggaatcttatgaatacagccagggcaacagtgtagagaatcatgaacaaaaacatcacagtccacacagaaaacctttaggcacacagcacaaacatcaacatgttggtctttcaattccccctgacatccataacaaaatctttct

SEQ ID NO: 570820 - DNA, 437 bp, Homo sapiens
  misc_feature (46)..(46): n is a, c, g, or t
  misc_feature (93)..(93): n is a, c, g, or t
ctgcgcctttaaccgacatacaccatgatatcagggtctaagtgtntagtttttacatgttaaattttactgtaatttattttttaacctgtntttaatttatttcattttgttcttaggtgttgagtggggtctggtgtttcctgatgctaatggggaataccagtctcctattaacctaaactcaagagaggctaggtatgacccctcgctgttggatgtccgcctctccccaaattatgtggtgtgccgagactgtgaagtcaccaatgatggacataccattcaggttatcctgaagtcaaaatcaggtattttagaaaatatgtttgtgtggtcttttaaactagaagtcagcgtagagttattgaactgtgatttaacttgcacaatttaaaaagtacaactgacgtatctctatcttcaggatacctttg

SEQ ID NO: 570821 - DNA, 1189 bp, Homo sapiens
tctctcattttattacaatgaagttataacagtacagaaaagtcacatgacctgtggggggtcaaatttcttaaacccggcaacatggaggaactctaaatactattaaattattggttacactattcagacttccaatggtacaagtacttggaaacagttacagccctcaccaagctaaggttgggggcacatgaagttccaacagcatcgtgaaattgcgtttgaaggcaaacttttacaaattagcaagtgtaccgcttacaaaacttgtgcctttacctaggggtggtatgttccagtgttaattccagcgcctttcacaattttaaggaaccaaatttctactataccttcactttcataaaaacccctagattgacaacagtgaaaaaagaagccaatacagataataaactggcaactttcacggaacaagtcccgtgcttacattatctgcacaatacattattagcgcagttgttaaacactacaattgctcccaaatagctcccgtggaattggtgcggcaacagactcagtgttcgcgtacaaacaagtcaacacatgaacccccttaattaggaccgagaaacgcctgcggcccacttatacaaccgagcacacaacagttgtcaaccaaaacacgtttacactcctccaaaacctatttaaccactgggcattcaacgtaaaaaaccaagatacacgggccccccttgcgcaaacataacacggagggtacacaaataccccaatccagaaggatcaacaagaagagccccaaccactcgggaaaaggggaagagaccccaaatagacgagatacactagtcccaaaaacacggaggaaaaacaaccaccacagaagaagaaaactcggataaagacatctaaacaaaaaaaacacataacgcagacaaacagaagcggacacgaggaggaacctaacaaccacatgcaagaaggaaaacaccacggaaggggcgagaacaaaaaacaccaaaagggtcacacaccaggaggcacataacagagaatggaggcccaccgcgcaagagcagtcacaatatgcaacaagaaaaaaacgaaacaaacaaaacacgacgagaaaaaaaaccaccgcaaggcaaaacacaaaagaacaaaaagaaaagaacgaaaaagaaaactaaaaaccagcgcgaca

SEQ ID NO: 570822 - DNA, 938 bp, Homo sapiens
  misc_feature (669)..(669): n is a, c, g, or t
ttcaccgtccaggtctgactcataaatcaattaccaggaactagtcattgtgggacattagggcccccggctcgggagaggtgccggccagcttcccatgccagcccggagcccacgagtgctgcccacgcgtacctccgcgtcaccgtcatggggctcttctgggagcacggagcaatccgcgcgtgttcctgtttcactcctcagcttctcccctcgaagggactctctggccacctcctccaccgaagtccagctccctcagtctgggcacccactgctacactcagcctcatgatgccacttcagaccagccaggtgtcttcccgggccctgccagaccctgctcacattccctctgctggtctgtgctggtctcacgaaggccaccgcgccctgattccactcaggccaggtccgagctgcagtcccccgcaccttccttccgctgtcccggtccgtgggtcatgttgttgccgagccctgtgtgacttttgaagctgtaaaatgagcttccaggcttgggtggcgtcggggcagggccgcgaggctgggaggaagcccttctgctttgctggtgtgtctggaatttgctttccctcacctctcacttccttctacgaaggagcttcctgagtggaaccagagaatgcatgtctgtccacttgngtggctagtgggtgggggctgggaacaaggggccctgacctgtgtgctggccgggacgtggcaacaacccccccagctaggttcttccccttaagcttatgggtccccggtgggctagccttccctccggaggccggacatggccagaatggggacacggcactacagagaaacccctattggcacacaaccagaatttacgggacacccgtggccccattgtgccgcacgcaaaaagcgccggggcaacaacacaaaacggggcggcc

SEQ ID NO: 570823 - DNA, 453 bp, Homo sapiens
tgtgcttgacactaaacctgaatgggtgctttataatgagtatgtatctaacaacaaagaattacatccgaacatgtacagatatcaagccagaatgattggtgaaaattgcccctcaatattatgacatgagcaatttcccacagtgtgacgcacagagacagtaggaccgcatcattgccaaacttcaatccaaggaatatacactgtactgaattcagtgcttagcactgaagttattgagaggacagctttcaaagatgaatgaactcaaaagttcgagttgtgctcttcacgttggttcgataatggcctttatttgaaagctttttaatttttctttacagtaaatattccattctgatttcataaattacacatttatgcctcccttttgtgtagacactgtagctcatactggaaaagtcgtatcactgcgcaggctaccgagct

SEQ ID NO: 570824 - DNA, 101 bp, Homo sapiens
atgatcccggtagcatagtgtggtatctaatcccagttgggtcttagctattgtgtgacagatatgttaaagccactttcgtagtctattttgtgtcaact

SEQ ID NO: 570825 - DNA, 149 bp, Homo sapiens
cgaccatgctcttgtgccttgaaccttgattaaagcaggctgtacggccggaatcttgggcatttttcaccggcgccgtggccgcctctgaggccagggcaggacacgatcgcgctggagctggcggcggcgactgatgagccggggcc

SEQ ID NO: 570826 - DNA, 98 bp, Homo sapiens
ggatttgctggtgcagtacaactaggcttaatagggacatgacccaaacaattgctatgtagaatgagacaacagcattcatactgaacttttccaaa

SEQ ID NO: 570827 - DNA, 365 bp, Homo sapiens
  misc_feature (230)..(230): n is a, c, g, or t
  misc_feature (327)..(327): n is a, c, g, or t
agccctctctcccacatgagctgggcagttctctgagcagggcccatgatgtttgttcagaaaacagtaagggaagtggggcctcttcacacacaggcccttcctgccagtttaagtgtctggctttctggtgtagccaaagctattcctccctgtgctgcctcctgaggctgcaggctgctgctctgctcctgggctaggcttgctggagaagccacgtgcaggaaggnttataaaagagcctttccataaattttctgcatgacttgccaagaactgtaagttgtaaatctgttttgttgcttcagagagaagtaggaaggaggnaatgggtcatttctactcagctctgggaacaacccttg

SEQ ID NO: 570828 - DNA, 594 bp, Homo sapiens
  misc_feature (484)..(484): n is a, c, g, or t
cttattccgggtgtccttaaaaaataaagagagacttatactggggacaccaatgggcattgccgtatcctagttatttattccccaggtttaaatcatatctaatctgataaattcattcccttcagaacttgattatttttctccatcttataaaattaaagtacctaggaatgttgggctcagaaaagcaacaaattaggaggacacaggggatttggtcttcaaacaactgaagtatggtcatgttagaaaagcatttggatccttttggtatagccccagtggattgaacctatgtatggaatttatagtaaaacagatttcagtccagttaaaggaagaactatcctaacagtcaaatctgcttagagagggagtgggctgcctaggaggggcttgcaggggtccctcttgaagtttcaatatatgagttgggatgaccttctccggggtgtgtatggtacattcagatgtcgagtgnattatcatataaggggggctataaggactatcccaccctgaattttttcctaggacacattgggtgatggaaagaaaccagatgattattacaggatgagtcaggccccg

SEQ ID NO: 570829 - DNA, 659 bp, Homo sapiens
aatcggccatatgccggagcacttgttagcagagcttatgacacctgagctggggagaactcctgactttttagccatgaaatctcacactaaactcttcaataaactacgttcttttaatatcacttacttctactctcacttactttgtctttttttattacattgataattatttatccttatatttatttctaattctttatcttttttctatccttttacttcttttcctatctttcacaatacactttactcattttccttttaatttaacattttctatctttcatctacccattctctatttactcttcattctcttatatcatttattcttttatatttttaatttttacaatctctttttttcttattctttttacctttttatatctttttttctctattcttttttttattctttaatctttctctttctaatctttctttctatatttttttatcttcatctacttatattttttcctcattttcttttatttttaattttttctctaatttgtttattacttcttttatttattttctttttatttctttcttctcctcatcttttaactctttcctcttattttaatttcaatttttaatttactttttcatttattttttaatacttcttttcatttcctccg

SEQ ID NO: 570830 - DNA, 103 bp, Homo sapiens
tgggtccttccctttgctccctactcccccccccggcagagaataggctttttaagatgctgcgatcccgttttgctgcccgtaataaaaatgctctccgccc

SEQ ID NO: 570831 - DNA, 204 bp, Homo sapiens
tgcacggtactggttagcagcggtactggttctggggatgatgaggctattgttttctgtgaattcttcgatcatggcccatttgggtcaaaaagccggttagcgggagcaggcctcctagggagaggagggtgtgatggaattaagggtgttagtcatgttagcttgtttcacgtgcgagatactatccgggtcttggtgagg

SEQ ID NO: 570832 - DNA, 169 bp, Homo sapiens
gcgtctgaagagtccgactacagctatagtgctagtgtggagtagggctgaatctgtgctgggtcctactatggctgacctgagtcgagctgggagacctaatcggcctgaactgcctgcagctgctaggaggagccctagtaaccgagtgagacttctattagcggtg

SEQ ID NO: 570833 - DNA, 614 bp, Homo sapiens
  misc_feature (509)..(509): n is a, c, g, or t
caactacgcaaaggccccaacgttgtaggcccctacgggctactacaacccttcgctgacgccataaaactcttcaccaaagagcccctaaaacccgccacatctaccatcaccctctacatcaccgccccgaccttagctctcaccatcgctcttcgtacgtatgaacccccctccgccatgacgccagaccccctagatcaacctcgaacctagggcctcctgatttattctagccgacctctagcctaggccgtattactcaagtgcctgctgatgcagggtgaggcatcaagacttcgaaagcgtagcaccgctgatcgggcggcgacgtgcggagcgaggtgaggccgcgagaacaattcgtcgatatgaaagtcatccctagcccatcagtgtctcacatagtcgataccatttacgtgacatgaaagatggccatccttattataccacgtacgtcgcacactcgtgtattcacaagcgatcaaagaatcgaacctcctgantttatcctgccatgtcgcaatcaaattgaccccttgggcctagtcacatattagatcttgatctcaccaacacttagccagaagaacgcaaccagaagccccgct

SEQ ID NO: 570834 - DNA, 266 bp, Homo sapiens
tggggcaatgtctgcaatctcactgtctgactcaggtgtagaatacttttttttttcttacacatttattccgcaaagaaatgttatggtcagtgccaggaagcagcatgaaggtagttgtaaatcatgtatgttaaatttgcactaggctaaatatagccttgacatcatggtgttgcatgtagcaaatgacttctccacagataaggatatctcctactctgacctcaaggcccttctggccaagaacaactgcccgtcgacgc

SEQ ID NO: 570835 - DNA, 342 bp, Homo sapiens
  misc_feature (72)..(72): n is a, c, g, or t
  misc_feature (79)..(79): n is a, c, g, or t
  misc_feature (116)..(117): n is a, c, g, or t
  misc_feature (125)..(125): n is a, c, g, or t
  misc_feature (141)..(141): n is a, c, g, or t
  misc_feature (154)..(154): n is a, c, g, or t
  misc_feature (157)..(157): n is a, c, g, or t
  misc_feature (159)..(160): n is a, c, g, or t
  misc_feature (163)..(163): n is a, c, g, or t
  misc_feature (174)..(174): n is a, c, g, or t
  misc_feature (242)..(242): n is a, c, g, or t
  misc_feature (252)..(252): n is a, c, g, or t
  misc_feature (275)..(275): n is a, c, g, or t
  misc_feature (297)..(297): n is a, c, g, or t
  misc_feature (332)..(332): n is a, c, g, or t
  misc_feature (334)..(334): n is a, c, g, or t
caacttctgttcaacaagttgtctgccttaagtttttggaagcaaacaaaaaagcaaaactcctcagatttntttgccnaacccaaattttcaaagcctttcaaccccctgcaaannaaaggccnttatgcattttttcanactggagattccnccncnnacntcatgctaacncagtttgtttcaaatgaataaggcaaggaatcataaaatcaaaaaaaaatttcccgaaccacttgccntttaaagacnaatgtcaatgaaaaaattatgcncagtattcgatcgggttttttnatttaggggtttgggaataaaacaaaaatgtttcngnggcttcca

SEQ ID NO: 570836 - DNA, 156 bp, Homo sapiens
ttgggcctttttttttttaaagggaaaatttttagggctttggccccctttgttttccccccccgaaaaaaaaattttccctttcccctttttgtccccccccccaaaatttttttttggccccccaagtttttgcccataaaaaatctttgctta

SEQ ID NO: 570837 - DNA, 214 bp, Homo sapiens
cgaagctgcttcccctggtgcagcaggctgtgggaggtggtgacagttgaggccagcctctttcaccacgcagcttacgcgttcaccacgttcacagtccgcctgcttggaagcctctctcaggaggccgacaatgactgcggggctcaatggagctgtcttcaggccagaagtgcctctccgcagggacctgcccctgctcctattccggact

SEQ ID NO: 570838 - DNA, 952 bp, Homo sapiens
gcctcttttctccggctggaaccatggagggtgtagaagagaagaagaaggacggttcctgactgtgccatgaaaccccttacgacacacaacgcgacacggaactttcgcagacgctgaagatcaacgcgcctgagacacgaacgtttgcccaaacacgatgcttcgaacacggcaacggacggacacgcttatctactgacaagaacgcaaacagcactactcacacaggaactatcaggcacgatgtacacgaacctgaaaattcgaactggccgaggactggcacagacaacagcctggcaaactatctatgtacccctgcacgacacccaaaacttggcgatcttgtcaatcagacactcaggacgtgtatcaactggacgtgcagcccaacacggcttcgtaaaatgtgtgtcagccaagcgttctatcgcactatcgctcaaacatcttcacatggacaccatttgtgacagctcacgcacaggcatttcgatatacacaatgctgaaggacttgtacgagccactactatacgcactgggcggtacccacagaatctgaacagatcaggcaagcgtgacactcactcgtacaacgcgctggacctctgagcaacaactcaatacagaagccgaactacgtctcttgaccagactcaccgacgtatcagcaatatgcagtcggaatctccttgagtaaatatcacgggcaatcaactactgcatggcgggactattgactccgatgaagaatactaactacgtgaccgggcaaaccagcataacaagagacgggacacaataaaaataaccctgatgggcccgcatacaaacagtatgacacagcgtcacagagacagtggcacatgcaagacccacacacacaccaccaggacaggcacgaagggagacacgaagactggcagcaagaggaggaacaggaggcg

SEQ ID NO: 570839 - DNA, 248 bp, Homo sapiens
atgtaacgattccagagtattcccactgctcatcactagcgctgaacatcgtcttggctatgcgggctcttttttggttccatatgaactttaaagtagttttttccaattctgtgaagaaagtcagtggtagcttgatggggacagcattgaatctataaattactttgggcagtatggccattttcacgatattgattcttcctatccgtgagcatggaatttttttccatttgtttgtgtccgcg

SEQ ID NO: 570840 - DNA, 725 bp, Homo sapiens
agcggtgcgaagcaggcgagcgagcgggaagacgcagccaccttcctcaccagtccagtcccacagcggtttgttccccttctcgggagtgcgccaatgcctgggtcgaccaaaaccctgtccccaatatggcgagaacgacaactgacatcatccaggataataaacggtgacctagtcagttcgctttcctggtaatgcacacagtgcgcggggagcgttcctacagttggggaatggcggtcaatgtgtattctacctcgataacccaagagactatgagcatgacatgacatcattgcatgggttaatgacatagtatctttaaactacaccaaagtggaacagctttgttcaggagcggcctattgccaagttcatggacatgctcgttccctggctgcattagttcgacgaacagtagcattccaagcaaagctggaaccatgaagtattttcacaactgtgaaacttctgcaaggcatcatttaacgcgaatgaacgtggactaaggtaattccagtggagaagctagtgacacggacgtttccaggacaacctggcattttattcaatggttcacgaaattctatgatgctaactacgatgggaacggagtatgatcctgtataggcacgacaatgggccagatgcaattcctcctcctgaccctggtgaacagatcttcaactgccaaaaaaagtctcaccatgcaactcgcccag

SEQ ID NO: 570841 - DNA, 133 bp, Homo sapiens
agatgacttgaggaaggatcccctctatcacagttttaggaccccagaatgatttccatgattgtgatccagttcatatccactacccaagtaactctgggtgcacatgaagatggtgtggctgctctgtagt

SEQ ID NO: 570842 - DNA, 429 bp, Homo sapiens
ctgtgcagcgtactcacagagcacgtcatatcactgcaccagtaggccttgacataggctgagtacatacatagttggtcgctcagtggcagcagcgagacttctgagtagccagtcacagagtgcagtctgtacgctgtacccggggtcagtaggcagggcgcacataggctatcaagtctaaccggcgatccgggttacctcagagcaagaggcgtacaccggctgtcagagcgcgagcttccagccgcagcagggcgcgatcttccactgagcgtctgctgtctcgccgccctggacagacagcaggatcagtaccatccagacgcgatcaacatgaacctgttccatgtccaggcgcaagcagcagccacagacctatgctatctcggttgttgacgacgagcgttgactctcactctggacaag

SEQ ID NO: 570843 - DNA, 445 bp, Homo sapiens
gtggtgccggaggaccaccctcccaagtactcaggtctcttaagctggagccttcaatcaaggacctcctctactatggttcccctctatcctcaaccgggacacagaccatctcctcacccttccctatcgtccggtgattctccccttcagtcagaattctgttcatatcaaaagataaagcttttctgggtaaaactcacatcgggtgcatctcaacaagttatccagatagctggaaacaaggcaactttctatgtacacgggtaactctaagccaggtacgttctcttccttattactttccaccatagtgaaataaaatcgtaactaatgcatttgtctatagttctttacttcatgaaaaatattaaatccttctaatgtctgatacagactgagaccacaatgggctaactgacacctatctggatcacggtgggct

SEQ ID NO: 570844 - DNA, 1318 bp, Homo sapiens
ccaagatcacagactgagcagacccagcctctgtcgctgtccctgaagcccgagccccttggcgctaccatgtccgatgatgccatccgccaccgcgacctccatgcgtcgctgaggacatccacaagggctcacgcccatctgtcaccaacgtgggaccatggaacgtgcacgcccaagcacggcattttgcagccatgccgacaccctcctcatcaatggcacagccgtcgacattcttccttacattcccacagactccctggccgggaccacagacaccagacagctgtcgcatcgatagccaagtctttagaatagcatttacgcgtcggtgcaaccgccgactgccttaggctcactcggtaaacgatatccgactattgcgttcaacttatgacgccccacaccgcacacaacctcgcaaacgggtatatggaagaagataaatcatctataagtaatgaggatgaggcagtggtgggggtcaagattaaggttggacgtggtgtattacggcgggtacgatgggggtcgaaatagtgtgggagccggaaaacggtaaagttgacaaaatgtaacatacgttttaagacagtattggtaggactgagaaggaaaggaaggcgtcagagtgacgtgcttacggcgaaagaaagtggagaacatcgaaggaggctggtctacgagaggttatatggggaggcaggttatacacaccaagtattaatctagtaattgcaagttaagctggttaagtgtaaggtaaccgggactaggcgtaaggtgatcagagaagggcgttgaaatacaagaaggacgccgccccgcaacgcccacacgggcacaatgacaggacccgccaccccctccccacaacggggcagtcggggaactgaccactgacgagcgcaaatcaacactacgcagcgctagccggaaccccagcccaccgagcagcctcaaagggaaaccacaccgggcagcgggcccgcaggaaacgtgcagcgccggcacggcataacgacaacacaacagcgggccgcaacaccacacaagaggcaaaaacgagaaacacgacagatcacagaaacacgcggggcaacagcgcacagacacaggacccggagcagcacatgaggaagacaggccagaacgaccacgcacaaacagcgcagcgcaaaaagaatggataaaagttagacagcaagcacccagaagagacaagaagcgaacgcacccaacgaccgtccacacagcgcacaccagtagacaccgcggactaactcacacattcctctcatcctgcctcagaaag

SEQ ID NO: 570845 - DNA, 158 bp, Homo sapiens
cgactctacggatcctttcgattggcgggcacttatgcacgcttatcatcttaacaagctttgagtgcaagagatgaagagttcaaatctgagcaagatgttgatgttggataagagaattctctgctccccacactctaagttgcccgccaatcgaa

SEQ ID NO: 570846 - DNA, 323 bp, Homo sapiens
catgtgggcatacaggactagtgtgaagaatgaagtccgtcatggaatctgttcaattggaggtaaagtgatagtgagtcaagaaggttaaagagatagttcctacttgggatgggagtctgactaggctttttttcattcttcgtgggttggtcaaacatttatggagtatccgtggtacatcaggcacagacctcatctcaagggaaaaaaatggactaagataccatcccggctcccagggaagacagaagccctacccacggggtaatactgtgctccccacagcactatggcatcctgacaggggggctggtctcccg

SEQ ID NO: 570847 - DNA, 493 bp, Homo sapiens
  misc_feature (5)..(5): n is a, c, g, or t
  misc_feature (165)..(166): n is a, c, g, or t
  misc_feature (211)..(211): n is a, c, g, or t
  misc_feature (323)..(325): n is a, c, g, or t
  misc_feature (331)..(331): n is a, c, g, or t
  misc_feature (343)..(343): n is a, c, g, or t
  misc_feature (380)..(380): n is a, c, g, or t
  misc_feature (402)..(402): n is a, c, g, or t
gaatnttgtgaacctgcttcctgatgaattctcccttgttcccccttggctctgcattatttcgttttcagtgtaatttgccaagccgcagttttctgtgctggctgtgctctagtcgcagctctgtgactgattccctcccgggtgctgagtcccctccccggnnaccatcctgcgtgaatatcctgaaattcatgggcttcctcggggncccgcccgcaggtggtgctgggtgggttccgccaccttctcctggaaggtgagccttttcctggccaagggaagctgccttaacctctgagagtctgcgcttggccttaagnnnacccanaaaacccaaaanagggacttgaaccgtgctgctgttggggagccaagancggccctttggaagccggcatncccaggggtccctgctggatcagagaaatagaaagcacccgaagacggttagtggcaattccttgacccggtttgcttccaaaaccccccc

SEQ ID NO: 570848 - DNA, 100 bp, Homo sapiens
cggtcggagaggatcccggaagatcactgacatagaactgaacgttgaacacttcaaaaacagaagaaagttaaaaaaaccaccaccagaattatcacca

SEQ ID NO: 570849 - DNA, 229 bp, Homo sapiens
gtggccggccaacgctcggcctggagctgccgatagcccaggcgggcggtgttttccatcttgaagggaatgacgacgccctcctcgtcgacgggcaactcgatgctctggtccatcgacgtcttgccatcctccgactgccgtgtccggatatccgagaacagcacgttgcccagcttgagcatgttgtcgttgccgatcacgccgaaatagcggaccagcggcttgg

SEQ ID NO: 570850 - DNA, 306 bp, Homo sapiens
gactgaactagaggatccatctcgtgacggcgattatacagttgtgataatgcaggtaagtgatcaggatagtgcctgtcacctggtaagccttcggtaaactttagttattcccagtggtatctactgaatgaagtgaaccttgagtagatgtagaatatatttatgacttagtttaacaaaaattagccaagtaaggccaagacagagaaagattaaaatgttcaagttcatatctttcaaacacagtaatatgtgattagctatgcaggcagatacatcccacataatcgccggtcacgagat

SEQ ID NO: 570851 - DNA, 168 bp, Homo sapiens
gggggggggccccccccccccccccccctttttttttttaaaggggggttcccccttgggttcccccttggccccggcttttgggggtcccccgggttttcccccccggggttttttttttttttttttccccaatttttttgtttttttttgcccccccggggggga

SEQ ID NO: 570852 - DNA, 220 bp, Homo sapiens
aagaaaacacctgtccatccactgactcttctacattgatgttcgaaattgctgctggtaccaccacctccttaagaggcttccctgattccaatgccatccatcctggcatcctggccctccgacaggctgccgtaagtagcgatctcctgctccagccgtgtctttatgtcacgcagcatcttgtaccccatagttcagcgtctgacggggattctct

SEQ ID NO: 570853 - DNA, 181 bp, Homo sapiens
  misc_feature (16)..(16): n is a, c, g, or t
ctctgaatatggtacngctttagtgatgtctgctttattcttaaaatgcttatttctttggctagatgtaaagatttggtgtaaacaacaagtggttttaacatagtaaattatgaatgaatgcctttagatttacccgtgtttgtcttattattaactctgttttcattttatctcttca

SEQ ID NO: 570854 - DNA, 393 bp, Homo sapiens
cgggctgctgggggagcactgtgagtggtggctgctgcgggtatgtggtgacccccttggtcgttactgtgtgcttcgcacggaccaagagaggattgtcttgttcagccctggaacatgcacgctgcgctgcgggccgtgacctgtagccgtggccaggccgacagcatcctggacccccagtatgtccacgggctctgggggtccctgagcttggcagcccaggttgaaggccgtgttggcggccaccgtcctgtcttcgggctcctccaggaggttttgcaagccctccagcccaacatagcctggcccgggacacgacggtctgacgtcccagatcacccattcactggtactgtcccttgccgcaccccccgggtaacccgctcaaat

SEQ ID NO: 570855 - DNA, 273 bp, Homo sapiens
atcctcactcgatatcagtgcatatatattattagatgccactacagcatgcgataactgtcatcacaacttgtacagaagccgtatctttaaaatgtgttgttttcacaagtaattcacgtatagcattatatcatctggtacttgagtcagagacgacatatagattcttcagctttgaagcatatagtaacatcattgtctagtcaggcagaggaaagaaattcagaagcactttctttttcttctgtcagttcctttgcagaaagatcc

SEQ ID NO: 570856 - DNA, 105 bp, Homo sapiens
tcgaattcaagcttctaacgatgacggggacatgctaaggtgggttgggcttggaccgatgtccccatatgtacagaactgaataaagtgggtctctgacaaaaa

SEQ ID NO: 570857 - DNA, 248 bp, Homo sapiens
tcaaagaggtaaaagcttaaaaataaaaagctaagttgttaaaaaaaaatcactgttcaaatagtttatgctgtacctacttccaaaattattttgaacgttagatgagatgaggaaaagacttatgctgaaaggatgagaatagtttatgctcagcataaactattacagcataaactattacagcataaactatcacagcataaactattacagcataaactattacagcataaactattacagca

SEQ ID NO: 570858 - DNA, 85 bp, Homo sapiens
  misc_feature (63)..(63): n is a, c, g, or t
  misc_feature (70)..(70): n is a, c, g, or t
  misc_feature (75)..(76): n is a, c, g, or t
tttattccatagaaaggaggaaaatatttattccaaaagatggcagaaagaagaaattcatcntgaaagnatagnntggtgcgat

SEQ ID NO: 570859 - DNA, 151 bp, Homo sapiens
ggctgctctagacggtctcgagagggtgggaccacggggagtcatgatcccccaggagctctgtgaagaacatctgccaggagtcaagaactactttgacttctgacctcgagtgtgatgatcgtggaccagtgctgtgtgagacctacgg

SEQ ID NO: 570860 - DNA, 207 bp, Homo sapiens
agatgccttaaaagtgcactcttctatatctcctctctctatacacaacaataaaattggaaatcaagataaagaaaatctttcgaaaccgtacaattgcatggatattaaacaacctgctcctgaaatgactatttggggtgaataactgaaattacaggcagacaatcaatgaagttctctagaaactaatagagaacaacagat

SEQ ID NO: 570861 - DNA, 164 bp, Homo sapiens
ggtgttgcaggaattacagcccaatcatctacaatcaaccaacaagtcattattaccctcactgtcaacccaacacatggcattctcataagtgaaaggttaaaaaaatgtaaaagtgaactcgtgcaaatcttaccccgccacaaccgtgggtacctgagctc

SEQ ID NO: 570862 - DNA, 183 bp, Homo sapiens
attcgcggccgcgtcgactctaaatttttttttgttcctgagacagggtctacagggacttgctctgtcgcccaggctggagtgcaggggcacaattatagctcactgcaacctccaacttctaggctcaagcaatccaactgctttagcctcccgagttataaatgtcattttaaagttgtt

SEQ ID NO: 570863 - DNA, 1367 bp, Homo sapiens
  misc_feature (108)..(108): n is a, c, g, or t
  misc_feature (1367)..(1367): n is a, c, g, or t
ctggtatcaaaggagaaaaaggaaatccaggcgttggaacccaaggtccaagaggcccccctggaccagcaggaccttcaggggagagtcggcctggcagccctgggncccctggctctcctggaccaagaggcccaccaggtcatctgggggttcctggaccccaaggtccttctggccagcctggatattgtgacccctcatcatgttctgcctatggtgtgagagctccccatccagatcagccagagttcacccctgtccaagatgagctggaagccatggaactgtggggccctggagtctgatagcctcaggagaaatttgaagaccaactgcaagaactcttaaggaatcttgtttgagaaaatgttgttatgtggtttgtatgctacttttggggggcagggctcatttcagcagcctaaatctcctccttggataatgttaatattattattattattaacaaaaaatatatatttttaaaaagttcccttaatctatgacatggtagcaatgatttccctttggtgtcttaatggcatgtcagataatttgtttttccagagaagagagctcaaagaggaattgggaaaaataaattgaactctggaatcttctctctcaagtcctaaaatgaacaaacagatatgattgtgtttgagggaaatatgtccctagcaggaaaagaattcaaagaggttcaaagaatatgtcacttactcctacttgctataggaataaccttgctgataagaaaaaaagggacaatattggagaaactacctcttgtttaattgatctgtccaactctgagatcacttggtaactggtttcatgtgtatccaaaaatcagcatttggatttaagctttctgaatttggtagtttaagaaacagatttagtttttcagtggttttaactcatgtgaaataatgattttccaccagctctgatgcaaagagatataattttaatgaacgatttatccagcagtttgttccaggggttgcctctccttatctacggggattactttgtacatgcagataagttttcgcaaacctatttccattttcttttgtaagcaaataaaactttaaaacaaaaaaaaaaaaaaaccaaaaaaaaaaacacttggtgggccgacatgggcccctgaaaaaggtttaaaacccatcgtgggggcggggccccaatgggagcgacacgggccaaaggggggcccaaagagaaccggggccagaacaagcggcggggtctccccaataaaaaacgcggggggacccaggcgtttggacaatcccaagggagccgaggggccaacgggggccacacgggggccacgggagcaaataatacgn

SEQ ID NO: 570864 - DNA, 100 bp, Homo sapiens
taaattagcttccggcactgggcaaaccatttaaccttgcaagccttacatatcttcgcctctaaaatggagatgtaatataataattcctgcccgtacc

SEQ ID NO: 570865 - DNA, 359 bp, Homo sapiens
  misc_feature (359)..(359): n is a, c, g, or t
ggcaacccctggaacaaactgctgggattactttgtacatgcagataagttttcgcaaacctatttccattttcttttgtaagcaaataaaactttaaaacaaaaaaaaaaaaaaaccaaaaaaaaaaacacttggtgggccgacatgggcccctgaaaaaggtttaaaacccatcgtgggggcggggccccaatgggagcgacacgggccaaaggggggcccaaagagaaccggggccagaacaagcggcggggtctccccaataaaaaacgcggggggacccaggcgtttggacaatcccaagggagccgaggggccaacgggggccacacgggggccacgggagcaaataatacgn

SEQ ID NO: 570866 - DNA, 2367 bp, Homo sapiens
aagatacagtgactttgatttgcttaacaacagcttacagattgcaggcctaagtctacctcttcctcccaaaaaattgatggtaacatggatcgtgaattcatagctgaaaggcagaaaggtcttcagaactatctcaacgtgatcacaacaaatcatatcttgtctaattgtgagctggttaagaagtttttagatccaaacaactattccgcaaactatactgagattgccttgcaacaggtttccatgttcttccgatcagaaccaaagtgggaggtggtggaacctttgaaagacataggttggagaataaggaagaaatatttcttgatgaagattaaaaatcagccaaaggaacggctagtgttaagctgggctgaccttggcccagacaagtatttgtcagataaagattttcagtgtctaatcaaacttctgccttcttgtttgcacccttacatctatcgggttacctttgccacagctaatgaatcctcagcgttgctaattaggatgtttaacgaaaagggaacattgaaggatctgatctacaaggcaaaaccaaaagacccatttctaaagaagtactgcaaccctaagaagattcagggcctggaactccagcaaataaaaacatatggacggcaaatattagaggtactgaagtttcttcatgacaagggattcccttatgggcatcttcacgcctccaatgtgatgctcgatggggacacttgccggctgctggaccttgagaattccttattgggcctgccttccttctaccgatcttatttttcacaattcaggaaaatcaatacattggaaagtgtggatgtccactgctttggccacttactgtatgaaatgacttatggacgaccgccagactcggtgcctgtggactccttccctcctgccccgtccatggctgtggtggccgtgttggagtctacgctgtcttgtgaagcctgtaaaaatggcatgcctaccatctcccggctcttacagatgccattattcagcgatgttttactaaccacttctgaaaaaccacagtttaagatccctacaaagttaaaagaggcattgagaattgccaaagaatgtatagagaagagactaattgaggaacagaaacagattcaccagcatcgaagactgacaagagctcagtcccaccatggatctgaggaggaaagaaaaaaaagaaagattttagctcgaaagaagtcaaaacgatctgctcttgaaaatagtgaagagcattcagcgaagtacagcaactccaataattcagcaggatctggggccagctcacctctcacgtccccgtcatcgccaactccaccctctacatcaggttagtgatggagtaaagtgacatgccaccttcctgtccgccaacaggaggagcgggctgtgcctcttcctgccttggccaacaatttcaggggttagatagcagcagctttctcaagagagatcagtgggagtgcaaattagcagtgtcatttgggagagctgaggggctagatttccaagctcggctttcacagggaatggaccggtttcagggccactagccacccccgggctccagcttgctgtctttgctgaaaagcttcatgcagagcttctcagattggagcctgtcttggtacatgcttagctgaacaacacaaatgcgccgtggcccaggggtcccgtcctgccaggcctctctcctcagggagcccgtccatagggtcagttttgtcacagagcacaactggtaagatgcctaggtggaggagtgaaagagtcactgcgtttctgattttctggcaacgatttgactctgttttgctctgtaatgtatttaattatctgaatatttttctgttattagcctttgcttcacttttgtaaattagatactagttttgattgaaaaaaaaaaaaaaaaaaaaaaaatcaacaggaagcacatgattgataacatcttgggacagaccaaaaccactgactgatggcaaggctcggcgattctgatttcccttctcaaatctggtcaactccaagagtcttgagaaactgctaaaattttgcctcctggagtcaagtcttacaaatgtaattttgcaaacctttgaggtgaactattccacttgcttggacataggcatcttattcacttgaccctgttacacccagaaccctccgaccagtagattatttgaaacactgggaattttatggctagggacagtcaatagacttttattccaggggcgactgccccctctaaagtaaaggtcatacaggaaaactgcctatttatagcctaaagtaaaggctgagaacttcattttccatggggtc

SEQ ID NO: 570867 - DNA, 2183 bp, Homo sapiens
  misc_feature (108)..(108): n is a, c, g, or t
  misc_feature (828)..(828): n is a, c, g, or t
  misc_feature (2183)..(2183): n is a, c, g, or t
ctggtatcaaaggagaaaaaggaaatccaggcgttggaacccaaggtccaagaggcccccctggaccagcaggaccttcaggggagagtcggcctggcagccctgggncccctggctctcctggaccaagaggcccaccaggtcatctgggggttcctggaccccaaggtccttctggccagcctggatattgtgacccctcatcatgttctgcctatggtgtgagagatctgatcccctacaatgattaccagtactgaagtggaaatcctccactctggttccattggccccagacatttagctgtggatacagaactgtcctgtcaaccaccaccaccaccaagcccctgcccctaacaatggacactctgcttccctgcttcttctgcatccctgccttcccactttcaaacctcttgcccactctgctccaaacatgatggagtgataacatcggaacttaaccaaatcatatatgtctattttaatagacactgactgctccatgtcagcctggatagaggtatatgatcgtgtgccaagaatttatcccagactcccctgtgtgacagcttcataataaagttacttaactgtgcctcttcctccttcctctccccacacaggatggatgggcatctttctccttgaccaccctactctcccttcctcccctgatcacctcccctccctgctctcccctggtgatggacttctaacatgagatttttttaaaaaatttctatttcttttataattttgctgagttttcagggtttcttctgtaaataaaacataatatttaaatggttggttatgattctngttttctaacaatttctgtaatgtatctttcccttcgtctatttactaactgtctgaaaccttatggggaaggtacaaggggcgtggtggattaagacatccactgctttttacccagcaggatatctctgtgtctctaaggacccaggtgaggggagaatatcaatttatgattcctgggtgcagcaagtccccacccccacttttcctctttagctccccatccagatcagccagagttcacccctgtccaagatgagctggaagccatggaactgtggggccctggagtctgatagcctcaggagaaatttgaagaccaactgcaagaactcttaaggaatcttgtttgagaaaatgttgttatgtggtttgtatgctacttttggggggcagggctcatttcagcagcctaaatctcctccttggataatgttaatattattattattattaacaaaaaatatatatttttaaaaagttcccttaatctatgacatggtagcaatgatttccctttggtgtcttaatggcatgtcagataatttgtttttccagagaagagagctcaaagaggaattgggaaaaataaattgaactctggaatcttctctctcaagtcctaaaatgaacaaacagatatgattgtgtttgagggaaatatgtccctagcaggaaaagaattcaaagaggttcaaagaatatgtcacttactcctacttgctataggaataaccttgctgataagaaaaaaagggacaatattggagaaactacctcttgtttaattgatctgtccaactctgagatcacttggtaactggtttcatgtgtatccaaaaatcagcatttggatttaagctttctgaatttggtagtttaagaaacagatttagtttttcagtggttttaactcatgtgaaataatgattttccaccagctctgatgcaaagagatataattttaatgaacgatttatccagcagtttgttccaggggttgcctctccttatctacggggattactttgtacatgcagataagttttcgcaaacctatttccattttcttttgtaagcaaataaaactttaaaacaaaaaaaaaaaaaaaccaaaaaaaaaaacacttggtgggccgacatgggcccctgaaaaaggtttaaaacccatcgtgggggcggggccccaatgggagcgacacgggccaaaggggggcccaaagagaaccggggccagaacaagcggcggggtctccccaataaaaaacgcggggggacccaggcgtttggacaatcccaagggagccgaggggccaacgggggccacacgggggccacgggagcaaataatacgn

SEQ ID NO: 570868 - DNA, 171 bp, Homo sapiens
actcgcagcagttcatttcgaacgcctgtcaggatctgttgcaggacctcctgcagttccgggccgttgccggtatgggggggctccagcagcgcatgccaggggtgcgcgccggtcagcggattcttgcggccgggcacatgggtcatgacgatgtccagctgattgctg

SEQ ID NO: 570869 - DNA, 904 bp, Homo sapiens
  misc_feature (88)..(88): n is a, c, g, or t
  misc_feature (94)..(94): n is a, c, g, or t
  misc_feature (99)..(99): n is a, c, g, or t
  misc_feature (152)..(152): n is a, c, g, or t
  misc_feature (189)..(189): n is a, c, g, or t
  misc_feature (193)..(194): n is a, c, g, or t
  misc_feature (202)..(202): n is a, c, g, or t
  misc_feature (234)..(234): n is a, c, g, or t
  misc_feature (236)..(236): n is a, c, g, or t
  misc_feature (238)..(238): n is a, c, g, or t
  misc_feature (282)..(282): n is a, c, g, or t
  misc_feature (293)..(293): n is a, c, g, or t
  misc_feature (313)..(313): n is a, c, g, or t
  misc_feature (315)..(315): n is a, c, g, or t
  misc_feature (326)..(326): n is a, c, g, or t
  misc_feature (355)..(355): n is a, c, g, or t
  misc_feature (397)..(397): n is a, c, g, or t
  misc_feature (419)..(419): n is a, c, g, or t
  misc_feature (435)..(435): n is a, c, g, or t
  misc_feature (444)..(444): n is a, c, g, or t
  misc_feature (453)..(454): n is a, c, g, or t
  misc_feature (466)..(466): n is a, c, g, or t
  misc_feature (563)..(563): n is a, c, g, or t
  misc_feature (567)..(567): n is a, c, g, or t
  misc_feature (569)..(569): n is a, c, g, or t
  misc_feature (641)..(641): n is a, c, g, or t
  misc_feature (811)..(811): n is a, c, g, or t
  misc_feature (872)..(872): n is a, c, g, or t
agaaagttgaagaattcatatattttccagccccaaaaaggccacacagaatcacaaacattcaacgtgttccacgataatgatatgntatganaagcncttccttataaactttattacgaagcaaataaaataatacattcataatatangaacaaagaaatcatacattaagaatcctgtagtaantaanncttaagancaaagaactgcagaatctctaatataaaaaanangncattttcaatgtgtccattttcctaagacatgcgtgtatgacangcctccccgtntctcatactatatatacttncnttaaagacggnaattatttctcatttcattttccaaatgngaaacattgcctaaattcatgacatccctagggttattcttngtctcagcttccacacagagangtctgagatagggggntcttaagtntcagagttnnggggtataggcnttcacattcaaaagtgcagagaatcccaacattaacaaacaatggttccacaaaaatcaaaattacaacttagacatctctaaaataataggaatgncacngntagagtttacaaactacagtgataactgaattgtaacacatgcagagattaaagaatatttcaagtgcttcnaaatacctattagaaaaatgtgtatctatttgacaatattatgttctctggagaaagatatataaggattacagcagagacttcagtattgacaaagtaaaatttttaccttcaagttgcattctaaaattactatgaagtctcaacttcactggaattaatgaaaatanaatatattccacgacagattttttgtggcacaaatgaaaactttaaaaaatacatgaaacnaaaacaagatgagagattcctgatacatataa

SEQ ID NO: 570870 - DNA, 2044 bp, Homo sapiens
  misc_feature (108)..(108): n is a, c, g, or t
  misc_feature (828)..(828): n is a, c, g, or t
  misc_feature (2044)..(2044): n is a, c, g, or t
ctggtatcaaaggagaaaaaggaaatccaggcgttggaacccaaggtccaagaggcccccctggaccagcaggaccttcaggggagagtcggcctggcagccctgggncccctggctctcctggaccaagaggcccaccaggtcatctgggggttcctggaccccaaggtccttctggccagcctggatattgtgacccctcatcatgttctgcctatggtgtgagagatctgatcccctacaatgattaccagtactgaagtggaaatcctccactctggttccattggccccagacatttagctgtggatacagaactgtcctgtcaaccaccaccaccaccaagcccctgcccctaacaatggacactctgcttccctgcttcttctgcatccctgccttcccactttcaaacctcttgcccactctgctccaaacatgatggagtgataacatcggaacttaaccaaatcatatatgtctattttaatagacactgactgctccatgtcagcctggatagaggtatatgatcgtgtgccaagaatttatcccagactcccctgtgtgacagcttcataataaagttacttaactgtgcctcttcctccttcctctccccacacaggatggatgggcatctttctccttgaccaccctactctcccttcctcccctgatcacctcccctccctgctctcccctggtgatggacttctaacatgagatttttttaaaaaatttctatttcttttataattttgctgagttttcagggtttcttctgtaaataaaacataatatttaaatggttggttatgattctngttttctaacaatttctgtaatgtatctttcccttcgtctatttactaactgtctgaaaccttatggggaaggtacaaggggcgtggtggattaagacatccactgctttttacccagcaggatatctctgtgtctctaaggacccaggtgaggggagaatatcaatttaaatttgaagaccaactgcaagaactcttaaggaatcttgtttgagaaaatgttgttatgtggtttgtatgctacttttggggggcagggctcatttcagcagcctaaatctcctccttggataatgttaatattattattattattaacaaaaaatatatatttttaaaaagttcccttaatctatgacatggtagcaatgatttccctttggtgtcttaatggcatgtcagataatttgtttttccagagaagagagctcaaagaggaattgggaaaaataaattgaactctggaatcttctctctcaagtcctaaaatgaacaaacagatatgattgtgtttgagggaaatatgtccctagcaggaaaagaattcaaagaggttcaaagaatatgtcacttactcctacttgctataggaataaccttgctgataagaaaaaaagggacaatattggagaaactacctcttgtttaattgatctgtccaactctgagatcacttggtaactggtttcatgtgtatccaaaaatcagcatttggatttaagctttctgaatttggtagtttaagaaacagatttagtttttcagtggttttaactcatgtgaaataatgattttccaccagctctgatgcaaagagatataattttaatgaacgatttatccagcagtttgttccaggggttgcctctccttatctacggggattactttgtacatgcagataagttttcgcaaacctatttccattttcttttgtaagcaaataaaactttaaaacaaaaaaaaaaaaaaaccaaaaaaaaaaacacttggtgggccgacatgggcccctgaaaaaggtttaaaacccatcgtgggggcggggccccaatgggagcgacacgggccaaaggggggcccaaagagaaccggggccagaacaagcggcggggtctccccaataaaaaacgcggggggacccaggcgtttggacaatcccaagggagccgaggggccaacgggggccacacgggggccacgggagcaaataatacgn

SEQ ID NO: 570871 - DNA, 2091 bp, Homo sapiens
aagatacagtgactttgatttgcttaacaacagcttacagattgcaggcctaagtctacctcttcctcccaaaaaattgatggtaacatggatcgtgaattcatagctgaaaggcagaaaggtcttcagaactatctcaacgtgatcacaacaaatcatatcttgtctaattgtgagctggttaagaagtttttagatccaaacaactattccgcaaactatactgagattgccttgcaacaggtttccatgttcttccgatcagaaccaaagtgggaggtggtggaacctttgaaagacataggttggagaataaggaagaaatatttcttgatgaagattaaaaatcagccaaaggaacggctagtgttaagctgggctgaccttggcccagacaagtatttgtcagataaagattttcagtgtctaatcaaacttctgccttcttgtttgcacccttacatctatcgggttacctttgccacagctaatgaatcctcagcgttgctaattaggatgtttaacgaaaagggaacattgaaggatctgatctacaaggcaaaaccaaaagacccatttctaaagaagtactgcaaccctaagaagattcagggcctggaactccagcaaataaaaacatatggacggcaaatattagaggtactgaagtttcttcatgacaagggattcccttatgggcatcttcacgcctccaatgtgatgctcgatggggacacttgccggctgctggaccttgagaattccttattgggcctgccttccttctaccgatcttatttttcacaattcaggaaaatcaatacattggaaagtgtggatgtccactgctttggccacttactgtatgaaatgacttatggacgaccgccagactcggtgcctgtggactccttccctcctgccccgtccatggctgtggtggccgtgttggagtctacgctgtcttgtgaagcctgtaaaaatggcatgcctaccatctcccggctcttacagatgccattattcagcgatgttttactaaccacttctgaaaaaccacagtttaagatccctacaaagttaaaagaggcattgagaattgccaaagaatgtatagagaagagactaattgaggaacagaaacagattcaccagcatcgaagactgacaagagctcagtcccaccatggatctgaggaggaaagaaaaaaaagaaagattttagctcgaaagaagtcaaaacgatctgctcttgaaaatagtgaagagcattcagcgaagtacagcaactccaataattcagcaggatctggggccagctcacctctcacgtccccgtcatcgccaactccaccctctacatcaggttagtgatggagtaaagtgacatgccaccttcctgtccgccaacaggaggagcgggctgtgcctcttcctgccttggccaacaatttcaggggttagatagcagcagctttctcaagagagatcagtgggagtgcaaattagcagtgtcatttgggagagctgaggggctagatttccaagctcggctttcacagggaatggaccggtttcagggccactagccacccccgggctccagcttgctgtctttgctgaaaagcttcatgcagagcttctcagattggagcctgtcttggtacatgcttagctgaacaacacaaatgcgccgtggcccaggggtcccgtcctgccaggcctctctcctcagggagcccgtccatagggtcagttttgtcacagagcacaactggtaagatgcctaggtggaggagtgaaagagtcactgcgtttctgattttctggcaacgatttgactctgttttgctctgtaatgtatttaattatctgaatatttttctgttattagcctttgcttcacttttgtaaattagatactagttttgattgaaaaatgtaaaaagaatttatcttggagactgcttataaaaataatccccaattttgttgagtagccccataatactatctttcttttatttttgaaccaagatgtctctcctaaagtcttttgcaagcccaataaaaacaactgggacaccagta

SEQ ID NO: 570872 - DNA, 932 bp, Homo sapiens
ccggtgcccaggtgcagtcccgtccctgcagcaagtgaatgccctcctctttcgaacatgacagatgccgttgtgtccttcgccatggatattactgggaggtggaggggtggccgtctatcgtcccaagacagggggtagctgccatcgagcgggtcgaagcatgcaatggtgcaggtgcacagccactggcaagtgagactagatcactgctgtataagcgaaagtaacaaaggcatttataccatgtgcagtggctctggtagtcccgatggcatcagggagtacatgtcccttctgcgagcggtgatccatggcccacatgtcaatcgagattgagttcctccacgccaatggtcgttgagcttctgccgtatcgacagattaacttcaatgcatgaatcatttgcacggggctggtgtggacaaagcagtaaccacgagttgtaggctcgtatcttcgcacaggaaagtctggcatcgagtggggccgtggcgggcatcatccctgggttcgtgtaccctcttgattgtgccgtaacagtctaccggcggatgtggggtaaagctggagctgaaagggaattccgaggctcgttgaatgcctggtgagatctacgaatctgatgggataagggcggtagcaggttacgtgttgtgctggtatatcatttagcggggcgggtactcggtatttatgaacatgggaggcatggtcccggtgccggaacattcattgtcataggtgtgatgacagatgcatgcgtgcggttgatccatccttgactgtgcctcgtgtttaagggcagagaatagacgaggcgttgtgtgggaatgctaaaggagttaagggggctctcaggggggagtgggagtaaaaaaaagagacgaggaataatacgaaggggggatggaacctcagggaaataggt

SEQ ID NO: 570873 - DNA, 1621 bp, Homo sapiens
aagatacagtgactttgatttgcttaacaacagcttacagattgcaggcctaagtctacctcttcctcccaaaaaattgatggtaacatggatcgtgaattcatagctgaaaggcagaaaggtcttcagaactatctcaacgtgatcacaacaaatcatatcttgtctaattgtgagctggttaagaagtttttagatccaaacaactattccgcaaactatactgagattgccttgcaacaggtttccatgttcttccgatcagaaccaaagtgggaggtggtggaacctttgaaagacataggttggagaataaggaagaaatatttcttgatgaagattaaaaatcagccaaaggaacggctagtgttaagctgggctgaccttggcccagacaagtatttgtcagataaagattttcagtgtctaatcaaacttctgccttcttgtttgcacccttacatctatcgggttacctttgccacagctaatgaatcctcagcgttgctaattaggatgtttaacgaaaagggaacattgaaggatctgatctacaaggcaaaaccaaaagacccatttctaaagaagtactgcaaccctaagaagattcagggcctggaactccagcaaataaaaacatatggacggcaaatattagaggtactgaagtttcttcatgacaagggattcccttatgggcatcttcacgcctccaatgtgatgctcgatggggacacttgccggctgctggaccttgagaattccttattgggcctgccttccttctaccgatcttatttttcacaattcaggaaaatcaatacattggaaagtgtggatgtccactgctttggccacttactgtatgaaatgacttatggacgaccgccagactcggtgcctgtggactccttccctcctgccccgtccatggctgtggtggccgtgttggagtctacgctgtcttgtgaagcctgtaaaaatggcatgcctaccatctcccggctcttacagatgccattattcagcgatgttttactaaccacttctgaaaaaccacagtttaagatccctacaaagttaaaagaggcattgagaattgccaaagaatgtatagagaagagactaattgaggaacagaaacagattcaccagcatcgaagactgacaagagctcagtcccaccatggatctgaggaggaaagaaaaaaaagaaagattttagctcgaaagaagtcaaaacgatctgctcttgaaaatagtgaagagcattcagcgaagtacagcaactccaataattcagcaggatctggggccagctcacctctcacgtccccgtcatcgccaactccaccctctacatcagtagagcatgcaccattttgaacgtgaattttcggtaaagtaaactatgctgatttctcagactttaaagatgctctgtttctgtgtgtgaaataggacccaaagtgtctcgattgctgaagtgatgaacaagtgggaaagcagatttgagactatttccttatctgaatatttaaatgaaatacagcatctttaaaaagcaaaaaaaaaatacgacgaaccatacatcagcaatgtcactacaatattcatacat

SEQ ID NO: 570874 - DNA, 273 bp, Homo sapiens
actccctccttcctgatgcagaatgcagccctagtcagtatagaatcggcctcatatgctgattacagatggtcatcttcaaagaagctgcttatagacttcatgaagcttcttaggaagtaaaactttctgacttatagacagcaaatgtcttccaagaagaatagctctgctcacataatagtgcagcatgagcatgctgcaactgctcattttaatcatctccaagtgtacacggttctgaaatatttaagtacattctcattttgagac

SEQ ID NO: 570875 - DNA, 2021 bp, Homo sapiens
  misc_feature (1686)..(1686): n is a, c, g, or t
aagatacagtgactttgatttgcttaacaacagcttacagattgcaggcctaagtctacctcttcctcccaaaaaattgatggtaacatggatcgtgaattcatagctgaaaggcagaaaggtcttcagaactatctcaacgtgatcacaacaaatcatatcttgtctaattgtgagctggttaagaagtttttagatccaaacaactattccgcaaactatactgagattgccttgcaacaggtttccatgttcttccgatcagaaccaaagtgggaggtggtggaacctttgaaagacataggttggagaataaggaagaaatatttcttgatgaagattaaaaatcagccaaaggaacggctagtgttaagctgggctgaccttggcccagacaagtatttgtcagataaagattttcagtgtctaatcaaacttctgccttcttgtttgcacccttacatctatcgggttacctttgccacagctaatgaatcctcagcgttgctaattaggatgtttaacgaaaagggaacattgaaggatctgatctacaaggcaaaaccaaaagacccatttctaaagaagtactgcaaccctaagaagattcagggcctggaactccagcaaataaaaacatatggacggcaaatattagaggtactgaagtttcttcatgacaagggattcccttatgggcatcttcacgcctccaatgtgatgctcgatggggacacttgccggctgctggaccttgagaattccttattgggcctgccttccttctaccgatcttatttttcacaattcaggaaaatcaatacattggaaagtgtggatgtccactgctttggccacttactgtatgaaatgacttatggacgaccgccagactcggtgcctgtggactccttccctcctgccccgtccatggctgtggtggccgtgttggagtctacgctgtcttgtgaagcctgtaaaaatggcatgcctaccatctcccggctcttacagatgccattattcagcgatgttttactaaccacttctgaaaaaccacagtttaagatccctacaaagttaaaagaggcattgagaattgccaaagaatgtatagagaagagactaattgaggaacagaaacagattcaccagcatcgaagactgacaagagctcagtcccaccatggatctgaggaggaaagaaaaaaaagaaagattttagctcgaaagaagtcaaaacgatctgctcttgaaaatagtgaagagcattcagcgaagtacagcaactccaataattcagcaggatctggggccagctcacctctcacgtccccgtcatcgccaactccaccctctacatcagtagagcatgcaccattttgaacgtgaattttcggtaaagtaaactatgctgatttctcagactttaaagatgctctgtttctgtgtgtgaaataggacccaaagtgtctcgattgctgaagtgatgaacaagtgggaaagcagatttgagactatttccttatctgaatatttaaatgaaatacagcatctttaaaaagcacccagtgacttcatctatattcatttcattttcatcatgaccttcaaaatcttcattttcactctgatttcagttttaaaatacagctctaaaacctgcaaatcaactgcatggcattntggtatattttaattttggaaaccataactctcaaagtgctgggattacaggcttgagccactgtgcccggccaggattgcaacttttggctggccagcccatgcttaggctgttcttccttgcagaactggaggtcggtcttctcctgggctcaagtgatcctcctgcctcagccttctgagaggctgggactataggcgtgcaccacacatccagctaatttttaaattttgtggagacaggggtctcatcatgttgcccaggttggtatcaaactcctgggcacaagcacttcctctcacctcaagctccaaattgctgggattatagattg

SEQ ID NO: 570876 - DNA, 317 bp, Homo sapiens
  misc_feature (10)..(10): n is a, c, g, or t
  misc_feature (105)..(105): n is a, c, g, or t
  misc_feature (123)..(123): n is a, c, g, or t
  misc_feature (147)..(147): n is a, c, g, or t
  misc_feature (196)..(197): n is a, c, g, or t
  misc_feature (199)..(199): n is a, c, g, or t
  misc_feature (205)..(205): n is a, c, g, or t
  misc_feature (312)..(312): n is a, c, g, or t
taaaaaggantcaaatgaaaatttttgtcaaaatggcagaatgacagatgaaggcaatcatgagctagaagacagaacaatataaattacccaacctgaaagagnaaaaaaatattgacaagnaaaaagtaatatgaggatctatgnagacagtaacgaaggggatctaatacactaacataattaaaatcccagnngngagganaaagagattactagcagtagtttgataagtatgtgacaaagtagttttcagaggagtattgacagggatagtgatattatctattgacaaatgattcagtccaccangacat

SEQ ID NO: 570877 - DNA, 796 bp, Homo sapiens
  misc_feature (270)..(270): n is a, c, g, or t
agcggggtggcaggagtcatggctttatttggaaatgtcagcgtgctatcatggttctgtcatttgatgtgcacaggtatcagaggagcctgttaacctctctggtgccttgagctctctctgtggtcgccagtggaacagcagcatcagttgccttgacccgagggcactatcctctacagggcttattgatgaggacaagtgacagtaggaacgatgcataggagacctttaagtacctaagggttgctcaaccactgactacagtgnctggcaatgacttgtgcaatgcttttaccatagaatggttagtgcccactcttccccgtgatacccccggacgagttaaatcagaacctcagacagcaatatgccttgagatgccttgaaccatgcttgagaacggaaggacaaacacattattatcttggaaagaattgcataaggcttatgacttacaaaaaaaaattctttttgggaaacacaagcatttctttaaggatgaccggatgttgccgtatgtataatggcacaagcaggtgtgtctaagcaagtttctctgtttgcttgtcatagcagcatttggaaactcaaacatgctttcatttacataaatagtttatgaagctttgacaacaaattgtcaacaggacacgaaattataaatctgctaacatatgtacttacggggtattaacttattgaaaagtccctttccccaaaactcaactcctatggcccattatgaactccattttagcaagaacattcaagtgcctcagcatctgtatgatac

SEQ ID NO: 570878 - DNA, 371 bp, Homo sapiens
taaagagggcacacacacttttaccgtttataccaaaccaaacttacgaagttcaaaatccgagtaccaaaaaattcacgccaagtcaaagccaaaaccaaggtgtccagcaatttaagggaagccaaaaccagaacaagagtgcccgggcaggcgtgctgtgggtgatcaggccacgtttccactcacatggagtggggcaggatccaaagactagtcttaccaagtcaagccgagtcaaaaccacatcaaagagcgccaatacaggcgcaccacgggggatcaggccacgcttccactcacgtggagtggggcaagtcccaaagactagttgtaccaagtcaagccaagctaaaaccagaacagagagg

SEQ ID NO: 570879 - DNA, 1516 bp, Homo sapiens
  misc_feature (1282)..(1282): n is a, c, g, or t
  misc_feature (1367)..(1369): n is a, c, g, or t
aagatacagtgactttgatttgcttaacaacagcttacagattgcaggcctaagtctacctcttcctcccaaaaaattgatggtaacatggatcgtgaattcatagctgaaaggcagaaaggtcttcagaactatctcaacgtgatcacaacaaatcatatcttgtctaattgtgagctggttaagaagtttttagatccaaacaactattccgcaaactatactgagattgccttgcaacaggtttccatgttcttccgatcagaaccaaagtgggaggtggtggaacctttgaaagacataggttggagaataaggaagaaatatttcttgatgaagattaaaaatcagccaaaggaacggctagtgttaagctgggctgaccttggcccagacaagtatttgtcagataaagattttcagtgtctaatcaaacttctgccttcttgtttgcacccttacatctatcgggttacctttgccacagctaatgaatcctcagcgttgctaattaggatgtttaacgaaaagggaacattgaaggatctgatctacaaggcaaaaccaaaagacccatttctaaagaagtactgcaaccctaagaagattcagggcctggaactccagcaaataaaaacatatggacggcaaatattagaggtactgaagtttcttcatgacaagggattcccttatgggcatcttcacgcctccaatgtgatgctcgatggggacacttgccggctgctggaccttgagaattccttattgggcctgccttccttctaccgatcttatttttcacaattcaggaaaatcaatacattggaaagtgtggatgtccactgctttggccacttactgtatgaaatgacttatggacgaccgccagactcggtgcctgtggactccttccctcctgccccgtccatggctgtggtggccgtgttggagtctacgctgtcttgtgaagcctgtaaaaatggcatgcctaccatctcccggctcttacagatgccattattcagcgatgttttactaaccacttctgaaaaaccacagtttaagatccctacaaagttaaaagaggcattgagaattgccaaagaatgtatagagaagagactaattgaggaacagaaacagattcaccagcatcgaagactgacaagagctcagtcccaccatggatctgaggaggaaagaaaaaaaagaaagattttagctcgaaaggtaagcctgctgtctctctgcagtccctctatgagttcttgagtacatntgaagaaagttctaggttaatggtgcccatttaatgacagatgctgtgctatatctccttgaaagctaagactatttccagatgnnnggggtgcagttttttttttttttttttttttttttttttttttttttttttggggggggtttttttttttttttttttatgagagaaagagggggtggggggggggggcccgcggcgcccacacaccaaacgagggggacagggtgt

SEQ ID NO: 570880 - DNA, 904 bp, Homo sapiens
ggagtctacacagagaaggttctggaagccactaagctgctctccaacacagtcatgccacgttttactgagcaagtagaagcagccgtggaagccctcagctcggaccctgcccagcccatggatgagaatgagtttatcgatgcttcccgcctggtatatgatggcatccgggacatcaggaaagcagtgctgatgataaggacccctgaggagttggatgactctgcaactttgagaccatgaagattctttgatgtcagcaagcaggactgagcgtccacgatccagagatgacgatctagctgactagctggccatagtgcccgggcgactcatggctcacgcttccccaggagcaatagaagcgaagattgcggaccaggtggccagcttccaggaagaaacgagctacgctggactgctgaatgtgtccaaatggtgcacgagcagtggctatgacatcattagtgctggccaagcagatgtgcatgattatgcatggacggcatgacatgactttacccgaggctaaatggaccactcactaaagtacatcggatgtcatcagtgctgccatgaaaattgctgaggcgggatccaggatggacaagcttggccgcaccattgcagtaccattgccccgaactctggcttgcaagcgcgtgaccttgtcttggcctaccttgcaagcgcatcgccctctaaggtgcccacgtgctgtatacttctgtctgccagggctaggccgatgtgcagaatctcggcgtgggagctcgtgtgtctctggggttggcctgcgcctgtccctgattcgggctgcccgactttatgatgcgtggtgccaccggtgaaggctcccgttcctctccatccagtcccggttgggtccctcactccgtgt

SEQ ID NO: 570881 - DNA, 107 bp, Homo sapiens
gacgggggacttacgacacactgctacgggacactggactactgccactttcactctacacggacgctaacgcgacaacgcctcaccggacgaccacactgaccact

SEQ ID NO: 570882 - DNA, 870 bp, Homo sapiens
  misc_feature (12)..(14): n is a, c, g, or t
  misc_feature (38)..(38): n is a, c, g, or t
  misc_feature (41)..(41): n is a, c, g, or t
  misc_feature (72)..(72): n is a, c, g, or t
  misc_feature (93)..(93): n is a, c, g, or t
  misc_feature (109)..(109): n is a, c, g, or t
  misc_feature (117)..(117): n is a, c, g, or t
  misc_feature (125)..(125): n is a, c, g, or t
  misc_feature (132)..(132): n is a, c, g, or t
  misc_feature (142)..(142): n is a, c, g, or t
  misc_feature (145)..(145): n is a, c, g, or t
  misc_feature (153)..(153): n is a, c, g, or t
  misc_feature (160)..(160): n is a, c, g, or t
  misc_feature (203)..(203): n is a, c, g, or t
  misc_feature (214)..(214): n is a, c, g, or t
  misc_feature (246)..(246): n is a, c, g, or t
  misc_feature (270)..(270): n is a, c, g, or t
  misc_feature (288)..(288): n is a, c, g, or t
  misc_feature (293)..(293): n is a, c, g, or t
  misc_feature (349)..(349): n is a, c, g, or t
  misc_feature (359)..(359): n is a, c, g, or t
  misc_feature (721)..(721): n is a, c, g, or t
  misc_feature (863)..(863): n is a, c, g, or t
taagattcactnnntttcccatggctgggatataggcngcngctatagttgaacaagcagtctttaaaaacngctgtgaaacacaggccctcngggaaaacgaaaggcngcactatnaaattagnggttttngaaaaacccnacncccacccngggcagnggttgcctagttggtatagaatgttaagtttcaagaaagtttnccttggctttnggtcataagtcccttatttgatggctgtatanggaaacatggctgttcgtgacatnctttatgggcaaatttgngattncaaaaatgccctgccagtttaagggtacattgtagagccgaactttgagttactgngcaagatttntttttcaggctgtcatttgtaatatgttttgtgagaatccttgggattaaagttttggttacaaattgttaaaaaaaaaaaaaaaaaaaaaaaaaaaaaaaaaaaaaaaaaaaaaaaaaaaaaaaaaaaaaaaaaaaaaaaaaaaaaaaaaaaaaaaaaaaaaaatataaaaaaaaaaaaaaaaaaaaaaaaaataaaaaataaaaaataaaaattaaaattataaaaaattaaaaataaaaataaattttaaaaatttttaaaatttaaaaaataaaaaaaatttaaaatataaataaatttaaaaattatttaaaaaaaattaaaattttaaaaatataatttatttttaaaaaaatttnaatatattaaattttaaaattaaaataaaaatttaaaaattttaaattaaaatttaaattataaaatttaataataaatttaattttaaattaattaaataaaattaattttttatttatatatattaaaatattaaaaatntattttt

SEQ ID NO: 570883 - DNA, 229 bp, Homo sapiens
ttgcactccagcctgggcaacgagagcgaaactccgtctcaaaaaaaaaaaaaaaaaaaaaagattactttctttttatcattgcttttttttttaaagctttcttgcagtcaggtgcagtgtctcatgcctgtaatcccaacactttgggaagctgaggtgggaggatcactcaaggctacaagttcaagaccaacctgggcaatgtagggagacctctgtctctaca

SEQ ID NO: 570884 - DNA, 664 bp, Homo sapiens
  misc_feature (615)..(615): n is a, c, g, or t
tgagttatctagaggatccgttgagaagctgggacagcctgtactggatggctccaagcggggtgagggtgccacgagaaacccaccttccatttgtcttcaagcagatggagcaggtggctcagttcctgagggcggctgaggactatggggtcatcaagactgacatgtcccagagtgttgacctctttgaaggcaaagacttggcagcagtgcagaggaccctgatggcttggggcagcttggcagtgaccaagattgatgggcactagcgtggagatcccaatgggttaatgaagaaagcgcaggagcgtaggagggaattcacagagagccagctgcgggagggaaagcatgtcgtgggccttcagatgggcagcaacagaggggcttcccaggccggcatgacaggctacggacgacctcggcagatcatcagtaagagcggagagggctagccctgagcccggccctcccccagttccttggctgcagccatcccgtttagccttgctcacccacacccgtgtggtaccttcagcccgggccaagcttggaggctctgtcactgagcaagggtaactgacctgggcagctcctccctgtgcccccagnctcaggccaatttcttaccggatagcttcattgccttggcccctctttc

SEQ ID NO: 570885 - DNA, 170 bp, Homo sapiens
atcataaagatatcacttcttctcattaatgggtgcagcacaccaacatggcacacgtatacatatgtaacaaacctgcacgttgtgcacatgtaccctaaaacttaaagtataataataataaaattaaaaaaaaaagaagtagaattactggataatatggtataaaa

SEQ ID NO: 570886 - DNA, 177 bp, Homo sapiens
tgtactctcgtgtcactgcgcctccgcctcctgggttcgggcgattctcctgtctcagcctccaagtagctgggattacaggcgcacgccatcacacccagctaatattttatatttttagtagagatggggttggcatcccacaaatttttccatatcatgttcctaaatttgggt

SEQ ID NO: 570887 - DNA, 173 bp, Homo sapiens
cgagacatgcctatcatgggctgatgcacctgctgattgttcgcgactagatgccccttgctggtttacggtgacccttgtgaactattccagccgtggagtcagatctgaattgtgcccatttggaagaggacctttctgagcctctctgacctgtttccgacgagagcaat

SEQ ID NO: 570888 - DNA, 400 bp, Homo sapiens
cataaatcacttccgccccctcacacaaaaccacaatacatcatacatccctgctctttcgctttcaagcccttccattgttcatctcacagtggttgtttgtgatgttatctagcttgctttagcatggtatttctgtgaattccaaattaatatgcttgacacaagccaattatacactgtaaggttaggctatccctctactcagaatagtgcagcagcacctgtgatgggctctaacatcctctctggcatctagtttcctgagtgttgttcactatgaataattaaaccctggcttctgtaatcacctgtgcccttcactgtgaatggattgaagctaacgtgtggctcatacaaattaaatattcacgtcatgttttcatgacaacgtcgacgc

SEQ ID NO: 570889 - DNA, 216 bp, Homo sapiens
cacgggtccaagtcctggtgcttgatggtccttgtcaactcctgggccgcctgccggccatcgtgtctaacacaggtactgctgggccgtcacgtcatgatcctactttgtcaacgcatcaacatttcgggcatcttctttttccaccattttttgtacctggctttcctccgcagacgggtgaacatcaccccttcccgaggatcctatcacttc

SEQ ID NO: 570890 - DNA, 730 bp, Homo sapiens
  misc_feature (194)..(194): n is a, c, g, or t
tcccggtgctacctgcaaaggggtccatacggcgttgtcctggatccccgtcgtaacttaaggggaaactttcacaatgtccggagcccttgatgtcctgcaaatgaaggaggaggatgtcctttaagttcccttggcagcaggaacccactttagggtggcaccaatctctggactctccagaagtggaacangtacattctataaagaaggaaaaggtgagtggcactctatatcataaactctcaagaaggaccgtgggagaaagcttcgtgcgtggacagctccgtggcaatggtgtgccattgtgaaaacccgtgcgtgagtgctcgaggtgtatatactccctccaggaaatacgtggccagaagggcgtggtgctgaaggttggcgtgcgtgccactgggaagccacctccaattggcgtggccgctttcactccgtgggaacctttcacctaaccgagaatccaggcaagcctcccgggagccagcggctcctgggggttcacggaccccgagggctgaccaccagcctctcaggggaggcatcttatgttaacctacctaccatggcgcggtgtaacccagattctcctctggcgctatgtggacttggcatcccatgcacaacagggaggctcctcaggggttacaggtggggacgcggccgggaagtctggcttggttgcccttcccggacccctgggggcttgccgctgactctagga

SEQ ID NO: 570891 - DNA, 486 bp, Homo sapiens
  misc_feature (262)..(262): n is a, c, g, or t
ttccattgatgagcttgctaccatttcctccgtcttctgtgcagatacctttgtacttcacaatgttctcatgatagatgttccttaagatctcgatttcctttttcagatcagctatgtggttccctccactctcaggcttcagatatttaacagccacctgctccccatggtattgtcccctttcggcggtcataccttgcagtagctcaactcttcccaatagtggccctcttcccaagatcacggcatcctcatttangtaatgcgcttttcaaatatgtgtggggctccacttcagattcgctggttttttttctcgaaacaatatctggattctgctcttcaagcttattaatgtctctcatgatggctcggaagaaaggcctctgattggggtcatagttctgccctggggtcatgaggtcagccagctccttacatgatggtgtcactggcctgcaccggctttcatagaatctctct

SEQ ID NO: 570892 - DNA, 909 bp, Homo sapiens
gagacactgagccgcggtgggatccccaccggtctgcgaggcctggagcgcaggaggcgcacgaggagccgggcagcgcgggcacttcaggggggccgcctcgccgccggcggtcgagagatccttgggggcacatctcgcgggttgcggtgacccgcccggggcattcgggggtcggggcgcaatttgccatgggggacttcttggatgcccggccctggcttctgtccgggctccagggtacccctgattggttggcgcttgtgcccttcgcggggcggcccggggcggccgaagggggtgaaggttcccgcccggaattcgggccggggccgggcgcactttttgcaccaacccccgtgtggcattggctcggcggccccggggtgtcgcggggccccaactttggagacgccgtttgggccccccgtggtcccccttaaggttgcacgccgggcggttaggttgcccctcctatttgtcctacggtggggcctggttcctttccgtcccagtgggtggctggtcccttggtacaaacgggctatccttcattgggaggtacccttgtgccctccacgcgtggggcccttctggcttttcgttgccccgagggaacttttgccccagcgggcgctcggggcaccttcgggggtgttctcgggacccgggcttgcgggccttttaacgatgctggctcgggaggcccgagcgtcttgtggtggcgtacctggggcgaggggcctcggcagtgttgttccccttttccttaagagatccggaaaccatgccctgacaggcggccgagataatgccgcggaggtggtggggggcccattggcgggattgtcccggggaggcctcccgtcgtcgagggtactgtccctaagtggcagagaggcctttgcc

SEQ ID NO: 570893 - DNA, 832 bp, Homo sapiens
tactgtggatatatacatgcctgtgtatttatcagcataattttcattaccaaaatgtacagctattattgccatggaaaaggttagtctcatttagaaaaatcgaaagtgcacagcacttaaagggaatatatgaggttttttttttttaaaaaaaaaacttttatttattattggtagtatatggtctggaaatggtggtcggcagttttttttctttaatggtggtcaaatctggaattattaattggtatacttttggtggctattgtttggggaacaaatctggttggattatatagtttatatggaatttttttggccctgatggttaggggggataggtctaaagcagcatatatctatatatcggtatgggggtatatagagatatatgtggggtgtgtatgtatatgtcacatatacatatttatgagtgtataattctaaatttctaaaaatcatttatgaatgttcatcaattgtgactattatagggcagtttccatttagtcaataaaagggtaatttttagttacttacctgtgaacattattcggtgttgaaagaatacctctttcttcacaaggttaaaggtgaattttatgaaaggataccttgggtggaacatagaattttaaccacatctggggtgtcggcaaaaaactggtgtggtgttttcaacaactctgttggtttaacaaaacattttttggggggtgttgggtagaatttcacgagtttaataaatagagaggcgtcttaaagagagaggaataattcgggttaaaaagaaaggcatggaacagggtgtgtgtgttttgaaaaaaag

SEQ ID NO: 570894 - DNA, 1270 bp, Homo sapiens
tatctcctgtaatttcttttattaaaaatactcgctgtacactaaaaaaatctgaaaacaggtattaaagatgaattacccacaacattgtgggtctcagtgcactttcagaacacctacacacacgtgggtgccttattgagggaaagttgtgtgtgcactctccaaactccacagaacacccagggtctccaaagttctcaaatcacaagaggtcaccccctcaaagaatattatttcacaagtgaaagttaatatacaccctaacacaaatatatttcaaacacagaggttcacaaaatatatatgtgcaatagtgcacccacagcgtttcactagtgtatattctcagagggtgttggtcctctttctctgtgtggcctcttattatctctgtgtccaccgaaacagggaaagtgtgtgtgtgcgaaacatgtttatatatatcctcttaaatatttggatctatatctctctcgggcgataatatttaaaaatatctctatttctatatatacatctataaacacaagagactcttttatagagacacacacgctcctctctttaaacagctgcgggagatctctcacgccctctatttgagagaaaacagcaggggggtcctccccgccacaaaaaaaaaccaccctcttaagagccagcagaaactcgtcggaaaagatattccctttgtgacaacaaacccacaatatccccaccaaattaatcaccaaacatcttatactatgacaaacaacatatcaccatatatatcacacacaccaaaaagctctttaaaaccaaacaaaattatattgcctaatttacaccccttggataaacacccaccaaaaacgctttctatagcgcggggggcgcgtggcaaccacatatatactctattataatcccccctgtggaaaaaaacaccatattactcagacgagcgtgcgcccatcatcatccctcttctataaatttgttgtccaaacaccacaaaagatatccccactgaggggagcctataacccataagggggaggccgatagaaaaacaccaacacactattaaggccaatttttcagggaattttgcgcaaaaaacaccatattcaccatggcaagaacatatgggagacgaacatatatcacacgttttgcccctttgtgcccacccacggggcgaaaaattatgcggcgcgggcgctcctataacacggaaaaatttggacgacaacactctcagaagtcccccagataattcgta

SEQ ID NO: 570895 - DNA, 861 bp, Homo sapiens
ggtcttgctcagtgtgcgagaactctggtggaagttgatagggtgaagccggaaagaggcaagttcctggtgcaaaggtggctctgcaggataatttatgcatggaggagctgtggtcgtaacttacgttctacaagatgggttttcgcgggaagccgcctagttcttttttagaactccatcaaattgaagctgtgcctaaccaggtctgcaaagtgatggatttaaggcaaatcattgtttgtaaggagattgcagaagaaactggaagaggaaggggaagagtttgtgaaggaaaatcgtgtggtattttgcgttcaaggtgattggatgggcctgggggtaaagaggccaactggggtggtggattgtgaagaagtggcatacaggatcagtgcttcctatgtcagataagaaggctgagtggacaatcacaatgggtgagtcagacttcctggcttttaatgactcggtaaaatgagtcctcagtcgggcttctttcgaggcaaatggaaaatcactggctacatgggtctcgctgtgaagttataaaatcttcaggttcagtgcaggcaaaggtaagctctgaagaaacttccttcggtactgtttgatagtcatgatgagattattttgatatttttcatacagtttattgtcaaggaaattaagactggaagtaaggagtggacataggtgggagagatgtgggtcgttactgggtgtggccaatccttgttttgctatggccgggggataagaaccggtggtacaaagggttggggaatgggaacggggttacaagaaagggaaggcggggaaaggttgaaacaggaagggagcaaaggtgaaatttgggaa

SEQ ID NO: 570896 - DNA, 713 bp, Homo sapiens
  misc_feature (211)..(211): n is a, c, g, or t
gcccccacctgggtctgtgccctgccccgcgctgggggccgagtccttgaatgtggcttcaggggctcctgtcctgggccagggcctgatgggcaccacgtgaggggcacttggtggacagggcggggctgacgtggcctcctctggggtcgcctgcttttgacccaaaggtcctgacggttgcgtccgggggaggggaaggaagggccgntgtcgccaaggttttctctcccagaacccacagtgggaaagcggtcttgccaggcgttgtccattgtcagtgtgctcgtgggctggtgactgcgtcttgggatcccaggccacgcgccagccaggctgtgggcagggcggggccagggaccccaaagagaggtcgcagtcagaaccctggaccgggtgggttgaggcctctctgacacccgtcttcctgggtagcagaagtgcatatcggcttgggttcgggtgttccttataacttgcagccaatttgctctacaagggtatctcacatccttccaacaccctttagaaggcccatccagtgccttcaagcaaggacctggcctgtctatcgtaaatgagggtcccacattcccttggcccgaccctgtatagccaccttacagcccagcccccaacatgcatgccaggggtactccgttactcccaatgtcctcttggtccccagatttatcctttttaaacaatattct

SEQ ID NO: 570897 - DNA, 126 bp, Homo sapiens
  misc_feature (96)..(96): n is a, c, g, or t
gatcatgtgttttcggaagaagaccacagagcacaacattctgaaattttttggttattgtaatgatgttgatcgggagttgagaaaatgcctgangaatgaggttcttgctctgtcacctaagct

SEQ ID NO: 570898 - DNA, 145 bp, Homo sapiens
ctagaggaccgtgacgcgcatctcctcttctctggagaagagctacgagctgctcgaaggtccagggcgacagtagcacagcttctccttgatgtcgcgcacgcatttccctgctcagccatgggtctcccatgggtacctgagc

SEQ ID NO: 570899 - DNA, 593 bp, Homo sapiens
atagtgtatcatcccatttatatgaaatgtccagaacaggcaaatccatagagacagaaaggaggttagtggttgccagaggctgagagatggaagaaaagtagagagtaactgctaatggtgtgaaatctctttttggagtgatgaaaatgttttaatttttttttttaatagagacagggtctcactatattgcccaggctggctcgttgaacttctaggctcaagtgagttcagcctcggcctcccaaagtgcttggattacagacatgagccaccatgcacagcttaaaatttatgatgctgatggttgcataactgtgaatttactaaaaaccactgaggcggggtttggtgactgacacctgtaatcctagcactttgggaggccgaggtgggaggatcacttgacaccaagagtttgaaaccagcctaggcaacatagcaagactccatctctacaaaaaatttacaacataaaattaaaaaccattaggccaggcatgatggctcatgcctgtaatcctagcactttgggatgccaatgcgggtggatcacctgaggttaagagttcgagaccaggctggccaca

SEQ ID NO: 570900 - DNA, 875 bp, Homo sapiens
gtatatataactgtatctacgtaaatacatgttttatacagaatggggatcacatgcatactgtattctcctttttcttattagatttcttttagcttaatatatttgggagatctattgggtgcttaggcccactggattactttgcccttccttttgggttggccacgatggagttataggggaatggactgtcagctggctttacttataagtctattctactctaatgttggaaattgtagacgatggttttccttactggttgttgtcccagataataatggctggtaagtgtgtgaccgtctttgtgtgaaatattattatgtcttagtacctctaggggtccataatactgtaggatgacattttactaccacggtgggaaatgggctagaattctcagaaactagtgtccttgtgcaaacattttcctaagaccgtggctaaatttgtcttcttacacaagggtttgccccgattaataatggtagctcccgaccagttcgtgtaagcagattgggttcacccccctgcttaattaaacggggacgttaactaaccgcatttcagggtttctagcaaggttgcttcgaacgaaggaataccaacagactgtgggatcaccgtacattgtactttttgttaaattatatcaagctgatttaaaagagtccatggacagtgggggggcccactgatcagtgtacttaccaccaggtgtctcattgggggccatttacgtttaaaaaaattaaattggtgacaaggtggccaaatttaagtatctccttatcaagattggttgagaccatataaaaggactcaatagtattacccctcttggaatttggaaggaagactcataatggggg

SEQ ID NO: 570901 - DNA, 321 bp, Homo sapiens
gaggatccccggccgcatagcttctcctgtggatccttactgctcacaaaaaagagccctccattcctaaatgtctcgaccagtccaggtgtgtcatattacaggaccagaggtggttggtagtgggtttcagtcatcatgtggcagtcaggtgcctgttgacatcagccccatctgccccaattagactatccacacacggctgctttatctcagattcacctgccaagggcctctctagtagcatgcagatcggcatcctcctaactaccagtgaagctgccaattcgccctgtcctctgtagatggcctataggcact

SEQ ID NO: 570902 - DNA, 428 bp, Homo sapiens
gcttgcacagtgggaactcccgttttataaaaccattagctcttctgagacatactcactatggacaagaacagcatgggaaaacccacccccatgattcaattacctcccatcaggtccctcccgtgacaggtggggattatgggagctataattcaagatgagatttgggtggggacagagccaaaccatatcaccacctaagttctctgtaaaaatagtttcagccaggcatgctggctcatgcctgtggtcccagcatgttggaaggccgaggcaagaggatcgcttgagctccggagttcaagaccagtctgggcaacatgacaagaccctgtctccacagaaaattaacattagccaggtgtggtggtgcgcatctgtagtcccagctactggggaggctgagatgagaaaatcgtttgaac

SEQ ID NO: 570903 - DNA, 112 bp, Homo sapiens
cacagaatgctccatggcgacacagcggacggtccatgcagcaagtcagctctgtcaggaaacaatggggaatctgtacaatttcaacacttcctccagaagtcaggacaga

SEQ ID NO: 570904 - DNA, 899 bp, Homo sapiens
  misc_feature (1)..(1): n is a, c, g, or t
ncagccgttttgtgccgcaggttctgctgcccaccgtgagtgtggtgccccaacgggtcacccgcgagtctttttttgggaaggtcaccttcttttgtgctccccccccgggggccccgccgcgtgattttttgcgggaagaaccactatatgttgggggggaaagaacaggcccttacgtggcccctattatagcgcacagttttgtggggtccccggcaggtgtattctttttgtcaaacagaccaccacacatcggggggcaggcaccacattctgtcacaaggcccccctctcggccgagcacactctaatggggtttgcttataaaattggtggggaacttatccccctgccctgtcgccacccacgaaggggccacacaggggtgggagcccccgggcggaacgattgtggttaaaaccaaacttgttgttacggacacagacagttgcgccccgcacaaagaggttgaaaataattctttgtgtttatgataagaacgcggtatgttgagcgcacgactggcgctcatagaggaatttatattatgggagaaataatgtaactcgctgttgatagagagtgttcaccaccgcgagcagataatatttcgttgaagtagatggctttctaagagctgtcccgcgagttgaaccagctcctctctgttaaatagggaggttgcactgcgggcaggtgttttcctccctctgtatatgtgtgatatataggaaataactttctcttttacacaagagggaatattgaggccaccacgtttttgtctgaaacatcgggtgaatagagacccccaaaggttcaataaagataaaaaatttttttttggcccaaaaatttttgggaaaaaaaaaaataaaaggtaccccccaaaaaaa

SEQ ID NO: 570905 - DNA, 447 bp, Homo sapiens
  misc_feature (254)..(254): n is a, c, g, or t
gtcgctgacaggtaagtagaatttatgtgagtattaagaggggggcagcacattggaagccctcatgagtgcagggcccgcaacttgtccagagggccacgactggggatgtacttgaccccaacagcctatctgggaatgagcctgcttttcagccacacatgtctatcaaattcatcagacattgaatcttggtgaaagccccactttctttgagcatgtggatcttcgtggcggccagagaaacttgaacnttggcccttgtcgcaggggccctcaatcagcatgctcctttgttctgggcaggcttgggtgcgggatgggcccatgattacctttggccaaatggtgaccccttggccacaggtgccctgggggcttttccaaaaggcacccttcgcatgccctgttttgggagccttgtacagcaacctttccagggggggg

SEQ ID NO: 570906 - DNA, 895 bp, Homo sapiens
gatacagagtgtcactctgtgactcaggctggagtgcagtgactatgatctcaagtctcgactgcacgcctcccgttcctgagttcgagcaattctcatgcctcagactcctgagtagctgagaccacaggcgaaccgcacagcatcatccagactattgtatgtggtattgcgagtagagacacgagtctcaccacattgcccaggcatggtctccaacatcctgagctcatggcagatcatgcctaatccgttgagctcccagaagtgctgcagttacaggctgtgacccacgtgacctggctcactgtttctttgaataattgccttttatattgaccctatttggtcatcactttgaatggagatttcgccatttaaatctgaaggttaaccttaatagatcctctgagtgtgatttagtgacagtatgattataggtacttatatattcaatattagattttaaagttatcttctcgtttttctttttccttcctgtctgcgattagggacgaataaaatgggaaattatgaaacatgggaatattttatcctatattgaaagtaaacgatttatttgttatgcgtacggaagactgatggctaataacaatctgtcttcaatgtgtgaccggctggcacataaggatcatctcttcctttactaaaatgtccaggcgcgtcaggcaagtaccgcactgtgaaggaccgggcctacaacgatattaccccagaggtatgtttaggcccaaaacattggatacgggtcgcgacaatatacgcgcagcggtcacttaacaacacaacctataaagtcgctgtgacttaaatgctaccgcgaagggaaacaacacaccaccctggttgttaaaacacgccccgcgccctgtgt

SEQ ID NO: 570907 - DNA, 487 bp, Homo sapiens
  misc_feature (22)..(22): n is a, c, g, or t
  misc_feature (65)..(65): n is a, c, g, or t
  misc_feature (105)..(105): n is a, c, g, or t
gaaccatcaggggcccacacgnatggcacatgccatggcccgaacgggatgcctcctgggcctgncaacatttaatacatgggtgatggccagagagcgatgggnctcaagtagtgacagaatgaaattacatgttttctccaaacttagggctggccaaggacaaccctcttaatctctcagtctctacagcccacattcataacaggaagataataaacctcacttgcctcactgcattgacgtggggataaaatgatgtaagctatcttgtcaaacactgagctggaactcgctctccctctagttctccagggtaaaaaacatggtgagcatttcagatcataaatctatgtgcatttggaataataagtggttctggtcagtaagaggcttacaaaacagcagtacttcaataaagtctacagactacgtttattcacattatacacaatttcccctctccctggttttattttttcacttt

SEQ ID NO: 570908 - DNA, 384 bp, Homo sapiens
tgcccacctgtatcgccctaagtggagtgaacatgctctcggctcactatcgcataaccaagggggccactcaagtgtcatgaggtataaaagaccagcttctctaaagtaagaaaaaaagtcatcagtagatcatggaacctacactcccaatcattttaaataaggaaaccaggtcccagagaccacacacaccttccccaaggcccacagccatgcgtctgacccttccacttgttgcttatcctttgtggatgagccaagggcagatacccggctgggggccagctctagagcctccgtggcccttcccaggaccaatccctctgtttcctccttgtggatctgcaggtgaggtcgcaggagctggtgcagccagtgtca

SEQ ID NO: 570909 - DNA, 177 bp, Homo sapiens
gtcgacgttagtgctggttgtaggagacaaagttgtgctggttgtaggggcagagattgtgctggttgtagtagcagaggttgtgctggttgtagtcgcagaggttgtgctggtggtagaggcagagattgtgctggttgtaggggctgaggttcttctgggtgtaggagcagaggt

SEQ ID NO: 570910 - DNA, 278 bp, Homo sapiens
gaagaaaacactgtgtgtgtttactgcttggcagtttatgagtttcaaaaggcctcagcttttgtgaggttaggctgtaacaatgtgcagcacagagagcaccaggcacacacacgtggttccgcagaactagagttgttactcttcgccgcgcggggatgctaggaagtgagtaccagaagcactagacagggtattgggaagctatatttagctggggacgacgaagtgaccaaggtaatgaacaggcagatggcatagcacgaacgccgggtgga

SEQ ID NO: 570911 - DNA, 189 bp, Homo sapiens
tcactcagggcttggcgtgcttacaaacgtacacaccgggtttttctggtaccatgggagactaaggtggcatatgtcaggcttcttttagccctaaaagggtgggggtttatttcctaagacggaagacattctctggtatggttacggtagggtggtgggcggggataaccttaagcttggggtcta

SEQ ID NO: 570912 - DNA, 282 bp, Homo sapiens
ttttttttggtattctttagattagacagggtttcaccgtattagctaggatgacctcaatctcctgaccttgtgatccacccgcctcagcatcccaaagtgctgggattacaggcatgagccaccgcgcctggcctaaaaggctagttttatcagtcaaagtagactacttaacttttttttttttcctttgtagagacagagtctcgttttgttgcccaggctggtctcgaactcctgactttaagcgatcctcccgcctctgcctcccagtcgacgcgg

SEQ ID NO: 570913 - DNA, 790 bp, Homo sapiens
ctggcctaagcttaaggacctggacatttctcaagaaccaggtggaaagcctgcagcggcgtgtagaagacgaagtcaagcagtggagtgggccaggatggctcgctgttgtcctccccgtatcctcaagggattcctggctgcgctatgtggtgtgccaaactgagggtcatcagcagttgattgtggcttatgctgatgaggcacctgtcactggcatctatgcggcatcaggcatatgctgtgtcccaacgtgccagaagacattaagaggactagtttgcaagtttgctaccgcaagtgggcccgactagctctaggtgccatggcaagaggcaggatgagcagtctcatgccttcaggtgtgagacactttgaatctcggattccccagctgtcatccgatttgcctatcgtcgcgaactttgccctgccaccgttcgatccttgcctcgcgcttcctgcagattgtggacagtagttcctcaggctgcaccctggattccttcttccccttcctagctccatgggagtcgccccaagactgtggcttcaaggtaccaccatgcccttactcttcaagcccctgactgtgggagtttggctagatgcctctgtatcctcagtattctctctggcaatgttccacgggtttctcttccctggggagctggcgtcccgtaacttgatgttccccccaacgttgttgcaatcccggtggcctttgtccccccggcgtctgggcgggcatcacctgtccagctcggggttttccgcccggggcgtcccc

SEQ ID NO: 570914 - DNA, 636 bp, Homo sapiens
cacgagtaatgattaaaaaaaaaaatagaatgaataaaacctggtatttgatagaacgggggactacggtcaataataattgtacatttaaaaataactaaaagagtataattggattgtttctaatacaaaggataaatgcttaagggaaggaatactccattttccatgatgtggttattacgcattgcataagtgtagcaaaatatttcatgtactgcataaatatatacacctggctgggcgaggtggctcacacctgtaatcccagcactttgggaggccaaggcaggtggatcacttgaggtcaggagtttgagaccagcctgaccaacatggagaaaccctgtctctactaaaaatacaaaattagctgggcgtggtggcgcatgcctatagacccagctactcaggaggctgaggcaggagaatcgcttaaacccgagggggcggaggttgcaatgagccaagatcgcgccattgcactccagcccaggtgacacagcaagactccatctgtgaaaaaaaaaaaaaatgcataccacacacacacacacacacacacaacacccttgtacccactacgaacttggtagtacaatattctcaatttggtctattggtctttttcgctgg

SEQ ID NO: 570915 - DNA, 865 bp, Homo sapiens
tggattgtttttgtgtgtttatcgtctcgggggagttatatagatcggagagccggtcaagacgacaaagcagaagcagacaccacgccgttggacaccccccctcatcggccccttttgaccgaaatgttctgggggtgctcggagcggttggcgcccacaggggctcttgaaggttttgatggacaatgttgggttcccctgccggtgtgcggtgcacccaagagggtccccacacccggttgagccaagaaaataatgtttgcggcgagcactaatttatatgggggtgagacacccaggaattgaatttgatggccacaggggaaaaaagggacccgcttttccccgatgtgggtatgtttcactaggccccccccccgcgcaatgtgtgggaaaaggtctcttgagggctcccaaaaacacggtggtttttctttccaagtgtaatgtcaacgtttccccaagttcacactagttcgcggtttccctcgtggcctctggcaattaaggcggagccccctgtgttgggggccccccccttcccccccccgggttgccaaatatagaagggtatcccgggtccgtattcacgccaacacacccgttttaaccagatattgtttagtttaaactatacgatttgccccccctgcctctgttgagattaagccagactgtggatactgataagaacccgacccaatgttatttgcggggggtaaaaatctcacttttctctatagtaggaagttccgttgtgtggggaattctctgtgtgtgaaaaaatatttgtggaaaaaggcgcctgtttttgccacataaaaaaaatctctttgtgtatatgtgtgtgccccaaaaaaaa

SEQ ID NO: 570916 - DNA, 325 bp, Homo sapiens
agtcgacatctacgaggatcccctcctacacagtactaggatctggtgccaacgtggatgcttttctctagggtgaagggactctcgagctgtggtcattgaggacaagtcaacgagagattcccgagtacgtctacagtgagccttgtgggtgaaggtactctacagagtggtcattgaggacaagttgacgagagagtcccaagtacgtccacggtcagccttgcggtaagcttgtgtgcttagaggaacccagggtaacgatggggcaaactgaaagtaaatatgcctcttatctcagctttattaaaattcttttaagaag

SEQ ID NO: 570917 - DNA, 462 bp, Homo sapiens
  misc_feature (384)..(384): n is a, c, g, or t
  misc_feature (449)..(449): n is a, c, g, or t
acactgatggtctctatgcaactatcccaggaggagaaagtgaggaaataaagaaaaaggctctagaatttgtaaaatacataaattcaaagctccctggactgctagagcttgaatatgaagggttttataagaggggattcttcgttacgaagaagaggtatgcagtaatagatgaagaaggaaaagtcattactcgtggtttagagatagttaggagagattgagttaaattgcaaaagaaactcaagctagagttttggagacaatactaaaacacggagatgttgacgaagctgtgagaatagtaaaagaagtaatacaaagcttgccaattatgaaattccaccagagaagctcgcaatatatgagcagataacaagnccattacatgagtataaggcgataggtcctcacgtgctgttgcaaagaaactagctgctaaaggngttaaaataaggc

SEQ ID NO: 570918 - DNA, 522 bp, Homo sapiens
  misc_feature (13)..(13): n is a, c, g, or t
tcttccgtgcccntttttatcattttgtgcttatttattcatctacaaaatgagttcattataacatccatcccatactgtttttgtgataatgtatgaagcacaagctgggtacataacatatgatgtgtgggccactatgattatcattaggttcccttaatcattcctaaaagtagctattcattctccacaattactttaggagaagctattctttttcatgtatttatatatcaccttcataacttatttgttgaaaaagcagataattattgggatgcctacctatgtgccagctgactacacttagtactgaggattgaaaaataaactgaaaagacattttctgtctttaagaagataaacactgaggagagagagatgagagcaaactgctgcactaaaatgcaataagtttattggtagaaaatgtaccaagtattgtagaggaatgaggaactgctttgtagaatgagattatataaagaagactgcagttgagaggttaagcatgaatag

SEQ ID NO: 570919 - DNA, 381 bp, Homo sapiens
ggacctcattggaatgaatgtgcaccatgaaaatcagcatatcaccctggggcaacattttagtttccaagtctttgggtcatgactgatggtaacctacactagctgtcaattttttttcagtaattggttttcagtgctttttttttttccaatctgttaaaaaggtgatgcatttaaaaaggagtgtcctttgcctttgagagctgaaaatttgctcatgtgatcccatcacagcccgttataatgcagattacagtactgtctcccgtgtcttttccgcaaattgaagttatggacgttctccacatttggaaattcgtcccacgtgcccagacataaattcaaccacagcacatttcttccaagtgggttaccgag

SEQ ID NO: 570920 - DNA, 1054 bp, Homo sapiens
actggaaactagacactaaagctttctctttctctgggctaacacaacacaactgttccaacacattctagcactagctggcggactgcacttgctacacattcctgcttactacctacacagcctcgctgcgaactgtgcttcaccctaataactgcgactggaacttatactgcgtgctactcacactctatactttcacactacacagccctctacacacacaactaacctctctctgctactctgtgcgcacgcctcttactacacacgccttaactaacccagcagcacacgtgttactgcaccgacacctacaccacgccacagcaccctggcgcagcacacgcaagcgcacacgtggcacacacatacataccgtggccctgcgcacaccaaactgtccgctatgttacgccatactctcttgcggcaggcctaaatgtatgtaatccaactttgctacttcctatctatcgaccctccctggccactacttggctatacaacacggcactgcataaataaccagggtcatcgacgccctcccattccatgcatcacatacccaagccaaggcgcttttcccaagcaacttcatttgaataaggaattatctgaaacctggaacgcaatcaacgcaatatcaacacgaacccatatacatctgtgggacacacacacacaaggccccacacacacacgcttcttacaacacaacttaacccaaactaacacacaagcagccaatacacaacattgcgtatataacccacgcattactaacacccaaacccttaagactcttacaccccaacacgccccacttattcataaccgacacgctgggctaacttccacgcggcctacttaaacagtcttaacacttcccaaggtcagccagttggcacttcttctcacacaggagtaactacattggggtcgcaagcggccacctaccttggattggccttacgccggctttcaacctcacttggcccacaacttggatacgaaccacgcccacgtgtattcaaaacgttaagttggcacc

SEQ ID NO: 570921 - DNA, 655 bp, Homo sapiens
gccatgaggttgatcctgtttttggtgcccattttgggcatatctactgtctagaaacattgtgggagaccaagttctgtgagcatgtaccaagcaatgaagaacgaaattaagaaatctgctacaagttggaggctcaagaacatctccagctgtgatttttggaaatcacccaccacccagggagacagccagtcccgagttcccttcgtcgaacgtccaggcagtcaaagtgttcttggagtcccaggaattgcctattccatcatgattgaagacgtgcaggtcctgtggacaaagagaatgaagaaatgctctttaataggagaagagaacggagtggtaacttcaatttggggcctaccataccctggaagagatttcccaagaaaatggataacctcgtggtgagcacccatgggtctagtgagcaaagtgaatattgggtctttctttgaagaaccggctatgaagtgctcaagttcagcaccggaggagacaagccagtatctggtggatgctgggatcactgtcgagagtgggttaccaagctacggccctttggaccgcaaatagatggtctgattatggaaggaccatccataatccattctggagcctggatatttcttctgcagtcagaacccgatggtag

SEQ ID NO: 570922 - DNA, 145 bp, Homo sapiens
accctcaggcagggccctgcttttttaggaattggctcccatgcagaatagtgagaaatccaccaaaagccaaattaggccattcccgaccctcctgaattttcttggatttaaaagggttaataaaaaccaactattaacccca

SEQ ID NO: 570923 - DNA, 308 bp, Homo sapiens
tattgatactcgtgatacatttgtcgtgattaagtcccagcaggccacgtattattctactgggagtgaggcttttctcaaacgaattaaagggcggcatttatggtttgggatgatctataaagcgcgcgaacgttatttttattactatcaaacgggccatattggtaacatgacctatcaaatttatattggtttagctgaagtgattgggatggtgctgaccgtcagaccgccttatttgtgacgctaactgtgatttttgtcttagcgatatttattgtgcggcaactggccgagatttgaat

SEQ ID NO: 570924 - DNA, 796 bp, Homo sapiens
cagggagtatgatgaagcttcgggaacgcttacattagaagaagcagagtaagtactaaaatgcactgtgctggagcagattgtgacaatcttaaactgctgcgcatgaaacctctaagattggacatctcgtaagctcagtccactctagatggaaagcattgaagttggctaggaggaatggcctagtgaagtcctccgcttctcggaaattaggaaaggccatgaagtagaaaagaaatcgcttgaagattgtagtttctggagaagcaggaatcgctagagaagcaaatcaatgatctgaagagtgaaaactgatgctttagaatgaacaaaattgataatcatgaagaatcgaagaaagaagagcaagagaagagaagcaaattggtatcttgcatgtgtttctttccagaaaaatcctcgagatcagtgtagtcgtagaaacgaggagttagaagagccgtgaaagcgtggtgttaagagagtcaagaatgagaagacgtggatcaacaggacatcaagttaatgaacaatggatgaaactggtggacaaaaagacagacatgtggttgacaaattgaacgcgttgccagccaggagaatgaagaattgaaaggctcggatggacgagcacatggcaatctcaaggaaggttgccagaggagcagggtagtacttgagagaagtcggtggagaaggagtcagaaagtcagaaagagaatctcctatgggaataacgagggaggcatctgtgggaaagttgaacaatgggggacctgtgtaggcccagaga

SEQ ID NO: 570925 - DNA, 1183 bp, Homo sapiens
ggcccgggaatacccgcgggaaattcctgggcaccccacgcggttcgggggggcgccacaaggggctccgtagggcaccggcggttggcggaatgttccccgaggaggacacacagggaggacccccccaaaaatatggggcctgttcctcgggggtccaacacgattccaatccgcggttatgaggaacccggcggggcccccgggggccccttcctggcaaactcttcgggccccggaaggaaaaaccccccgggcccgaaggattccatcgccgggaaaagcacgcttgtttgaagagcccccccccggggaaaaagccaagaaagggaggatgatgcaaaggaaaaaagggaaaaatagaagggggaaaaccccccacgagaaaagaggaaagaaaggagatgagatagggcccaaaggagggcaacaaagggcgggcccacacctgaggggccaccccgttcccgtttgccccaaacaatgtctccctgaagagaggccccacggggaaaccaccccaccacctggagactcccggaactcccaaaacttctcccccccggctcgtataagaaagggaggggaaaagccgggggagacaccaacactggggggacacacgagagggaagcccccgcgttttcgccacagggggggccactggaccacgaagggcttcctgaaaggcctcgaattgggctgggagacccctcggttcacctcgcttgttttgtttggggaaccccttgaaacccctctccgcttttacacctttgctttgcctttcctcgccttcgggaaagtcttcctcttgggtttgttgggtgaaagcccgaggctgctcctcgtggaaatggcttctgggcacaccacgcctcgtgggggctataaagaacttgaacacagctaagcttctggagagcacagccggcttcctgggaaaacctcccacaggttttgcataaccacgggagtggcccctggcttggcctgcgaaaggtgaacctgcccacgagtttatcacgtagaaggctggaactccctctgtgtcctgcccacatggttgcaagcacagccactgggcctaatgagagcggtctaactgtggccacagtatggtgacctctatttttttttatattgactctttgtatttccaataaaaatattttaaaaggga

SEQ ID NO: 570926 - DNA, 213 bp, Homo sapiens
gtaaggaatactggcctgagtcctatctcatctggttctggctctgtgatcccccaggtgtggtggctcacacctgtaatcctagcactttgggaggccaagctggtcttgaactcctgacctcgtgatccacccgccttggcctcccaaagtgctgggattacaggcatgagtcactgcgcctgttaaaattattttttacaaaaaaaaaaa

SEQ ID NO: 570927 - DNA, 1368 bp, Homo sapiens
  misc_feature (198)..(198): n is a, c, g, or t
  misc_feature (308)..(308): n is a, c, g, or t
  misc_feature (698)..(698): n is a, c, g, or t
ggcgtaacagtaagggaaaggtgatccttgtcacaggcctgtgtccggtaggagatgcgtgtacgatccccatgagacaagcacatgaagcataaggcacccggcgccgacgactcgcctttgcaactctctatcgcgacatgtcttgatccgtcattcctgatgaagcgcccgatggaatgtctgatgcttggaggngagttctgcgctcaactctttcgcatctgaggggtgcatgatctcatcgcggttgacgtactctgtgaacgctgggctgaggtcatcgatgcttcgctgtctggactctngcgaggccccgtgtgctcgtgtcgcgctctactccaatgggtagttactcgtcaagtcgtgttatccaacaggcacgcccgacctaatcgttcggttgtctgctcgtcgcggtaacggtggtggtccgaccagcgaatcattgatccagtatgacagggaccgagtctatggacagagagaattgttgtaagcactgtagtgcaatacagtatcatgtcactcctgtgttgatgatgtggcagcagggggtggcagtacgacgtgctacaggtgttgcgaggacactcatgagttctgagtcaaaacatagcggtgcgacatgtgtctagtcagagcagtgactggaaactggggagtcatgtcaatttgttcttctcgcgacggtcaanttgagcttaaacatttcacaactgcccaggaacactctaggcgtggaactgtccttacgcgagttcgcgatcgcctatcatccatgtggaaaccatccatccgtgagctggcatatgatcgagcatcgaggggaccagctgctgtattaacattggactaactgggcagccttgtgccaaatgtcccttttttggcagccccacggctatggtgcccttccttgacttctacaagtattcttcgaacggaatattaacacaccggactatctcaacgtggacaggggccggggaactcctttaggaacatgtctgcgcagaagtcccgaaaacgcgctactcccggaactcgccacacctttggtgggtccgaactatctgtgccaacaatggtgctcacgtgaaccgcgcaaacaatttgccgttccccccaaaaagggcgccatctacgctatgggttttcacccctcccaattttcgagggacaccactcatggacgggagcccatgatgtgattacgatcacctagggaccgcgacacagcggtcttatgcacaaccgagcgcaagcttgtctgaaacaacagcggagctgcactccgtggccacaacaccgtttcatcactcaccttacgcgacgtagtccgcgagccagtgaagcgcaatagcg

SEQ ID NO: 570928 - DNA, 101 bp, Homo sapiens
gtctaggtggatagtggaatacaggtcaaggtgcagagctcctggctctgggggcagtgcgaggaatggaagatagagtacgtgggatacaggtcacgggc

SEQ ID NO: 570929 - DNA, 226 bp, Homo sapiens
ggatggtcgtggaggttgggggaaatggagagcgactggtaataggagtacagggtttctttttagggtgatgacaatgttctaaattatgtgatgatggttgcttaactctgaatacacaaaagccattgcctgatatactttaaatgagtacgctgtatggtgtgtaaatgatatctcaatagagttgttatttttttaaggattccatgggtatttctgctga

SEQ ID NO: 570930 - DNA, 875 bp, Homo sapiens
cgtgagggggaggcgcgggtggcggagggatgccggagcgggcagcgcgggggtcgccatgtgcgtgaacatggagcgaagctcaagcaccaaagtcatgatcaaccatgttcgtgctgacggcgggctgcgacggtgcgaccaggcggaagcaagtgtcttgcgggcgggcactacatggcagttcgagacagccactcagcggcctttttcctagggtaggagcatagcaatccgccatacgagcgcgaccgagtcgagcctagccaggatgattgtgcacctcccgagcaactaccgccgtggctacaatgcgtcgcagaagattacgccgtgtacagactacttaatcccagtggtagcgtacgccggttcgtcaagagggtccctaccggaagaggcctttcgcaacgaagcagggtgaggtcaggcgaagggaagctccgcatgtggccagaggatgagtcgcaaccgtttccaggcacgcgcgcctaaaaacttatcgacactaataggccttctcccacattaaatgagccctcaatggtcgcgagcatcccaagacatttgtactccggaacgggcgggatgcaatcctgccacgccctgtgggtgtgggtgcgcctagcctggggtaacacggggggcaacgaaccgaggaaggaacaggcacacttcgttgaattgtgccacagtgctcatacctgagggcacgcccattatttttccagcgttcttatacaagtgaacgtgggtgacactacaacttgcgattccgaattctgggggcttatcctaccgcgctgaaaccaatgataaaaagggcccgttgtcccctcacacgctaggggcctgtgctcggaaacagcagggaa

SEQ ID NO: 570931 - DNA, 807 bp, Homo sapiens
gatacacattacggtttaatgtgatgtgatcgtgtctaatatactagtatcgagtctcgtgtgcactgtgtcagcaatagtaggacttagtagttgtggtgaatttagtgatagcgtgtcattatgccgagaagatgctagatatcacgattataggtgattatgtgttagttcatatctcttgagtatgtgatggtggtgaagtctgagtatttatatgctgaattattaatggagtaagcagtatcgtgtgtcgttgtgagtcgagtagtggatagtgattccgataggagtgaatattggattactagtaatggattattattggccgggatggttagcttcataagtgcctttaggaaaggggttttgaattgatctagatagggagcatatggaaagtcttgagcactttaaaatacaggtagagggaaggaagccaaagggtgggcaggcaaggagtgagtcggaagtttgcaccaaaaggtgccaaggtgtctttagagttgtgtgaggggaaccaacggggtggggcaatgactgggttacgatgggggatacgtttatgggagagcctgcaatatattagtacacaggggatttcctatgttaccaagggcttggggccagttacggagtagtgagaaagataagaagttaagcacacatttcctgtgcagggttggacgcccttctttaactagcagtgggaatcctgtgtgctggagagttcagtatgggggtctttggcataggtggatggaggagggaagatagtacaaatacaggaaagttgtaacaaatggg

SEQ ID NO: 570932 - DNA, 181 bp, Homo sapiens
tccccctgagaggctgcagtgcagctaggataaaagcaggcagaggaacatggaagaaccaggctggctgagtcttccagcctacatctttctctcatgctggatgcttcctgcccttgaacatcagactccaagttcttccgcttttggactcttggacctttgaccacagactaaaggc

SEQ ID NO: 570933 - DNA, 465 bp, Homo sapiens
  misc_feature (75)..(75): n is a, c, g, or t
  misc_feature (79)..(79): n is a, c, g, or t
  misc_feature (82)..(83): n is a, c, g, or t
  misc_feature (85)..(86): n is a, c, g, or t
  misc_feature (88)..(89): n is a, c, g, or t
  misc_feature (91)..(91): n is a, c, g, or t
  misc_feature (110)..(110): n is a, c, g, or t
  misc_feature (113)..(113): n is a, c, g, or t
  misc_feature (154)..(154): n is a, c, g, or t
  misc_feature (169)..(169): n is a, c, g, or t
  misc_feature (171)..(171): n is a, c, g, or t
  misc_feature (173)..(173): n is a, c, g, or t
  misc_feature (183)..(183): n is a, c, g, or t
  misc_feature (195)..(195): n is a, c, g, or t
  misc_feature (214)..(214): n is a, c, g, or t
  misc_feature (228)..(228): n is a, c, g, or t
  misc_feature (242)..(242): n is a, c, g, or t
  misc_feature (248)..(248): n is a, c, g, or t
  misc_feature (258)..(258): n is a, c, g, or t
  misc_feature (273)..(273): n is a, c, g, or t
  misc_feature (276)..(276): n is a, c, g, or t
  misc_feature (279)..(279): n is a, c, g, or t
  misc_feature (306)..(306): n is a, c, g, or t
  misc_feature (310)..(312): n is a, c, g, or t
  misc_feature (315)..(315): n is a, c, g, or t
  misc_feature (335)..(335): n is a, c, g, or t
  misc_feature (341)..(341): n is a, c, g, or t
  misc_feature (343)..(343): n is a, c, g, or t
  misc_feature (349)..(349): n is a, c, g, or t
  misc_feature (355)..(355): n is a, c, g, or t
  misc_feature (357)..(358): n is a, c, g, or t
  misc_feature (370)..(370): n is a, c, g, or t
  misc_feature (379)..(379): n is a, c, g, or t
  misc_feature (386)..(386): n is a, c, g, or t
  misc_feature (394)..(394): n is a, c, g, or t
  misc_feature (396)..(396): n is a, c, g, or t
  misc_feature (399)..(399): n is a, c, g, or t
  misc_feature (405)..(405): n is a, c, g, or t
  misc_feature (408)..(408): n is a, c, g, or t
  misc_feature (419)..(419): n is a, c, g, or t
  misc_feature (426)..(426): n is a, c, g, or t
aaaaaaaaaaaaagaagtgattttaaataataatagtgaagaaaataaaattaaaaaattattggaaattaaagnaggnggnngnntnntnaaaaaaaggacagtaaaantgnttaaaatgaaagggattattttctttaaaaaagaaaaaaanataagtggaaaaaanangngaaggttgangtgttaataggntaatgtgtgaaaataaaanagggacgaagaaanaaacgtgtgtatgntcttanttggtatatnagaaatatagaagangcngcnatctgtacagtaaaatggggtgatggnaagnnnttntgtgtggggggtgtggggtngttggngntgtttnggtttntnntgggttgtggtnggggggggngtgattngggggggnanggnggtggnatngaacgatcacntgagggntacaacaaagaaaaaaaaaaaatatgttaagtaggactt

SEQ ID NO: 570934 - DNA, 143 bp, Homo sapiens
  misc_feature (21)..(21): n is a, c, g, or t
  misc_feature (85)..(85): n is a, c, g, or t
  misc_feature (104)..(104): n is a, c, g, or t
gccggccgagggagacggtcngaagccacagtggcgcttggggcggatggggcggccggccggctgggttaacattctgctgcantgcggagggccagctgacngtcggggcctggtccgggcggtgcagttcactgagactt

SEQ ID NO: 570935 - DNA, 330 bp, Homo sapiens
tactgtagtggttgtgggcaggcaggaggtttccaaactgcagtatggagccatgtccggggtgaagctggcagcagagcgctggggcccccgtatgaggaaaggctgtgaggcggcagtggcggtgctggtcgtggtactcacactgctgctgctcacactgtttatgccagagccaaacgcaggcttcgaagcagagtctgtggatggactggcagaggtgatgggagccacagcagaggtggcgctggccagtgccagtgaagagcgggggcagttgtggtgggacgcagtggcgggagttagttgtcttgcttgaagtccccctcc

SEQ ID NO: 570936 - DNA, 202 bp, Homo sapiens
tgcttcgtgaaaacttgcttcgaccatccgggtacgtcagtccgagttctccatatccatttaaatggtatgataggaacgtatcttcatgttcttacccatgccaagtcatccatggattaaaacgttaccaggagcagaaccattatgctggtccaggcgagttggactccaccatttctagaagcaggaactgggtggt

SEQ ID NO: 570937 - DNA, 496 bp, Homo sapiens
cgaagggcacagctcccgcgccgcgcacgccgccctgagcccggagtctggacacccccgggatcttgctgccccataggacccgtgcccctagcccccgtcgctcgccctcatggcccacccggagcatgctgcctgcaccatgagcggctcgtgcctggcgctgctaggccgtcctgctgtgctcggcgcccgctcatggcctgtggtgccatgactgcaccctgaccaccaatctccagccattgcaccccaaagcagtgccagccgtccgacacggtgtgtgccagtgtccgaatcaccgatcccagcagcagcaggaaggatcactcggtgaacaagatgtgtgctccttcttttaaccttctgtaaaagcgacacttactctcacgactatctgatggggtttattaactctgggatcttaaaggtcgacgtggactgcctgcgacaaggatttgtgcaatgggtgcgtccaggggcagtgcacagcccc

SEQ ID NO: 570938 - DNA, 644 bp, Homo sapiens
ggcgtgtccgcagcagccgcagctcgggggctggtgcctgccttgctgcctcccctcggcgatcgcgcagccccatctttgtcctggcctccgcgactttgttctcggcgcccgggccttggccagcctggccagccgccgcagcagaccccacgcctgcgctggcagtacagtccatcgccatccctcgaccgacgccccccgacgcgcggccgggccttgccaccccatggtgtcccaggacaagagcccgagggcgaggacatggcacgccgcaactgcacggtagacgccgaccgggctgcatcgcaaccatgggcagctttcacagggtaggaccaacatggaccacacgaacctgacgggccactctaccagatgcatccgacgctggagcggcacggcattgagagcccgcaaagcagcaagggcgcacaggtccatggtatctgccatgatctggtggctgtccacctcaacacgagctgcaatttccgtgcctctacctgtgatctacactgtccgagcatgaaattccacaaagagcaacggcactattccaacgacggcattgcggaagcggccgaaagccgggcacccaaccttggacccattgcatcctgactgtataggacgtcaatcta

SEQ ID NO: 570939 - DNA, 168 bp, Homo sapiens
cagtctgagaggatcccggtcatgccgtaatcctagcactggggaggcgaggtgggtggatcacttgaagtcaggagttggagaacagccgggtcaacatggtgaaatcctgtctctactaaaaatacaaaaattagcccgacgtggtggtgggtgcttataatccag

SEQ ID NO: 570940 - DNA, 152 bp, Homo sapiens
cgttgacagagagactctactggggctcgaactccttctggagacctgctctgtctgttctgggtcctcacctgcactgtacagagaccagctctctggtctcgctgtccctgtataccagcttccagagaagcagcatggcgaggctagga

SEQ ID NO: 570941 - DNA, 188 bp, Homo sapiens
ctctgattcctagcagaggcccaacaacccctctactgtttctcagagtcccaactcctctggcctcctcatcaggcttcctctccctgctcttccactaatacagctctcatcaaagcaatcaccaccttcgtgttgccagacccagtcagttgtattttacatgttcttatcctttcttgacctct

SEQ ID NO: 570942 - DNA, 304 bp, Homo sapiens
caagtggtcccccacagagtcttcaagaaataagaaattctgtaccatctgaaagtagttcttgttggtgccttcatttaaccagcactctttaaaataaaagggcaatgttttctgatagggctaacatttagttggggttcttgatattcatccatttctaaatgagtgttgtttgtacaccagtaacatctttttggctagagagataaatgtctcatgtttttaattaggttttgtttgtcgacagattacaattctattttaaatataaagtttataaaataaatactttttgtatcca

SEQ ID NO: 570943 - DNA, 298 bp, Homo sapiens
tccaattgcagaaaactgctgtagccgtgaatactgtatctcggaccgttttttcagagaattgaaagctcatttgagtggatggcggtttgggctgtgtcagacacggtgaagagagtgcagtaaagctgggtccaggttaagcgaagtggcttcaatccgggctgacagccaagaagagttttcctcccttcggtgacagggcctgcccctccgagtctagagttaaaagcagcttctagaactggcccctaagtctccaaatgtggtggctaagctgaaatgagagactctgaat

SEQ ID NO: 570944 - DNA, 161 bp, Homo sapiens
cctaaaaccaaagccaaacagaggctttaaaggccaagaaggcagtgctaaaaaacattcatgccaaaaaacaaatgaaaattgcatatcatccacatttcagtggaataagatactgtggctctcaaggcagcccaaattctctaaggttgatttggccg

SEQ ID NO: 570945 - DNA, 345 bp, Homo sapiens
  misc_feature (227)..(227): n is a, c, g, or t
cccttggcaccttgagaggagaatttgagtactagaatttgcatctgggagtgtccaccacgtgatcttccagaagcccaggggttcgggccccactcctggcatgaagaaatagcgacgtctggtgtcagtccgacccaggtcctggctgtgtggcctcgggcgcgtcacttaacgtctctgagtggcagtcacaccatcctgtgtggtattcagacttgagctgntcccaggtgctagcggggtgggctccggggagggagtgagggagggagggcgtcgctgggggcggctcaacccttcagtgcccgcaggcggctgtgcgtggcgagcagtggacgccca

SEQ ID NO: 570946 - DNA, 398 bp, Homo sapiens
taccgtggtcctctccgtggtatcgtggtgcatgtctactacgaaccgtcagggcggttcatcagtcaatgtggcgacctgacttattaccctctgtaagatgcaacgcccctataggcaccactgtccttgctctatctccttttagacagttccagcggtaccacacgatcagtgctggtaatcctaggtcttctctcctactactgatgggactttcattccagacatctctgttggacattaccctgcatcttgaatccataatgagggagttccttaccttcgcaaggagcggacccgtcaattcaagccgccgctatcagctgtacacctactctcaggtggtcgtacgtgtctagttacacgctgggcccttatcgccatatgagtgacga

SEQ ID NO: 570947 - DNA, 370 bp, Homo sapiens
tggtctcttaatacgcatgcccaagaagctgctcctccgtggggcctgcagtcaattaacagtttgatgatgttaacaggtgtggaccatcaggaaatggcctctccctggtgctgccaaattatcatttttagacaggcaatgcaataattgctgaaccatcacccgacattctagttggtagaggagagccctctctcctgcccagctcatgcctaattacctgtaacaatcccactgggcccaatctgtttttcactgcaaatgccttgctactaagactatacaggcatcctccctctaagcccagggactgtcgcatgagagtgtaagggcgagttttgaaggatataattaggtcaaggtcaga

SEQ ID NO: 570948 - DNA, 361 bp, Homo sapiens
  misc_feature (11)..(11): n is a, c, g, or t
  misc_feature (167)..(167): n is a, c, g, or t
  misc_feature (274)..(274): n is a, c, g, or t
atcaaactatncagctgtcccccaaccttttcctcttttttcctaacaacccccctccttatgctaactacctgactccgacccctcacaatcatggcaagtcaacgccacttatccagtgaaccactatcacgaagaaaactctacctctctatactaatctcccnacaaatctccttaattataacatacacagacacatcgccctcgttgtaacagccaatctcatccaaaccccctgaagtttcaccggagcagtcattctcatattcgnccacggacttagatcctcattactattctggctagcatactcaatctaggatcgcactcacaggcggcatcataatcctctctcaag

SEQ ID NO: 570949 - DNA, 401 bp, Homo sapiens
aagggcccagctgggtgcgcaggccgggtcttgtgtccacagcacttttgatggggattttgggttttaccctttccttttctgagtatagttgtaacagcagtaacctgtgcatctaagcccgttcaggtggtgatgaccggtagactagatatttacgccaccgtagctgttttcttggtaactttttaaactcttcctccgacgactctaccctttcccgaggaagttcatacggacccagaacctatttgactttcgactcgcacttgcaccatagtggtaactatagaggaacacctttaaactctggtcgttcatgatacactgatagtaactacggggtcctgtgtctctgaaatagtttttgtactaatgtccctgtagagtccgactgacac

SEQ ID NO: 570950 - DNA, 2127 bp, Homo sapiens
ccgggacgctttgtgttctcatcggagctgcatgggaagtctgcatacagcaaagtgacctgcatgcctcaccttatggaaaggatggtgggctctggcctcctgtggctggccttggtctcctgcattctgacccaggcatctgcagtgcagcgaggttatggaaaccccattgaagccagttcgtatgggctggacctggactgcggagctcctggcaccccagaggctcatgtctgttttgacccctgtcagaattacaccctcctggatgaacccttccgaagcacagagaactcagcagggtcccaggggtgcgataaaaacatgagcggctggtaccgctttgtaggggaaggaggagtaaggatgtcggagacctgtgtccaggtgcaccgatgccagacagacgctcccatgtggctgaatgggacccaccctgcccttggggatggcatcaccaaccacactgcctgtgcccattggagtggcaactgctgtttctggaaaacagaggtgctggtgaaggcctgcccaggcgggtaccatgtgtaccggttggaaggcactccctggtgtaatctgagatactgcacagacccatccactgtggaggacaagtgtgagaaggcctgccgccccgaggaggagtgccttgccctcaacagcacctggggctgtttctgcagacaggacctcaatagttctgatgtccacagtttgcagcctcagctagactgtgggcccagggagatcaaggtgaaggtggacaaatgtttgctgggaggcctgggtttgggggaggaggtcattgcctacctgcgagacccaaactgcagcagcatcttgcagacagaggagaggaactgggtatctgtgaccagccccgtccaggctagtgcctgcaggaacattctggagagaaatcaaacccatgccatctacaaaaacaccctctccttggtcaatgatttcatcatcagagacaccatcctcaacatcaacttccaatgtgcctacccactggacatgaaagtcagcctccaagctgccttgcagcccattgtaagttccctgaacgtcagtgtggacgggaatggagagttcattgtcaggatggccctcttccaagaccagaactacacgaatccttacgaaggggatgcagttgaactgtctgttgagtccgtgctgtatgtgggtgccatcttggaacaaggggacacctcccggtttaacctggtgttgaggaactgctatgccacccccactgaagacaaggctgaccttgtgaagtatttcatcatcagaaacagctgctcaaatcagcgtgattccaccatccacgtggaggagaatgggcagtcctcggaaagccggttctcagttcagatgttcatgtttgctggacattatgacctagttttcctgcattgtgagattcatctctgtgattctcttaatgaacagtgccagccttcttgctcaagaagtcaagtccgcagtgaagtaccggccatcgacctagcccgggttctagatttggggcccatcactcggagaggtgcacagtctcccggtgtcatgaatggaacccctagcactgcagggttcctggtggcctggcctatggtcctcctgactgtcctcctggcttggctgttctgagagctccgctgagcatctggccttgaagtttgtgttcttccctctggcaatggctcccttcagcacttctgctttccactccaattcacacaggcttggtattaacagaatcaaggccaggctaggttaggaaaagggaagagctttcaccttctttaaaactctcggctgggcgcagtggctcatgcctgtaatcccagcattttgggaggctgaggcaggtggatcacctgaggtcagcagttcaaaatcagcctggccaaaatgctgaaactccgtctctactaaaaatacaaaaattagccaggcatggtggcaggcgcctgtaatcccagctactcgggaggccaaggcaggagaattgctcgaactcagggggtggaggttgcagtgagttgagattgtgccattgcactccagcctgggcaacagagcaagactctgtctcaggaaaaaaaa

SEQ ID NO: 570951 - DNA, 246 bp, Homo sapiens
gtgcatgtggactggtcactgagtctgctcccggtcagcatttctgctccgatcccagtaatggactaagggcctgcacacgccggtaatttttgtatttcagcttagatggttttcaccatgtagccaggatggtcttgaatcctgaccacgtgatccacctgctcaggctccccaagtggagggatataggtgtgagccacctgtgccagccgataaaggtaagtttaaaaagcgctaggcagt

SEQ ID NO: 570952 - DNA, 1686 bp, Homo sapiens
ccgggacgctttgtgttctcatcggagctgcatgggaagtctgcatacagcaaagtgacctgcatgcctcaccttatggaaaggatggtgggctctggcctcctgtggctggccttggtctcctgcattctgacccaggcatctgcagtgcagcgagacccatccactgtggaggacaagtgtgagaaggcctgccgccccgaggaggagtgccttgccctcaacagcacctggggctgtttctgcagacaggacctcaatagttctgatgtccacagtttgcagcctcagctagactgtgggcccagggagatcaaggtgaaggtggacaaatgtttgctgggaggcctgggtttgggggaggaggtcattgcctacctgcgagacccaaactgcagcagcatcttgcagacagaggagaggaactgggtatctgtgaccagccccgtccaggctagtgcctgcaggaacattctggagagaaatcaaacccatgccatctacaaaaacaccctctccttggtcaatgatttcatcatcagagacaccatcctcaacatcaacttccaatgtgcctacccactggacatgaaagtcagcctccaagctgccttgcagcccattgtaagttccctgaacgtcagtgtggacgggaatggagagttcattgtcaggatggccctcttccaagaccagaactacacgaatccttacgaaggggatgcagttgaactgtctgttgagtccgtgctgtatgtgggtgccatcttggaacaaggggacacctcccggtttaacctggtgttgaggaactgctatgccacccccactgaagacaaggctgaccttgtgaagtatttcatcatcagaaacagctgctcaaatcagcgtgattccaccatccacgtggaggagaatgggcagtcctcggaaagccggttctcagttcagatgttcatgtttgctggacattatgacctagttttcctgcattgtgagattcatctctgtgattctcttaatgaacagtgccagccttcttgctcaagaagtcaagtccgcagtgaagtaccggccatcgacctagcccgggttctagatttggggcccatcactcggagaggtgcacagtctcccggtgtcatgaatggaacccctagcactgcagggttcctggtggcctggcctatggtcctcctgactgtcctcctggcttggctgttctgagagctccgctgagcatctggccttgaagtttgtgttcttccctctggcaatggctcccttcagcacttctgctttccactccaattcacacaggcttggtattaacagaatcaaggccaggctaggttaggaaaagggaagagctttcaccttctttaaaactctcggctgggcgcagtggctcatgcctgtaatcccagcattttgggaggctgaggcaggtggatcacctgaggtcagcagttcaaaatcagcctggccaaaatgctgaaactccgtctctactaaaaatacaaaaattagccaggcatggtggcaggcgcctgtaatcccagctactcgggaggccaaggcaggagaattgctcgaactcagggggtggaggttgcagtgagttgagattgtgccattgcactccagcctgggcaacagagcaagactctgtctcaggaaaaaaaa

SEQ ID NO: 570953 - DNA, 149 bp, Homo sapiens
tgcttccagtacttacacatgggcccccaccttgttttcagacctggcttctgcccgagcccccagccatgtctagaccaggtcgtttcccacgcggtcccgggtccgccgtgcacgatggcgctaggggcgagggggacgacaagcgc

SEQ ID NO: 570954 - DNA, 784 bp, Homo sapiens
gcacgagggaattagggccatagcgtgaaccagttctggacacagttcttggtccagagctgcccattgtaggagcagtctagatagaatccaggcatttaaattttgatataataaaagttcatcatccctacagtcttgctcaagaagtcaagtccgcagtgaagtaccggccatcgacctagcccgggttctagatttggggcccatcactcggagaggtgcacagtctcccggtgtcatgaatggaacccctagcactgcagggttcctggtggcctggcctatggtcctcctgactgtcctcctggcttggctgttctgagagctccgctgagcatctggccttgaagtttgtgttcttccctctggcaatggctcccttcagcacttctgctttccactccaattcacacaggcttggtattaacagaatcaaggccaggctaggttaggaaaagggaagagctttcaccttctttaaaactctcggctgggcgcagtggctcatgcctgtaatcccagcattttgggaggctgaggcaggtggatcacctgaggtcagcagttcaaaatcagcctggccaaaatgctgaaactccgtctctactaaaaatacaaaaattagccaggcatggtggcaggcgcctgtaatcccagctactcgggaggccaaggcaggagaattgctcgaactcagggggtggaggttgcagtgagttgagattgtgccattgcactccagcctgggcaacagagcaagactctgtctcaggaaaaaaaa

SEQ ID NO: 570955 - DNA, 339 bp, Homo sapiens
agctgaacaaatgtgtcatgggttagggcatctggtcccacaccaaatggtagagtgtaaggctacctgtattttcagatcccttctgcttggagaataaaatcggtggtagtcacatactgacttggggcatagttctattggcctccccagtgagcagacaccttgctcttctgggtgtgtatatgaaaagtagaataggtgggaatacataagaagcgggctgctatcatgtaaaggggaattcatgaatgatatcaacaaggagaatgaataaacgaaatatttaaagacccaaactccactaagatgagtagactcatgactgaaaaaaaaaaa

SEQ ID NO: 570956 - DNA, 146 bp, Homo sapiens
agctgctcgtgatcacttcacgatgttggttgcacagtcaggtcctccgagttgggctggctgggcgtgagataagcgaggagcaataggattcatctccacctcagcagagggagcctgggttcgtaaaaatgcccactgttggt

SEQ ID NO: 570957 - DNA, 293 bp, Homo sapiens
  misc_feature (291)..(291): n is a, c, g, or t
tagagatgaggtgggaggattgcctgagctcaggagtttgagactagcttgggcaacatagcaagaccctatctctgttttttaaagaaattagccaggtgtggtggctcatggctgtgggcctagctacttgggaggctgaggcaggaggattgcttgagcccagtagtacaaggctgcagtgagctatgatcactgagctccagcctgggtgatagagtgagaacctgggctctctaaaaatttaaaagcaaaaagaaaattactttcagttagtttgcaaccagtccntt

SEQ ID NO: 570958 - DNA, 212 bp, Homo sapiens
  misc_feature (72)..(72): n is a, c, g, or t
atcctaaacgcatcttgcactcccaatgagatgggtgtagtattaatacaacccatatctcggagacttcanaccaataaatgcgatcctctccttattttggattaggtatatagattttattggtttaacccaataccttattaccggttaatttccactctaatttcgattaatccttttttaattgttgggtactgggacaaatttaa

SEQ ID NO: 570959 - DNA, 985 bp, Homo sapiens
  misc_feature (309)..(309): n is a, c, g, or t
gcggagaaagaggtctccggaggtcgaggggtgacacacgacgcgacacagaagttgacgcgcacagcatatgcgtgtgtccgaccctcgatgttgcacacacgacagaattcgttcccgagcatacatccggtggtgaacaaacaaagaccagttgtgcttgacaaacatcatcgcgagggatacacaagaatcggacacatgcgtgacgaacccaaatattaatgtcgggggcgggttgtacaacacccggcccccctgtcggtgaaacccgcccttccccctacgggataacatgggctgttcacntcaacaccgggcgaatttttgtgactgttctccggcgctcccttttgtatgaaccggcggacaaataatgtcagagagcacgtgtggaccaaaaagatgtaaaaggtggcagggtctggcaccccgacatctcaatgggggatctgtcccccacgcgtgtagtgtttcggttcagggctccccaaagtgccgcaatctgtggattgtcgcccctacccaaaagaaagaaaatgctatgccgcctacccgtattagaaatacactgttgtgttagatacctttggcacggttgttctcagcacggcgcatatcagaacaacttggttacaactcagcaagataggcaaatatgtacggcgggaaaaatataacaactcgcgacaatagggagagacagactttatttcttctgttaaattcagccgagggtaaaatatgcctaaggggcgatgaagcctctatctgtaatgagctatggacgtcgttaggcacccttctgtggttggaggtcggtcccgccccccacgctaacttttcgcattatcaatgcccccagtatgatttgggcacctccattcgatttatattcatgtaatccaaccacgcgagggggccaaattatccggaaatcaccactgtgaaaaacaaaattgagaaaaacacgccccacatgtca

SEQ ID NO: 570960 - DNA, 539 bp, Homo sapiens
  misc_feature (35)..(35): n is a, c, g, or t
  misc_feature (46)..(46): n is a, c, g, or t
  misc_feature (82)..(82): n is a, c, g, or t
  misc_feature (87)..(87): n is a, c, g, or t
  misc_feature (132)..(132): n is a, c, g, or t
  misc_feature (208)..(208): n is a, c, g, or t
  misc_feature (327)..(327): n is a, c, g, or t
  misc_feature (364)..(364): n is a, c, g, or t
gggacccttaagctcagagttcaagccagcttggncaacataccangccccatttttccaaaaattccaaaaactagccagncaggnctggccggtggctcacgcctgtaatcccagcacttttggaggccnaggcgggcggatctcgaggtcaggagattgagaccatcccggctaacacggtgaaaccccgtctctactaaaaatncaaaaaaaattagctgggcatggtggcaggtgcctgtagtcccagctactcgggaggctgaggcagaagaatggcgtgaacttgggaggtggagcttacagtgagccgagatcacaccnctgcactccagcctgggggacagagcgagactccgtntcaaaaaaaaaaaaaaaaaaactagccaggcgggcatggtggtggcacccatctgtagtcccagctacttgggaggctgaggtgggaggatcgcctgagcctgagggggatgttgccgtgagccaagagcttgtgactggactccagcctgggcaacagagcaagaccctgtctc

SEQ ID NO: 570961 - DNA, 468 bp, Homo sapiens
  misc_feature (132)..(132): n is a, c, g, or t
gtcgttcatccgacgcttgagcgaccttacaaaggcggggaccgaattgaagattgatccgatcgacatgacctgtcaccgggtcctcggaggctgtgtatgccgcctaagagggatcccgaatggttgtanccttgtgatcactgagaacggcattactagacaggtcaactagagccgagagatcctcgcgcagcgagtcctgcggtgagtgagaggatgcgtcggatccaatagaatgtaggcgagcgcattcaaggagagcgcatcatatgccacacatgaagtgcctgaaggtaattccgggcatctttgacgtcccagtgcctagcgaaatgtctctcatatggaatccccgaacaatccagagttctaccttttcgtagtgaaggacaaagcttggccatagatcttccgttctagcgatacagtagtgtcaatcgcactagaggaggaatggtagagcaa

SEQ ID NO: 570962 - DNA, 338 bp, Homo sapiens
cttttggggtctttgctcaggttttcaagggaacccaggaccagatgcataaagtgatattacaatctaattgtatcacaaatgtataaaacaaccacagcgatggggtggatgaaattgatgtggacctaagtaattttggaaatagagtctataaaattaaaggcaaaagaaactgtatataagtactgcactctagttgaaaagttgtttcctgagggatatgggttaacaattatgatactgctgtacaggtatgctgtgactgaacaaataaatgcaaagatggtggatgggggaagccaggtttattactcttagaggtgagtgcatagata

SEQ ID NO: 570963 - DNA, 479 bp, Homo sapiens
gagaggaaaatgatagaaaatgttctgtctttgaagcactccagccatttgttcccactgagcttggctctggcttgtggatagattccacgggtggaatgccggcatgttcttggagcacgaggcagacttgggaactgagtcaacacatggcgtatcactgagacagagcagccccagaacacacaccggggagtacaggagcctaggccacgtacccaacattgcaggcagagaaaaaagaaagtgtattccatgtggtgcattccaggccttagaataaaattaaaagggaaatcaatgaagacacatccactgttcacactctcatcttcaatgtttgaccagtggctgaactgtttggagttgcagattgatatttctcttttatagttttaggtgcttgtaattgctctttaatgctcatgtttactcttattctgtgtgtctttgactcataaagacagttttccatgaga

SEQ ID NO: 570964 - DNA, 542 bp, Homo sapiens
  misc_feature (528)..(528): n is a, c, g, or t
gtacagctgtgataaggtgattatgatagattaaatgaataatatatatgttaaatcactggtgaacagtgtctagacaccacagtaggtgctcactaaatgttgattgccttatttctctgcaactggtcgagcaagctgtattactataggtccttaactggcatcgcgatgtacgtcccccgtgagtcgatttctttctctggaaataatgtcactttacatgtgcagagtgctttgtaagtcacaaagtgctctcacacgtgctatctcacttgtactttataaacgtcaggaggcaggtagaagtgggggttgttattctcattttacaaataacagtgagcagaaagaagtgactgagatcacagggcagtggaaggatggaactgggagttttcttattccaagttcagtgcttcttccactgtgctccctctgatcttcaaaaactggtcaagcaactatttttttggactggccgaggttaaggatcctcaaggccatctgctaaccctcctcatttgncccatctcatttcc

SEQ ID NO: 570965 - DNA, 272 bp, Homo sapiens
ggtcatctttctacaccagtgcaactatgtaactcgcttagtaaaaactatccgtcgagaacttatcatcaccactattcctatctcccattcctatacaagatccaagtagcgagctcacactgattcacactcgctagctgttgagtcgacgaatgtgtagtcatatgtgttgactcctaagagagcacacctagacaccccaaaacactcttgcaggcttcatctcattccttccccaagagtattctgacctgtctgcacaggtatcc

SEQ ID NO: 570966 - DNA, 428 bp, Homo sapiens
cgaatctactcaaaaaaaaaataaataaacgctaggtgtggtgctcacccctttatcccagcctttgggaggctgacatgggtggattgcttgaccggagagttcaagactagcctggccaacatagcaaaaccccatctctacaaaaaaatacaaaagttagccaggcatggtggcacacacctgtagtcccagctacttgggaaattgaggcaggaggatcacttgagtcctggaggtcaaggctgcagtaagccgtgatcgtgtcactgaactccagcctgggtgacagagcgagaccctgcctttcaaacaaacaaacaaaaaaagagttaaaaaaaaaaaacccagctgagcatggtggcccacgcttgtatcccagcacttgggcaggccaaggcagtgggctcacctgaggctcaggggac

SEQ ID NO: 570967 - DNA, 468 bp, Homo sapiens
cgcaagtttatgtgtctcagtctgcagcagctcaaatcccagccttctatatggacacagccaaaccatatcacttgctttatccctcatttttggaaacagctcatcatacacatatggctttcctcatgcagcagaaatgcctggcttttaatgactggatagtaggagaatgacctaccttgactattgactggattccttcctagttgtgtctggggagattttcgtcattcttgtatctttttacaacaccctcaaaatctggaattactttggatgtctccagatttcttttctttttttattttccccagagtttcgctcttctctcccaggctacagtgcagtggcatgatcttggctcactgcagcctctgcctcccaggagaatcgcttgaacccagaagacgaaggttgcagtgagctgagaatctgccgctgcactccagcctggtgacagagaga

SEQ ID NO: 570968 - DNA, 847 bp, Homo sapiens
  misc_feature (30)..(30): n is a, c, g, or t
  misc_feature (65)..(65): n is a, c, g, or t
  misc_feature (68)..(70): n is a, c, g, or t
  misc_feature (74)..(74): n is a, c, g, or t
  misc_feature (98)..(98): n is a, c, g, or t
  misc_feature (316)..(317): n is a, c, g, or t
  misc_feature (319)..(319): n is a, c, g, or t
  misc_feature (322)..(323): n is a, c, g, or t
  misc_feature (326)..(326): n is a, c, g, or t
  misc_feature (330)..(330): n is a, c, g, or t
  misc_feature (381)..(381): n is a, c, g, or t
  misc_feature (496)..(496): n is a, c, g, or t
  misc_feature (527)..(527): n is a, c, g, or t
  misc_feature (556)..(557): n is a, c, g, or t
  misc_feature (564)..(564): n is a, c, g, or t
  misc_feature (597)..(597): n is a, c, g, or t
  misc_feature (600)..(600): n is a, c, g, or t
  misc_feature (603)..(603): n is a, c, g, or t
  misc_feature (606)..(606): n is a, c, g, or t
  misc_feature (616)..(616): n is a, c, g, or t
  misc_feature (623)..(623): n is a, c, g, or t
  misc_feature (632)..(634): n is a, c, g, or t
  misc_feature (637)..(641): n is a, c, g, or t
  misc_feature (645)..(645): n is a, c, g, or t
  misc_feature (662)..(662): n is a, c, g, or t
  misc_feature (666)..(666): n is a, c, g, or t
  misc_feature (670)..(670): n is a, c, g, or t
  misc_feature (680)..(681): n is a, c, g, or t
  misc_feature (684)..(684): n is a, c, g, or t
  misc_feature (733)..(735): n is a, c, g, or t
  misc_feature (755)..(755): n is a, c, g, or t
  misc_feature (822)..(822): n is a, c, g, or t
tagtataattacacataattacctttagtngttttcctacaagaaatgcacaggtattttgaggnctnnngtantgcattattggtaaaacattgcanagtattagtttgtggctctgttacaatgggtaatgacaggaatgcatacagatgtctctgctatgataaaatgtgctcttgttgggttacattaaccttccttcaaaagggatttctcagttgtacttcttacagtcttcaggaaattcattaaatcagtgcctccagttcctttggcttccagttttgaagggtcttcagaggtcttattctccttnngnagnnggnttgnaggaatcaggatgtacttagtcacgatttgcagatggtagctcctcagggngaccagagctttcacacaggcgtcataagcttcccgcaggccagcatcaccttttgaaaggacaaactcacggactgagggatttgactctaatgagcacaggaagttcctgtgngctggtggcatatatcttctcatgtcctggnggaactgagcagcatgtcctccaccagcnntctgctngatgcccagcaggacgtcaaagcactgaaagangcngcnttngcctgcactnccccctncaaactccnnnggnnnnnccanaacccttcatacaccanatcntctnatatcttttnnttncctttccagccagacaaatatatgcgaagaacactgaaaaatgcttttnnngtcacatgatcgttgatttngtgaacacttgaagggctttctccaagcaagatgctatttccaacagcgcctttagcaaagtgtccngttcttgcatttgcattgccttgaa

SEQ ID NO: 570969 - DNA, 339 bp, Homo sapiens
attgggcgtgacttgtggctctgagctctgtgagagcatgagtcttcaaggaagccagagtgagtcagtgctcaccgaggccagagtcagagctggccacagtgtggcagcctccaggagcttaataaaaaatggcaaagaacacagaaagaggaggagcaagtgggatgtatatgtccccccttctcttcctgagtgattctcagccaagtccagaacagtgctcggagggtgaaggaaggttctgccccgcagctttctaggttggcaggatggcaagcaaggcatgctgggtgttcagccttgattgcccagggagcaatttccacagggggggcg

SEQ ID NO: 570970 - DNA, 846 bp, Homo sapiens
  misc_feature (30)..(30): n is a, c, g, or t
  misc_feature (65)..(65): n is a, c, g, or t
  misc_feature (68)..(70): n is a, c, g, or t
  misc_feature (74)..(74): n is a, c, g, or t
  misc_feature (98)..(98): n is a, c, g, or t
  misc_feature (316)..(317): n is a, c, g, or t
  misc_feature (319)..(319): n is a, c, g, or t
  misc_feature (322)..(323): n is a, c, g, or t
  misc_feature (326)..(326): n is a, c, g, or t
  misc_feature (330)..(330): n is a, c, g, or t
  misc_feature (381)..(381): n is a, c, g, or t
  misc_feature (435)..(435): n is a, c, g, or t
  misc_feature (447)..(447): n is a, c, g, or t
  misc_feature (449)..(449): n is a, c, g, or t
  misc_feature (451)..(451): n is a, c, g, or t
  misc_feature (462)..(462): n is a, c, g, or t
  misc_feature (495)..(495): n is a, c, g, or t
  misc_feature (526)..(526): n is a, c, g, or t
  misc_feature (555)..(556): n is a, c, g, or t
  misc_feature (563)..(563): n is a, c, g, or t
  misc_feature (596)..(596): n is a, c, g, or t
  misc_feature (599)..(599): n is a, c, g, or t
  misc_feature (602)..(602): n is a, c, g, or t
  misc_feature (605)..(605): n is a, c, g, or t
  misc_feature (615)..(615): n is a, c, g, or t
  misc_feature (622)..(622): n is a, c, g, or t
  misc_feature (631)..(633): n is a, c, g, or t
  misc_feature (636)..(640): n is a, c, g, or t
  misc_feature (644)..(644): n is a, c, g, or t
  misc_feature (661)..(661): n is a, c, g, or t
  misc_feature (665)..(665): n is a, c, g, or t
  misc_feature (669)..(669): n is a, c, g, or t
  misc_feature (679)..(680): n is a, c, g, or t
  misc_feature (683)..(683): n is a, c, g, or t
  misc_feature (732)..(734): n is a, c, g, or t
  misc_feature (754)..(754): n is a, c, g, or t
  misc_feature (821)..(821): n is a, c, g, or t
tagtataattacacataattacctttagtngttttcctacaagaaatgcacaggtattttgaggnctnnngtantgcattattggtaaaacattgcanagtattagtttgtggctctgttacaatgggtaatgacaggaatgcatacagatgtctctgctatgataaaatgtgctcttgttgggttacattaaccttccttcaaaagggatttctcagttgtacttcttacagtcttcaggaaattcattaaatcagtgcctccagttcctttggcttccagttttgaagggtcttcagaggtcttattctccttnngnagnnggnttgnaggaatcaggatgtacttagtcacgatttgcagatggtagctcctcagggngaccagagctttcacacaggggtggtgggggtgggggggggggggtctgctttngggggggcgggntngnggggtgggggntttgggtgtgatgggtggggggggttgttgtgngctggtggcatatatcttctcatgtcctggnggaactgagcagcatgtcctccaccagcnntctgctngatgcccagcaggacgtcaaagcactgaaagangcngcnttngcctgcactnccccctncaaactccnnnggnnnnnccanaacccttcatacaccanatcntctnatatcttttnnttncctttccagccagacaaatatatgcgaagaacactgaaaaatgcttttnnngtcacatgatcgttgatttngtgaacacttgaagggctttctccaagcaagatgctatttccaacagcgcctttagcaaagtgtccngttcttgcatttgcattgccttgaa

SEQ ID NO: 570971 - DNA, 224 bp, Homo sapiens
acccccccagcaggcccccaaggcaggcagcagggcagccaggcagccaggcagcagggcagcaaggcaggcagcagggcagcaagcaaggcaggcagcaaggcaggcaggcaggcaggcagcacaggcagcacaagcacagcacagcaagcatgcaagcaggcaacacaggcacagcacagcaaggcagcaagcaaggctgtcagttgttgcatttgcagtgt

SEQ ID NO: 570972 - DNA, 401 bp, Homo sapiens
  misc_feature (176)..(176): n is a, c, g, or t
actcaacaagcggcggccaaacgcatgggcatcccgcaaccgaaggtgtcgggcatgatgcgcggcgacttcaccaatctatccgaacgcaagctgatggattgtctgaatcgcctcggctacgacatcgaaatcaaggtacggccagcagccgagccgatcgggcatctaacgcntgcaaccgcttaatcggagctctcctgatggcagcccgcatcaccgacgacgaatgggacgaactgactcccgagaatttcgataccacggcactgctgcgtgcagtcgatgccgtggacgtgctgcgcggcgatttgaatgacacggcagacggcgcacctccgcaactgcgcaccgacctgttgaagctgcatcaactggcaatggccgcgttcaacgaggga

SEQ ID NO: 570973 - DNA, 294 bp, Homo sapiens
attcagtcattactcggtgcgtccagtccatgtttcgtgacctaggttggtgaggagttctgatccttaggaggagaagaggcattctgggttaatggaattttcaggcctttaggcactgtgtgctccccagtctttgtggattatctgcctttggtctttgaagtcagtgaccttcagctgggtttctgagtggatgtccttttggttgatgtagatactattcctttctgtgtgttagttttccttctaacagtcatgacccctagatttttggtcttagctggtgggaag

SEQ ID NO: 570974 - DNA, 215 bp, Homo sapiens
ctgggtgatctagaggatccttttggggggctttccccctcagaagttggttctctcagagtctggaaagattttaactgggagtggaagtgggtattggtaatcctgagaacaaaggggcggttggagactctcaacttgtgagagatttgggtgaacagtccccataaaggcagggggtactaaaccatctaatgaaaagcgagactcttcaa

SEQ ID NO: 570975 - DNA, 130 bp, Homo sapiens
gagggctcttagacccgacctgcccggctcacccaaaggggcaatggccttcttgtatgcaagccagacagtctactgtgtatatttgaattttttactttttttttaaattaaaatttaattaaaatat

SEQ ID NO: 570976 - DNA, 1080 bp, Homo sapiens
gtcgtctcttctttgtgcgcgttcctttgtgcgctgtttgtgcgcccccctcctttgtttaggggttcctggcgggcttatcttattgtcccctctggtcacatgggtttttggattactgttctgtcctcctggctttttgtttctgctcggtcacgcatttatatttcggtttattgggggactcgtgcccatccccccttttgggatggttcctcgggcagtccctgggcacctgttttcctggccctcccgggcttcctgtgccaattgtccccccaccctggtcttagcccgatcttgttttgtccagtgttgaggccccagtgtattcggcattggttcttggagatcttctggttcaagtacactgctggccacttggggcacccgaggtgcccccgttttgccccggggttctgatagagaggtatagaggcacgttcttggtcactgttccacttgcagaccagacttgctggcctgagccccaagggaatggctgggaactcacagccagcatagggacatccccctgcagccttttgacccgccatcaaggctggggaaggggtttgcacaggcacggatattgctggcccttcacccctgccactcccatctcccagccccacgcgtcacctatgcccttcaatataatgcccttatacttggagtcaccggggcccaaggcctgagacccccccctgccccccaaacatggctttagaccagctttccagttcctgactcccccacattggtctcttgccctgaaacagggccctgaactcttgggctgcgttcttctgtgtgtaaaatgggcacatctttcctaatctgttaatggtcactggtgtcccccaggatagtgctggcttccatgggaaccctcactcctggagattccattccattgttcaagtgtacagccaccagcaaggagcccgacactgatttgatcgattctgtgacaccaaacccccacccaattgttaatagcaagtttttatttggctgtataataccatttaagctatttaaatttgtaccatatttaccaattaaataatcatctga

SEQ ID NO: 570977 - DNA, 805 bp, Homo sapiens
tactgcgggcgggagcgtggagtcgggaagtcgagggatttcggcttcgtccctcctggtgctatatctcctcccttttactttgccggtagaacacagttatgggtcgcacgaagaagaagcagctgaagccgtggtgctggtattgtaatagagatttagatgatagagaagatccttattcagcaccaaaaagcaaagcattttaaatgttttatatgtcacaagaaattgtatacaggacctggcttagctattcattgcgatgcatggtacataagagaaacaatagatgccgtaccaaatgcactacctggaagaacagacatagagttggcaatatatggtatggaaggtattcccgaaaaagacatggatgaacagacgacgacttcttgaacagacaacacaagaaagtcacacaaaaagaagcaacaagatgattctgatgacatatgatgatgacagactccgcgagcctcaagctctcatttcagccacagacctgttcaatctcagcaaggttatattcctcccaagtggccacagcaggactagcaccagtaccaggagcaccaggaatgcctccaggcatacgtccataaaatgccaggttgttcctcctctgatgcccaggaatgccaccagttatgccaggcttgccacctggacttgtatcatccagagataagtacacccagatcattggcggtgaaacacatattgatggcgatgggtggaatgattgcaccctggacgggaataccgctctgactgcctgaccttccacagtatacaccagcga

SEQ ID NO: 570978 - DNA, 689 bp, Homo sapiens
aatcgagcccgtacctttatacacccagcatgtacacccctgtgacattggcagtaacatccccccagtatattacaaataatatcaaaaggtgtacacacattgtgacattagtagtagtataccgctagtatgttgtgaataattatatcagggtgtagacacctgttacattaggagtaacatccccctagaatattaccaatgatatcacagggtgtgcaccctttgcgactttagaagtatcatccccctagaatattaacgagtaatatcacccccatctcccacaatggatattacgaaccatatcacaggggggtggacaccccccacaatatggcgagtaatatcaccctactctccccgcctagatactacgaaccacttcccctgtaaggacacacatagacttaaaataatgggatgaaaagatatatttcatgtcagtggaaaccaaaaaagagcaggagtagctatacttgtatcatacaaaatagatttgaagacaaaaactataagacaaagaggcccaggcgcagtggctcacgcctgtaatcctagcactttgggaggccgaggtgggtggatcacctgaggtcaggagttcgatgccagcctggccaacatggtgaaaccccaactctattaccaatttccaaattagccaggtgtggtgctatcagggg

SEQ ID NO: 570979 - DNA, 1041 bp, Homo sapiens
gcccgctccagcccggcccgacccgaccgcacccggagcctgccctacgactacggcgtacccggccagcacatgggacccttggagccgcagcctctcggacgactagatgcatgcatgctgcaggtactaccatacttgagctcatgccaggagccggagcacctgaccaccctaggcttatgaccgccgcagagctcacactgttcacaggtagccccaggacgccaacctaggagcagcaggccgcagtccctagggccagagtagacatttctgcaacgcattagcacctggtacgacacaacggaccagcctaatttattcccttcgaacaaccccgattcaaaagtagcggcacacgataggtagtcgattcaccccgtcacaaagggcctctacagcgtattacatcacacccaacagatcccatatatcttggctctacgccctgggcacatccaaccatacagaaaaggtaaacacaaccacaagatcacgactgacaatacagaaggaggcacccaccaaccgcacacccccgccacccatacagcgccatccgcattaactgcgaacatccacccgcacgaacttgcctcaacacttctcgcacaaacatccttctcactgagacctacaagacaggaccagaagcagcagacctggcgatatactaaccatacccatacacgctagcacacagaaaacattgacacaacggccaccaacaacctaaaaccacctggcaacacgatccaaatccaacaacagacacaacgaacgcacacggcacccctcacacgcacatcacctggccccacaggagctgaacaccaccaccctgggacgcgcgcaccacacaacaaccacgacacagacgaacacacaggacggaccttgcacgcggagcaccaccacgccccactggaaatccagcaacgcacatgacccgcaaacaccacaaccacaccacacccaccaaccaacccaccacccacagacccatgacccctcccaaaaaccgcgccccaacccaac

SEQ ID NO: 570980 - DNA, 443 bp, Homo sapiens
ggcagtgtaatccctctgaccggccctcctttgctgaaatccatctagctgacataccctaatgccaagaaagcctgtctcctgtgctccctaaggtcccatgactgtcttcctgctctccacggataagggaagcttgcagatagccaatatgaaaccagcttcaggaacacaggactggccgggggagagaagttgagaatagtggcatcgtgcctctctcatggaagagctgttcccatagactgagaactggagagcggactgggttccatcttgtgtattttcacatgtcccacagtggagtttctctcacagctggacccatatgggggtggggagggtagcagtctgtgtgtcgcatgttacagactctcactgttccctgaaccgctccgtttctttttctgtattaatgtttctctccattcctgagtggtctt

SEQ ID NO: 570981 - DNA, 558 bp, Homo sapiens
  misc_feature (13)..(13): n is a, c, g, or t
  misc_feature (289)..(289): n is a, c, g, or t
  misc_feature (332)..(332): n is a, c, g, or t
  misc_feature (395)..(395): n is a, c, g, or t
  misc_feature (458)..(458): n is a, c, g, or t
  misc_feature (482)..(482): n is a, c, g, or t
  misc_feature (536)..(536): n is a, c, g, or t
  misc_feature (548)..(548): n is a, c, g, or t
  misc_feature (558)..(558): n is a, c, g, or t
gttcctgaactgntagaactgcacgatagtctggcggggagtattcctctcgccgcagatgagtctatccgtcgtgcttctgacccattgcgtgttattcaagcgggtgcagtcgatcgcgtggttgtgaaagctgcgcccttgggtggccccggcagctgttgcacttatctagccacatcccttatccccttaccgtttctagcgctcttgactcagcagtggggatgagtgccggtattgcggctgcgctgctttgccacacgtagccgcatgcgggttaggaacnaggacatttcttcgtgacggatgtatgcgaagcgcacacgctntgttgatggttctttgccttaccgcatggctaccccggatccggctcggttggtagagttacngtgcacctgcgaagcgggagcagtggtggagggaacgcctggagcgttgttattctcgtgcanttcttctcacctcgttctgctacntcatagaatatgtagtatctgtagatgtcactcattgtgcatggcgcctgtttnacctatgaaccngcccactatn

SEQ ID NO: 570982 - DNA, 202 bp, Homo sapiens
agggagctcactcgggagctcactgcgagtcgatagtcttggggatgagctgggacagcctcagcatcaggaaccttggagtccacagctcagaggtcaagctaaggtcaaaaatcagctcactggccgggcgcagtggctcatacctgtaatcccagctactaggaaggctgaggcagcagaattgcttgaacctaggagg

SEQ ID NO: 570983 - DNA, 554 bp, Homo sapiens
  misc_feature (126)..(126): n is a, c, g, or t
  misc_feature (137)..(137): n is a, c, g, or t
  misc_feature (379)..(380): n is a, c, g, or t
  misc_feature (410)..(411): n is a, c, g, or t
  misc_feature (479)..(479): n is a, c, g, or t
  misc_feature (525)..(525): n is a, c, g, or t
gcaaagttctgcgaacctgtacgaggcgggtgcggggaacgtccctgcacggggggggaaaaaaaacccagcgcaagcgccgagttcctggagacggggagttgcagatcagcttgacagaaaacntttaatttganttcccgcccaagccaaagggaacgaagcgccttctcggggcaccgtcaggcttaagtcactccccgccctaagttctctgtgtgtgtcctgggggaccagcagcactgtgacgaggctaagggccgggttgggattagtcgccccacatggacatcgaggcgctgaaaaaactcaacaagagataaagaaacgtggtcaagaagctggccaagaaggtatgactgcggtttttggccctcanngagtctctgatcaagcagattccacgaaanntccttcggggccgcaggggtttagaataaggcaggaaagttccctctccgctgcttccaacaaacaangcaaaaaggaaagaaaaccagttggggttgggggtgccccgaaaanaacggttgtgggaattttttgggggggga

SEQ ID NO: 570984 - DNA, 189 bp, Homo sapiens
ttagaggttccctctctgtccctcccagagttcaacgcggtttcgtgcctcatcctactgacgtaattaggattataggctcttgccaccacgattcagctaatttttgtattaatattagagactgagtttctctatgttggtcaggctggtctcgaactctccgatctcaggtgatccatccacctc

SEQ ID NO: 570985 - DNA, 166 bp, Homo sapiens
ggaagagcattgacaggtagtagctattactctagaaaaagatttcagtatagtatatggaataaacgcgggctgggtatggtggcgcacgcgtgcaatcccagcactatgggaggctgaggcaggaggattgcttgagtccaggagttcaagaccatcctgggca

SEQ ID NO: 570986 - DNA, 179 bp, Homo sapiens
tgtcagaggagtaccccatcatgattgccatcagtgacagatgtcacttcccctgcctcttcgtgcctggccagccccagatgagctctgtggaacatcacatcttagcaacaatttctctccctcggttctccagcattgcaccaggaatacccttacaggggccccttgcattgaac

SEQ ID NO: 570987 - DNA, 395 bp, Homo sapiens
actagaggaccccctacttatgtgtgacaccctagtcatgtcgacctccaccgtcatgctagaatgccagcggcaggcttactactccaccgccttctcagcagagcacaggaaggctattacactctggtgccatagcagtgcagcgtggaaaagatccacaatatgcaagatcaagacctacgttcatcttcctcttcactgtccttgacctctccctctctccttcccttcttcctccccctctttctcttgctccatatctttctctagacctctgaagtgctgctctccctttgtctctgtcatactgaaatttcgaaacagggtcccactctgacacccaagctggagtgcagtggcgtgatctcgggatcactgcagcctccgtctcc

SEQ ID NO: 570988 - DNA, 182 bp, Homo sapiens
gctccggtggtctcctccagctcagatatctttgtcctttcatgggcatgataacgtgtttcgtaatgcgatgaagatgagggagtcgatctataaaccagacgagctactgaatataagaactctgcagtcttagatgttataacactatatatctgactcgtaagagtggttagcacaag

SEQ ID NO: 570989 - DNA, 730 bp, Homo sapiens
  misc_feature (3)..(3): n is a, c, g, or t
  misc_feature (211)..(211): n is a, c, g, or t
  misc_feature (227)..(227): n is a, c, g, or t
  misc_feature (263)..(263): n is a, c, g, or t
  misc_feature (293)..(295): n is a, c, g, or t
  misc_feature (299)..(299): n is a, c, g, or t
  misc_feature (319)..(320): n is a, c, g, or t
  misc_feature (330)..(330): n is a, c, g, or t
  misc_feature (344)..(344): n is a, c, g, or t
  misc_feature (350)..(350): n is a, c, g, or t
  misc_feature (361)..(361): n is a, c, g, or t
  misc_feature (381)..(381): n is a, c, g, or t
  misc_feature (395)..(396): n is a, c, g, or t
  misc_feature (399)..(399): n is a, c, g, or t
  misc_feature (423)..(423): n is a, c, g, or t
  misc_feature (426)..(426): n is a, c, g, or t
  misc_feature (437)..(437): n is a, c, g, or t
  misc_feature (469)..(469): n is a, c, g, or t
  misc_feature (496)..(496): n is a, c, g, or t
  misc_feature (515)..(515): n is a, c, g, or t
  misc_feature (541)..(541): n is a, c, g, or t
  misc_feature (546)..(546): n is a, c, g, or t
  misc_feature (553)..(553): n is a, c, g, or t
  misc_feature (572)..(572): n is a, c, g, or t
  misc_feature (612)..(612): n is a, c, g, or t
  misc_feature (614)..(614): n is a, c, g, or t
  misc_feature (616)..(616): n is a, c, g, or t
  misc_feature (648)..(648): n is a, c, g, or t
  misc_feature (697)..(697): n is a, c, g, or t
ganatgaggggctgtctggtgtgtaaggaaagttggagggacagaaaacaccgtatcgattcagttccatcatccgctgcagtgacttcggaaaacagaatccagcatcccggtcctcccagcctcaggatgaactggtgaggagttgttctttgtgctgtggccagcgtgaccagggtgggctcctggcaatggccacgagaggtcaggngggggagctggcttantggaaggtgttggggttcggtcggatcatcatcaanactttcttaagtgagttagagactcatcgnnnctcngcccaatagactccgtcctnntagcggctcnggtaatggcccccncggtancagaacccgtngaggttggagtgggcacagncgttataccaacannctnccttctggtagtgggcacagtttnctntgtagacatcntgatctctgtccagggtggtgaactgcttgcngttgtgccatgtaaaggagttacccgnattgacatggtaacgccgncaaaaagcttataatactcgctctcnggttncaggcgnaaactggcgtattctgcanagactttgcgggcggaccagtcctccatggtcaccaggantntntagttgccttggttcgtcagccagtaaatgtnctccaggcccagccagtattcgccgtcaatgtgcccaaacccttgcttntgcgtctcccagtacctgaagaagtaaacagag

SEQ ID NO: 570990 - DNA, 969 bp, Homo sapiens
ggctatggggatggatatgacgactgggaaacggacgaagatgaggaatcgtctgggcgatgaagagggaagaggaggaggaggaaggaggaggaagttctggacatagctgcgtggtgggggtggctagagactctgtgaagaggaagggagacctctccctgcgaggcagaggatggcgtgtgggcgctgcgcctctcctcctccggcatctggggcaaggaacatcccgacgtaggctgatgttttcccaggcactgacggtcccggagagtggtgcatcgcccctggattatgaagggggcgccgtgactttcaccaaacgcagagtcacaggaactcatctacaccttcactggcagcgttcacccggtgcctggtacccttcctgtggctcacgtggtcaggaacactgcctcctgctatagatcctgagaccgctgagaatctgaccccagtcgcaaaacctcagatgcttcacttctgttgtaatgccaggactctcaactggggggacgggatgcctggcctaagcacctggagactggggacccatatcgactggtagccatgctccgcattgttgtggccctgaaatctcactcagtgctgttgctcagtcttattggcctaatgagtgctcttttcgcagctcgtgtcatgattcccgagggatagtctgacctggagtccatgagggctcttccctttttgaccatggacttgggcccaagtctgaaggtctcgtggataagcccgaggcaggatttcttgccagtgtgggaaggactccgaagaccagcatacgctagagcatttgtggctaaaccccaggtccttctgcaagtccttgtgccattctggtttaaacttcccaccacagataagtaatggggcgaaaacaaccgggccagcactaaggggcaggaacaggagaggcgcgctaaaggacacccggggcggcgtgaa

SEQ ID NO: 570991 - DNA, 424 bp, Homo sapiens
  misc_feature (18)..(18): n is a, c, g, or t
  misc_feature (182)..(185): n is a, c, g, or t
  misc_feature (241)..(241): n is a, c, g, or t
  misc_feature (243)..(243): n is a, c, g, or t
ttatctacaaggcctcantgggggacagggacatttggtttcataaaacggtgttggggcaacccgaagaaaaggccctgtactggttttgctctcaattttaagggctggatcggggcacgcttcttttgagcaagacaaagcccaaaattgcttcaaagacacttgtgggcgcacctttnnnnacgcaaggcagtttgcttcacggggctcgtcaaacaacttggacaggggtccacgnanctgttgctgtgtgccagaccccaggccaccacctgtttttcctacagccctccagctaagtatggttttgacatttttaaatgattggaaaaaatcaaaagaatacaattttgtgatgtgaaattatatgaaattcaaagttcagtgccacgaataaagccatgtttattccttaaaaaaa

SEQ ID NO: 570992 - DNA, 445 bp, Homo sapiens
  misc_feature (31)..(31): n is a, c, g, or t
  misc_feature (95)..(95): n is a, c, g, or t
gtttttttaaataatgctatccaattatttncagtagcaattgatttgtgagggcattttgaaccttgtaagacaccaaataatgacgtgttttnattagtcttgtgatactagtatccacctaggtcattagatatttaaaatctgcactttatataggaccaacgatatttaaaaaaatagtgaagtatctttcttacactagtgttgatgatgtgtatatttcttgtttacctgagtatagggctcatagagaaatggttgttctttgggaaagcttaggtgagttgattgtttattaagcaagcttaaaaattagaccctcaggctgggcgagatcgtcacgcctgtaatcccagcactttgggaggttgaggcaggtggatcacgaggtcaagagatcgagacaaccctggccaacatggtgaaaccctgtctctactaa

SEQ ID NO: 570993 - DNA, 879 bp, Homo sapiens
ggtgttgcgctcgtattgtggtgcgcgtccctctgcgcgctgtgctacaccaaagtgggctgtttttgtcgcgcgcgagttttgctgttgcggctcctgatcgttgttctgtcacacgggcggtttttccgcctaagatggtgtggtgtgttccgggggcgtgtggtatcgagcaccgtggcgtcgtgttgtgtccctctgttggtgtgtcttgggttccatgatggtagtgcttgcgtcgcccgcgctcgggtgtaggggttgttcgccattgcagtgtggtccgtgtggtggcgaggtgcgtgttcggcggggcattggtccagtcgtgttggtggccgtgcgagcggtggggcggtaggtggtagatcgctgtgtgtgtcgcgaccacggtgggtggttctttcgtgctagatggttgtgttggtgtgagcggtggcgatcgtctgctattcggtggctgtgggggccgcgctcattgtcccgtgttggtcgggttgttgtgattgcgcgccccgccctcctcggttagttaggcgtggggatcgtgtgcgtcgggttggggttcgcggtgtctcaggggggcgcgccgtttgtggtgtctcttttgattcctctgcgggtttggcaccgcgtcaggtgggtcgcccgcccacacttgtttcgtttgcataggtctagtcattggtctcccgttctgtcgtgttcgctcatcgacctcttgcactattaccttttttgcacactccttctttttctcctctctcgatcattatctaggattttttcttcttgtatcaaccacattcataacataccacaaaaatcaataaaacaataaagaaaacaaataaaaacaaaacaacaataatcaaaaat

SEQ ID NO: 570994 - DNA, 169 bp, Homo sapiens
taaatttgtggagccggggggaattgaacccccgtccgcaagccctccgcaaccagttctacatgcgtagtcgatttatttaggttttaacccatggacttagccaaccgacaggccggaccagagcgattcacgtaatttaaatcgactacgcatgtagaactggttg

SEQ ID NO: 570995 - DNA, 102 bp, Homo sapiens
acttagcgacgagtcagtgtggtccctccgccgaacacccagtgaatgttggtatcataagactgtctctgggctgagaactgaggacgaggctgcctacta

SEQ ID NO: 570996 - DNA, 160 bp, Homo sapiens
cgaatcatgcgggatttttttaaaaaaaaagtttactgctgttgtgtgaaatattggctggaaagggatggttaaaatattaccatgatgtggttgaaatataaaataggatttggagccttattgtgaacaatatttatatatgatgtatgtaagactc

SEQ ID NO: 570997 - DNA, 1117 bp, Homo sapiens
tgggctagttctagtaagcctctacctgcacgacaacacataaaaaaaaaaaaaaaaaaaaaaaaaaaaaaaaaaaaaaaaaaaaaaaaaaaaaaaaaaaaaaaaaaaaaaaaaaaaaaaaaaaaaaaaaaaaaaaaaaaaaaaaagggggggggggggtggagtaataaattaatattttgtggggggaggatggtgtagtatcaaaaaaaagaaggtcagtcttcatttataatataaaaagaggtgagttatttctatatgatagaacagaagcgacggaaacgataaatataagtttatatattttaatggataacagtcgaaaggttggagtggttggatttttaatgaatatgagaaaagaaaaagatataaataatattagtatattagaatcgagaggagcactgtaaaaaaaaaataaacaccacgctgagagatgaatatatagcgcgcgccgagcgacaatatattatttgaattaattgatgatgtagccgcaccacacatcgcacgccgaaagaaaatgtcattttttagtataacaagagagaggggggtgtaagtagcgaccctccttctttcgtacgttaaaacatacatttagtgggggcccaccaccagatgagttgaatactaaaatgaatgataaacacacgaatgggaggagaggagaactataattaacacacacgcaatcaaatgaatgttcccccacgcattatgttcttactaaaacagagacaggacacatggcgcgaccagcatatttgatgggattgatacgaacaggaagtatgtttttcctcacctacgaagtaataagaccccaccccataggtttatgattataatattctagcacagagacaacagtgtttgtatggataccgtataagtgagggccggcccccaatatgttgtggttgaacagaacagaagaatcgcgccgacggagtatgtataagacaggacacattgtggtgagctgcaaaagagagcggggggtattattcaggagcagcgcgtctactaatgtttggtggcacccaccaatgttttggcccgcagctaaaattatgcccccacgaaatgtgtagagggagcgtataca

SEQ ID NO: 570998 - DNA, 850 bp, Homo sapiens
  misc_feature (18)..(18): n is a, c, g, or t
  misc_feature (22)..(22): n is a, c, g, or t
  misc_feature (42)..(42): n is a, c, g, or t
  misc_feature (55)..(55): n is a, c, g, or t
  misc_feature (65)..(65): n is a, c, g, or t
  misc_feature (74)..(74): n is a, c, g, or t
  misc_feature (78)..(78): n is a, c, g, or t
  misc_feature (83)..(83): n is a, c, g, or t
  misc_feature (97)..(97): n is a, c, g, or t
  misc_feature (106)..(106): n is a, c, g, or t
  misc_feature (112)..(112): n is a, c, g, or t
  misc_feature (115)..(115): n is a, c, g, or t
  misc_feature (125)..(125): n is a, c, g, or t
  misc_feature (134)..(134): n is a, c, g, or t
  misc_feature (137)..(137): n is a, c, g, or t
  misc_feature (144)..(144): n is a, c, g, or t
  misc_feature (170)..(170): n is a, c, g, or t
  misc_feature (206)..(206): n is a, c, g, or t
  misc_feature (228)..(228): n is a, c, g, or t
  misc_feature (232)..(232): n is a, c, g, or t
  misc_feature (234)..(234): n is a, c, g, or t
  misc_feature (247)..(247): n is a, c, g, or t
  misc_feature (251)..(251): n is a, c, g, or t
  misc_feature (256)..(256): n is a, c, g, or t
  misc_feature (270)..(270): n is a, c, g, or t
  misc_feature (277)..(277): n is a, c, g, or t
  misc_feature (282)..(282): n is a, c, g, or t
  misc_feature (288)..(288): n is a, c, g, or t
  misc_feature (306)..(306): n is a, c, g, or t
  misc_feature (325)..(325): n is a, c, g, or t
  misc_feature (336)..(337): n is a, c, g, or t
  misc_feature (355)..(355): n is a, c, g, or t
  misc_feature (379)..(379): n is a, c, g, or t
  misc_feature (396)..(396): n is a, c, g, or t
  misc_feature (408)..(408): n is a, c, g, or t
  misc_feature (463)..(463): n is a, c, g, or t
  misc_feature (536)..(536): n is a, c, g, or t
  misc_feature (552)..(552): n is a, c, g, or t
  misc_feature (579)..(579): n is a, c, g, or t
  misc_feature (598)..(598): n is a, c, g, or t
  misc_feature (614)..(614): n is a, c, g, or t
  misc_feature (634)..(634): n is a, c, g, or t
  misc_feature (641)..(641): n is a, c, g, or t
  misc_feature (703)..(703): n is a, c, g, or t
  misc_feature (707)..(707): n is a, c, g, or t
  misc_feature (724)..(724): n is a, c, g, or t
  misc_feature (771)..(771): n is a, c, g, or t
  misc_feature (784)..(784): n is a, c, g, or t
  misc_feature (841)..(841): n is a, c, g, or t
tcaaattaaatacttttnattntcattctagccagggtcctnctaagtggggtcncctgacagtnacatatgcngcgncttcncctaaaccgtggcnctgaatgcnctgccntgngccacaagcngcccagtgntcntcacccncaagggcaggttgctggggtggggcnccctttcctttcatgttttggttcttctcccctgcntttccctttcctaaaggtcccngccncncagcgttcttttngggntttangttgttgggaaaanataaagngaacncaacanccctcctttaagaaaaanagtgaatcccctttttggngggcttccgcnntgggcaaatttggggtcngtgttctcccgtttgaacatagtnttctgttacctgggggngagtggtccggnactgcccgccccgggcggccaaaagcttgacaaacggcagggagatgggggggtngtggcttcggggaatcagctgacagttgggaagattctgcgtccggttggtggggatgatctgccttgttttnctagaagatgggtctnagttggggattctatgaaaaatctctnccatatactgatatatganggctttgacagcgggnatattggtggcatccatcangagggtnactgcttgccctttccgaatcttcactgcccctttgaacacctgctggttattataacaggnagcnaaagtggcaatggccancacctgtggaatagcacagaagttaaacacactctggtttctgagtntcgaaagggaggngatgacatctggggatgtggtgcagtgcattggttataagttcattcaggcactgcncggccaagt

SEQ ID NO: 570999 - DNA, 215 bp, Homo sapiens
  misc_feature (179)..(179): n is a, c, g, or t
gtgtgggaggtgatccaatctgatggagaatcatgtcaaagagatcactagctgtgtggaatgcttcattcattaagacgctgttcccagcatctactttctcataagtgtgacacaagcactggattcttttgagatgacagctatttttaagtgtctgttcggaataccgtactatnttgcatctaaccaaaaaaatacaatgcagtcaacat

SEQ ID NO: 571000 - DNA, 207 bp, Homo sapiens
acccctcaaagaagtcagagaagcctgcatgtctgcacaaacgggtcattctcattcttacaaatctcactgatccaacctggttttaggctaagttagtttaagttttcatggaatactgaaactgcattagaggacaaaggagcctaaaccattgttcccggggttctatcaattaaacctccatgaataaaacatgaaatcaca

SEQ ID NO: 571001 - DNA, 168 bp, Homo sapiens
cgtacgcaaacactgaaacaaagcaaagatgtccacttacaccacttctattcaacataatactgcaagattttggccaaaattaggaaagagaaagaaataaagggcattcgaattgaaaaggaagaagtcaaattgtgcttgtatgcagatgacataatctcatat

SEQ ID NO: 571002 - DNA, 232 bp, Homo sapiens
tgagacaagatcttgctgtcacccacaagggcgtgcagtggcatgatcatggctcacagcacacttgcactcccaggctcccaccccagccccccatgtgactgggaccacaggaacgagcgaccaggcccaatgcattttaaccatgcccacagcaccgccacagcaagtaatctagtctggctccacagccccgcaagccagagaccatcccgctgctgaattccacagg

SEQ ID NO: 571003 - DNA, 205 bp, Homo sapiens
  misc_feature (1)..(1): n is a, c, g, or t
ngatttagagggaggcagcttgattaaatttaaatcaagacaagaaaaactgttactggcagtagaaaataaaaggtaggctaacatctaatatatcagtatttatgtatataaataaaattagtttgttccagactatctggcttagaagtattctttctcaactcatgctgcaagttttcttccactttagaataggaacata

SEQ ID NO: 571004 - DNA, 149 bp, Homo sapiens
  misc_feature (76)..(76): n is a, c, g, or t
tctttttataaactttactcttttgagaatttgcgaaggcaggacccagagcccttggcccaggttaagttatggntttcttcttgttcaagtgcaccaatccaaccaatttctaggccacacggaataggttagggaaaatgcccaaa

SEQ ID NO: 571005 - DNA, 226 bp, Homo sapiens
ctacgactcgggtacgtggaggatctctagagtctgacgaggctccagctttactgatattctggaggtcagcactggtgctcactgtgtcgacggaactatgtacagggaggcatgcaccgatagtgggtgaatacactgtcgaccatggctccagtctataactgatattatggaggtcagcactggtgctcaccgtgtcgaccggaacttgtccaagggcggc

SEQ ID NO: 571006 - DNA, 121 bp, Homo sapiens
gggctggggatgtgcctattatcccatgctactcaaagcaggagagttgcttgaaccctgggctgatgatagcaccactgcactccagcctgggtgacagggcaatgactccgtctcaaac

SEQ ID NO: 571007 - DNA, 373 bp, Homo sapiens
atcagtgaacccgaaggaacaatccaaacgtactttcttctgggaagagtccaacccaacccacttcatcttgccccccaagaagactgcctgggcactactccctggccccggttgtcctgggacttgtccagtccctcaataggcaaaggcagaagcagctactccatgacaacaacaacacacgaatcatcacgggtcattacaaccggcggaccttgttgtcccccagcggcacagagcctggagcccaggctcaacggcaccgacaaatctgatcttgccataacagcattctctttctgctttctcttctcgtcatttcttctctatatcaactaaatatactaataacaaggtttaattctttttt

SEQ ID NO: 571008 - DNA, 410 bp, Homo sapiens
  misc_feature (111)..(111): n is a, c, g, or t
tcccaacctcaagctatccacccacctcagcctcccaaagtgctgggattataggcgtgagccactgcacccagccaatctgatgggaaaaaaaaaaattcgctacggagncttgttctgtcacccaggctggagtgcagtggcgctatctccgctcactgcaagctccacctcccgggttcacgccattctcctgccacaggctcctgagtaaccccttttgcttggttctcattctctctcttggctgccaccatgcaagacctgcctttcgccttctgccttgattgggaggcctccccagccacatggaactgtgagtccattcaacttctttttctttgcaaattacccagcctcgggtctggctttatcagccgcctgactcccgaccactatactgctgtttc

SEQ ID NO: 571009 - DNA, 886 bp, Homo sapiens
gaatcacttgaacctgggaggcggaggtggcagtgagccgagatcgcaccactgcactccagcctgttgacaaagcgagactctgtctcaaaaaaaaaaaaaaacaaaaacaaaacaaaccagctggggagaaaatttgtttttacattgttcgaagcagatttaaaacccagcagtggggccagacgcagttcacgtgacaccgtgtaaactccagcactttgggagaggccgaggcaggagaatcatttttgagcctaggagtttggagaccggcctggacaacacagcaagaccccgcctctacaaaaactacaaaactcagctgagtgtggtgtgaccccttgtggccccagctactcaggaggctgaggtgggaggatcgcttgagtcccaggaagttgaggcaggctgcagtgagcttgatcatgccattgcatttcagccctggggcgacagagtgagaccctgtctcaaaaaaaaaaaaaaaaatgtttgtgcgcaagggccacctctgttaatccccaacattgtggaagcccaaggagcggatggcaaccacacacggttcagaggttctagagaaccagcttgccccgaatggtggtgtagaacccccggtctcgtatgataacagcgttcacacaaaattcggtggctatggtgtggcgccacctgtattccccacaattgtggggagctgaacacggaaaacacttttacccggtaaggcagaagtttcaaagaacaaatcttgtgcagttggccaacctggaacgcgacgccagactgttccacaaataaataacaaaaaactgttttcgggcgcaccagaaattaacatgttgccgcccaggataaaggcaacgtctaacagctgaagagg

SEQ ID NO: 571010 - DNA, 461 bp, Homo sapiens
  misc_feature (460)..(460): n is a, c, g, or t
gcactgatcatcagagaaatgccaatcagaactacaatgagatattatctcaccctagttaaaatggcttttatccaaaagttagataggtgctggtgaggatggggagaaaggagaacccttgtatactgttggtgggaatgtaaattagtacaactactagggagaacagtttggaggttcctcaagaaactaaaaattgagctaccatgtgatccagaaatcccactcctaggtatatacccaaaaggaaaaaaaatcagtttacagaaaagatatctgcacttccatgtttattccagtactattcacagtagccaagatttgaaagtaatctaagtgtccatcagcagatgaattaataaagaaagtgggatcacatgatcccattaaagaaaattttaaaatatagtaatatataccaatggagtactattcagccatgaaaaaaaaccaatgng

SEQ ID NO: 571011 - DNA, 616 bp, Homo sapiens
  misc_feature (275)..(275): n is a, c, g, or t
  misc_feature (277)..(277): n is a, c, g, or t
  misc_feature (605)..(605): n is a, c, g, or t
tttttttgagacaaggtctggctctattgcccaggctagagtgtggtggcacaatctcagctcactgcaaccttcccctcccaggctcaagccatcctcccacctcagcctcctgaggtgctgggactacaggtaagcaccaccacgcctggctaattctgcattttttgtagagatggggttttgccatgttgcccaggctggccctgtactcctgagctcaagtgatccacccgccttggcctcccaaagtgttcggattacaggcgtgagcncngcacctggcccagcattttaaatttgatttcttagcgagcctgcacagcacacttccgtgggtggtctagtgctgtccactgttttacataaagaaattttctttataaaatcctagaaagcaattattattcttcataaaccatactaatgtgtcattaactgttagacattaatacttcatgtatcattttcacttatcagaaatataacagatttttttccaaatcagtactctgtcacagattcagtaataggcaaaggaaactgagttggattaatcttgggagaagtcattctaaaaataatgtgatgtgcgtcgacacggncgcgaattagt

SEQ ID NO: 571012 - DNA, 173 bp, Homo sapiens
gattatcactggcccttgaggtacagtagaatgtccctttgcaatgaggaggagatctgtgctaggcgggacagctggggaagcattagactatctggaacttgtgtgtgcctcctcaggtatggcagtgactcacctggtttcactaaaacaacctgcaacatctcaaaata

SEQ ID NO: 571013 - DNA, 266 bp, Homo sapiens
ttaaaaaaccacccttcccctcccccggggggttttggggaacccccctttcccttcagggtggtttagtgtttccaattttaaaaggtttagggggccccccaaaaaagggaaaaaggcccccaaaggtccccttccctttccggtaaaattaattaaacccccccccccccccaattaaattgaattaaaaaaaccaattgaattaattttggggtgggccgcctttaaaaaaatccaaattaaaattttatgggggccaagga

SEQ ID NO: 571014 - DNA, 460 bp, Homo sapiens
ctactactactaaattatcggccggtcgactaatgctgaaatgagttaaggctttgaggaactgttgggaaggcatgattggttttgaaatgtgagaacatgagatttggaggggccagggacagaatgatgtggtttggctatgtccccattcaaatctcaacttgtatctcccaaaattcccacgtgttgtgtgagggacctaagaggacgtgattgaatcatggagccggtctttcccatgctattctcatgatagtgaataagtctcacgagatctgatgggtttatcaggggtttccacttttgcttcttcctcattttctcttgctgccaccatgtaagaagtgccttttgcctcccgccatgattctgaggcctccccaaccatgtggaactgtaagtccacagtccaaagtctcatctaagacaaggcgtcgacgcggccgcgaatttagta

SEQ ID NO: 571015 - DNA, 170 bp, Homo sapiens
aatactagtactcttgctgtcaagacagaaaatatcatcataagaaaactacaggccgggcatggtagctcatgcctgtaatccaagcactttgggaggccgaggcaggcagatcacttgaggtcaggagttcgagaccagcctggccaagatggtgaaaccctgtctct

SEQ ID NO: 571016 - DNA, 565 bp, Homo sapiens
agcgggcaggcttcgggaggcgagggggcggggggagcagcgccgaggccgccgcctccgcctccgccgccgtagagactagaggggtgggggacggactaagaccccgatgaccgggggagacggaagagccgagaaccccggacgtcagcaggaccaggaagggggagaaggacggctaaggcaggatccaggaggagaccccaagaaacgagacacactgaaagcggacagcggcggcagccattgccagggaacacagctagaacaacccgcacgtgcatcgactggcgagcgtacagggacacagacggccgaggaccgacttgacgagacacagaccgccggaccgcaagagtcgatggataacacagcacagggaaggaacacgggcccgcagattataacaccgaaccgggacgagaaagagaagacacgaacacccaggagaactacggacacatccacgaaccgaatcaccccagcgagcgagacaggcacccaaaccgacccagcaaccgatccacacgagagacacaagataaccagaggcacacggaaatga

SEQ ID NO: 571017 - DNA, 974 bp, Homo sapiens
  misc_feature (1)..(2): n is a, c, g, or t
nnggggtgcgcacataatgtgcatgcgacggactagagcatgtgaacacgaggctcgctcctctctgggttcttcctcacggaatatgtgtggacccggcgttacttagtggcacagcccgacttgcgcagctatagaccatattgagaggtaccgttcttactcagggggttggctcaaatccgcgccgtggctgctctatttcccacgcatagggcctgcttgtctccggaagcctggctcaccatgaggtgttcatgccgggagacatttctggtagaccccgcgcactattaaatgggtgatgagccgctgctaagacatacgcggtagctggttgtccccgccgcggtagtcttcaagaggcgccgccagtcgtcttatcagaattgcggcaagccatgggggcccccgttaggacactagctgtagtgcgaaaaccagagtgggtttatatgacttgagcgcaaggagattattctcgccggcatttcgaacggcccaggttgttacccgcgagcattgttgcttccgcggtgtgggcactatgtcatacaccaacagcaagtgcggggcgcacacaattattcttgttatcgatgtggatctcctgtaggaaacaagccaagaagttcttgaccctctggatacccacaggatacatcaggtcatagatagcacacacgctggaaggcttctttctgaggaacatgcactattttaagttgtctccaggtagatgaacatagtaaacgacagcgcggccaggacatgtcgcataacagcaggtgcatgttgggaccgcatgttgcaattcatggcctgtggtggtttctgccctcaagactagaggagcatgtcgaggcaggaaagtttctggcaacacagataacaagagtaatcgcatgttgctgacacaacaaagacgctttttcggcggccaaaaaacaaaaactttttcaacaaacatgaca

SEQ ID NO: 571018 - DNA, 124 bp, Homo sapiens
acggccgtgtattactgtgcgagagatgggtctgtccttctagcatattgtggtggtgactgctattcgatggactggttcgacccctggggccagggaaccctggtcaccgtctcctcaggga

SEQ ID NO: 571019 - DNA, 97 bp, Homo sapiens
  misc_feature (25)..(25): n is a, c, g, or t
acggccgtgtattactgtaccacanatcggtcgacgggtgataaaataaggttcgacccctggggccagggaaccctggtcaccgtctcctcaggga

SEQ ID NO: 571020 - DNA, 88 bp, Homo sapiens
tgtgcgagacgaccgggggtattgtactggtctcgaaactggttcgacccctggggccagggaaccctggtcaccgtctcctcaggga

SEQ ID NO: 571021 - DNA, 85 bp, Homo sapiens
ggggattattactatggttcggggagttccacggggtggttcgacccctggggccagggaaccctggtcaccgtctcctcaggga

SEQ ID NO: 571022 - DNA, 272 bp, Homo sapiens
atgatgtccactggctggagctgagtatcagcggccctatttagaaaggggctgcgctttcgggtccatcacgggccccgccattccttagggcttatacctggcccacattactcatttcggtcatctgcctggccaacatggggaaaccctgtctctcctaaaaatacaaaaattagctgtacgtggtgacagttgcctgtaatacagttactgtgagcctgaggcagggagaactgcttgagcccggaagtatgtagtcggttaccgag

SEQ ID NO: 571023 - DNA, 475 bp, Homo sapiens
  misc_feature (138)..(138): n is a, c, g, or t
  misc_feature (165)..(165): n is a, c, g, or t
tggcagagcccgtccaagaggtgggggcccatccacgaggttaatacttcaccagaaaaaagcactgtagcaacctgtgttgttgttggtcttcccaatattggtggaaccccaaaacaggacccacaaggatggggnatttcgcccccacccgttgggagaganaccccaccttcagggattatgggtcctccccctggtattagaccccccatgggccccccaattggggtttcccctggttgagggaagccaatagggaatccgcctccgggaatttaacccccctccaccagggattaaaggtccccctcccccaggaaagggtcccccaaaaccttaggaaaatgttgatccatttcagtcactttttcccccgcaatgggttttgtgaaattgtgtaaagggtttgtgagctttttgttccctcattttgcattaaaaaaaggtaataataaatggatagggccattta

SEQ ID NO: 571024 - DNA, 1408 bp, Homo sapiens
tctgagtggtctggctgaagccctggtggcactgcatcttctccttatgactgtgcaaggacgtcctgagtgcaccccacctggccccagaagagcgtgtggcatggctctgtgaccccaactgggctgcaggctgacctgagagctacttgtgagactgtgtgctggactgtgatgtgctccctctggccactgggccatgtgcctcctcgcatgcttgggtggtgcatgtgctcctgtggggcaagatgttgccgcgatgcttgccatcactgcctacatctgtgctctgcactttgagaacagcttcatgacttgcctcccaagtagcccacctgccttggcattgcggatgtgccgtgaggcaggacctgggctggctccgacgagggacagcccccgaccgtgggccacgggatggcggaccgtgccaggcccccatggccaccaggtgaccctgtgcttgcccatacctcttcctagtaataggatatcactgttttccctgtaacttccgttcaaacgcatgccattactcacgggcgacacgcgccgaacctgaacggtggatattgggtctgtaggcccatggttttaaactcatcgactaacactgatacgaggggccgggtccggcatcccttagggagtgttgtccccctgcggaggggggggcgcccaacggccatacacggactgtacgccccggcgatattcttgatatgtgattacttagaggcgtgttggtgtcccccctttacttatgttgataagcatcaggtcatacacatcaagcccctcgtgggccccgttgtgtaccccgcttccgtctatgtcacacacagcgttatagtgttagcacttggcgtcacatcaactagtcgattacgcttttggtgcgacctctctcgttgtaagtggtggcaagcttttacacatctattggtgtgggtctgttggaaacattatatattgtggaagagatatattagctttcacgtggtaaatatagtagagcataaaaaaggggaaaggatgatgatgatatatatcaagtgatgttttaaacgtgtggtgtgaagctggaagcgtgtgatatttttattggcgttgttgtaaacatttgatggataacggagggaagatagatttgaaggaccagatagtgtatcctaggtggcgcgaatgggaattagagatgatggcggatcgagcagctctcgatggcctgtggcagcagatcgccagtctaccgctgggctgcctcccgcgcggctgatcaggcagcagcccgcgttcctgtcgtgccagtgccactccgcacgctatgtcacagtgactgatggagctgtcatcctcggacttcctcgttcgtgccttgatgaccacgcgtgccagatccagagtc

SEQ ID NO: 571025 - DNA, 470 bp, Homo sapiens
cggctgatgggatttagacagcacagagcaagtggttaggtttaaagaacgtcatccaaataccctggcaggaaaccttgtatactgacagttgcaatatgtgtaagaaaagaatgcatccaatggtatcctcaattaattaattaattaatttttgagacagtctctctctgtcgcccaggctggagtgcaatggtgcaatctcagctcactgcaacctccgcctcccgagttcaaatgattctcctgtcgcagcctcatgaagtagctggaattagatgcccgccaccccgcctagctaatttttttgtatttttagtagagatggggttttaccatgttagtcaggctggtctcgaactcctgacctcaggtgatccacccacctcaccttcccaaaatgctgggattacaggcatgagccaccatgcccggccaatgccatctattaaaaaaacaaagaaaaagag

SEQ ID NO: 571026 - DNA, 130 bp, Homo sapiens
  misc_feature (77)..(77): n is a, c, g, or t
ctctagaggatcgcatatggtgctcatccccctggtactcaatttcaaacttcgagccattgatgatctggtaccgncccaggggcgtaaggatgagttcggtcctcaaccacgatgcagtcggggagtt

SEQ ID NO: 571027 - DNA, 106 bp, Homo sapiens
actccgggtattcctgtgagagcatccctgggggccacctcagctgactgcgattggttggacatgtgcaccacgtcagcaagaagctttgacgtgcactgccaca

SEQ ID NO: 571028 - DNA, 355 bp, Homo sapiens
atgtagacatgagcttgagatttataatctctaaacatactaaagtgaaatcatagcttacctctatagcagtatcagttatttagacacagaatgggattttatagtgaattgctttaaggttggggagtcggagccaggaatcttttcattaattataaggaaaggttgaaacctctgagtacctttatagggggttctcttactatttggctcttgcgtagaactggttaaccccaggttgctcagagaactgatattggagccacatacaagcaattcacatcatatttttcctttgaaggataatcattggatgggaagaaggacaaggcccgttgggttcgggcttggc

SEQ ID NO: 571029 - DNA, 236 bp, Homo sapiens
ggcgaggagtatagagcggaaggcaagagagtgagccacggtatggttagtagaattttccagatgttgtgcttggaatggtggagtgttcggttcagtctcctcttgtttatcgagtatttatccctgtgcttcagtcggtacagcccgaattatcggtgacccatcactacatggagatgtttggtcgtggctggaattcttcctcacgtcaattttcagtactcttcgggcat

SEQ ID NO: 571030 - DNA, 552 bp, Homo sapiens
  misc_feature (10)..(10): n is a, c, g, or t
tggtacgtgngaacttccctaccgttaccgcctaatttatcatcctatggctctctcaccgagcggcccgattctgcaggacgccatactctttcacatatcatttcttcgtgccggcaatgccggatctgcattcgcggggaccacacactttaccaccgattcagagactattctcgaacctcaccactaggggtttcccataacccaccaccccacatggcgaataccaaccacagagattggtgggcaaatatcccacaaacacacggctgtctcttcttttctcctctgaaccttcacattgctctctctcccgcaacttctgttttagaataataccaccccgccccacttggctcacgccctatcgcacaccttgggaagctaacgcgccgattaccaagtcagtagattgagaccatccggctacatcgtgaaccccttttgatggaaccaccggccggggggaccgggccctatggaggaggccgagaagcgaccggggccggttttgccgggattccccctccatccccggggcaggcaacc

SEQ ID NO: 571031 - DNA, 320 bp, Homo sapiens
ggtgcgtgctctagcctctcagttacagctctttggaggaggatcaaaatcagatgtgatgtgggatgggtaataggtgagagtagaaacccttccctccaggagtccccagctgactcccacagaaacccacctaccataagatgtcttcaggtggccttgtccactgatgggggtcaggcatcttatatcaagggtgctctgaacatatattattttttaaaaaaactatgtttgtgaattttgcgtatactggcaagcttttgaaaatgtattacattttgtattgtttaccactgatttatttacacgatatttac

SEQ ID NO: 571032 - DNA, 1027 bp, Homo sapiens
  misc_feature (26)..(26): n is a, c, g, or t
  misc_feature (61)..(61): n is a, c, g, or t
  misc_feature (86)..(86): n is a, c, g, or t
  misc_feature (100)..(100): n is a, c, g, or t
  misc_feature (106)..(106): n is a, c, g, or t
  misc_feature (132)..(132): n is a, c, g, or t
  misc_feature (142)..(142): n is a, c, g, or t
  misc_feature (150)..(150): n is a, c, g, or t
  misc_feature (152)..(153): n is a, c, g, or t
  misc_feature (157)..(157): n is a, c, g, or t
  misc_feature (160)..(160): n is a, c, g, or t
  misc_feature (168)..(168): n is a, c, g, or t
  misc_feature (186)..(186): n is a, c, g, or t
  misc_feature (190)..(190): n is a, c, g, or t
  misc_feature (208)..(208): n is a, c, g, or t
  misc_feature (211)..(211): n is a, c, g, or t
  misc_feature (216)..(216): n is a, c, g, or t
  misc_feature (225)..(225): n is a, c, g, or t
  misc_feature (227)..(227): n is a, c, g, or t
  misc_feature (230)..(230): n is a, c, g, or t
  misc_feature (243)..(243): n is a, c, g, or t
  misc_feature (251)..(251): n is a, c, g, or t
  misc_feature (258)..(259): n is a, c, g, or t
  misc_feature (272)..(273): n is a, c, g, or t
  misc_feature (284)..(284): n is a, c, g, or t
  misc_feature (311)..(311): n is a, c, g, or t
  misc_feature (340)..(340): n is a, c, g, or t
  misc_feature (352)..(352): n is a, c, g, or t
  misc_feature (356)..(356): n is a, c, g, or t
  misc_feature (428)..(428): n is a, c, g, or t
  misc_feature (432)..(432): n is a, c, g, or t
  misc_feature (533)..(533): n is a, c, g, or t
  misc_feature (543)..(543): n is a, c, g, or t
  misc_feature (547)..(547): n is a, c, g, or t
  misc_feature (552)..(552): n is a, c, g, or t
  misc_feature (556)..(556): n is a, c, g, or t
  misc_feature (643)..(643): n is a, c, g, or t
  misc_feature (690)..(690): n is a, c, g, or t
  misc_feature (787)..(787): n is a, c, g, or t
  misc_feature (821)..(821): n is a, c, g, or t
  misc_feature (833)..(833): n is a, c, g, or t
  misc_feature (890)..(890): n is a, c, g, or t
  misc_feature (929)..(929): n is a, c, g, or t
  misc_feature (942)..(942): n is a, c, g, or t
  misc_feature (1026)..(1026): n is a, c, g, or t
gaaaaacatttacactttcccatgtnacagcacaatatttcaatggaatatttcttgccanaaataatatcttgctgatttgtagnaagtcaaacaacantctatntccttcaaggtaaagaaaaatgacanagtcaatcantgtctaananncccnaanccagacanaaacccatggcttcattncccncatcctgtatagtccatnacnaaatnatttccatnancanttagcacccattnataaagangccttcnnaacattgtcttgnncagccggaatncagcagacaaattaacacagtcgacanatatcaagcatacatttttgccacatatnaatctgtatggnaacnacactttatggtatagggttctgactagcctttattacccataagtctgtcttcaaataatttttaccagtnatcnggaaattttgacaatttaaaatgattcccatttttatgtctgcctcaaaaactaatacaaaaaataatttgactaaagtcaaaatttcaaataagtccacnggcagacganaatnaagcnaaanattacaatagattcctcatcttctacagtagtcggtttcaaacgtgtacaaagtaaaccctatactatgagaagatgaaatcatctnagaagtcagtttttaagatcagtcttaaagatatttcagaacatacnagaatatgatctaattattctttcagttgtttacagaaaaatgaaaccacagaattattcctgttacctgggttgaagatcctaatagctaggtgtnaatttggataaggtacagtaattcgaaataagtngtgcatgaagtntttaatgtctggtttctctataaagcataaatagattttaaataccttatatctgtnacccagaatgtcaaattacagcatgtattgacagtcgcngtctattgcaganaggcaatacttggcctgctatgaaggacaataaagaaaaacaaacttttttttttttcttgagaaaaagagtttaaatagaaana

SEQ ID NO: 571033 - DNA, 1038 bp, Homo sapiens
cggcgcgatcggagtatcattgaacgtcaggtgttctctgatcagagcccgggaagaagctgtgagatctgtttcggggacttagaccgtcgagctccgagccatggatgcgcacgctgtgctgggcccagagggtcacggttaggatctttctagcggacaatacctgatggatggatgttgagtgtaaccagaggtagctgagagtcgccaatgagtttgaagccattctaatatactagagctgaacaaattaccatgcgtggtctctcattgcatttgtgccgccctccacgatggatgtaatgcattgacctgtcatgccagagtgtaagagaacccggtaaggtgctgtcttgagaaatgagattctcttctctggacagcgatgcaagatgtcgtgtgctcgacgccggagctgagaaggacatgaacgctccctgggagaaagagacatgcggatatcctggggagagatcttgtttgagcaatcaacctggaaagactattaggctaggcctgcacacccatgttaagccagacgaggttccaaggatggaggctggtttctggatggatagactgttgatgttcgtgagcgtgtaccatgaatgctttctctacgagaagattattttcgttaggttgttcttggtcccattactaaatgtcgcagctttaatgggtcgaatggcttgctatggaatatccgaaaagacctagggcacgtcgaatgtctgggtggatccttctgggtcggcgtgaggtatagccgtactaagaggcactcagttggagatcacgattgagttgtattgctgcacgtttgttgcagcatagcagtggttgttcccaataacagcattccgtgctttgcctgaagttgcctcggagtagttttaacagttaaggctaccttctctagggtggttgaagccgggacccctgtagactgtgtaccctggggcagggaatctgggccccttttaaaccggtgggggcgctctttcggtttggaaaaagacctaacggttgaac

SEQ ID NO: 571034 - DNA, 130 bp, Homo sapiens
gaccccacgtgtatacctcttccctcctaggctataaagtatcagtggtagagaagagcttattcggacctgttactaccccacagctgtgtactatacttgtatcaccgcaaatactaatatacaacac

SEQ ID NO: 571035 - DNA, 145 bp, Homo sapiens
cacaatcacaaagtgctgggattacaggcgtaacgattccgttgcccggcccattgtgtgtttttattaagtcaaatttatcaatctttatctgttggattatgaactggtggatgcttatacgcattttgctgctattataatg

SEQ ID NO: 571036 - DNA, 104 bp, Homo sapiens
  misc_feature (34)..(34): n is a, c, g, or t
  misc_feature (50)..(50): n is a, c, g, or t
ggaagtaggcattataaatgcttcacagttaaancttgacccagtaaacncttgtgtgtttagggagtatacaaaagaaaactgttcttttcctttttctttaa

SEQ ID NO: 571037 - DNA, 126 bp, Homo sapiens
tgtccgggtccaacatcgaggtcgtaaaccctatggtggatatgaactctagaaataggatggcgctgtaatccctagggtaactggtccggtgggtcacgttatgggatcgatggagtatagtag

SEQ ID NO: 571038 - DNA, 178 bp, Homo sapiens
atcaggatgaaaccctggtagcatgattaaatcgaagcagatgtctttaacaatgaagaatatactgtcccgggctcctatcttgttggctgatggtaacctccggggattctctctctgttacagagggccccccccacaggaaacttcgcagagatgcaacccgggctgtgtgggg

SEQ ID NO: 571039 - DNA, 349 bp, Homo sapiens
  misc_feature (42)..(42): n is a, c, g, or t
  misc_feature (46)..(46): n is a, c, g, or t
  misc_feature (65)..(65): n is a, c, g, or t
gggtctgtgatggcggtgaacagcagtgaaggatggtgagcnaaanagccttcaagccaaaacangcgtggaccagaagagtgtgcagttgcaagatttaatagagtgaaaacagagcttccatacagtgggaggggaaccaaagggggtggcccactcccgcctcatatgcctggggtttatatcccaatcattgtccctcctcctgtgctctcagatgatagatgatttgactatttctttacctcctgcttttaacctaattggtattttaatgagccctctttactgcctgattggtcaaggtgtgagctgagttacaagcccggtgtttaaaggtgggtgcgat

SEQ ID NO: 571040 - DNA, 168 bp, Homo sapiens
tcagacagtataaaattagtatccctacaaagacaatgttaattattttaatccataaacatgggatatctttccatgatttttatcaatgacttctggttttcagaatctactgggcaaacgatatgaagacatgccatctaaagaacattgaaagtgaatatatat

SEQ ID NO: 571041 - DNA, 199 bp, Homo sapiens
agggcctgcctgcccccgttttgttggggtttccacgggggggggtgggggacgcccccttttccttttccctgatttttcccccaccccttaggaggaacggtccccccgggggtaatggttgccccctggggttttttttagaatggccctaacgggacccatttgcccaaataaacgaacatcccatgtttggtga

SEQ ID NO: 571042 - DNA, 631 bp, Homo sapiens
  misc_feature (42)..(42): n is a, c, g, or t
  misc_feature (45)..(45): n is a, c, g, or t
  misc_feature (49)..(50): n is a, c, g, or t
  misc_feature (52)..(52): n is a, c, g, or t
  misc_feature (57)..(57): n is a, c, g, or t
  misc_feature (301)..(301): n is a, c, g, or t
  misc_feature (335)..(335): n is a, c, g, or t
  misc_feature (380)..(380): n is a, c, g, or t
  misc_feature (431)..(431): n is a, c, g, or t
  misc_feature (519)..(520): n is a, c, g, or t
  misc_feature (534)..(534): n is a, c, g, or t
  misc_feature (539)..(539): n is a, c, g, or t
  misc_feature (542)..(542): n is a, c, g, or t
  misc_feature (545)..(546): n is a, c, g, or t
  misc_feature (558)..(558): n is a, c, g, or t
tcttaatagaggaagttgaagattcctgggggaatagcattnganagcnnanagggngagggtgctgattactagctaaaagacttagaaattttgcaaacatggactcatgatagttttgggtgatgagtcttcttgtaggatagcttgaaagaggaggaggaaactagaggccctggtaatataaggtaacattaagtatcctgatgtcagtaatggagaagagtgaaagactatgattgattgggtgactgtgtgggcagaggatgtgaggaaaaaaggacatcttgtgtgtgtgtgngcacacatttttagttgtgtatcttctacttgtnttctcccccaccttgtacctgtactttctcaagcccaaaaatganaatttacctgctaccaaccacatcatcttgtgcatctgtgtagctcagttnttatttctttagatctgtggtcctccgtggaaagagagccactaccccaagacacatctaatataatacacagggcgcttacgtggtnngaaaagaagagatnagccnggngcnnggccactctgtnatttcattgtaatgttttaacgggtaccccctgtaaattagtgtatgaaagggcttttgtctgttgtaaagca

SEQ ID NO: 571043 - DNA, 335 bp, Homo sapiens
  misc_feature (9)..(9): n is a, c, g, or t
  misc_feature (21)..(21): n is a, c, g, or t
  misc_feature (27)..(27): n is a, c, g, or t
  misc_feature (35)..(35): n is a, c, g, or t
  misc_feature (38)..(38): n is a, c, g, or t
  misc_feature (44)..(44): n is a, c, g, or t
  misc_feature (98)..(98): n is a, c, g, or t
gatattganagacggaaagangttganagcatctngangaaaanctcagattggctatgggattggccaagtcggccggaaaatattccccccaaggngttcctctttaaacacccgaagcgcacggccaccctcagcatgaggaacacgagcgtcatgaagaaagggggcatattctctgcagaatttctgaaagttttccttccatctctgctgctctctcatttgctggccatcggattggggatctatattggaaggcgtctgacaacctccaccagcaccttttgatgaagaactggagtctgacttggttcgttagtgggattacttct

SEQ ID NO: 571044 - DNA, 665 bp, Homo sapiens
gcaaatatcgactctattagaatactcctttaatcacaccatatcccttcagtatcgcatgggagtgcttgacagttgtacttgcgctatggagacatatcagtatacagtcatgctacgctgaatggtaagatgtgccatcatattcgatggtgatcctcagatcgggcgtagacgagcaatccgtcgagttattgcctgactctgatgatacattgagcatctaggtaaggtgttggacccctagtggctcttgggagtgcttatattctgtggatgtatagaatgcaggtggacactagctttgaccgttcggtacacatcgatgcagtagaagggcatcatgtgggtctagtgcaatagaacgatcgattgagcgcaacacttctagacttgcgacccgaagggattgacaccgaatctcaattaaggtctcaagaaaatctagccctctatccacacatgtactgtgatcacaaggatcttgttcccgatttcgagcaacttctatgcacagtccaattccattgagccttctttgagagaagaaggatgcatctcaggaaggcaagcagcagtaatctgcagtccatagaagagcgtgagaaactggcacgggctctacgaggtgcattctctgtgccttgctgtagcaccagctgccc

SEQ ID NO: 571045 - DNA, 327 bp, Homo sapiens
ttcgtgctggcttgctgccggttcgtgtctgcttgccagtttgtatcagccacgggtcttcgtcattcctcaccaggaacttcaccctgtagtgggccgtgtcctggtcggggatggttgcagcccatttctgttggttggcagtgggtatccttgccgacgcgcaggcgatggagctggcctctggtctggtacagcacgccgtgattggccctcagtgtgagataggtagcccctctgggagaatgtaggcagagagcagagataacctgatttgtccgtgggactctagaattgggtaccgagactacgaaattacataatcat

SEQ ID NO: 571046 - DNA, 1421 bp, Homo sapiens
gcgtgtggtcgttgtctcctctgtccctcgtgcgtcagaggtgggtggtggtgagaggacctctttttataaggagtgtgctgctcgtttttgtcgcggttatttctccgcgcagtttgctcggcttgttgggcgtctgatgagtgtgaagaaacgggtggcccctctgttttccggggttttgtgcccccccgcgcccccccccccgcggggggtcaccccccgaggtttttccggggggggtgccctccccccccctgtgggtggtgagagccctctctcctggctccccgggtggggtccccaccccgcggtgttgttcttttttgtgacagggacccacccccgcacacgggggggtgtgcccccttatggggcaaccgtttggtgtcttccccccccagcgtgtggtgtgttggaggagagctcccccctccctgtcggtgtggttttatttgtggggggctaccacctcgggccctccttgttgtggctccactccctgggggggggtgggctcgttcttctcgttgtggccacaccttgtgtggctggggtgctcccctcgttggcccgcccgctgctgtatcagtgggcctttttgtgtgggtgtatattgtgtggcgcgccccgtttccgacgccgcacacgccatcggcgccagcaccccaaaaagttgtggggttccctccctcttgttttgtgcccaccgtgcgaggtgcctcctcgctcagcaccccccagggggggcgccccccttgtatagagtggaatagcgccccccactctctctcttgttgttgtgtgggcgcccccacgcagcgcacctcactgggcgcattttgatgtggtgttctctttggggggacctctctcctgtggagagggaagagtttattatgagactgtcgcgcacctgtgggcggtcgcacactcttttcttgtgggccaccggcgcgctttgtcgcctctctcttgtgtgggagaatgttcgctcgggagatattgtgggcctctctccctctatgagaggggaatatctccctcacactttttatgtctcccgcgtttctccctcgtgagaaagaagattctcacaatatacgcacccctgggctcccctctctccacttattttcgtccccataccacctttgtgcggccacattttttcttaataatattgtttttctccgccctccgcgaagatgggagtctccccccggcagaggagaacccccttttttgtttttgtggagaaccccgcaccgtgttctaccctttgtggggcagcggcggggaacacatatttcctttggtgaagatttgttttgtgataaaccggtcccccttttttctccccccccccctgttttttggtgaaaacccggtttataagggggtttttggggcccccaata

SEQ ID NO: 571047 - DNA, 291 bp, Homo sapiens
gggcccgaggaaaagttagggtttgcccttttcaggtcaactccccttccaaatagttatatccaaaactgtttttcggtctcccctcccttgtcccccctattaaaataaaaacagggattgattaatgtcccgctcctgaaaacaagaaaaatttgtccaaaaatattttttatgaaaatgatttgtaatcggtagacttattacctgggaaatgtcttaatgtaaaatcccatcctttgggttgcgggttttttgttttctccaaataaatttgggctttaaagttca

SEQ ID NO: 571048 - DNA, 526 bp, Homo sapiens
tttcttgccccgactcagggggtttctaaaaaaacaggcagtttgtaaggagtatagacgcactgacttgtgtgtggcctctgtctagaaaaggtcagtgtcatctgagggaatctagcagaaggtgggccgtatgcatgtgagtcatcgagtctgtaattgggaatggtgtggaagtggaggctgaatctggattactgaaaaccgtttctgcattatacatgttggatttatcacatgcagtggctttcaggttgactcttttcaccctgcagaattacagtgtatatatatcgttgttgtatatctccagtgcatcatcagggcaaaagaacataaattacagaattagacatggcttttagcaaagtgtgtgcatttttgtcccaaaggaaacagaaaggtcacccttggagaaggaattgccattctgtcctgagatagccctgaagctctatgtagaagactgagaatcaagttgaaggcattgtctttctcctattgtgaataactaacttttgcattg

SEQ ID NO: 571049 - DNA, 641 bp, Homo sapiens
  misc_feature (430)..(430): n is a, c, g, or t
  misc_feature (476)..(476): n is a, c, g, or t
  misc_feature (512)..(512): n is a, c, g, or t
  misc_feature (515)..(515): n is a, c, g, or t
  misc_feature (594)..(594): n is a, c, g, or t
cacttaggagatttcaacttaacttgaccgctctgaccaaaaaaaaaaaaaaaaaaaaaaaaaaaaaatttgggggcgcccggggcagcccctgaagaagaaggtttcgaaaacatcttgccgtgtgggggcgcgcgggcgcccaaggtaggtgcacgtggaacacatggctgcaaaacgtgggttccctataaggagaaaccctgggcgcccatcggcaacgatacgtgacgttggggggtcttctctctaccccccaagcataataaacagcgcgccgccggggaggaacaagcgcgaggagcggtttcgcggcaaccacacatctcaccagaagatgaaggagagaattatcgcgaagacgaggcccaccactatccgagggagggctattccctataccaccagcgggaggcgagacttccctccnaagggcgcaggaagctaccgcccgtataactatcccacaaatattnaagcagccgcccgccgcgcccgctgccgtgggtatnaantacgacatatacgacggtagccaactcaaccgaaccgacctaaggctatgaccaactaccgaaccgaacgctacaacanagacagaacgaggccacacaaagaaaccggaaacgtcagcacttgag

SEQ ID NO: 571050 - DNA, 604 bp, Homo sapiens
cctgaggtttggctgatcgcttaagacatattaattgaaggaagtcggtcacaaaagaccattcgttgaatgattccatttatatgaaatgtccagtataggcaaatgtatggagacagagagtagattagttgtttcacaggcccgaggagggtgagcggaaatagggagtgactgctaatgggtataggattacttttgggagtgatgaaaatgttctaaagttatactatggtgagagttgcacaaccctgtgaatataaatatactaaaaaaatgaaatcagtgaattggatgatgtataaattatacctgtttttttctgtttgttttttttggagacggagtctcgctcttgtcacccaggctggagttcagggaacaatcttggctcactgcaacccccgcctcccgggttcaagtgattctcatacctcaaacacacagacccaccaaccacacctggctaattttggtggtctagtagagacagggtttcaccatgctggccaggctggtctcgaactcctgacctcatgatccacctgcctcaggctcccaaagtgctgggattacaggcctgagccactgcacctggcctcct

SEQ ID NO: 571051 - DNA, 120 bp, Homo sapiens
gtatttaagactttactttattcagcaaaatcatttatttacacaatggggaatgctggtttgattttgttcccgtcccttaggctttttgaacagagacaatactgaactgtatatata

SEQ ID NO: 571052 - DNA, 870 bp, Homo sapiens
  misc_feature (6)..(6): n is a, c, g, or t
  misc_feature (163)..(163): n is a, c, g, or t
  misc_feature (188)..(188): n is a, c, g, or t
  misc_feature (203)..(203): n is a, c, g, or t
  misc_feature (224)..(224): n is a, c, g, or t
  misc_feature (226)..(226): n is a, c, g, or t
  misc_feature (229)..(229): n is a, c, g, or t
  misc_feature (233)..(233): n is a, c, g, or t
  misc_feature (237)..(237): n is a, c, g, or t
  misc_feature (239)..(239): n is a, c, g, or t
  misc_feature (242)..(242): n is a, c, g, or t
  misc_feature (257)..(257): n is a, c, g, or t
  misc_feature (262)..(262): n is a, c, g, or t
  misc_feature (270)..(270): n is a, c, g, or t
  misc_feature (311)..(312): n is a, c, g, or t
  misc_feature (339)..(339): n is a, c, g, or t
  misc_feature (341)..(341): n is a, c, g, or t
  misc_feature (348)..(348): n is a, c, g, or t
  misc_feature (350)..(350): n is a, c, g, or t
  misc_feature (374)..(374): n is a, c, g, or t
  misc_feature (378)..(378): n is a, c, g, or t
  misc_feature (383)..(383): n is a, c, g, or t
  misc_feature (386)..(386): n is a, c, g, or t
  misc_feature (389)..(389): n is a, c, g, or t
  misc_feature (392)..(392): n is a, c, g, or t
  misc_feature (397)..(397): n is a, c, g, or t
  misc_feature (399)..(399): n is a, c, g, or t
  misc_feature (406)..(406): n is a, c, g, or t
  misc_feature (416)..(416): n is a, c, g, or t
  misc_feature (432)..(432): n is a, c, g, or t
  misc_feature (434)..(434): n is a, c, g, or t
  misc_feature (447)..(447): n is a, c, g, or t
  misc_feature (457)..(457): n is a, c, g, or t
  misc_feature (463)..(463): n is a, c, g, or t
  misc_feature (465)..(465): n is a, c, g, or t
  misc_feature (486)..(486): n is a, c, g, or t
  misc_feature (488)..(488): n is a, c, g, or t
  misc_feature (500)..(500): n is a, c, g, or t
  misc_feature (516)..(516): n is a, c, g, or t
  misc_feature (522)..(522): n is a, c, g, or t
  misc_feature (529)..(529): n is a, c, g, or t
  misc_feature (571)..(571): n is a, c, g, or t
  misc_feature (806)..(806): n is a, c, g, or t
  misc_feature (842)..(842): n is a, c, g, or t
cacgcnctggggtccggcgccctggttcctgcttctgccgctgccgccgccggatcccagtggcccggcgtgctcggctcccacaggcctgcagccagcatcgcaccgaaccttcggggggccgcggctggagcgctcggccggcgtgggagcgccaaggccncagatgcaatcttcttaccgcgaanaagccaggggaatangtagccacatcttgtttgcananaanaaangaancnaangcagtatctgcaaanccagnagtctgantcagtacttttctcactcatgcatacaaagcagctaaaaannacacaacttatttaccatacccctganantgcactnancactttataaacttaaactctgtnaatnctcangancanctnatganantctccanaaaaagcaanagtaatggagtacatnancactggaagtganaataaaaaanaaattnanttattaattaaacaattaaananatctaaagtaanaaacattatggaaaanctttangcaaatnaaaaaccagcagtttatgaacccagtctaatgaccatgtgtnaagacagtaatcaaaacgatgagcgttctaagtctctgctgcttagtggccaagaggtaccatggttgtcatcagtcagatacggaactgtggaggatttgcttgcttttgcaaaccatatatccaacactgcaaagcatctttatggacaacgaccacaggaatctggaattttattaaacatggtcatcactccccaaaatggacgttaccaaatagattccgatgttctccngatcccctggaagctgacttacaggaatattggttntgattttattcctcggggcgcctttgga

SEQ ID NO: 571053 - DNA, 367 bp, Homo sapiens
  misc_feature (294)..(294): n is a, c, g, or t
  misc_feature (308)..(308): n is a, c, g, or t
  misc_feature (363)..(363): n is a, c, g, or t
aactttcccacatcgtcctgtctcctgagtcctccaagtctccaggaagttccaaactttcccacattttcctgtcttctgagtcctccaaactgttccaacctctctgcctattacccagttccaaagttgcttacacattttcgggtatcttttcaacaacaccccattctactggtaccaatttactcttttagtcagttttcatgctgctgataaagacatacttgaggactggggcaatttacagaaggaaagaggttcattgggactttaacagttccacgttttctnggggtggggggggnctcacaatcatgggcagaagggcaagggaggggagccaagttcatgtcttaacantggg

SEQ ID NO: 571054 - DNA, 188 bp, Homo sapiens
acttagaaatggttaaaggtagccgtggtacggtgaggccgggtactgctggctagcctgtgatggctaggcgcgcgaagccggggtataaagaagtgcaggcgagggacgggcaccatgtcaccgccagcttgcggcaggatctgcgtacagttggcccgggaatgcgcaggcaggtggtgacccct

SEQ ID NO: 571055 - DNA, 164 bp, Homo sapiens
tcgcgcttggcggatatttgagctcaggagtcaagacaacctgggaaacacagtgagaccctgtctcaacaacaacaaaaaaagtattttattttatttatttaatttatttttgagacagagttttgctcggtcacccaggctagagtgcagtggtgcaatca

SEQ ID NO: 571056 - DNA, 1009 bp, Homo sapiens
  misc_feature (5)..(5): n is a, c, g, or t
  misc_feature (155)..(155): n is a, c, g, or t
  misc_feature (166)..(166): n is a, c, g, or t
  misc_feature (429)..(429): n is a, c, g, or t
  misc_feature (442)..(442): n is a, c, g, or t
  misc_feature (455)..(455): n is a, c, g, or t
  misc_feature (470)..(470): n is a, c, g, or t
  misc_feature (481)..(481): n is a, c, g, or t
  misc_feature (484)..(484): n is a, c, g, or t
  misc_feature (496)..(496): n is a, c, g, or t
  misc_feature (507)..(507): n is a, c, g, or t
  misc_feature (516)..(516): n is a, c, g, or t
  misc_feature (521)..(523): n is a, c, g, or t
  misc_feature (531)..(531): n is a, c, g, or t
  misc_feature (534)..(534): n is a, c, g, or t
  misc_feature (539)..(539): n is a, c, g, or t
  misc_feature (564)..(564): n is a, c, g, or t
  misc_feature (568)..(569): n is a, c, g, or t
  misc_feature (581)..(581): n is a, c, g, or t
  misc_feature (585)..(587): n is a, c, g, or t
  misc_feature (599)..(599): n is a, c, g, or t
  misc_feature (602)..(602): n is a, c, g, or t
  misc_feature (613)..(613): n is a, c, g, or t
  misc_feature (617)..(618): n is a, c, g, or t
  misc_feature (622)..(622): n is a, c, g, or t
  misc_feature (635)..(635): n is a, c, g, or t
  misc_feature (641)..(641): n is a, c, g, or t
  misc_feature (646)..(646): n is a, c, g, or t
  misc_feature (648)..(648): n is a, c, g, or t
  misc_feature (657)..(657): n is a, c, g, or t
  misc_feature (661)..(661): n is a, c, g, or t
caaanaataatttacaggcacgaacaggccaatgtggatcttttaaaaccaaaacagattggagggattggatggagatgccaaggaataacagatgtgggaaagatattaatagaaaagtttcagctgaagaatctttctgaacttcagaccantagctttcacnagttagtttctcagagacattcaaccccccaaaataaaaatgctgtatcagtgcactctaatctgaactctgaggctgtaatgaaatcattaactcaaacatctgcaactgtggaagtaggcagatggaataacaacaaaaagagccccataaaagcaagtgacttgacaaagtttggtgattgtggtggtagtgatgatgaagaagagtccacagttataagtgtcagtgaagacatgaacagtgaagggaatgtagatttngaatgtgataccnaactatacacgtntgcgcccaacacatntcagggtaaanatnattctgtcttantagttctcagnagtgatganagccnnncagtctgnaancagtnagaatgaagaggaactttatgtttngttnnaaatagtggccnaagnnngtcattaagtgncgncacaggaagtntgtnntgtnacaatgcattgtntgtaantgacncnactcctggnatgngtgctgatacacacaattcttaaccttggaacgaggaaagaccaggcaacgtgaggttgccatcgacggaacgaacaccgacgacggacacgaggatgaaagacaagtgacacgaagaattcaatcagaccatgaccgaacatgaaagatgagttctagtgatgaagaagacttcctaaataggcagaaaggcttaacacttctgaagttgaccaagcagcagcaatagacccctggtctgagtatcaagcagttgggtggttttgcactaattaactttccactggagggactaaacgtacaggtctaacaagagaaccccttaacacagatcacggagaaacaaga

SEQ ID NO: 571057 - DNA, 725 bp, Homo sapiens
  misc_feature (5)..(5): n is a, c, g, or t
  misc_feature (155)..(155): n is a, c, g, or t
  misc_feature (166)..(166): n is a, c, g, or t
  misc_feature (429)..(429): n is a, c, g, or t
  misc_feature (442)..(442): n is a, c, g, or t
  misc_feature (455)..(455): n is a, c, g, or t
  misc_feature (470)..(470): n is a, c, g, or t
  misc_feature (481)..(481): n is a, c, g, or t
  misc_feature (484)..(484): n is a, c, g, or t
  misc_feature (496)..(496): n is a, c, g, or t
  misc_feature (507)..(507): n is a, c, g, or t
  misc_feature (516)..(516): n is a, c, g, or t
  misc_feature (521)..(523): n is a, c, g, or t
  misc_feature (531)..(531): n is a, c, g, or t
  misc_feature (534)..(534): n is a, c, g, or t
  misc_feature (539)..(539): n is a, c, g, or t
  misc_feature (564)..(564): n is a, c, g, or t
  misc_feature (568)..(569): n is a, c, g, or t
  misc_feature (581)..(581): n is a, c, g, or t
  misc_feature (585)..(587): n is a, c, g, or t
  misc_feature (599)..(599): n is a, c, g, or t
  misc_feature (602)..(602): n is a, c, g, or t
  misc_feature (613)..(613): n is a, c, g, or t
  misc_feature (617)..(618): n is a, c, g, or t
  misc_feature (622)..(622): n is a, c, g, or t
  misc_feature (635)..(635): n is a, c, g, or t
  misc_feature (641)..(641): n is a, c, g, or t
  misc_feature (646)..(646): n is a, c, g, or t
  misc_feature (648)..(648): n is a, c, g, or t
  misc_feature (657)..(657): n is a, c, g, or t
  misc_feature (661)..(661): n is a, c, g, or t
caaanaataatttacaggcacgaacaggccaatgtggatcttttaaaaccaaaacagattggagggattggatggagatgccaaggaataacagatgtgggaaagatattaatagaaaagtttcagctgaagaatctttctgaacttcagaccantagctttcacnagttagtttctcagagacattcaaccccccaaaataaaaatgctgtatcagtgcactctaatctgaactctgaggctgtaatgaaatcattaactcaaacatctgcaactgtggaagtaggcagatggaataacaacaaaaagagccccataaaagcaagtgacttgacaaagtttggtgattgtggtggtagtgatgatgaagaagagtccacagttataagtgtcagtgaagacatgaacagtgaagggaatgtagatttngaatgtgataccnaactatacacgtntgcgcccaacacatntcagggtaaanatnattctgtcttantagttctcagnagtgatganagccnnncagtctgnaancagtnagaatgaagaggaactttatgtttngttnnaaatagtggccnaagnnngtcattaagtgncgncacaggaagtntgtnntgtnacaatgcattgtntgtaantgacncnactcctggnatgngtgctgataaaaattctttcttgcagtagtcagactaggcacgtttggttgcctttaagaaaaa

SEQ ID NO: 571058 - DNA, 224 bp, Homo sapiens
gccctttttttttgaccccgggggttggggtgagaccgggggaacctgtgccccccccccccccacccggtttttccgggtcccccgggggggccccgggggccctttcccccgggtccccccttggggggcaaaccccgggtttccctcttttttttttcccgggggggcccggcccttttgttttttcccaaaagggggaaaaaaaaaaaggatttttttta

SEQ ID NO: 571059 - DNA, 702 bp, Homo sapiens
  misc_feature (614)..(614): n is a, c, g, or t
  misc_feature (648)..(648): n is a, c, g, or t
  misc_feature (661)..(661): n is a, c, g, or t
aggactcttatagatacagtgttctatggaaaaaaaaggccaccatggaggcagaatatgtgtcatatagtataggctgaaaatgaaagataagcaataagatctgagaaataattccaaacgttgtcaatcccatactctggcagacagtcatcataaaagctatatacttgcataaattgtcggctctagttattacctcagaatattgtaatgagttgtgaataacacaccattaatggaacaagaagagtaacagtcaccagtgaataatatactctgagtacatagtcaaccatgaataagtagtttgtatccggtgataatccaccaattttaaagagttccataagatcatgaaattgaccatgaaaatatcaacagacagtaacagggaaacgaacctcatgcacatttgattcttgtgttaaaatttcctttgccttctcacacagcgtccgaacttggttctagtacagcagcttacactcattcagatactcaacccactagtccaactagttggtgaacgccttgtcgtccatgacggcccgatcccgaagcggataccaagccccagaacggctgccgccctcccccctccccacccgccnccggccccggcccgggcgccgctcccctctcccnccgccgccgtcgncaggtcccacagggggaggactgagccgggtagggcggccg

SEQ ID NO: 571060 - DNA, 192 bp, Homo sapiens
cttttctcacactcataacaaaactactaatactaacatctcccccagttacctccatatgcccagtttcctccatacaccccagtttcctccatatgcctcaatttcctccataagccccccagtttcttccatacaccccacagtttcctccatacaccccacagttatctccatatgcccaggtatgca

SEQ ID NO: 571061 - DNA, 229 bp, Homo sapiens
ctctacaggatccttaggaggagggcaggtcaatgtcaagctagtctggaagtagaagctgagacttgagacaggaagaggggggatcttctagcagcgagaacatgcacgaaggtgcctagccaaagtgcggtccacagtggggccttacctgtggcatgagtgaatcaatgaacctaaggattcagacaacattgctagtttgaaggggccttaagtccagaattgc

SEQ ID NO: 571062 - DNA, 269 bp, Homo sapiens
atcagtgttggacattagatctttgtcacatgcattgttgcaacagttttctcctattctgtaggttgtctgttcactctgttgacagtttcttctgctgtgcgaggcttcaagaagaaggatccgattggttctgtgtctgtctctcttggtattctcagacttatgtagtcatccatatagagaggtgattaggaaacagcacacgatagcagaatctacataaaatgtgggaattaaattagttaccagcatacaaaactactata

SEQ ID NO: 571063 - DNA, 370 bp, Homo sapiens
  misc_feature (44)..(44): n is a, c, g, or t
  misc_feature (210)..(210): n is a, c, g, or t
  misc_feature (324)..(324): n is a, c, g, or t
  misc_feature (333)..(333): n is a, c, g, or t
  misc_feature (356)..(356): n is a, c, g, or t
  misc_feature (359)..(359): n is a, c, g, or t
gaggctcgattctcatcggtgtcatcgggccccttgctttcctnttggcaggccgtcgcagggagcagccgcccgtgacaacggcaggcgcaagcaaggccaccgcagccaccgcgattgacgagctctacaaatgaccgcacccgctattcgcatcgagcatctcgtcaagacctatccggctggatcgggacagacaaagcgtgccgncaacgacgccacgttcgacattcccgcaggtcagatcgtgagtttcttgggccccaacggcgcaggcaagacgactacgctgcgcatgatcctgggactggctcggcccacgtncggctcggnccagaatcttggccacgataggncgnggctggagcat

SEQ ID NO: 571064 - DNA, 294 bp, Homo sapiens
gaaccctatccatacatattccgaaatagtttttgatctaagatcatgaaatatgatccacctgcttgatttaatagcgtattatagaaggaaactatttggtccattttctatttgtctattttatacaaaaaggcaacacaattgttacactttattcagattacaattgattagagtgattatgaattaattagtgttctacaccattactcaattcttaaaaattagaaattgctgtagcagtattcactataacttaacactacgagagacttaaaaaacagttactgc

SEQ ID NO: 571065 - DNA, 385 bp, Homo sapiens
tatgagcttgtcatgtctacttgtagacacgtttgttcttaatatgcatagtctactgcaggtgtaaaaccgctgtaacctcaaatttagcacatgttccagaacaagcattaaataaaacttatttcaggctgtttgtatatttacatcctgaaatgagagaaaacaaagaagattcctggggtcattggggagtgacaaaactagcagcacgtgagttttgcaactttctaatctttcccccttaagattaccaaatggaaaacccttattttaaattaaaatgacttaaaattaatttggctttgaaattctcttgagattaattttgtgattatttataagacaaacgacaaaaccaaaggtaaggatcacttatttgaag

SEQ ID NO: 571066 - DNA, 240 bp, Homo sapiens
ggtttttcatttttatttttttttccccccctttccccctccggccccccaaaaaattatttattgggttttaagggcacaaaaaaaggcattgtttcacgcccgtttggggtggaaccccttgggttaaggggaaacaaaatgttgctttttttgcggtttggaaacaggggcttgctttaaattagtaaattttgaaaaagctttcctggcatgtttaaaataaaaggttggggggga

SEQ ID NO: 571067 - DNA, 217 bp, Homo sapiens
  misc_feature (10)..(10): n is a, c, g, or t
  misc_feature (40)..(40): n is a, c, g, or t
  misc_feature (63)..(63): n is a, c, g, or t
  misc_feature (69)..(69): n is a, c, g, or t
  misc_feature (93)..(93): n is a, c, g, or t
  misc_feature (136)..(136): n is a, c, g, or t
  misc_feature (165)..(165): n is a, c, g, or t
  misc_feature (182)..(182): n is a, c, g, or t
  misc_feature (193)..(193): n is a, c, g, or t
  misc_feature (211)..(211): n is a, c, g, or t
cactcaccangataaacattgctgtatgttacagtaaagntatctggagagaacacataaatnattttngcataccattagagaaaccatttntaaaactcaaatgaccacataaagcttatcaaggagtctagantggttttgttttataccatatgggatgangaaaatagaaatgtcantagactcattngtgggtgctcttgccagntgctga

SEQ ID NO: 571068 - DNA, 514 bp, Homo sapiens
  misc_feature (398)..(398): n is a, c, g, or t
gctctttgtatctgttgtctctccatcccacacatacatataatagggagaaatacacagcataatgtattttagaccgcctatattacccacccagagagcaacatattctctcctccctctgctcatataatagtatagtgcgcccccccattctattctcgccaacgtgttctcctctcccccactaatgttcttgtgcgctctcagagcgcatcacccgttgttgtttctctctttgggggtgtttttgtgccgaggagacacccctgagtgtcctctcttctccctccagagtgtggtggcacactcccctcgcgctggcagagtgtgtgtgtgcgtctctctcagctgtgtctcctctccctctctcacactatgtgctcaccaccctttantttttatctttctctatctcccacagagatcgcctctatatttgtgaagattttcaaaaaataaactgtatctcgacaatttgtatttctcccccacaacaaataacaaacaaaca

SEQ ID NO: 571069 - DNA, 328 bp, Homo sapiens
aggagagaaggggcaagacagaacggagggacgtcatgggaaatccttttcgcgacgggggttcaagtggtagcaagcgtagccgacgaaaccgccagcgcaacgcaccgcagccgcgttcgccacagaggcggaactcgtggccataggccatgcgcgaagtacgcggccagtacccacaacaccaaggcagcgccccaggccacgccctgccgtgatagttgccagcggctgttcttggccgagttgcttgagggtcctcggcgatggaaaatgtcggtctgtaggcgcttgctccctgcgcctcgacggtgacttccggaacgcg

SEQ ID NO: 571070 - DNA, 214 bp, Homo sapiens
gctcgagcctggcgcctcgcggcaaactgagttcaaagtgtggggagggtcctcttcccgggacgcagccttcccgggcatggcagacggtgccccggttagacagagccgtgacacccggcagcgagtcccgtcattctgaaaggcgccgttcgtccgaccgctcgcccgctcctcccggcgtcgccgccgcctgtttccctgcccgcgcccc

SEQ ID NO: 571071 - DNA, 287 bp, Homo sapiens
tcaacgctttatacttcacccagtaactataggtggaagtggaagtttgttatttcaggttgacccagaaggttctcaactctgggattactcatgccagatacttgtatttggtagactggttgttttggctatacaacagctactttgtaagttactgtaaaatatcatgtaattgatataagtaccacatattttaagtatattatggaaagtctgaacttatttgtgtgagttgtgtattgtagttaatggcaataaagacaatagcctaatagtactacagg

SEQ ID NO: 571072 - DNA, 193 bp, Homo sapiens
  misc_feature (165)..(165): n is a, c, g, or t
tgtccaaagcgtatacccaaattagcgtatgttcctgcttataatgtgggagctaaatgataagaacttatgaacacaaagagggaaacaacagacactggtgtctacttgagggtgagggtgggaggagggagaggatgcagaaaagatcactattcgggtacntgggcttacttgtggtactatcgctttg

SEQ ID NO: 571073 - DNA, 412 bp, Homo sapiens
atccatgaagtgatgcaggctgctcttccctcatgtgagaaaaacctgtttccctctggttcttactggctttgcacctggtggctattacaaatcagtactgcagtatgtcttggacctggaaagttccattgtccctgtctcccctcttttctcggcctagtccagagtcctgttggtggccaccctatgttgtcaccagtcagttggtgcagggggccctttcattggtaaggtccctgtcataccttcattcagcctcttccaagagcagaggaacaccagtagtccacacgtcagtgcgtgaccagaaagggccttgtggcatcagtggacatgcttcattagcggaagtgtcaccatctcaggccttggttcacaggatcaccagtaattacatgtgttatcccaa

SEQ ID NO: 571074 - DNA, 221 bp, Homo sapiens
ttatgtcatagatactacataatttctaggctaatctgccaaatactatccaagacaaaacttaaatcaaaacttacagaaaaagtggacaccttttactcacacttaatactagtcaattttccaggaatttttgggcagggaatattcccaaatcgaaacgataacactatccccgactcgcggatgctgtcacgtattccttcttgcttgtaccgctg

SEQ ID NO: 571075 - DNA, 198 bp, Homo sapiens
tcgcccgaccaaggagctggaggctacagtgaactatgatggtgcctctgaatagttgctgtactctagtctggtaacacagcaagaccctgtctctctatcttgtctttttttttttttttttttggaaccgggtttccttgttgtgcctggggttgggttgtggggctgggttttgggggccttgccccgggttca

SEQ ID NO: 571076 - DNA, 472 bp, Homo sapiens
tagatgatggggtatgaccatttttgctagttattgggatttttttttttaattaagttctggggtacatgtgcagaacatgcaggtttgttacataggtatacatgtgccatggtggtttgctgcacccatcaacccatcatctacattaggtatttcttttaatgctatccctcccccacccccatccccttgtccatgtgttttcattgttcacctcccacttacaagtgagaacatgtggtgtttggttttctatttttgtgttagtttgctgagaatgatggtttccagcttcatccatgtccctgcaaaggatgtgaactcatcctttattatggctgcatagtattccatggtgtatatgtgccacattttctttatccattctgtcatagatgggcatttgggttggttccaagtttttgctattctcacagtgcctcaataaacatacatgtgcatgtgaaaa

SEQ ID NO: 571077 - DNA, 449 bp, Homo sapiens
  misc_feature (83)..(83): n is a, c, g, or t
  misc_feature (85)..(85): n is a, c, g, or t
  misc_feature (236)..(236): n is a, c, g, or t
ccccctcttccttgctgccagggtcggaccctccacaaccaaaggacccctttgttttctataggccctggaggagttgggcnanccgccccccccccccccagggcaggggtggttttggggaggcagggcaaccttccggttttgggcactggtgggttggcccccaaaaccccaataggacaaaaggggttgggtttgggcagcccctttggttagaagggtccccctggccngccaatttcccttcccccaaccccgtgtcctgtggtttggttgggggttcccaaccccccctggactgcccccccaggttgtttaaagtcaaaattgtattttggatttttacccaactgtcccgttcccccccccccaaaaaaacccaaaaaaaaacccccaggggatggggggccaaaacaggcaaaaatttataaacaaacaggctttta

SEQ ID NO: 571078 - DNA, 152 bp, Homo sapiens
gctgtgggtgatctagaggatctggctcccactgggtgccagaatggtctcaaactccgggactcaagcaatcctcccgcctcagcctcccagatggctgggattacagtgttttaaggattggaatgtgacgtctccaaattccagacaca

SEQ ID NO: 571079 - DNA, 376 bp, Homo sapiens
ttcaagtggaagcctcccatatttctccactatatttttgcaagtgcttaacaaaacagggcagggcaaaacaagggtttagggtggggaggggaatagggcagtagtcaggagtctcccctaattatcacagtcaggcctgaattagtaaccttgaatatcaaacacagactctcaaagtataggacagagacagcagggcaggtaattattaagcacctactacatgccaactacagttctaagaattgaaacagggcagggcaaaaagggcaaggagaaacgaaaagataagacagtgaaagagaagtcgaagtcaggcccggcacggtcgtcacgcctgtaaatcccagcactttgggaggccgaggctggt

SEQ ID NO: 571080 - DNA, 235 bp, Homo sapiens
  misc_feature (2)..(2): n is a, c, g, or t
  misc_feature (6)..(6): n is a, c, g, or t
  misc_feature (17)..(17): n is a, c, g, or t
  misc_feature (67)..(67): n is a, c, g, or t
  misc_feature (69)..(69): n is a, c, g, or t
  misc_feature (79)..(79): n is a, c, g, or t
  misc_feature (153)..(154): n is a, c, g, or t
  misc_feature (159)..(159): n is a, c, g, or t
  misc_feature (215)..(215): n is a, c, g, or t
  misc_feature (217)..(219): n is a, c, g, or t
  misc_feature (221)..(222): n is a, c, g, or t
gnggtnattcccatgcntgtgatattgtaagcagaataaatgtctaaagtaggtgtaaatagtaaantntatggcttanagttttaaaaggaaagaaaaaacatgtatctattgatactgccatggttcctcacaggcctggaatattctccnntaagnaattgtatttttttttttttttgctttttttttttttgtaacatggctttgtaaangnnntnntttatatgtttgt

SEQ ID NO: 571081 - DNA, 508 bp, Homo sapiens
ctgaggatgcatcagttaagctgatacttggagcttgagaaagagccagccataggaaggctccatgcaacactgcagctgaggagtagcacgtgcagaaaggcaactgaggcagcaacgtggaggaggctaacggggagctggagttgataggggaggggttggcagggactagattgtgcaggacctggtggttcaagtaaggagtttcactttcattctcggtgcaatggaaaactctagaatattttaagctggaaagtgctgacatggtctgagacatggtttaaaagatcacagacaatagtgtacttgaaccacggttttcgaagaccctcacagaaattactttccctaaataatttgtgaaggatacagttaagaaactgtgaactaaattttgctactttccctaaataatttgtgaaggatacagttaagaaactgtgaactaaattttgctaccatatccaatatagcaagatcctgtctctaaacaaaataaaac

SEQ ID NO: 571082 - DNA, 221 bp, Homo sapiens
  misc_feature (27)..(27): n is a, c, g, or t
  misc_feature (47)..(47): n is a, c, g, or t
caagtcagggaacaggtgtgagccatntgcccggctcctcagtccantaatactgaaggtataaattgtataaagatgtttagaaagttctaattcaatgcatttttgcaaatttgactccatgaaagtgcattatcacgaagctgaatttgtgtaagcattgtgcatgtatgtaaaaacattgcaacttcctcaataaaatatcttctttttgtacatcc

SEQ ID NO: 571083 - DNA, 338 bp, Homo sapiens
gggccaagttgctgaaaaagttttggtttaacccgaagattagtggaaaagagcttgtccctgaaccccggttctccctctgtttacagaagtgtgttgagtcccgttggtgaaggaagaggtaaccaaaaatgcttaattttttttccctggaaatggcttccagaaaaggaagaatttggacccccggccgaaggggaaaagatagtttatagtattttctaacctggttggtttttgtaatgaatggtgattttaattagtccttagccctaatgatgtttttttcccgtattactcctgaatgcttctttaattaacccgggttccaactgcca

SEQ ID NO: 571084 - DNA, 391 bp, Homo sapiens
cgatactgtataggtcagactgtctaggaattctgtcacatatacacacacacttggccaaagtaatatcgttttattccatgtagaacaaattatgggcagaaagtaaagttagttttagaagtgctgtgtgtggatgtagaattgtactcttatacagggataagtgaattagtggctcttaatataaccactgctttagcccgatacacacaatcactgatacatggaccactggttattaggccagatatatattcatatatgtctagagtatatcatgtgtgtatgtgttgcttacgatgactagcttcagagtctctcatctctattaatcactgtatatacagcaatactgaagacttgagagaatgcacattatgtcggtgct

SEQ ID NO: 571085 - DNA, 148 bp, Homo sapiens
cacgaggggaatttccataatttaaagtcttgagtcatgatatgacactgacagaattcaagttcatctggtagatggagtactcacaccgaatgtggggtcgccttgtaagccttgtgtacatcctgactgttgcctacttttggag

SEQ ID NO: 571086 - DNA, 489 bp, Homo sapiens
taaattcgcggccgcgtcgacggagttgatgggttaaattgggacatacagagtcaagaaacagatacctaaaatagagtgcatgtggttggtgcttacataaatgtttgctgtgatctgggacagaaatgatctgatagtcatagggtttgtttcctcatctccttcacatttttactaaaatattgctgccttaggaaagccttccttggtcatcctatctgaaattgcaatattcatgacctacttccttaacactcttgtccaatatatcctaataagtcctgtgtcacttctacactatttttttacctgagcatttatttatattaaactacatatatgcttacttatttatcatgttttcctaatagaaggtaagctcaataatggaactttttatctgttttgctcactttgtagctccagtgcctgggacaatgcctgacacttagcaggtcgacgcggccgcgaatttagtagtagtag

SEQ ID NO: 571087 - DNA, 651 bp, Homo sapiens
gatctagaggaccccacccgggtcttctccaagccgggtgacactttcccagtctttcccggtccttcaggaccatgacactcaggatgagcaccgggtcagtcactcggcaaaatacatctcacctggggctggtggaccgctctcccatgactagaccgagatcatgtggtctggacaaataaaaaagaaacccacacgcagaagtgatgtgcatgacatcgggagggcaggggacatggatacatctaatacattatgtcaacttcaattagcgggtccagggggcatcgaggggatttctccagggcaacaggaccagtttttcttgggtaaaaacggataactatgtcccccattcattcatcatcccttacaatatgccatggatcggaaggggcatcccaaggtcctagatgtaaaaaagtgaacaagggtccatctgagaggggaggggtaaggtacttctataattatagtcaattaagaaagagagcaggggaaaggggaccaagagcatgacagagaaaatagcagcaacaagccacgggaaagacagaagactggagagtgagcagtcctagaagggatgtgctgtgggtgtgcctatcatatacgaggggggagggggacagctgtcccctttttgta

SEQ ID NO: 571088 - DNA, 1203 bp, Homo sapiens
gttccgcgtctgtgctgacctgtccgtcccgagcgcgcagcctgcggtagtgccaggtcagagcagcccaccatgtggatggggagggggtggaggctgcacccctggcccacccatccaccagcagccgccggagcgccgcgtggtcaccgttgtcttttctcggcctcctgctggacctcctgtggccttcactgctgctgctgccccatgctgaccgggctgttggagagccacgtgctgtgcccactgaccccctctatggctcctggcagggcggggtggacttggtttgccaactgacatcgtggatgccagtggagaagaggtacaacagtgtcctgtacggaggtctcatttggctcggcattctctgtccatgcagtttctgtgtgcgcacactcactggggccaactctgactgactatggggaggcgcccggtgatgcagctgtgcctgaatagggtgaaggccacctcatatacagacatagaagacacctctcgagagctatagcggactacctggaacatccaggctgattgggggcatcagacaaagggaacagtcaaactactccacaggaacatcagtatgattgaaccatgtggctacgcaatcatggcaccaacaagtacaaagagcagtaggaggaccataagagggtagagcatatagatcaatgaaaacttcaaacactgaggcccaaataagcacaagaagacctaccatgcaccacttggacatatggcaaacacatagagaatctgtcacaatgaatccttacggcaagacacatcacgaagccgatgaacagctcacattcataacttgagtaaccactgcacaagaaagataacatagagccccaagtggaggaacaacggatacgacacaaacaaatacaacaacagcaacagagattacaagaatacaatgacagaaacaatgaaaacatggactcaaaaaaaacgccatagaaacagctatatacaagaagacaaataccaatacgcaagacacaagaaaaagaaataatatattgaatacaagtaaaacacacagaaaccaatcaagtagaaatagaccagaagaacatcagaacaacaaaattatcaacaagtaaaactgaatagaactaaggaatcatgaaaataacataacaaataacaacaccaatacaaaagataacaaagagaaga

SEQ ID NO: 571089 - DNA, 787 bp, Homo sapiens
  misc_feature (13)..(13): n is a, c, g, or t
  misc_feature (63)..(63): n is a, c, g, or t
  misc_feature (126)..(126): n is a, c, g, or t
  misc_feature (189)..(190): n is a, c, g, or t
  misc_feature (192)..(193): n is a, c, g, or t
  misc_feature (353)..(353): n is a, c, g, or t
  misc_feature (364)..(364): n is a, c, g, or t
  misc_feature (373)..(373): n is a, c, g, or t
  misc_feature (518)..(518): n is a, c, g, or t
  misc_feature (606)..(606): n is a, c, g, or t
  misc_feature (632)..(632): n is a, c, g, or t
  misc_feature (680)..(682): n is a, c, g, or t
  misc_feature (684)..(684): n is a, c, g, or t
  misc_feature (764)..(764): n is a, c, g, or t
gggggaggggggntcacggggggaaggtggcggggggcaaggcggccgtgcagaagctgcagncgaagggcctgagcccgcgctttcacaaatgggacatcgacgactcgcagagcatccgcgccntgcgcgactctggcgcaaggagtacggggggctcaatgtactggtcaacaacgcggccgtgcnntnnacgagtgatgatccaacgccctttgagattaaatgctgagatgacactgaagacaaattctttgcgacttataaacatgtgcgacgcgttactgccgataatgaaacctcatgggagagtggtgaatatcagtagtttgcagtgtttaagggcttttganaactgcagtgnagatctgcnggaaaggttccacagtgagacactcacagaaggagacctggtggatctcatgaaaaagtttgtggaggacacaaaaaatgaggtgcatgagagggaaggctggcccaactcaccttatggggtgtccaagttgggggtcacggtncactccaggatcccgcccaggcgtccggatgagcagaggaaacctgacagcactccggtgaacgcgtgctgcccaggaccagtgaagncagacatggatgggacagacagtatnaggactgtggaggagggggctgagacccctgtctacttggccctcttnnntncagaaaagaatgaaaaatcatagaagttggttaacgacaaagttgtgcaaacaccggtcaacgtctgccttggaggttgntggttaataaaagatggtggaat

SEQ ID NO: 571090 - DNA, 179 bp, Homo sapiens
tatcgtaaaacctctgctctcataacctgtgcttgtgtatccttgcgtcactgcagtgagtgctctaggtcagcacgtgttgcctctgccagtgcagcactcgcatgtgcgcacctaaccccaggacccagccctgcctccttctccaggtctgttacctcgcgaactgcctttgacag

SEQ ID NO: 571091 - DNA, 271 bp, Homo sapiens
ccctggggcttgatgttggtgaaccgactgacataggaggacagcgagaccgcctgcttgaccagggtgaaggggtcaccgctcacgctgtccaccatgatgatcgatgctcccgatcagtcctcgtcgcccttgttgagggtatccagcagtcgctcctccagcgctgcgatcagcgacgggaacttggtgacctcgccgacgaagttcttccactggtactcctggatgaccgtcgcatcgtcggagtaggaggagcggaagttctcct

SEQ ID NO: 571092 - DNA, 149 bp, Homo sapiens
tacggaacgacaagaaaactcatggccagacatcccagggctaccccttaagaaggtgacctcccttcaataccacttcccaatccacccaagcagcaacagacaaatatctgtatacccgctaaaatggggtgcaactttctacttcc

SEQ ID NO: 571093 - DNA, 297 bp, Homo sapiens
gggccttcttcactttgtcaaagaggtgagtcatgtccgccagaggatctgtcgaaagccgtactccatcttccccaggataagccggctctggccagtctgacaaccatctttctttcctcccatccctcccttcaagaccccagaatcctgttctcccctgtctctactaaaagtgcaaaaattacccgggcgtggtggtgagtgcctgtaatcccagctatccagaggctgaggcacaagaattatttgaacctgggaggtggagtttgcagtgagctgagattacgccactgc

SEQ ID NO: 571094 - DNA, 367 bp, Homo sapiens
cacgtttattatgaacaaaaaagtgaaggacgtgagggttatgaccagaggagccatgttgagaagggtcacagcgatatgagcgaagtagtggagagagggcatgggtaccttttctcgaaatctccagtgcccgctggcgcagaggctctgcctccttgtacttgccccttttgccatagagcacagccaaattgttgagtgtggcagccacctatgaagacaggcctgtccccatcagacatttgggttgcaaaagagctatgggaatctgaggttccccacctcccagcagggcccaacactcactgcacaactctaagagacaaagtctactaccctggagccaggggctgaagggagggga

SEQ ID NO: 571095 - DNA, 110 bp, Homo sapiens
caatcatctgtctccctaaagcactccaggtagtagtagtcaaggtagtcaccacagcaagagtactaataatacctgacatggacaactgacatcataaatcttgcata

SEQ ID NO: 571096 - DNA, 321 bp, Homo sapiens
ccgatgtaaatatcacatgatactatcccttctcctcctctgatgtcttcatcacctcgccatgatcatgaagtgtatacattcactggtttgccaaattggtcagggtccccagcgtgaacgattgcctagaggacctggtagctaaggcagttgccataaaaattacaaccactgctggatagtcgggagcagcttactgtgtctggggcagaccgaccaccttctatctatgagtgccagctacatctttgggatcagtggtgtcgaggctgggctgaccaggagcgcaagtgaatacgtcagacagctggagtccag

SEQ ID NO: 571097 - DNA, 191 bp, Homo sapiens
aggacaaaaatataaataaagtaaaatctggtccctagtaataaaatgagaccaggagtcaggagatctgggcccctaaggctgccccgctaagctacccctttctggatgtcaaaggaagcctataactagagaggtgttccccaatttcccttccagagcagtattttatgtgcatgttttaaatgacc

SEQ ID NO: 571098 - DNA, 143 bp, Homo sapiens
ggcatctatgtggaatccaaaagatttcgggcaccgagggggttcattcttaccttctacccactctttttgcaagggcaccaccttcaattcaccacgccggcttaaaggcttccgcaaccttgtaatttttttttacccct

SEQ ID NO: 571099 - DNA, 341 bp, Homo sapiens
  misc_feature (45)..(45): n is a, c, g, or t
  misc_feature (89)..(89): n is a, c, g, or t
  misc_feature (111)..(111): n is a, c, g, or t
  misc_feature (134)..(134): n is a, c, g, or t
aagtgtaatttggttatgactcttttcaacccccctaaagcaganagctaattctgtaagaaagaggttaggagtagatattgattacnaatccatattcagcacttaaancatgagcaggcatcaatactaanacttccacctacatattcacttaggcctttatcatccttaaaacaattctgtgacaataccatattatctcattttacacaaagggaagtcgggcatggtggctcatgcctgtaatctcagcactttgggaggctgaggcagaaggattacctgaggcaaggagtttgagaccagcttagccaacatagtaagacccccatctcttt

SEQ ID NO: 571100 - DNA, 401 bp, Homo sapiens
  misc_feature (45)..(45): n is a, c, g, or t
catcagcagtgggatggataaattctggtacattcattgaaatgnaactacgcataaatgaaaaagagcaacttgcaacaacacgtagtatattcatcaaaataatgttgagcaaaataagccagacacaagtaatacattctgtatgattccattacataagtttaggaaaaaccaaccaatagtaaattgataatctgaacagtgctactttttggaggaaggtcttgactaagttgggggaaggaggatccttcctggagcctgaaggtttcttgacctgggtgttactaccttgagtgtttttttacttaaaattccttgtaaaatttaacttaggatttatgcatttgacttatgtaaattatacttcaataaaatgtttctacaataaaaaaaaa

SEQ ID NO: 571101 - DNA, 1073 bp, Homo sapiens
ggtgcagcgagagctgcgcggatctcagcgcgggagctgtgcttctgcgtgcaggagcccgtgtgacaaggcccactgctctgagcctgaactatgagcacctcctagtggactgcccaggcttgctctgctctgacccttctgctggccagctctgtgcacctgtcaggcccctgacggagggagctgtcagccagggaaaaccgataacaccatcaccatgacaaccagtcaccagcctcaggacagatacaaagctgtctggcattatcttcttcatgctgggtctgggaacgctgctccccgtggaatttcctctcatgacggccactcagtatttcacaaaaccgacctggacatgtcccagaatgtgtccttggtccactgcctgaactgagcaaggacgcccatgcgctcagcactgccccctgccagccaccccttgccctccaagccgcaacctcctctcactgccactctccccaacaacttgtcaatgagccctatctcgccatgccctgcccccctgcatgctcattcaaccttaccctccaatcttcctttaccttgcattcccggcagggtatccccctccagcttcccgctacgcgatccctgcgcgcaaggccctggcatgcgccagtccctggctgggctgctactcgtgatccgccctgccaccccctgcgctgaacagcgtatgaccaggctctggcggaattgtcctcctggggcgcctatcattctcggctccactccaccccaactccactcgccacgcacttccgcctggcttcgcatttcaccgtcgtcgccgtccatgcagctcgccccacactcccgcttacgccgagccggcccatcgcgcctggctcctaggacggtccttaggccttcggtccccttctccttcggcccctcgccacacgcgccttctctacccggcgccaccccaccacagtgttcacgttcgaacgcgctgggcgcccaccgcggggccccttaacgcccagccggcgccctcccctctctctcgcccgttcccccgctcgtgcgccccgactcgactgtcg

SEQ ID NO: 571102 - DNA, 327 bp, Homo sapiens
  misc_feature (2)..(2): n is a, c, g, or t
  misc_feature (50)..(50): n is a, c, g, or t
cnattctctttcccccgggaaagttgaactgaggtgaccaagtaataganttgaaaagggagagtgtcttcagtgcaatgtggcatcctggattgggtcttggaacaaaaacaggacattagtgggaaaattggaaatctgaaaaaagtctgaattttagttaatataccaatttcagtctcttggttttgacagatgtaccatggtgatgtaagatgttgaccttggggtaggctgggtgaagggtatacaggaactctttgtactatctctgcaacttctctgtaaatctagtatcgattcccaaaataaaagtttatttaattt

SEQ ID NO: 571103 - DNA, 103 bp, Homo sapiens
ttcgccagacttccaggctgatttgccaaatgccagagaatgataacctagtcaaagaacttacgggaagctagacgaggacattcagaaagagcgagtcacc

SEQ ID NO: 571104 - DNA, 205 bp, Homo sapiens
tgcggcctctctctaatgagctgcagtttgagggagacacctacggtgctgttgcttatcttggatattcctggtagatatttacttctatcactatgctctttcccagtcacagcatggattccaaggctcctggagattgccttgtccagtgccagcaccccaaagatttagacctgtcacagaaagcttcttaaaatcccca

SEQ ID NO: 571105 - DNA, 181 bp, Homo sapiens
gttgttgttgacctgtgctgaagggctggagcaaccccaacctggggggcggatggagcaggctttttccagaacgacccggcctcaatcctcatagaggggagaaccatcaagaattggtcatcgaaggaggtacggtgccagcaagcttggagtgggctaattttcctggcaggctgaa

SEQ ID NO: 571106 - DNA, 100 bp, Homo sapiens
cggagactctagaggactccccagatctgtcgacaggttggtaggccaaagggcccgatggtgaagcatgctgaattctcaaggctatggggtccttcaa

SEQ ID NO: 571107 - DNA, 413 bp, Homo sapiens
  misc_feature (3)..(4): n is a, c, g, or t
  misc_feature (7)..(7): n is a, c, g, or t
  misc_feature (12)..(12): n is a, c, g, or t
  misc_feature (178)..(178): n is a, c, g, or t
  misc_feature (368)..(368): n is a, c, g, or t
  misc_feature (386)..(386): n is a, c, g, or t
  misc_feature (398)..(398): n is a, c, g, or t
ganngancctancaggctggaatgcagtggcatgatcttggctcactgcaatctctgcctcctgggctcaagtgattctcgtgcctcagcctcctgagtagctgggattacagatgtgttccaccatgcctggctaatttctgtatttttagtaaagatggggtttcaccacgttggnccagggctggcttcaaactcctgaccctaagtgatctgcccatcttgggcctcccaaagtgctggggattacagggcgtgacattttgttgcttcgggccattcagttatttttctgtttccttagtaggagcccaatggataatgaaggattaggctgcagagatccaaagtatcccggaaatctattnctgattttttggaaaagnatttaaatgggnttttcaaaatagttt

SEQ ID NO: 571108 - DNA, 1409 bp, Homo sapiens
  misc_feature (642)..(642): n is a, c, g, or t
  misc_feature (949)..(949): n is a, c, g, or t
ggttcgacaatcatccgcatcttcttctgcgtcgccaggcgatgccacatcggtgagacaccatggagaaggtgaaggtcggagtcacatggatcaggatcatataggggcgacttggtacactcatggtctgactcgttaagctcatggatacacagctggcatgatggctcgccatgcaatgcagccccttcattgcagctcaatgtacatggtttaacatgtttaccaggtatgatgccatccgatggcggaaatttcatgagtcgaccgtgtcccgggatgcataactggcaagactatgatcatgcaactgggaaatcacgcagtcacgcatcttgccacgaggcgagatcccttccctgaatccgaagcgtgggtgccgatgcctggtgcggctgagctacatcgttgcagataccgactgggcggtcttcaatgcaccatgggagaaaggggtggggcttcactcttgcgacgcgggaggaggccagaacaaaggcgctctactcattctcatggccgctgtccttgctttgatcggccgcttctagtgtgtccgctcaggtggagtggttgacacgcgattggaacgaaatcgctattgatcgaaacacagcacatccaatcgaatccagtcantccacactgacgtgccgtgtgagacaactcaaacggtcgactataacgtaggacccccttgcgttcgcataagagatcagtttgcgattggaaccagagcttttgggttgactaccggcggatacagagaacgtcaattgagtcgaccgacgtccacttggctagttccacggtgggcacgggcaaggaaacgaacctggaagggatttgggccctcccctgtcggtgtgcacaaccctggtgaggggttgaatagggcgccgccggagggactcctcccctggaaaccggatcgatccgcgcttgnacctccttaactgggccgactgcgccaaacggctttgttggccgcaaaccggtgcactttcgccctgtatgggtggaaccgagcgatgggttcacttggggccgtttggcccttccacggtggttcaccccaccttggtgctaagaccgctggtcccggtcgcgtgtgtgaccctcggaaccctgaagcgggttgtttggagaaagaaactctggcggccaaacatcctgtgatggttaccttttccacgccaacgggttcggttgcacgactctggatccttgcgtaataggggccccccctccacagaggcgcctccctcgggaggctcacacaggctttgtcggtaagcccgcgtggggcggttcccctctggtgtctctctaacgagggggcagcgccgctcgcttcacctcgcgacctttcgaaccgttgtgcctgtggtatatggacgcccccg

SEQ ID NO: 571109 - DNA, 361 bp, Homo sapiens
cagtttgatggttacagatgagctatgatcctgccactgcactacagcatgggcaacagagctcttaaaaattaaaaaaaaaaataaaaaagagaaacagcacataaaaaagagcagggtgcgtgggctcacctgaggtcaggagttcgaaatcggcctggccaccttggtgaaccctcgtctctactaaaaacacagaaaatcaccaggcgtggtggcaggcaccgtgttaatgtcagctactcgtagggctgaggcgggagaaatcgctggaccccgggaagcggaggtggcagtgagccgagatggtgccatggcactcgggcctacgtgacaagagcgaaacactgactcacaaaaa

SEQ ID NO: 571110 - DNA, 328 bp, Homo sapiens
  misc_feature (267)..(267): n is a, c, g, or t
  misc_feature (283)..(283): n is a, c, g, or t
ttgaattatcactttggttaaatgaatgactattattagtggcctgtaatcctattttgatcaaatattttaaaccttcagtatctgacatactcccaaaatcaaatttaaaattctaaaattaagtcttttccagaagaaaaccctgggaagtccaagagagatatattaggcttatttggtatattaaaatcatatgggaagcactgtcaaataagaaatagtatttaactttgagttatatttgtatagctatgttaatatgtncccaaaattgtagggngattccactttcagatatgtcttggtatatggaaaccagtcatgg

SEQ ID NO: 571111 - DNA, 201 bp, Homo sapiens
ccccagggggccctttttttggggtttcccggggatttttttttttccaagtttgccctttccccgggggtggcaggggaacagacctttttgccctttgtttgggttgggcccttttttcctggtttccccggccccgttggggggttcctttttgaattttttttttttccccagggggttccccgccttggtttccca

SEQ ID NO: 571112 - DNA, 162 bp, Homo sapiens
  misc_feature (30)..(31): n is a, c, g, or t
  misc_feature (159)..(159): n is a, c, g, or t
caagagatccactcagccttgccctcccanngtgctcgggattacaggcttgagcaccacgcccggctaaaacattgcaaatttaaatgagagttttaaaaattaaataatgactgcactccagcctgggcaacagagcaagactctgtctcaaaaaanaaa

SEQ ID NO: 571113 - DNA, 158 bp, Homo sapiens
tacgctggttgtcctcgatattacaacttcaatctgctgttgatcatcttcaggtggaagtaacaatcgagtccagagctgagcattgtaaagattaatcgtggactatcataatccttgccagcatgtagcctggtaccaaactgaccattgtgctg

SEQ ID NO: 571114 - DNA, 866 bp, Homo sapiens
  misc_feature (866)..(866): n is a, c, g, or t
ggagcaggtagcagaccccccgaccaccagtcgagtggaccctcaccccaagcactgggtaaggtctgaagacagcaccagcagccatcaccccatcacgcatcgatataaccgacctatccacccagcattctagccatctcccctagtgctacttgcacccatgggcaatacggccagccatgtgttaggaactagcaatctccaggcaacagcacacactcggcgcgtgcttagctacacaacctaccagtacactcgtcgaccacaccaacggatcctctaacacactgctagcgacgacctatccataccaccacttctacccctagacgacagcactcactacacacctgcctccaccacacccctaacgccctagcgccaacacgcgacacgacccccaaatgagacacatccctagccacacgccaaaccacactcgcgcccctatcggaaaccatcagcacatagctcgaccgggcaacgccggcgcgccactcgcgtgagttcgcccacaccacgcccaaggcgcacccactgatggccctccccacccaaggcggcacccacaccctcgcgcagaacggcccaccacgcccacgcgttccgcccctcgcaccagccacactttgacccacctctgaccccgatacgttcgtctacaccacacgctcccgcacacccccataccatcggacccccaaccaaaccataacaacacactacaccaatcgcataccaactaacctctacacatactcccacccccaaacacatacccaccatcagccaaccacttctctaacacatacccacaccatcacctaaaacccccacctactcaggatcgcccctaacaatan

SEQ ID NO: 571115 - DNA, 370 bp, Homo sapiens
  misc_feature (17)..(17): n is a, c, g, or t
  misc_feature (33)..(33): n is a, c, g, or t
  misc_feature (50)..(50): n is a, c, g, or t
  misc_feature (70)..(70): n is a, c, g, or t
  misc_feature (96)..(96): n is a, c, g, or t
  misc_feature (113)..(113): n is a, c, g, or t
  misc_feature (207)..(207): n is a, c, g, or t
  misc_feature (217)..(217): n is a, c, g, or t
  misc_feature (266)..(266): n is a, c, g, or t
  misc_feature (282)..(282): n is a, c, g, or t
  misc_feature (357)..(357): n is a, c, g, or t
agccgggaatggctggnaactgcagacctgtcntcctggtggtccagggnccctccagcttgtggagccnaaactggggtgccgcctgcccgtctnatctcccatggagcccnaagcccctttgggcccagggacaccagccaggctctgtgctgaccctccttgttgcacccagccctggtctcagcagcgaccacccctgcctcnaccctccganatttgcatgttccacttaaccccgggcgggtggcaggtggaggtgtcanggcatgtggcgccttntgcaagggcagaacacttaaccttgaccgtggcggggcattgggtatccgcccccaataaaagcaattccaaccnttaaaaaaaaaaa

SEQ ID NO: 571116 - DNA, 460 bp, Homo sapiens
  misc_feature (4)..(4): n is a, c, g, or t
  misc_feature (238)..(239): n is a, c, g, or t
  misc_feature (250)..(250): n is a, c, g, or t
  misc_feature (252)..(252): n is a, c, g, or t
  misc_feature (257)..(257): n is a, c, g, or t
  misc_feature (261)..(261): n is a, c, g, or t
  misc_feature (267)..(267): n is a, c, g, or t
  misc_feature (271)..(271): n is a, c, g, or t
  misc_feature (275)..(276): n is a, c, g, or t
  misc_feature (279)..(279): n is a, c, g, or t
  misc_feature (284)..(284): n is a, c, g, or t
  misc_feature (293)..(294): n is a, c, g, or t
  misc_feature (297)..(297): n is a, c, g, or t
  misc_feature (310)..(313): n is a, c, g, or t
  misc_feature (333)..(333): n is a, c, g, or t
  misc_feature (344)..(344): n is a, c, g, or t
  misc_feature (388)..(388): n is a, c, g, or t
  misc_feature (394)..(394): n is a, c, g, or t
  misc_feature (439)..(439): n is a, c, g, or t
agtnaactggctcattcctgcttccagtgggaacaatttttcagttaaatcttgcttccttgcatgtcaagaattctctactggtaaatcttacaggtgtcaactttcattatcagggcatctattggccatctattaaaggccttacctgttttttctgtcatccagcaaatcttagactatttacttgtgtaaacattagatagcaaagaaactaagggcaaaaatctctagttcnntttagccttgntncctcngggngctggntggngggnnggngtttngtctggttnnggntcgggtggggggnnnnggtggcgcttcatttcaggnttgtctttggncatttcgggtgcctttgggtcttgggcgatgctcgttgccagtntctttnagaggccttatctcttgggctgctttgtctcctgcttagcgtgtncttgagaacacatgtcctggc

SEQ ID NO: 571117 - DNA, 325 bp, Homo sapiens
ccggcgtcttcagctgcataggaacatgtcatgcaccatcaggccgtcggcgcggatcctgccgtctttcacgaagaaatcgttcaccgggttggccttcagccacttcatcaccgtgtcgccatcggtactgccggtggcggccacggccttcaggtaggtggtggtggccgagtagtcgccggcctgcagcatcgacggcttcttcttcattttctcctcgaagcgcgccgcccactggcgcgacgcgtcgtcctggtcccaataccaggccgtggtcaggtacatgccctgcgcggccggcaggccgagcgcgtggatgtcg

SEQ ID NO: 571118 - DNA, 982 bp, Homo sapiens
ggcgagcgcagtggagcctggagagaaggctgctgggctgcgaggtgcgcgaggtgcgcgagggcagggggcaacctggaccccgcccgcacccatggctgccctgtctgcctgtctgggcctgtgctggcctgtctggactggatgctctgtgtgctgctgtgtgcactgcctttgcccgcccaggccaacatgcaaaatgtcttctgtaccaagacctcggacaccgtgtgtgactcctgtgaggacagcacatacacccagctctggaactgggttcccgagtgcttgagctgtggctcccgctgtagctctgaccaggtggaaactcaagcctgcactcgggaacagaacctgcatctgcacctgcagtgccctggctggtactgcgcgctgagcaagcaggaggggtgcctggtgtgcgcgcctgttgcgcaagtgcctgccgggcttcggcgttggccagaccaggaactgaaacatcagacgtggtgtgcaaagcccttgtgccccggggactgttctccaacacgagttcatccacggatatttgcagtggccacagatctgtaacgtggtggacatccctgggaattgcaagcattgggatgcagtctgcacgtccacgtaccaccacctggagtatggcccagtggtgcagtacacttacgcagtcagtgtcacacgatcccaacacacgcagacagtccagaagccagcagttgtccaagaactccttctgctccaatgggcccagaccccagctgaaggagcatggggaattgatcttcagttggactgattgtggtgtgaaggattgagattagacgtaatggcagtggtacctgggtaaatagacaggttaaataagcattgtatggaaggaagcagggtgtataggtagaaaggcgggttatgggcggagaagatatgagagagagagagagatatgagagcaggtaagaggatagaaaaaaatggg

SEQ ID NO: 571119 - DNA, 144 bp, Homo sapiens
ttagtagcggagcatcagtaagacgggactcagataagcggagcatcagtaagcggagcatcagtaagcggagcagtcacgcctgctggggtatgttgtgttgctcccttactgatgctccggctactgatgctcgcttactga

SEQ ID NO: 571120 - DNA, 269 bp, Homo sapiens
ggtcccggacattgtgtaagattgaatagacataatagtgattaaaggcttgtcaaggtcttggcaataagggtcagcaatagccttgtgtatagaacagttctggtagtatttggtagctgggggatggtatactgtgacacaacaagtatcttattcccatttcacagagaagacataagtctgggaaaaaaatttcactgtcatgatacttgcccacccccgacatatctaagactggcacgtatatttaatgaaattggggatgg

SEQ ID NO: 571121 - DNA, 191 bp, Homo sapiens
attagattctggctggaaatgcaacatctacaaggcccctggaggtgtaaattttgaacacaaaacatgatatcaagaaaagcagcttaggacagataggaatcaggagaggccttttcactctctgcccaggacctcattggacccttatccgagttggcccccttggaccttatcgagggggatcctct

SEQ ID NO: 571122 - DNA, 258 bp, Homo sapiens
gtcgctacagcctgcttcaggtgggagagtaacgtcaggcaagcatgcagcgcacggatagttgaactgttcaccagcaccctgcttttccagcaacattccagcggagttggaaccattttttccagcacacacccttacaacgaagtccctccccaaacccactttaaccatctcaagctaacacccaattacttgcaaacactggtataaaacacagtataaaacaattagaaaactgaaaactgataccaactt

SEQ ID NO: 571123 - DNA, 401 bp, Homo sapiens
gttcgtcatgataccgcctaatcacagcagatcctacttctcctatctctcgccagatcctagactgctggacatcactatagctactaggcagaacgaagagactcaacaccacctatcttcgatcccgacaggaggaggagcccccattctataccaacaactagtactgattatacggtcaccctgaagtttatatacttatcactaccgaggcatcggaataaatctcccatattgtacacttactactccggaaaaaaaagaaacatttggatacataggtatggtctgagctgtgatatcaataggcttcctagggtttatcgagtgagaacacacatatattgacagtaggaataagacgtaaacacacgagcatatgtaagctccgctaccat

SEQ ID NO: 571124 - DNA, 107 bp, Homo sapiens
actgtggaaagagaagaggatgaaaaagataaaaggaaggacgagacagaaaaagaaaggaggcaggacggggagtctcttatagccccccctctcaagctatcgaa

SEQ ID NO: 571125 - DNA, 457 bp, Homo sapiens
  misc_feature (212)..(212): n is a, c, g, or t
tttctctgagcatgagcccactgattggagctctgggtcatctctgtggcagaaaccacagagcagtgaatcagcactgatttctggtttcagtgtttctaaagggacatgagaactggaaggcgcttgcaaggcaatctcgaggcagagtccttcattatttgtgtgattattttccccaaatcattaccctcatctgtgctgggactttncaaagcttccagcctagcattcagggagcagctccctttctgcattaatatttcatcagcttccctcagtggctctccgagagtggcccagggaccacttgcgaccctttcagggaatccaaagtccaaattcttttcacggtcaaactgagatgttgtttgcccttgatgctctcattttctccagaaggtacaaataaagattttcagagcccccagcccccagccctggcctctgacagccg

SEQ ID NO: 571126 - DNA, 496 bp, Homo sapiens
ttcggggcagtgggtggctcacgcctgtaatcccagcactttgggaggccaaggcgggcggatcacgaagtcaggagatcgagaccatcctgggtaacacggtgaaaccccgtctctactaaaaatacaaaaaaattagccgggcgtggtggtgggcgcctgtagtcccagctactcaggagggtgaggcaggagaattgaacccgggaggtggaggttgcagtgagctgagatcgcaccactgcagtccaacctgggtgacagagcgagactccgtctaaaaaaaaaaacagaaaagaaaaaacacacttttttttttttggcccagcgagcgggagctctcttttccagttattccataacctggggggtggggatctcggcggggattggggccggggttaatgggcggattgggggaccccctctgagactctctcctgagattcccccctcttttttggttgtccagtggcttcaagctccctcggtcccg

SEQ ID NO: 571127 - DNA, 121 bp, Homo sapiens
aggtgattagaggactccggctaagtgatctataggctcaagtgatactactactcagtctccaaaacgctggaacttacaggcgtgagccaacgtgtacagcctcaaaaaattctttaac

SEQ ID NO: 571128 - DNA, 123 bp, Homo sapiens
agaaggctgatgtccacaagtggcctcacagccctccttgccacaggatcagcccgctgagcacatccacctggtccaggtggacctgccagtagagacttgcgggatgacattcaggatagg

SEQ ID NO: 571129 - DNA, 267 bp, Homo sapiens
aatagaatcgagctcggtacctgaacattcgtgtcccctggtagacactctggtagattgagaacttggggaagctgccattgtacaatatcatcgattgattaagatcgagggcctggagaacctcgtacacctggatctggctggactctgtctttcaacatagattgagaccatcgaggggctggacacactggtgaacctggaggacctgagcttgttcatcaaccggatctccaagatcgactccctggacacgaatgttca

SEQ ID NO: 571130 - DNA, 309 bp, Homo sapiens
tctggggagagatgcaccatgggaggatcccatgagtcaggaggttctggccacagctgatccatgattataccactccagcctgaatgacagagcaataccctgtcttaaaaaaataaaaactgtaaaacagttattgccttgaattttatttaggccttggggtacacaaagattcttttaggcaggatgcaggaccttggggtagaacacagaaaaacactggcataaaaataggtaaattgataaataaattcatctaaacaaaacacttgtgctcatcacagggcactgttagaaacatgaaaa

SEQ ID NO: 571131 - DNA, 100 bp, Homo sapiens
acaatcgagaatcatgagggcggttcgcgaggttcgatgaaatcctggcaggccagtgatgggatcatggtggctcgtggtgatctaggcactcgcgatc

SEQ ID NO: 571132 - DNA, 438 bp, Homo sapiens
  misc_feature (201)..(201): n is a, c, g, or t
  misc_feature (261)..(261): n is a, c, g, or t
  misc_feature (377)..(377): n is a, c, g, or t
  misc_feature (422)..(422): n is a, c, g, or t
  misc_feature (426)..(426): n is a, c, g, or t
gcagcagtgaagcagagagatgaaggagttgtcaagtgacacagcaagttagtgactcatccccaacatataacacaggactgtcatacaggggatccttattaaatgtttacaaatgaataaacaaattaaggtgccaaagcacttttttccccccccatttttttcatttaaaatttttttttatttcagtagtgtttnggggaacaggtggcattgggctacatgaataagttctttagtggtgctatctgagatttnggtgcacccatcacctgagcagtgtacactgtacccaatgtgtagtcttttatcccttgccacctccaccctttcccccaagttctcaaagtccaatgtatcattcttatgccttngtgtcctcacagtttaggtcccacatatgagtgagaacatacaangttnggttttccattc

SEQ ID NO: 571133 - DNA, 606 bp, Homo sapiens
ggtctgtctcttgcttcacacagtgtttggaacggaacatggatccgggagtactctcttccaagtgctccgaccgccctccgaatttgctctccgttggaaagctccgggaccatcttctacgtgccatactcctgactgctgggacctgaacaggcaccgtagttagtggttcagctccttcttggccaaacaaaccgatgagctcccagattgcgtgcaggaaatgtattactcaaccgatggtggaggggccagcgcgatcaacaagcctggtcgaattttgtatcgcatgcaatggccgtccctaatgaccataccttcatctcggggcttctatgtatcgaaccggcggagtgagtgtgagctctgaggagaaggcgtgaggccaagttcctttccctgcgaatctggcacgtaggagcagacgccgctaggggcgtaacgaagacgatctctctagtaaccatgtcattaactccagcgttgagcggggcctgcggcttcttctatcccagagtacattcaaagcaatacctcacgtcttgaagcatggagtgcggcgtaaaaccccgcatgaacgctatagtaaacgctgcctatggc

SEQ ID NO: 571134 - DNA, 306 bp, Homo sapiens
  misc_feature (15)..(15): n is a, c, g, or t
  misc_feature (115)..(115): n is a, c, g, or t
acatagcagcctgcncaggagtcctgtccatctgtggctcagacctgtggttgctgcacacaccatcaccacttgctggcagtgtaagtttctataatggaaaagctgaatttgnggaggcatcaaaaacaaaacaaaacaaaacaaaacaaaaccccacaaacccttgaagactacatctgcatagtcatttaagaattgctctctattccatttatacttaaagggtattttattcctattcagcatctaaattttcagttttatgtatttggcatatagattttaaattacaggttgagtgac

SEQ ID NO: 571135 - DNA, 444 bp, Homo sapiens
  misc_feature (8)..(8): n is a, c, g, or t
  misc_feature (26)..(26): n is a, c, g, or t
  misc_feature (37)..(37): n is a, c, g, or t
  misc_feature (85)..(85): n is a, c, g, or t
ttaaaaanaaaaaaagtcctcagccngatacggaaancccaacagtcaaagtttggatgaggaacagaatattttacatattccngcaagtgtttcccccacacattacctttttaattacaaaaggtggatataaccttaacccaagcaattaaagctagcatcacccaatattgggatgaatcaacatcatatgcctcttgatgtgatatactaagaaggacaaagtgtcaattctttggtattcctgtgaaaaatttataacttgaatcttaggaggaaacatcaaacaaatccatgttgagggacattctacaaaataacttgcctgtacctttcaaaaatattaaggtcaagagacagaaaggctgaggaactgttccagataaaatgagactaaagagacataacaactaaatgcaatctgtgatcctgggttcgaac

SEQ ID NO: 571136 - DNA, 261 bp, Homo sapiens
ctggctatatggagtcattctgtggttcacatatgacggtcaggtatataaaccgagatacgtgtgaagaatataattgatagggattataggtgaatctctagatggcttcgggtagtatggtcatttaaacagtattagtaataccaacccacgagcataggatgcctttccatttgctcgagtccttctcaatttattttatcagatgtctggtggttttcatcgtagaggtttcttttctttttttttcttttatca

SEQ ID NO: 571137 - DNA, 181 bp, Homo sapiens
agaggacccgacatgaagcaagcggcgagcaggagcagtggggtccattcggaggcaaggagacgcaggcgttcccgatcaagaggaaaacacgcagcgggacagatgtaaatagagcaacctatataaaccgggattttttttttttttttttttttttttttttttttttttttttttt

SEQ ID NO: 571138 - DNA, 612 bp, Homo sapiens
  misc_feature (339)..(339): n is a, c, g, or t
  misc_feature (522)..(522): n is a, c, g, or t
gagatctggtgtctgcagttgacacgaagcacttgcagaactcatcagaagccagccgcggttatcagctagatctcaagagtagcgttcgggtggagggcctgtggttctgcagcagcgtactagccgtgctcctgggaaacgtgcgtctgcccagatgacgtcggtagctctggaagcatgagtcacccactgtgagacctggaagagttagcgaagcgcagcaggggagcccacgtgaggcactctaggaactacgagaggactcctttggcgtcgtatttccaagaagaatccaaacagtgtcttttccattcgaagagcacaatcattgtcagnacaatgcatacatgttgtggccgttgcagtataatctaatacgtaagatgcgataggggataccagatagggagttgtctgtcctcgcttaagaaaaatcgtgagactattgggtagtaatagggagggaagatattcgttaccaagcagaatgggtcatcacctattgcgagagcatagggnggagagcttgtatctaattcatagctagaatgctagtagtggttacttgggatcgttggacgagcggacgggccatcgcaggagtacaga

SEQ ID NO: 571139 - DNA, 884 bp, Homo sapiens
tcagcgcccggcgaaccctgctgctgctactgctgttgctgctgctcggcctcatgcattgtgcgtcagcagcaatgtttatggtgaaaaatggcaacgggaccgcgtgcataatggccaacttctctgctgccttctcagtgaactacgacaccaagagtggacctaagaacatgaccatttgcacctgcctatcacgatagccactagttgcgtgacatcaagccagcatgcgtccatgatggcaacacagagcaacgacattactcgcaccaccgagctctacgctcgacttgctatccgcgaacaggacatacactcactctcaatttcacgagaaatgcaacacgttacagcgtccagctcatgagtccagtccataacttgtcagacacacaccttctccccaatgcgagctccaaagaaatcaagactgtggaactctataactgacatcagggcagatatcgataaaaactacagatgtgtaagtggcacccaggtccacatgaccaacgtgaccgtaacgctccatgatgccaccatccaggcgtacctctccaacagcagcttcagcaccggacagacacgctgcgaacaagacaggccttacccaaccacagcgcaccctgcgccacccagccccctcgcccatcacccgtgacccaagagcccctcagtgaaccagtacaacgtgagccgccaccaacgacaacctgcctgccggaccagcactggggctgccactagaacctcaccctatcaaaggaaggacaacaagaccgcgacaaaagataatcaaccagaaaaaccacacaaaacacctacaaccaaacgaaaacagccagagcccaccccgggcgacacccagaacaactgcacag

SEQ ID NO: 571140 - DNA, 438 bp, Homo sapiens
atgtataaattaattaccatatcccacccattcacttcatttaagctggggcaagtattatccagtttggttccatgtttagcttaattaaggtccactggtttgttccctaggacagtgttgggcttggtcatataagttagaagcacctgggagcttgggcattgcgtgtcacgcctgtaatcccagcactttgggaggccgagcgggcggatcatgaggtcaggagatcgagatcatcctggctgacagggtgaaaccccgtctctactaaaaatacaaaaaaaattagctgggcatggtggtgggcacctgtggtcccagctacttgggaggctgaggcaggagaatggtgtgaacctgggaggcggagcttgcagtgagctgagatggcgccactgcactccagcctgggcgacagagcgagactccatctca

SEQ ID NO: 571141 - DNA, 1068 bp, Homo sapiens
  misc_feature (198)..(198): n is a, c, g, or t
  misc_feature (208)..(208): n is a, c, g, or t
  misc_feature (212)..(214): n is a, c, g, or t
  misc_feature (216)..(216): n is a, c, g, or t
  misc_feature (223)..(223): n is a, c, g, or t
  misc_feature (225)..(225): n is a, c, g, or t
  misc_feature (229)..(230): n is a, c, g, or t
  misc_feature (484)..(484): n is a, c, g, or t
  misc_feature (617)..(617): n is a, c, g, or t
  misc_feature (647)..(647): n is a, c, g, or t
  misc_feature (657)..(657): n is a, c, g, or t
  misc_feature (664)..(665): n is a, c, g, or t
  misc_feature (669)..(669): n is a, c, g, or t
  misc_feature (680)..(680): n is a, c, g, or t
  misc_feature (682)..(682): n is a, c, g, or t
  misc_feature (687)..(688): n is a, c, g, or t
  misc_feature (690)..(691): n is a, c, g, or t
  misc_feature (713)..(713): n is a, c, g, or t
  misc_feature (720)..(720): n is a, c, g, or t
  misc_feature (726)..(726): n is a, c, g, or t
  misc_feature (740)..(740): n is a, c, g, or t
  misc_feature (748)..(748): n is a, c, g, or t
  misc_feature (757)..(757): n is a, c, g, or t
  misc_feature (760)..(760): n is a, c, g, or t
  misc_feature (767)..(767): n is a, c, g, or t
  misc_feature (771)..(771): n is a, c, g, or t
  misc_feature (778)..(778): n is a, c, g, or t
  misc_feature (782)..(782): n is a, c, g, or t
  misc_feature (792)..(792): n is a, c, g, or t
  misc_feature (797)..(797): n is a, c, g, or t
  misc_feature (799)..(799): n is a, c, g, or t
  misc_feature (806)..(806): n is a, c, g, or t
  misc_feature (819)..(819): n is a, c, g, or t
gcctggctgtgccggcggccaatagagcgaggagcctgagttgggctaatgccgcgccctccgtagatcgagagactgaggtagcccagatatgagtcaagagactacgcaacatctcacgggaaatgcccacagaaacgaagagggagcggccccaccagatgaagaagatcccgcatttggagggggaagccagancctgcaggantatnnngngggggcnanttanncaacttgtccctaattttcgatgggccatacctaataggcatattgagcacaatgaagcgagagatgatgtagaaaggtttgtagggcagatgatggaaatcaagagaaagactagggaacagcagatgaggcactatatgcgcttccaaactcctgaacctgacaaccattatgacttttgcctcataccttgaatcctaaaagttttcgctgaggttaatgtgaacactgctttacaagcttgtatttttgngatttactttttctgtaagccttttggtgtttacacttaccagtttctaatggaaattagaattctaattgaatattgttttgtctcagcctaaaagttacggtcagcatggcaattcacctattttaggagnaatactcttttcataatatgaaatgcatanagcagttcanaaagcannctgnattccatcatntnccttnntnnattcagtccttatttttgaagnattactnttcctnctccggctacctgnactaaaanctcagttgnctntgacagntttnttcttgncctnaccaaaaaanatgancntacccanaattcaatgtttnatatttaagaatgtatgttgtagtgtttttgcagagtgtagtctactcatctgtataaacacagccattgggggcaggcaggggcatgttaagtgaatgtaggacatcagtcgtccagactcacagagtggggctccagaatctccatgtttaacaaacttctcgttaaggtaaattctgaatgtgtaccaaaatcagtgccatttggtgtgtgtgtacgtaactatataaataccgggtgtggtataa

SEQ ID NO: 571142 - DNA, 157 bp, Homo sapiens
ccgactgacctccctcagaccactacactctgtgcatcagatgcactaacaatgagacatggtcacatcactgagctaggtgggcatggtgaaagcctttattccccatagatccgtgggaactgcttaaaagcctgacctgcattcagttagatgc

SEQ ID NO: 571143 - DNA, 160 bp, Homo sapiens
tctagaggatctccgctctcaccaccccaggatcagatgaggctcatagaaaactagggaccgtaaaaacccaaagtttggagcactgcagagctggtgatattgagatgaagggaccaggatggacatgcacgcagagcccggggtgggtggagagcgg

SEQ ID NO: 571144 - DNA, 169 bp, Homo sapiens
tcgaagatggcggttgggccaccaatcatgctatcatatagtaaaacccagcccttttttctctcttgtttaatggaagccatgagaaaatataccaacctagacccagccagccagaaggaaccactatcttaagccttcggttcatctcccaaccggccatcttcga

SEQ ID NO: 571145 - DNA, 197 bp, Homo sapiens
  misc_feature (42)..(42): n is a, c, g, or t
  misc_feature (86)..(86): n is a, c, g, or t
  misc_feature (153)..(153): n is a, c, g, or t
tcctccttccactacttcggggccggtggtgcccctcacgtngaagctctcggccggcgacaagctggaccgagttcctgcaaganccggatcgctactacgaccccaacggcttcaatggcccactacctccgaaacctggctcttcttcgnacctgggctatgacaacatcctgggaccccagcagcccgcagtg

SEQ ID NO: 571146 - DNA, 169 bp, Homo sapiens
catgaccttactgttagatgctgtaccaaatctcatccgtctaacattttcgccactcgttaaatctggtctttgggaggaatgatcaatgatatcatgctggtgtcattgctgcgagccgcctcctaagctcttaatgagcttcttgatcttccagatctccacgttc

SEQ ID NO: 571147 - DNA, 446 bp, Homo sapiens
  misc_feature (128)..(128): n is a, c, g, or t
  misc_feature (138)..(139): n is a, c, g, or t
  misc_feature (176)..(176): n is a, c, g, or t
  misc_feature (224)..(224): n is a, c, g, or t
  misc_feature (235)..(235): n is a, c, g, or t
  misc_feature (247)..(247): n is a, c, g, or t
  misc_feature (276)..(276): n is a, c, g, or t
  misc_feature (278)..(278): n is a, c, g, or t
ctcgaggccaagaattggccctccggcgtggtgatgtcggtcgccaccgcgatcacgcggcggccatggcgcgcgcgcaggtctgcggcggccttgtccagcgcctcggcgccgcgcgccacgatcancacgtcgacnncctcggcggccagcgcatcggcacaggcaaagcccangcccttgctcgcgccgcacaccagcgcatgcttgcctcgcagtccganttccatgctcncttctccttgantcgctagattttccaatcgttcgggcgcncnatgcggcccgttcaggtccgcgcggtcttgccgcgcgacagcagatagatgccgcccatcaccagcgcactgcccgccagctgcaccagcgtgatcggctcgcccagcagccagaagccgaggaacagcgtcgacaccgggccgatcatgcccgcctgcgatgccatc

SEQ ID NO: 571148 - DNA, 619 bp, Homo sapiens
  misc_feature (169)..(169): n is a, c, g, or t
  misc_feature (209)..(211): n is a, c, g, or t
ggaaacagttcttggtgggaaagaagcccaaaagcccagacagactgaaagtgaaatcagaaaaagagcccaaggtggaagattctgcgagatgatttcatgatgggagccagcataaaggactgggacaaggagagcaagggcgaggagcctgctggtggcagggcanaggccgcagccagccgttgagcggcagacgggagcatccnnntccgctgcaaatgacccgacggttgggagcctgcgcatggccatctgccaaatgctaggacttcctgagaacctgtgctctagggttcctcaggtgcagactgtattaaagctgtatttttaattcttacagaaatttaacctgtttttctaaaatatttgtacagagaaatattttttttcttgagcagtaaactgcaattttctaggatcctttgctgtggacacatgcccatcatccatcagggtttctaaagtgcggtcccatttataattaaagtgaatttgatatgaaatctctgcttccctgctcagatccatagatctgtctgtcacggagggtgggtgattggtgccgttggtttgtgtggctaagcctttaagaaaaaggtacataaaatttcaaaaa

SEQ ID NO: 571149 - DNA, 710 bp, Homo sapiens
  misc_feature (19)..(19): n is a, c, g, or t
  misc_feature (22)..(22): n is a, c, g, or t
  misc_feature (119)..(119): n is a, c, g, or t
tgctaccttatgctgaagnacntgcagtcatcccagcagctgccatggatggattttgggggcacatgcgactccagtgtggcttgtggaatggtgtgaattcgccggtggtttctctnccggaattgaatcccgaaatggggactgaccatgatagtgaaaattggaaggaagtgcataagatggtggttgaaagtgcctatgaagtcatccagcttaaaggatatacccactgggctattggattaagatgtggctgatcttattgaatacccatgttggaaaatctatcccaggattcatccccgtgtccaaccaatggtaaaggggatgtatggccattgagaatgaagtcttcctgagcccttccatgtatcctccatgcccggggattaacccagcgttatcaacccagaagctataaggatgatgaggttgctccagctccagaaaagtgccagatacccctgtgggacatcccagaaggacctataaagaccctgtgactagtgagctcttaggcctgtagaaattttaaaactacccatgtgattaactcgagcccttagttttcatccaagtacctggatccccgtttgctttgatctttttccatatgtgaatttgggctcacagaatccaagcctatgcttggtttaatgcttgccatctgagctcttggaccaataaaattaactattgtagtgtga

SEQ ID NO: 571150 - DNA, 178 bp, Homo sapiens
ataagaaacaaacaaataatgaatgaaccccccaaatttcagtaccttcccgcattaaacatttgcttcattcatgtaactctttaaatacaggtgtctctgttcatcacgttgctactcccctaaggaagattcaaggtgggaaaaggatctgacaaagaatggatatgtcctcgtt

SEQ ID NO: 571151 - DNA, 298 bp, Homo sapiens
  misc_feature (24)..(24): n is a, c, g, or t
  misc_feature (91)..(91): n is a, c, g, or t
  misc_feature (122)..(122): n is a, c, g, or t
  misc_feature (184)..(184): n is a, c, g, or t
  misc_feature (290)..(290): n is a, c, g, or t
cctctgctcagcagtacagatacngtgtatggagggctctaggctagatgctgggaatccagagaggaataatcaacagttcttcccccanggcgcacagcctacacgtggctttttccttnggcatctggaccacacctcctctgagggctaataatgcagcctgtggtccaggcaacacctngccattctatcaagacaaggctcactgaccccatgctgcagtggctagaaagaatggctagcagcagttcccaaccagtagcaattttctttcctaggggaccttngtcaatgt

SEQ ID NO: 571152 - DNA, 931 bp, Homo sapiens
gccctgttgtgattccgtcctgcgcggttgtgctctgagagttgatgcgttcttggtatctccgtccgtcttctctcctacctaattgcttgtcgcatccgatggaagcattcgatcggacatggacatgagcccccatgtaggcctctagaaaattatctttgtcgggtgtgttgaacttaaatggccggacataagattcatcgacttatcaggtggtgatattggatgaagattgaggcacgccagttcatcttgtatctgcaacggtcacgcttttagcgggtgctgggttcctcaccgtgaattgatttggctcaattgtccgaaacgctagaggctctggaattactgaaggccggccctttaaagttcctcttggcgaacttatcgaccttgtctgtacaagccgcacgggtttcctcatctcgggggcctttgaatataacttagcgacaagtcggtcattcaatcgttcgagagtgtaggattctaagggtcgaagtccccatatttaggttgggacagcccctttagtcatgctcgtcgtgtcgggaagatggcagtacgtctagaagatgaacgcatgaggcaggtatgtgaaactccttcagttagtatctggtgagcggtctgccccctgtacgttgtgttcgcgcggtgccctgcctcgaacagtctagcttgctgctggtgctgattgatgactgatttggtgttgaggagacgttaccgttgtcgatctttgatcgccgagaatttgcggggatcgggcactcggacaagacctttcctgaaggagttttggattataccctgcgccaattgggcgagttcattcgcatgggcaaatcgcacgtttttaacccaaaatggcgggccttcacggacaactctttcccaacgcgttgtttccacccttacccttaag

SEQ ID NO: 571153 - DNA, 553 bp, Homo sapiens
cgaatcatcggagcaaggaaaaggttgctttgttactcatgccctatggtgggtgattaactgcttgtacaattacgtttcactttaaataaattgtagcttaaggatataattaactgaggagagtcccttctatagagcagctcgtactgacgaaggtgcatgcgctgaatgatgtcacggcagtcgtagaacacacggcggatattctcagtgtccacagcgcaggtgaactgagggtagcagtagtgacgcccatctccactggcagtgctgatcctcagacactcatctcgaatgaagtacttggcccgggtcacgcgtgggtcctctccgggctcgggagtagcatcctcaggagtagtgtagcgagcaaattctggaaagtagtcctcaatcttcgatttccccgcaaggactttctcagcgagcagatctatgcatgtagaggaccaaggatcacagagatgtgcgcagccatctgttgtaccagatgctcttgaagaggttcagagcctcctgcaggcggttggtctggtagtctcccggatga

SEQ ID NO: 571154 - DNA, 128 bp, Homo sapiens
cagggctggtggcccttcatcctgccagcatcctctaaggagtcttgagaaatatgtcttagaactgtgtactgaaaggcaaaaggggaagcacttatttataggctcccatgtactctcccacttct

SEQ ID NO: 571155 - DNA, 285 bp, Homo sapiens
ggccctgatcggagcatagcgcaacaatccccaagcgcaagtgctcatctgacgtcagcccagccatcattctactatcaacattactaataagtggctcctttaacctcgccacccttatcatgacacaagaacacctctgataacacctgccatcatgaccctgtgggcataatatgattcatctccacactagcatcgaacacccgaacccccttcgaccttggccgaaggggagtccgaactacgtctcagactatcacattcttcaagtctacttgctgg

SEQ ID NO: 571156 - DNA, 453 bp, Homo sapiens
  misc_feature (427)..(427): n is a, c, g, or t
tgttggaagcgacatttaagatgtggagcacttggggtcgtttgaaacccgctatcttcagtagggacttttacttctagagaacatgtgcattttgattttatctgtcctcaaactgaacttttgctcattttaatagtaaaaacacattcctaggtggagacttaagatgctaatgagacatgcaatgtatgcacaaataagtacagttagtgcacatgtgcacccagaagaccactcaaaacatgcttacactaacacttctttccaccttcttatgaataatcgtgcaaaacccccagaaggagggtttctccagtaacaattaatgctgtctcactcttatgagcagcctgccctggaatctctttctcagaatgtaccgtctattctgcacttaattttcaaagtagtcttttcttttttngtgtgcaataaattactctatgctgt

SEQ ID NO: 571157 - DNA, 371 bp, Homo sapiens
atcatttatcctgtattctattggtcaaatcagtctcaggcctaaacagattcaagaaggaaaagaaatagaccccaactcaggggtgggctgggatgacttagagagtgacaaagaatttgcagttatttttcatttataattcatttgtttttttttttttgggaaaaaaagtttttttttttttaaaaaaaaaaattttccccccctttccccaagggcgcccggaagttttaaatgtatatatgcagatgtgtatatgttttctttttacaaaatttagatcatactgaaaaaagtacaacatgaatttttattgtatcacaaacattctctcaagtcattaaatattcttgaaaaattgacaaaaa

SEQ ID NO: 571158 - DNA, 449 bp, Homo sapiens
gattcttgaggatacacccgctgtcagtggatacagagttttctttgggggcgatgaaagtgttttggaactagatagagggggtggttgcacaacattgttgttggtgggaatttaaaatggtgcaagcactgtggaaaaaacagtttagcatttcctcaaaaagttaaaacaggccaggcgctgtggctcacgcttgtaattccagcactttgtgaggccaagccaggtggatcacttgaggtcaggagtttgagaccagcctagccaacatggtgaaaccctaaaaatacaaaaaattagccgggcatggtggcagacacctgtaatcccagctactcaggagactgaggcaggaaaattgcttgaacctgggaggcggaggttgcagtgagctgagatcgcaccgctgcactccagcctgagcgacagagtgagactctgtgtga

SEQ ID NO: 571159 - DNA, 603 bp, Homo sapiens
ttcggaggagcctccgtggaccccggggaagtaacagtgtgtctggagtgctgaatgggtggatgtgggttcctgtgatttggggtttgcttgtgaaactcccctccacctcctctctcgcaccacaccacctcaagccgactaacatagagaccagacgcctagagaaaatgtggtcaaagcaacacgtacgcaccacgcaagaacagcagtggaacagcagtgcgggagacacgggggaacaccatggaagatgacagggaacagggccagagagggagagcagcaacaccaccgaaccacggaggtgtatgacataaatgacgagatttgaaccgttgataacgcgatggcatgtaggtggcctaatgacgcaagacaatcaaacactagtgaaaatgggatacatactaactagtatgttacgacggagaaaaggaaacagaaagtgacggagcgaaataacggcatacgaggacaggcgacaaaaaaaagagcacaacgctaggccaaacctaccagggaaaaagaggaagaaacaaaaacagatacaaagaagacaaagaacagagaagacaagaggccgcacgcgagaaaaaaagg

SEQ ID NO: 571160 - DNA, 624 bp, Homo sapiens
gaggagctctgtgcagcctggtggggttctctcgaaatatagttgtctttggcttgtcttttgtgacgaatgggagtctctttgtctgttgcccagggtgggagatgcgagtggccagtgattatcaggctcgcggcgagtctcgtgatcgtcccggagttgcgggcgattctcctgcctcagcgctccctagtcgctggggattagtaaggcacaataccatcacagaccggactaaattcttcgtagttaacgtgggtcggaagacgaaggtttttttgccgtgttggccaggcatgggtctcagaactcctgacctcaggtgatccagcaccgaccattgggtacgtctcaaaaagttgcctggggaacttaacaagggcgattgggaagacacccaacgccaacaacacgcagaggcccaagggtgctgcactaatggaccgattggggacataagaggaaagacccaagggaaatgactaataggatcagacacaaccccccatggagaagacacgggggactacacacgacaatgccatcaccacacaagagacaaacctggacgaacagtaaagtcacacaggggaagtggtcaaaggaaggagagaacaagaagga

SEQ ID NO: 571161 - DNA, 771 bp, Homo sapiens
ttagcgtggctagaccgggtcttttctggctcggagagaagcatctgcccccccccgtgtccaccgggagacaacgattgcttttgctagtgtagcattcccctctacgcgaagtttgctacttcattgctagcgttcaaagcaccacgtggccttgaccaagcgattgctaaaagagtggtggcgcgtatttttgtaccagccccccccccctcgcccgcacgcctcctttgttgtggaggcgcccccccgctgggtactttccgccagggataattcgtacaccgcgttaggttctcccccactgggcccgcatataacacatggtcataccccccacaggcgccccacaaatatgcttaggatttcccctcaaggcgccactttgtgtgctcctagtcactctcatgcgtgcctgtaggcaccccccaccacgctacataaccatcggcgcttgttcctttccgcttcattaaaggggtgttctttatacagaccccccattgcccctttgtatctcacggggtattactgccaaagaacactgtattgcggtggggggagacttttagccagcaggctgtgtcgcgcacatttgggctcctcctagtaggtgtactactacgctgcattccccgagttacctcgctttttactttatactcctaagatttttgagggtttagctccccccgaggaggccccccacggcgggtcttttcccgccgcgccgccacacaaaaagatttctccttttcccccaacataaca

SEQ ID NO: 571162 - DNA, 545 bp, Homo sapiens
  misc_feature (248)..(248): n is a, c, g, or t
ttgggcctcattcagggtcatctcggaaatactatgaggtcaccatccataagttcatcaggggctttatcaagagacacgtcatagtccggaattctctcggttaaatgcggtttaacttcctcatagaggataaggctagtatctggaataaatccggctcggtcacacataacggggagcaagtcacgtatttcacaggatatgggggtgtagatatgcccacagtaattcaagctccgggttgngggatcatacatcttcaaaaataacattacatcatgatctttatcaaactggggtaaggtcgctccactagcagccagctcgggatcaacggtttccaggaatattgtgcaagggtttgcattatcacggagctcaatcatggtttcattgccgtcggcttcattatctaacatggcgggtcgtaatgtcccattactctgtgtttgcatgggccacaatcgaatttgatcttgtggaaatcccatggtctgagagagcgtctgaacaaaactcagcaagcgaggagtccttcaata

SEQ ID NO: 571163 - DNA, 172 bp, Homo sapiens
agatgagccaagatatagttaaatacaacacatacatgaggagtactagtaaacaccagcagcagaacatcagtatcagcagcgtcgccagcaggagatatgcagcgcagagccgaggagacccccgtcctgaggaggactgtccaacttttcaaacaccaagccgctgcag

SEQ ID NO: 571164 - DNA, 301 bp, Homo sapiens
  misc_feature (10)..(10): n is a, c, g, or t
  misc_feature (58)..(58): n is a, c, g, or t
  misc_feature (65)..(65): n is a, c, g, or t
  misc_feature (131)..(131): n is a, c, g, or t
  misc_feature (163)..(163): n is a, c, g, or t
  misc_feature (232)..(232): n is a, c, g, or t
  misc_feature (273)..(273): n is a, c, g, or t
  misc_feature (295)..(295): n is a, c, g, or t
agaacctccnagcctgcctttcggagcagcaccccaggaggggatgccgcgctccagnaacaccnaggtcaggcctgtgcagacccctgccctgcagctgcagaaatccagaagcatccttaatgcttctnagtcttcagccagagggagggctgttatttcnagaggtgcgctttttatgtacttttagctagatgtggcatgcatctgtgagctttagatcattaaatcnaaaatgtttgcctaaattagtttatcaggttgttaaccttnaagaatattaaaatgatttccnataaaa

SEQ ID NO: 571165 - DNA, 114 bp, Homo sapiens
acatgatcaatatgatgaacagataagggagcagagatggttaaggactttcaggaacttaactattactggaataaggaatgaatcaacatagaccttgggccagacaggttt

SEQ ID NO: 571166 - DNA, 1390 bp, Homo sapiens
agggcccacgcgcgtatatctcagcttccccaggagcaagagctctgagcccgccaagcgcggtcgtacggccctcggcagagatggcactgaaggactactgcgctatgagaaggagaaagggttaacgaaagttcttacaaggagttctaccaggatgatgaactcgggaagaagctagttcacagtatgggcaacacagttggttcaggcatgagctctatgcgggaacgaggatggactctgttatgtggaccttggacgacgtagccgaggatgaccccgagttggctggactcaagtttggtgagaactgccaggcgctacgtcgaagctcatatggctgaatgcgcgtacaagaggctgcgtgcctcagatacaaggagagggaagctggataaataagagatgtcctggacgtattacattgacggcaatcgcgctaactgactggagggcagcggagatcgggaccctggggatgggtccgagagctcccgcagaactcgagtagccctgctggaactcgatgcgcaggatttgatggtggttatttaccaagggctccgtaggagggaaacaaggcctcggggtgaatccgggcacagtgccggggcgtggacgcctgtggaggaaagattggtgaacctgtgcgttgcaagtcggtcaagtccgtggttcttcttggaacggtcaaaaccccaaggaatgcgctggatgggtgcactttacagctttgttgaacacagcggtggggtgcaagaaaaccataacagccgagtcccagatcttccgcaattgttgcactgccttcgtgatcatggtggcaccaaggctcagtgtagattggcccaaaagccgaaccggagacccagggaaaggagcggattggggattcatggcctgaaccaccggggggcttcacagcagtcccttcaaaattccccagggcggacggcacgacatgggcaggaagcattagctcgagtcaagtgtcgcctgtgagggcgcaagaatccctcggggcggcacacacggggccggagacaaacgtcgggaggacacacaacaggcgaagtgggccccaaggctgtgcgtaaagaaacgcattagaagggtcaccagggggatacttcacgtgggccaagagacctgggggcaaaccgtgagagaaccccgcacagggttggaagcacgacggatcaaccacaggtgaaaccatgacgctggatacacactcgagtgtgttcaaagaaacaacacgaatacgatagacaaacaagtggaggacgcaaacaacacgagagcaaagagtacccacacagacaggaacaaaagacgcacagcagacacaacggggaggaagaacgaggggagacagagaaagacc

SEQ ID NO: 571167 - DNA, 268 bp, Homo sapiens
tcaatgggcaaacccagggttaggccctggtggggtgtggagcccccaggcaaacccagtcctggttgggatcccccccccgggggttactgcaggtaacccccccccttaggcctgggggccaagggggggggccccccccctgatctttgaaaaccctacccaggggtggggtcccttcccagggcccaggccccagcccaggccccgggcccccccctttgtaaaccccccctgaaggtattaaaaactaattttggggaaccca

SEQ ID NO: 571168 - DNA, 1023 bp, Homo sapiens
ctttgtaacctgtaataaaaaaactacaattctgtacatagtttatagttaggattcttaactgtagcatgaacacttagatataccagttatcccatctatataccatatatcgaaggggcaagtcgctatataagttaacctagctagtcaaagagaatggtatccgcgtgttcgattcagtgaatatgtgactgtgtatcgctcaattgcgatgtctcaatccagtcatatcctaaattggtaagctaatggcgtaagactacaggagttcacctgaacgtgatagtgccacaacgtcaatacacgttcattatggcgtgtctcaccacgctggatggtagcagtagatgtagtcacagtcagctaaaagactggacctgcttacacttgaactaggaagccactgaggttgttagacccttgcttcatgtccttgttagttgtaaaaactccctactgaggtctatgccctaattataactaaatctcctggtgccagtagggccatgcgttggccattaggacattgcggtggttaggactcttttttggtcccatctgcctattactagatggttactagctcttgaaataaacattgtttacatattcatagatcaaggagtgcaagatgtcgaaacccttcgtatattaatatgccttgcccaagtttcaactcactttgtaattagaacctaatattctcaagtttgctaattcgtttcccctatagggggccttctcttaaaatgaaagtagtttgcccccatgtgcgtaaacccacggttggatttgacacggtaaccacatttggaaatcctatacttaaagtggtcgttaaagaccacactccataaggaatgcgccttgggattaggcaatcaatagcgtctcgaagttcaccattcccttaccatttgttacaaaccttaggggatagtctttctcaaattgattaagcacttgtgaagcaattggttaacgtaattagagaatttcaaatggctaaaataatacgta

SEQ ID NO: 571169 - DNA, 286 bp, Homo sapiens
  misc_feature (31)..(31): n is a, c, g, or t
ggctatcacattatctcaaacacattctttnctttgtgtaggaatattcaatatccttctagctatttgaaactatgtatcactgttaactacagtcatcctacagtggtatagaatactagaacttagaacttactcctcctatcgagtggtaattttgtatcctttaacaaacctctccctatccttcccttccccctacccttcccaccttcccatatcctctgttctactttatacttctatgacatcaacttttttagcgcccacatagataatgtgatag

SEQ ID NO: 571170 - DNA, 255 bp, Homo sapiens
tgtcgtctagaggatccgaagcgcacgatggcgcagtaatttggtattagtagagacggggttactatgtggctaggtggtcttgactcctgacctcgtgatctgccctcctcgtcctcccaaagtgctgattactggcataagccaccgacccagccgaatacagctttatttctatatacacaaaatcaagataataatttccataatatgctaagtctcctgtcacttcacctaaaccctatgttgcacatt

SEQ ID NO: 571171 - DNA, 926 bp, Homo sapiens
cgggcaagttaatacccagttcccgtgttttctgaaaagcccctctggcgcttcctatttttaccttcatgccccaggcccttttatgggggcaacccccttcgtgggaactcttaggctttattataggaattcagatggagaagtgggccaaagtaagttcagctaactacaaagttctgtatgtggctggacgtccattggtaagtgtgcgaagggtctaggaaacatttgtgctcttctcaaaagcggagttctttgccgttggcgctggaacgcttgtgacaccatagaatggccttctcagaaggacgtatatatatagagctatatagagacttgtaggctatctttggacaactacatgggggacaacctatagggttcatgagtcattgtgtagaggagaatggatacactacattctacgcgaccgacatacatttgtttcaatccgtggtgtttgtagaacaacttttcttaaagattccttagttcctagactcgcgacgccactcgtaacacaaagcggtcatctcttactccttatgatcaagtgaggaaatgtgtatatttgctttggactgataccctctatgggtccaagggagatagactctagtagacgctgtatactggggatacgggtacggattcttgttgcgtggttttccttctcgtggcgggtggggcgagtgtgttgctgttgctttggctgtctgtgctgtagtggagtatttgtcatgttctggggtggggaagatattgatgtatctgctactgctttatgagttcatttgttacattatccccccagaataacatccatctatacagttgacttacagggggataatactgagatggtaaacgcctgccacctttatattttcctggcttcgatcttaactgctgaggaaaaatac

SEQ ID NO: 571172 - DNA, 600 bp, Homo sapiens
tattatgggcacgcccatgagttcccgagtatgactgcattgtctctggctatcactctgatctgcatcccggtcactggacaccagaagctcggagtgaccacacctcttcaatgatggctaaacaaggactacatttatcctccctctctacgctctttcttgtattcagactgcactgtttttctgctggccggatgactcatttctttgtcatctcttaccccacttggccttttcagctgctcgaatcgcctctgtgtgatgcggacagagctatcgacctgctggggtgagattcacttgcattgaatcagctcaaagcgcaggaaggtccagggaagccaaggaagagaagagacaagtctccaactctctcaggagcaaagacaaaaatatgctcctgctctcttatctcttattcagaccgttcagttgcaaaagggttgaacatgatgcagcgggtggtatgtgtggaccagccctaggtcgtgcttctcctccatctggtacccccacccctagttatccagaaagggggatgttccccaggcaaatgccaacatgtccatactgcactcttcacaattgcagtttccc

SEQ ID NO: 571173 - DNA, 408 bp, Homo sapiens
gcttgtgcacaccttaagccctgtacgcggagctaatgcacgagaatcacttgaacccaggaggcagaggttgcagtgcgctgagattgtactactgcactccagctgggcgacagagcaagatcctttctcaaaaaaaaaaaaaggaaagggtaaatttttttaaggcaaattgcaattcataatttactcaactttcttaaaaggggaccctagataccttccaggatgaccgggtctcaagtgatttgtccgtcattctttcaaaaacgagacctatttaatatcggtgacttattttttgcaactaacctttttatggagccctacgtgttgggctgtgttaagtcctattaggcttcatctcacctgatccttcactctgtgacttcggtttacctgtcattt

SEQ ID NO: 571174 - DNA, 276 bp, Homo sapiens
ggggtttttccccgtttttggggggggccctttttccccgttccaaggggagagggggaaaaattttcccttcgtagggggtttttttacccccccccctttaaaaaaatggggttttttttttaagggggggggggttttaaaaaaattaaaagggtaaaaaggggttgggaaggttttaaaaagggggggttaaaatggttttttggggtccccccttgggggtgggggttttttttttggccttttttttgggccaataacccctttggggga

SEQ ID NO: 571175 - DNA, 356 bp, Homo sapiens
agttcgacggagtactctctaaaaaaaaaaggatcaataaataaaggtccaaaaaaggggccaaagatttgaaaggatacttcaccaagggaagatatgagtgggggtataagaacatgaaaaactattcaatatctttagttatcggggaaaggcaaattaaaaccacaaggagatacggctacccaccaaccagaaagtgattaaaaggtaaagtgccctcagctccattggcgggtgagaacgagggcagtcgaaactctcacacattttgggggacatttgggggaagggtaaggatgtctataaagtactctgaaaggcttcaaaaaggtgtgagagtctccgctcgaacg

SEQ ID NO: 571176 - DNA, 234 bp, Homo sapiens
  misc_feature (1)..(1): n is a, c, g, or t
  misc_feature (108)..(109): n is a, c, g, or t
  misc_feature (115)..(115): n is a, c, g, or t
  misc_feature (121)..(121): n is a, c, g, or t
nattcggcaccgaggcaaccataaaaattagctgggtgtggtgtcaggcgcctgtaatcccagctactcaatgatttgttcaatgatgggccctgtccaagcacagtnncagggntgtaangagtattttgcttggactggatttaatgtgagcaggtatacatccaggagttgtaacagccatcttgcaatcaaaaatgaaagcttgtttaaaaatcgaggcagcattcaaat

SEQ ID NO: 571177 - DNA, 1097 bp, Homo sapiens
cccccgggggttaccaccaacagggggcccccacgcccgaagatgagtgatggtggggggccagctacgaccaattgacaagtttctcctcagaagtttagattttttgtatggtgagcccctgggaagtataatgcgtcgccctaatgtaccaacccccccaatgggaagtgttcttaacaaaccagcgacgcgtgtctaaacaggtgtgacgcgcacacagcggagcctccctccaacgtaaacgcctgccaaaacttggcgttggatgtgttgaacgcccccgtgtcaccccgaagtggtgcagttccactctcacacggaccacacgccctcgagaaggagtcctttgcgcgccctctctttttctcgaaaggggggaccacaccgcgggggccccctcgcgacggcgagaaattggggcacaccgctccgcgaacttttggggatacccccccccacccccccctgagaggagaagatattgtgggggcccacgaaaagattcaaccgcgctctcccccgcccctcgtgtgtccccccgccccgccttgtttgtctccccgcgcttgtgtccttctgtctttggttttctgccagctgccacccccggtgccccctccaagctcccccaagccttatagggggagaggggtttgccacacacaggcctctccctcgttttgagaagcctccgccctcttgtgttcgagagatatctggtaaatggccactcggtaaccccctcttctgggcaattctcgttttggtttttaacccactctgttcttgtttctgtgaatagaaggggaaggggggcacacacatgctgaggttcttcccaaggctgccttctggaaggggcccccgcttttccacaccctggacccccacgctttgccccacacacccacagcccctgccccacacccacaagtccacaaatgtttaacagggaaccctcctgcccacagtccccccactcccccacccctcggaggcccccaaggagaaaagccaccagaagcctcgagaccccccccatcctggagaacccccgtgccccctgctcattttcgtagccttttttaaaaaat

SEQ ID NO: 571178 - DNA, 86 bp, Homo sapiens
ggaggcaactctcggggcgctcctagccctgggtgggtggagcgggggaagcggagtgggttggacccggctccgccctaccccac

SEQ ID NO: 571179 - DNA, 497 bp, Homo sapiens
  misc_feature (30)..(30): n is a, c, g, or t
  misc_feature (99)..(99): n is a, c, g, or t
  misc_feature (177)..(177): n is a, c, g, or t
  misc_feature (182)..(182): n is a, c, g, or t
  misc_feature (260)..(260): n is a, c, g, or t
  misc_feature (270)..(270): n is a, c, g, or t
  misc_feature (278)..(278): n is a, c, g, or t
  misc_feature (286)..(286): n is a, c, g, or t
  misc_feature (321)..(321): n is a, c, g, or t
  misc_feature (327)..(327): n is a, c, g, or t
  misc_feature (329)..(329): n is a, c, g, or t
gggtttggggtgtaaaaatgagtagggttnaaggttgtgaaggaaaataggttggtggctttgggctttggggtttagcaatagcttgaaatagtggtngactttgatagtatggggcctttggcctagagttgttgtgctgtgtccaagggctgtgcctttgcccttggagctgcngtgcntgtgtcttgatggcccaaatgtcagggttttggtgggttttttggactttggggtttagtccccatccggggtttggntgagtgtggntggagagntgatatgntaaacctcctgcctcccaataccagcaggaggttntgggcntntgaaccccctttccccacacctccccctggtgctgctgccccagggtcttgacgggagcattggcccctgagcccagagaagctgaaagcctgccgaaaacaggagcaaatggcgttttataaattatttttttgaaataaagctctgtgtgcctgggtaaaaaaaaa

SEQ ID NO: 571180 - DNA, 129 bp, Homo sapiens
cacgagaggcggtcttaaacgggagccaacgaataaggtgtttgatccattgtctacacagagattggtattatgtgaaagcacctgctatgttctagtactaagaaatattggaacagacgctcgatc

SEQ ID NO: 571181 - DNA, 149 bp, Homo sapiens
aatcttggcatcctcccttacagcacatcttactaaaacccccgagtctcagccagaagcagtggccttatgcctataatcccaacactttggaggctaggtgcggtggctcacgcctgtaatccctgcacttcaggaagccagggtgg

SEQ ID NO: 571182 - DNA, 715 bp, Homo sapiens
agcggcttactttgcggaatcaccatggcggctgggaccctggtacacgtactcctgcaaaactggagaggccttcaaggcatctcatcagctgctcagatacagcggggctcaggtccgcgtgctctccgcatcgaccccacttccatctttggccaaagccagccgcagccccctgaactttcgtccgcgaaattctcctggccggcaaggtcccagcaatggtgagggtgagtgatggagttctgtgtgctttgagcagcaacgctcatttgctctactatgttgagcatatgcaggagctgacgggagaagtactcgcagagagcagcagcgccaggtgagtgcagatgggtgagctttgctgattccgatatagctgcccccagtccaggtacctgggtgtacccgcaccttgggcatcatgcaccacaacaaacgaggccactgagaatgcaaagggaggtaaggtgaggcggaatactggggctgcgtggagtgctatactgtgaaagacgagcgacttttctggtgggcgaacgagttgacattggctgcacatcacacgttgtctgcaccctgttgtggctctataagcacggttctatgagccttctttccgtcaggcctttcccaataccaaccgctggttcctcacctgcattaaccagccccagttccgggctgtcttgggcgaagtgaaactgtgtgagaa

SEQ ID NO: 571183 - DNA, 157 bp, Homo sapiens
ctacatcatgatcatatattgtcttctctcagcattatattgcagaagagaacaccacattgttggtcattgtgtttcaaagatgttcattgctgagaataacatatacacagatgtgtttatctcatcacttcacccatttctcacctgggctgtg

SEQ ID NO: 571184 - DNA, 126 bp, Homo sapiens
tactttcacaggatattcatgatgaaaaaacgtggtgcgaatatatctaagtgcccaagcaatgtgaaaagactgcgccgaagcttgtaattccaaaccttaatcttatagtcatctcctccagag

SEQ ID NO: 571185 - DNA, 429 bp, Homo sapiens
  misc_feature (14)..(14): n is a, c, g, or t
  misc_feature (24)..(24): n is a, c, g, or t
  misc_feature (116)..(116): n is a, c, g, or t
  misc_feature (185)..(185): n is a, c, g, or t
  misc_feature (187)..(188): n is a, c, g, or t
  misc_feature (212)..(213): n is a, c, g, or t
  misc_feature (216)..(217): n is a, c, g, or t
  misc_feature (266)..(266): n is a, c, g, or t
  misc_feature (268)..(268): n is a, c, g, or t
ggtgacgatggcanagcgccgccncagcatgcaggcgctcagcatcgcggcctcggccatgccgacgacggcaggtcgaacagttctcgcgcgccagcaggcccgggtgccgagcngcgatgatcgccgcatcgacgttcgcgtgatgctcggccagcatctccacgcgatggcgccgccgattncnnctcggcgcgggtggcgatataggnnacnncgcgtggggcggtcaggggcacgagttcggtgccgggcgcggcggcacncnggccgcggccatcagggtgccgtgatgccttcgctggtattgggattcaggacaaggatgcgcatggtgtctagggatgcatcgagggttcaaagagctgcggtagcgcgatcggcgtttcagccggcggccagcagttgctcgacgaggcgcgcggccgc

SEQ ID NO: 571186 - DNA, 131 bp, Homo sapiens
cgcgaggcttgtctctgagtcttaacctcagtgatatacccacttcggctcccaaagtgctgggattataggcgggagccaccacacccggacttttgagcagtttctgtttgctaagcatttattgataa

SEQ ID NO: 571187 - DNA, 680 bp, Homo sapiens
ggttcattagaccagtgcattaaaggatacacgtcgtaagaaattttccatcgagaaaggctttgcctactggtcagggtatgtcaagtcattggcagttcacgtggccgagaacagaaggcagcagctgcacctccttgttagagtaccagatgctggtgtccgcctggaggatgcttcgtcatacatgtgccacacactcatgcgagatataatagcatcctgactgagcatctgtggtgcgtcgccagctctttcttgacgtggcttgatggaaccaaagtcattactcctagttccagtcctcagtagaactgccttcgaccttggtgtccatgaagtgcatctctgctgctatatcctcctccgagcagccggaagagaggagttaggttctgtggatgagatccattggtacccttgacggagatcctgcagggagtgctgcaggaccgtccagaaactcatggggaagaacagggacagcgtgttcttcagcattcatcagagtgttgcaatatgaaggagatgagaagtacgtgacatcccccaggtagtcccagctggtgctgaatgtctgtgagaccctccaaggaggaagtgattgcactctttcgaccagacccgcacgtctggccttaggcaggtgccacagaggacaggacagcattggagactga

SEQ ID NO: 571188 - DNA, 956 bp, Homo sapiens
agcggaagtagcacaaagatgggaaggaagagtgctacgagaccaagatcatatgctgacactctccccattctccctctccaccacatatggtgttaggaattctccgaaatggaaggttatgaatggggatgactcaagggattcatgaactacgcagagggaagagaaattgctaagggaatgttggtcagaagagtactgcggtagtgtctgtcaaatgtctgcatggatctaagtatggtaaaatagatagcaacgagaaaacataataaggcccaggcgttgagtcacgtggagagcgtcgacgggagtgaaggggcgtccgcatgcagttctcacgagcacctgaggcgagagcagtgctcaggaggggtcctgacatagctcagaaagataccgtagaatagaaggcactatggcggcggacgcggcgtgatgcagcataacagattctgatcctggctccttgggggaaaacctgcatgctaggaccgcgactatagtagtggagatctcagagtaaacacgtggcagtcgggaaatacctagtgatgcatataatcccccaagcgcctaagatcggactcgattcaagtagtgtactctgcatttacccacacgtcccaatcgagaatattaacgaactagacaatggctaggaaataaatgggttgagaaaacacacacatggggggccggacgctgggattcatacccgtaaaaaggaaccagttcctacctttaggttctccatacttggcagactatggtggattgggaaaggttgcataattcccaagtcaaccttggcccccttcactggcacttgatcttccaagaaggctggaccacatccactagggaacggttgggaagcctaatcttccaagtggacttgtgactcttcacaggagtcgcggaaagaagaacgaaatacctcacagtcaatgaag

SEQ ID NO: 571189 - DNA, 328 bp, Homo sapiens
gctgcgtggcaggaggtacattgtaattgatcttcacacccactccatgatctcagactgggacagactcacctgacccgcctcatgatgaaagctgcctgggagtggtttagactgttgtcgccctgaccttatcacgacacctttgatgggctggaggaggcccaggctgccggacagcgttttggttgtcctggctgctgcccggcttcgagatgacatgtcatatcggctggcctgagacgtgcatctgctcggttacggggcccgtcccgacgatccggtattaggtagggaactgcaggccagccgagcatcggcgagcagg

SEQ ID NO: 571190 - DNA, 486 bp, Homo sapiens
caaaagagaaaagatttgttcagaaaggtaccaagtgaggcaggagaacagctctcaaatccacctccctgaagacaaggctcggggatatttatgggttagggaagcagggtggtctaacgtgtggggaaaagtgattggcaatggggaaaaaatgaagtaacaggttcattctgcacaagcatagtcggggttcatggcatctcaaaggaagtatgttcagtaaatggcagcattagcgtgatctgggggaggtggagcttttggccctccaatgtcaaaaggccacctctccggcacttgctcaggcccagttgaaggggcagtggtcctaactggtttgaactggacaggagcttgccctagtttctgaaaaacaactgttgcgaccattaccgtggtgacctatgaatgttatctgtaaagtagccagtgaaggtcaagttccagcattcaggtgcaaggcctcagcttcatggaaaaagg

SEQ ID NO: 571191 - DNA, 136 bp, Homo sapiens
tgatggtcgatctctacacggatccccgcacgattttgcactgtacatgctctatgtgtttttgttgactcgacatctttagctaaggaatttgaattttctattgcttcggtctattgcacatatccattgatag

SEQ ID NO: 571192 - DNA, 216 bp, Homo sapiens
caagggtcgcgggtgtaactcatgcccctcccagcacgcgccgggtctccccatggcccccggtctgggtgcgtttgtctacctctcctccttgttccctaagaggcggggggggggaagggggcgggcggcgtaggcggggcgccagagtggtggtcgggcaccaggtgagacgcccgggtcagtctgtgtaggccggacccttggcgctcggct

SEQ ID NO: 571193 - DNA, 476 bp, Homo sapiens
gccccctcatgccctggctgcgagctggcccgtgggcacctgccctggacatgtgccctggcctgcgagctgcgcccagctgcgaaagtggagcacctgcctgcacctgctttggagtgttggttgcctgtgtgttgcctgccaggaccctgcgccctgctgctggatcctgcagctgcggctggtgaatgtgatgtacatgcctgaccctgcctgacctggcaatgcccctgtggcccctgcccatgctctaggtttgctggtccatgtcccctcccggtgcttgctggcccaccttgtgctgcataacccttgtgcactgcgttgcaggcggttgtgccgggcaggaatgcctggcccggaacgattctgccctggctggcccggacgtggttgcggccacggcctctcgggtcgccccatagaccccgactttagcgcgagcccttgtttgcgaccccgttgcagaacccctt

SEQ ID NO: 571194 - DNA, 192 bp, Homo sapiens
cactataggttttctttacttcgcctgtctaattttgtacttttagtaaagatgaggttcctccatgttggttagaggggtcttgaactggggatcgcaggaccgcctgcaggtgggggtggtacacacagcagggcagctcctccgagaaggctccccactgaaaccaccccctcatgaatgccacacagg

SEQ ID NO: 571195 - DNA, 862 bp, Homo sapiens
ccaagtgctcctagctttaaggggcctttaacagtgtggctggttgtaaaactcccccccaccggccaaatggtactgccccctatccacgtagccaagttggtatattttccgggccccttctccgggaattagaggccgtcttttcgcttgctcgcgtgttctcccccactaatgtcgcgccgcggtgagttccactcatctgccggtcatctcttggagggatgctggcgcacacacacacgaggatcctttggtagttcttctcgccgccgataggcaggtgcttggtaccccacccacgaggctccccgaatgggccgttttttcttgtcacaaggaagaacctttttgttagcaacaagacctcctgttaccaaagctctcttttggaaaaacccagagctttcccactaatgaactctctcatgatacacttgactcaccctggtccccgtcaagacacgctcccctctcaaatttcatattgtgctaaccccggctataacaccctcctcgacggcagtttttatatgccaccagataggaatcaaccactcccctcgttctttggcgcaacatatttgtctctccccagcgacaaacgagtgcttgacatagtatctattatagacagccccgcaattatatgttgtaaaagttgtatttctccccacgcagtatgcgaccatttctgtttgtaatgccccacatggtgcaagagaaacatctgtgagcgccccaacatggtcccccgcgcctgtgtgcttctaaatctggggcccccacattggggacacaaaatacctcgggagccgcgaatgttttcggtaaaaacgtccccgcccaagcccaacaagac

SEQ ID NO: 571196 - DNA, 382 bp, Homo sapiens
gttcctgggaaaggttaatccccgagagtttttcctggttcatgtgttttggggggtttggggtgggagggaatccaaatgggagttgggggagggggggatccagttcaggatcccccagcctggagtcagggccaggggggcatggccccccttgtatccaaaagttcccaggggggattgtgatgggggttgggactggaggttgtataaggggtttttggaaggaagggccaggagttggaattagtgggtccctactgtcccccatggggttgtgacccccccccccccacttttcatgttttttaaaggcattttggttttttaaaatttggacagcaagagcaactttttttgtcaaataaaaatgagaaatgca

SEQ ID NO: 571197 - DNA, 82 bp, Homo sapiens
tccttttgtgtcattcagtgtaaaactgtctaatttgaaaaaaaatgtaggttatgaaaataaagatttaggcactgttaaa

SEQ ID NO: 571198 - DNA, 259 bp, Homo sapiens
ccggctcatttcagtgaagttcgcgtggttcgcgcattcgactacccgatagcagggcggtcgttccgtttcgccattcatccccctgttcgcgcctctggggcgcgtcgcctacgtcattccgagttcaagacaggtcggcagtgcggcctgctgcacatgaaagcgaagcgccgcttgatctccgccgctgagcggcatctcgcggaggttgttcgcgttcagggtgaaaccgagctcgtgcggttgatcgagcaga

SEQ ID NO: 571199 - DNA, 103 bp, Homo sapiens
cactcacagccgcctgcgtcgccactcacagcctctcccagcctcagccaggtcctcagaaggcgcttaagccagttggaggagggtttttccagagagaccg

SEQ ID NO: 571200 - DNA, 256 bp, Homo sapiens
cgtcgacgaaaagcagagctagtaaagaatataacatcataggcatgattaaaatgctaatagtgagcctgttctggatgaaatagcctagtacttctagagacacggcaaggaaacttggttctcctgtaaggagtcctgttatcatgatgaaggaaatcaaatagttaagatctctacagtctttgtgctggctgaaggagggatggtcaccagaggtttagggggtgcttgaggagggacagttggtccacgc

SEQ ID NO: 571201 - DNA, 128 bp, Homo sapiens
tccgggcggccccatcatagtgcattggcttcagtgggcgcacatcattcatgctttgttgttatggcatcatcatggcaggcatggggcattcatatgctcatgcatgcaggcatggcatcagtcac

SEQ ID NO: 571202 - DNA, 1268 bp, Homo sapiens
  misc_feature (1268)..(1268): n is a, c, g, or t
cgcacggccccggtccccctcccagcctgccgtctccgtgagtagtccgcccgccgaggatgcgacgcaccgcagtgttctaagaacgtgaatgcatctgggctggatggaatttagcatcaaggcagagtcccctttctgttcatgagtgttgtaagacgtgcataaaggatgaaggcaggcaccagaaatcctcggcatgtgccaatcgggagagactccgcagctgctgatggtgaaccgtcgagtgttgctgtgttcctcgagcataagcccagtctctccagtatgcctgcaggagggggtcatgcaggaagtttagactggcctatgacgccctgcgcctttattccagccgacaagctgaacatgatcttacttcccgggtgtttaatggagaacccggcgctacacgatgccaaactgcgttttgagtcccaggaaatgtacagggattggggacacgcacctatcacgacacccatcctatgaaagagatggaacgatgcatgagaagcgatgaaaaatgtctgcaagaaagaagatacaagagaagaacggagactaaaatgacatgagaatgtaaccatgatctaaaagccaataaatctgcgacattacatcaagagatggcacaatcgggcgtgagaatgtgagccattcattaacctctccaaaggaagtcaaacgattctgctgtacaaggcatggtgtgtacccaagtgaggcgatcgatcaatggacaaaccgggctacgaaccaaacagtgctagcaccgtaatgaccacacaacaacaaccataaggcatcctagagcatagacaagcgccaaatcaacacacatggacactgggaacctagataaccacacgaaccacaagacagcgaggggaccggaaccaccccaggcctcccacctgacagatgtgaaccgagcgtggggtagttaaagaaccattgataaaactgagctacgctcaccgaggacgcaaaccaacgaaatcgactacaaccatggagacaaaatagggcgaagaggaacagacagcaaccaagacagggagccacgcaggagcagtcgacacgagggcaatgataacaaacaaacgaccggagtgtatacctcccacagaggacacaccaacaccagctgaagaagatcaactactgacggccagtcaacgacgagcagggaagcacatagagcaccgcggagcgacatgcagaacagcgagccacacgagcatcctcatctgaaattagctaan

SEQ ID NO: 571203 - DNA, 163 bp, Homo sapiens
tgccatggtcagacgcagagagaaatcaggcatagacctcttctcgagtagctacatgttatatggaaaataagccaaaggcacaaaagactaacagggtgaaacttgtccagagataaatcaagtacacgaaaagaactgagggtgtacttctagaggcaat

SEQ ID NO: 571204 - DNA, 1136 bp, Homo sapiens
ggttttgtcgagaagcgtccggcgccgtggaggaggaggcccatgctggtttctgtgcgggctcttgttcggatggtgaagctgttcatcgtgaaatctgccccggtaggctacagagcaggagattcggtcactcttcgagcagtatgggaaggtgctggaactgtgacatcattcagaattacggttttgttgcccatattatgacatagacggcagctgaggatgccatactgcaagctgatccattacaatgcttcatggggtgaacatcaacgtggaagccacgcatgagtaagagcaaaatcgtctgcgaaagttgcatgctgggcaacatcgagtcccacctgcagccaatgaaggagcttcgagccacagtttgaggagtatggtccggtcatcgaatgtgacatcgtgcacaggattatgccttcgtacacatggagcggcgcagaggatgccgtgtaggccatcatgggtgccttgcataaacacagagtttacaaggtgtaatgcacacctctttagggtagagggtctgaaccacgaaggctgtgttgcttgaaacactggtctggatcagatctacaaccggcatgagagttctgcgctaggagggacttcacccatgtcgtgaatcctcgcttggagttgagttgatgtgagtggagaattcaaggtgcttggggtggactgagaagttgcggaaactcgaatggttaaaaacttgccgcttgggcgcagattatcagttggggcctaataagccttttaccgccactatgtgccttctcgggggatgtggatacagcccaagtccacgcgtgttctcccgtaccgggtatggccccggcctattccgcggccctattccgcttggcctctcgttgccttttgggtaagtaccaccccgccttgtggaaccttttcgtagagaggtctttcccggtcgatccctaggctgtggggggcgttccccggcaacttgttgtcgaccaacgttgtcttggtgcgttccagagggtacggcgtgtacccccgacgcttccgttcgcccactctgggatcaccccccagattgccccctcccgtccacggcgggctcccagaacactgccttcccttggcccccgtca

SEQ ID NO: 571205 - DNA, 1234 bp, Homo sapiens
  misc_feature (424)..(424): n is a, c, g, or t
tttgtggcttcggttcgggacccgtctgggccaatatgtctggtgaggctccactgtcggccacagtttctccagtctgattggtccagtctgtgtggccacttcccactacctagtttacattcgtgtgcgggcgtatcggttggtggtcgtcttgctctataagcctcagggccgtgttggtggtctatccccggtggtcgtcatcgagctgcagatgtcatgatcatcgtttgatgccctcggggtgaccccatggcaaggacccccctgttcttctaacaatgagaatttctggtgaataactgctattatgtattcagtctcaggtggcgggtatagggaagtcccctaatagcttttctgttataccacttgacggtgagccattttgtaactaaagagtatgtcccttgctcttganaatagccaaggaatattcaggcatacgtatagtttagacccacaggagatctgacagtaaaacctatttaatatgttcaaggaaattataagatggagaaatttagcagagtatcttagatagcctctttatagtaaaccctagtacttaaatagttcagtatactgatctcaatactcactggatgatttaactagcaaactggtagcactagctgaaggatttgtgagcttgagatatagtatgtagtaaaaaatattacaggtataaagttcgagatttaccaaaatgggacattagagattaagatatgtcataagatatcagggataaagatctgtataaatataaatggagtttcagaaagatattaaagagaatgaagataaatcaagatttgaacagataatggatgacaattttaaaaattaacttaagacattgtagaatcaagaaaggctatacatctcaagcaagagaaagactaataaaagcaggccgggcatggtggcgcacccactgtaatcccagcacttatggaggctgaggtagttggatctcttgggctcaggagtttgagaccagcccggccaacatggcaaaaccctgactctacaaaaaaattagccgggtgtggtggcatgcgcctgtggtcccagctactcaggaggctgaagagggaggatcacttgaatctgggaggttaaggctgcagtgagctgagattgcgccactgcattccagcgccaccacactctcaaaccttctgaaacaaaactgcttcaaaaacaaatacaagaccttccactg

SEQ ID NO: 571206 - DNA, 217 bp, Homo sapiens
ctcggtcctgtagcagacacagcataagttacttagagccaaatgttaattgccaagacaacaatggggaaaatgtctccaggctttgtcagagaactttcccattacaggcctggaagcctaggaggaaaaaatggttttcgcgggccaggcccatggtccctctgcatgtgtgcagtctacgggacttgcgttccctgtcatcccacgtttctct

SEQ ID NO: 571207 - DNA, 433 bp, Homo sapiens
cacggttataagtagttcaccagcaaaacggagaacttagtagacagtggttatagccaacgactgctatagtgccccttgtggcactgtcgagaatgcctcacttgtgttgtattttatgtatttcatcatgttaattttttaaatagcaggtatttgcgttcacatgttttgtgtatagtatgtttggggcctaaatgtacatgttttacatcattaattaaattgctataaaacagtttcaaattacaattttaagagatattagtcgacaatattaacatagtcgaaattggttttatttaaactttccaaactttaataaattatgattctgattgaaattttataaccaaataaacatattttgagacttctgtaaaagatttgcacgtaacacctctaggaaaaatctagcatgcttcatttggca

SEQ ID NO: 571208 - DNA, 298 bp, Homo sapiens
gtccccacgtggggacgagccccaagttgagaacaagttatgaaccattgttatactgaaccacttattacatactgctgatcataaacacctgtgtgtaatatttttccctaaaacgtagcacccttcagcaggaccctataaaactttcctccagcccttgcctctttgcaggtagccccttctctgctgagctgcccactgcaacatattttcacaatttctctaataaatctgcccttctttacctacaactatcttggtaaatggctttaccacctgcaaaactgaccctagg

SEQ ID NO: 571209 - DNA, 486 bp, Homo sapiens
ccggacccggaacacaaataaacaaagccactctttggcacagttgtgttaaatacacatcccaggtcacacttgttcctggctccccaagcctgggtcactgctacatggattgcgccaaaacattcgcagcttcaacactgctagattaacattgctggcatttttaaatcacagcaaagcttttcacaatgccctcaagtacgcgaggacaaaggagaacagcaacatgcaacggcagatcctcatgtgaacgggcaggaacagtccctgcgagggcagcatgccagggcaagcacgtccacggccagccctggacttctactccgtgctcaataaaaacaaaactgtgaagcacaccatacatcatgcaaacgcaatacatgcccggacgttgggcgcatctagttagaatgaagtgacttgcgtacaggagtccatgtacgagaactgccacatgagttcaaactcctttgtagccgtctc

SEQ ID NO: 571210 - DNA, 1273 bp, Homo sapiens
gcagccctgttggtgatcggctatctcagggccccctgctggtctttgaggaggccttcttctcgttctgtagcagacaaccacctggagtacctggtgggccgtgtgtggatcggcttctggctggtgttccatggaccctgctcatggtggccctggaggggagcttcctggtaccgcattcgtactccacgcattcacccaggagatactatacgcctatctatgatctcactcttttttctatctatgagaacttctacaagctggtgaagatcttccaggagcacacaccctgcataggctgcttcagacctccaacagactcagaggtaggacggcggatgagaacatgacatagggccgagggacaagaaccacagctggggccgggcacacaggagcttggctagggaagtactaggcgcaggggaaagacccgggggccaagcccacaacacaggaccatgcatgtcgcatggatgcatcagtgagccagagcaccatatattatcaatcggaacatatcttaccatgcagcacaaatttacaacggaaccaggcacagagatacatataccataggcccgggatacagagccgaggactgaagcatgagaggacccaacatggagaggtgagacacaaatacgacaaaataccatccactcacatggctggcaaagcaggagcaataaccacgacaactaaggaaggcaaccaggcaataactaggccccaagaacacagcctggaaagccagacccaccaaggagggaatacaaccaaccaggaccgaaactagccgccacgcacacaaaaaacaacaacggccccacgcggaagcagatccagaccaaccccatggcgaaaaggacgaagaggacagcgacccagaaacaccatggaagctagtaacatagcaacgagctcacggccagcacagcacgagcgagcacccagcaccaaccaccgagcacgtcgtaacaacgtcaagtgcacaccatatgcatggggaagaaccaccaggaaaaaaaaacacagaaggcaaccaggaaagcagaacacaaaaacagcgaaaaagagactgaccaaaaaagacaaggggaactaacgaggacgtaaaacacagcaggggcacagccggagatggccagcaacacacggaagacaacacgggagacaggacaaactacaagcaagcaccagagataggagacagcagacacacaggagagcgcggaagtaaagcgagccgaagagagaccagcca

SEQ ID NO: 571211 - DNA, 145 bp, Homo sapiens
cactgacactcactgacacgactctcgcgcgcgactcgactactacgcgctttacacactttgcgcactgctacgctactacgttctacgacggtacccggtagttaaccgttagacacggctaccgtactacctaccggacact

SEQ ID NO: 571212 - DNA, 165 bp, Homo sapiens
  misc_feature (54)..(54): n is a, c, g, or t
  misc_feature (57)..(57): n is a, c, g, or t
  misc_feature (62)..(62): n is a, c, g, or t
  misc_feature (71)..(71): n is a, c, g, or t
  misc_feature (80)..(80): n is a, c, g, or t
  misc_feature (87)..(87): n is a, c, g, or t
  misc_feature (103)..(103): n is a, c, g, or t
  misc_feature (108)..(108): n is a, c, g, or t
  misc_feature (110)..(110): n is a, c, g, or t
  misc_feature (114)..(114): n is a, c, g, or t
  misc_feature (121)..(121): n is a, c, g, or t
  misc_feature (134)..(134): n is a, c, g, or t
  misc_feature (141)..(141): n is a, c, g, or t
  misc_feature (148)..(148): n is a, c, g, or t
  misc_feature (151)..(151): n is a, c, g, or t
  misc_feature (157)..(157): n is a, c, g, or t
accggttaggggatttgggttttacaaggaaaactaaactcctgctttttgctnaangtggnttttgcccnctaaatttnaaaagcngcctttttaaaatttncaaancnatgnttttccnggattgtttggtnatttttnaaaaaantcntggtcngggggcca

SEQ ID NO: 571213 - DNA, 411 bp, Homo sapiens
tagagtatcccccatcgtttgaaggcggtggaaatctcttatagtcgaaaaaaaagacatcaagcttcaagtgtgctttgataggagcgttgttgggattgggaagctgccggcgggataaatagtggaaggacatcttatgtcattggtttggggagtatatttggctctccctagttggtcctgagttagcagtggaagaaaaaaacacggaagttggcagtcactgaccaagtcctgggtggattgctccagagttagtagtttgctccagagttagtagtttgacttcccaggttgcttgctatagagtttgtaggtcagaaatctattgtcacatttggtcaggtcattgtttatattttcagtttctcaatcttttaattttctagttcattttccactaattgt

SEQ ID NO: 571214 - DNA, 1118 bp, Homo sapiens
  misc_feature (32)..(32): n is a, c, g, or t
  misc_feature (36)..(36): n is a, c, g, or t
  misc_feature (132)..(132): n is a, c, g, or t
  misc_feature (490)..(490): n is a, c, g, or t
  misc_feature (505)..(505): n is a, c, g, or t
  misc_feature (514)..(514): n is a, c, g, or t
  misc_feature (541)..(541): n is a, c, g, or t
  misc_feature (1063)..(1063): n is a, c, g, or t
  misc_feature (1076)..(1076): n is a, c, g, or t
  misc_feature (1081)..(1081): n is a, c, g, or t
  misc_feature (1083)..(1083): n is a, c, g, or t
  misc_feature (1089)..(1090): n is a, c, g, or t
  misc_feature (1095)..(1095): n is a, c, g, or t
  misc_feature (1097)..(1097): n is a, c, g, or t
  misc_feature (1104)..(1105): n is a, c, g, or t
gctgcaggaattcggcacgagggctgatttanaagngctgctttgggcagttacacagtttgtttacaatgaggagttatttgactttgaacatactgtacatggcaattagaagttgtcatggcaaaaganaaccacagctggcctgccacagccaacacaagaaccagaaaatggtagatgaaatgaaggaataaaggtggggtttattccttattataaaagaaaaaaaataattcttcagcagtcttaacaaagacatcaagatacaaaattacaagtgttttgactccagccctgtccccatctcctccaagagcagaggtaggagacagttgaagcaaacaagcaattctgtaaaaattacctagaaaccctacaaatttgattaaaatcaaaaataattcttcagcagtcttaacaaagacatcaagatacaaaattacaagtgttttgactccagccctgtccccatctcctccaagagcanaggtaggagacagtngaagcaaanaagcaattctgtaaaaattacctaganaccctacaaatttgattaaaatctaaacttctataattttgctttttaaaaaatttaatatcaaaaggcctgctttagtgacatgctattcctaccagaaaataaccccaataccccctctgtcagtaacatgctcaagttgaccagccaactcttatctctaaacctatgtggacaagtgtgtcttttaaaccaaagccacggagatcaagtgactgctagtaacgtgtcgtctgttaactaatccagtgcccaccttctccagagggtgggcagggcagaaacccaaaagggtcttgagggcctaatcccagatcaccatctaagaaccacttcccttgctctctactcaaaatgagatgctttatttctaatccgactatttgtctcaaatttggtgccccgtgacctggatggttttttcctttagcaaaacacacataatccacaaaaccatacatatagtttttgtctttacatttagatataaaaatactattctgctttgtgtgataaatcaanggaccaagcagtnaggancntttctnntttcngntaggatnnctctctgtttatc

SEQ ID NO: 571215 - DNA, 989 bp, Homo sapiens
  misc_feature (32)..(32): n is a, c, g, or t
  misc_feature (36)..(36): n is a, c, g, or t
  misc_feature (132)..(132): n is a, c, g, or t
gctgcaggaattcggcacgagggctgatttanaagngctgctttgggcagttacacagtttgtttacaatgaggagttatttgactttgaacatactgtacatggcaattagaagttgtcatggcaaaaganaaccacagctggcctgccacagccaacacaagaaccagaaaatggtagatgaaatgaaggaataaaggtggggtttattccttattataaaagaaaaaaaataattcttcagcagtcttaacaaagacatcaagatacaaaattacaagtgttttgactccagccctgtccccatctcctccaagagcagaggtaggagacagttgaagcaaacaagcaattctgtaaaaattacctagaaaccctacaaatttgattaaaatctaaacttctataattttgctttttaaaaaatttaatatcaaaaggcctgctttagtgacatgctattcctaccagaaaataaccccaataccccctctgtcagtaacatgctcaagttgaccagccaactcttatctctaaacctatgtggacaagtgtgtcttttaaaccaaagccacggagatcaagtgactgctagtaacgtgtcgtctgttaactaatccagtgcccaccttctccagagggtgggcagggcagaaacccaaaagggtcttgagggcctaatcccagatcaccatctaagaaccacttcccttgctctctactcaaaatgagatgctttatttctaatccgactatttgtctcaaatttggtgccccgtgacctggatggttttttcctttagcaaaacacacataatccacaaaaccatacatatagtttttgtctttacattaatttaaaacctatttcgttgggataatcaaggccaccttttcaacaggatcccagataatacaaacttctttttctaactcctttttctatccccttagaaatgggtatcttagaagtcccccggggggaaccg

SEQ ID NO: 571216 - DNA, 935 bp, Homo sapiens
  misc_feature (32)..(32): n is a, c, g, or t
  misc_feature (36)..(36): n is a, c, g, or t
  misc_feature (132)..(132): n is a, c, g, or t
  misc_feature (358)..(358): n is a, c, g, or t
  misc_feature (880)..(880): n is a, c, g, or t
  misc_feature (893)..(893): n is a, c, g, or t
  misc_feature (898)..(898): n is a, c, g, or t
  misc_feature (900)..(900): n is a, c, g, or t
  misc_feature (906)..(907): n is a, c, g, or t
  misc_feature (912)..(912): n is a, c, g, or t
  misc_feature (914)..(914): n is a, c, g, or t
  misc_feature (921)..(922): n is a, c, g, or t
gctgcaggaattcggcacgagggctgatttanaagngctgctttgggcagttacacagtttgtttacaatgaggagttatttgactttgaacatactgtacatggcaattagaagttgtcatggcaaaaganaaccacagctggcctgccacagccaacacaagaaccagaaaatggtagatgaaatgaaggaataaaggtggggtttattccttattataaaagaaaaaaaataattcttcagcagtcttaacaaagacatcaagatacaaaattacaagtgttttgactccagccctgtccccatctcctccaagagcagaggtaggagacagtattctgtaaaaattacctaganaccctacaaatttgattaaaatctaaacttctataattttgctttttaaaaaatttaatatcaaaaggcctgctttagtgacatgctattcctaccagaaaataaccccaataccccctctgtcagtaacatgctcaagttgaccagccaactcttatctctaaacctatgtggacaagtgtgtcttttaaaccaaagccacggagatcaagtgactgctagtaacgtgtcgtctgttaactaatccagtgcccaccttctccagagggtgggcagggcagaaacccaaaagggtcttgagggcctaatcccagatcaccatctaagaaccacttcccttgctctctactcaaaatgagatgctttatttctaatccgactatttgtctcaaatttggtgccccgtgacctggatggttttttcctttagcaaaacacacataatccacaaaaccatacatatagtttttgtctttacatttagatataaaaatactattctgctttgtgtgataaatcaanggaccaagcagtnaggancntttctnntttcngntaggatnnctctctgtttatc

SEQ ID NO: 571217 - DNA, 559 bp, Homo sapiens
  misc_feature (21)..(21): n is a, c, g, or t
  misc_feature (49)..(49): n is a, c, g, or t
  misc_feature (60)..(60): n is a, c, g, or t
  misc_feature (504)..(504): n is a, c, g, or t
  misc_feature (517)..(517): n is a, c, g, or t
  misc_feature (522)..(522): n is a, c, g, or t
  misc_feature (524)..(524): n is a, c, g, or t
  misc_feature (530)..(531): n is a, c, g, or t
  misc_feature (536)..(536): n is a, c, g, or t
  misc_feature (538)..(538): n is a, c, g, or t
  misc_feature (545)..(546): n is a, c, g, or t
tattagaacttgctaaagaanctgtaataagctattttgaaaacgaagnctgcttttgtnaaatgaataatttctaccagaaaataaccccaataccccctctgtcagtaacatgctcaagttgaccagccaactcttatctctaaacctatgtggacaagtgtgtcttttaaaccaaagccacggagatcaagtgactgctagtaacgtgtcgtctgttaactaatccagtgcccaccttctccagagggtgggcagggcagaaacccaaaagggtcttgagggcctaatcccagatcaccatctaagaaccacttcccttgctctctactcaaaatgagatgctttatttctaatccgactatttgtctcaaatttggtgccccgtgacctggatggttttttcctttagcaaaacacacataatccacaaaaccatacatatagtttttgtctttacatttagatataaaaatactattctgctttgtgtgataaatcaanggaccaagcagtnaggancntttctnntttcngntaggatnnctctctgtttatc

SEQ ID NO: 571218 - DNA, 268 bp, Homo sapiens
tcggaacttcgggactcgcatcctgtgagtaccgggaatcgcagccgcgtcgacgcggtgctggttttcgctcgtcgactgcggtctctctggcagcgaacagccggggtctgagaacttgtctgtaaaccggcgtgggtaagattagtgtaaccatgttactcctctgttccccggtgggaaaaccccgccatctgctcccaccagtgttcattgatatctctctctcccgcgggtaaacaatcctcatctctctgcccgggatcgt

SEQ ID NO: 571219 - DNA, 139 bp, Homo sapiens
cccccccttaacttttttccctaaacacctttttttaggggggggccaagggggggagttctaaattgggtgggggggccggggattcccggggggcaagtgtttttttttcctttgtcaataaactgttttaaagtta

SEQ ID NO: 571220 - DNA, 1167 bp, Homo sapiens
tgtttctacataaccgtatgagctttcgtcttcgttttccctgtttttcttcctcgactctgtgttgttgtgtatttctctttctcgtcttctttttgtgctgtttatttctcttctttttctgtgtctattatattgtttcgctttgttatccttcttaatttctattttcctgttttccttctttcatttacgattggccttttggtgtctttttcccttgtgtgttttacctcgtgacttttctgtacttgctttcattttttgatcagtttttactagtgtcacttttctcttgttatttattcatgtattgccacttttgatattttaattgggtctttatctgtttagtctaatcctttattatctttatttgtttcctgtgtttttctctacttgtcacttttattgcattagtctatgttagccgttcgtcctcaggtctcttttattgatgtgttatattgctttgttccttgtatagctgttttagtgtttctattataatattataccaggtagatttctttttatattctgagttagctgtagttctttattattttgtggattcttagccttatctagttacttatttctgctacatcttctggtttggtttattatttattttttcctatgtaggaaatcctacttctgtattttgttacgtctgtacttagtagtttagtatggtcgtctccatcagtagttaagtgacagctatttgttgtgtataggtgtatggctctccctcctccctccccatttcattggcgtaacgtattagtgtattctgtactatatatttacaaataaaactattttattttcattgttacttattatttgagatatttctcttactactttattattctataataattaagtaccatgtatagggtatgtttttagagtataatggtaagtttgtagtaaccctacagaacatctgtgatctttctacagcagcttcagttttgtgccatacattccatgtattttgatatgagcaaaaactgatcttaagtagcagacttaaagtagctttgtacgccttaatgttcattttgatttattttaaatctttacattctagaaatgagatactgtattatcagaccaggaggcatttactgtcgaagataatttcctattcta

SEQ ID NO: 571221 - DNA, 264 bp, Homo sapiens
gggcgtgaggcccacccaggaaaattgcgcaatcctatcaccgaagtcctgcaggggactctggaacccaacgatgtgcctccaaaagggtgtaaggttgtctcgacatccagtacaaggacacatcacgaaaaaagagtggcacacatacctaaaaaaagctccacagtataaagaacgtctgggctcccaagtgatcacgtcaacggccaaatgcatgtgccacactgtcccccgaaagcacctcctatgcctgcaggttgc

SEQ ID NO: 571222 - DNA, 2248 bp, Homo sapiens
atggcggtggccaggaagatccgaactttgctgacggtgaacatcctggtgttcgtgggcatcgtcctgttctccgtgtactgccgcctgcagggccgctcccaggagctcgtgcgcatcgtgagcggcgaccgccgggtgcgcagccgacacgccaaggtgggcacgctgggggaccgtgaggccatcctgcagcgcctggaccacctggaggaggtggtctacaaccagctcaacggccttgccaagcccatcggcctggtggaggggccaggaggtctgggccagggtggcttggcggccaccctgcgtgatgacggccaggaggcggaaggcaagtatgaggagtacggctacaacgctcagctcagcgaccgcatctccctcgatcggagcatccccgactaccggcccagaaagtgcagacagatgagctacgcccaggacctgccccaggtctccgtggtcttcatcttcgtcaatgaggcgctgtcggtcatcctgcgctccgtgcacagcgtggtcaaccacacgccctcccagctcctcaaggaggtcatcctggtggacgacaacagtgacaacgtggaactcaagttcaatctggaccagtacgtcaacaagcggtacccaggcctcgtgaagattgtccgcaacagccggcgggaaggactgatccgcgcgcggctgcagggctggaaggcggccaccgccccagtcgtcggcttctttgatgcccacgtcgagttcaacacgggctgggccgagcccgcactgtcgcggatccgagaggaccggcgtcgcatcgtgctgccagccatcgacaacatcaagtacagcacgtttgaggtgcagcagtatgcgaacgccgcccatggctacaactggggcctccggtgcatgtacatcatccccccgcaggactggctggaccgcggcgacgagtcagcacccatcaggaccccagccatgatcggctgctccttcgtagtggaccgcgagtacttcggagacattgggctgctggaccccggcatggaggtgtatggcggcgagaacgtagaactgggcatgagggtgtggcagtgtggcggcagcatggaggtgctgccctgctcccgcgtggcccacatcgagcgcaccaggaagccctacaacaacgacattgactactacgccaagcgcaacgccctgcgcgccgccgaggtgtggatggatgacttcaagtcccacgtgtacatggcctggaacatccccatgtcgaacccaggggtggacttcggggacgtgtctgagaggctggccctgcgtcagaggctgaagtgtcgcagcttcaagtggtacctggagaacgtgtacccggagatgagggtctacaacaacaccctcacgtacggagaggtgagaaacagcaaagccagtgcctactgtctggaccagggagcggaggacggcgaccgggcgatcctctacccctgccacgggatgtcctcccagctggtgcggtacagcgctgacggcctgctgcagctggggcctctgggctccacagccttcttgcctgactccaagtgtctggtggatgacggcacgggccgcatgcccaccctgaagaagtgtgaggatgtggcgcggccaacacagcggctgtgggacttcacccagagtggccccattgtgagccgggccacgggccgctgcctggaggtggagatgtccaaagatgccaactttgggctccggctggtggtacagaggtgctcggggcagaagtggatgatcagaaactggatcaaacacgcacggcactgaccccacctccgcccggacccccacagacctcgggaaggcgctgggccgagccagtgtggctgagtgaccggggtgtgcccggcagacacagcaggacagggctctatgtgcggccaggacagcagaggctgaggggccggggtgtggctgagtgaccagggtgtcacccactgcatctggagtacagcttctcctaggacaggcggctctacccgagggagggcgtctggggacagtgatgccaactcaaacacgtgccttctccacggtatctcctggccaggctgctgggacagccgccgcctctgcatgtaccacagccccccacgccccatagggaggccaagccccggaccatgcaccaggctgcaccctggtgtcttccacccgcaggcctcccatgctccaagcagcctcccccagcacttgcggccgc

SEQ ID NO: 571223 - DNA, 188 bp, Homo sapiens
ggtcgactcttgggctcaagcatcacgcctagcagttggaggctgtagtatgctatgatagcatctgtgaatagccaccgcactccagcctgggcaacacagcaagacctcatctgtaaacaaaacaaaacaaaacaaaacagacaaaaatgaaccagaaagtcctctttacttatgctgttaaagaa

SEQ ID NO: 571224 - DNA, 214 bp, Homo sapiens
attggtccatattcaaacctattcccaaaggttaaaagggtttaaaattcctttattgggggcccatgtctgtttacctatgcttatgagcaccaataaattactagtttcccttctggaattttaattgttaaacccgaatcaattattggaaagtgaaaaaccccccccggtcccccaacaggggacgtaaataaatgtgttgttccccgta

SEQ ID NO: 571225 - DNA, 1409 bp, Homo sapiens
gagcggcctagtctggaaggcagaaaggaagccccggctcaggtggctggaaaaccccaggcttttctcaggcaggttgtcccacagcagagacaacagacagaaacccagaaaccacctgccacgatgtgaacctgatgcagaaacgcggttcgctccctcgggatgcaaaggccaacttcagcctggcacggcggcgccgcggactccaccatcccggggaaggagccggacccctgtgtggcagtgtggcggcagcatggaggtgctgccctgctcccgcgtggcccacatcgagcgcaccaggaagccctacaacaacgacattgactactacgccaagcgcaacgccctgcgcgccgccgaggtgtggatggatgacttcaagtcccacgtgtacatggcctggaacatccccatgtcgaacccaggggtggacttcggggacgtgtctgagaggctggccctgcgtcagaggctgaagtgtcgcagcttcaagtggtacctggagaacgtgtacccggagatgagggtctacaacaacaccctcacgtacggagaggtgagaaacagcaaagccagtgcctactgtctggaccagggagcggaggacggcgaccgggcgatcctctacccctgccacgggatgtcctcccagctggtgcggtacagcgctgacggcctgctgcagctggggcctctgggctccacagccttcttgcctgactccaagtgtctggtggatgacggcacgggccgcatgcccaccctgaagaagtgtgaggatgtggcgcggccaacacagcggctgtgggacttcacccagagtggccccattgtgagccgggccacgggccgctgcctggaggtggagatgtccaaagatgccaactttgggctccggctggtggtacagaggtgctcggggcagaagtggatgatcagaaactggatcaaacacgcacggcactgaccccacctccgcccggacccccacagacctcgggaaggcgctgggccgagccagtgtggctgagtgaccggggtgtgcccggcagacacagcaggacagggctctatgtgcggccaggacagcagaggctgaggggccggggtgtggctgagtgaccagggtgtcacccactgcatctggagtacagcttctcctaggacaggcggctctacccgagggagggcgtctggggacagtgatgccaactcaaacacgtgccttctccacggtatctcctggccaggctgctgggacagccgccgcctctgcatgtaccacagccccccacgccccatagggaggccaagccccggaccatgcaccaggctgcaccctggtgtcttccacccgcaggcctcccatgctccaagcagcctcccccagcacttgcggccgc

SEQ ID NO: 571226 - DNA, 1425 bp, Homo sapiens
ggcgcttctgaagacgggtgggcagacgatggaggacgaggctctgtcccgcccctgcagcttccttcgttccggccccttccagcgaagggcaggctccgagcagagacaacagacagaaacccagaaaccacctgccacgatgtgaacctgatgcagaaacgcggttcgctccctcgggatgcaaaggccaacttcagcctggcacggcggcgccgcggactccaccatcccggggaaggagccggacccctgtgtggcagtgtggcggcagcatggaggtgctgccctgctcccgcgtggcccacatcgagcgcaccaggaagccctacaacaacgacattgactactacgccaagcgcaacgccctgcgcgccgccgaggtgtggatggatgacttcaagtcccacgtgtacatggcctggaacatccccatgtcgaacccaggggtggacttcggggacgtgtctgagaggctggccctgcgtcagaggctgaagtgtcgcagcttcaagtggtacctggagaacgtgtacccggagatgagggtctacaacaacaccctcacgtacggagaggtgagaaacagcaaagccagtgcctactgtctggaccagggagcggaggacggcgaccgggcgatcctctacccctgccacgggatgtcctcccagctggtgcggtacagcgctgacggcctgctgcagctggggcctctgggctccacagccttcttgcctgactccaagtgtctggtggatgacggcacgggccgcatgcccaccctgaagaagtgtgaggatgtggcgcggccaacacagcggctgtgggacttcacccagagtggccccattgtgagccgggccacgggccgctgcctggaggtggagatgtccaaagatgccaactttgggctccggctggtggtacagaggtgctcggggcagaagtggatgatcagaaactggatcaaacacgcacggcactgaccccacctccgcccggacccccacagacctcgggaaggcgctgggccgagccagtgtggctgagtgaccggggtgtgcccggcagacacagcaggacagggctctatgtgcggccaggacagcagaggctgaggggccggggtgtggctgagtgaccagggtgtcacccactgcatctggagtacagcttctcctaggacaggcggctctacccgagggagggcgtctggggacagtgatgccaactcaaacacgtgccttctccacggtatctcctggccaggctgctgggacagccgccgcctctgcatgtaccacagccccccacgccccatagggaggccaagccccggaccatgcaccaggctgcaccctggtgtcttccacccgcaggcctcccatgctccaagcagcctcccccagcacttgcggccgc

SEQ ID NO: 571227 - DNA, 94 bp, Homo sapiens
  misc_feature (67)..(67): n is a, c, g, or t
  misc_feature (80)..(80): n is a, c, g, or t
attcgcggccgcgtcgacataaaataaagacactgcccagtccctccctcaacgtcccgagccaggngctcaagggcatnattccaataaccca

SEQ ID NO: 571228 - DNA, 808 bp, Homo sapiens
  misc_feature (143)..(143): n is a, c, g, or t
  misc_feature (193)..(193): n is a, c, g, or t
gcacactccacctgtattactgtgcattgataatctctgcattatatcccaataaaagtatagagtggagtatagtattgataacctgtttgcatgtctatatgagtatctgcttggaggatatacttattcatatctcttgncttcaagcaataagaactttggaatggagctatggcccttatcatccatntcgtgtcaatacctgaacgcatggtctacgtaataagtactttctgctagtgtaccagccctacttacgttgagactcactcgtacgtcgttaaagctagtacgtgagctgaatagactcgatgcgcccgatcaacatcatagacgctggacttcgtggaatgcgctcaagcattatgaggatcatactttaatatgcgtagcgacaggactattgggacacctatgccagactgcacttcgtgactactgcacggatggctcccaacggactattaatattcttagattcaaccttgtcttaactacctggggtcaacaagtagtgccctcctagagtgttccccgttttattaaagcttggtatacatggtttggtccaccaaggaaggactcaagagatgcatcctggccctactactttgcgtataccctcaatgtgtcaatattgacgtacctataccttatgcccactctagtaggtcttgccttgcaacagcattaccatgcacgattgcgaacaaacagttcaaccacatgaaaagccaaggaatttaaccctcctccctcattggtcttacccggtcctctccttttgtaggacccctaatcctcg

SEQ ID NO: 571229 - DNA, 1623 bp, Homo sapiens
  misc_feature (386)..(386): n is a, c, g, or t
ggcgcttctgaagacgggtgggcagacgatggaggacgaggctctgtcccgcccctgcagcttccttcgttccggccccttccagcgaagggcaggctccgagcagagacaacagacagaaacccagaaaccacctgccacgatgtgaacctgatgcagaaacgcggttcgctccctcgggatgcaaaggccaacttcagcctggcacggcggcgccgcggactccaccatcccggggaaggagccggacccctgtgggtgacgtgggactgtggggcgggggtgtccccggctgggctgagctgagcagcgaggaggctctgggttgccggaccggggtcagggagcctggcgttagctgcgtgctgtgtggtcatctcggcgangagggagcggctccctcctgccccggactctggatctgtcctgcggtgggcggtgtcggagcagccgtgtggcagtgtggcggcagcatggaggtgctgccctgctcccgcgtggcccacatcgagcgcaccaggaagccctacaacaacgacattgactactacgccaagcgcaacgccctgcgcgccgccgaggtgtggatggatgacttcaagtcccacgtgtacatggcctggaacatccccatgtcgaacccaggggtggacttcggggacgtgtctgagaggctggccctgcgtcagaggctgaagtgtcgcagcttcaagtggtacctggagaacgtgtacccggagatgagggtctacaacaacaccctcacgtacggagaggtgagaaacagcaaagccagtgcctactgtctggaccagggagcggaggacggcgaccgggcgatcctctacccctgccacgggatgtcctcccagctggtgcggtacagcgctgacggcctgctgcagctggggcctctgggctccacagccttcttgcctgactccaagtgtctggtggatgacggcacgggccgcatgcccaccctgaagaagtgtgaggatgtggcgcggccaacacagcggctgtgggacttcacccagagtggccccattgtgagccgggccacgggccgctgcctggaggtggagatgtccaaagatgccaactttgggctccggctggtggtacagaggtgctcggggcagaagtggatgatcagaaactggatcaaacacgcacggcactgaccccacctccgcccggacccccacagacctcgggaaggcgctgggccgagccagtgtggctgagtgaccggggtgtgcccggcagacacagcaggacagggctctatgtgcggccaggacagcagaggctgaggggccggggtgtggctgagtgaccagggtgtcacccactgcatctggagtacagcttctcctaggacaggcggctctacccgagggagggcgtctggggacagtgatgccaactcaaacacgtgccttctccacggtatctcctggccaggctgctgggacagccgccgcctctgcatgtaccacagccccccacgccccatagggaggccaagccccggaccatgcaccaggctgcaccctggtgtcttccacccgcaggcctcccatgctccaagcagcctcccccagcacttgcggccgc

SEQ ID NO: 571230 - DNA, 703 bp, Homo sapiens
taaagggtagttcttcaaatccctaattatagtcaaaagaaatcttttatatgaattgggggggaaaattgggatttttaattggagtatgattaaagaaacttagtggaaaatctgcaatatgctaggataaaaaatactggtgctttactcggtgggcaaagcagattaattaaaacaatatagattagcaaggggaaaaagcaaagttattaatataaactaggtcatttggcagattgtcgcaaattttatgggaaattctaatggatcacatttggattggatttcataagaagtcaccattattattcatggttaaaagaacacctcaagccttctatgtggctatgattttaacaatcttttatactttaacaacagatttgaaattaaacgggcttcctagctggttcctattttctcaaattggtgcaaaatggacttttataattctctatcttaaaagtcccctaaaagagaataatggcgaactttacgtctcctagtcctaagttctgggcattcaatgcggcctccaatgaaccatgggtagtctcattaaagctctgttaggcccactttcacactcattcatacactgtcaaaccgtcggttcacagagggttcttttaaaagccccttttccagatcctgggattccaagtacttcccatttgggcttccccctgtcttcatctcg

SEQ ID NO: 571231 - DNA, 563 bp, Homo sapiens
  misc_feature (31)..(32): n is a, c, g, or t
  misc_feature (137)..(137): n is a, c, g, or t
  misc_feature (162)..(162): n is a, c, g, or t
ggtgggggggggggaaaaaacacattttccnngaatccactgcacactggggcctatacactttgggcatttaattggatttggcgtggggatattcctggtaaaagaacacattggctttcttttctaggacaganttatgcattcggggggggggcctanttaggttcctatataggggggggatgtcgagagggcagactatgggggaccatgattctattatggatggggacggctggaggccaagatataattttttaaaaataggggtatttctttcaagggttacaaataacaagggggcaccttggatttaaaatgggcattataggtgggaggcgggcatgcgcaggcattgttggttaaggggaatatttttaatggaataaatgggaagacggcgcgggggggggatctgacaggggtgaatgggccaagcgaaaccacagcggggtatattttaaagcgcatgagggctttaagggccatggtgggagggggtctcaggaaggggcataggacgggcatgggagtattgtgggaggcctgatcaggcaagg

SEQ ID NO: 571232 - DNA, 479 bp, Homo sapiens
taatagttttctatggaactgatctaagattagaaaaattaattttctttaatttcattatggacttttatttacatgactctaagactataagaaaatctgatggcagtgccacagtgatagcatttattgttatttaaataagaccttggagcatatgtgcaacttatgagtgtatcagttgttgcatgttatttttgcctttgtttaagcctggaacttgtaagaaaatgaaaatttaatttttttttctaggactagctatagaaaaggtatttagagtatctagttaatcagtgcagaattgcagaaccttcatggtgtatggtatgtgcttctgtggtttcgaaagactttatcatctagtctttgtatatttttccttttatgttcaagtcctagtgtaaaggattggcagtttaaatgctttactcccccttttaatattaatgattaaaatgtgctttggaaaaaaaaaa

SEQ ID NO: 571233 - DNA, 1016 bp, Homo sapiens
ggagtcgcgcggtaagaagcaacaagctctcctcttcgtctccgccatcagctcggcagtcgcgaacgcaggcatagcatgcgtgtagtgcatctcctagtccagcgtgggcaggctggtgtgcgagtatcggcaatggcctgctgggaagctactacgtagcctggaacacaggcatccagcctcgatggccagatgccaatgtgacagagaccattgcgggagaggagatagattgccgttctagaaaccttcttcagtagacgacagagggagctgaggcaagcaatgtgccccggggtcagtgttggttagactctggaaacccgactagtcaatctgagtgacacgtctcggcaactgtggaccttaggcaggcaaagcgtcgttccgaccgcttgaagccacactataatctaccagggcaaacaggaccggatggctggccaaataaacttaatggcccagaaggggtgctacttcaaaggctactatggggcacacgcggacgaatcccagttgaatccgtccgactgctgagagatagccgaaaagtgcccggcacaagcttcgtgggctggacccaaggtggcaacaggggggttctaccaaggggtacatagcctttcaggggtatcatctatccccaacagaggggcctttatgggcggatagcgaccggaaaacctttgggtattgcccttgggggagtatctcaccgcacgtacaagacttggggcttcccagtggggaagaaccagattcaatctatcaaagggttcgcagaatatcactcgaggccaacatggaaaaggctccccaaatgtcctgggagaagtgtgtcttccgtaaactgtaaacccccgtgggggaggccctcgcaaggattttcccccacgaaggcatggttaacggtagggaaaggtcccgtgactaacagtgttcccaagttcgtcttcaagcacaagccgctaagagagcacaaacacctgtgtgaaagacaacctcggtggcat

SEQ ID NO: 571234 - DNA, 292 bp, Homo sapiens
tggctggtgcagagctcttaagttaaattagggtctcactggtcaattttggttttggtggccgtggctttggagagtctccatcatgaattcttggccagggcctatgtcgggagtggtatttcctaggtttcctccaagggtttaatagtttaaggtatcccttttaagtcttaaatccatctggagtggatctgggaacagggggaaggggagggggtcaagtttcaatcttcggcatagggttagccagttatcccagcatcatttatgacatagggaatcttttccc

SEQ ID NO: 571235 - DNA, 1091 bp, Homo sapiens
  misc_feature (327)..(327): n is a, c, g, or t
ggaggctctggctcttgcttcttaggcggccggaggacgccatggccgagtgcccgacactcgtgggtaggcagtcactcgaccacccggatcgcctgtgggcctgggagaagttcgtgtatttggacgagaagcagcacgcctggctgcccttaaccatcgagataaaggatagagttactaggtttacagggtgcttcttgcggtcgggaagactgtctgtcctggggaggccttatgtaccccgctaccctgagatagtgcccaatgctctgcgtgccgtatcactgtggcatgattcttagccgtgtatggtactgagtaccngcatcctcagactcctagtttcttggctgctatacgtgtaccacattcaagatctgacggcgtgcgaggacatgcttctacgagctgctgcgcagatgactgatgtatggtctgtgggagtacctgtctcctttcacctccagggcctgatgcctggccagcctacattgggggatgttgtgtgttctgtctcgccgttcgttctactatgcctgtggtcttctccaccacgtctggggtctgggcggaatggacccgacagaaggatgagctctagccgggtcctgtgggacctgcctgtaagcccactctgctcgccttagcactaccactcctggcacggaggattccatttggccgagcttcttccaggtgcccagctatacctgtgcctcggcttctctcagctggatgatggtcttcaggctctttctgtcccttcttgtccttcacagcactagtatttcatgtttgcacaccaatcaagtccgtgaacttgtgagaaccacagcgattcacctgagcaggactcttaaaccctggaccagtggtctcccatggtgcgtacgctggttgtaacccgcctggaaagctggctggcgtgaaacaggctggaaagctgctgcgcggaaaaagccggaagctgctggcccacaggggcctggcgtccaggaagcgcgaagggaccctttgggccagaaccaagctcgggcgggccacccggagcacaggaggccgagccctgggtaccccacacttcgccc

SEQ ID NO: 571236 - DNA, 318 bp, Homo sapiens
atcgctgctcacaaaatacatggtcataacttttctttaaaaaaaaaaaaaaaaagacagccttaacaccattccaaggggcacactatttgggcaatggttatgcaccatttcaattcccccatggtgacccctaatcacttcatgtggatatccctttttggacccacccatctccttcatatatgggcatgtccatagataaagatagactacaaggtggtatagggctttatggtaatatgggtgggttatatgacctaaataaaggtgtatttatgtataaccagaggggtgtttttaactgtgagcgggtgg

SEQ ID NO: 571237 - DNA, 103 bp, Homo sapiens
atcgggagaagacaaaggcccagaaggagacgatgcgaagctggaggctgagctgagccggtggcgcaatggagagaatgtgcctgagacagagcgcctggct

SEQ ID NO: 571238 - DNA, 415 bp, Homo sapiens
  misc_feature (157)..(157): n is a, c, g, or t
  misc_feature (168)..(168): n is a, c, g, or t
  misc_feature (171)..(171): n is a, c, g, or t
ataaatttcatctgcttccatgaattaaacattaacagttctgtgatgtgctgatgtgccctaccacacagttctacagggtagcagtgattgattttattgtattttttttttgagcaatcaagagggggaagaaagggccgcgttgttggcgaangggaagtgggngcnaagaggcggcgtggcaaaaatggggggggggggggggggggggggggggggggggggggggggggggggggggggggggggggggggggggggggggggggagaatgataggagattctctctcaaccaatattatcaaatatttaatggctttggatttagttttactgagtaactcataacatctcttaaggaagttagtctaaaattacaaacaaaatcatgcctatatgaaaaacttata

SEQ ID NO: 571239 - DNA, 279 bp, Homo sapiens
ggtactagcatcccttaacagcggacccatgttcattgcagcgttattcacaatacgagatatggaaacaacctaaaaatttttggtgtttaatgacaatgtggtgtgtgtacacaactgaatattattcagctatgaaaacgaagggaaatcctgtcatgtgtgacaacgtggatgaacccaaagtcattatgttaagtgaaaggacccaggcacagaaagacagatactgcatgtcactcatatgtggatctaaaaactgtcacaactcacagaaac

SEQ ID NO: 571240 - DNA, 192 bp, Homo sapiens
gcttattcgtgtctgccgattactgcgctaaccacatcgagcagatagctgctgcctccatccactgcgtgtggattaccaacgccgctatcctctggctctggtctacccactacagggtcaatactcgctttgcatgtacccccagcgaggacccccagttccccttggtgcagtggtcagcccgtgaac

SEQ ID NO: 571241 - DNA, 514 bp, Homo sapiens
tttttttttgagacaaggtctcactctgtcacccagactggagtacagtagcgagattacggctcactgaagcctcaacttcctgggctcacgcaattctcccgcctcagcctcctaagtagctaggactataggcgcatgcatcacacgcggctaattattttatttttggtagaaacagggtctccccacgttgctcaggctggtcttgaactcctgagcccaagcgatcctaccgcctgggccttgcaaagtggtgggattacaggtgtaagccaccgcacccagacagagaagaagtattagacaaaaatctctcacatgtgcatatctgtgatggctagagcaggtcatcagaagttcaatgctgccaaaacacaagctgcatgtgtaggtgtagaggtggggataagaggctggagtgtgtggtagattgtaatgatggccccaattctttaccctcctttgtagtctcactgccacataactgcatggccctcattctatgggtgag

SEQ ID NO: 571242 - DNA, 268 bp, Homo sapiens
  misc_feature (156)..(156): n is a, c, g, or t
caccaccaaagacaggcaccctggatcttttcccgtggttcacgtccaacacaccaatggcaccagctttgccactcgactttgccaacatttttgtcattggcgagggcaacaaaccatggatttctcttcccccaggaaagggtatccgcctcnccccccccacaaaaaaagacaaaagactggcggccaaaaaaaacagtgggtgaaatgggtccctgggtgacatgtcagatctttgtacgtaattaaaaatattgtggcagga

SEQ ID NO: 571243 - DNA, 1317 bp, Homo sapiens
  misc_feature (512)..(512): n is a, c, g, or t
  misc_feature (524)..(524): n is a, c, g, or t
  misc_feature (699)..(699): n is a, c, g, or t
  misc_feature (891)..(892): n is a, c, g, or t
  misc_feature (952)..(952): n is a, c, g, or t
tggacattgattcaccacccatcacagacccggaacactggacggatcatctgtaccatcggtcccagcttcccgatctagtgtgcatgacgattagaacggatgatagaattaggctcatggaatgaagatgtgagcatcggtctgaaacatttctctacgatggacactcaatgaagataccgagtgcaggaccgaccagtcgacaggaagtagtagcaggcagatgggcaactgaggaagagtcgtttttgcttattctagacctctcacattcacatactaacaccaggtccctggggtctgtgagctcatagaaatcaactcaacaagggaatctgtaagatctcgagaccttgggactgcatcgacagggcgcaagacggtgcaacattgcaagtagagttggagacgtaggaagcagagttggagcaacacggtctttcaagaggtacgaccagttcgtcgtgattcattcaggcctgatcatttgggaaagacagatgctgaancgattgattagncacttgccctcgaatgggactggggattctcaaactaggagacacacctatacatgaacaaggggggtcgtgctctggaaccgataggaggcgacaacgagatgtaatatcttactcgcctgtaaagtgtattgggtgtccattgagtatgttctttcttccctacgtgctgcanaggcctatgatatatgagctggcccagaaacatattcggcctgaaggatggacttgcggtaccgagtagggacacatagacctggctgagttacttcccctctggtggagtcaggtcggatgaacacgggggttggatgaaaacctctatagcactgagttgagcctctcgacctaggtaagaaccatctgnncttctgattctcggtggggtcccgaggaggaaagaagagcaccaaactcccaccagcggnaagttctagtaccaggctttgtagcaagtggttccctgagcgcctatcgagtggactggatccaattgagtgggttgtccgcttgtttcctatccaatcccgaagaagaccctcctaggattggtccccggtccgacttgttccagagaaaggggtccctcggtggaggcaatggacagggcacactcgctttctgtcacgattccgttctccgcacaagtccgggacaaattccttcgaagggcgtctgggcatgtcgtctaaacacctgggagcgccatagattcgggtcaacaggggcggctctcggaaatctctgactttaacactggagaaaggggacagcagccaaagtataaggccgg

SEQ ID NO: 571244 - DNA, 1461 bp, Homo sapiens
ctggtgccctgcagctcaaaatggatagccacagggctggacgtggaaaaagatatggtgaaggcagaactgcctcacaccagctccagaagcacgtcctctgacttcactgccgcagctctttccacacgtgggccgtgcattgaccctaaacacacttgcacgaccatgcacatacactcggcaccacttgcacggccaacggtcgtccggctactcctgcccctgcctcctagcgcaccgaactagctagaccgttagcccagccagccccctaccccaagagcgtacacgccctcccccacactcggtaactcactcgcacgcaacccctccgcttccacaccccatcatactgacctccccctacccgcgccttccccccgtctgttagccactctacgcgctaattaactcattacccccctaccggcaacacctcactctcaccacagcaccctaccccgttcccacacatcgccacagcccccctggctccaacctctccctggaccctcacagttcagacaatcccagaacgccggcactgattctccaactaccccctgcgtcccgtggcgccctcccacacgcagcttccgacaccagcacaagattattcgacgcactggcgccacctttccccctcgccaaaaccaatccctagggcatagcgccgggccaacacgggcccatcaaaccgcggacacataggccttaaggcccgttcacattacgaaaacctttggccctctccttccctccccctttggcccaaccgcaatcgccccagaacgacatcgaacattgaaagctttataccgaagcatacccaaactgccctaccgcgaaaagcaaccttgccggcctacacaacagcagggcgtacaacttggccgcctacacaacacccacctttaaaccgcctataagagtgctcaccctgcggaaaccccgaaacgcccaaacccgcatggccccaacagcacaccttccacagagcccgcggaacagcccccatcacacaaggctcttcacccaacgttccccactaaccattgtgcccctcgccccaacacagaaaagattaccaccccgatcgggcacaacaaccccgcccttggggccatcgcctgctctaccaccgacagcttcgcgggaaccgttctcaatctgggaccgttggcgatccccacaactactataccggatgagcattttggcacagacatttcccgagagacgccacatactcgggaccaacacattcgaatgtagactagaccgaaaccccccctatcaacatttacacctctcacatctccaccaccaccttcccctgtccacaccacgcccctctctccacataaacatttccgccaccacatcaacaacatcatccacatctacacaaccacaaccacccaacgacagcacaacaccccaaaaatcaaccactaa

SEQ ID NO: 571245 - DNA, 178 bp, Homo sapiens
cgctgaacgctagggccacaacatataaagagggattatagtcatataaccactatagcagtaatagacagagcagcacaaaccacggctgcgaacaggaataaagggaggcagagagaccgagaagatctctgaacatgtacttgagtggggaacaggaatctttagggcgcgaaca

SEQ ID NO: 571246 - DNA, 501 bp, Homo sapiens
gacactgcagccgccctcggcttgcgccgccgcactaccaccgacgccttgccgcttcgcgccactatcccggccgggaggcccaggcgcggcgcgcgcaggaggaggcggaggcggatggagcgccggctgtcgggagcaggaggcgctgtctagttgctcgagcacgtgctgctccggcgcccgtgactgccttccggtcccgcggtgtggttctgcctcctgggcgagtcgggcgttgtctgctggagaaggtgacttaagcgccttttccggccctagctccaggcgttgtgaggcgtctggtgcctgatggtaggtatggtgtgtcgttctgtgccccaggggctggagtcacctggtgcccctgaaggacagattttcggctgttacaggatggcattgtcctgctgtcttctgtgcgttagttttctcgctgagcgggagctcagtatgacttgccaccacctgatactcagggcaaggcccttttcctccagc

SEQ ID NO: 571247 - DNA, 143 bp, Homo sapiens
aacaaacttaatctgtttcaataaagcatccagatgcctttccattctacctgtgctgtagatttctaaatcacaatactgtgggatttgtagcaagtatgctacctgctctgaatctgccgaatactttgaaagtaacatag

SEQ ID NO: 571248 - DNA, 300 bp, Homo sapiens
tggacagcgtatggctccatcacccagactagagtgcaatggcaggatcacagttcaccgcagcctcagcccctcaggccccagcaattctcccacctcagccttccaagcagatgggagcacaggaatgcaccatcacacatggctaatttttgtactttttgtaagatggagccctgccatgttgctcaggctggtcccggactcctcaactcaagtgattcacccggttcagcctcccaaagtggaatctgcacgtggataaatatttttaagaattaaaatattgaaccaggtcga

SEQ ID NO: 571249 - DNA, 498 bp, Homo sapiens
  misc_feature (1)..(1): n is a, c, g, or t
  misc_feature (12)..(12): n is a, c, g, or t
  misc_feature (40)..(40): n is a, c, g, or t
  misc_feature (74)..(74): n is a, c, g, or t
  misc_feature (111)..(111): n is a, c, g, or t
  misc_feature (135)..(135): n is a, c, g, or t
  misc_feature (137)..(137): n is a, c, g, or t
  misc_feature (140)..(140): n is a, c, g, or t
  misc_feature (150)..(150): n is a, c, g, or t
  misc_feature (173)..(173): n is a, c, g, or t
  misc_feature (178)..(178): n is a, c, g, or t
  misc_feature (190)..(190): n is a, c, g, or t
  misc_feature (251)..(251): n is a, c, g, or t
  misc_feature (258)..(258): n is a, c, g, or t
  misc_feature (265)..(265): n is a, c, g, or t
  misc_feature (267)..(267): n is a, c, g, or t
  misc_feature (271)..(271): n is a, c, g, or t
  misc_feature (277)..(277): n is a, c, g, or t
  misc_feature (293)..(293): n is a, c, g, or t
  misc_feature (311)..(311): n is a, c, g, or t
  misc_feature (320)..(320): n is a, c, g, or t
  misc_feature (343)..(343): n is a, c, g, or t
  misc_feature (349)..(349): n is a, c, g, or t
  misc_feature (385)..(385): n is a, c, g, or t
  misc_feature (407)..(407): n is a, c, g, or t
  misc_feature (481)..(481): n is a, c, g, or t
nctataaatccngccacaatatttttaattacgtacaaanatctgacatgtcacccagggacccatttcacccnctgccctgtttggccgccagttttttgtctctttttncagcaatggtgagggggatacccntnccncggggaaganaaaaccatggtttgttgcccttnccaanaacaaaaatgtnggaaagtcgagtggcaaagctgtggccattggcatctttcacgtgaaccacgtaaaaaganccagggngcctttntntgtnggggancacaccaatccttccnaggttagcacccccagtnaccaaaaanaggtaaccagttttgaacttgangaaatnagtaatcttgccagtttctaaatcaatctgaatggnataattcaccttgatgaggggntcgggggagcggatggggcgggcataaagagtaaccagaagagggattccttttgtgcccccaaagatctttcncactttgcacaacttgt

SEQ ID NO: 571250 - DNA, 106 bp, Homo sapiens
cagtcccacagcataacatgctctccttgtgcagcttatctggagtcttgatgttgctctctaaagacctttaataaaattttgtacaaatgacaaacaaaaaaaa

SEQ ID NO: 571251 - DNA, 290 bp, Homo sapiens
cagccggtctatgtgtctctttcaatgtgtcttagaatagcgtttccttcctcttgttctcagggtagcttaggttcctattcactgacacgtgataagcgtatgcgcgaatgaatcacagcacgtttatgaaggcccttttagaccatgcaggtgtactttgtgacatccgactcgcacatgtcccctgaacctgcgcgttcaacgtatgacaccggtcgtctgctcccttgctccgttgggggtgtgtaccacgagcggagccacaccagtcagagtcaatatctgcc

SEQ ID NO: 571252 - DNA, 119 bp, Homo sapiens
ccgaacagcaccgcctcgtcccccaccgccacgccggcaccgtcgggccccaggtcaatgacgaaatggtccatacagattcgcccgacgttgcggtaccgggcaccgttgatgctggc

SEQ ID NO: 571253 - DNA, 487 bp, Homo sapiens
  misc_feature (38)..(38): n is a, c, g, or t
  misc_feature (49)..(49): n is a, c, g, or t
  misc_feature (123)..(123): n is a, c, g, or t
ctcccttcccttaaccaattccaataatttaaatctgnctgaagcttancctttaaccttggaggatccaacttcctgccacagaagtatattccttaaaattacgtattatgcatgtatgtntgcataatatacttcccataaaagctgaaacttggctgggcacagtgctcacacctgtaattctagcactttggggagcacgcctgtaattccagcactttgggagaggatcacttgaggccaggggttcaagaccaacctggccaacacagggagaatttgtctctacaaaaatattttttttaaaaattagccaaacatggcggtgctgcctgtagttccacctactcagggggctgaggcaggaggatcacttgagcccagaagttcaaggttgcagtgagttgtgatcacgccgcaccactgcactctaacctgggtggcagagtgagcctctgtctcagaaacaaaacaaacaaatgaa

SEQ ID NO: 571254 - DNA, 320 bp, Homo sapiens
gaaaaggagaatagaaagagggagagagtgagaggagataggacaggggagaaaaggggaatgataaaaggagcaaagtagaaataaggagaagcaggtatagatggaagagaagggaagaagggagatagagaaagagagtaagaggaagggaaaagaaggtgaagagaaggaatgggaaaccaagaaagagagcgagatatcgaggtgtctatatagatatctgtctagatctacgtgtatatgtatatatatctactatatatatatatatatatatatactactctactccgcgtgcagaatcgtgcagcgccggg

SEQ ID NO: 571255 - DNA, 371 bp, Homo sapiens
ggcacacgagcattaccacctgagctctgcctcctgtcagatcagcagtggcattagactctcataggagcacgaaccctattgtgaactgcgcatgtgaaggatctaggttgcgtactccttataagaatctaatgcctgataatctgaggtggaacaatttcatcccaaagccctgccaccgcatcacatccatgggacaaattgtcttccacaaaacctgtccttggtgccaaaaaggttggggaccactgttgtgggatcatttcgagttacacctctctgaataagtggacatattccagtggtgtttacctggcagctgttgtaatgctatgatgtaggtcttttctctatacagaacatgctga

SEQ ID NO: 571256 - DNA, 423 bp, Homo sapiens
  misc_feature (246)..(246): n is a, c, g, or t
tgttgggccctcccactccatttggcaatggcctggaatcctcctttgccctccttgaggcctgcacaactgtggccgtggagctgacctgaccaggcaagggtgctgtttccatccctgagccgcctgccccctccccctcctgaaaatccattttttggggctcccctgacaaaaaaaacagccgaagtcaaaaccacatcctcttgttgatgttggatgcaggctgtccggcctcagggccanggagccagtttcccctgtgcgggaactttgagtcaaacgtgattatttgggggtctgtcccccctggctggatttggaggcaaaatgccaggccccccaggtgttttcagggcagtttttggtgtttgcttttcaaattccaaggactggaattaaaacctttcctgggactttgga

SEQ ID NO: 571257 - DNA, 420 bp, Homo sapiens
gagtgatattcagcctggcacattgcatgcttacatggtatagggacatcagcattagcctgtagtcccacctactagagaggctgaggcaggaagaatctctatgaatgcaggaggcagaggttatagtgaagcaagatcgcaccaatgcataccagcctgggacaacagagtgagacttcgtggcactcccacccagagcgcaaccaaactgactatcatccgaatccagctcctgggcatcaccgtctaacgacttcacaaaactctccatggtacgaccagtgatgctgaaacacttcaaagctttatctcctcccaaaatggccttgacgatttcctcactgctggagacaccccacaagagggtacacgctgctgctcccatttctgtacaatactctgcctgctgcaggagta

SEQ ID NO: 571258 - DNA, 865 bp, Homo sapiens
ggacgcgtgggtcgaacccacgcgtcgtttttcttaattgtatatacgcgggtttggttattgtctctccctggtttggttttgtaacctaaggaagcagagcctctgaaaccaaacacagcgagtgtcgcccgtcccctagaaggcaccccggtcacaggaggggcaggagaggagacccccgtgttcctgcatgcgctgtcgccccgccagggtgttctccgcaggggtcgaggcaggagggtgcggtgtgaggcgccagcctgtcctcagctggaaggtgcggggcttggcactgggcacggtgggcaggtccaccagcgaggacgcagggagcccggccccctgtcacacggcgtggtgcggcgtggtgtgtagccgggctggttcagccgcgagggttttacacaacacctaggccggggcgaaaaatccccactttctgttcccacacttcggagaacccggctttttgaacttagaaagcgttgttggtgtttttgtgtggggacgccagtctttctcaaggggctccccgcccggggcactccccaggcgaatagggggggatctccttagagaattcgaaaggccgcccaatctttcacatttcgtggacgaccgacaacaagaacctcttctcgccggttgggtggacaaaaaactccttcctggagggcggggcatgtcgtttgtgaaaaaccaacacgcaaccaaaaaccgccggaggggtgttgtggtgtgtggcggcgcacacacaggcgcccgcattaattcaagagctgaacaagcgcgggtcggtgtggaggaccacattcgcaggagagtttctctcaccgcaaccaccaacacttatccaatctta

SEQ ID NO: 571259 - DNA, 337 bp, Homo sapiens
  misc_feature (213)..(213): n is a, c, g, or t
gtagtccaagccctgattagatccatagagtttggaagtcttccttccaagtagaggggcttatgacaaatcttagatttttgtatgaacctacaatcacagagtgtatctgtaagctaactcatggtcaaggagatcagtcagtaatttttttatgtgcttacataagaattgtttttcttcataagaagactatagaatcaatactctctnatacatcttattcacaatgacaaggattcaaaaaaaaaatcactgaaccaaacaaaaatggggatgtggatagtgatacagagtcagattaaagcagtcagtagaggcctggctggcacacatt

SEQ ID NO: 571260 - DNA, 725 bp, Homo sapiens
cttctttggaggatgtagggtattttgtgcatctagatcacgttgtagtaactagtagttccctgttactgggaagcatttcattgcctcccagcttgggagcatacaatggagaaccatgactgggtcatgaaatgggttaatttaggcttcttgtcattacagggcaaagggctccctgtggactgacaattaaacatatgataaaagtgacatctgctcatagaatagaaatcagagagtaaaaagtcttgagtgtaataaacaagtgtctttttcccccacagtctaactacgcagacgcaacctgtgctactagatatgcgatctcctcttaccttcaaggaaagaggtcaccatttttgagttgatgcgtatccttcgcctgagagctatctttgatatcatccttttggggtactttttaattacttgctgtatctctgtcgtagctgctgtgtataatagagaaagacacatttgtgggagtatctgcccacacaggcaggctgtacattctggagagaggtcaccacgtgggtgtactctaacccaattcatatccacattgtgtactcggagatagtgtcagatcccacaggttgagtggctctggccacatgactgtcccctacttgccacaccaattgcatgctgcaggctgggtttacctgtgcttcttgccaaccgattataatttggggttccccccctttcttttggtc

SEQ ID NO: 571261 - DNA, 582 bp, Homo sapiens
gttgggagctggggttgtttgctcccaacttgtttgtccctctttgttcatttttcttgtgggcccgctcttttgtgtgtcctctcctctcgtgggggggacacggtggcgcgcgtgctgcggttgttgtgttgtctacaacagactcttctgtgtggtctcccgcattgagccactcgcgttggagtgagagagaatttttatgtgtgggaccactctctacaagactgcgtgggccttttcttcactaagatagcacaaaccccctcacgatagggtgtcatcgatcgacagtctgttacctcacgtggtcccattgaggtagccatcgataagaagtcctctgagtggtccctctatataaatactgttactcttgtgtagtgggtccccagacgcaagaaggagtttataggagtggaggaggatatttgcgctctcttaattgggggctagcgccacattttgtctccccgcggggaagaccctttataaaaaaggtttcccggggtttttatatttgggggccccgttttttcccacttgaaacaacttttggtttatcattaggggtttttccca

SEQ ID NO: 571262 - DNA, 358 bp, Homo sapiens
  misc_feature (358)..(358): n is a, c, g, or t
aagaaatatttcacaggctgatgagacacagagggccaccatattcagcataagacattctattgatggaggaaacgtcaccatgttcgggaaatgtgtagttcacgatagtgaaaggctggatctttgtaggcagagatataaatgggccacgaacatttgcatgaagtaaatctatttaattcggagcattatgaggaatcacagcacttatttgaaagagtgctgatatgatcaaagtcaattatagatatgatcttcagcattaacctggcactgagtacagaatagattggagtctttgctgagcactaagcatgggagagatactcttaattagtccttatcacgcctatgn

SEQ ID NO: 571263 - DNA, 221 bp, Homo sapiens
tgggggggggggggttttttcccccccccgggggttttggggggggctttccctttttaagggggcccggggggcctttttgccccgaaaattaaaaggggttttaaaaccccctttccccaaaaagggccctggggctccccctttttttcccggggggggggcccttttggggggttattttaggggggttttttccggggaaaaaacccttccccgga

SEQ ID NO: 571264 - DNA, 380 bp, Homo sapiens
tcatttgctttataatcaagcatgggttttgacataatagtagcgcttgcaatttaccaatgcgcattcaggctgagttattgctagttaaagagacagggtcgggtgatttggacattaagggagctggggacatgtggatgtcctgaaatgctgtaaagttgggtcaccttaaagttttcgcattctggatgttgtcaggcacgggagactgaattgcaaaacgggtcttgatacggcgcagggtgtttggtgctgcccccagagcggatgtaagagtagcgactacgggaacgggatcggccacgagacctacagtaatttacgagccgcaaattattattgttatgtcaattatcgcgcaggtaagagctgtaaat

SEQ ID NO: 571265 - DNA, 1946 bp, Homo sapiens
cctcccttcttcagtgtaaatatgaaattaatttgtgataccttactttaaagaacttagagttcagtaaaggaagcaggtatagaaagtgctatgataaagctatacatacgatggtatagaaccacagactaggggcacttaaaatgggcaagaaaatagcctctgtaaataaaatagaggcaagagatataatgctttacctgcaaagagccataaatacagccatgtaccatataatgatgtttcagttagtgaaggaccacatacgagggtggtcagaacagcaggctataccatatagcctaggtgtgtagtaggctataccatatagcctaggtgtgtagtaggctataccatatagcctaggtgtgtagtagtaggctataccatatagcctaggtgtgtagtagtaggcgataccatatagcctaggtgtgtagtagtaggctataccatatagcctaggtgtatagtagtaggctataccatatagcctaggtgtgtagtaggctataccatatagcctaggtatgtagtagtaggctataccatatagcctaggtatgtagtagtaggctataccatatagcctaggtgtgtagtagtaggctataccatctggggttcctgtcagtacagtatgatgttcacataatgatgaaatcacctaacaaagcatgtctcgaaatgtatccacattgttacgtaacacatgactgtagttaattgttacaattgaaatactagatgtactcattgaaatccagaattcccattatctggattatttaatatcgttcaggaaatttttgccagtgcaatggtgcatgaaacaatgtcttttagaaatgaggtggccagatttctatttgcagataataattgtatatctaaaaatcctagaaaaagaaatgataacaaatggagctacttaacctttacatgttgaatgctgccactgttaaaatttctgagggggtataatagataaactatcccatagttcatctggaaaaataaggtggtgaaaattgctaagaaatttttgaaagggtaatgtaaacctagattaactgtttttgaaaggtagtacagaactgaatgcacaactagatatcaatggtatgtactcacccagaaaaaagacttcagtacatacatgtgagggcttaaaacattgttataaagacgggatcacaatgggaaaaggattattcaataagtagggcaggcattctctatgcctgctagggaagtgtgacttgttatactctttatgtacagcaattggcagtctgtgaaacttttaaattcatatacataaccttttgccctgcaattccacttctagaaatttatcctaccaaacaaagcacatagatgtgcaaaagtatgtatttacaagtatattctttgcaacttggtaatgtcaaagaattggaagcaacctaaatatctgccataggtaggataaccatatgctttggctttttgaacactaccagtttatacctgctgttcttggataattattaatggtgctttcattctcaatgtctcactttagataataaattacagaggattggtgaaactaatttgcccaatggaaaaaggaatgaagaagtgctttaggtactgagatgaaaagatctctaaggcataataatgtttattgagaaaagcatggtgtcaaactgtatggcatgctacaattgatgtataagaagaaaaaatgtgtatgtattcctatttgtttgtatatggtagactgtctctgaagacatatatggaagaacctgatcacattggtagtctccaaggagcagaactagatacctgggggataaggatcccaggagtgagccttttcattgtaaacttcattgtactttgagtttttaactgttcaaaaataataaaattagaaataaaaaaaaaaa

SEQ ID NO: 571266 - DNA, 873 bp, Homo sapiens
gagaaaaagatcccaagaatcttcgagaatggagctcttgcagccatcgtacgtgggacgagaaataggatgaaagacatcccagagaggcctttctctcagggtttatctacaatgtatttctcctctgtttgcagagttgaaggcagaagagccaggcgtgcggagggaacttggggtccattgaagagctgtgagtggccatctacctagcgtaggcggtgtgccctggcttcttccgacaccatgggtggcccagctcgtgcgagcggttccgagagatactctctaaagtggtggaggaatgttcatcccactgaaagttccttggcgataggggattaggggcttcctttcatatcctgcttcatcctcctctttttttagaagttcaatgagagccttcggttgactccgaccgaagaggtgcgccactgggagccacctccaagcgccatggtgccgtgctaagggcactaccatgacagtctgcaatgtggcttgcagcgaagatgaagtctctcagatgggattgggggaggagtcaggtccttaccaggtgatcagtctgatttctacttgtatcacttgagtattcatgtttgaaaccgttgtgcacatttggcaggagagtgtctttataactaaaatgaaatgtggaaatgtatcttgggcgatttggataggggcacttaatgtgtggaaggtcaggtgtcctggtttaaggtgagggacaccctctgggggtggagaacagctctggggggggggtgcaggctgtgttatgtctttacgggacccttcgggggttagagaacgggtcaaatgcgggggtttaaaaaaggggaaaatgagggaaaagtagctcggtaa

SEQ ID NO: 571267 - DNA, 494 bp, Homo sapiens
tctgcccttttggaggctgtccacgtttcaacttcctcatggaggtggactgtggggaaaacatcaggctcaccacctggaaaaatgtctgatgtatcgaggtaagtctcaggcttccatgtaacttcaagagactcagttgtttctgtagatgcattaggttgcacagcatgagactattctgtttaggctataacaaatggatgagtatcactttcagagctgtccgagaaatttcgagaaggtgcacattttcaaatctggcacgcgtagattctgtagcttctgggtccttgggcacagtggtaacgagatgcttgccatatatgtactgcacagatggcgtggttagcacatcagtagcatttgcagattcttgtactacttcttccatttacttcactgaggtagaaggtctatgacaattatgtcagggagtcaggtcacattcagccgttagatcatgcacgggatctgttgcttcactacaaggt

SEQ ID NO: 571268 - DNA, 180 bp, Homo sapiens
tagctggtccctagttgctttggagcacatgctctaagtgtaacggctgtgggcggatgcgggcagagaggcggacacggcgaagccttgtggcccctggaaggcccaggcaccagcccctgaccccagccaagaccagtcaggtcctacctctcccaacttcccagtcccccatgatat

SEQ ID NO: 571269 - DNA, 357 bp, Homo sapiens
ttcctttgtctcagaaacaaacacaaccaacaaacaacaaacaaacaaaataaaccttactgaaaaccatgcaagtacatggaagttaaacaagttgcttctgggttacttgtgggtaaatattagaattaatgcagaaatcaagaagttattttatactactgagaacaaagaatcatcatatcagtagctctgggacacagttaagagagtgttaagagaaaactttatagcactaaatgcctgcatcagaaagttagaaacatcttaaattaacaatctaacatcacaactaaaaaaaaattagggaagccagagcaaacaaatcccaattataacagaagacaaagggaaaca

SEQ ID NO: 571270 - DNA, 314 bp, Homo sapiens
  misc_feature (64)..(64): n is a, c, g, or t
  misc_feature (71)..(71): n is a, c, g, or t
  misc_feature (81)..(81): n is a, c, g, or t
  misc_feature (133)..(133): n is a, c, g, or t
  misc_feature (135)..(135): n is a, c, g, or t
  misc_feature (141)..(141): n is a, c, g, or t
  misc_feature (150)..(150): n is a, c, g, or t
  misc_feature (158)..(158): n is a, c, g, or t
  misc_feature (193)..(193): n is a, c, g, or t
  misc_feature (264)..(264): n is a, c, g, or t
  misc_feature (267)..(267): n is a, c, g, or t
  misc_feature (273)..(273): n is a, c, g, or t
ctggacaggccgttggttggccaggatgagtttttcctgagagcagaccaagaagaaaggagtngaagcgncacagcacgnctcgcacaccaagccgtcccaggcgcccgccgtggaggtggcgcctgccggnancttccnacaatccancctttgangaccaccagaccctgctctcagcggcccaagaggnggagttgcagcggcagaaggaggcggagaagctggagcggcactggccctgcccgccacggagcaggccancanccaggngtccacattccaggagctgtgcgaggggctgctggaggagg

SEQ ID NO: 571271 - DNA, 163 bp, Homo sapiens
tgaacggcatgacattttactgtcgcggctgcagcgctgtagtgtatgggctactgggcacggagtgattactcgtggccctacttttcctcctgccaggcctcctgatcacttgccacgtggcacgcatccctctgccagccggatacagagaagagattgt

SEQ ID NO: 571272 - DNA, 924 bp, Homo sapiens
gtgatgtgaaagagtgggtggtgtgggccgcaggaaagtgggagagactcatcggagcgtgtggatgtgagccgtcgcattgtagaaccctagatctcgaaaatgcatacgtgattcctgattccattggagctgtatggtttagtggtaggggccaataccttggagaacaattggcagatccacacgacgggattggaacggctcttagggttatctatggaccactccgaagtgtgtgggatagctagagagtccagccggcgtaggcttaagtagaatcttggacggatccccgagatgcaagctgatgtccgttcgcgagagcctggatggagagaacactatgttggtttgccggtggtaagaaagtggccatcggtggcgaatggtcgatttagaattgacatgtatggacttgccgtggaccgatctcctcttttggggtctgtcggccctccgagatcgattatcgtgagggagggagtccatccacactcgtccgtacgtatcctccaaagaagggatgaacgctttcttgtcgcatccgggagtcacggtccctgtatctagagatatggagaccgcgatagctcgatggcctcgggagatggaaatcagaaggcggcgggatcctttcctctaggtctcgaagtgcgatcgaggtcaactcacaggcagtgacgacagctgcgggacaagtggtgtcggggaacatacctcatccgacagcgtgtccgaaacctcagctgttgagctcttagcatggcgcttgagcagtatccgcgaaccccggctggacagggccagcgcacctgctggagggacgaggcttacacgagcgtcacgccgcacataggggatatgtacgaaaccagcccggggcacaaacggaaacacgcgagctaaccgacacgccacaac

SEQ ID NO: 571273 - DNA, 515 bp, Homo sapiens
  misc_feature (262)..(262): n is a, c, g, or t
aatgtgctccctgtgggcaccatgcctaaggggtacaatcgtgtgctgcctggaggaaaaacctgaagaccgtggcaaactggccccgggcatcagggaattatgcccccgttatctcccacaacttgaagaccaagaaaacccgtgtgaaactgccctccggctccaaaaaggttatctcctcaaccaacaaaactgtggttggtgtggtggctgaaggtggcccaatttacaaacccatcttaaaggctggccgggggtnccccaaatataaggcaaagaggaactcctggccccaagtacggggtgtggccataaatcctgtgaagcatccttttggaggtggcaacccccagcacatcggcaagccctcccccatccccaaaaatgcccctgttggccgcaaaatgggtttcatttttgccccccggactggaggtttccggggaaccaaaactgtgcagaaaaaaaaaaactagtgctgagggccccaaaaaagtttgtgtttatgccca

SEQ ID NO: 571274 - DNA, 572 bp, Homo sapiens
  misc_feature (37)..(37): n is a, c, g, or t
agcctatctggctccctattctgccactggctacatnttcaggcaataacagaggaggtgcaggcattgtgtggtaggccaaataatcctcccctcccccaaagatgtccatgctataatccctagaatctgtaaatatgttaccttacatggcaaaagagactttgcaggtgtaattaaggttaagaaccttgagaggaggggattatcctggattattcaagtaggcccaatgtaatcacgagtccttgaaagtggaagaggaaagcagaagagttgctgactttgatgattgaggaaggggttcttaaactagggcatgtgagtggcttctgaagctggaaagaaccctcagctgacagccaccaaggaaacagagatttcagtcttacagactcaaggaactacattctaccaatgatcaatgtacaaggaaatagattttccctcgagcctccagaaaggaacctagccttgctgacactttgattttagactggtgaaattcatgctgaacttatgacctacagagttgtaaaataaataaataaataaatttcaaaaaaaaaaaa

SEQ ID NO: 571275 - DNA, 363 bp, Homo sapiens
cttctactcttgacgagggagtagatggcatctcattaccaaatgtggaccaggcatggtagctcatacctgtaactgagacattttgagaggctgaggcaggagaatcacttgaacccaggaggcggaggttgcagtgagccgacatcacgccactgtactctagcctgggtgacagagcaagactctgtctcaaaaaacaactgatcgagggagagatcactgcagagattgccatgagaggtgatgggacaggggacggagctgagggctggcctggggatgcctttgggaggtgggcccgctgcttttgggcctggatgggcctggagcgtgaggaccagggaggactctgtcaggccc

SEQ ID NO: 571276 - DNA, 714 bp, Homo sapiens
  misc_feature (106)..(106): n is a, c, g, or t
  misc_feature (115)..(115): n is a, c, g, or t
  misc_feature (123)..(123): n is a, c, g, or t
  misc_feature (159)..(159): n is a, c, g, or t
  misc_feature (290)..(290): n is a, c, g, or t
  misc_feature (311)..(311): n is a, c, g, or t
  misc_feature (363)..(363): n is a, c, g, or t
  misc_feature (401)..(401): n is a, c, g, or t
  misc_feature (405)..(405): n is a, c, g, or t
  misc_feature (520)..(520): n is a, c, g, or t
  misc_feature (547)..(547): n is a, c, g, or t
ataaccacacgagagggcaagagaggctgtcaacgagatttgtccctggggaatccacgaaacccatgataccctactgaacaccgaatcccctggaagcccacanagacagagnacagcaanagaagcagagataatacactcacgccaggagctcgntcgctctctctctctctctctcactcctccctccctctctctctgcctgtcctagtcctctagtcctcaaattcccagtcccctgcaccccttcctgggacactatgttgttctccgccctcctgctggangtgatttggatcctggctgcnagatgggggtcaacactggacgtatgagggcccacatggtcaggaccattgngccagcctcttaccctgagtgtggaacacaatgcccangtcngcccatcgatattcagacagacagtgtgacatttgaccctgatttgcctgctctgcagccccacggatatgaccagcctggcaccgagcctttggacctgcacaacaatggcacnacagtgcaactctctctgccctctacncctgtatctgggtggacttccccgaaaatatgtagctgcccagctccacctgcactggggtcagaaaggatccccaggggggtcagaacaccagatcaacagtgaagccacatttgcagagctccacattgtacattatgactctgattcctatgacagcttgagtg

SEQ ID NO: 571277 - DNA, 130 bp, Homo sapiens
gcctagtggagcagagagacacaaatatcttcatgaggaagagaagaacgtcaagaagttgtgcgagtctggaagactttgttgaagacttgaaggaggactccacggcagccagccgagttggttactc

SEQ ID NO: 571278 - DNA, 308 bp, Homo sapiens
agctgctaccgttaaggctgcagtgcattccagcctgctgtaacaaagctaacctgtctcaaaagtgaaaaaaaaaaacagaaagaaagagagtttctagaaaatggaagtttctgtggaaccccttggatggattcaccacctgtgcggaaaagggaaggaagcggggatgactgggagggaaaagctggactgggattaaggcacgaaaaaggcattcatctgatttgtaaaaggagatctgaagctgaaatagccctccagagttattctctatgggagggagggggcacagcctttcttactcc

SEQ ID NO: 571279 - DNA, 1073 bp, Homo sapiens
  misc_feature (1073)..(1073): n is a, c, g, or t
gggccgccgtcccgcccgccagcgccccagcgaggaagcagacgcgcagccctgctggcccagactgcaccctgcatgcagctgccctgcaagcatctgtcctgctgcacatgttccatgtgctgtgcctgagctgccccacagtgcagtgtggcccattgtgatgtgtgcacccctgctgactgtggctgaagaagtgagctgtgctactggacgaccgccacgacatgcggcctggactccatgaaagacgaggagtacgagcagatggtcaacggagcatgcaggagatccagctcgagccgcaggaggtgccagcgcggctcaggagccctggaagcagcagctcaccgaggacggggactcgttcctgcacttggccatcatccatgaagaaaaggcactgaccatggaagtgatccgacaggtgaagggagacctggctttcctcaacttccagaacaaactgcagcagactccacatccacttggctgtgatcaccaacacagacagaaattgctgcggcacttctgggagctggatgtgatccttgagactccgagactttcgaggaaataccccacactacaacttgacatgtgagcagggctgcctggacagacgtgggagtccttgactcagatactgaaacaccacagaagctccactccatcctgaaggctacagtaaaatggacacatgtgtctaaattagaatttatcatggattacttgagaatgtggagctattggatgacatgagtgatgatgtaatgatggagcctgtatggcggaatgacttaaaatgaaatgacattaaaatcttaactgttgtactcctgtgaaggtggggatatgttaagagatctaacaggataatactacattaacttgggcacataagaaggttcaagagtgagactgagttagacgtcaatgtgagaatgatgtaaggatataaataggatgggatagagagcagtaagtgtgtaagaaaaatagaaggagaaggagtttaatattaaaagaaatgttaaaagatgagtttgatataattatttgttgtgagatgn

SEQ ID NO: 571280 - DNA, 300 bp, Homo sapiens
tacagagtgaatgtgaagatcaacgccatacaactcacacaagctcgccaacctttcaccgttaagtaggcggggggtctggctcaagcgcagcaagatggccttgaccgaacgacgatgagacttggccagggctgcgacgtcggcgcaatcctgatacgcagacacgagccgttcatcctcatctgccggccacttactcccttgtgcggtcgcctcttgcgccggcggttccaccgttaccgatgctggtgctggtgctggtgctggtgctggtgctggtgggggtatcacggcatc

SEQ ID NO: 571281 - DNA, 256 bp, Homo sapiens
ccgcgagatgttctctgcatcttgccctgcacttaggcgggctaattagcgcccacagtgcctctggggcttatgccagccgttgcctcaggcctcgatgtctatctcacacaagctgccttccatagctggcgaggcatatgcagacaaagccattgacctcatcaatacaggtgcctccattctcacagcggctgcagaggctgccatgaatgagaatctcacagttctgtccggcgaagccctgatcacagct

SEQ ID NO: 571282 - DNA, 192 bp, Homo sapiens
cgccatggggtctgaaggcccagctacacgtaaggctgaggcaggagcatggcgtgaacggaggatgcctatcttcgcagcgagccgagaacgtgctactgcacttcagcctgggcagcagagctagactgcatctcaaaaaaaagagaggattatccaccgggcgcgggggctcacgcgtggcatcccagc

SEQ ID NO: 571283 - DNA, 308 bp, Homo sapiens
tagatcgagctcggtaccggtgtttatcgatgccaccgtgtgccggtggggagggagccgttacgctgataaccctggacctgaatcttccctttcttcaggtcggcgccctttatatctgttaccaggccaatgtctccagaacctctgtctgggttctgctctgctatgggcatctggatccaccatcaccaggatataggttgcgccgtccacggcctccgtgtacttgactatcgtctccatccaggatggtgatctctcgtgtcttgtgtcggatccctctagtatgtccatcgtgtcaggtg

SEQ ID NO: 571284 - DNA, 852 bp, Homo sapiens
ggtactcctaaccctgtagaaatgtatgacctctcacaaagttgagatttgatccaaagagaaatgcaagtataaaagaattagatacttattatcttttaaggtttttttttttttgggtagagatgggggtctcacggtgttgttggcccaggcgggtctcaaactccgtggccacaagtgatcttccgtgcctcagcctcccaaaagtgctgagattacaggcatgagccacgtgtacccagcctttccttataaaattcaaagagaaaatttctacacctttatccctcaaataaaacaagtgctcagttcttaccgtgccctggcaaggtctatatgtaacaagaacatctgaaaatttagctgtcagaataaaacttggataacataaaaggaagaaaagcttactttttctccagtgggttggctcttggctgtgttgaagtaataaaccgttttaaagagaaactactggcctgtaaacccccagtcgccttcaactctttgggcagactatttttaacgaaatccagaagcaaacttggaggtgctcaatggacacgtacaggcaagggcggtatactagtttgggcagaactgaacaggtgtctccacaggagaacatccatacccagggtgggttcggcgaggttttctaccaagacttaggagaagtggattgcctccgggggaggtgaacccgaacatttccatgaatgtcagtcgagaaataatgttctccgggtggtcatcatacagtcagacggggaaccacgtcggggagacatggctagcatcaggggaaacctattggacgacatgctatagaccaacacacgcgtttattcc

SEQ ID NO: 571285 - DNA, 948 bp, Homo sapiens
  misc_feature (33)..(33): n is a, c, g, or t
  misc_feature (82)..(82): n is a, c, g, or t
  misc_feature (84)..(84): n is a, c, g, or t
  misc_feature (86)..(86): n is a, c, g, or t
  misc_feature (113)..(113): n is a, c, g, or t
  misc_feature (117)..(117): n is a, c, g, or t
  misc_feature (129)..(129): n is a, c, g, or t
  misc_feature (137)..(137): n is a, c, g, or t
  misc_feature (155)..(155): n is a, c, g, or t
  misc_feature (173)..(173): n is a, c, g, or t
  misc_feature (187)..(187): n is a, c, g, or t
  misc_feature (193)..(193): n is a, c, g, or t
  misc_feature (223)..(223): n is a, c, g, or t
  misc_feature (273)..(273): n is a, c, g, or t
  misc_feature (277)..(277): n is a, c, g, or t
  misc_feature (284)..(284): n is a, c, g, or t
  misc_feature (331)..(331): n is a, c, g, or t
  misc_feature (352)..(352): n is a, c, g, or t
  misc_feature (597)..(597): n is a, c, g, or t
  misc_feature (626)..(626): n is a, c, g, or t
  misc_feature (777)..(777): n is a, c, g, or t
  misc_feature (844)..(844): n is a, c, g, or t
aaagcacaaaaacaccagcccaaagaaggcagnacagcaaggtgaagaggcggacagtcccgtctgcccccgaggagaaaancnanggctggggtggggtggaaaatgacgtncagnactcccaaatantcgggtanagcacgtgtcccttcagnaccttgacgggcaccagnaaggggttctgcanaaggtnattgtacaccatgccatggcagacgatganactgccgtcgtccgagcctgacgcaaaaagtgggtaccgcgggtggaaanccanagcccgnagagccttcttgtggtgtctcagcatcctgtatggcttggtggaaanatccaggtcaaaccacaccancttgctatcgtagctcccacagatgacgttgtcacctgcagggtgcaccgccaggctggacacccacttgcagttgggcatcagcttcttggtgagctcctggcgcacaggtggtaaaggcggacgctgcgctgggacgccaccaacaggaagggccgggcagggtggaaggccactcgctgcacctgtccgtggctgcggcggaacggactctggctgcggcgacggctcaactggtgaatcancacctgggtgtggccttgggtggccagcnccacggccaggtagtccccacgcccgtgccaggtcacctgcgtcactggcttcccgtggcagatgcgcagcgcaggcctactttggcgctcctcctctgaggcctccagccagcgggccggctgcaaggggggctcctcaggcgggacgangcgctcaacagctgatctgtgctgcccgccaccagccggtcccccagagctgggttcagcagccgcnccgagtcctccacggctgcggcaccaggcagacagcggggctggggttccaggcacactcttcatccacgcccccacgggaacagtctcacacagcggcagtgg

SEQ ID NO: 571286 - DNA, 749 bp, Homo sapiens
atcataatttctaatgcacgtttatccttagctttgtttgttattatgtatcggaagtgaagattaggtcagataatatgattacggtgagttctgtaacagctactggtaagtatttttgtacagtcacgtgaaagcattggagcaactgtcttggaaaatgctctttaaacttcaaaccccaggtatgttttggtagtagtggatattacacgatatatgctgctcttttcagtgttcttgttatgtgtgcgaaaacagttatttaagaacatttgatttattaagtaggatttattttgtaataggattgttaataggatttatttttctaggacagtgtcttgtaaacagcttggatgactttatactgtcttaagttctttaagtaacttttgtagactttaacaacaagcttcgtcgggacagacaagcgaagaaactaggaaacggatataagactttacttgtggcactttcacaggatctccgtgtcttattatccccgtcttattaggagtagtaaacgtcgaaagtcgtatttgtataccttcatctgattatggcattgagtgtgtattgagattccggatctaatctgaactgacctttgcataacacagtaaagatttaagtttccctggtcaagaagtaggactccgcaaagtttcgtgcaattgtctgatatcacgggtatccaggttaccctcaggtttcctggcaccgtaaaagctactgactaaccatac

SEQ ID NO: 571287 - DNA, 163 bp, Homo sapiens
catctgttgcgcttcagattgagtgctataagtttgacggagtttgtcttccagtccccaaagaaggtttacatatgtactaacttcacaaactggagaaataggaatttgtgaactcctaaaattgttggaactttgaaaggttagtgtaatatttacctta

SEQ ID NO: 571288 - DNA, 1105 bp, Homo sapiens
gtggcatggccccaacctgcggaggagcaggagagggcggaggccggctgggccatgccctggtctgtccctgctgtgctgccctccttcgtggacctggtcctggtgcgtgcttgggcacctgctgccttcctgctctgacctgtggcacctgacctgtgtggcctgcctgtccagtatgctgctctgtgcggcctgctaccttgtgtggctggctgcttggtgcttggctgctgcttgtgtgcctggcctccgtgtgctgcttgcatgctcttcagctttgctctggctgcgcgctgaccctgccctgtgcctgcacggggtcgcaggccccctgcggccgcttgccttggcggctgctgcgatctccgtgcatgcttggggttaccttgtacatggttgctgttgcagtgcaggcttgctgtgcatgtggtgcttgcttggttgttgtgcatgcatgggaggatgccgctctggagtttggacttgtggcctacgccggacttccttcgcccttggacatcaggcgtgctgcgtgctcttcgatgaccgttcttgggagacgtgcagcgacaggtcactgctggtgctggccagtcattgctgcagagttggcctgggctgaggtactaccagtgggttggcatctgcacatccttccttgggcatctctgtgggcactgctcggataccacgggccttgcgcacttgctcccctccaagcggtccttggggcctgggctcctccggtgatctactttcttgttggacttgtgtgttgtggcccgagtctggttgtggcctgtctaggctcttccccgtattgtggccttgcttcctgggcgtgtggtggactggtgcctggggcaggcgtcagggccgaattattgcgggacccagcctcgggttggttttccggttggcgtgtgccccccccctatatccctgggtaccgtggttgggcgggccccagggtggcgtacatatgtcgccctctggtaagtatctgggcgcgcgtagaagctgctgggaggcacccgggctggagacggggtccggcggagtgacacgaccatacgcgcacgagaggcgatagcctgtatgg

SEQ ID NO: 571289 - DNA, 890 bp, Homo sapiens
gtgcccatggaggagtactgggtgcaatcgcctgtaggagtttgaggggaagagtttagatgtcagtcaccaaataaggccttggaatgttccagagggatgaatatcgagaacagagaagcgggaacgcagaatgagagactataggtttgtaaaaacctatgagatagagatctttgagagtgagattatgggagacaaaggagttgagcatgtggtgtgggtcagaaactgtaatgtgagtgtagtatcgtggcgatgcatgtatgagtcacgaagcatcatataggcattgggagaggtggacattgcgtagaggatatctatcgtaggagactcgaggctcctggaccgcatgagaaggtcggacaaatggggttccatgggaagaaaaggtaaaaatcttggggataatagacacctagtagactagtatccattgtaatgagtaggagcatgtgatggtagaatagggcaagtagagtcgtagtataataggaagccagaaaggttcggtgaaggagtctggtcattctttgcttttattgaaagcatgcgctactcatgttacgtattcatggcttcagatctggtagagaatcccacgatgaaatatgcataagcgaggatcatatcaggatcgatcaataattggtactgagtgtattgactgaaagatgtaacctctaaatgactgattgattaccaagtgcttgattgtaaacctgaaggaaattgacaaccccgtttgaagaggatatgacggacacaattgacgcatgggaatgaaaagtaagaggtgtagatcttcttggctgagggggattggaccttaacccttgtttcatggtattcttggatgaattaccttcgtggatcaagtatagttg

SEQ ID NO: 571290 - DNA, 1103 bp, Homo sapiens
agcgggtttgcgcggcgagctggcgagaaaatggggtgccctcatgaacacgggacgggaacctcagggccggtgattgctccgtggccccgcgggtgggctggcaggtggcggtgagcctcttggagctgagatcggggattcgtggcacggtcgtctccgtggtatcgggtgtcgtccgtgagggtgctcgggctgcgcgtttcgagccccggtgtccgtgcggtggatgagactttgttgctggctatgcgtatgggctttattctggtggaagcatgttcgatcgtggtgaaatcacttgggcaggagcgaagtgagcagggctgacagaggctggaagagacggcgtcctctctggggatcctgcagtcgacccagaaacaagttacggccgacgttcgtggtgggacccttcgttggtaattccggagacgacggtaaaaggcgtggtgcccggggggtttcacaactgctctatggaatatcctgtgggagttaaaagcctggaggcacggctggagttggaaacactatgccccacttcaaggaacgggtgagcttaggctaattggcgaattgacaccgcgagaaaagaaccgggatggtagtccgaaggagctactttgacccaccagcgttgagaaccgtgcttcgacacgggctttttttgcgccctccaagtttcccctagtgctccaagaacagggtcgtaaaacatgatgttttgcccaaggggggatccccaacccaagggttgatgatgtgctgaaagcggtttgggacattttttacaccaccttgcggcgtttccccctccgcgtctgtgactacaactgggttacccggaccgcgccctcttaggctcagctccaactgggtggccccaccagtttgcgagttcccattgggtgggaacacggtcccatgcatgagccgggacacttgtattacgctttataaacagtttacttgtccacatgtgtgggccaggacgcagagccgccgcgtgttgccgcaaaaacaggcccttctttttgcgcacttggatgtaaaggagccacggtacaaacaccaagtccatgaacacatgtgactaaaac

SEQ ID NO: 571291 - DNA, 157 bp, Homo sapiens
tatacacaaagccacgcatgtgcgtaattgttactcttaaatcaatcattcagcaaatgagatcatctgtaatcgaacaaaaaagaaccacaaaaacaaaaaccccacaagaatatattatttcacctattgtaacctcatacgagagtggggatcc

SEQ ID NO: 571292 - DNA, 425 bp, Homo sapiens
atatgaaaacaccaagagaaaaataaatggcagctccaaaagtctttccttcctaggagagaaggagcacctgcacacatcaactcaccattcacgttaggtatttctcctaatgctatccttcccccagccccctaccccctgcctggtgtccaagtgttctaattgttcagttctcactcataagtgcgagttgaacagtgagaagacatggacacagaaaggggaacatcacacactggggcctgtcagagggtggaggtcacagggagggagagcattaggacaaatgccgaatgcatgagggacttaaaacctagatgacgggttgataggtgcagcaaaccaccgtggcacatgtatacctatgtaacaaacctgcacgttctgcccatgtatcccagaacttaaagtaaaaaaaaaaa

SEQ ID NO: 571293 - DNA, 200 bp, Homo sapiens
  misc_feature (16)..(16): n is a, c, g, or t
ttgggtctttactcanacatgtaaaggacctgtggactcgacagcctttttgcttgtcattattccttaaatgatacagtttaacaaatatttatatagcatttacattgcattaggtgttataagtaatcaaaagatgatttaaagtatacaggagtttgagaccagcctgggcaacgtggtgatacctgtctctactt

SEQ ID NO: 571294 - DNA, 606 bp, Homo sapiens
atctgcagcgggctgggtcgcaagaagaccctgaccgtgctccggcgctggggcgcgtgctaagtgaccgcggggtttcagctgtatctccgaacccctgtgcttggctgaggggttcccaaggctccactccgccttggagggggctgcggaagcccggaggtgacctgggctctgggaggggcgttccccaacgtcggggaggggagacaggggccctttgatagacaggcgcgggtactcggaggtggggtccctcccgacctcatgacgttggttaaacttgagggccgtgcgaggaagggaggcttgaggtccggggaacccagtgcgtgccccgtcagctgctccctccggacccgttctccccgcctgcgccttgttcggtacgggccagggctcggcgtgccgagatccagctgggctcgggggccagagcctgggccctgcgggcggcgctctacctcctccgcgctcgtctcccatgctcgccctccgcgtcgctcttcgtccgaagttgtcctccttccagagtagcgggtaaccgcggcggccttgtcgctgggtttcaaaaagatgcccccgctgtgcgcgggggccacgcgc

SEQ ID NO: 571295 - DNA, 582 bp, Homo sapiens
gtgattatcatcagacggccaattcatgtatataacctataccttccaaaataatgctcaggccactctttatgaacagagatccatcacagactcggggtaccccagctccatctcttcatcaccccgaaaggaactggattccgggcaagcaatggcttcagttctgtgcagagccgagcaggtacagaccacacaagtctgtaggaaggtgctacaggctctgtagggaaatctgattcagcttccacttactagcatccccccttctcaatgaaacggtatctgcagtttccttactgacgacaaccaatcagcattcatcctccttgggtggcttgagccacagtgaggagattccaaatactaccatcacacaacagaggagcacgttatctacgcaggagaataccctttcatcatcaacatcttctgggcgcacttcgacatccactcttttgcaccccgagtcttggagagtgaggcgaatcctccaaacttcctccagcactttttcccacacatccagccagtctctgcacctcccccagtggtcagggtctcctccagtctcaatagtgg

SEQ ID NO: 571296 - DNA, 352 bp, Homo sapiens
ctcgttacaatgtaggccaagatattgcttcctagaacagcctagacatggatttgcgatgtcattaaccatctgtggatctggtaaaagtgtagattcataatattggaaaattgagcacacgttttaaaagtaaactgtgtgttccttattgttgtattgacacggattctagcgctgtcgcccaggctggagtgcgggggtgctatctgggcgtcactgaatgctccttctctggggttcatgccctttctctgggctcagcctcctgagtggctgggactacaggtgcccgccaccacgctgggctaattttttttttttttttttttttgggttttttaagaaaaga

SEQ ID NO: 571297 - DNA, 452 bp, Homo sapiens
aagcagtaatacagactcatggcggcacccacatgcccagttgattaaagacaatggtgtttattaattcatccatttgttcatcaaggttgccttgcttttaatggtgccaagaataagcagaacactgctctttaaatgttcttaagtgtttacttataacaggttgttaataaagtaaaagcctgagttggcatatataaatttgggtttaaaatttgattttggttgagacagggtcttgctgtgtcaccagtgcggtggcgcaaacacagctcacaggagcctcaatctctcaggctcaagcaatcctcccgaactcaggtgatcaccctgtctcgggctcccaaagtgctgggattacaggcgtaacccatggtacccggtctgtttttggaattttggaaaccagtctgaagtgagtctgtattaactgcttggggtaccgagct

SEQ ID NO: 571298 - DNA, 416 bp, Homo sapiens
  misc_feature (4)..(4): n is a, c, g, or t
ggcnagcttgaagggcctgcttgaactctgtcgctaattgaacaaatgagccatcagcatagtcgtgtgttactctggccacttactagctgcctgactgcagcggctgaggaggctgacagctgggtttagacacggttagacagggccaaggcaagggagggggttgaaaatgtgtaccagcgggtgattaacatgacagccacacaatctgagtcaggcagaggccaaggccaacctgggaaggtggaagggtaggaaggagggtttggaggaaatattttggaggtcatggtggtgctgaacaactgttcagtgagagtagaggagggagtgaacaacaatgttggccagagggtgggatgcttcatattgagagtgtattttttggtggtaggtagagtttggtacttgca

SEQ ID NO: 571299 - DNA, 786 bp, Homo sapiens
cgttgaggctgccagccttcggttgtgtcatcccaggcgaggtgagccaagggggactgcctggggtccccctcagtgcacacaggagcccagtgtggcctctgggcctggagaagctgcccctgcgccagcctgggcctgagaagggggccctggacctgtgagaagccgcccctaccccagcctggggcctgagaagtggggccctgtgacctgggcctgctgtcccaggagggcgagtgcgtgcacacatgcagtggcttgtggggggccagcgggtgggtgcgtgtgcctcttctggtgcagcagactgacctatcagaccccagccctgtgcagcctgcgagctctgtccggtctcctactccacaagaaggccctggagcacaagggcacctccctggttggttggggggcggaggctgagcggccgtgcggaggcactgcaagcctcaacttgggggctggtgctggggggcagctccagtgacaacccgggctacctcctgtttgcgatgcgcgtgttcctggcagcgcttcacccctccctagcgactccttgggcacacctgtggcccacaagggcgtaccgaaccacgcctctcaagtaccttctgagggttgggctctgaggagtagaggattgaagaccgtccttgagttgaagctaggaggcgttgcaggaccggggacggggcagccgggcgtgcacggaaaggccacatgccgcatacaggcagccccaactctggagattgtctgcttctcctgccggttctctagtga

SEQ ID NO: 571300 - DNA, 280 bp, Homo sapiens
tgatctgcccgcctcggcctcccctttgctgggattacaggcatggtgagccactgcacctggcctttttttttgtatttttagtagttaaagtgggtttcaccccccatctctactaaaaatacaaaaaattaatcgggcgtggtggtgggtgcctttggtcccagctactcgggaggctgaggcaggagaatggggtgaacctgggaggcggagcttgcagtgagcggagattgcgccactgcactccagcctgggcgacagagcgagactctgtctc

SEQ ID NO: 571301 - DNA, 308 bp, Homo sapiens
gagacagagtttcgctcttgttgcccaggctcagtctcaaagaaaaaaaaaattacagatctggttgggcgtggtggctcacacctgtaatcccaacactttgggaggcccagaggcaggtgatcactggaacacaggagtttgagaccagcctgagcaacacgacaagaccccggacctaccaaaaaaaaaccaaaaacaaacaaacaaaaaaactagccaggtgtggtggtctaagcctatagtcccagctacctgggagattgaggtgggaagatcacttgagccctggggaggtcaaggctgca

SEQ ID NO: 571302 - DNA, 245 bp, Homo sapiens
ttccagggagactacttgcaggtagtccttgatctggtccttgtctcagggattacttctgggggagcccagccctaagaagcacttccatcctcttcccctttttcccctttaagccaataaaggctccccatcctgccccctgcccccccagacccccctaacccatattgacctcttcctgtttctgttaacgcaatttttgcacctaacttcttaggcaccccctctaagcattaaagctg

SEQ ID NO: 571303 - DNA, 811 bp, Homo sapiens
gtaacattactcaggtccagttcgcaattcgggctcacagtcgttactgtctttacccagtgaacctatattgagacagtgaaatagagaatgccgacttgtgtccagcatgcatcataccactgagagccagtcaatccttgttgcagtacatcacagtgaggcaaggcgagggataccttaggaagcagtacaaatcttcataatcactctgagggagagtatattccaggagcttgtagtgcttcaagtgtccaaaatggaatggcatggttcatacagactcttatgatccagatggcaaacatggcgaagatccatgaccatcttcaactttctgcagaagtcgtggaaggtagtagataccaggaagtcattaggcaatacagtattgagtggaaaacagagaggcagaggcatacactggtctttcaccaccagttccctcatttaactgtgacgtaccgagatgagttcgaagagttagattctgtaccattagtgaaaagttctgctgggatactgagtttggtccatcagaatagccaggaaatacagaggtcttctcaagatgaaatggttagtacgaaacaacaacatataaatactagccaggaaatgacagaccagaacattcagctgaagatgcagcctgtgctccagggcatattgtagtgaacgaaataccaatgataggggacagaaacatggacgtcttcctgacacaggtagtgaggcacaatgtacaacacttgtaagttccagcccgttgaccagacaacaggttaactagaatgggggaaccacaagt

SEQ ID NO: 571304 - DNA, 737 bp, Homo sapiens
  misc_feature (5)..(5): n is a, c, g, or t
  misc_feature (75)..(75): n is a, c, g, or t
  misc_feature (153)..(153): n is a, c, g, or t
  misc_feature (169)..(169): n is a, c, g, or t
  misc_feature (189)..(189): n is a, c, g, or t
  misc_feature (193)..(193): n is a, c, g, or t
  misc_feature (211)..(211): n is a, c, g, or t
  misc_feature (216)..(216): n is a, c, g, or t
  misc_feature (219)..(219): n is a, c, g, or t
  misc_feature (221)..(221): n is a, c, g, or t
  misc_feature (228)..(228): n is a, c, g, or t
  misc_feature (240)..(240): n is a, c, g, or t
  misc_feature (275)..(275): n is a, c, g, or t
  misc_feature (278)..(278): n is a, c, g, or t
  misc_feature (281)..(281): n is a, c, g, or t
  misc_feature (299)..(299): n is a, c, g, or t
  misc_feature (368)..(368): n is a, c, g, or t
  misc_feature (388)..(388): n is a, c, g, or t
  misc_feature (406)..(406): n is a, c, g, or t
  misc_feature (408)..(408): n is a, c, g, or t
  misc_feature (412)..(412): n is a, c, g, or t
  misc_feature (421)..(421): n is a, c, g, or t
  misc_feature (469)..(469): n is a, c, g, or t
  misc_feature (577)..(577): n is a, c, g, or t
  misc_feature (590)..(590): n is a, c, g, or t
  misc_feature (644)..(644): n is a, c, g, or t
  misc_feature (651)..(651): n is a, c, g, or t
  misc_feature (717)..(717): n is a, c, g, or t
ggggnttggttgtttctcttggctcttggctggggaattggtgttcgggggcatggtcttttgcgtgtgggtttngctttcaacattgtttcttcaatgtttttcatgtgggttctttctttttgggttcttgctgattggttctttctttgntgtggtgcttctgaangggcatcttttggaatctcntggngcattttcaaagaattcntgccnaanantctgtanttaaatcaatcnttggtgcaatggggaaagatttgtatgttacctcnttnatngggaagctggcctttacngccaaagttttcggtacaaattcaatcctaacctatccggaaaagcaaccttgtcaggtccaaaaatgnaagaaaacgggtcccaacantgccccacccagggatgnanagcnttcaaaaantgtttcagccttgccttaacaattaaagccagaggtaaattccagggngaatgctttcctgaaaggcccttgaatgactaccaattactccctcacttaatagaatgaatgcaccggggccccctgccgcctgggaatacgggcgacgggttttcntcaatttttgccnttttgccaagcgtctcaattccgcctgaggagggcaatagaccctttttttgantattcanttcccagggcttttaaagttttctttaagggagcaaaaacaaggcgttcccttgggttctttcttngttagcctttcaaactttta

SEQ ID NO: 571305 - DNA, 327 bp, Homo sapiens
cacgaggataatctcagtctgtactgtttatatggatatcgaggacaggactgtacagcttatgtttaccttcttccgaatggggaaataacttatttcattgcatcagttttatggctatttagttatgacgacagaactcagtgacactacctgtggcacacataatgtgtgaaatgccttgctatacatcctgactcaattaggattgcaagtggacagatatctggcgtggataattgtggaaggtctctacaaccacacgtcagagtgtgggattctgttactctatccacactgcagattattgggcttggaacttttgac

SEQ ID NO: 571306 - DNA, 262 bp, Homo sapiens
caggggtgggatacaggctgagccacgtgctggccgagtctctcaattcttagtcacttgtccagccttcacagttaagtgtgccatttcctagacaagtcttctgcaagtagaaaagttttcttatacagttcttctacacacttttactcaactctgtcataacatttgcgttatttaacaggtagttttccaattctcgagtgttatttctatttcataaaagtcagaagtcggggtggagagaagctagtggcggacg

SEQ ID NO: 571307 - DNA, 137 bp, Homo sapiens
tagagatcccaggcgtttcagtgacagtcggggtgcagcatgagggagatggggtaggtggagttgagggagatggggtaggtaggagttgagtggaactgtgcagtgcacagtcacatcctggctgggattcgtgt

SEQ ID NO: 571308 - DNA, 630 bp, Homo sapiens
ggcacgctgtacgcctctcacaggctgacgaccgagcaagtggcctgttcatggggagctgcatttttgctggattggtcgtgcagtggccactgggctggttgtcggaccgatatgaccgcgcgctgctgattcgctgcttcgccttgtgcctggcggtgacggccttgccgttggcaatcatgacgcaggttccgctggaagtgttgttcgtggcgggcttcttctgttcgctggtgcagttctgcctttaccctttggcagtggccttttccaacgaccatgtggaaggcgatcgtcgggtatcgctgacggccatgttgctggtgacctacgggatcggcgccagcgtggggccgctgttggccggtgtggtaatgaagctattcggcagccagatgctctatgcgtttttcagcctgtgtgcattgatcctggtgtggcgcattcgccccaaggcggtgaccaacctgcatcaggtcgatgacgcgccgctgcatcacgtggcgatgcccgacagcatgtccagttcgcctttggtggctgcccttgacccgcgggtggatgagcaggtggtacaggatcagatgcaagtcactgtgcccgatccagagcctgcccctgaaaacg

SEQ ID NO: 571309 - DNA, 134 bp, Homo sapiens
ctcggccttcttgtacggctgcccaagacgaacccaaacgatcacctgcgactcgaacctgatccattaccgtcaactccacatccacggcgccatggctcggcccccgagcacaacaaacgtgccttgcagta

SEQ ID NO: 571310 - DNA, 468 bp, Homo sapiens
actcccgtctcacagaaaacaaaacgcaaacatacagcaccaatatctacaccaacaacaacccagagctcacatgtgaggatgagacagttcccggagccacagagaagtgaaaaaacttggagaatcagacttccacatccatgactctccttcctcctattctgcccagcaccaagtgtatggaaaatctcccctcaactcagggttgctacacgggaaaaagtgacactgaggtgtgcaaccagcttctccaccttctggggttcccgggggggagatttgtcctggccttaacccacagaaaacatcatgactgtctgaaggcagaaatatcccagactacaggcagagacaaatgagggaggaaggactaccatccccagccctggaaattctgctctataattgggccaaagacatgcaaattcagaagggccgtgcagcagcaccatgctgtagcaggtt

SEQ ID NO: 571311 - DNA, 179 bp, Homo sapiens
gccaggaccccctcagcccctgggcctgcactgcctgcaggtgtggcccccttggcctggacctggggccttaattgtgggaagggggggttctttccttccctttttttcttttcctttttttttttttttttgggcttcggagacatcagaattaataaccctatttttgattttga

SEQ ID NO: 571312 - DNA, 976 bp, Homo sapiens
ggagagaactagtctcgagtttttctggatttttttaaccaggtcaaaaaaaacctttattacttttcatgattgccacttatgctttcttgccaaatgccttaggaaaccaggtgctttctgggctggagcttttggacccttctgagactttgggacgcaggcgctagtttcatggcctgatggcttatctgggcaggacaaccttctgggctgagagccttaataactcgacggagatgatctttatggctggacactttagcagcagacagcagcagcaagccgccacgcagcagatcaccctttagtcccaggttgacttattgagggaacaaagctatacaggaaaagcgtgccttagaaagcctatcttaaataacattctggataaatacggtaccatcatattacttggaccttctataaatctttcaaaaacgaattcaacactcgtgctaaatccctgggcaatttcccctatatcttcgtggcactatcaaaatcttatctgtgggagcccacatgcgatggtggactgggccccaatagttggaacatagaaatgtttctgccctttactgccagagacttgaccgagcaaccaataactatcatgggtgggagcaaccatgtgatgcgggaacacaagtttgaaggactcaaaacattccaggtgaaaccgtgacagtacaccattttgaacaagggacattgtgcacttgtacaatatgaaggacgacaaagtatacctcaataaagaccaattccaaggtgacaatacacagacgaatagccatgacagcgcaagaacagcaaccacctacaacagcacgaccaacgaacaggacagcgaagtgaccccattagatggggacaccacaacaagaggcccaacaaggggttggggataaaaccaagacacgcacagatcaccccagaagaaaaccccgggaacagtggaaacccaacaacg

SEQ ID NO: 571313 - DNA, 1591 bp, Homo sapiens
  misc_feature (1177)..(1177): n is a, c, g, or t
  misc_feature (1359)..(1359): n is a, c, g, or t
  misc_feature (1480)..(1480): n is a, c, g, or t
atgtcgcgctcatattttgtggggggcacccctcttatgttaagccacaccgttgcgtgtcgtccccaagaagaagcgcccgggcggtgtgggtgtcccggccgtctgccccggagatcttctctcccgcggagcgttttctctgttcgcaggtcacccaccgccggcggtgctcccgcccttgtgggctcctattgtgagttatcccccactgttgggcgcttctctccttatagggtggtttttattcttcccgtgtggtgtggacccgcacccccgccccgcagtgtgtagtggttgctacccccctatattgggggaattttatgtaccccgttttgtgtagcaccctccccccgccgggggcgcgcattacttgttgtcgcacccgcccctcccgccgctggttagcaccactagtattctccttgtcggtcggctgtctttgcccccccacacccccgggggcacgggttcccacgaaaagggtagatttgttgagcctgttggagaccttctgcccgccgcccgcccgacttgtcccccacccggggggaagcgccaatatatttgtgggacgaattgagtaatgccttggcctcgccacgaatcggctcttccttggggggccccccttttaagggggaatgttcgaataccgtggtttccgcggtgtgtccccgccccgcttgtaggggtgggcggccccttgaaacctcgggcgcacttttggtatatttttattggccccaaaccttcagctcccgctcttgttggagccacttccggttatcctataccactcgagcacacacgctagactaacacgctttgtttaggcctccacacttgtggcacacgcctatatggttcccctcatgtcccacacttatggggagagcctcgtgatattttggcccgcactctcactatagagagaggctcgttcactttgtgcacgcgtcgaggtgttgccgcgccctatattttctcctcacagggcatacacacacgccctattgagccgcacacacacctctatttcgccctctccacatagttcccccctctgtgcacacgtattctagatatatgtctaaatctcgcgcgccgtataaaatctctacacacctttcctttcctcccccaccacacacacattttctctctcgcgccnctattctccggagattgcccccccgcaccgtttatcctctcgggacattatcccccccgaatgccaataccacgcaccactgtgaaccactccctcattcactctctcgttaagggctcacatgtcactttctcttctataccacgccacgctataatataaataatttttccactgagatnttgaggaagcccctctcgcctttcgaaagccgcagaaaagttcctaataagtagagagaaccctcccactataaacctcggaggtgaactataatggagtgccccccacccctaccaccanactttcggagaacccgtatacacttaaattctagaccacacaaaaaggaaaggaatcgaacccccccaagctggtttcaagcccaccccctggcctccatgactttttcca

SEQ ID NO: 571314 - DNA, 641 bp, Homo sapiens
aatccccctccttaaaattgtcatttagagaaattactccggcaaaaaatttcttttacagtccataccatcatgaatgtattcattttgcgccaaatctgaatatgctgctgctgcttaaaaagaggtacctcatttcgtgattattattttaaaacgcagacttctttcaagaatgccgctaagcgtgagatcatcattttcaatagaagcgagcgtagaacttttctatttttttttccctaacctctcttaagtggaaaccaattctgtactatgtatgcagaatcagctatagcagaagcagtcattaatatagattcgctagtgccacacaccagacaccagtcagcttttaactgagcacttcacctttttcattcttttaaacatatttgatcatgtttttatgttctagtcataaccctatacccctatacgttatatagagctttagtgtttctaagcagaataaatcatttccctatctcctaaacaactacattttctcatatatctagaatgattttttttcatattttaaatttgtcaggtcagaatgtctcctgtagttggtgatttctcagcaccattttctcagcatatttctccagtaagttacatcaaataatgatgtatct

SEQ ID NO: 571315 - DNA, 216 bp, Homo sapiens
ccgtgtgcatgtagttttaaatacatagacagtctcctctcctctcctctcctctcccacgtccacgcccacggccacggtctcctcttcctctttttccccggttctcctctgatgcaaggggaagttggactatacttgcggcatctcgggtccattgaaactcccttgcttgattctcctgcctcggcctgccaagtgcctgcgattacaggt

SEQ ID NO: 571316 - DNA, 248 bp, Homo sapiens
atcagtctcccgtttctgggcccacagcgcacaccagcctcctttctcgcctgcccttctactcttatcccgacctttcatcgactgcctacctgcccatgctggacatgtgctgctatcctcacctcagtgccagtgctataccacaggcctcaatgcctctgccggagccctctctagcttcatgaacccagaccagatctcgagctcccttgctcatgccccagatattccgttctctctccact

SEQ ID NO: 571317 - DNA, 641 bp, Homo sapiens
acctgatcgtgaatgttgacctgccttgtcgaagttggtgaagtttcctggataatggataatatgctgaagagtgttttccatcttggttccattctccctgtaactttcaggtacaccattcaaacatatatttagtgttttcacatagtctcatatttcttggaggtttagttcgtttctttttactcttttattctctaaacttctctttacgcttcatttcattcatttgatcttcagtcatctgtcttccacttcaatgaatcggctgctgaagcttgtgcatgcgtcacgtagttctcgtgccgtggctttcagctccatcagttcatttaaggtcttctctgcgctatttatcctagttagccatttgtctaatcttttttcaacgtttttagcttccttacgatgggtttaaacatcctcctttagctttgagaagtttgtattaccgatattctgaagcctacttctgtcaacttgtcaaagtcattctccgtccagctttatttgattgctggtgaggagctgcgatcctttggaggggaagaggccctctggtctttagaattttcagcttttctgctctggtttctccccaactttgtggttttatctactttggtcttgatgatgtg

SEQ ID NO: 571318 - DNA, 190 bp, Homo sapiens
tcaggggccggccccacggggttatcgaagcagctgtcaagatgctggggcccctggcgttgaggagaaaagcactggcgccacttttactcctccggttgctcagggccccaacgctccggggccatggaggtgcttccggccggagtgcgactactgggcagctcggggagccgcaggggcctggggt

SEQ ID NO: 571319 - DNA, 419 bp, Homo sapiens
cttactaaatgaatgatcaggaggaaagcagtgagtggctctctaaaaccattttgaaatattttgaaaattcaggatttaattctgaccagttctgaaaatggcatgtctttctggttacattatataaaaatattttctggccaggtgcggtggctcatgcctgtaatcccaacgctttaggaggcccaggcaggcagatcacgaggtcaagagatcgagaccatcctggccaacaggatgtacaacaggatgttctaaaaatacagaaattagccgggcatggtggcgcggacctgtagtcccagctactcgggaggctgaggcaggagaattccttgaatacaggagggggaggttgcagggagccgagattgtgcccctgcactccagcctagcaacagagtgagactgtctca

SEQ ID NO: 571320 - DNA, 205 bp, Homo sapiens
gagaagaagaaggaggttcctgctgtgccagaaacccttaaggaaaaggcgagggaatttcgcagagctgaagatcaagcgcctcagaaagaaggttgcccaaaagatgcttcggaaggcaaggagggagcttatctaattaaaaggccaaggacctattcacaagggatattgggcaggtgtacaggacctaaattcggattgc

SEQ ID NO: 571321 - DNA, 1130 bp, Homo sapiens
  misc_feature (85)..(85): n is a, c, g, or t
  misc_feature (88)..(88): n is a, c, g, or t
  misc_feature (297)..(297): n is a, c, g, or t
  misc_feature (851)..(851): n is a, c, g, or t
cccccatttttttattagtttttacatttaatttttttaatggggtctcaaaattctgtgacaaatttttgggctcaagttgtgnttnccatttaaaaagttacgtgatttttaaaacacttaattaactttaaaacgtgccacacgcaaaaaagaaagaccaaagtgtggctccacaaaacatttcctccttttccttctcgtgagaggttttatacgagtgcattgtgttattcattataaccagtctcttttatacttagcttaacactttaaatgtggccatagtgtaaaacnaaacagtttcgtgagcacgcgttctttccaccactgtgatttaagaagtgtgggggtggcaggcgtatttagggagattaatatattctcatttatacgccttttgtgacgctttcctgtggcgcaagcacttttggggtggacctttttgcccaggctctcccagcaggccttctctgtgtgttccactgtgctttgtgattagacgcccaccacccgaaaacctgtgctctgtgtttctcatatatctccacagaaaacagacaaaagccagaaccccaaaagggtggattggtctctgtgaagagagcttcttcaacacaccatgtggggcttttgcccagggaaccccattttgtcaacccaaggtggggccgaggcgattaccaccaggagtttctcagcgcaatttttagcgcgccatatcttttccaaggcttttttatcccccagagaaaccgggcagactccaaactcttttgtccccctttcaagactgtcaacgaccaacacactttggcctttgcaaaatgtggtagagcccgggtgttgtngcaaatccccagaattaacagggggcgccattaagcccggggcgtccttaaatttggggcccctgggaatggggtcctcccgggaattaagttcccaccctgtagagccaggtgtggagagccccctgtgcttgtcttctcctccactgggagcggggccccacctatttggcgctgatccccacctggcgactgtgttgcccccaccacaggaacacctctctgttagcgccagcctctctcttctttgacattttgaatgcccccccattgttcccc

SEQ ID NO: 571322 - DNA, 423 bp, Homo sapiens
  misc_feature (38)..(38): n is a, c, g, or t
  misc_feature (156)..(156): n is a, c, g, or t
  misc_feature (283)..(283): n is a, c, g, or t
  misc_feature (308)..(308): n is a, c, g, or t
gggggccgggcggaccaagggagccgggcgcggggatntggaagaggagggcaagaagggcaagaagcctggaattgtgtcgccatttaaacgagtattcctaaaaggtgaaaagagtagagatttttaagcccatgaaaaggttttgtttatgtnccgtgtgcacactgtggtgttgtcattgcctgagcgcgtcgagcagacagactgtgagcgactatattgagaaggaggtaaagtatttaggtcagttaacgtccataccaggatacctgaatccctncagtaggactgaaatcctgcatttnatagacaatgcaaagagagcccaccatctttcgggacacttgactcaggagcacgatgctgtgctcaggctgtttgtgtacaacgtcaagctggcctggagggaccgggaggata

SEQ ID NO: 571323 - DNA, 1172 bp, Homo sapiens
gagtggcctgatccgggcccgtgggcgggcgtcacagacgcttcgctccggtcctcggatcccgaggcgcggggagtgcagacgcagacggtgagctgcttgtccccgatcgctgccggctcgctccgtgggggaacgacgagagccccgtccgttgtgtgtcgccggggtagttggtagttggagcgcaggatgcttcgacttcgctctcgtcgtgggtcccgtgccctctgggcccgtcctgagtctactcttgggccgcacgtcgtgcagtcccgccgcgcgatggtggcgggcccatggtgttggctggtcggcgtggcatggttgagaggtgcccctgcggtgtgggacctgggggctacgcggtgctggggctgctagaggcctccttggggggcctgtccttgtcgagatgtgatccgctggtctagcgaccgtggcccttgggggcacactcagggattccgtcacatctgccgaagaagtaggcagtatgctcgaagacggggagggaagaatagatgactccatggcaccctagaaccaagactagaaagcgggggtagaacgcctcgagaggacatggaccggggcaaccatcatactcggggggatcctcgagagcagagaggggtcgtgcaccgtatgcggcatggggcacccggtggctgggctattgagttgaagcgacagctgggaagcgcagttggctcggacgctccgagacgggaaggccagagggggatccatcgtttggcgcgaacggttaggggactggtgacaaacatcttgcggcccccgggaaacagagtgcgccgcagaccacacggaatggcacccgccagaaggatgagcggttcgatcaagggcgaagagtaacgctgtccctgccaagtggtcgcgtccagaagagtcgggcacaactgggatcgggtgggatcgcacatgaaacgaactcaagtgaaccacgcaagggcgttgatgcgagaccgcagtgggaagaaggcggtagcgggggactagcagtttgttggcaaacggggggacctcaaacggtaacaaggggggcgggagaaagcgctcaaaggggggtcggaaggcaccccaagggaggtagcaagaaaggggagggaatggagctggggggataggcagcaacgaggggaggc

SEQ ID NO: 571324 - DNA, 463 bp, Homo sapiens
tcattatgcatacaactcaggactgattttacgtttcgattaattttaccgcatactgagttattcccaaaagacgttgggaaatggtcagcctatgaacagctcacgcatgacagtagttgtgactctgaaaacgccctagcgcgtccagaggcgcaggatccagcgcagccatgcccattcggctcaccaaaaaaagcttggaagcactgctgcaaagaacagcgcggattactcacatcacctctaggttcactaaagtcaggcactttggggggagttgagagtcagacttccgtgtgctgctgggaatccaggggcgggatcgtcacctcttcgaagtggccgtcgtccccgctctcatagtcactcatcatgacctcggactccacttcgcagcaggctgacacgtcagagcaggaggcggtggaggcgtacacagacatgggcatgctctcgacag

SEQ ID NO: 571325 - DNA, 312 bp, Homo sapiens
  misc_feature (144)..(144): n is a, c, g, or t
  misc_feature (162)..(163): n is a, c, g, or t
  misc_feature (167)..(168): n is a, c, g, or t
  misc_feature (173)..(173): n is a, c, g, or t
  misc_feature (178)..(178): n is a, c, g, or t
  misc_feature (186)..(186): n is a, c, g, or t
  misc_feature (230)..(230): n is a, c, g, or t
  misc_feature (238)..(238): n is a, c, g, or t
  misc_feature (262)..(262): n is a, c, g, or t
  misc_feature (275)..(275): n is a, c, g, or t
  misc_feature (288)..(289): n is a, c, g, or t
ggtatatgctggtcactttcgaagagccgccctatgctatcaaggctggatggaaagaaaaccatgcaacgtttatgaatgaattgaaaaaccttcaggctgaaggacttacgactcttggccaatccctaaggacagcttttnatttattaaatttttttnnattnnttacntgcanagacaacnatgggcaggtaggttgaataataaggtggcaaaatagttgattntcattttntggaaaacacagtccagtccaaanctacataacatgnatgcaagtataanncattccaaattaaaatagaatat

SEQ ID NO: 571326 - DNA, 176 bp, Homo sapiens
tcaaggatccgtactgtggtgtacgtctttatgaaggctcatccacacaagttgtaaattatgtagatgataaaatttgtaagtttgagctaataggatttgggtaagattttggacttaagttgattctgtaatgacatgagaccttataggaacctttgggaggacgtaaggta

SEQ ID NO: 571327 - DNA, 367 bp, Homo sapiens
tcaggtaggcaaacctgtggggcaggttggaacctgcaaaaaagcctgcagtgagggtggggtctgcactgagccttttcaaagggatgtgttttacaggcttctgtcatatacacaatcagggaataccttctggattcttgggcgatccgttgttgttgagacacagtctcacttcacacccaaactggactgcagtggcatgatcttggctaactgcaacctgtgcctcccaggtacaagcaatgctcattcttaagcctcccaagtagactggaattacagacacatgccaccatgcctggctaatttttgtatttatagaacagatgggatttcaccatgttggccaagctggtcgtgaact

SEQ ID NO: 571328 - DNA, 325 bp, Homo sapiens
  misc_feature (66)..(66): n is a, c, g, or t
agcaagaaaactattaagggcccttaagggttagccgaaggggccctggggttgggtgaaatttcngggcaccgagggggttcagggggcaacatatcaagaattcgggaaccaagcagagggcgctggggagcggcatgtaccatcactggctctcggtctcatcgccctggccagtactcatcactgctgggcgcgcggtttggcggctaccactggcagatgcagcagtatggagcagaggcgagcggaaattctccccctactgaggccagctgaggtacaggcaggggcaggcaggaccacaagcgcccgctgcccagcc

SEQ ID NO: 571329 - DNA, 140 bp, Homo sapiens
tttcaccatgttggccaggatggtctcgatctcttgacctcatgattcgtccggccttgctccccaaagttctgggattaaggcgtgacacccgcggcccgccgagtggtggtattttttaagaagcacaggccatacct

SEQ ID NO: 571330 - DNA, 424 bp, Homo sapiens
ttttttgagatggagtcttgctctgttaccaggctggagtgcagtggtgcaatctcagctcactgtaacctctgcctcccgggttcaagcgattctcctgcctcagcctcctgagtagctgggattacaggtgcacgccaccacaccagctaatttttgtatttttagtagagacagggtttcaccatgttggccaggatggtctcgatctcttgaccttgtgaactgcccgcctcaatctctgaaagtgctgggattacaggcgtgagacaccacgcccggcctattacacactcttttatatgcttgttggactctttctccaactggattttaggctccttaaggacagtgactaggagacacagtaggagttcaagacatacttgattgatttcttgattgttggacactttgggtggga

SEQ ID NO: 571331 - DNA, 175 bp, Homo sapiens
  misc_feature (167)..(167): n is a, c, g, or t
caatgggaacagtggctgctgggaaaaccttcgcacctctgcctctgggcctgccttggtgaccaaggacagtgtagcagatccacacaacttaaagatctgctgcccgagtgaatggggaagtcgtccagagcagcaaccacccaacccagatggtattcaaaggncaggagga

SEQ ID NO: 571332 - DNA, 742 bp, Homo sapiens
agcctgcagtggcctgtagtgcatgccatggctgcccagccggaatggcatggtcttgaatgccccacttccacaatggacttggcatgctgtgctgctgtggccactgtggttcaaccatgcctggccctgtaagatcctgcatgactgtaatgtgcccgtgcaatgccaatggctgcgccgcatctgcccctgctgcccctgctgtctggtgtcccatcctggcccatctgtgctgctgccccactggttctggtaccacactgaatggtgcgcgcctggccgctggcttcagcctggaggagctcatgggtgtgccaggcattcacaacgaaggtggcccggaccatcggcatttctgtggatccgaggagtgctgtgaacaagtccactggagtccctgcagaccaacgtgcagctggctgaaggatgtacctgtccaaactcatcctcttccccagtgaagccctcgtgccccaatgaagggagacagttctgctgaagaactgaaactggcacccagctgaccggacctggtcatgcccgtccggaacgtctataagacaggagaaagctcgagtcatcactgaggaagagaagaatttcaaagccttcgctagtctccgtatggcccgtgccaacgcccggctcttcggcatacgggcaaaaagagccacggaggccgcagaccaggttgttgaaagaaaaataagtctcctggggactctggatcagtcggcaa

SEQ ID NO: 571333 - DNA, 1067 bp, Homo sapiens
gacggagccgagctgagtgctcggcttcctgctgatggtcagtgctttttggcaactccccgtgtgtgagaggggtagtggagtgctcccgtgcgtgcgactgtgggcctgagttcaccagcctgccggggcagtagtcgaaggccctggctgcggcatgtcctgtgtgtgccgcggtgcgggcagtgaactgctgcgcctgtgtgcggtggatgtggcctggctgcctgtgtgctgccagagctgtacctgggctcctgttccctgttgtactgctgcttcagtgtcgatcccagcactggtgctgctcatcgctgcgtggctggagggacggctgccgacaatgacatggcataacgaatcggctgttgcactttcttgcagctagagctgattactcgtggctgcttgagtgcctccttgcttgaacatcccatgacacagagacactgtggaccaccatgaacttggcacttggctggtgacatccttgctgcagggcaggatgcccactgtcagctcctgcgcttccaggcacatcaacagcagggcaaacaatggcagagaaggcctggttccaaaggatgcaggggcctcgacaaaggaacgggaggcagccccagcagagaccgacatgtggccgcggaaacccacacacgaggggctagaactcagggtacgagaaatttgcaggtggtgcagaccaggactttagatccgatccattgaggacagcttgctgtgcttcagcaggataaatacgcctgagttgccacgttggcaggaaccaaggatgggtaacgtccggagggactggcgaagcggttttgcccgcaacggtgggggcgcgcaggggttccgtcggcgaggttagcgaaggggagaccagaagaaaggcgtggcacatctgggacgacccgggggaatagagaggggcgactgaatgggacacacgttcgggtaacacaggggtgagccgcgggaaacaaggagggccacactggaggtagggcaagagaggggatcaaggagtggacgcacagatgactggagaggggcgacgacaa

SEQ ID NO: 571334 - DNA, 401 bp, Homo sapiens
  misc_feature (174)..(174): n is a, c, g, or t
  misc_feature (190)..(190): n is a, c, g, or t
  misc_feature (256)..(256): n is a, c, g, or t
  misc_feature (291)..(291): n is a, c, g, or t
  misc_feature (318)..(318): n is a, c, g, or t
cctcccccacagtgaggggagcaacctcagcctttacctgatgtagatactggtgctgattttggtacagcctatagaattgtgacctaaacaaacctccttttctttataaattacccagactcagattattccttttatatgtaacacaacacagattaagaacacttcccnacccgagttgtctctnacagacctcatttacgggttatctctctcttacattgtgtctccacttatagcggctgtgggtccnccattgcttttctcacacacacagcgctggtgctnccttcttgccttgtgcattgtcgtccncctctcctgggaacatgcctcctttagtgacctgaatggctcaccacttcacctcctgtaggtctttgcttgggtgtcacctt

SEQ ID NO: 571335 - DNA, 506 bp, Homo sapiens
aataaacgcctcttgttttagagtcagagtatttggggttcagttctagcttcactacttgaaattggagtcttgtggtatgcacattaaagatataggaattcaagtaaatgtgttcagcagagggagggaggaaggaaggcagggaggaagagaggaagggaggacacatgattctgcctgtcatcccatataatgaatctgacattgtacagtcatgtgccgcataatggcattttggtcaatgacggactgcatatatgacagtggttccataagattatattggagctgaaaaattcctatggcctaggacattgtagcatgatgcattgcactcacatttgtggtgatgctggtgtaaacaagcctactgcactgccagttgtataaaagtatagtacatacaattatgtacagtacatatttgataatgaattaaatgactgttactggcttatgtatttactatattttttaaatcattattttagggtatacttcta

SEQ ID NO: 571336 - DNA, 351 bp, Homo sapiens
gagtgcagtggtgggatctcggctcactgcaagctccgcctcccgggttcacgcattttatactgtttaagtgttaaacaccaaccctgtctttctttgggttgagcttttttagaaagtcgaagtgaatgtggccaggaaaatggaaaagccattgtataaattttttttgaggcagagtcttgctctatggccaggctggagtgtagtggcaccatctccacttaccacaacttgtgcctcctgggttcaagcgattctgctgcctcagcctcccgagtagctgggattgcaggtacccatcagcccatgcccagctaatttgtatttttagtagagatggggtttcac

SEQ ID NO: 571337 - DNA, 896 bp, Homo sapiens
taatttcactctgggaatcaaaaagcggggtattctgggcaaatggtccttgtgccctccccactcatccctggtctggtcccctgttgcctatagccctttacccttgaatgcaccgacccccataaagatagcttgtggaccaatccaccaattcgacgctttcacgtgttggtatcttcccctacaaaccccttttataaatgtgggagtgcgaaatcgtacgatgagggggaggtggacctcgtgtcccgcacctcatctcaaggctctcatggtgaagagcccgcatgtgccccacaaatggtggattaaaacctctatacgccgtgagcgggggatcctcttatctaccccgcggacaagctattgtgctcttcacatgtatacgaaacaccgtgagagtattagaatcctacacgacgtttttaatatatatggtaatagacaacagacatagagaaacaggggagcgcgcggggcgccttgctaacataaaaagagaatttatccccacgcgaagagagaggctcccccaacgtttttacaccggcccgatctcccccgccgtatatctttctgtgtcaacgcagagggagtgggcccccccccatatatggaggaagcggaagacgtgcgaatactatcttgtttagcacaggcgttaagaaggagcaacgcgtgtgcgccccgtcctggccttaatgtacagcagaacgcgctctcgcgaggtagcatagtgtgcccaaaaaaaggaaggggcagatggcttcctctggggggcacaatccttgttcggtacagagagcgacaccccccctatagtacattcgtggtgggcttgtgtgcccccctcaaacgagggggccaaacactttcacgccttgccgacaact

SEQ ID NO: 571338 - DNA, 561 bp, Homo sapiens
tcgatctagaggatcccgtgctcatgaatggtgatactcttctatgataggggaagtagcgtctgtagacctacttgcgctgcatgtgccataccggacatcgtgatcctcgaggatcacgatgtccgtctgcggccggcggtgtagacgccccttcgccgggacctggcacccgaatccggcctgccggtgttacctggaatgtcagagagctgaaagcagtcatatttggggatcatgcacctacggcggcagtatataaagaaagataattaagtatgcacccaagaagtagctgcgcccctacccatcacaaacggtatagaaggatatctcctaaggatcttatcatgtgaaacccttctgatataagtgggctctattaagaaatgcagctaagatgcaggatatgggccagcagctatacactacacacttgaacggcggacatattccttgaccatgtcacccaaacagcgtgatgctaatggagcacctcggccaactagacaagaagcacaaacccttttgtatcagggctcagaggcagcaggtgccatg

SEQ ID NO: 571339 - DNA, 1452 bp, Homo sapiens
  misc_feature (128)..(128): n is a, c, g, or t
  misc_feature (201)..(201): n is a, c, g, or t
  misc_feature (343)..(343): n is a, c, g, or t
  misc_feature (665)..(665): n is a, c, g, or t
gccttcgcgttctgtagcatgctccgtgcgtgcttgtgtggacagcgaggccatgctttttgagagccctatctgctgttccagtcgtgggtccttcactggagttacatgcttgaggaccagcgaanagagatgggtgagagtccaatgagcgtgcatgaggttccgacagtcgacacactatatgcataggactaattnttcgtgaccacgtacaccatcgattggcatggctaccgtcggacatatgcgcgtacacgacaagccagagcctcgcaacaagctgaccctcttgccccgcatcgatctcttgtctcaactctcccagaggtgatccatagcnagatctcatgtcatgcgtgagatcagataggcagaagaatgatggcgttgtgcacgcgacgcatagagcgagaaggcaggagcgacccaagaggccggctcgtggggacccgtacttacaaaaggagttgtatatagacaaggggattcccactacgcagcaccgccttactgcgtcaacgcacatagtacgcctgagatgcgcgtgcgcgtatgcgcatggcatgtgttcccgtaccgaatggtacggggtagcgaagtcgttgtaaggcgcgttgaccatatcgcaaactgactttgtgtgccctaatttcattgcgttngggcagtgccattcgggacgtgccaaccagcaagaaggtttagagggcgtgtggtacaatgttaaccccgagggggaccatgtctgcagctaagacggcgattcgcccttggggacacggtgcccgtaccatgaagtggcatagcaaggatgcatatagaaggccaccgaatggaatttcgccaattgttccccggaggaaacgcacaaggttaaaagccgaaggtgttcccagttgtagggggtcttcacccgggagcatttgtgcaaggggcccgggcatcgatacggaatagccgggttggaggcacgcaacggcgacgcacaattttcggaacgaaaaagttcatccgaggtacgcgtggggtttcccctttcgaaaggcaaccgccaatctgtgggaccttcgcgtttgtgcttcccttggaagggccgcggatattggtagaaggaactatagattgagatttggcggtatctaaattggcctgttctgagcccatgttgaccagttgtttgccttaccaccatgtgtgtgtcgtccccttgtagagaagctggtaacatagcggcgaaaacccacattggaggtggcagtcacaaagagcaagagtctcaagagggttgttgtctcacaacagggtggatcggccccccttggggagcacacatcggggccaacccagatggtgaacgccccacggcggcaaaaaggcgcccataagaccgaacatgttggttacccgatagaagtgtcccattgtacaaaacgagcagtccttcgacac

SEQ ID NO: 571340 - DNA, 1600 bp, Homo sapiens
ccttagtgcttagtctgtcgtgtctctttctgttgttttaggttgttgggtgtttttggcgtacggtgtctcgtcggtgttcgtctctgttgctgccctgctttagtgtttgcttctcctggtttggtcgttgctctctgttggtggggacgttgtgtgtttcgtattcctttgtggttcttggttactgtgtggctgcctgattggtgctcagtttgtgcctgcgtgggtaggggctgcgtagttgtgcgtgcgcgtcgggtagctgacaaatcggggttgtgttccgctaccgttgtcgcatgtgtgtgcctcctttgtgggttcgcaccgtacgattctgtgtatgtggatgggtttgacgtgcggacgggacgcacgtatgtgtctggttggctccttttagtgttggtggatccgctccctctgtggtgatcctgtggtggtcctctgtgttctggcgccaccgcagatatgtggtgtgctgttgttcctatttaagtcgtctggggcagttcgtgtgtgtgttctcctgtgtcgtggtatgtttgctcccgtttgcggggcgtttcgtcggtcgatctacacggcggtttgtttgtatgtacttgtatttgcgcctcgcccacttgttatgggcacagttgggggttcaacgggtggtgtgttaacatgggccgtgcttgttgtttcaccagcggggtgtttattggcccctgtctcacggtggaccccttttttgccgttttggaatgagtttcgttctcgtgcttgcccacggaaccaattcgtcctgttgttcgaagtgtgggaataatgtgtctgtgggttgtccacgagaactcgttgtgtgtttcacttcgcggtgatgaattctcttttcttttcggtgagtggtccacttgaggatgcctcctcagacacttcacgggatttccaccaggcgttgaaaagaatgtggaaagtgttccacggtgaattgagaatggagaaatattcacacgccccaataggaggtgccaccctgaatagggacgtatatatgaatccaccccacgagtctcgtttatttcaccgtcttactctttgtgacttccactgtgtttttacctggggatagtgtgtttaatagctgtgttgtgtgtcaacacaggcgtcattttattggaactgtaatttaagcatctgtacaccacgcctggaaggcgcccacccacggacgcaccacggcttgccacctgtttcttgtaacacgcttctgtgtgccccttgaacactcgcctgaaaatgagatttatctgtttgaaagaagaatgccctctgtcggtgtgtgccacgcctggtgatggaagaaatgcacgcctggcacagctgttatggagcacattatgtccacccttcacgcgcccgggttctctggccgcggtctgactcacgaaccctctggtactcgcccctctggccccacgtgcccacgaacccactgttagccccctggctcctgcactttatccccgaatatcctcgcttttaatctgtgcccttaagctgggaacttaccccctgtaatcacctaaattaacgtgtttataaaccatga

SEQ ID NO: 571341 - DNA, 144 bp, Homo sapiens
gatgcaatagactttacagaaagacttccggcgcatgcaggtctgtgtcatcgaggctcaagctgtgtcgatcagtggaggtctttggtttccgacatatagtctgtggaagagaatcagtactcgggccacgaagcttaacaa

SEQ ID NO: 571342 - DNA, 104 bp, Homo sapiens
  misc_feature (19)..(20): n is a, c, g, or t
gcggggggggggccccccnnccccaaccctttttttacaaagggggtttggggcgggggaaattttcggggtttggggtttttaaacccttaaaaaaatttgga

SEQ ID NO: 571343 - DNA, 844 bp, Homo sapiens
cgtgtctggactacaagtaccaactttgagcccttctctcatgatgatcgccacgtccatcgcctcagttcgttctgtggactgctgcgcctcagagcagaaggctgttcaccaaaagtggtttgcgccactgaaacaagaacttcaacatccatggaacgaacaagcactggttaattaggcaatgccaagactccgatgactaacttcttcacatactagttccatagatgatgcatattaggaacaaatgtgtggcaaactctcctctcagttgatgaccttgtggagaaactggtcaagaggctggagttcactggtggagctcaacaacacttacatcttctatacctcagacaatggctatcacacaggacagttttccttgccaatagacaagagacagctgtatgagtttgatattcaaagttccactgttggttcgaggacctgggatcaaccaaatcagacaagcaagatgctggttgccaacattgacttgggtcctactattttggcattcgctggctacgactaaattagacacagattgtgggatgtccttatttgcccttttgagaggtggccgcacttgcctggggatacgagtccttggtgggggaacaccggggaaggccggcgaggtgtcttgcaccagtgtcgccccagtagtcgggggatccagtgtcccccaggtgtgtgtaggctcttatacacccttgccgttgtaggcagttcgctgtggacttgattcgcgttgtcccgcggttgtaacttattcggtggccacgactaattgtgtcacaaccccgtagaactgtatatcacttgccacgacggtgaa

SEQ ID NO: 571344 - DNA, 384 bp, Homo sapiens
tctagaggtccccgagccgctcagtactgatcattctatatcccctctatttgacccccacctccaaggtatctcatcgacaaccgacgaatcaccaccccacaatgactaagtccatctaatcctctaacacagaatgatagccatacactacactataggacgaagcttatcgcttatactagtatccttaatcatttttattgccacaactaagcgctcctcgggactcctgcctcactcatttacaccaaccagcctactatctattaacctcgccatggccatccccttatgagcgggcgcagtgattatgggctttcgctctagattaaaaatgccctagcccacttcttaccacaaggcacacctacaccccttatc

SEQ ID NO: 571345 - DNA, 578 bp, Homo sapiens
  misc_feature (432)..(432): n is a, c, g, or t
agaggaccctcttgggtgataccacgacttgctattgtgaataatgctgtgataaatgtatgagtgcaggtgtctttttggcaaaatgatttcttttcctgtgggtagatacccactagtggaattgttgaattagtagttctgtttttagttcttgagaaatctccatgctgttttccatagagatggtactaatttacagccccaccaactgtgtataagtgtccccctttctccacatcctcaccaacatctgttttttgactttctaatggccattctgactggcgtagaagatggtatctcattgtggttttagtttgcatttctctgatgattagtgatatctgactaagtccccaaaaggaaacacagcagaaacaaaaatagacaaatcagacttaattgaactaaaaagcttctgcatagcanaagaaataatcaacagagcaaacagaccacctgcagaatgggagaaaatatttacaaacaatgcgtccaacaaagggctaatatctagaatctacaaggagctcaaacaacaagaaaaaaataaccccattaaaaagtaggccacg

SEQ ID NO: 571346 - DNA, 1238 bp, Homo sapiens
  misc_feature (98)..(98): n is a, c, g, or t
  misc_feature (124)..(125): n is a, c, g, or t
  misc_feature (269)..(269): n is a, c, g, or t
  misc_feature (330)..(331): n is a, c, g, or t
  misc_feature (340)..(340): n is a, c, g, or t
  misc_feature (342)..(342): n is a, c, g, or t
  misc_feature (356)..(357): n is a, c, g, or t
  misc_feature (363)..(363): n is a, c, g, or t
  misc_feature (385)..(385): n is a, c, g, or t
  misc_feature (393)..(393): n is a, c, g, or t
  misc_feature (395)..(396): n is a, c, g, or t
  misc_feature (423)..(423): n is a, c, g, or t
tgggctcacgtttttactcgcttactttagcagaagtagttctggtcgtcgcctaccgtctcgctatagccgtttgagggaagaaggaggaaaattanccggtatcgttagagctacaccaaanntgcattgagccaaacttgccaccaagagcccaacaatcaccatgatgctgagcacggaaggcagggaggggttcgtggtgaaggtcaggggcctaccctggtcctgctcagccgatgaagtgatgcgcttcttctctgattgcnagatccaaaatggcacatcaggtattcgtttcatctacaccagagaaggcagaccaagtgnngaagcattngntgaacttgaatctnnagaggnagtgaaattggctttgaagaangacagagnanncatgggacacagatacgttgaagtatncaagtctaacagtgttgcaactggcatcgcggtgctgaagcatcacaggtccgcaatcagccctgcatactgccacacgatggcttcgtcacggcttcagaggcatcccattgggctgtagcaaggcaagagcatgtacaagttatattacagggattggaacattgtgccaaaatgggatgacactgacagttggaactttcagggtgcgaagcacaggggaagcctttgtgcagttgtgttcacaggcagatagctgacaaggcttaaagcaaccacaaggaaagaataggggcacaggtacattggagatcttacaagagtagaccgagctgcaagtacgaaaaacagtatgatgcacacgtgaaacggttactgggttatgccagcggacaaggttccatatgataaggcagggggtatgcaacagggatacataggattggaaagaaggcaagcagggttagacaggattaaggtagagagccctagtgcatagcacgagagaaggaagtgacatgacacgaccaagcgacggccaatccgtcaccgacacggcgacaaggcacccaaaacaaatagtcgaaaaagacacacaccacacgcgaccgaacgtcagcagcaccgcaccagagccagagaagcacgaaaacgacgccacacgggcacagaaacaaaaaacggaaacacaaaaccagaaaagaacaaaagagaacaccacacaacaacacaacagacacaacacaacagacagcaaggcccccagccagccccccacacacacacaacgacacaccaaacggaccaacccagcg

SEQ ID NO: 571347 - DNA, 1868 bp, Homo sapiens
  misc_feature (1693)..(1693): n is a, c, g, or t
cgcccgggcaggtcctttgtcaagtcatcccctcttctcctcaggaactgctcaaacctgtgccccaaagatgagggcccaggaggacctcgagggccggacacagcatgaaaccaccagggacccctcgaccccgctacccacagagcctaagtttgacatgttgtacaagatcgaggacgtgccaccttggtacctgtgcatcctgctgggcttccagcactacctgacatgcttcagtggtaccatcgccgtgcccttcctgctggctgaggcgctgtgtgtgggccacgaccagcacatggttagtcagctcatcggcaccatcttcacgtgcgtgggcatcaccactctcatccagaccaccgtgggcatccggctgccgctgttccaggccagtgcctttgcatttctggttccagccaaagccatactggctctggagagatggaaatgccccccggaagaggagatctacggtaactggagtctgcccctgaacacctctcatatttggcacccacggatacgggaggtccagggtgcaatcatggtgtccagcgtggtggaggtggtgattggcctgctggggctgcctggggccctgctcaactacattgggcctctcacagtcacccccactgtctccctcattggcctttctgtcttccaagctgctggcgaccgagctggctcccactggggcatctcagcttgctccattctcctgatcatcctcttctcccagtacctgcgcaacctcaccttcctgctgcctgtctaccgctggggcaagggcctcactctcctccgcatccagatcttcaaaatgtttcctatcatgctggccatcatgaccgtgtggctgctctgctatgtcctgaccttgacagacgtgctgcccacagacccaaaagcctatggcttccaggcacgaaccgatgcccgtggtgacatcatggctattgcaccctggatccgcatcccctacccctgtcagtggggcctgcccacggtgactgcggctgctgtcctgggaatgttcagcgccactctggcaggcatcattgagtccatcggagattactacgcctgtgcccgcctggctggtgcaccaccccctccagtacatgctatcaacaggggcatcttcaccgaaggcatttgctgcatcatcgcggggctattgggcacgggcaacgggtccacctcgtccagtcccaacattggcgtcctgggaattaccaaggtgggcagccggcgcgtggtgcagtatggtgcggctatcatgctggtcctgggcaccatcggcaagttcacggccctcttcgcctcgctccctgaccccatcctggggggcatgttctgcactctctttggcatgattacagctgtggggctgtccaacctgcaatttgtggacatgaactcctctcgcaacctcttcgtgctgggattttccatgttcttcgggctcacgctgcccaattacctggagtccaaccctggcgccatcaatacaggcattcttgaagtggatcagattctgattgtgctgctgaccacggagatgtttgtgggcgggtgccttgctttcatacttgacaacacagtgccagggagcccagaggagcgtggtctgatacagtggaaagctggggctcatgccaacagtgacatgtcttccagcctnaagagctacgatttccccatttgggatgggcatagtaaaaagaattacctttctgaaatacattcctatctgcccagtcttcaaaggattttcttcaagttcaaaagatcagattgcaattccagaagacactccagaaaatacagaaactgcatctgtgtgcaccaaggtctga

SEQ ID NO: 571348 - DNA, 247 bp, Homo sapiens
taacaaagaacaacttaaaaacgagtagacactgatagtttcaccttaagagaaaagaactcttaagcatacaagttacaagacaaaaaacccaacaaaccaaaaacaacaactgagaaaccaaaatcagctattaggaaacaggtaaaaaagaaagcaaagcaaatgaaaataccctttcatcatgagtagtaagtaatttcagtcatggtcacgtaacagaagtagcagagcagtccctacctat

SEQ ID NO: 571349 - DNA, 4709 bp, Homo sapiens
aaaggaaatgattttttcatcgatgactctaaactagccagtgcagatgatattggtactttgatctgtaagaacaaaaaaccgctcatacaggaggaaagtgacaccattgtttcttcttccaagagtgctttacattcatcagtgcctaaaagtaccaatgacagagatgccacacctctgtcaagagcaatggactttgaaggaaaactgggatgtgactctgaatctaatagcactttggaaaatagttctgataccgtgtctattcaggatagcagtgaagaagatatgattgttcagaatagcaatgaaagcatttctgaacagttcagaactcgagaacaagatgttgaagtcttggagccgttaaagtgtgagttggtttctggtgagtccactggaaactgtgaggacaggctgccggtcaaggggactgaagcaaatggtaaaaaaccaagtcagcagaagaaattagaggagagaccagttaataaatgtagtgatcaaataaagctaaaaaataccactgacaaaaagaataatgaaaatcgagagtctgaaaagaaaggacagagaacaagtacatttcaaataaatggaaaagataataaacccaaaatatatttgaaaggtgaatgcttgaaagaaatttctgagagtagagtagtaagtggtaatgttgaaccaaaggttaataatataaataaaataatccctgagaatgatattaaatcattgactgttaaagaatctgctataaggccattcattaatggtgatgtcatcatggaagattttaatgaaagaaacagctccgaaacaaaatcgcatttgctgagttcttcagatgctgaaggtaactaccgagatagccttgagaccctgccatcaaccaaagagtctgacagtacacagacgaccacaccctcagcatcttgtccagaaagcaattcagttaatcaggtagaagatatggaaatagaaacctcagaagttaagaaagttacttcatcacctattacttctgaagaggaatctaatctcagtaatgactttattgatgaaaatggtctgcccatcaacaaaaatgaaaatgtcaatggagaatctaaaagaaaaaccgtcatcacagaagtcaccacgatgacctccacagtggccacagaatcaaaaactgtgatcaaggtagaaaaaggcgataagcaaactgtggtttcttccacagaaaattgtgcaaaatccactgtcacaaccaccactacaacagtgaccaagctttccacaccctccacaggcggcagtgtggacatcatctctgtaaaggagcagagcaaaaccgtggtcaccacgacagtgacagactccctgaccattccacgggaggcacactggttacatctatgactgtgagcaaagagtattccacacgagacaaagtgaaactgatgaaattttcaagaccaaagaagactcgttcaggtacagctctgcccatcctatagaaaatttgttaccaagagcagcaagaagagcatttttgttttgcctaatgatgacttaaaaaagttggcccgaaaaggaggaatccgagaggtcccttattttaattacaatgcaaaacctgctttggatatatggccatatccttctcctagaccgacctttggcatcacttggaggtatagacttcagacagtaaagtccttagctggagtgagcctgatgttacggttactgtgggcaagtttgagatgggatgatatggcggccaaggctcctccaggaggagggactacacggacagaaacatccgaaactgaaatcacaacaacagaaataattaagaggagagatgttggtccttatggcattcgatctgaatattgtatcaggaaaatcatttgtcccattggagttccagaaacaccaaaagaaacgcctacacctcagaggaaaggccttcgatcaagtgcactgcggccaaagagaccagaaacgcccaagcaaactggccctgttattattgaaacctgggtagcagaagaagaactggaattgtgggagatcagggcatttgctgagagagtggagaaagaaaaggcacaagcagttgagcaacaggctaagaaacgactggagcagcagaagccgacagtgattgcaacttccactacttccccaacaagcagtacaaccagcaccatctctccagcacagaaggttatggtggcccccataagtggctcagttacaactggaaccaaaatggtactaactactaaagttggatctccagctacagtaacattccaacaaaacaagaactttcatcaaacctttgctacatgggttaagcaaggccagtcaaattcaggcgttgttcaagtacagcagaaagtcctgggtatcattccatcaagtacaggtaccagtcagcaaacctttacttcattccagcccaggacagcaacagtcacaattaggcccaatacctcaggctctggaggaaccacaagcaattcacaagtaatcacagggcctcagattcgccctggtatgaccgtgattagaacaccactccaacagtcaacactaggaaaggcaattattcgaacacctgtgatggtacagccaggtgctcctcagcaagtgatgactcaaatcatcagggggcagcctgtctccactgcagtctccgcccctaacacggtttcctcaacacctgggcagaaaagcttaacttcagcaacgtccacttcaaatatacagtcttcagcctcacaaccccctcgcccccaacaaggacaagtgaagctcaccatggctcaacttactcagttaacacagggccacggtggcaatcaaggtttgacagtagtaattcaaggacaaggtcaaactactggacagttgcagttgatacctcaaggggtgactgtactcccaggcccaggccagcagctaatgcaagctgcaatgccaaatggtactgttcagcgattcctctttaccccattggcaacaacagccaccacagccagcaccaccaccaccactgtttccacgacagcagcaggtacaggtgaacaaaggcagagtaaactgtcaccccagatgcaggtacatcaagacaaaaccctgccaccagctcagtcatcaagtgtgggtccagcagaagcccagccacagactgctcagccttcagctcagccccagccccaaacccagccccagtccccagctcagcctgaagttcagactcagcctgaagttcagacccaaacaactgtttcatcccatgtcccttctgaagcacaacccacccacgcacagtcatccaagccccaagttgcagcacagtctcagcctcaaagtaatgtccaaggacagtctcctgttcgtgtccaaagtccatcacagactcgaatacgtccatcaactccatcccaactgtctcctggacaacaatcccaggttcagactacaacctcacaaccgattccaattcaaccacatacatctcttcagataccttcccaaggccagccacagtcacaaccccaggtggtgatgaagcataatgctgtaatagaacatttaaaacagaaaaagagcatgactccagctgaaagagaagagaatcaaagaatgattgtctgtaaccaggtgatgaagtatattttggataagatagataaagaagaaaaacaggcagcaaaaaaacggaagcgtgaagagagtgtggagcagaaacgtagcaagcagaatgccactaagctgtcagctctgctcttcaagcacaaagagcagctcagagccgagatcctgaagaagagagcactcctggacaaggatctgcaaattgaagtgcaggaagagctgaagagagacctgaaaattaagaaagaaaaagacctgatgcagttggctcaggccacagcagtagctgcaccctgccccccagtgacaccagctcctccagcccctccagcccctccaccttcacctccccctccacctgctgtgcaacacacaggccttctgtccacgcccaccttacctgctgcttcccagaagaggaagcgggaagaggaaaaagactccagctcaaagtccaagaaaaagaaaatgatctctactacctcaaaggaaactaagaaggacacaaagctttactgtatctgtaaaacgccttatgatgaatctaagtgagtagatctttttgagctctagttttttgtcttgaaagtttagctattaaattggattttgaagaaaatgaatattttgggagtgatataaatgaaaatattaaatttaagagtaatgtttcatccatggtcttgcatgtgatattcttaccattgacgctagtaaagtaaaatttgctatttcacgtgtttgtgattgtcctttgttatattcttttctgtcaaaaacaagctttctgttgctcctttgctttctcttcttccctctgaattaactccaaatcagtgagtaattgatgtctggagaaggaggtgtattactgttgcccaaaatggagagcatcctttctgggatctgttcaaagccctgcgaatacatgaaatcctggaaaccagttgaacatgaatggtcagaggttttgaatttgagtggttcggtttcttaattgttttattttaagcagttgttttttttgtattaaaatactgcaactc

SEQ ID NO: 571350 - DNA, 700 bp, Homo sapiens
  misc_feature (98)..(98): n is a, c, g, or t
  misc_feature (124)..(125): n is a, c, g, or t
  misc_feature (269)..(269): n is a, c, g, or t
  misc_feature (330)..(331): n is a, c, g, or t
  misc_feature (340)..(340): n is a, c, g, or t
  misc_feature (342)..(342): n is a, c, g, or t
  misc_feature (356)..(357): n is a, c, g, or t
  misc_feature (363)..(363): n is a, c, g, or t
  misc_feature (385)..(385): n is a, c, g, or t
  misc_feature (393)..(393): n is a, c, g, or t
  misc_feature (395)..(396): n is a, c, g, or t
  misc_feature (423)..(423): n is a, c, g, or t
tgggctcacgtttttactcgcttactttagcagaagtagttctggtcgtcgcctaccgtctcgctatagccgtttgagggaagaaggaggaaaattanccggtatcgttagagctacaccaaanntgcattgagccaaacttgccaccaagagcccaacaatcaccatgatgctgagcacggaaggcagggaggggttcgtggtgaaggtcaggggcctaccctggtcctgctcagccgatgaagtgatgcgcttcttctctgattgcnagatccaaaatggcacatcaggtattcgtttcatctacaccagagaaggcagaccaagtgnngaagcattngntgaacttgaatctnnagaggnagtgaaattggctttgaagaangacagagnanncatgggacacagatacgttgaagtatncaagtctaacagtggtttgtaatgagttgttgaagcatccaagttcgaattagccttgttcttgccaacgatggatttcgtccgggttcagatggactcccattttgactgtagcaaggttagagattggtcaagatcttttcatggttcggtaattgtgccaaattgggatgaccattgccagtggacttttaagggtctaaatctcacgggcctttggggaagttggctttacaggctttgtgtactttaagtagtcgagctgtatttcgcccct

SEQ ID NO: 571351 - DNA, 851 bp, Homo sapiens
  misc_feature (676)..(676): n is a, c, g, or t
cgcccgggcaggtcctttgtcaagtcatcccctcttctcctcaggaactgctcaaacctgtgccccaaagatgagggcccaggaggacctcgagggccggacacagcatgaaaccaccagggacccctcgaccccgctacccacagagcctaagtttgacatgttgtacaagatcgaggacgtgccaccttggtacctgtgcatcctgctgggcttccagcactacctgacatgcttcagtggtaccatcgccgtgcccttcctgctggctgaggcgctgtgtgtgggccacgaccagcacatggttagtcagctcatcggcaccatcttcacgtgcgtgggcatgttctgcactctctttggcatgattacagctgtggggctgtccaacctgcaatttgtggacatgaactcctctcgcaacctcttcgtgctgggattttccatgttcttcgggctcacgctgcccaattacctggagtccaaccctggcgccatcaatacaggcattcttgaagtggatcagattctgattgtgctgctgaccacggagatgtttgtgggcgggtgccttgctttcatacttgacaacacagtgccagggagcccagaggagcgtggtctgatacagtggaaagctggggctcatgccaacagtgacatgtcttccagcctnaagagctacgatttccccatttgggatgggcatagtaaaaagaattacctttctgaaatacattcctatctgcccagtcttcaaaggattttcttcaagttcaaaagatcagattgcaattccagaagacactccagaaaatacagaaactgcatctgtgtgcaccaaggtctga

SEQ ID NO: 571352 - DNA, 4344 bp, Homo sapiens
tgagctggtccaacctcggacagtgggagtggataggctccacagctgcctctcccagtggacaaaaacatccaggtaatgggtaaaaaaaccaagtcagcagaagaaattagaggagagaccagttaataaatgtagtgatcaaataaagctaaaaaataccactgacaaaaagaataatgaaaatcgagagtctgaaaagaaaggacagagaacaagtacatttcaaataaatggaaaagataataaacccaaaatatatttgaaaggtgaatgcttgaaagaaatttctgagagtagagtagtaagtggtaatgttgaaccaaaggttaataatataaataaaataatccctgagaatgatattaaatcattgactgttaaagaatctgctataaggccattcattaatggtgatgtcatcatggaagattttaatgaaagaaacagctccgaaacaaaatcgcatttgctgagttcttcagatgctgaaggtaactaccgagatagccttgagaccctgccatcaaccaaagagtctgacagtacacagacgaccacaccctcagcatcttgtccagaaagcaattcagttaatcaggtagaagatatggaaatagaaacctcagaagttaagaaagttacttcatcacctattacttctgaagaggaatctaatctcagtaatgactttattgatgaaaatggtctgcccatcaacaaaaatgaaaatgtcaatggagaatctaaaagaaaaaccgtcatcacagaagtcaccacgatgacctccacagtggccacagaatcaaaaactgtgatcaaggtagaaaaaggcgataagcaaactgtggtttcttccacagaaaattgtgcaaaatccactgtcacaaccaccactacaacagtgaccaagctttccacaccctccacaggcggcagtgtggacatcatctctgtaaaggagcagagcaaaaccgtggtcaccacgacagtgacagactccctgaccattccacgggaggcacactggttacatctatgactgtgagcaaagagtattccacacgagacaaagtgaaactgatgaaattttcaagaccaaagaagactcgttcaggtacagctctgcccatcctatagaaaatttgttaccaagagcagcaagaagagcatttttgttttgcctaatgatgacttaaaaaagttggcccgaaaaggaggaatccgagaggtcccttattttaattacaatgcaaaacctgctttggatatatggccatatccttctcctagaccgacctttggcatcacttggaggtatagacttcagacagtaaagtccttagctggagtgagcctgatgttacggttactgtgggcaagtttgagatgggatgatatggcggccaaggctcctccaggaggagggactacacggacagaaacatccgaaactgaaatcacaacaacagaaataattaagaggagagatgttggtccttatggcattcgatctgaatattgtatcaggaaaatcatttgtcccattggagttccagaaacaccaaaagaaacgcctacacctcagaggaaaggccttcgatcaagtgcactgcggccaaagagaccagaaacgcccaagcaaactggccctgttattattgaaacctgggtagcagaagaagaactggaattgtgggagatcagggcatttgctgagagagtggagaaagaaaaggcacaagcagttgagcaacaggctaagaaacgactggagcagcagaagccgacagtgattgcaacttccactacttccccaacaagcagtacaaccagcaccatctctccagcacagaaggttatggtggcccccataagtggctcagttacaactggaaccaaaatggtactaactactaaagttggatctccagctacagtaacattccaacaaaacaagaactttcatcaaacctttgctacatgggttaagcaaggccagtcaaattcaggcgttgttcaagtacagcagaaagtcctgggtatcattccatcaagtacaggtaccagtcagcaaacctttacttcattccagcccaggacagcaacagtcacaattaggcccaatacctcaggctctggaggaaccacaagcaattcacaagtaatcacagggcctcagattcgccctggtatgaccgtgattagaacaccactccaacagtcaacactaggaaaggcaattattcgaacacctgtgatggtacagccaggtgctcctcagcaagtgatgactcaaatcatcagggggcagcctgtctccactgcagtctccgcccctaacacggtttcctcaacacctgggcagaaaagcttaacttcagcaacgtccacttcaaatatacagtcttcagcctcacaaccccctcgcccccaacaaggacaagtgaagctcaccatggctcaacttactcagttaacacagggccacggtggcaatcaaggtttgacagtagtaattcaaggacaaggtcaaactactggacagttgcagttgatacctcaaggggtgactgtactcccaggcccaggccagcagctaatgcaagctgcaatgccaaatggtactgttcagcgattcctctttaccccattggcaacaacagccaccacagccagcaccaccaccaccactgtttccacgacagcagcaggtacaggtgaacaaaggcagagtaaactgtcaccccagatgcaggtacatcaagacaaaaccctgccaccagctcagtcatcaagtgtgggtccagcagaagcccagccacagactgctcagccttcagctcagccccagccccaaacccagccccagtccccagctcagcctgaagttcagactcagcctgaagttcagacccaaacaactgtttcatcccatgtcccttctgaagcacaacccacccacgcacagtcatccaagccccaagttgcagcacagtctcagcctcaaagtaatgtccaaggacagtctcctgttcgtgtccaaagtccatcacagactcgaatacgtccatcaactccatcccaactgtctcctggacaacaatcccaggttcagactacaacctcacaaccgattccaattcaaccacatacatctcttcagataccttcccaaggccagccacagtcacaaccccaggtggtgatgaagcataatgctgtaatagaacatttaaaacagaaaaagagcatgactccagctgaaagagaagagaatcaaagaatgattgtctgtaaccaggtgatgaagtatattttggataagatagataaagaagaaaaacaggcagcaaaaaaacggaagcgtgaagagagtgtggagcagaaacgtagcaagcagaatgccactaagctgtcagctctgctcttcaagcacaaagagcagctcagagccgagatcctgaagaagagagcactcctggacaaggatctgcaaattgaagtgcaggaagagctgaagagagacctgaaaattaagaaagaaaaagacctgatgcagttggctcaggccacagcagtagctgcaccctgccccccagtgacaccagctcctccagcccctccagcccctccaccttcacctccccctccacctgctgtgcaacacacaggccttctgtccacgcccaccttacctgctgcttcccagaagaggaagcgggaagaggaaaaagactccagctcaaagtccaagaaaaagaaaatgatctctactacctcaaaggaaactaagaaggacacaaagctttactgtatctgtaaaacgccttatgatgaatctaagtgagtagatctttttgagctctagttttttgtcttgaaagtttagctattaaattggattttgaagaaaatgaatattttgggagtgatataaatgaaaatattaaatttaagagtaatgtttcatccatggtcttgcatgtgatattcttaccattgacgctagtaaagtaaaatttgctatttcacgtgtttgtgattgtcctttgttatattcttttctgtcaaaaacaagctttctgttgctcctttgctttctcttcttccctctgaattaactccaaatcagtgagtaattgatgtctggagaaggaggtgtattactgttgcccaaaatggagagcatcctttctgggatctgttcaaagccctgcgaatacatgaaatcctggaaaccagttgaacatgaatggtcagaggttttgaatttgagtggttcggtttcttaattgttttattttaagcagttgttttttttgtattaaaatactgcaactc

SEQ ID NO: 571353 - DNA, 632 bp, Homo sapiens
  misc_feature (457)..(457): n is a, c, g, or t
ggcctttacatgtgcttatttaattttccagctccatttatctacatttatcatttctccattatcatttcaactttacagatgaggaagatgaggctcagtgatttgtcccaggtgaacaactagcaactggcagaattgggacttgagcccagagatagggacagagataggtttgagacagggctttgtactgttcctttgccatagctgcacaagaggaagtccctcaactctgctctccagattgggccatgacacccattggcccttggcctattccacaggcattcttgaagtggatcagattctgattgtgctgctgaccacggagatgtttgtgggcgggtgccttgctttcatacttgacaacacagtgccagggagcccagaggagcgtggtctgatacagtggaaagctggggctcatgccaacagtgacatgtcttccagcctnaagagctacgatttccccatttgggatgggcatagtaaaaagaattacctttctgaaatacattcctatctgcccagtcttcaaaggattttcttcaagttcaaaagatcagattgcaattccagaagacactccagaaaatacagaaactgcatctgtgtgcaccaaggtctga

SEQ ID NO: 571354 - DNA, 4399 bp, Homo sapiens
aaaggaaatgattttttcatcgatgactctaaactagccagtgcagatgatattggtactttgatctgtaagaacaaaaaaccgctcatacaggaggaaagtgacaccattgtttcttcttccaagagtgctttacattcatcagtgcctaaaagtaccaatgacagagatgccacacctctgtcaagagcaatggactttgaaggaaaactgggatgtgactctgaatctaatagcactttggaaaatagttctgataccgtgtctattcaggatagcagtgaagaagatatgattgttcagaatagcaatgaaagcatttctgaacagttcagaactcgagaacaagatgttgaagtcttggagccgttaaagtgtgagttggtttctggtgagtccactggaaactgtgaggacaggctgccggtcaaggggactgaagcaaatggtaaaaaaccaagtcagcagaagaaattagaggagagaccagttaataaatgtagtgatcaaataaagctaaaaaataccactgacaaaaagaataatgaaaatcgagagtctgaaaagaaaggacagagaacaagtacatttcaaataaatggaaaagataataaacccaaaatatatttgaaaggtgaatgcttgaaagaaatttctgagagtagagtagtaagtggtaatgttgaaccaaaggttaataatataaataaaataatccctgagaatgatattaaatcattgactgttaaagaatctgctataaggccattcattaatggtgatgtcatcatggaagattttaatgaaagaaacagctccgaaacaaaatcgcatttgctgagttcttcagatgctgaaggtaactaccgagatagccttgagaccctgccatcaaccaaagagtctgacagtacacagacgaccacaccctcagcatcttgtccagaaagcaattcagttaatcaggtagaagatatggaaatagaaacctcagaagttaagaaagttacttcatcacctattacttctgaagaggaatctaatctcagtaatgactttattgatgaaaatggtctgcccatcaacaaaaatgaaaatgtcaatggagaatctaaaagaaaaaccgtcatcacagaagtcaccacgatgacctccacagtggccacagaatcaaaaactgtgatcaaggtagaaaaaggcgataagcaaactgtggtttcttccacagaaaattgtgcaaaatccactgtcacaaccaccactacaacagtgaccaagctttccacaccctccacaggcggcagtgtggacatcatctctgtaaaggagcagagcaaaaccgtggtcaccacgacagtgacagactccctgaccattccacgggaggcacactggttacatctatgactgtgagcaaagagtattccacacgagacaaagtgaaactgatgaaattttcaagaccaaagaagactcgttcaggtacagctctgcccatcctatagaaaatttgttaccaagagcagcaagaagagcatttttgttttgcctaatgatgacttaaaaaagttggcccgaaaaggaggaatccgagaggtcccttattttaattacaatgcaaaacctgctttggatatatggccatatccttctcctagaccgacctttggcatcacttggaggtatagacttcagacagtaaagtccttagctggagtgagcctgatgttacggttactgtgggcaagtttgagatgggatgatatggcggccaaggctcctccaggaggagggactacacggacagaaacatccgaaactgaaatcacaacaacagaaataattaagaggagagatgttggtccttatggcattcgatctgaatattgtatcaggaaaatcatttgtcccattggagttccagaaacaccaaaagaaacgcctacacctcagaggaaaggccttcgatcaagtgcactgcggccaaagagaccagaaacgcccaagcaaactggccctgttattattgaaacctgggtagcagaagaagaactggaattgtgggagatcagggcatttgctgagagagtggagaaagaaaaggcacaagcagttgagcaacaggctaagaaacgactggagcagcagaagccgacagtgattgcaacttccactacttccccaacaagcagtacaaccagcaccatctctccagcacagaaggttatggtggcccccataagtggctcagttacaactggaaccaaaatggtactaactactaaagttggatctccagctacagtaacattccaacaaaacaagaactttcatcaaacctttgctacatgggttaagcaaggccagtcaaattcaggcgttgttcaagtacagcagaaagtcctgggtatcattccatcaagtacaggtaccagtcagcaaacctttacttcattccagcccaggacagcaacagtcacaattaggcccaatacctcaggctctggaggaaccacaagcaattcacaagtaatcacagggcctcagattcgccctggtatgaccgtgattagaacaccactccaacagtcaacactaggaaaggcaattattcgaacacctgtgatggtacagccaggtgctcctcagcaagtgatgactcaaatcatcagggggcagcctgtctccactgcagtctccgcccctaacacggtttcctcaacacctgggcagaaaagcttaacttcagcaacgtccacttcaaatatacagtcttcagcctcacaaccccctcgcccccaacaaggacaagtgaagctcaccatggctcaacttactcagttaacacagggccacggtggcaatcaaggtttgacagtagtaattcaaggacaaggtcaaactactggacagttgcagttgatacctcaaggggtgactgtactcccaggcccaggccagcagctaatgcaagctgcaatgccaaatggtactgttcagcgattcctctttaccccattggcaacaacagccaccacagccagcaccaccaccaccactgtttccacgacagcagcaggtacaggtgaacaaaggcagagtaaactgtcaccccagatgcaggtacatcaagacaaaaccctgccaccagctcagtcatcaagtgtgggtccagcagaagcccagccacagactgctcagccttcagctcagccccagccccaaacccagccccagtccccagctcagcctgaagttcagactcagcctgaagttcagacccaaacaactgtttcatcccatgtcccttctgaagcacaacccacccacgcacagtcatccaagccccaagttgcagcacagtctcagcctcaaagtaatgtccaaggacagtctcctgttcgtgtccaaagtccatcacagactcgaatacgtccatcaactccatcccaactgtctcctggacaacaatcccaggttcagactacaacctcacaaccgattccaattcaaccacatacatctcttcagataccttcccaaggccagccacagtcacaaccccaggtggtgatgaagcataatgctgtaatagaacatttaaaacagaaaaagagcatgactccagctgaaagagaagagaatcaaagaatgattgtctgtaaccaggtgatgaagtatattttggataagatagataaagaagaaaaacaggcagcaaaaaaacggaagcgtgaagagagtgtggagcagaaacgtagcaagcagaatgccactaagctgtcagctctgctcttcaagcacaaagagcagctcagagccgagatcctgaagaagagagcactcctggacaaggatctgcaaattgaagtgcaggaagagctgaagagagacctgaaaattaagaaagaaaaagacctgatgcagttggctcaggccacagcagtagctgcaccctgccccccagtgacaccagctcctccagcccctccagcccctccaccttcacctccccctccacctgctgtgcaacacacaggccttctgtccacgcccaccttacctgctgcttcccagaagaggaagcgggaagaggaaaaagactccagctcaaagtccaagaaaaagaaaatgatctctactacctcaaaggaaactaagaaggacacaaagctttactgtatctgtaaaacgccttatgatgaatctaagtgagtagatctttttgagctctagttttttgtcttgaaagtttagctattaaattggattttgaagaaaatgaatattttgggagtgatataaatgaaaatattaaatttaagagtaatgtttcatccatggtcttgcatgtgatattcttaccattgacgctagtaaagtaaaatttgctatttca

SEQ ID NO: 571355 - DNA, 1457 bp, Homo sapiens
  misc_feature (1282)..(1282): n is a, c, g, or t
ctgaggatgagctggaaggagtgagagggggtttgtggaggtggtccaggagctttgttcctgctagcagcagccaggtcatgacctttacatggtgacttacggctgatgtttgcccttccaggtccagggtgcaatcatggtgtccagcgtggtggaggtggtgattggcctgctggggctgcctggggccctgctcaactacattgggcctctcacagtcacccccactgtctccctcattggcctttctgtcttccaagctgctggcgaccgagctggctcccactggggcatctcagcttgctccattctcctgatcatcctcttctcccagtacctgcgcaacctcaccttcctgctgcctgtctaccgctggggcaagggcctcactctcctccgcatccagatcttcaaaatgtttcctatcatgctggccatcatgaccgtgtggctgctctgctatgtcctgaccttgacagacgtgctgcccacagacccaaaagcctatggcttccaggcacgaaccgatgcccgtggtgacatcatggctattgcaccctggatccgcatcccctacccctgtcagtggggcctgcccacggtgactgcggctgctgtcctgggaatgttcagcgccactctggcaggcatcattgagtccatcggagattactacgcctgtgcccgcctggctggtgcaccaccccctccagtacatgctatcaacaggggcatcttcaccgaaggcatttgctgcatcatcgcggggctattgggcacgggcaacgggtccacctcgtccagtcccaacattggcgtcctgggaattaccaaggtgggcagccggcgcgtggtgcagtatggtgcggctatcatgctggtcctgggcaccatcggcaagttcacggccctcttcgcctcgctccctgaccccatcctggggggcatgttctgcactctctttggcatgattacagctgtggggctgtccaacctgcaatttgtggacatgaactcctctcgcaacctcttcgtgctgggattttccatgttcttcgggctcacgctgcccaattacctggagtccaaccctggcgccatcaatacaggcattcttgaagtggatcagattctgattgtgctgctgaccacggagatgtttgtgggcgggtgccttgctttcatacttgacaacacagtgccagggagcccagaggagcgtggtctgatacagtggaaagctggggctcatgccaacagtgacatgtcttccagcctnaagagctacgatttccccatttgggatgggcatagtaaaaagaattacctttctgaaatacattcctatctgcccagtcttcaaaggattttcttcaagttcaaaagatcagattgcaattccagaagacactccagaaaatacagaaactgcatctgtgtgcaccaaggtctga

SEQ ID NO: 571356 - DNA, 3844 bp, Homo sapiens
ggatcccctgcctcgatgtgctgccatcaaccaaagagtctgacagtacacagacgaccacaccctcagcatcttgtccagaaagcaattcagttaatcaggtagaagatatggaaatagaaacctcagaagttaagaaagttacttcatcacctattacttctgaagaggaatctaatctcagtaatgactttattgatgaaaatggtctgcccatcaacaaaaatgaaaatgtcaatggagaatctaaaagaaaaaccgtcatcacagaagtcaccacgatgacctccacagtggccacagaatcaaaaactgtgatcaaggtagaaaaaggcgataagcaaactgtggtttcttccacagaaaattgtgcaaaatccactgtcacaaccaccactacaacagtgaccaagctttccacaccctccacaggcggcagtgtggacatcatctctgtaaaggagcagagcaaaaccgtggtcaccacgacagtgacagactccctgaccattccacgggaggcacactggttacatctatgactgtgagcaaagagtattccacacgagacaaagtgaaactgatgaaattttcaagaccaaagaagactcgttcaggtacagctctgcccatcctatagaaaatttgttaccaagagcagcaagaagagcatttttgttttgcctaatgatgacttaaaaaagttggcccgaaaaggaggaatccgagaggtcccttattttaattacaatgcaaaacctgctttggatatatggccatatccttctcctagaccgacctttggcatcacttggaggtatagacttcagacagtaaagtccttagctggagtgagcctgatgttacggttactgtgggcaagtttgagatgggatgatatggcggccaaggctcctccaggaggagggactacacggacagaaacatccgaaactgaaatcacaacaacagaaataattaagaggagagatgttggtccttatggcattcgatctgaatattgtatcaggaaaatcatttgtcccattggagttccagaaacaccaaaagaaacgcctacacctcagaggaaaggccttcgatcaagtgcactgcggccaaagagaccagaaacgcccaagcaaactggccctgttattattgaaacctgggtagcagaagaagaactggaattgtgggagatcagggcatttgctgagagagtggagaaagaaaaggcacaagcagttgagcaacaggctaagaaacgactggagcagcagaagccgacagtgattgcaacttccactacttccccaacaagcagtacaaccagcaccatctctccagcacagaaggttatggtggcccccataagtggctcagttacaactggaaccaaaatggtactaactactaaagttggatctccagctacagtaacattccaacaaaacaagaactttcatcaaacctttgctacatgggttaagcaaggccagtcaaattcaggcgttgttcaagtacagcagaaagtcctgggtatcattccatcaagtacaggtaccagtcagcaaacctttacttcattccagcccaggacagcaacagtcacaattaggcccaatacctcaggctctggaggaaccacaagcaattcacaagtaatcacagggcctcagattcgccctggtatgaccgtgattagaacaccactccaacagtcaacactaggaaaggcaattattcgaacacctgtgatggtacagccaggtgctcctcagcaagtgatgactcaaatcatcagggggcagcctgtctccactgcagtctccgcccctaacacggtttcctcaacacctgggcagaaaagcttaacttcagcaacgtccacttcaaatatacagtcttcagcctcacaaccccctcgcccccaacaaggacaagtgaagctcaccatggctcaacttactcagttaacacagggccacggtggcaatcaaggtttgacagtagtaattcaaggacaaggtcaaactactggacagttgcagttgatacctcaaggggtgactgtactcccaggcccaggccagcagctaatgcaagctgcaatgccaaatggtactgttcagcgattcctctttaccccattggcaacaacagccaccacagccagcaccaccaccaccactgtttccacgacagcagcaggtacaggtgaacaaaggcagagtaaactgtcaccccagatgcaggtacatcaagacaaaaccctgccaccagctcagtcatcaagtgtgggtccagcagaagcccagccacagactgctcagccttcagctcagccccagccccaaacccagccccagtccccagctcagcctgaagttcagactcagcctgaagttcagacccaaacaactgtttcatcccatgtcccttctgaagcacaacccacccacgcacagtcatccaagccccaagttgcagcacagtctcagcctcaaagtaatgtccaaggacagtctcctgttcgtgtccaaagtccatcacagactcgaatacgtccatcaactccatcccaactgtctcctggacaacaatcccaggttcagactacaacctcacaaccgattccaattcaaccacatacatctcttcagataccttcccaaggccagccacagtcacaaccccaggtggtgatgaagcataatgctgtaatagaacatttaaaacagaaaaagagcatgactccagctgaaagagaagagaatcaaagaatgattgtctgtaaccaggtgatgaagtatattttggataagatagataaagaagaaaaacaggcagcaaaaaaacggaagcgtgaagagagtgtggagcagaaacgtagcaagcagaatgccactaagctgtcagctctgctcttcaagcacaaagagcagctcagagccgagatcctgaagaagagagcactcctggacaaggatctgcaaattgaagtgcaggaagagctgaagagagacctgaaaattaagaaagaaaaagacctgatgcagttggctcaggccacagcagtagctgcaccctgccccccagtgacaccagctcctccagcccctccagcccctccaccttcacctccccctccacctgctgtgcaacacacaggccttctgtccacgcccaccttacctgctgcttcccagaagaggaagcgggaagaggaaaaagactccagctcaaagtccaagaaaaagaaaatgatctctactacctcaaaggaaactaagaaggacacaaagctttactgtatctgtaaaacgccttatgatgaatctaagtgagtagatctttttgagctctagttttttgtcttgaaagtttagctattaaattggattttgaagaaaatgaatattttgggagtgatataaatgaaaatattaaatttaagagtaatgtttcatccatggtcttgcatgtgatattcttaccattgacgctagtaaagtaaaatttgctatttcacgtgtttgtgattgtcctttgttatattcttttctgtcaaaaacaagctttctgttgctcctttgctttctcttcttccctctgaattaactccaaatcagtgagtaattgatgtctggagaaggaggtgtattactgttgcccaaaatggagagcatcctttctgggatctgttcaaagccctgcgaatacatgaaatcctggaaaccagttgaacatgaatggtcagaggttttgaatttgagtggttcggtttcttaattgttttattttaagcagttgttttttttgtattaaaatactgcaactc

SEQ ID NO: 571357 - DNA, 238 bp, Homo sapiens
cacgagtgctggcagacgcaacggagagataggaacgcttgaggactcccaccagccccgttgaacattcctttgtctccacaaccttgctgacatctattatcttttaactttttattaatggccattctgactggtgtgcgacagtatcttgtggtttgatttacattaatagtgcatgatgagcattttttccatatatttgttggctgccacgttcgttttctgcgcaagctgt

SEQ ID NO: 571358 - DNA, 4828 bp, Homo sapiens
aaaggaaatgattttttcatcgatgactctaaactagccagtgcagatgatattggtactttgatctgtaagaacaaaaaaccgctcatacaggaggaaagtgacaccattgtttcttcttccaagagtgctttacattcatcagtgcctaaaagtaccaatgacagagatgccacacctctgtcaagagcaatggactttgaaggaaaactgggatgtgactctgaatctaatagcactttggaaaatagttctgataccgtgtctattcaggatagcagtgaagaagatatgattgttcagaatagcaatgaaagcatttctgaacagttcagaactcgagaacaagatgttgaagtcttggagccgttaaagtgtgagttggtttctggtgagtccactggaaactgtgaggacaggctgccggtcaaggggactgaagcaaatggtaaaaaaccaagtcagcagaagaaattagaggagagaccagttaataaatgtagtgatcaaataaagctaaaaaataccactgacaaaaagaataatgaaaatcgagagtctgaaaagaaaggacagagaacaagtacatttcaaataaatggaaaagataataaacccaaaatatatttgaaaggtgaatgcttgaaagaaatttctgagagtagagtagtaagtggtaatgttgaaccaaaggttaataatataaataaaataatccctgagaatgatattaaatcattgactgttaaagaatctgctataaggccattcattaatggtgatgtcatcatggaagattttaatgaaagaaacagctccgaaacaaaatcgcatttgctgagttcttcagatgctgaaggtaactaccgagatagccttgagaccctgccatcaaccaaagagtctgacagtacacagacgaccacaccctcagcatcttgtccagaaagcaattcagttaatcaggtagaagatatggaaatagaaacctcagaagttaagaaagttacttcatcacctattacttctgaagaggaatctaatctcagtaatgactttattgatgaaaatggtctgcccatcaacaaaaatgaaaatgtcaatggagaatctaaaagaaaaaccgtcatcacagaagtcaccacgatgacctccacagtggccacagaatcaaaaactgtgatcaaggtagaaaaaggcgataagcaaactgtggtttcttccacagaaaattgtgcaaaatccactgtcacaaccaccactacaacagtgaccaagctttccacaccctccacaggcggcagtgtggacatcatctctgtaaaggagcagagcaaaaccgtggtcaccacgacagtgacagactccctgaccattccacgggaggcacactggttacatctatgactgtgagcaaagagtattccacacgagacaaagtgaaactgatgaaattttcaagaccaaagaagactcgttcaggtacagctctgcccatcctatagaaaatttgttaccaagagcagcaagaagagcatttttgttttgcctaatgatgacttaaaaaagttggcccgaaaaggaggaatccgagaggtcccttattttaattacaatgcaaaacctgctttggatatatggccatatccttctcctagaccgacctttggcatcacttggaggtatagacttcagacagtaaagtccttagctggagtgagcctgatgttacggttactgtgggcaagtttgagatgggatgatatggcggccaaggctcctccaggaggagggactacacggacagaaacatccgaaactgaaatcacaacaacagaaataattaagaggagagatgttggtccttatggcattcgatctgaatattgtatcaggaaaatcatttgtcccattggagttccagaaacaccaaaagaaacgcctacacctcagaggaaaggccttcgatcaagtgcactgcggccaaagagaccagaaacgcccaagcaaactggccctgttattattgaaacctgggtagcagaagaagaactggaattgtgggagatcagggcatttgctgagagagtggagaaagaaaaggcacaagcagttgagcaacaggctaagaaacgactggagcagcagaagccgacagtgattgcaacttccactacttccccaacaagcagtacaaccagcaccatctctccagcacagaaggttatggtggcccccataagtggctcagttacaactggaaccaaaatggtactaactactaaagttggatctccagctacagtaacattccaacaaaacaagaactttcatcaaacctttgctacatgggttaagcaaggccagtcaaattcaggcgttgttcaagtacagcagaaagtcctgggtatcattccatcaagtacaggtaccagtcagcaaacctttacttcattccagcccaggacagcaacagtcacaattaggcccaatacctcaggctctggaggaaccacaagcaattcacaagtaatcacagggcctcagattcgccctggtatgaccgtgattagaacaccactccaacagtcaacactaggaaaggcaattattcgaacacctgtgatggtacagccaggtgctcctcagcaagtgatgactcaaatcatcagggggcagcctgtctccactgcagtctccgcccctaacacggtttcctcaacacctgggcagaaaagcttaacttcagcaacgtccacttcaaatatacagtcttcagcctcacaaccccctcgcccccaacaaggacaagtgaagctcaccatggctcaacttactcagttaacacagggccacggtggcaatcaaggtttgacagtagtaattcaaggacaaggtcaaactactggacagttgcagttgatacctcaaggggtgactgtactcccaggcccaggccagcagctaatgcaagctgcaatgccaaatggtactgttcagcgattcctctttaccccattggcaacaacagccaccacagccagcaccaccaccaccactgtttccacgacagcagcaggtacaggtgaacaaaggcagagtaaactgtcaccccagatgcaggtacatcaagacaaaaccctgccaccagctcagtcatcaagtgtgggtccagcagaagcccagccacagactgctcagccttcagctcagccccagccccaaacccagccccagtccccagctcagcctgaagttcagactcagcctgaagttcagacccaaacaactgtttcatcccatgtcccttctgaagcacaacccacccacgcacagtcatccaagccccaagttgcagcacagtctcagcctcaaagtaatgtccaaggacagtctcctgttcgtgtccaaagtccatcacagactcgaatacgtccatcaactccatcccaactgtctcctggacaacaatcccaggttcagactacaacctcacaaccgattccaattcaaccacatacatctcttcagataccttcccaaggccagccacagtcacaaccccaggtacagtcttcaactcaaactctttcatcaggacaaactttaaatcaagttactgtttcatccccatcccgtcctcagctacaaatacagcagccacagccccaagtcattgctgtgcctcagctgcaacaacaagtccaggttctctctcagatccagtcacaggttgtggctcagatacaggctcagcaaagtggtgtgccccagcaaatcaaactccagttacctatccaaattcagcaaagcagtgctgtgcagactcaccagattcagaatgtggttacagtgcaggcagccagtgtgcaagagcagttgcaaagggttcagcaactcagggatcagcagcaaaagaagaaacagcaacagatagaaattaagcgtgaacacaccctccaagcttctaatcaaagtgaaatcattcagaaacaggtggtgatgaagcataatgctgtaatagaacatttaaaacagaaaaagagcatgactccagctgaaagagaagagaatcaaagaatgattgtctgtaaccaggtgatgaagtatattttggataagatagataaagaagaaaaacaggcagcaaaaaaacggaagcgtgaagagagtgtggagcagaaacgtagcaagcagaatgccactaagctgtcagctctgctcttcaagcacaaagagcagctcagagccgagatcctgaagaagagagcactcctggacaaggatctgcaaattgaagtgcaggaagagctgaagagagacctgaaaattaagaaagaaaaagacctgatgcagttggctcaggccacagcagtagctgcaccctgccccccagtgacaccagctcctccagcccctccagcccctccaccttcacctccccctccacctgctgtgcaacacacaggccttctgtccacgcccaccttacctgctgcttcccagaagaggaagcgggaagaggaaaaagactccagctcaaagtccaagaaaaagaaaatgatctctactacctcaaaggaaactaagaaggacacaaagctttactgtatctgtaaaacgccttatgatgaatctaagtgagtagatctttttgagctctagttttttgtcttgaaagtttagctattaaattggattttgaagaaaatgaatattttgggagtgatataaatgaaaatattaaatttaagagtaatgtttcatccatggtcttgcatgtgatattcttaccattgacgctagtaaagtaaaatttgctatttca

SEQ ID NO: 571359 - DNA, 4505 bp, Homo sapiens
  misc_feature (4492)..(4492): n is a, c, g, or t
aaaggaaatgattttttcatcgatgactctaaactagccagtgcagatgatattggtactttgatctgtaagaacaaaaaaccgctcatacaggaggaaagtgacaccattgtttcttcttccaagagtgctttacattcatcagtgcctaaaagtaccaatgacagagatgccacacctctgtcaagagcaatggactttgaaggaaaactgggatgtgactctgaatctaatagcactttggaaaatagttctgataccgtgtctattcaggatagcagtgaagaagatatgattgttcagaatagcaatgaaagcatttctgaacagttcagaactcgagaacaagatgttgaagtcttggagccgttaaagtgtgagttggtttctggtgagtccactggaaactgtgaggacaggctgccggtcaaggggactgaagcaaatggtaaaaaaccaagtcagcagaagaaattagaggagagaccagttaataaatgtagtgatcaaataaagctaaaaaataccactgacaaaaagaataatgaaaatcgagagtctgaaaagaaaggacagagaacaagtacatttcaaataaatggaaaagataataaacccaaaatatatttgaaaggtgaatgcttgaaagaaatttctgagagtagagtagtaagtggtaatgttgaaccaaaggttaataatataaataaaataatccctgagaatgatattaaatcattgactgttaaagaatctgctataaggccattcattaatggtgatgtcatcatggaagattttaatgaaagaaacagctccgaaacaaaatcgcatttgctgagttcttcagatgctgaaggtaactaccgagatagccttgagaccctgccatcaaccaaagagtctgacagtacacagacgaccacaccctcagcatcttgtccagaaagcaattcagttaatcaggtagaagatatggaaatagaaacctcagaagttaagaaagttacttcatcacctattacttctgaagaggaatctaatctcagtaatgactttattgatgaaaatggtctgcccatcaacaaaaatgaaaatgtcaatggagaatctaaaagaaaaaccgtcatcacagaagtcaccacgatgacctccacagtggccacagaatcaaaaactgtgatcaaggtagaaaaaggcgataagcaaactgtggtttcttccacagaaaattgtgcaaaatccactgtcacaaccaccactacaacagtgaccaagctttccacaccctccacaggcggcagtgtggacatcatctctgtaaaggagcagagcaaaaccgtggtcaccacgacagtgacagactccctgaccattccacgggaggcacactggttacatctatgactgtgagcaaagagtattccacacgagacaaagtgaaactgatgaaattttcaagaccaaagaagactcgttcaggtacagctctgcccatcctatagaaaatttgttaccaagagcagcaagaagagcatttttgttttgcctaatgatgacttaaaaaagttggcccgaaaaggaggaatccgagaggtcccttattttaattacaatgcaaaacctgctttggatatatggccatatccttctcctagaccgacctttggcatcacttggaggtatagacttcagacagtaaagtccttagctggagtgagcctgatgttacggttactgtgggcaagtttgagatgggatgatatggcggccaaggctcctccaggaggagggactacacggacagaaacatccgaaactgaaatcacaacaacagaaataattaagaggagagatgttggtccttatggcattcgatctgaatattgtatcaggaaaatcatttgtcccattggagttccagaaacaccaaaagaaacgcctacacctcagaggaaaggccttcgatcaagtgcactgcggccaaagagaccagaaacgcccaagcaaactggccctgttattattgaaacctgggtagcagaagaagaactggaattgtgggagatcagggcatttgctgagagagtggagaaagaaaaggcacaagcagttgagcaacaggctaagaaacgactggagcagcagaagccgacagtgattgcaacttccactacttccccaacaagcagtacaaccagcaccatctctccagcacagaaggttatggtggcccccataagtggctcagttacaactggaaccaaaatggtactaactactaaagttggatctccagctacagtaacattccaacaaaacaagaactttcatcaaacctttgctacatgggttaagcaaggccagtcaaattcaggcgttgttcaagtacagcagaaagtcctgggtatcattccatcaagtacaggtaccagtcagcaaacctttacttcattccagcccaggacagcaacagtcacaattaggcccaatacctcaggctctggaggaaccacaagcaattcacaagtaatcacagggcctcagattcgccctggtatgaccgtgattagaacaccactccaacagtcaacactaggaaaggcaattattcgaacacctgtgatggtacagccaggtgctcctcagcaagtgatgactcaaatcatcagggggcagcctgtctccactgcagtctccgcccctaacacggtttcctcaacacctgggcagaaaagcttaacttcagcaacgtccacttcaaatatacagtcttcagcctcacaaccccctcgcccccaacaaggacaagtgaagctcaccatggctcaacttactcagttaacacagggccacggtggcaatcaaggtttgacagtagtaattcaaggacaaggtcaaactactggacagttgcagttgatacctcaaggggtgactgtactcccaggcccaggccagcagctaatgcaagctgcaatgccaaatggtactgttcagcgattcctctttaccccattggcaacaacagccaccacagccagcaccaccaccaccactgtttccacgacagcagcaggtacaggtgaacaaaggcagagtaaactgtcaccccagatgcaggtacatcaagacaaaaccctgccaccagctcagtcatcaagtgtgggtccagcagaagcccagccacagactgctcagccttcagctcagccccagccccaaacccagccccagtccccagctcagcctgaagttcagactcagcctgaagttcagacccaaacaactgtttcatcccatgtcccttctgaagcacaacccacccacgcacagtcatccaagccccaagttgcagcacagtctcagcctcaaagtaatgtccaaggacagtctcctgttcgtgtccaaagtccatcacagactcgaatacgtccatcaactccatcccaactgtctcctggacaacaatcccaggttcagactacaacctcacaaccgattccaattcaaccacatacatctcttcagataccttcccaaggccagccacagtcacaaccccaggtacagtcttcaactcaaactctttcatcaggacaaactttaaatcaagttactgtttcatccccatcccgtcctcagctacaaatacagcagccacagccccaagtcattgctgtgcctcagctgcaacaacaagtccaggttctctctcagatccagtcacaggttgtggctcagatacaggctcagcaaagtggtgtgccccagcaaatcaaactccagttacctatccaaattcagcaaagcagtgctgtgcagactcaccagattcagaatgtggttacagtgcaggcagccagtgtgcaagagcagttgcaaagggttcagcaactcagggatcagcagcaaaagaagaaacagcaacagatagaaattaagcgtgaacacaccctccaagcttctaatcaaagtgaaatcattcagaaacaggtggtgatgaagcataatgctgtaatagaacatttaaaacagaaaaagagcatgactccagctgaaagagaagagaatcaaagaatgattgtctgtaaccaggtgatgaagtatattttggataagatagataaagaagaaaaacaggcagcaaaaaaacggaagcgtgaagagagtgtggagcagaaacgtagcaagcagaatgccactaagctgtcagctctgctcttcaagcacaaagagcagctcagagccgagatcctgaagaagagagcactcctggacaaggatctgcaaattgaagtgcaggtaagagggcacatccttttcttctgtgtccagtgtttaacatctgaggttctgcttttttcccttgcctttttaataaagcttaaaatttcagtatgttttctaggaacttacatttgtgtacatagggttaaaaaggcagtgcagccttgtgtgttctttgcaaaaacaagttcagggctttttntaaacttaaatgt

SEQ ID NO: 571360 - DNA, 413 bp, Homo sapiens
ggacactgccagatccctccgagcaaagctggaatcagtccattgttcaactgtgccctttggggctgcggttcattaggctctgagtattcctatatgttctgtactccaacccccatagctccatcttgtctacaagattttgttagaagctgtcaaaatcctgctgactcgagatgcactgtgctgcatgttttccccgggcacagcaggctaataatcctgttacaaagagaaatgctagtacatttcgagcaccaccaatacaaatatatccggccggatataatttgtaattggtggttctggcccctgggactccaccgtggccttttctaagtacttacagactctctgtttaataatccattccagaaattttccagggctcatttttgagctaggtgttcgca

SEQ ID NO: 571361 - DNA, 1980 bp, Homo sapiens
  misc_feature (86)..(86): n is a, c, g, or t
  misc_feature (97)..(97): n is a, c, g, or t
tgtattcagtcatggaggtgatctcagggagggtgggtaaatccagttcatgacctgagattgagagtgggtccagaaccactttnttgaccttctnctgcaagtcattgtaactaactaccaccacgcctggccagaattctcaacttcagaagatttccttcagattcttctttaaccacagttttatgttccagagtaatagaaatggttcatctttcctttttacaggtacaggtgaacaaaggcagagtaaactgtcaccccagatgcaggtacatcaagacaaaaccctgccaccagctcagtcatcaagtgtgggtccagcagaagcccagccacagactgctcagccttcagctcagccccagccccaaacccagccccagtccccagctcagcctgaagttcagactcagcctgaagttcagacccaaacaactgtttcatcccatgtcccttctgaagcacaacccacccacgcacagtcatccaagccccaagttgcagcacagtctcagcctcaaagtaatgtccaaggacagtctcctgttcgtgtccaaagtccatcacagactcgaatacgtccatcaactccatcccaactgtctcctggacaacaatcccaggttcagactacaacctcacaaccgattccaattcaaccacatacatctcttcagataccttcccaaggccagccacagtcacaaccccaggtacagtcttcaactcaaactctttcatcaggacaaactttaaatcaagttactgtttcatccccatcccgtcctcagctacaaatacagcagccacagccccaagtcattgctgtgcctcagctgcaacaacaagtccaggttctctctcagatccagtcacaggttgtggctcagatacaggctcagcaaagtggtgtgccccagcaaatcaaactccagttacctatccaaattcagcaaagcagtgctgtgcagactcaccagattcagaatgtggttacagtgcaggcagccagtgtgcaagagcagttgcaaagggttcagcaactcagggatcagcagcaaaagaagaaacagcaacagatagaaattaagcgtgaacacaccctccaagcttctaatcaaagtgaaatcattcagaaacaggtggtgatgaagcataatgctgtaatagaacatttaaaacagaaaaagagcatgactccagctgaaagagaagagaatcaaagaatgattgtctgtaaccaggtgatgaagtatattttggataagatagataaagaagaaaaacaggcagcaaaaaaacggaagcgtgaagagagtgtggagcagaaacgtagcaagcagaatgccactaagctgtcagctctgctcttcaagcacaaagagcagctcagagccgagatcctgaagaagagagcactcctggacaaggatctgcaaattgaagtgcaggaagagctgaagagagacctgaaaattaagaaagaaaaagacctgatgcagttggctcaggccacagcagtagctgcaccctgccccccagtgacaccagctcctccagcccctccagcccctccaccttcacctccccctccacctgctgtgcaacacacaggccttctgtccacgcccaccttacctgctgcttcccagaagaggaagcgggaagaggaaaaagactccagctcaaagtccaagaaaaagaaaatgatctctactacctcaaaggaaactaagaaggacacaaagctttactgtatctgtaaaacgccttatgatgaatctaagtgagtagatctttttgagctctagttttttgtcttgaaagtttagctattaaattggattttgaagaaaatgaatattttgggagtgatataaatgaaaatattaaatttaagagtaatgtttcatccatggtcttgcatgtgatattcttaccattgacgctagtaaagtaaaatttgctatttca

SEQ ID NO: 571362 - DNA, 3311 bp, Homo sapiens
aaaggaaatgattttttcatcgatgactctaaactagccagtgcagatgatattggtactttgatctgtaagaacaaaaaaccgctcatacaggaggaaagtgacaccattgtttcttcttccaagagtgctttacattcatcagtgcctaaaagtaccaatgacagagatgccacacctctgtcaagagcaatggactttgaaggaaaactgggatgtgactctgaatctaatagcactttggaaaatagttctgataccgtgtctattcaggatagcagtgaagaagatatgattgttcagaatagcaatgaaagcatttctgaacagttcagaactcgagaacaagatgttgaagtcttggagccgttaaagtgtgagttggtttctggtgagtccactggaaactgtgaggacaggctgccggtcaaggggactgaagcaaatggtaaaaaaccaagtcagcagaagaaattagaggagagaccagttaataaatgtagtgatcaaataaagctaaaaaataccactgacaaaaagaataatgaaaatcgagagtctgaaaagaaaggacagagaacaagtacatttcaaataaatggaaaagataataaacccaaaatatatttgaaaggtgaatgcttgaaagaaatttctgagagtagagtagtaagtggtaatgttgaaccaaaggttaataatataaataaaataatccctgagaatgatattaaatcattgactgttaaagaatctgctataaggccattcattaatggtgatgtcatcatggaagattttaatgaaagaaacagctccgaaacaaaatcgcatttgctgagttcttcagatgctgaaggtaactaccgagatagccttgagaccctgccatcaaccaaagagtctgacagtacacagacgaccacaccctcagcatcttgtccagaaagcaattcagttaatcaggtagaagatatggaaatagaaacctcagaagttaagaaagttacttcatcacctattacttctgaagaggaatctaatctcagtaatgactttattgatgaaaatggtctgcccatcaacaaaaatgaaaatgtcaatggagaatctaaaagaaaaaccgtcatcacagaagtcaccacgatgacctccacagtggccacagaatcaaaaactgtgatcaaggtagaaaaaggcgataagcaaactgtggtttcttccacagaaaattgtgcaaaatccactgtcacaaccaccactacaacagtgaccaagctttccacaccctccacaggcggcagtgtggacatcatctctgtaaaggagcagagcaaaaccgtggtcaccacgacagtgacagactccctgaccattccacgggaggcacactggttacatctatgactgtgagcaaagagtattccacacgagacaaagtgaaactgatgaaattttcaagaccaaagaagactcgttcaggtacagctctgcccatcctatagaaaatttgttaccaagagcagcaagaagagcatttttgttttgcctaatgatgacttaaaaaagttggcccgaaaaggaggaatccgagaggtcccttattttaattacaatgcaaaacctgctttggatatatggccatatccttctcctagaccgacctttggcatcacttggaggtatagacttcagacagtaaagtccttagctggagtgagcctgatgttacggttactgtgggcaagtttgagatgggatgatatggcggccaaggctcctccaggaggagggactacacggacagaaacatccgaaactgaaatcacaacaacagaaataattaagaggagagatgttggtccttatggcattcgatctgaatattgtatcaggaaaatcatttgtcccattggagttccagaaacaccaaaagaaacgcctacacctcagaggaaaggccttcgatcaagtgcactgcggccaaagagaccagaaacgcccaagcaaactggccctgttattattgaaacctgggtagcagaagaagaactggaattgtgggagatcagggcatttgctgagagagtggagaaagaaaaggcacaagcagttgagcaacaggctaagaaacgactggagcagcagaagccgacagtgattgcaacttccactacttccccaacaagcagtacaaccagcaccatctctccagcacagaaggttatggtggcccccataagtggctcagttacaactggaaccaaaatggtactaactactaaagttggatctccagctacagtaacattccaacaaaacaagaactttcatcaaacctttgctacatgggttaagcaaggccagtcaaattcaggcgttgttcaagtacagcagaaagtcctgggtatcattccatcaagtacaggtaccagtcagcaaacctttacttcattccagcccaggacagcaacagtcacaattaggcccaatacctcaggctctggaggaaccacaagcaattcacaagtaatcacagggcctcagattcgccctggtatgaccgtgattagaacaccactccaacagtcaacactaggaaaggcaattattcgaacacctgtgatggtacagccaggtgctcctcagcaagtgatgactcaaatcatcagggggcagcctgtctccactgcagtctccgcccctaacacggtttcctcaacacctgggcagaaaagcttaacttcagcaacgtccacttcaaatatacagtcttcagcctcacaaccccctcgcccccaacaaggacaagtgaagctcaccatggctcaacttactcagttaacacagggccacggtggcaatcaaggtttgacagtagtaattcaaggacaaggtcaaactactggacagttgcagttgatacctcaaggggtgactgtactcccaggcccaggccagcagctaatgcaagctgcaatgccaaatggtactgttcagcgattcctctttaccccattggcaacaacagccaccacagccagcaccaccaccaccactgtttccacgacagcagcaggtagagctgtgggtttatcggaaatgtcggatgttactactacacgtggctgggctaacagaggccaacaggagaaccagtatttacctttggaaggatatgcctcaagccagtgagctcaacagttgacatagtcagcctcacaacgtctcgaagcttttgtaccctattcttacagactccctgttaccaccaccctctccctcctattaaaaaagagagagagagaaaa

SEQ ID NO: 571363 - DNA, 4066 bp, Homo sapiens
  misc_feature (3534)..(3534): n is a, c, g, or t
aaaggaaatgattttttcatcgatgactctaaactagccagtgcagatgatattggtactttgatctgtaagaacaaaaaaccgctcatacaggaggaaagtgacaccattgtttcttcttccaagagtgctttacattcatcagtgcctaaaagtaccaatgacagagatgccacacctctgtcaagagcaatggactttgaaggaaaactgggatgtgactctgaatctaatagcactttggaaaatagttctgataccgtgtctattcaggatagcagtgaagaagatatgattgttcagaatagcaatgaaagcatttctgaacagttcagaactcgagaacaagatgttgaagtcttggagccgttaaagtgtgagttggtttctggtgagtccactggaaactgtgaggacaggctgccggtcaaggggactgaagcaaatggtaaaaaaccaagtcagcagaagaaattagaggagagaccagttaataaatgtagtgatcaaataaagctaaaaaataccactgacaaaaagaataatgaaaatcgagagtctgaaaagaaaggacagagaacaagtacatttcaaataaatggaaaagataataaacccaaaatatatttgaaaggtgaatgcttgaaagaaatttctgagagtagagtagtaagtggtaatgttgaaccaaaggttaataatataaataaaataatccctgagaatgatattaaatcattgactgttaaagaatctgctataaggccattcattaatggtgatgtcatcatggaagattttaatgaaagaaacagctccgaaacaaaatcgcatttgctgagttcttcagatgctgaaggtaactaccgagatagccttgagaccctgccatcaaccaaagagtctgacagtacacagacgaccacaccctcagcatcttgtccagaaagcaattcagttaatcaggtagaagatatggaaatagaaacctcagaagttaagaaagttacttcatcacctattacttctgaagaggaatctaatctcagtaatgactttattgatgaaaatggtctgcccatcaacaaaaatgaaaatgtcaatggagaatctaaaagaaaaaccgtcatcacagaagtcaccacgatgacctccacagtggccacagaatcaaaaactgtgatcaaggtagaaaaaggcgataagcaaactgtggtttcttccacagaaaattgtgcaaaatccactgtcacaaccaccactacaacagtgaccaagctttccacaccctccacaggcggcagtgtggacatcatctctgtaaaggagcagagcaaaaccgtggtcaccacgacagtgacagactccctgaccattccacgggaggcacactggttacatctatgactgtgagcaaagagtattccacacgagacaaagtgaaactgatgaaattttcaagaccaaagaagactcgttcaggtacagctctgcccatcctatagaaaatttgttaccaagagcagcaagaagagcatttttgttttgcctaatgatgacttaaaaaagttggcccgaaaaggaggaatccgagaggtcccttattttaattacaatgcaaaacctgctttggatatatggccatatccttctcctagaccgacctttggcatcacttggaggtatagacttcagacagtaaagtccttagctggagtgagcctgatgttacggttactgtgggcaagtttgagatgggatgatatggcggccaaggctcctccaggaggagggactacacggacagaaacatccgaaactgaaatcacaacaacagaaataattaagaggagagatgttggtccttatggcattcgatctgaatattgtatcaggaaaatcatttgtcccattggagttccagaaacaccaaaagaaacgcctacacctcagaggaaaggccttcgatcaagtgcactgcggccaaagagaccagaaacgcccaagcaaactggccctgttattattgaaacctgggtagcagaagaagaactggaattgtgggagatcagggcatttgctgagagagtggagaaagaaaaggcacaagcagttgagcaacaggctaagaaacgactggagcagcagaagccgacagtgattgcaacttccactacttccccaacaagcagtacaaccagcaccatctctccagcacagaaggttatggtggcccccataagtggctcagttacaactggaaccaaaatggtactaactactaaagttggatctccagctacagtaacattccaacaaaacaagaactttcatcaaacctttgctacatgggttaagcaaggccagtcaaattcaggcgttgttcaagtacagcagaaagtcctgggtatcattccatcaagtacaggtaccagtcagcaaacctttacttcattccagcccaggacagcaacagtcacaattaggcccaatacctcaggctctggaggaaccacaagcaattcacaagtaatcacagggcctcagattcgccctggtatgaccgtgattagaacaccactccaacagtcaacactaggaaaggcaattattcgaacacctgtgatggtacagccaggtgctcctcagcaagtgatgactcaaatcatcagggggcagcctgtctccactgcagtctccgcccctaacacggtttcctcaacacctgggcagaaaagcttaacttcagcaacgtccacttcaaatatacagtcttcagcctcacaaccccctcgcccccaacaaggacaagtgaagctcaccatggctcaacttactcagttaacacagggccacggtggcaatcaaggtttgacagtagtaattcaaggacaaggtcaaactactggacagttgcagttgatacctcaaggggtgactgtactcccaggcccaggccagcagctaatgcaagctgcaatgccaaatggtactgttcagcgattcctctttaccccattggcaacaacagccaccacagccagcaccaccaccaccactgtttccacgacagcagcaggtacaggtgaacaaaggcagagtaaactgtcaccccagatgcaggtacatcaagacaaaaccctgccaccagctcagtcatcaagtgtgggtccagcagaagcccagccacagactgctcagccttcagctcagccccagccccaaacccagccccagtccccagctcagcctgaagttcagactcagcctgaagttcagacccaaacaactgtttcatcccatgtcccttctgaagcacaacccacccacgcacagtcatccaagccccaagttgcagcacagtctcagcctcaaagtaatgtccaaggacagtctcctgttcgtgtccaaagtccatcacagactcgaatacgtccatcaactccatcccaactgtctccactgtcgtcaaataccttcttactttatttcccagactaaattcttgaataagggctaggtgcggtggctcangcctgtaatcccagcactttgggaggctgaggcaggtcgaatcatgaggtccggagatcctgaccatcctggctaacgcatggtgtaaaccccgtactctactaaaaatactaaaagattgcctgggcgttggtggagagagtcctgtagttcccagactaattcagtgaggctgaatgccggagaatagcttgaggctgggaagtgggacggttgcaagggagctgagatcaacaaccaatggcacgaccagtcatgggtaacacattggagaatccggcgtcaaaacaaaagaaaaaagaaaaacgacaaaaacatatagacaacacaacagaacaagcacaaaacgaaaacccagaacaagacaaagagaacaggagaagaacaaagttaaatgagacagaaacagacacgacagcaagacacaacaaagcaccaacaaaacgagcaagaggaagcaagagaacaacgaaagacaaaacacgaccaagcaccacacaaagacacaagaagaaaaacagagagcagagca

SEQ ID NO: 571364 - DNA, 387 bp, Homo sapiens
  misc_feature (14)..(14): n is a, c, g, or t
ctgaggaaaatagnttagcaggtcctcaaaaggtcaaacgcttagctactgaatgactcagcaaggccactgctaggtatataccaaaatgaaatgaaagctcatccacacaaacacttacacataaatgttaacagcagcattatttataatagccaaaaggagaggcatcccaaatgtccatcaactgatgaacaaatgaaccagatgtgatctatccataaaagggaatattactcagcaataaaaagaaacgatttgctgatccacgctacaaaatgaagaaacgttgaaaatgcaatgctaagagagcctagacacgagggatcacacctttaatcccagcactttgggaggcccaggcagtcagaacgcttgagcccaagg

SEQ ID NO: 571365 - DNA, 232 bp, Homo sapiens
  misc_feature (146)..(146): n is a, c, g, or t
ctggactccacttttctttttccacaccacttatcacattctaacatacgggaaaggcttacttatatttatggtctgtgttcctctgatagaatataagctcctcaagagcagaacatcttttgggtttactgggtgtaacccanagaacctagaacgagcgtccaagggtggcattcaagtaaaacactgacaatacgaaatgggctacgggtttctctgcggccttagc

SEQ ID NO: 571366 - DNA, 315 bp, Homo sapiens
accaaacacgcatcaactgggagctttgaaaaaaaggcgcctggaacgggctatccgattcgcgacccagaaagcgctgctgaagacgtcagggaggagatgaagacgtggagtttcccaggaagcacctgactgggaacttcgctgaggagatgatctgtgagcgtcgcccctgcagagtacctggcctgctctagccatccgctgcgtgcgccgctcccgggagttctggacttcctcacgcggccggactgcgcaggctttcggctgcctgcgggcggccagtacccgcgcgccctggagctgctgctgcgc

SEQ ID NO: 571367 - DNA, 825 bp, Homo sapiens
  misc_feature (150)..(150): n is a, c, g, or t
tgggacaggggcaagccaggagggacgctcttcctagccacttggctcatctttcagtcagctctcctttgaagataactagcagctttctagttgttcttacctagtcttcattttgtttctagttgtcttagttgggtttaagatatnagaaaactcttgtttgcaactaactaaaactctcacgttaggctgaactgtggagctactttgacaagagtgggtagtgtaccatcttctggccagatcacacatttacatgactctaatgatagtcttgtattgtctttaattgacaacaggaagagctgaagagagacctgaaaattaagaaagaaaaagacctgatgcagttggctcaggccacagcagtagctgcaccctgccccccagtgacaccagctcctccagcccctccagcccctccaccttcacctccccctccacctgctgtgcaacacacaggccttctgtccacgcccaccttacctgctgcttcccagaagaggaagcgggaagaggaaaaagactccagctcaaagtccaagaaaaagaaaatgatctctactacctcaaaggaaactaagaaggacacaaagctttactgtatctgtaaaacgccttatgatgaatctaagtgagtagatctttttgagctctagttttttgtcttgaaagtttagctattaaattggattttgaagaaaatgaatattttgggagtgatataaatgaaaatattaaatttaagagtaatgtttcatccatggtcttgcatgtgatattcttaccattgacgctagtaaagtaaaatttgctatttca

SEQ ID NO: 571368 - DNA, 813 bp, Homo sapiens
gaggccggctcgggccgaaccggctccaaccgtggtgacaggacgggagcccagtgcagtcgtgagtccgagcccgagtggatgtggcgtctgggtcgcttgtgtctggcctcaaggacaccggtgaggggcagcctacggcctgtcgttggccgtatcatttctgaagatgaaacaatacaattaaaccacgaaagatattattagacaaaggccactttccctcataaacgagtagtcagccttccatatcgaaatgatgaccgatgggttgaacaacagacgattgcctttttgtggacccaactaagattagaggatccagctccgccggatccgcttcgtaagtgggagagagcaatcgcgcaggtaccttttgtcttgtgctacgacgactattaactatcatgctatgataattaatacacgcaatgtatagttccaacatgacgtaaggatcattatcctattacaccagggataccagatgcatgtggcagtggcacgagttaacggagtattgtacctgcaatgtttcaaggaacgtaccagagaggtgcgatgtgcgaaaggtggtggagcacatgcaagtcatcagagctttgattcatatctgaagaaaggagtcaaggttgctaaaagtatatgactttactggaacgagtccgttccaagtttcgttgcagaggtgaatgggaggtgtgggtgtctggtggagaattaaagtgttctggaattatgcctatggagttccaaggttgtgaaggaatggggggaatctggaggagaacaattcgattggagcttgatcta

SEQ ID NO: 571369 - DNA, 813 bp, Homo sapiens
gagagagagagaactagtctcgagtatttgggtttttttaattttcctaataacaaccttataattctaattgtgacccagggccctgaaagctgataacaagctgggttgaccagagggaactaggggtcggcaaaaagggatcatggggtcgaggaaaacacattgggtcccttacctaggagggatgtggatgctggggagaaagggagaagcgacgatgtgggctcagcctggcacggtaacataggcgctacgaaaaacgccacaggccaaaacggctagaagggcgagacgagcgcacagtccacgcatagtcacacgcctgggcgtcgagggatagaagggagtaacaccacattcatcccaggggccatatccaactaaatcagaacacaaaagaagccaataaggatctgagggaagccctagagggtcgagagacgggactagctagaagacatagtcaagcgagaaccgggagagactcatggacataagccataaggggagcccaacaacacctgagcgagaccacaccaaagggccacccccagtgtatacggaacaaccacaagtggggacagaaatggggcgacaacagaagaggacggccccatgcgcaccgaggccaaatgcgacaaaactcaacgccatgaaccagcagacaaccatgggggaacagaggatcagttgggcacccaaaaggggggagtgacagaagagaaaagagaagcgaccacgaagaggaacaccaaaggggacctcctacaacgggggaagcaaaacgaagcgaatacaacgggggacgag

SEQ ID NO: 571370 - DNA, 159 bp, Homo sapiens
  misc_feature (44)..(44): n is a, c, g, or t
ctcaatcgggcttatagaacgaggtcacaggcccgactgacttnctatttattgtgagcctcagtataacattagcgtgcctacagcagacagtgagatcgtgcactaacactatggacctaaggacctggtacacaatcttgtactaacatctttata

SEQ ID NO: 571371 - DNA, 1019 bp, Homo sapiens
gcaagatgtcgaagcgaggacgtggatgggtcctctggtgcgaaatctccggattgtccttgggtcttcgcggtaagaggtgtagtcaacttgtgctgacaacacatggatccaataacaccatgtatatcatctccgtgacacggggatcggagggcacggcatgaacgagcacattccgcgcgtgcatggtgtgggtgacgatggtgatggacatcagtcaagaaaggcaaagccagagctcagaagaaaggtaggatccagtagtgtggtcattcggacttatggagagagtcataccggtgaaaataagatggacgttgttattttggattttgcaagataattgtcacggagttgcatagttgaacaaataaagagggtagtatgaaaggcttcgtgtcattataggtatccagttagtcaacaggagtgtgcagacattgtgagaatccgagtatctgcatccgaatgctgtgagagaggatggctgtgattcttccagtatcttcggtgaagctttctcaaaaattcaagcacattacacagactccaactgataacatacgaggacgatgctgatagacggagatggacggtacgaatgaagcgcagggtggaaaggagggatcccatgggccattggccttgtgtctccttggtcccaagagtcttaccttgttgtccgaagaggcgaaagaggtctggcgcggatctcctcgaatgaggcgaagcggttatatggaattattgggaaatagtggacgaaggttttgcgcctgtggattatatgtaatgccgcggaaaataggaccacggccaacttttttttttgcgatggtccctcaaaagggaaggtaacccctgacagccctcgaggcccggaaggtgctgggcaccctggttcgttatccacctaacatacaggtttctgacgctatccttggttgcggattggaccatcgagcaaacaaccaaaacaaccgccactaccactcagagggacaccatacatctgg

SEQ ID NO: 571372 - DNA, 263 bp, Homo sapiens
cccacaatctcttctcgcgttctggacaacggagaacaatctaacaacatgcaggatcgtcgcaggcaacagcagctcccgactcgtgcacaggacgccgttcgttggtcgtatgcctgagccccgtcccctgggctccctcgggctggggtgaggcgggcaggtacgcgtggggtaggaccatcttacgctgggaccccgccaaggagccccaggaagtaggtgaaagggcaggggcgtggctctcggggcgccacccacgc

SEQ ID NO: 571373 - DNA, 194 bp, Homo sapiens
ctcgcatgtttgaccaccacgtatgtcgtcgtgaagcacgcgcatgttgaccacgacgtatgtggtcgtgaagcatgctgacgacgacgtacactgagcagggcagagtgctgccatctcccacgcagggcagataagcagagcgagttctgacaggtagttatgtcgtggtgaaacatgcgggtaccgacgct

SEQ ID NO: 571374 - DNA, 206 bp, Homo sapiens
atcgcagtggcatgatctcggctcaccgcaacatccgcctcctgggttcaaccgattctcctgcctcagcctcccgagtagctgggattacatgatgtctgccacttatgcctacactaaattttttgtatattttaagttggaagaacagaagtttctgcccatgtttgggccagggcttggtcggtgaaactccttgggccctc

SEQ ID NO: 571375 - DNA, 334 bp, Homo sapiens
atggatctacgcctgtgatctcagcagtttgggactgccaaaagccgtaggatctcttgagcccccgggagtttgagacgggcctgggcagcatagggagacccccatctctacacgaaaaagatagaaagattagccggacatggtgatgccaacctgtggtcctggctacttgggaggctgaggtgggagggtcgcttgggcccgggaatttggggctgcagtgagctatgattacgccactgtactccagccagggtgaccgagcacgaccctatctctaaaactatttttaaaaataaaacaatatgttgttcatattatcctaatgtag

SEQ ID NO: 571376 - DNA, 806 bp, Homo sapiens
cacagcgcgtaggagcaaatggacaaacagcggaacaacctataaatgtcggccagcttcgtggtactctatttgactaaggcttatttatggcacctggagtttaaactttatgcgtgggcaaagtgccgtgtaagcgtaacgggtgtgtagctaaatcggcggtacccaccattggccggttcccaaaccgaggtatatttttcggaaacgtgctactttcctttcagtttctcgacacgcctaaattggtggcaaatgggcaacccccactgtagaacgatgtttccccccaaagtggcaaatatcttcgaaacatgtctggcgactcccactgtaggaaatatcacttcccccggtgtaccgacagatacccccccatccctgccacccccgttagtacaccacttcctcatagcccccctagttttgcgcccaccaaacatcttaagtcaaactactgccaccccattttacacgaacattttctcccgcctctccctattctgttgcgagaaacatcatctgcaaatcccccgtagtgacccctatcataaaatttttctgtcaacccccgggcaactaatagttgttttatatgcgcaggcactattttttcttttccaccttcagaaataaccattacaaacagtttaacaactaacacatcaaaactttgggccaccccccagcataaagaagaaacatgttgtgttccaacaaatatgcccgccagataaattttgtgcacacaaagttgtagtgggaataaataatcacggaccttagcgcagtactcacaatca

SEQ ID NO: 571377 - DNA, 451 bp, Homo sapiens
agacggcctctatatctataaataaaatagtgcttgaggggtaacaatattcttcgcgctgacttaccatagcctggtggtagactcttagaagagactaaaatgaaaatggccccactattattgtcaatcttaacacagagcttgtgcgaaaggtccctatactgctgactgtcagcatctccaggtccacgatatgtactcttggtcctgataagtgacttcacgagcacaagcattgcacttacaggacttgttggtcgtaggtagaactctccattttcatttccagatttaatccgaaaagtattgctggtgtaggcatacatagttgtggcctgtatctggaagaatgtctgatggcacagacctatcagatcggatgctcatgtatttgtagactattgactggggcagttctcggcacatggcatttgagactgggcaaaca

SEQ ID NO: 571378 - DNA, 237 bp, Homo sapiens
  misc_feature (34)..(34): n is a, c, g, or t
  misc_feature (81)..(81): n is a, c, g, or t
  misc_feature (95)..(95): n is a, c, g, or t
  misc_feature (108)..(108): n is a, c, g, or t
ttgtttgctgtctaggagtgagctatagaattgnccaggtgagatggaaagattacaagagagaagatatgagaacaaaancctgtaggaaattngataatatcaagnacataaatagaaggcctggcacaaagtctcatgcctatgatcccagcactttgggaggctgaggcaggcagattgcttgagcccaggagtttgagaccagcctgtaacatagcgagaccacatctctac

SEQ ID NO: 571379 - DNA, 505 bp, Homo sapiens
  misc_feature (353)..(353): n is a, c, g, or t
  misc_feature (355)..(356): n is a, c, g, or t
  misc_feature (387)..(387): n is a, c, g, or t
  misc_feature (463)..(463): n is a, c, g, or t
  misc_feature (476)..(476): n is a, c, g, or t
atctgtatatgggccccgctacgagacacgcagcgatgtacgaggcgcgatatcgttgatcaatcaatatagcgactcgacttccggatcgccatagcggcactgaatgtagttcctcatggtattacatatttattcttaatatgaggccatgtagaataaaatacactagagagactagaagggctttgtccactaatttattccttttggtcgtatatgcttcatgttatttaaccagaaatgtcttatctctaaaaatttttagtagtaattatttaccaaacttaaaaaccaatttttctcccttaaatttaaaaaaaatttaaacttaaaacaagcccttttttctntnntatattcctaagacaaaatataacaggctangaatttgggttccttctctgtaacactaaatattttagtgtgaaattgaatttttttattactatagtcttttcanatctataactttnttgggttggggattcttatctctcaccac

SEQ ID NO: 571380 - DNA, 221 bp, Homo sapiens
gacgtattctaacattagaagtaggtggaagaggaaaactagcaaggaagctggtaagaaatagccactgaggaagaagagaaaccaagggagcatggtaacctgaaagtaaagtgaaaaaaaagtctccaggaggaaggagtgatatagtaggtcaaatgctgctgatgagacaaggaagaactgaaaactgattatcagatttagtaatgttagagata

SEQ ID NO: 571381 - DNA, 667 bp, Homo sapiens
caggcacatgtcaccatgcctgaataatggttttattatcattataattttttgtagagacggggtctccttatgttgcccaggctggtctaaaactcctgagttcaagaaatcgtaacacttatgctgggattacaggattgagccaccatgcccagcaaggtggttttgttttgtttgtttttgttttttttccattttgctgaattctgaagctgtaaaattcaggaacctaagaagccaggcaaagcacaatggagttcctggcagttgcacatggctgaggagtcaaggattagagttcagaacgtgacatgggggctggaacctcgggaagacccaggcttttagttggaacttaagcagctaagctctagagtggtagtaatacaaaggtggaaagaggcttgttgcagcggctcacacctcgtagtttcagcaatttgggaggctgatgtgctttgatgccaccagtttgtgaccaagctgggcaatgaaaggagaccctgtctgtacaaacaatgcatgcatttatcttgacatggaggcatgcacccgtcgagctaccgctttggtacctacctgggaggatggtttgggccaccaaattggcccttcatgaggtaggatgggcgccccacttcacttgggtagcaaagcggtgttt

SEQ ID NO: 571382 - DNA, 485 bp, Homo sapiens
  misc_feature (365)..(365): n is a, c, g, or t
  misc_feature (427)..(427): n is a, c, g, or t
  misc_feature (457)..(457): n is a, c, g, or t
  misc_feature (463)..(463): n is a, c, g, or t
cattgtatgggcttagacaaatgtatgatgatatctacaattatagaatcatacagaatagtttcactgccctaaaacttctctatgcttcacctgttcatccctttcttccctaatcccctggcaaccactttaaaaaaaaaattaggttcagggggtacatgtgcaggtaaactcgtgacaagggggtttgttatacagattatttagtgacccaggtactaagcctagtacccaatagttacttttctggtcctgtcccttttcccaccctccaccctcaggtagggccccagtatgttattcctttgtgtccatgttatttcactcccacttgtgaggaacatgggatatttgggtttccngtttcccatggttaggttttgtttaaggggtaatggggcttccaggcccatccctggttccnggcaaaggggcaagatcttttttttggggnaaccantttttaattttcggcctaggtg

SEQ ID NO: 571383 - DNA, 467 bp, Homo sapiens
gaccataacctaaattattatgaactttctcagttcccatgtatgatggtatttttctgataatgaatgatgttgagcaccttttcctatacctgttgacattggtatgtcttcttttgagaaatgattattattttgtccattttaaaatcagattattaaattttttttcctgtagagttgtttgagttctttatatattccggttattaatcgcttgtcagatgggtagttttcatatattttctcccatcctgtgggtggtctcttcactttgttgactgtgtcctttgttgcgcagaagctttttaaacttgatgaaatcacatttgtctgtttttgcttttgttgactctgcttgttgggtattactcaaaaaatctttgcctagtccaatgtcctggagagtttccccaatgttttcttgtagtagatttgcaggttgaggtctaagatttaaatcttta

SEQ ID NO: 571384 - DNA, 201 bp, Homo sapiens
atgcaggaggagttctcgcgtgatgggaaggctctggagacggttcctgcaggattactgtattaaagtgtaatcagttgtgctgggataacatttgaacagatacttgaaagactgtagagaattgggaagtaaatatctgcggaagatcatcccatgcagggggacttaccagtgcaaaagtcctagtaaaggaacgtg

SEQ ID NO: 571385 - DNA, 224 bp, Homo sapiens
  misc_feature (166)..(166): n is a, c, g, or t
gtaaagactatctcatttcttcccctgtctatttcttggccattcatttcatccatagccttaccagcggctccatctgtcttcaagcatgaacaattgcgtaatctttcagcttcgtagtactctattcgagttttccaagattcagacaaatgacttttcctgntattgctatctgtcaccggtagtcagccaaagtttctacacaaactaaaacttttgac

SEQ ID NO: 571386 - DNA, 166 bp, Homo sapiens
accatgccatgactcggaacacgtcaggcccccacctggctcactcctggaggatgtggcctccctccaggtcagtccccaggccccagaggcaggtggacagaggggactaagccagctgcttggctgctgggagcagactgagtcttttctaatggactggcat

SEQ ID NO: 571387 - DNA, 131 bp, Homo sapiens
tgatccagtgcacaccgctttctgatcatcgtcttcctccatgtgtggctcctctgcttcttccaggtcctcgagatcgtcatcacccctgtcccatccgggccacgatctcaggaattcttaaaccatca

SEQ ID NO: 571388 - DNA, 160 bp, Homo sapiens
ctacggaaaaattatctgggtgtggtgggaccccaacctgtgatccccagctactcaggaggctgaggtgggaggatggctggtgggaggatcaccctgagcctgcgaggtgggggttgcagtgagctgagattgcatcacagcactccagcctgggagg

SEQ ID NO: 571389 - DNA, 394 bp, Homo sapiens
  misc_feature (1)..(1): n is a, c, g, or t
  misc_feature (194)..(194): n is a, c, g, or t
  misc_feature (258)..(258): n is a, c, g, or t
  misc_feature (263)..(263): n is a, c, g, or t
  misc_feature (308)..(308): n is a, c, g, or t
  misc_feature (320)..(320): n is a, c, g, or t
  misc_feature (338)..(338): n is a, c, g, or t
  misc_feature (385)..(385): n is a, c, g, or t
ntcttaaccctgttgagacgccaagctctcagctgtcctagtcaggtgttttttcagacagcaagtagaagaggtggtggccaactgcggtgctgtttcctggggggggtccgggtcagcactgggcaaggtaggtagctagctgcctgacccctagtctggggttgggacttctgtttgcctgggtaaagggntgtcagtcctaagatttctccacattgtgtctttcttctgcagtggttaaaaggctggtccttnttttntcctgcatggtaccctaaggcaggcccactggctctttttgatcnagggttctgggnaaagctgcccttgggggnccttgggttaacgtggggggcggggtgggtgctcgagtcgtggctgncacagtcca

SEQ ID NO: 571390 - DNA, 192 bp, Homo sapiens
  misc_feature (100)..(100): n is a, c, g, or t
  misc_feature (105)..(105): n is a, c, g, or t
acccgtctaccagcccagaaccaaccagcccggcctgagtttcaccccacgtgtcggctaccgttccctgtcccttggaggctccaatgagctggcgtgntcgtntgttgccggcgtcgtttcgtggcgtcgggttttgggtcgaccaggcaaaagtcccggtcggcaagaagggccagttgcacgaatacc

SEQ ID NO: 571391 - DNA, 594 bp, Homo sapiens
aactgttttactatactttattgatttaaatacagcaaatttgagtaagcaccagttaaccaaattaccactactcatgagaaacaaagtcttgccaattatatattaaggcaaagggtaaacacagaaggctttcacttccactatagtcctatttaacaaaacatcctacatactttggacaattggcttataattggttaaatatttgatttgaagcaaggttgatttttacttaaacttctatttttcagtgaaaaaggctctcttcatcagaggtggttgcgttttcccggcatgaaacattatttccaaaggagggttattgagagaacaccaattaggtatacggcccgtctgattataatattcctttgaaacataacggctcccacagatatagtgtcatgatccaaaaatagcccgtgccagccaggccatacaattagcttttgcaggtggtgtatgaattcgaaatgtcttagtgccaagggcttttttatatttagggttttttaccaaataccttatttcttgaagcaaactgtggagaaatcctggcaacatagaagtgcctcctatgactacccaagt

SEQ ID NO: 571392 - DNA, 522 bp, Homo sapiens
cgaatacggctagtgctggacatatccaaactaaaagcaacgtaaatcctcttcaaatctaatattaatatagggaataagattattgaaaaacaatatttttcctgatattcttatacctgaaggtaatttttgtagaaaccatggtaagaagggaaaagaaacctttgactggcgggggcagggggaatacaaaaaaaaaaatccctatgcatctcaacaattatcacttgaatatcaaactcagacagagtactcttggtgaaagaggcaaaatgggtcttgagctgattcaagtctaatgtctgacggttttcctgaaatactggcccagtattaggagaaacattcacagaaaagtcagcatggtagatattgagaaggaaactctgaggtggtgattttctccaaggtcatggttataaggctcaatgagggcctgaatgggtacttccacagaccccaatagaatgagcgcccatttagcgatcttcctgaaagaatttaaaagcctccactgaa

SEQ ID NO: 571393 - DNA, 271 bp, Homo sapiens
ggaattggagacccgcctgagcaacatagtgagacttcctctctacaaaaaataaacaaaattagtggggtgttctggcacgtgcctgtaatcctagctactcaggaggctgaggcaggataattgcttgaacccgggaggcggaggttaggatgagcagggatcgtgccactgcactcaagcctggacgacagagtgaagctccgtctcaaaacaaaaatcccacaaagaataaaatcaaatttgtttcatgcatcatctgtttgcacaa

SEQ ID NO: 571394 - DNA, 544 bp, Homo sapiens
  misc_feature (434)..(434): n is a, c, g, or t
  misc_feature (495)..(495): n is a, c, g, or t
  misc_feature (504)..(504): n is a, c, g, or t
agaacgtactttgatagagagagacccacattcacataacgtttattacaatatattgttataatttttgtatattactactgtcaatctcttactgtgcctaatttataaattaaactttatcataggtaaatatgtatagaaaaaaaagcatatatagggttcagtactatctgaggtttcaggcatccactgggggtcttggtacatatctcttgcaggtaaggggaaactactatatttgtctttttcttattttattgtcgttctttgtgtatcatcttatacgttgcaggtaattttatcctaccatattgtgatttttattttgtttttagttataatttagacacttgaaaattctcctctgtttgtgatagttttcccttccttatatgccccaagattatataatattcttttgatttttttcnaatggtccatagcaggggtttttacatttacaaccttaagcaacctgattaactttaaagnccatatttnaaaattaggaaacctcgagttaaatggggaaatatatcca

SEQ ID NO: 571395 - DNA, 1937 bp, Homo sapiens
  misc_feature (375)..(375): n is a, c, g, or t
  misc_feature (453)..(453): n is a, c, g, or t
  misc_feature (997)..(997): n is a, c, g, or t
gaacagaatggtctactccatcataaaacatgcacacataacgcatgaattgagacatacataattaccctagtatagtatcagagtcgtctactggagcctcgtcacgttccacttatagtgaccagtcttaccataacgtcaccacgctgtattacgaaggtgcagtacgtctagtgtgccctaggactcaagtggctaagcgctttacttgacgggctaaaaaccggatgctacgacttcttataacggtctgatcgttgcatcacgacgcatatgctgtgcgaataggtcattcattcctatcattggctaactgcctcatcattacacatacgcgcactggctgggagctatatcttgtatgtcatgctntgcctccttagattatattgcgggttgtaccctcgcgaatcattgggacgatcttttcctccgtttattaagagcaancaatacacggctagctgcacctggcttcagcaactgaatctacgcgcttatcttcctcgtggacttctgccaaattaatgtcttattgagggtcgcgtacgtgggcccaggtaagccaatggtagagccagggggttatcgcacatggatggtgcttaagcgccccttcgcactttttagagcatttcgaggaagcattagcttcactcaacctcaccgtgagatagtccatcccaggtaagtgaaaccagaaaaggcgccacatgcgttaagcctctgcctgttaactaaacccataatgaacatgaggtgtggtttacctcctcagtgcgtaactactaaagggggagaactctatgttcacaaattttttacacattcacctaaattcaatgtgtacatcctcaagtatttaaaaaattcggccccctctggtctccggtataaaccccccaaactttacacggataaacggggcgccggggctcagatatccagggggcattcggtatttctcccagtttctccactcaaacttcatacnaatggctcaaagtacacacaattatacccttgcctgtcaacagttagatactctccttgctcaacctaggtgttctcaattataccacacttagagcgttcggagcgcattttcccacatttaagttgacctattaagcgtgaaaaaacaagtggcattcctggttgagaacccggtaaaaagagttagcttcggacctcggtatatcacttctctgttagcccccctctgatgggctggggaccgcgatattggaggaagggccccctctggaatacaaaagtattggccccagatataaaccttttataattttctctagacattctcatgcgcacgggtgtcctacaacccccattgagaccgctctagaggatatatttcctagtaaatgtccataaccaaacggggtcttgtggggacaccttcatagtaccacacgaggatattcagttagggctaacatatcacgcgcgtggggggacaacaaagcgtggtatgcgccgacatggggggggatcaccacaactgaacaacgaggcctatggagggccaaacctgatagtagacaaaaatgcgccatgacgccacaggggggtacccacatgactagtcgatccccccccccagccgattattactaggccgggagggaaataacagcggccccaacaatccacgagcgggaactaatcaaaaccacggagagcgagcagccacactggaacaccaccgccgaccgcgagcgagaacaaatagagatgcaaccaagacacgcgagacaaactaagagaaaacagcgggacgagacaaagcacagacatacgcaacatacagcgaagagcagcgacgacagacacacagaacgacacagccggcatagaacagccgaacaacaagagggtccagcaactacgcacgacgacgccacacactagac

SEQ ID NO: 571396 - DNA, 1082 bp, Homo sapiens
  misc_feature (885)..(885): n is a, c, g, or t
gagtctgagcggcgatggcggacggtggtggtggaggtatctagctgcgggggcttgcgggcggtcggggctccggggcctggggctggcgtgagcctaatcttgtgcccgtgtggccggtgtgggacgtgccgcgtgtgtgtgggtccccggggggcgcagggggactacgggaacgtgcctggagtctgaggatctgtgacgcctgtggtgagctggtcttgctggaagcccctggaggccggaaggccggatgcgccggattgatgggatgctcggtcccgtggcccccggtgtccgcccccgggggggcctccatggggcacttgggcgtcactgttttcgggtagctccggcggcatgcacatgtggatgtggagggatcccggggtagttggatccggatagggtatggacccgcggggctgaacccggtggagctccagttggatggaaccccgttgggccatggagacgtcctttattcaacgtccttcgaagtttaaggggcagtggtggtgacgggagagaagcctgtgaaagttgctttggagggaggccttcaaaaaaatgtgcgcctagggaagaatcgtcatatctcgaaagtatttgatgttcacgtcgtactaagtgctaatggcttggtccccggggtggcttcgtggtcccctgtttggacgggatgaaagggttggcacagggctggagatagctcggattcacatctgactggttgggccatctgtatcggagctattggagttgcgaccatcgccgtgagataaggcatggggatgactgcaacgttttgcaattggggcctggtggggttgcaagttcacaacgcggtgtgtagcccagttacttgcgatgttgactaaaganttttatcgttgggcgcattccctaaatcggggcttctgcggatagttttaggaggtcttcaaggatccaaggtgacgttcaggaagaggtggaactcacctttggtgcatttaggattgaagttcccttaaattaggaaggagagggacaaagtccagaaggggtggagtccccagcagagggaaagcaagcagggc

SEQ ID NO: 571397 - DNA, 223 bp, Homo sapiens
gtcgggaagggtgacttccagagatgtcctgcatcttgctgaataccgctaacttcttctgctggccaggttggggcgccggcttgatagtaggctgtggggcagggttgtcgctgccatggggtttgggcagatactgggacgctccataaggctgggtgtgatacatcacctccgcacaactcatggcatccgaagcatgttgcggggtaccggagctcga

SEQ ID NO: 571398 - DNA, 1276 bp, Homo sapiens
  misc_feature (1)..(1): n is a, c, g, or t
  misc_feature (799)..(799): n is a, c, g, or t
ncgcctcgaggctgccgtgttgagttgtgttgcggccgagagggggtgcttgtgtgcccctccgctgtgtgattaggcgctgttgcgtgcgcaatgatgtgtggagaatcgttgagctgttaggggaagagtgtgacccggtgtgtggcccaaaaggggagggaaggccccccgaaaggcgtttttatgagccccgctcctccggttgtgtcctccccgtgtgcccggagaggcggtttatctgcctttagtaggggcgagctgaggccgtttgtaatataaggagtgccacccacccccccccgttgtgtaatatggagaggcgcccaacgaaatattagtgcttgggggggagaaaagaaatttttaaataaagcgatattggagaggccgggcgcacaaaacacgcggtattcgccggaggggcgccttgggtgtagtataatagcctggggtgttggtggtcccacaagaggtaataggatatttctttatagtgtttcacaaacgtgtgtaagaaagttttggcgccccgcacggagagccccgttctatagagtgtccccgctcttgtatagaatgtgtataagctcgtgtatagtgtcccacaaaagagaggagaccacagcttcttctttgggacacacactatagggagaaaaaaacccgctctcgtatagagagagggagagtatagaaaaaagttgtagacacacacccaccttagagttatagggccgctataagagagcaccgccctcgccacactgtattaagaaatagggcgttttacacaagngctctcacacacacaccccactcttaacctctataaatatatctccccacacacacatatataacttgagaactctctctctcacacacacccaccactttggagaccacatctctattcacacctcttatatagaagaaatctataatgtttatgtatatatagtatacacacatgtagaaacacacattttcctcccgccactataggcctgtgcgcttcacgaattataaacacacactgtagaactgtaccacacattataccacgcgcccacacatatttctacacatcacacccacccaagtcacttattgaacctccacctgtcacaaccccaacaccacaggcactgcttcactaaaggagaaaggttataaaaaaagtataaaaggaaactcggccaattcttaaccccccctgtttacccaaaacatcacctttagcatcacccagtattagaggcaccgcctgcca

SEQ ID NO: 571399 - DNA, 240 bp, Homo sapiens
aaaccttgtagagagagtaaattacaccatgtaggctaagagcaccaattagaagcgtcaagctcacaccactacctaaaatccaacattactgactctacaccaattgaccactttacctttagagactatgtagttagtacatgaacatctctcgcatagctcgtcagataaacactgactgacattacagccatttttcatcaccacagtcattttacctactgtcacccacacagc

SEQ ID NO: 571400 - DNA, 266 bp, Homo sapiens
tcccaaggctgagaaagtgtagagagtgagtgagcatagttgtgatttttagggcctctaaaattattaaagcagcggcagccacgtgcacgcggacctgagggctaggctaaaacagtaaggtcaagttgttgggacagaaaggctacagggtgcggtcccggctcttgtgtaagaattctgaccgcactaaccatgcctaggaaggaaaggagttgtttggtggaagggattgaggttggggagcaattcctcatccgtgggag

SEQ ID NO: 571401 - DNA, 1157 bp, Homo sapiens
gtggttagttattgtacgtttgggtgaattctgggagttttgggaattgtaatatttgaataagcaatgtttgtatactagatgaaggttgttaataggggcggatgaagtatgttctgctcgatatctggggatgcccttggttagttaatatgggaacgggggttctaaattatagtttgttcgctatttctaatttggtaagtgacaagtctaaagggattaatcgttctgtattaatttttcggttagaataactattaattgctgagggtccttgtacttttgtatgacttgctttgtcgggattacgtataaactctgttcgagggccgtacagtggctatttctgcagtcatatagagcccctctagtcatgcggcctacagttgaggacatcaccctcgacaatgctcggcgctcgacctcaggctgtcaaccaggcgactcgtgcgtagctatgtaccccctcttcgccataccctaacgactcgggtttaacctcaacctgaggcctcctagttattctaggccacgtattagcctagccgtgttaactcaatcctctgattctagggatgagcatcgaaagctctaaagcgtagcgcctctgatcggcgcactgccgagcagtaggctccaaacgatctcgataagaaagtcaccctagccatcgattctactatcgacattgacgtgaatagagtggctcctttaacctcgtccacgcgcttagtcaacaacacggagacaccgtctgatgttgactcctgccatgcatgaccattggccataagatgatttatctccacactagcagagaccaaccgtaccgcccttgcgacctgcacgaaggggagtccgaactagtgctcaggctgtcaacatcgaatacgccgcaggccccttcgccctattcttcatagccgaatacacaaacattattataagtaaacaccgctcaccacgtacaatcgtttcctaggaacaacatatgacgcactctcgcctgaactctacacaacatattttgtcaccaagaccctacttctgacctgcctgttcttatgaattcgacagatacccccgattccgctacgaccaactcatacaccttcctatgaaaaacttcctacaatcaccggggattacttata

SEQ ID NO: 571402 - DNA, 316 bp, Homo sapiens
gtagactaacatgtatgaggtggtatctcaagtagtttgatttgcattttcctgatgacggtgatattgagcaccatttcatatacctggttggtcattttctgtcatctttgaagaaatgtctattcaagtcctttccccacttttttttaatcaggttatatgttgtcttgctattgagttgtatgagttcttcctaaatcctgaatattaaaaccttgcctgatatatggtttgcaaatattttctccttatctgtacattgccttttcattttgttgattgttttcgttctgtgtaggttaggtctacctgg

SEQ ID NO: 571403 - DNA, 214 bp, Homo sapiens
agcagtgatggcagtcagtgtaggaaggagtaggccggatacatagcggttcaagacctgctgcacttcggctgcagtgctccggaagagttcaggtgtacgcctccggaggcctgccctacacgtgcaccattagaaagacaatccttgagctttctaggggagaaggcagcagcttgacattacggacccaacggtagcgtttggccccaac

SEQ ID NO: 571404 - DNA, 115 bp, Homo sapiens
ctatacattgtaggaggtagacacaggagcattggtgctcagagtgggtgtctggtgagaggaacaacggtgcttaagagattttcaggctattgctgtgggacacgaatgtcga

SEQ ID NO: 571405 - DNA, 791 bp, Homo sapiens
  misc_feature (605)..(605): n is a, c, g, or t
agtgccaaatctgaaacctagattcctctgtgactcctcccctttctttagccctaaagtctcttctactaagtcttctccaaactcaccaaattcctcacaaatccatcccaccccttcaactgccttagttgatccctcttatcatcacaaggttggctctatctcatttcccagatccagcatttcattctccaaagccatccttttcactggggccaaagttatcttccctataacccagacctgactgcgcactctcctagtctgcattctttagcagctcactgaagaattcacctgtaagagttcaaattcctactctaacctcagcctaccttccagctttatcctgtggcgctccatggctttgctaatttttcacctcagccacattagatttttcctaccccacaatttcacacagctgcttccaccctctatgtctttgttcacactactttctcagcctggtatgaactgctcttttctgcctatcaaattcatccttcaagatgaggctcaaatgtctttttttttcctgggacaagtttcctaaactctctaagcctgtctcccctccgccctttccacagtcaaaagtnagtgctcctactataacttatgtcaaccagcaatataactcttatctctgttacagtcataaatgcaagtctcccctacaaaattctgagatcttcagggaaaggagtgtaataattttgaattgtcattttctaccacaatatatggtacttggtttagctcaaaaaaattgttctggactgatt

SEQ ID NO: 571406 - DNA, 730 bp, Homo sapiens
agcgggggttctgccggctccgtggctgaggaggcggtttctttccggccgcgctggctccgtggctgaggaggcggtttctttccggccgcgccggctccgtggctgaggaggcggtttctttcgggttctgccggctccgtggctgaggaggcggtttctttccggccgtgccggctccatggctgaggaggcggtttctttccggccgtgccggctctgtggccgaggaggtggtttctttcccgttgtgccggctccgtggctgaggaggcggtttctttctggttctgccggctccgtggctgaggaggcggtttctttccggccgcgctggctccgtggctgaggaggcggtttctttccggtcgcgccggctccgtggctgaggaggcggcttctttcgggttctgccggctccgtggctgaggaggcggtttctttccggccgcaccggctccgtggctgaggaggcggatttctttccggccgcgccggctctgtggccgaggaggtggtctctttcccgttgtgccggctctgtggctgatggaggcggattctttaaggtcttatgctgtgctggatgctttgaaggatcagcgtgagaatggaggcgcttagtcacacagggttcaccattggaactgtcctggggctgatctgatgccgactgggctccgagttcaagtggttctctaacggaccatctcagaagatctccggggga

SEQ ID NO: 571407 - DNA, 281 bp, Homo sapiens
acaggctagtggaggcggggtttattggacgaggcgcgccgtcgctgtacgcttgctctgcggcgccgaggcccgcgcgctcgccagtgttccggccaccgccaccgcgggtcgcctcgggtgctgggcaccactggagatggggctgccgctatggacgcgcccgctcagcgccgcggccgtgcgcgcctttactggagcgtcgggtgacaaccgagactggaacacggaccgttcagtgtacatggcgagcgtgtcgcagtcctgagaaaccaattccc

SEQ ID NO: 571408 - DNA, 391 bp, Homo sapiens
  misc_feature (60)..(61): n is a, c, g, or t
  misc_feature (96)..(96): n is a, c, g, or t
  misc_feature (134)..(134): n is a, c, g, or t
  misc_feature (160)..(160): n is a, c, g, or t
  misc_feature (172)..(172): n is a, c, g, or t
  misc_feature (175)..(175): n is a, c, g, or t
  misc_feature (202)..(202): n is a, c, g, or t
  misc_feature (235)..(235): n is a, c, g, or t
  misc_feature (289)..(289): n is a, c, g, or t
caaaaagaagacagtgtggaaaagaaaaggaataagagagaaaggagggggagcactccnnaaaggaagaacagcaagcgagaaggagagcgcaancagaggaagcacagaagcagaggaagcacacacagggnagcaaacaagggaggtctctcaacanaggagagccgcngcnaagaagcaaaaaaaagtcaagcaagcngagaaaaaaaggcccaccgagagccaatcgcgnagcagaaacccaagccaaaagacagccccgggggcgggagcaccagccaaaacnacaagcggaagaaataaccccctccaccccctcccctcccctcctcctcttctttctccaaatggagagagttcttttttttcttcttccatctcatctatt

SEQ ID NO: 571409 - DNA, 322 bp, Homo sapiens
  misc_feature (21)..(21): n is a, c, g, or t
  misc_feature (76)..(77): n is a, c, g, or t
tgagggagtttcactcttgtngcccaggctggagtccaatggctcgatctcggtgtcaccgcaacctctgcctccnnggttcaagcaattctcctgcctcagcctcccgagtagctgagattacaagcatgcaccactatgcccggctaattttgtatttttagtagagacggggtttccccatgttgaggctggtctcgaactcctgacctcaggtgatccgcccgcctcagcctcccaaagtgctgggattacaggcgtgagccaccgtgcccggcccaagaactcaaattcttaaagacacaatctcagaataacaaat

SEQ ID NO: 571410 - DNA, 408 bp, Homo sapiens
gttcgaggccagcctggccaacgcggtgaaacccatctttactaaaaatacaaaaattagctgggcgtggtggcgggcacctgtaatcccagctacttaggagcctgaggcaggagaatcacttgaacccgggaggaggaggttgcagggagccaagatggcaccactgcactccagcctgggacacagaatgagattccatctccaaaaaaaaaaaaaggaaggaaatattcactcggggtttcattcaataagcactcagggccgggtgcattggctcacgactgtattcccagcactttggaaggcagaggagggcggataacttgaggtcaagagtttgagaccagtgtggtcaacatggagaacccacatgtctactaaaaatacaacaattagctgggcatg

SEQ ID NO: 571411 - DNA, 118 bp, Homo sapiens
cagaagattgtagttaggaagcaaagcttagcaggagaagggaggccagagaagtgacgggaagctaaggttaaaacagatttgtgaactcagccaagcacagtggtggcagggccta

SEQ ID NO: 571412 - DNA, 654 bp, Homo sapiens
ttttctaaggaccccaacttctttattcattaacaaatataagtttcaaaaattgttgtaatgatgtaaatggctttttgaatccagttgagtgttttcccatcaggcacttcaaatgataatgatgctctaatttgcatgcattgttggaggagtcatccagttgctggcttgatccctgctaaaagagcataccagctgcaaattgacagaagaatctgatacacgtgaagatggggacttggaggctttatctggagctgcagctaccaggagcccccttctggtcttctccaagaactgcaccttggcttcatggccttaccttggcacctggaacatggactccttcagtatcttccagtacctggatccacagtgacacaggatgttcgtggtggacagcgagtgtcagacgtagggatcaaagacacacctccagacctcactccatactggccaccccgacaggagccttggatgaggctgctcatggctgtagatgacacaccaaggaactagagcttttcagatgccacctggccactcctgttctcggccatagcagtgttacttggtactgtcaatgtccactgcattctgtcaaatgtgtgtcatttaaagaccacaagacataacaaaaattaattcgtt

SEQ ID NO: 571413 - DNA, 609 bp, Homo sapiens
cacaggtcgtcggggagggggtgtccgaggcgacctgaacgcgaggatttggggcaaaaaggcacttcaaatgataatgatgctctaatttgcatgcattgttggaggagtcatccagttgctggcttgatccctgctaaaagagcataccagctgcaaattgacagaagaatctgatacacgtgaagatggggacttggaggctttatctggagctgcagctaccaggagcccccttctggtcttctccaagaactgcaccttggcttcatggccttaccttggcacctggaacatggactccttcagtatcttccagtacctggatccacagtgacacaggatgttcgtggtggacagcgagtgtcagacgtagggatcaaagacacacctccagacctcactccatactggccaccccgacaggagccttggatgaggctgctcatggctgtagatgacacaccaaggaactagagcttttcagatgccacctggccactcctgttctcggccatagcagtgttacttggtactgtcaatgtccactgcattctgtcaaatgtgtgtcatttaaagaccacaagacataacaaaaattaattcgtt

SEQ ID NO: 571414 - DNA, 518 bp, Homo sapiens
  misc_feature (223)..(223): n is a, c, g, or t
  misc_feature (283)..(283): n is a, c, g, or t
  misc_feature (448)..(448): n is a, c, g, or t
  misc_feature (481)..(481): n is a, c, g, or t
agagcacccggaacgaagagagctctgagcacgacctgctgggggacgaacccccgagctccaccaacaccccgggaagcctgcgcaagtttggcctgcaaggggacgccctgcagagccgggacttccatttcagcatggactctctgctggcctgagggggcggggctgggacgggggcgactgtcccgggcctcacggatgaaggagtatgagcgctacncgtgagctccttggagatcaagtgccacctgtgagaaacggcaaaccagcttggggcctnccctctttccccggtgcctccgtgaggcaacatgcgcccttggacgtcaaccgcaactgagagccctgggccaccgaagatgggcccaatgctggaggggaggagcttaaggcacctggacattcacagtgccgcagacatactgcgtggctgcagaagatgcangcagctgctgtgagcgctgcatgaagcgcctgngctgctggacggaggagacgccctctagcgacctagg

SEQ ID NO: 571415 - DNA, 1060 bp, Homo sapiens
cctgcgcggtcgttctctggagcagcgttcttttatctccgtccgccttctctcctacctaagtgcgtgccgccacccgatgcgaagattcgactggacactggcacactgcagcccccttgaggccccagaacctatcttcttcggttgtgaactaaacgcgccgaccaacacgcattactcactcttaacgcgctggcataactgactgacaacactgagccaccacgttactcttctaacgacacggctcagctctccacgcggcccctggcctgcacacagcgcacctgagcctccgccaacacttcgctccgcaacccccacgcacgcgcccacacctgcacacctttcaccccacacgggccacgctcccaaactctacaccgcctacacaaacctggcccacaccttttctcgcacccaatttgcctccctgcctaccccacggccccaccaccgcgcctcttcccaccctctggcaccgcgccgccccccctgcaccacacttaacccccccccccacccccacagctggcgctccctttccacccgcgcttcgcccacgccaagcctgccgactcacaaacacaggaccccacacacacgccccactcacttcaaaacgcatgcgcaccacagcccacccatccaaccactaaccaccctgcccgccgaacgcgcaacaccccacctgccccacaaccccccccccgacacacgcactcgcaccccccacaccacacgcagcaccgcgacacctgcccccgccaccaaccctccccatacaaacccgccctacctcaactcccttggcccacaccacacgacccggaactccacatggcccacccccccgctgtgcgacacgcgcgccattgtcgcctccaccccccacacaaggcggccctatcaccaccaaccaccaccaccaacaccatcacccaccactcctaccgcaaacaccctcttcgtacccccccccccctagcatactcacaaacccacgcaccttggagacactgcacccgcacaaccacgccccacccgcacacctgcc

SEQ ID NO: 571416 - DNA, 389 bp, Homo sapiens
gtagagtagcctcatttcatttgagttccctttatagcagcaacttttttcctgggatccttcttcgtgcgcttctaagtcagtgttagttttggaaggtttggccctgcataagttctgcatagcatctaatggcaaaatagaaccaactggtaatcacagtattatttagtgtggtttccatgacaacaaaaatacatacgaagaaaacttctcaggttactatgctgaaattccaaaatgtctgagttttgaatagcgatcactttgttctggtattgacgcaattatattaggaaaaaagttggttgactgtttttgtttaattgacttctaaaatgttcaaagtgtctagctctaaaagtttactaaatgcctagcgcagttaa

SEQ ID NO: 571417 - DNA, 869 bp, Homo sapiens
cagtcgtaattgctggtttgcccagagctgctgtgcaatgacttgatcatggcttctagcactggtcgtcctctaaactcctgggtactcaaaaacggaatgattgctcctatctcaatcctcttgagtgaatgcaaccgccagccttgtgccaccctctcctgactattttctactggtactctttgtagacgcagtgcgtttggttagtgcctatcgttgtgcgcctgtggcctgctctaaggatccttctggaggttcgaggccatctgcctgtctggtctctcccaggaggtctgacgaatggcgatggtgtgagcgactcacatactgatctgtgtcgaattctctataccttgtcatgcatcttgcggaatatatgcatacacctatagttctcctctggtgtagaattgcctaaagcgtgtcccgaactacaacaacaaagtgactatattatcagtccagtccttaaggttttcatctcctatagaaacagaatggctgcccccaccattttttctgtccagctcataatgttgtgcccttggtaagagtttgtgctgactactttaaatcctttaactatccctgaaaaaagtatttgaggacttagtaccactttcgtcccaagtacgggagtagtatttggtgcctgatccactcggtgtcctacaagtataggttgtgacttacacgagatactagagataagttacggttgcaacattcaccgaaattgcactgagaattatgcctacataattcaaacgcatcaattactttgacagagcctaccattaatcacaactgtttttagaccaattgaaaaggaaaaaaacacttctcgagtaatacagaaaaaaccg

SEQ ID NO: 571418 - DNA, 575 bp, Homo sapiens
agcggagtgggctgtgtgtgcgtgcgcagcgtggcggaggcggccgtgggccgcctgggcagaatgtcacgatggacgagggcggctacgcccctgctccccgacatgcctggtctaccagatcttcctgagcctgtggcccggccgaccgtgctggcctgccgggctaggtgtgcctgccaatggcaggcctgtgtcgctgggactgagttcctgtgcgagggagcagttactaccagctactaccaggtggcccgcgtacgtgctcccgacagcccagtcgagcatgtcctggtactgaggagttccagctggctgtactgacacggtgcccatgcagtggaggtgcagacagctgcagggaacacacagaccaggtcctgcacctcagacttctccacattccgggtaccagattcgtcgtcctggttccaaaggcactgcacctgatgaaggagtcatggaagcaaacgaccccttgaaccatctcgacttgccttgcgacacgcagctggacccattgctgagacccttacaaaccatgcgaggcctaccaagcccaggattcgtccaca

SEQ ID NO: 571419 - DNA, 422 bp, Homo sapiens
aaacccctggtctatacacgtggtattttggcctcaattcttcaccaggagtcactgagtatacatgaaatgacaattggatactgtatttgatagagaactatagttttgataccggggtatacatagaagcacgttgtttataccactaagtgactttggcggggctctcccatggaaacggatggcactacctgaagctccctggtcacaggaggatgaaaacgtgtccgtgggtgacatcaggtggtgtctccaccaccaaaagcagttagaagccaaggagattccttcatgtacctaggagtcattttgaaatgaaaatatagactataatttaaacaattaacgttctattgtacacattgcagggacttgatatttttaaagagctctactggtaggatatccttttgcttttg

SEQ ID NO: 571420 - DNA, 308 bp, Homo sapiens
  misc_feature (306)..(307): n is a, c, g, or t
cttcttaagatgaagactgctgggctgggaatgatggctcacgcctgtaatttcagcattttgggaggccaaggcagaagcattacttaaggtcaggatttcgagaccagtccaggcaacacagtgagaactcatccctacaaaaaataaaaaattagccaggcatggtggcacatgcctatagtctccgctacttgggaggctgaggtggaaggatcatttgagcccaggagtttggggctacagcatgctatgattccaccacagtataaaagcccccgcaacagagtaagaccctgtctcatnng

SEQ ID NO: 571421 - DNA, 274 bp, Homo sapiens
accacagctcagtggcagcaagcggtcggaaaccacagctgcctgcagcatatgtactcatatggcatttaacttacactgccttacgacctccactggtaccttcatttaacctgaactcacactcatccctatacagctgtgtccaggtacaggaagggaggacaagactattggatggatggatggatgtggagagcagctagatgttccttatagtaaggaagactctcagatttgcatgtcagtttctaccttggacaacattcagtca

SEQ ID NO: 571422 - DNA, 132 bp, Homo sapiens
agtatgtaccgggtcatggcctaattctggtacaccaagacacgagccctgctggccacactggtcctgacacagcagacaggccttgtcgatcacccatgcgaaggcgatgtgacccgggctgtgtggggt

SEQ ID NO: 571423 - DNA, 530 bp, Homo sapiens
cacgcagcaggtcagtaacagagacaggatgggaatccagccccatctaactccagagctggcctctttccacatcccctcgcttagagccaccagcatgaccgagaagccaaaacccaccaggatggcaagaggggacttcctgaacctgcctgccttccacctgctgggccccgcttggtgccgcttttctagtttactttaaatatgaggaggggcaggaaagaagccaaatgtctctcacaataagaaaagcccatcatctgcaagatcatcctcaggttggacagttccctagaaggattcacagaacaagttatgggctgttacactcacagttatagtttattacagtgaaaggatggagattagaatcagccaagggatggggcacatggggcagagtccagaagagttccaaacatgaagcttgctaatgtcctcctccacaaactcatggacagactaacttttcctagtagcaatgttcaataatactcatgaaatactgtcaatcagagaaggttaaa

SEQ ID NO: 571424 - DNA, 298 bp, Homo sapiens
tttttttttttgagatgggggtctcactctgtcacccaggctggagtgcagtgtcatgatcttggcgtaccacaacctctgcctcctgggttcaagtgatcctcctacctcagcctcctgagtagctgggattacaggcacctgccaccacacctggttaattttttgtattgttagtagagatggggtttcactatgttggtcagggtggtctcgaactcctgattacaagtgattcacctgccttggcctcccgagccttagcccttttgattccctgacatcaaatgctgtcgac

SEQ ID NO: 571425 - DNA, 338 bp, Homo sapiens
cgcatctccaggcttctccaagatctcccggaaattgctgttgctattcatcaggctctggagggtgcgtacctgataggacatgcagagtctggaagtgatgataatacttgaaaagtaccatacattgttatagacaaaagccatgaaagttatcaagccccaagcaatacattcctgctggagaaaactgcccagatgttgtgcatgacttcacaggatttacgacaaagctaaccaaggacatcatgaaagagatagtgaatacggcaaaataacaaaaaaaaggtaaagaccagaggtttaaaaaaagggaataccacaaaaaattaaagggg

SEQ ID NO: 571426 - DNA, 317 bp, Homo sapiens
aggatcctccttgctttgggacggcgtggacgttgtcatggagcgagcgagcactcgaggtatgccacgcgcgcacggactcgccatctctggccctgtggtaggtcacaggctcccatccggttcttcggagcttgttcaccagtgatttgttcttgcgccggtcagtcttgcaggccacggacgataatgggtaccttcttgcagaaatgatttcacttcttgggtaccacccggttaaagatgttgtcaaagcttgttcgggctgggtgaacaatcgaagcaaagccaacagaacgctggcatcaggggtagaa

SEQ ID NO: 571427 - DNA, 196 bp, Homo sapiens
gtactgtagatcgagcgcggtaccgactgcagtctgtgcctctcaactaaggcccagtagtgacatcaaccagttttttattctttgtttttgttggtcaatggggttgggtagttctccctcactgcagtgcatggtacaggctcctattatacaaagcaccccagggcatagttctgtactcaaaaatacaaag

SEQ ID NO: 571428 - DNA, 619 bp, Homo sapiens
  misc_feature (57)..(57): n is a, c, g, or t
  misc_feature (61)..(62): n is a, c, g, or t
  misc_feature (98)..(98): n is a, c, g, or t
  misc_feature (185)..(185): n is a, c, g, or t
  misc_feature (294)..(294): n is a, c, g, or t
  misc_feature (296)..(296): n is a, c, g, or t
  misc_feature (299)..(299): n is a, c, g, or t
  misc_feature (306)..(306): n is a, c, g, or t
  misc_feature (308)..(309): n is a, c, g, or t
  misc_feature (326)..(326): n is a, c, g, or t
  misc_feature (337)..(337): n is a, c, g, or t
  misc_feature (352)..(352): n is a, c, g, or t
  misc_feature (354)..(354): n is a, c, g, or t
  misc_feature (357)..(357): n is a, c, g, or t
  misc_feature (386)..(386): n is a, c, g, or t
  misc_feature (394)..(394): n is a, c, g, or t
  misc_feature (397)..(397): n is a, c, g, or t
  misc_feature (405)..(405): n is a, c, g, or t
  misc_feature (425)..(425): n is a, c, g, or t
  misc_feature (432)..(432): n is a, c, g, or t
  misc_feature (447)..(447): n is a, c, g, or t
  misc_feature (460)..(460): n is a, c, g, or t
  misc_feature (468)..(468): n is a, c, g, or t
  misc_feature (471)..(471): n is a, c, g, or t
  misc_feature (474)..(474): n is a, c, g, or t
  misc_feature (505)..(505): n is a, c, g, or t
  misc_feature (536)..(536): n is a, c, g, or t
  misc_feature (542)..(542): n is a, c, g, or t
  misc_feature (556)..(556): n is a, c, g, or t
  misc_feature (595)..(595): n is a, c, g, or t
gttgttttgggcacatcaatgttgccacagggtcctcgcagcagctctgccagttgngcanntgctgcaccgtgctcctcctgtaacggtgagggggnagtgcagccaagctcgctgcgcaggctccgctccaccatgcggcccagggcccgccgacagctccttcagcaagccgcacggtacgngagtaaccctccagccgcagaaaggtcactgtcagctcagatgagatggtggcccggcgcccgtcatcacggatgtgcaacagtaccccgtcggtcagcagcagcaaananagngggtagnanntgagaggagtcccggangaagacgctgncattggacttgaatncnatnaaatacagatcagccatcggctccgtaancgtgtggnctncctagatnaatggtacgattgtgcaganaggaatnttgcctgaattggtncttaatgtgaagntgttgggnttnaanttcccctgccgggtgaccttgccctgcctcnactggatgaagttggggtaaaagccggccancaacangcccttctacaacncctcctcctctatgttatcgttgcaatgggcggaagccnaggtgccatccggaggcttccccc

SEQ ID NO: 571429 - DNA, 663 bp, Homo sapiens
attgattttaaaaaaaaaaaaaattaaaaaaaaaaaaaaaaaaaaaaaaaaaaaaaaaaaaaaaaaaaaaaaaaaaaaaaaaaaaaaaaaaaaaaaaaaaaaaaaaaaaaaaaaggaaaaaaaactttgtggcccccttggcccaagcgatttttaaactgggccaggttttttcctgggggccgaatttggggccatttggcccatttccccttaaggggggccgtttaaaatttaatggcccgggttttaaaaaggtgggactgggaaaaccctgggggttccccatttaaacccctttggagaaaatccccttttccccagtgggggaaaaaccaaaaggccccgcccggacggcctttccaaaaagtggccaaccctgaagggcaatgggaattggaaggcgtaaaattttggtaaaaatccgcggaaaattttggtaaaaccgcccattttttaacccaaaggcccaaattgggaaaaaccctttaaaattcaaagaattaccccggaaaggggtggggggttgccccatttggaaacaggggcccctttttaaggaacggggcttccaccttaaaggggggaaaaccggtttttaagggcatggcccctttaggggaccctatcccttaaaaaagtttttgggggccaaggggcccg

SEQ ID NO: 571430 - DNA, 285 bp, Homo sapiens
tggatacactgctgcatttcaagtttattttctaaaaggaattcaagtttattagttccattccccacaaaatacatacatttctacgcatttctaagtagatagtttcctggacagataaccccagaccatgctggtgcacaggaatgggtcctgtctacctgtgcacaaatgagaccccccgtctacagcaaagcgaggtttccaccgcccaccccccaatttaaattcacagcatttcgcatggtggaaacagattcatgctcttgatttgtccactagttc

SEQ ID NO: 571431 - DNA, 190 bp, Homo sapiens
tatgactgagcttcgtgtatgactgagcttactagaagtgtgaaaactgtaggcttggattaagtgcgacagtgatttctatggatagtcatgtagaatttagaattgtgaagattgataagtgtagaagggaagggtaaatggttgatattgctagggtggcgcttcccattaaggtgctgagtagggt

SEQ ID NO: 571432 - DNA, 313 bp, Homo sapiens
  misc_feature (184)..(184): n is a, c, g, or t
  misc_feature (193)..(193): n is a, c, g, or t
  misc_feature (235)..(236): n is a, c, g, or t
gctaccgggcctgggtagtagaatggaaattaaaattaaagggggaaaaggataagatgcaacattggactgcttttaaaaaatgaacttgtcgggcatggtggctcacacctgtaatcccatcactttgggaggcttagcgtgggcagaattacctcgaggtcagagacgttcaagaccagcnctggccacncatggacgaaatcctgtcgtactactaaacattacaaaaatnntagccaggcatagtaggcgcacgctctgtatatcccagcgtatcccaggaaccgggggatagggtaccggagctcga

SEQ ID NO: 571433 - DNA, 102 bp, Homo sapiens
gctgcggacacggccgtgtattactgtgcgagagaagtccatgtacatacagtgctactgactgcaataggagaatcgcgctatgatatctggggccaaggg

SEQ ID NO: 571434 - DNA, 284 bp, Homo sapiens
  misc_feature (20)..(20): n is a, c, g, or t
  misc_feature (83)..(83): n is a, c, g, or t
  misc_feature (117)..(117): n is a, c, g, or t
  misc_feature (135)..(135): n is a, c, g, or t
  misc_feature (139)..(139): n is a, c, g, or t
  misc_feature (158)..(158): n is a, c, g, or t
  misc_feature (170)..(170): n is a, c, g, or t
  misc_feature (174)..(174): n is a, c, g, or t
  misc_feature (210)..(210): n is a, c, g, or t
  misc_feature (221)..(223): n is a, c, g, or t
  misc_feature (255)..(255): n is a, c, g, or t
  misc_feature (261)..(261): n is a, c, g, or t
  misc_feature (276)..(276): n is a, c, g, or t
tagtgggggctgcagcagcnggacccaggtgcggaagtacgagggcccaggtggctgaaggggccgtaaggaacatccaaccngtggggcacaggcagacccccgacctgacctggnccacccttctcctcttgncccncccctccaactcgcctccncttaggtctggnttcnccccgccccctgacctgagcctgcgtccttcttcangcactcacccnnnacctccggtggctcccccatctctcacgcgcnacggcnacgggcgcggatctncgggacat

SEQ ID NO: 571435 - DNA, 698 bp, Homo sapiens
taaaaccctcatcaataaatggaaacatacaaaaatagtcaaaccacatctacaaaatgccagtatcaggggggggtttcaaacccaaagtgatgttgggatgtaaagtgaaatattagtggggggatgaaccaaatagtgaggaaagttgagccaataattgacgtgaagtccggtggaagcctgtggttggctacaaaaaatgttgagccgtaaatgccgtcggaaagtggtgaagggagactcgaagttactctgaggcttgtaggagggtaaaatagagacccagattaaaattgtaataagcaggtgcttgaattatttgggttccggtgtgttttctattagactagttggtgagctcggggtgatggacactccctgagtgcgagataactacggagtgtgttaacggaggtgggacttctaggggatttacaccggcgtgactgccttgtggggggccagtgccctccatagttgggggggctaggggcataggcgggaggggtcaaagggctcagaaaaacatccggcgaagaaaaaaacacttcggaggtcacaaactaggattatcccgtatcgaaaggccttttgggacagcgtggctgtgtggacggcctgggaatgtgccccccggtgtaacatcgagcccacaatggcacacgggcacgcgtgtgggaacacaggcctcaaag

SEQ ID NO: 571436 - DNA, 196 bp, Homo sapiens
cacagcgctgggatactggacttgagcacgtgcccagactgtaatcctcattactagtcctttggagtctcatattacgctgctattgtgtccaaggtccgtgtctagctgggtggaggagtctagaccacaactttggagttcactcagtgcctcatcagtccatgtctagtctggctatcttggagctgaggag

SEQ ID NO: 571437 - DNA, 360 bp, Homo sapiens
  misc_feature (36)..(36): n is a, c, g, or t
  misc_feature (194)..(194): n is a, c, g, or t
  misc_feature (203)..(203): n is a, c, g, or t
tgcgtgttggctcatgcctgtagtcctaatactttngggggctgaagtgggcggttcacttgagcccaggagtttgagaccggcctggacaacatggtgaaaccctgtctctgcaaaaggtgcagaaattggccgagtgtggtggtgtgtgcccgtagtcccagctacctgggagggagtttgaggtaggaggntcagttaancccaggaggtcgagggcggtgagccgtaatcacaccactgcactccagcttggacaacagagcaagactctgtctcaaaaatgaaaaaaaagtataccagcactattgttcagcagttgggatacagtggacaaaaccagcaaaaagccttgccttt

SEQ ID NO: 571438 - DNA, 149 bp, Homo sapiens
gtccctctcatccccctgcctgggtatggtgtttgacacatcttcccagtataggtgccctcgtccctatagcaaatcatgaaaaggacccaaactaaattttgggcccccagaggtcccgtggggggaaaggggctttttggggggaa

SEQ ID NO: 571439 - DNA, 113 bp, Homo sapiens
taattacgtatgtcacttctaggagttagatggtgtcctgtcgtatatttaacgtctttcagccatttggagtttatttttggtgcatggtgtgagggtgtgttctcagtttc

SEQ ID NO: 571440 - DNA, 360 bp, Homo sapiens
aatctgcacattacactgaggatgagaaaggaaaaaaaaaagactcccaggctaatagggcatatccttccatacacacacagtcttcgctgtcctctacctctcgacaaaaaacaaaacaaaacaaaacaaacacacccataaatagaatggccaaggctaattaatggacaggaaaaagggtagcacaggataacatgcacatcctgccaaagaagccttcatctcctctggcctaatatagatagggtaactcaagtacatggatgggtcatggatgatagttgcaagataggataaatcaaagagtcatcactaaaatataattgtattctaaggacagtttgcgtgcaatgaagc

SEQ ID NO: 571441 - DNA, 1097 bp, Homo sapiens
cactccataacgctcctcatactaggcctactaaccaacacacataaccatataccagatgatggctgcgatgtaacgacgagaaagcacataccaaggaccgagcacataccaccttgtccaaaaaggccattctgatacagggataatcctatttattgacctcagaaatttttcttcttcgctacggatttttctgatgccgttttaccactccagcctagcccctacacccgccaattgagggatgggcactggacccacaaatcaggcaatcaacctccgctagattgcccgcatagaaagtccgcacatgctctaatagacatccggtaagtcactcagcatcatggagtagtcaatcagactagagctcgccataggtcgtatataggaaaagagcaactcggaaaagacgaaataaatataccatatgcagttagactatagtgtcaacaaattatgtaactggtgggatctctatatattaggcacatgcctcatcaaggcactacagcagatgaagtgtccgagattttggcttgtgcaccattgtgcccagatgggatgatgacgagagtgctaaaagattttttggtaaggcacacgaggggcttgcaaacaggaagtatttcaacgtacgattcatgggtggtacgaaagtattggctgcatctgattctagtctttgtatccggaggcaatttgaataattttcacttttacatctctaatcaatctacttcgaggagatcagatcggcgcgccaggctggaatacctgagtcattttcgcatcacttgtagggatatgacttattaactggtattgtttaccgaatctgactttgactggaaggaggggtccattggaatgcaaggaaccttgataccagcaactgatttaggatactaaagaggggacataatccggggggggagacacactcttggagccacgctggtaaaaaaatccgtttttaataacaacaaacgttggttgtggctgttcccgtgatctggctagttaaatggttatccagtggaaagacagtagaatatgtgtaacttttcagatcaagggaatctgttctgctg

SEQ ID NO: 571442 - DNA, 115 bp, Homo sapiens
caaatttgactgtgacttaatctaaattactatgtaagcacaaagtagatagtttcactctttaaaaaatccattactgtttgcattcaaagttgattaaagggtgtactgacta

SEQ ID NO: 571443 - DNA, 351 bp, Homo sapiens
ataaaaatatcagctaccatttaacggggcctgtccaagataaccagcatctctgcgatcatcggtgctggtctaatacttccacggtcatcctctcaacaacccctcgaggggcacatactactgtcatcatcccccacagtacggatcgtcatgggaggcacaaacaggtaatgtaacttgaccaaagacattaactagtcttgtgtcagaacacacattccaactcgtgcacgtgttttcaaatccttcacttgggcatgtaattgtatttcttcacatcttttcatgacacttaatcgttatctttttctcttctaaaacagaaacagggtcccgccctgccacctg

SEQ ID NO: 571444 - DNA, 522 bp, Homo sapiens
gtgccagtggtggatccccaggaggaggagcgaaggcgggcaggtggcggggcagagagatcccgtggccgggaacgtcggggcaggtgcgccagtccccgagggggttggccctctctatcctgctggatcttaatgatgagaacagcaaccagagtttccattctggaaggttccctgcaaaagggcacagagcccagtcctgggggcaccccccagcccagccgccctgtgtcaccctgcccggacccccagaaggggtccctgaggaggctcaggccccacggctgggcccaagagagagatcccgggggcataactgctggcaagcaccgacgaacccccaattgctgaccaaaggacggaagccttgttttccaagaaccttgcttggaaacgctggaggccccccgaagctttaccctggtctttgagccaggtgccaacctgttccccttgaaggcaagcccaagggttgaccacagaggacctcggagggttgccccccgactcaagcgcatt

SEQ ID NO: 571445 - DNA, 304 bp, Homo sapiens
actgactcctttaatgtctcttcatgtatctcatacatgcctttgacaaacatagtataggctgctggcttctggcattctgttatcccctgggtccttgcaactccagcctgattgctctgttcctcaatttcccttttattacaggagtttaaagcttctttatcgtcttccaattatgcaaactctattaatgcatatccctttaaatatgcctatttggttctggggtactttgattaaagttgctgtgctctaactcggtaacggagctcacattcgttatacctgtcgtagtctcttt

SEQ ID NO: 571446 - DNA, 121 bp, Homo sapiens
tcactggtcgcagcgggctcaccaagaccctggcttcccctatgcagccgagctccccctctgcatagatcccagtattcctttgccaaattgaccacaaaggatcctttctctgtttcct

SEQ ID NO: 571447 - DNA, 371 bp, Homo sapiens
  misc_feature (14)..(14): n is a, c, g, or t
  misc_feature (17)..(17): n is a, c, g, or t
  misc_feature (94)..(94): n is a, c, g, or t
caccttgacgagtncanaaacttcccaaagctcacccaaaatatgctccagaactggcaaattcccttctagcctcagatgcttcaatgaaatnctcacctttcttcttgcatactgaaacactagatttttctgagaataccaaaccccttccaccctctcacaaagtggctgtatattctaccctcctcccctgcacttcaggactcagaagtggagtactgtcctccttaatcctcattactattcctagattactaggccaccacttccctcacgccttagcactgattactacattcttgttatgcctggagtttggtccacaagtttggttccttttgattacatccaagttcaaaagtaaaagt

SEQ ID NO: 571448 - DNA, 489 bp, Homo sapiens
atatcttcctgtaaaggagagaaagaaacctatctctgatactatctcaaagacgaagggctaaacaagttgtctagttatgaagcaacaaaagatcacaagcagtttggaatactactgtctacgccttcttatagatttgagagacatacaacatgctgtcgtgaccagcggataatcctgtggtggacctggagacccttcaagctctctatgagaatagagcacagtcagacgaactcgaaaaaatagaaaagcatggccgatcttccaaagacaaggaaaatgccaagtctctggacaaacctgaacagttcctttatgaactgtcactaatccccaacttttcagagcgagtcttttgcatcctgttccagtccacattttcagaaagcatttgctcaattcgtcgcaaactggaattactacagaaattgtgtgagacattaaaaaatggcccaggggttatgcaggttctaggttaggttc

SEQ ID NO: 571449 - DNA, 114 bp, Homo sapiens
gcacaccgtgccacactgcatgggaccccagaatcacacagctccacccagccatgccctgtagagtccatgcacaccgtgccacactgctagaaccgccatgaatcacacatg

SEQ ID NO: 571450 - DNA, 1279 bp, Homo sapiens
ggtcgagccagcaggagcagtggttggaataggccctacgagacaaggaagggcttcaatcgatctaagcgagactgcaacggtaggatggccgccatgatcgtcgtctcgcggcgctgttagctgcacgcagggatgtatggtaggaaccgaggaccagtgtcactgtacggttggtgctgagaagcattagcattggtacctatcatgatgaagcaatgccggactcacttctccaaagctatgttctatccagaggatcctttactcagcgcttatcaataaagcagggcaaggcggatgataacatatgttgcgcactggggagaactacaacttgagggatcgcaggccgattgtgctagacgagtgtagcaaggccgctcctgttgagaggttgtaccatggtagcatgccatgaggttagctatcctgtgacgctggaaagcgctcaataaaccgatgatttctcgactcgtgggattagcagtccagaccatcggagggaaccgatacgccaatgtctgttgtctcgggcgtacctcattcgggaaattattccacttactgaattttccatgtcgggatgaaaattcccttgaagcaaacgagagcaacgcaatctcggggtggttggggaggggcttgggggcctcctggggcccaattccatttgccaaagagctccaagtgggtttctccttgccaggcacgcacacgatgcatgccttggattgggacacggaagattgggcgcgattgagccataagagccatttccggggaacgcggaaggttccattggggcatctctgggaaaccaacgtcaaggaattgggcttagggaaaacggaacgaaaggtaacaaaccgggagacctaccaagaaccttgggggcaaggggggccaaccaaagttgcaaacgcccacatccgcagacgaaggccaagcggtcggggactctccgtcgggaaattcccgttaaccctacggcaagatggaggaataagggggggaggaagtaccacagggggaaaggaaaaaacccaagagggctatccggcccgaaggggtcccacgacatgggcgcccgccaaggcgcagagagcaccccgggtgaaaacggcccaagggtggcgccacacagtgaggcaaggtttgcctgggggcccaactaaaggcaaggagcaagcgcccttccaagagtaggcggccatggggcagggacacagtggggacattcagccagaggtgcgcccagagggggcagccaggaagg

SEQ ID NO: 571451 - DNA, 1579 bp, Homo sapiens
  misc_feature (234)..(234): n is a, c, g, or t
  misc_feature (388)..(388): n is a, c, g, or t
  misc_feature (496)..(496): n is a, c, g, or t
  misc_feature (782)..(782): n is a, c, g, or t
tggcactaatgctgctttataatggcggcgcaatagaaaagtacaaggttttcacttagcctttgagcttactagaaagggtgttaaaagattgcccgctgtgacacttaccaagttagccctcttaattagaaaaagtgtaaaaaatattacaggaacacgggtgtggaaagtgagcctcttgaaattatactagaggggtgacaaaagaagtttaaacgtgccaacacccgngccactactcgatgtggtcacttgtgtttgtggagagaacaacatcgtggttgtgtggtccgtgggtgaatgaagtgggtttatatcttctccctttttaagagtgtgggtgtgggcacaagttaaacgagaacaaatatttgtgttctctccnccagaaaaagttttgtgccacatatctctctcgtgtgtgtttcatatcacacagcgtttctctatttctcagagttcaccgacagtggccccaagcgtgtgtataaancgctctgtgtacaggagaaaatctcctctcactgtgggagtagtatatttctccctaggaacatagtgtgggtcgctagtagggtgtgtcgccaatgtgtgtgtgtgtgctctgtagacagagcgctcctccaaagacacagcggcttttggcctttctctatatacaacgcaaatctccgaaaacgtgtgtgggtgtggagcgccgtatataatgtgtgcgttttaagacaagacgacacaaaagtataatttaataagcccagaggtgtgtgtaatcttccccnttttttcccggtaggtattttctccgccgctattataccacatgttcggaaaaagcccccattttttaaagagcatctcctttaaagagatctcccctttggtctcccacaggggtaaatttcctcgggggggcgtttctaccacaacaagctgttttggcgggggggcacacgaactgcggcgggctaactggttgttttacaacaacaagaaacaaccacagaggaaacaagagcggtcttctcctttgtgggcgaaaaaaaaaaacaaccctattctccacaaagagggttgcccccactataaaaaggcgccaaatttgggcgggggccataaatattggtttgcggaaacgaaggccttcccttccttttctcccgcccagaaaaagcaaacagcagtgatttttgtcccccccccacttggtgtgccgcaggctgtggaagcaaatctctcatcatcaacagaagagagtcttgttgggggcgcccccacaacatttatgtgacgctgcgttattacacaccagcgcggcttctctgggtggtgattaccaaacaacacacaactgatgacgtcccgcatggggtgagtcaattttatcacactccccccttgtttgtctccgcccccaaacaaggagacacaacggtgctgcccgtctccatagtttgttcccgccaaaacaatatatctacttacatatttgttgggttgctccaacaccaaacagaggcggcacaacagatgagtagtgttgaaccaccgggtgattgctcacccttctgattgataa

SEQ ID NO: 571452 - DNA, 412 bp, Homo sapiens
gagtcagagtggagagctcagtaagccgtctgatgcactgctgctggcggtagccatcgcggcgcatgttgccctcgtttttgcggtatccgttccttctggatctcggaagtagcccccgtaggtgccctgcttgtggtcaaacacccgttcgttgttctccaccaggctgcccagcttctcggccagctgcagagccaggttctgctgggcagtgggctcagtgcggtgcatcaccactgtctgtgttggctggtccagggaggccatcagctcctcattaatgatcattttgctgatgatggagtgcacagtgggcagatccagctcaaacatgtctgacagcgtctccatgctgatggagtcatagacactgctgtaggtgaagaggtaggtcctcagtgactcttcc

SEQ ID NO: 571453 - DNA, 407 bp, Homo sapiens
  misc_feature (115)..(115): n is a, c, g, or t
  misc_feature (135)..(135): n is a, c, g, or t
  misc_feature (143)..(143): n is a, c, g, or t
atcgttcgtcagtcgagctgctctaagaagggaacccccaaatttagttcaagccttaagcacaattaattaaaagtgaaaggtaattgtacaagcagttaatcacccaccatanggcatgattaacaaagcaanctttcccntcccccgagtgattttgcgaaagcccccttttgcccttcaggctgcgttagcatgttccgaaattctagaaaggcttaaggcggccgtacagaaaaaggaaaaaaggccacaaagagttccctctcacttgtcaggtaacaaagtaaataaaacagcagcagcaaacaagataagaatgaaataagagaaacaaatgaaataaatatggtgttgtgcagcattaaaaaaaaatcaagataaaaattaaatgtgagcaaaggaaa

SEQ ID NO: 571454 - DNA, 352 bp, Homo sapiens
tactaccattaacaaacaacccccacaaaaaaacaattataattcaatatcttccatactaatcatgttacttcttacttctatgtctttagctataatcatcattgtactttgtaaattcttaattaaaccatttttaaatgatcaaaattgttcatttatatctccatttgcttatttagaaaccccttacatttgtatggataacatcagagaaaatgaaatatccacaaaacgtacatcaatcatttcacttacaccctggaaaccaagcaaaagcacacttttagcagatgacttagaaattaagttgtttgaatcaagtgaaaacattgaagactccaacaacccc

SEQ ID NO: 571455 - DNA, 184 bp, Homo sapiens
ttttaaaaaagttttaaagttaaaaaaatgttttttgcagtaaaaaaaaagttttttgggccggggggggggggtcacccctgtaatcccagccccttgggagggtgaggggggaggatcattttaggccaggagttttaaacccgcctgggcaaaaaaaaaaaacttcctttccagggagaga

SEQ ID NO: 571456 - DNA, 438 bp, Homo sapiens
aagcgcacgatggcgtctgctgtcaaacaggccactcggctctaccaatcagcaggatgtgggtggggccagataagagaataaaagcaggctgcctgagtcagcactggcaacccgctcgggtccccttccacactgtgctttgttctttagctgtttgcaataatcttgctactgctcactctttgggtccacgctgtttttatgagctgtgagactcacatgaagatcagcagcttctttcctgagtggagaccacgagcccaccgagaggaaggaacaactccagacgctctgccttaagagctgtaacactcactgcgaaggtctgcagcttcactcctgagccagcgagaccacgagcccaccagaaggaagaaactcccaacacatctgaacatcagaaggaacaaactccggacgcgccatcgtgcgctt

SEQ ID NO: 571457 - DNA, 296 bp, Homo sapiens
tggcattggaaatatttcaacacagcaagtacaaagtagatttcatagagacgaaggcatctcagaaccctgagagaatagtcaagctacacagcataggtgacttcattgatgtgagtgagggccctcttattcccagaacaagtatttgtttccagtatgaagtgtcagcagttcacaatcttcaacccacccagccgagtatcatacgaagattacagggtgagtctttacctattcacttaagagcacatttaacaaaatgggatacgctattggaaagatctcggaaaatg

SEQ ID NO: 571458 - DNA, 247 bp, Homo sapiens
gacctagaggatccggtaggccggagacagagggaggggacgccaggaagatttaaggcctacggaccatcagaagtgcggcgaccagaggccattagaggtggtggtaacagcaggcactagaagtacgtggtacccagaggtgctacggggagctgacgccttccctgctgaggcaagggaaaaccaatcatcttgtgcgtcctcggcccttaccggggtaccggaggctcgaaattcggtaaat

SEQ ID NO: 571459 - DNA, 398 bp, Homo sapiens
ggacgagcatccttaacagccaaagatggtaaaggcatccttgactcccacacaatcggtaatagggcctatggcttccatgggccaaaggtatctggacacaaaccagtctggtcctttctgcagatctccatagccactgggactacggtggccgctcccgatttccggttctttcctctctccacttccttcggcatccagcggtcaatacggtcatctgaaaatgcagatcacatggctcggcccggcttccatgactacttagaatacagctcatctccagtatggtcggcggggtctcagttcataccactctcggtggtgtactttgctccagcctcactggaagaaaaggttggcttgctataaacactggtaaggatgctggtgcgggg

SEQ ID NO: 571460 - DNA, 946 bp, Homo sapiens
ataaacttcgccttaatttaaataatcaacaccctcctagccttactactaataattataacattttggactaccacaactcaagggctacatagaaaaatccaccctttacgagtgcggcttcgaccctaatatccccggccgtgtgtccctttctccataaaatcttcttagtagctataaccttctaataatggatctagaaatggccctcctttaacccttaaccatgagccctacaaacaataaccttggtgccactaaatagtatgtcatccctcttataatcatcatccatagccctaagtctggctaatgagtgactacacacagcggactcagactgaaccttaaaaaaaaaacaccccacatcacccaaaaacttttgtgcggccgccagcggcaccccgaagaaggctcatcaaccccctcgcgttgggcccgcgggccccctaagagacaacacaacaccgtggcccaaacgggtccacacaagaaataacgcgggacaggacaccccagggggcggaatctccccaccaaaacaaaaaaccgggcgcggggacaacccggccttgttctcggacaccacccgaagtggcagtccagagagcaccaaacggggtcacacaccacgggcgcacaagcgacagaaataataccacagctcggtcggtgagaatctcacaccgaaacagcagagcatatcaaagcgcagcacaacacaacggaagccagaccagggaccacaaagagccaacagcaggaacagaagaagcggagcaaagagggcaaagcacgcacgacagcgagaaacggaagccgacaaggagagcgagaacacaagagacaggaaccagacacagcagaaagacaggaagaaagagcaggagagaacggagaaacgaagaaaacaagacaagaaaaaaaaaacgggcagaaacag

SEQ ID NO: 571461 - DNA, 991 bp, Homo sapiens
ttttgtatgctaaattcatcagcagcgctcagctcatactgatattttaccgtgagcaggtcgctaaagataatgatgttagccttttattgccaggttctagaccattacatacacacatcaaactcctcgattccacagacacgctgcaatacggagtattgacctcatcggcattgcaacacggatcctataattccttcttatcagctgatcctgcttccagcgaataataccgtcgtccaggacatagtgaagccgataaccgaaatagtaccaatacacaattcatacagttaatgatcattaaatgtgccttagttagcattatcaacgtaggacatagccccacatttcgacatctcctgagtccgcgagtagggttaccctaagggcacccgatctaatcatccggccctgctttcttcatctacattgaacatacacaactaagcttcgctatttcgaatcgattattatccatatctctcccatcattaagacgtaagccattgcatctcgtccacctctcctgctaatctttatcctatcgattaagcagtgccgtttgagcgtgggcattactacccatgagcgcagctgacgcgataaatcttcagcatactaccgtcaattaccgcgacgagtgatggatgcacataattagcgaaggtgccttacctgtagcaaacctcataccatgagatcatctctgttaatttacctatttagtattatccgtaaacgtactaccgtcattcctacatagtcaatttaaactccaggacaacgagcctactactatctcgctaagtgagaaaaagctagcaatgagtaaggacccttgatgcgattcaccttggtctcctaggaggcctgccccgttaacgggttttgcccaatggcttatttgagactttccaaaacaatagctttaatccgaacatataaagccccataacctctttagcttaatttcaagggaattatc

SEQ ID NO: 571462 - DNA, 384 bp, Homo sapiens
gagatcacatgcggtttaattgtgggaggctgagagcagcatttttaccaaattggtgtaaaaatgaaacggggtccagacgtgtacactgacagttacagtaaatttcaaaatccaagcagcaatttgaatcatttcttgaaaaacaaacacagacaaacaccaaacatggagttggtgcccggcgccgggcataagggcagcaccccacgggtggctgtgcggggggccgctgggtgtggccggggaaatgggggcagagtgcgggacccacacgctgcctgaggagtcttggcagggtggacaggcctgggggtctctaccagcaatgcaataaatatgcaaatccaagcacagaaagaccaagcgcagaccccacgggcg

SEQ ID NO: 571463 - DNA, 373 bp, Homo sapiens
aggagcttaccggttagaggaggaagcggaaagtagtttgagtaactacttggttcatattaccccccttttgttctctcagtttctcggcccctctaccaatagggcagtagcctcctgccctggatgggtataaggtgggcttggtccaacaggttcccagagggtacatactcctttctggggagagaatgctccctaccatatagttgacagtggttaggaactctccctttccctacctaccttccttttaatagcagaattcctatttttcccttgattatgtgtatggatcaccctgcaatcctattatgtatctgagtgtgtgtgtgtgtgtatgtgtgtgttatgggggtggggataccagggg

SEQ ID NO: 571464 - DNA, 425 bp, Homo sapiens
cgtcgtgaggcggcatgggaatggcctggctgcctgtggggcgttcaagaagagcagcaaacccaaccggaagtcgggtggaatatccgctcccttggggacctcacccaggccctactgggccgggatgttctggctcaagacacactcgcacagttcacagactttggagcctggcctgggggaagttttggagcctgccccgggggaggccgaggttggaagaacccttggtgggcagccagggcaggttttctggcacctggcacatagtaggtgctcaaaacatgtctgttggaaccgaacttgccacccctaaggcagccctccccatctttggatgtctcaccttgggggtctagaaaagccccgctgcgcgaacctgcgccctttccttgtactctctgctttgaccttaagcagaa

SEQ ID NO: 571465 - DNA, 114 bp, Homo sapiens
ctagcctcattcaggtcttgcttatgtcaccccatcagataccctttctggaccactgtatctagaatagcatcatctatgctccttattcccttatctgatcatccttatgtg

SEQ ID NO: 571466 - DNA, 123 bp, Homo sapiens
tttcatcccgctcggtaccctaggctaggtgggaggattacccaatccctgtggagtcgaggctgcatgtgagctgcacaccaatgcactccagcctgtgttgagccaagatcacaccattgc

SEQ ID NO: 571467 - DNA, 1411 bp, Homo sapiens
  misc_feature (175)..(175): n is a, c, g, or t
  misc_feature (313)..(313): n is a, c, g, or t
  misc_feature (943)..(943): n is a, c, g, or t
tggtcccctttaaaacaacaaaggaaaaaacaaataaccaaaaatagacaatcgaggctctacacccgtgcggggttcccgtaggacagtgctgcatattgaagaaacgcggtgcagcagccccccaaaggcagacgcggcgcgcattgcagaggtcagagcagactccaggcangcatacatcgggcctccagtggcctcctcgcggccgacaggtgagatgcattgcgttgcggggagacgccggggcgcgggtggcgcccaagacaatttctcacacggcaggggactggcctcttcacaaagaagcatnttccttcctatcacccacacgggggggcgcaagggagctcagtgttcgcccttgagaagtgttgtgtcatatcaggatgcccatatgcatttcgtagacgacaagtgttttcacgaagggcgtcttgaatcgagtgatggaagcgcgtttccactttcacgcgagcgcgtgtgtgtgaccacttcgaaagatgtggggtttctcccacaaaggtgagagcgcgttataacgcgtataatatacaaggggggctctttaatcacacgaggggatctccagcggggtgtgagacacaaaagtcgttgggggacacaggtgctggttttgatgaaggcgtaggagagagttactccgatgcaagcagcgcctttcactatctgtttccgaagagtacacagtttttccgaaaccacatgtgctgtgatgggccagcgtgttctttcaaatccacgttcacgagaaggcggggacaacaggcggaggccttccacggacgcccacaatgttgacctcagatacgtagtgagaacccccccagggtgggtgtggtgaccaacggcttttgtgggatatttgacccccggggggagcaccccaaaggagaaagtaccgctctaccgaaaacactgngagggggggacataaccagaagggatccccccagacggcagaaataaacacgggggggtattagcaactcgacaagaggtgtccccgctttacaaaaaagggagtcccccatcagaggagcgtaataatgtaataccagcagcaagcacgtggggcatccgcacggggcaaaaaaagctctccccgaaggggagggcgcccagagtgagaagacctcgtgtaggacaaccctcataacacacggaggggggagtagaacaaacgcgccgatgtagagaactccccagcagatgtgagaccaccaaagtgcaaaaatgtggggcgaccaactcggtggggccgccaaaaacatgaaacaaaaacaggacgaaggaaataatagtggcgggcacagacaccacaccaccagaagtggtgcgcccacaacaagagcaaatctccccacgaaagggggcgctctttcaccaa

SEQ ID NO: 571468 - DNA, 888 bp, Homo sapiens
  misc_feature (1)..(1): n is a, c, g, or t
  misc_feature (98)..(98): n is a, c, g, or t
  misc_feature (123)..(123): n is a, c, g, or t
  misc_feature (131)..(131): n is a, c, g, or t
  misc_feature (133)..(133): n is a, c, g, or t
  misc_feature (139)..(139): n is a, c, g, or t
  misc_feature (144)..(144): n is a, c, g, or t
  misc_feature (155)..(155): n is a, c, g, or t
  misc_feature (235)..(235): n is a, c, g, or t
  misc_feature (240)..(240): n is a, c, g, or t
  misc_feature (283)..(283): n is a, c, g, or t
  misc_feature (287)..(287): n is a, c, g, or t
  misc_feature (294)..(294): n is a, c, g, or t
  misc_feature (302)..(302): n is a, c, g, or t
  misc_feature (323)..(323): n is a, c, g, or t
  misc_feature (393)..(393): n is a, c, g, or t
  misc_feature (396)..(396): n is a, c, g, or t
  misc_feature (423)..(423): n is a, c, g, or t
  misc_feature (458)..(458): n is a, c, g, or t
  misc_feature (476)..(476): n is a, c, g, or t
  misc_feature (486)..(486): n is a, c, g, or t
  misc_feature (488)..(488): n is a, c, g, or t
  misc_feature (490)..(491): n is a, c, g, or t
  misc_feature (503)..(503): n is a, c, g, or t
  misc_feature (515)..(515): n is a, c, g, or t
  misc_feature (517)..(517): n is a, c, g, or t
  misc_feature (533)..(533): n is a, c, g, or t
  misc_feature (577)..(577): n is a, c, g, or t
  misc_feature (703)..(703): n is a, c, g, or t
  misc_feature (721)..(721): n is a, c, g, or t
  misc_feature (731)..(731): n is a, c, g, or t
  misc_feature (733)..(733): n is a, c, g, or t
  misc_feature (747)..(747): n is a, c, g, or t
  misc_feature (750)..(750): n is a, c, g, or t
  misc_feature (754)..(754): n is a, c, g, or t
  misc_feature (764)..(764): n is a, c, g, or t
  misc_feature (766)..(767): n is a, c, g, or t
  misc_feature (784)..(784): n is a, c, g, or t
  misc_feature (805)..(805): n is a, c, g, or t
  misc_feature (813)..(813): n is a, c, g, or t
  misc_feature (881)..(881): n is a, c, g, or t
ngcgagccgggctgcgggtgccaaacggttcccggcggggggcaggggacggggcgccgcaggaggccgggactcctggacggaggagccccaaggangcccgcctgacgactgaccagttgncatggcancntactangaganactagaagtgncgcgaagtagcgtccgctgaatgacaatcaagaaggcagatatcggcgcaaggctctccaatggcacccagacaaaaacncaganaataaaaagtttagctgagaagaaatttaaggaagtggccgangaanataaaangctgtatnacaagaaaaagagggagattnacgaacgctatggccgggaagggctgacagggacaggaactggcccaatctcgggcagaaacaaggcagnggnaggcactggcttcacctatcaccttcngcagcacccgaggaggtcttccggagaattctttnggagtggagacccttttncagaactctntnannacctgggccccntctcagagcttnanaaccggggttcccganactcaggccccttctttaccttctcttcctccttccctgggcantccgatttctcctcctcatctttctccttcagtcctggggctggtgcttttcgctctgtttctacatctaccacctttgtccaaggacgccgcatcaccacacgcagaatcatggagaacgggcangagcgggtggaagtggangaggatgggnanctgaagtcagtcanaancaanggtgtcccanannacctggcactgggcttngagctgagccgtcgcgagcancagccgtnagtcacttccaagtctgggggactcaggtccaacagaccctgcctcatgcccttggacagcgactctntgaggat

SEQ ID NO: 571469 - DNA, 1013 bp, Homo sapiens
acaaagagtacagaatcatctcagttacactagaagctctgcaacatcttagtaatctgaaaagtcttgacctgtgtaacctgtgagatcacacaacctggaagattatagagaaagtatttttgaactactgcagcactagtcacatactgtatgatggagtttgactcatggaggattatgcaagacgccgtgatcgtctgagacagtgaggagtgatgaggatgcgcgatgaaatatgatggacatcatggagggaggataataagaaggctggtcctagcgtgaagtattatgaggtaagaggcaggatgcagagggcgaggaggatgaggcatgaggatgaatgatgaagatgaagcatgttccgagttggcagagtggaaagaggaagtgggcctctcatacttaatgaaagaagacattcaggatgaagaagatgatgatgactatgttgaagaaggggaagaagaggaagaagaggaagaaggaggtcttcgaggggagaagaggaaacgagatgctgaagacgatggagaggaaagaagatgactagatcattctaagaccagattctctaatgtttctgggtgtgcaatagagtgatcacatctttgtttcttcatgtacgatagctatccctacagaagataatgtgtaactttttataggaaaagtgtggtttactattttttgccttatcattccaataagaagctagtctgttactgatctctggtctgtcgacgaaaactttcctgaactccatgtggacttccctagcattatttagacttatcttttaaaattccagcttacgtataatcattttaggcctattaaaacttatccttttataaaaacaaaaaaaaaaaccaacaacaacaacaaaaaaagagggggaaaaacccagaggacaaacaccccttgtaaggctctggtaaaaaaacgaggaaacagtgggaaacagaccgagcacactggaggagcacccaaacacgaaaaagagaagt

SEQ ID NO: 571470 - DNA, 511 bp, Homo sapiens
tttggcttaggattggcttggcgatgtcgactcgagtcaccaggtcactgcggacgaactgcggatccgatgtgtgggcatatggggcgatgtcgactcgagtcagtgcggatccgatgtgtgggcatatggggcgatgtcgactcgagtcagtgcggatccgacgtgtgggcgtacggcttaggattgacttggcgatgtcgactcgagtcaggctgcggatccgatgtgtgggcatacgggcggatccgatgtcgactcgagtcagtgcggatccgatgtttgggcctatggggcgatgtcgactcgagtcagtgcggatccgatgtgtgggcgtttggggcgatgtcgactcgagtcagtgcgaattcgatgtgtgggcttacggggcgatgtcgactcgagtcaggctgcggatccgacgtttgggcgtacggggcgatgtcgactcgagtcagtgcgaattcgatgtgtgggcgttcggcttaggattgacttggcgatgtcgact

SEQ ID NO: 571471 - DNA, 131 bp, Homo sapiens
tgctccacgctccttccttccttccttcctttctcttccttccttccttctttcttttttctttctttctttctttcttactttctttctttctttctttctttctttctttcgcgatgcgtctccctctg

SEQ ID NO: 571472 - DNA, 257 bp, Homo sapiens
tgggcgtggtggtcccccaaataaaaaaattaggtgaaaggcctgttttagcccaggtggcataggttgcagtaagcttaaattttcccccctccacttcagcttgggcaaaagaacaaaattttttcaaaaccaaacaaacaagcatgcaaggatatttgggtaaaaaggtttatagcattggttttaatagcaaaaaatgaaaaccagtttaaatgtccaataggtggcagggtaaataaattatggtccctcca

SEQ ID NO: 571473 - DNA, 191 bp, Homo sapiens
gtcgattagcaggcatccctttttctcctcctttctcggtttctgtttctcctcttcccttcctcccatccccatcgcctggctctcatccctgccctaggtatggctcgcattgactccgcccactcaggcagaggtgaagcaccaagtcaatctatatgtcctcattacatgccatgggtcacgagctc

SEQ ID NO: 571474 - DNA, 283 bp, Homo sapiens
ggggggggggaacccctaaaaaaaaaaaattttttaaaaattggggggccccccccagccttttcccccattttcccctaaaaaagtttttttgttaaggtcccaaaagaaccaattttaaaccaaaaaggtgaaaccatttttcccccccccttttctccggttcaggacccaaccatgaaaccccttttggggtatttcaaaaatttttttttctttttttcaattccccaatataccccccctcaaaaaaccttttttaaagtgggggttggtggggcca

SEQ ID NO: 571475 - DNA, 1268 bp, Homo sapiens
ttggggcccctcggggcgtattctcccgctccctgggttttgctctagggccccgcggggctgtgctacagtgtttccacgacgcggtatctccttttttgtgcaccatttggggcctattgtttgggggtgcaccctctagagcgcccacgtgttggtgacaaagtataccctcgctctgttgttcccgttctccgcggatttttccccggggttcctctgtcggtgtcgaccccagtcgccacgtggtgtcttgtcttccgccggtggagttttggttccccgcactgagcacagcccgtcctccgtgcttttgtgtttccgcgccggggcttattttgcgccctaattggcttgcatctctcctcgatgcccacttgtgggcgaaccctccggcgtttctggcgcccgtgaatttggggtgggctttctaaatctccacctcggggtcgtagtgtccgcggtggtgtgtgccgacccaccccttgggtcggcgtctcgcgaggggttggatctccccctcagggctgttgtcccccccccggggggtgcttgcaatatccccaggcaaaaccacaatgttttgttgtggtggaaaccaccggggcacaaacaaaagtgttgggcacgaatctccaggttgtaatcacacggggggatggcccactctggagaattgatatattgtcctgggaacgcgttgtgaaacacgcggtttgttctgcgctggatgtctgctataccgcgcgcgtttttgttggttatagggaaatcgaattgttggtgtgcccccccctgtgttgcaataacaccgcgggccggcgttgtggagagtttccacaatgagcacaactcttctggaaacacacgcgcccggggtgaaaccttctggcgcgcgcgccgtaacggacgaacgaacttgttttttgtcgggcccctgcctgggcacacgagatcccacctcgacaggcacaggcccagagttcaccgagggcaggcccacagagcgcatttgttgtgcgaacccctgtcgggagtccggcggaggtgttcggattatagatcgaccaagaaggcgcctgggttcgcgcttgggcttctatacctcctttttttttttcgcgagatgtaacccacagattcgtacggtttgtaaaacgaagtattgctggtggtagggccgagggcccagccccaatttaggccgggtgcgcccggggccttttactcccccttttttttacccgggaaaatgtttttatgggtta

SEQ ID NO: 571476 - DNA, 1335 bp, Homo sapiens
gctcccaacacgctgaaacccgattcctaccgggtgacgctgagacctgtacctcacccccaatgacagtgtgcctgtacgttttaagtggctccagcaccgtacctgtttacacctgcaaggaggccactgacgtcatcatcatccacagcaagaagctcaactacaccactacagccagtgtgcacagtggtgtgtcctgcgtggtgtgggaggctcccagacccccgacattgacaagactgagcttggtggagacacaactgagtacctggtggtgcacctcaatgggctccctggtgaagtgacagccagtatgagatggacatgttcgacgtacgagggggagttcggcagatgacctggcagggctatctaccgcagcgagtacatgctcgggcaactgtcagaaaacgtggtggacagtacacagactgcacgctgcgatgcccggaacgtcgcagcgcagtgattcgactgacgcgcgggcctgaagcggcgacggacggagcactcggcgcgaagtgcaagcccaggaggaaaccggacaggaccagtggaccaaacaaggcgtcacacaagagggacgcagagagcccgcgagagagcgagacagagacccaagcgggaacaggtcacctgcagagaccaacaagccgaaggcacacacagaaatgtccacgcgtaatagcgatggcacaaaacaagagaacacgaacacgcacgcaacatacggtgtgaggaacgcgaggaataccaaagtggtgtgcctagaacaccggactcagggaccggaacaccgagagggacgaataggacggagcgaccacgcggaacgaaagaccatgcccccggtgaacagcggatgaaccggcagtgcgctcccaagtacggaagacaccgacggagcaacgcgacggccgccagaaggcacgacaggccaataacacaggagcccagcacagcacacccgagcccaagaacataggcgacaggacggacaagccagacagacggacaggatggaagcagttggaaacaaacgtggattcaacagtgggggcacacctaacaccgggtgacaccaacggaccctaggccggatggagagaagcaccgaccagggggaacgcgcagacacagggcacggaaagcaaagagaagaacagaggagggcaaaggagcgaaaatggaccaccacaaacgcggggtaccacaacaacgaggcagacgtgaaacacgggtagagcacctaaaagggcgaacgacggaacactgagggaaacacagcaggcaagagcgaaggcagaacgggcaagctgacgcgagacaaag

SEQ ID NO: 571477 - DNA, 176 bp, Homo sapiens
gtgagaagtgacttggttctggagacatatgaaggaagatgttcaggcaggccgggcacagtggctcatgcctgtaatcccagcaattttagaggctgaggtgggaggattgcttgagctcaggagcttgagaccagcctgggctacatagcaaaacctcctctctacaaataaaa

SEQ ID NO: 571478 - DNA, 101 bp, Homo sapiens
aaagcctaattacgcatcatctcaatggtgaaaagctgaaagaattcctgctgagatcaggaacaagatgaggatatcagctctctccaatactcttcaac

SEQ ID NO: 571479 - DNA, 1535 bp, Homo sapiens
gttcctgtgggaagggccctggagctggggtggtgccctgtgtgtgagccctgctgcgagttccccatttccatttgtgaacaaagtgaaatgtcttgtctcctgagtgcatctgtcactcccagtgcttggccacatggaatgctggtggctgctgtgtgtgtgcctggctgcccctgtgagaaatgttttgttcgctgcctgtgtgaccctctgtgtgcatgtgcctgaatgtgttgatccaatgcctccctgctgtgtgagaatgctgctgtacgtctcctgggtgcatgtgtgtgtgctgtgaccaaaactacttgtgatgttcattgtgtgctgccatggtggcttgtgtgtggggcgtgagtgtgactgtgccagctcgagatgtgttgtgagatgcgccagtgcagccctgaacccctcacagccacacacctccattcccacccccacaccacgcacaaacaccccacatacagagcgcggccgacgcgcccgcccacgggcacgacaacggagccacgccagcccagccatacctggtcacgcgacgcagccgccccccgcgcacagcccccccagcacgacacgcgcgcaccgaccttcgcccccccaccgcaggctacccgccccgcacgcagagcagacacgagacaacacggccccaagcaacacaagaagagaccgcgcaaagacgtgagaggggagagggacagtcacgaaccaaccaccacccacacaccaccagcccggtacgagcaccagctcctcaaagcaacatcaacacaaggacaagcaaacaccacccagcagcagggaagcaagacgaacagacaagaagccccagacaacgcagcaccaagcagaagcggcgagcagagcgcgagccgccccacacggagcccacacgcgacacagagacccacccgagcccacgcggcaacccccgatagcgcccatacgtcaccgcaggccgagcctagccaacagggccgacccccgccgtagccacccgggcatcgagacccacacgagagtctgagcgagacgctgcccgacgcgaaggggctagaaggaggagcgtctaagtagcctacatcgatctcgacgagcagtacaacggccatgcgcggagtacagaaccgcagaagacccagcaccccagagcgcagggctgcgccagcacagcgcgacggcaccacacggcggtggatgagccggcaagaggcggaggtagctgtaaaaggaccctcccccatccacccactcacatcccaaatccatctcacccaatacccccacccacacaccagctatttggtcacagctccaccctccctcactccactactcactccaactactaccaataacctctgaacacattaccactacacacacacctaccacaccaactacacctcaccctgccaacactccactcccacctacaccccccccccccctttccttctctctccttcctctttctcttcacccactctcccacccctcctctcaataactactcc

SEQ ID NO: 571480 - DNA, 788 bp, Homo sapiens
tcagcgcatgggccggtaaagacatggattgcttgcgtgagaagtccgcagacggagcgcgacgaagcgcgctgctatatcttatcccgatcgacagtaagctgctgtcccgaacggtcggctgccgcttaggatcaatggaacaatcaattgattacatgcggaccgttacgaccatccctagagggatgtcgcattcctatacggaggaacagaatcttgagaaacgatctgttctgatccattggcctattgtcgtaagaacgctaagacctagaagtcgctgtaatacgaagctcattgctcgcggccgaggttctgcgtcgatgcaacatgcttcatgaacgctcgtggagatctgacttgtcagatcgaagtgagccgctaatgtggcgagaaatggctatttgacactgggtttgtaaagcctagtggtgtgggtggacagcacggtgctcattaattgtgtgacgaacaagggaaaagaagccagtagaagcttgaacgaattgacacgaatacgtgccagtacaagagagaagatgacaacacagaaagggactcaagcaaacatcgtaggtaggattatcgtaagactctggacatacgttcggaggcaggcactcaacgtagaaatgggcaaggcattgtcaaagtgaacaacagaacgtacttggaagatctaggggcacctatacggacacaagatgagatgtacaataagacaagaaacgcctagacaaaactaagagaaggcatgagagagatttaacattcactgccttgag

SEQ ID NO: 571481 - DNA, 385 bp, Homo sapiens
  misc_feature (297)..(297): n is a, c, g, or t
  misc_feature (374)..(374): n is a, c, g, or t
  misc_feature (385)..(385): n is a, c, g, or t
ctaggcatggtggctcatgcctgtaacccagtgctttgggagcctgagataggaggatcacttgaggtcaggagttcaagaccagcctgggcaatgtaatgagactctatctctacaaaaaatttaaaacaaaacaggctgagcatagatgtctactggggaggctgaagctactggggatgccgcaggaggatctctgttgcccaggctggagtgcagtggtgcgatcttggctcactgcaacctctgcctcctgggttcaagcgattctcctgccgtagcctcctgagtggctgngattgcaggtccccgccaccacacctggctttttcttatttatttatttatttttagtagagatggggttttgccgngttggccggcn

SEQ ID NO: 571482 - DNA, 117 bp, Homo sapiens
aactgtgctacggtgaggaagatcttctcagagtgctattcaggagttcttaacccatatgccagagtacttgtaggagccttaaagacgacagtattacagtctactgggtactgc

SEQ ID NO: 571483 - DNA, 287 bp, Homo sapiens
agctatcggttcaacgtctatgtataagcctgaattttatcccataggtctataccttaagattttgtggccatgcacagtggctcatgcctgcaagcccagcaccttgggaggccgaagcgggcggactgcctgaggtcaggagtttgaggccagcccggccaaaatggtgaacacccatctctactaaaaatacaaaaaaaatcagccgggcgtggtggcgtgcacctgcaatcccagccacctgggaggccgaggcaggggaactgattgaaccggatagcttg

SEQ ID NO: 571484 - DNA, 500 bp, Homo sapiens
agagagatagagagagagagagagagagagagagagagagagagagagagagcgagagagctatagcctctgcgagagcgtctcctctatgatgccccatggagctcttttgcccctcctgccatgtccggcctcccctcgatgctaccatctgtgacccacttatcctctctctccatccactctctctgcttcatccaccatcttgtacttcctcctctcccttgctgttctatataattgcctgttgtttgctttaccttttctcctttcctatttcttctcttttctcccttctggcgcttcccttttccgattccctcctctctcgtcctcttttctccccactctccccctttctctcacctctctttctgtctatcccccttctttacccctcttattctcctcccttcacttcctcttttccctcctgcctttttcccctccagtccctccctttccctctttccactacctccctctcttcctttccctgc

SEQ ID NO: 571485 - DNA, 168 bp, Homo sapiens
acccggaatgcataaggttatgttgggaaactctctttgtattgatttatatgtggactgggttttagtttcgaagtgcacatagtcagtatctctctctcacttttctactgatgtgcccttagaaacgtgtgcaggggatgggttgacattcaacttgctgaatct

SEQ ID NO: 571486 - DNA, 139 bp, Homo sapiens
tctagaggatcccgtatactggctccacatgcctatgctgctcggggggcattggtttcacccggttccgggcttacgacacacagcgggtccgggggaaccggaagcacaccatcagccccgaggaccacatcacggg

SEQ ID NO: 571487 - DNA, 766 bp, Homo sapiens
agactgagttgcacactggcagggagaccaaaaacattacttccatacttgtgtcattgattcttgggttttggagcagagtctcagtctgtcgccgaggctggagtacaggggcggatgatctcggctcactgtcaaccatcttgcctccctggggtgtcaagcgaattctcctgctctcataccacccaagtagctgggactcacaggtgctgtgccaaccaacggacctcaagcgtaaagttgggtatatatgtatgaggtggagcactggggttattcaaccatgtttaggcgctagtggactggtcatcgaaatactcctgtacccgtggcaggagtactgctcctagccctcatgccctcccacataagtgcgatgcgtgaattagcagtgcgtagatgccaccgggggaccttggcctagtctatatagtagatatcttaagtaagttacttgagttctaaccaatcacagttttagattacatatccttcgtggaaaaagtctgagaaacatgagtctacaggaacatacagcggcaagaattatacgatataagagggtagactgcaactgtcaccgtagttgcggtcatccttcaaagtgtgcaaacgtatgacagtgtatatgtcgtcatggctgcaagtttttctgtgcggcaagttaatctttagaaaagacccccaaaagggctttggtggactggtaaggcacgtggtcatggatccacaggaaatgccaagcttctggggtacccatgaa

SEQ ID NO: 571488 - DNA, 482 bp, Homo sapiens
cgtgaacattgacatgcagacgtataatttaccttgaagtgacaatagctgcactactattatgtaatgataaaataatgtatatcactagtagaaaatgattatagcactactgtgttaggacttttcatattccatattgaaacatagtgatactgtagctggcatcagctgtaccctgtacttcacatgcactggcctggaggggatcatatttataacaccaggaaatccagtgtgcaattagctgagtacttaacattcagtgtcacagtgagcattcttaactcaaatcacagtagtcatgaaagaccgtcctgttggtcaatccaaaaacatacatcaaaattcaatggtgaggttgaaggtagtagtctagtcccaactagtgtgagttctgggcgcatatcgaaatggtgcaggcatgtactccctttctgaggacttaatactgatgggacggatgcagtacagagtaacaa

SEQ ID NO: 571489 - DNA, 106 bp, Homo sapiens
ttccgagagaacatgcgtgcgagagtctgacgagtgctgcactaacgcaggatccggcatgccgaaggtcctcgccaggattaagttaaaggaagtagatcgtaca

SEQ ID NO: 571490 - DNA, 1284 bp, Homo sapiens
gagcggggctggcggctgcactggctggcagctggaggtgtaatagtgcgggtatgtgggtttgtgagaatgttcctgaggcggcgtgtgtgcgcctgtgtcagcgacaaggatagctggaacctgcggccctagggctattgtctgctcaccatgcctgatcatgtagacggacgctttactctgcaaattattgtgcatcctagtgcctgatgcctactgcgaggcaacgctgctgccatgccagtaccatgcatgccctagtcacacgctgcactactctgcgcactggctgctgcacaacggctggctacgtaacgcgcacaacaagccgactctacgccacgccctctacacttcttactttcacagcacaactctcgtctctacaggccatctctctctcgacgcacacttctggtctgactatcttggctactccaaagatgacaccatgcttagcacccgtcctgggtgcaggcactgcacacgcatgctccctcttatttccggatcgctcaacaggccagactttaaacggcaagctagccctacaaacatttcggcgcaccctggcacgcacacacactcgcttccctctgcacgtttgggccagcataactacactaaaacgcagatcaaaccataattcttgcctcagaaaccacgcaatgcaaccttcctgcctagtcacacgtttttaaatcgcctaaggctagaaatcagactgtccctccctaatttaaagggctaattacatttctacacacacttggggacctagtccacaacatggggcgcacctttgtaggtggcttgtgcggcttggtgacaacgtctcgagatgtgtttagtcttcttccaagccgcggcacgggaagtccggacgctaccttcggcttcgaactgcaacgtactaacgctggaacgtcccaaatctttaagcatcacttttacctcccttctttcccttaaagtgcataacatgtcactcctatttagcgacggcaaccctttttttacccgctagtggaaatttgcaagatgtggtttcctttttctgttcctcgatctggtgtacaacgtgtctggccgcgagccgggaaggtcccgttttacgtttagccctttactctcccgttgcgaacactatccccccaatcatcgatagtggcttccctgtacggcaagctgtcaatatggctggaccttgggtgttgttcatggaacagtgtgtggacgtccgtacttttgctttggcaggtaagctacctggttcttggg

SEQ ID NO: 571491 - DNA, 220 bp, Homo sapiens
ggaggttctagcaggggagcgcactactagtatacccttgaccgaagaccggtcctcctctatcggggatggtcgtcctcttcgaccgagcgcgcagttacgggagggacgcacatggagcggtgagggaggaaggggacacccgcctagccagccagatcagccgaatcaaccctggcgatcaatggggtgacagatgtcgcagccagatcggtcgacg

SEQ ID NO: 571492 - DNA, 286 bp, Homo sapiens
cagcccaagccttgcggtccataatgtggcctcaccatttatggagagaaggaggcatttgggtctggaggcccctggagccagatggcaagagggtgccagcttcctttcctgtgtgtattctgttcagttcctttaaaaaaaatggatgcccagaggactcccaaccctggtttggggtcaaaaaacagccagcaagagtttggggccttagggcactgggttgttgttccattgaaaccgattttggccctggccctacttggtttttttagctttttgggcc

SEQ ID NO: 571493 - DNA, 742 bp, Homo sapiens
ctatgcgccagccccggggcgccgcgctgcgccgacgccaccgccgccgcgccgtgaacattttccggctagactaggggacctagtcccacctaggcggccatcgtacatcctgctgctgaagatcctggaagacgcgctcctgcgccgggtacttgctctgtacacccaggctagagtgcagggatagtagaccacagctacactacagcctcagcctcctggagtcacgcaatcctcccacctcaacctcccatgtagctgggaccacaggtatattctgggaaaagccagctatctgttatgcactggtacttcacaactcgtatacctggatctttttacttcatttatttcattagtataacacatactatagaaggttatctacctatgcctgctcctatgccacagtgtacctgatctacctgacatttaaggcaacctacgatggaaatacatgatacctatccgagtggagtttctggtggtccctgtgggaggcctctcatattttagttaatcacgatattctctacctcttgagatcctctggacctatctccatactacctggagtaccgtggctatccttccgcagctgtatatgatcagcaagatggggaggccgaacctcacaccactactgtcttctggccttatcgtgcttgatttgtacatgcttggctcactggggttttactaatatggggcggtacaactctatggcctactgcattaa

SEQ ID NO: 571494 - DNA, 130 bp, Homo sapiens
  misc_feature (110)..(110): n is a, c, g, or t
gttgagttggaccaactgtgacatcaatcaacaatgagtgtgaatccaatcccttgtgtcgaacggcggaacctgcaatagacatgaacagtggctacgtggtgcacctngccgggtagggcttcatgcg

SEQ ID NO: 571495 - DNA, 297 bp, Homo sapiens
gccaatatgcaccgcagccacagccatgcaggatgcaacctacaccacggctcacggcaacgccggatccttaacccactgagcaaggccagggatcaaacctgaaacttcatggttcatagtcggattcatttctgccgtgccattgtgggaactcccttgtgagtcttgtttgttttatttttaagattccatacataactaacatcatacagtatttatcttttatccatctgatttatttcacttggcatgataccctccaagtccatccatgttgtggcattgcagggagct

SEQ ID NO: 571496 - DNA, 594 bp, Homo sapiens
aaaagctgcagtatatccttgcaagcgtgtcaaagctggctatggtacggcaaaggagagttgtatctcacaaagccataaacactaaacaacttcattttccagtaccagaaaatcagctgtcatccagacagcccttggtaatacatataagatttgtgataatatcaagtactgcagtggcacgccgggtgggtctccacttggaaaccccccattactgtgaccctgtcatatgattgagctactcagcaagtggactctgaggtgacgtgctttcggaccaacatcgtcttcttggaccttagtggagtggtgagtatgctctagagaagcagcagtgcatgcactgaagtataggggcacccggttgggagaagaatgggttgtccgtgtagcgtgcattctgggcaatcctgtgcatcaggagcggtctggagaatatgcagaaacaccgagaatgtgaccagaaagatagctgcatatttgctgtagtactccatggcgctcgttgctctgggcttatcgcaggatgtgttcagggcggttgactgtggatccgaagagggattgtagcttcgtcttatgagttct

SEQ ID NO: 571497 - DNA, 548 bp, Homo sapiens
  misc_feature (28)..(29): n is a, c, g, or t
  misc_feature (254)..(254): n is a, c, g, or t
  misc_feature (479)..(479): n is a, c, g, or t
  misc_feature (529)..(529): n is a, c, g, or t
  misc_feature (536)..(536): n is a, c, g, or t
ggcgttcgatgtgttaggcttcccagcnntgcttgtatcttaccaggggccacaccttcattcagaggccacaaactggaagcccgggagccctgcactggctccctcacccccgctgatgtggctttcacggtgtcctaagcacttttgaatgggaagctgacattgcaaaactggaagatttcactttcacacacacacacacgattcctcttgagcaatcagaagacagagtgagatgacactgctctgcnattcctgcaggtgatgagaagctaagctgaggagagcacgaagcccagcatctgaccatttagacatgctcaccaaagttcttagaagaagcagaggaaggagaaagctcacaaaagaaaacaaatgctattttatctgacttctcacttctacggatagttgttttcacttaaaaacaaatccccaaactgtttcatgatagggccaagtgacttttaaacacnatctagtttaggtagatagtatactatactattttaaggggcagccttgnggatacngctgtaatccta

SEQ ID NO: 571498 - DNA, 89 bp, Homo sapiens
gcggccgcctactactactactactgctcgaattcaagcttctaacgatgtacggggacatgtggcctttcgtgtctgacttccttcac

SEQ ID NO: 571499 - DNA, 126 bp, Homo sapiens
cgaggtcacatttggtcccggcagggctctgacctgcgaccactgctcgctgccggggcttgtcccgaggaggagaaggcggcggtggccgtcgcgtctgagtcaccgcagcggggaggagtacca

SEQ ID NO: 571500 - DNA, 1055 bp, Homo sapiens
gacctagctagtggatcctgcggttaatcgggagagggatcgtaccagatgacggaaggacgggagtccccatgcatgtggctcggtcccggagcctcagtcccggacgatccccagtatccttagtcagtgaaatagtaatgatgaatcatgtttacaatagaaagattcccatagaggctcatgagcgctcagagagctcagaaggtggcttctgtgatgcagctggtgaaaaagctgatgattatcattgcccgccagcatgtctcctggaatgcctgcgacgtttgatcccttgaagtagattctaccaaccttttagaagcagcgtgatgggccacgcctaaagagggacaagggattaacatgtgacattccccgtctacatcgttagccaggtgggactcacccgggatcccctagaagaaatggtccagttgagcagctgtgacagtcctgagcactccagagacagatgattctattgagggccatggggcatctctgccatctagaaagagatcaccctctgaagagggacttcgagaccattaagctcatcagacaatggcgcctatggggctgtattttctaggtgcggcaccaagtccacccggcagtcgctttgccatgaagaagatcaagtaagcagaacctgatcctacggaaccagatccagcaggcttcgtggacgcgtgacatactgactttcggtgagaaccccttgtgtggtcagcatgttctgctcctttgataccaaagcgccacttgtgcctggtgacttgagtccgttgacggcggcagactgtgccactctgctgagaactatggggggcctgccttgtggcctgggcgcgcctctcacttgcggcacctgtgtgcgctgggtattacacactatggctgggccgtggccctaactgaacctccttatattctgggcccttcgtcggctttgtcgtcacagtgctcttgtttcgccactgttggggcctcacggcccggtctgccccttggcccattgcgcgtgtttcgtatcccctggcgctcttcta

SEQ ID NO: 571501 - DNA, 149 bp, Homo sapiens
tacctgaggacccagggttgcagtaagctgagatcgcaccattgcactcctgcctgggcgaaagagtgaaatcctgtctcaaaaaaaaaaaagctaggtggtaagtatatgggaggtaccataatactattctctactacttcacatgc

SEQ ID NO: 571502 - DNA, 843 bp, Homo sapiens
  misc_feature (843)..(843): n is a, c, g, or t
tcctactgcctggctgagtgcacatcgtccgtggtaatacagcttgagtcggctgacgtcggacccgtgggtcctctgatccgtgagagcgaaggagaaagcggcgagatgactgaccgttacaccagccagtaggaccaggctggagtagccttgacagggtcgcgactgtaacattcggcagctggaggccaggtgtctcgtaaatagacatctcgaaagtgagcgaagctgggcttggatgaaatcgcaaacatcgctgacgtaactgcgtataccttgacgtcccataacactgggtgcacatactttactgtataccttttcttcacatctatcaccttttcgggcgccaattgctggcggagaaggtacactgcaggaaggaccgacgcgaaggacagccagagggtttcgccaaggtttggtcaaaccccgtttggcaattagccgtaacaaagaatgaagtggccctattccacgactcctaattagtattggggacacacggggacttagagaccgtgaaccaagagtgctccggtatgggcaacgtatcacctggtggacagttaagcagtaccagtggccctcctgttgtttaacacgcacgaattcggccttgggaacttaaaggctaggatggcgcgggatatgatgctagagcgtcaacctctcacgaaatacgagattaccaacagccgaaatggggccaggggttcattatccattcaacgtggtggtatgattcggttgctagcagttcgccgttcggtacaaaaagagttaaggtatgccccttgttttcaatcgcgaagacgagggactactgcgacgtcggtn

SEQ ID NO: 571503 - DNA, 255 bp, Homo sapiens
  misc_feature (250)..(250): n is a, c, g, or t
cggttctaaatcagaactcggatataccgggagcaatggccgatctggctgggtgttgcaagcatagtcagggcgcaaatacactggcggtgccgaaccgcgagcaatgtcgccacacattttattttttatggcggcgcaactttctttgtctccgcaggagcttgataaaatcatcgataaaatggcatcgattggtgcaaccattaaataaaagcacttggacagcataactgtacgggggatcctnctaga

SEQ ID NO: 571504 - DNA, 107 bp, Homo sapiens
tcgataatcttacgccttaatacttttgagttttgttatattttgaatgatgaggcttcgtgcccccccttcccccttttttgtcccccaacggtgaccggcgactt

SEQ ID NO: 571505 - DNA, 265 bp, Homo sapiens
ctccctctactatatatcagaacagatactaggtttcctcataggtaaaacaggataataaatgactttgccagtattcgatgaggattccctgagataatgtacaacaaagtgcctggtaaaatgcaggtagctaaacaaagtgtacttgctgccactgtcgtcatcagctcctgcccgtttcagcagtcagacacctgcctgatcatcccccatggcagagaagtgcgcctgggtgcgcacccaggcacacttctcacaagtc

SEQ ID NO: 571506 - DNA, 411 bp, Homo sapiens
gtccgacttgggtcgacattggacaccatgattgagactggctgagcctttttatatcctgacgacagctaccacacagtgaactatgagatgctaacggtggagcacgaggcggatgagctagtggcgcacaacagcgaggtttttgagacgttcaccgagatccacatccagagtgcgatcttagtgcgcgaccatgtgaaagtgcccctggtgaacactctatctatgaaccagtgctgactggacttaatagcattggcctactcatggaggtatcaggataggacgatgggatggcactgtgccgagaccatcgattagcggttctcagcaagtgtctggacatctggataatgttcctggtcattctcaagaccctactggtatcctaattccggttcttgccct

SEQ ID NO: 571507 - DNA, 181 bp, Homo sapiens
gttagatttgtaacaggtgatgcatcaattcttctttatttgaggaggcgtagaagtcaaataaaatatagagaggcatctctcaacttaaaatgttttacttgggaagcaagaatagcaatctgaggcatacacagaccagtggtcttcagtatgtctgaagaacaaagacgagattgcg

SEQ ID NO: 571508 - DNA, 579 bp, Homo sapiens
accccgagtgtttccgcgcgccatcatttttcaaattctgcccgccgggtccacaatcctcgcataaattttgcggcttggccaaactccacttgctgacgccacttccacattctgcctccacatataccctcttctccaagcacctccaacttgttactcccccccaaaagactgttttaaagaaccttcttgacacaagccttcgtcttaataacttcgcgtctttatcccccccctcttttaacccccttgggaaaaatctctcttttgtttataacccccctttttctcggtccaaaatccctctgtcctttttgctcacatcttacaatactatgccgtcatgcccctgaattcctctggataacacgtatcacccaccacccaacgcgtggtacacaatccgaccgccccacctagatcctaatacaatacgacctccatcctatttatgcccgactagactaccacccccaatatctcgttactaaaccgctgttgtcccccgcattcaactcgcctcgtagcccccagaccccacaacttcctacggcaatttcattatacaaaaataaa

SEQ ID NO: 571509 - DNA, 432 bp, Homo sapiens
  misc_feature (26)..(26): n is a, c, g, or t
  misc_feature (123)..(123): n is a, c, g, or t
  misc_feature (125)..(125): n is a, c, g, or t
  misc_feature (181)..(181): n is a, c, g, or t
  misc_feature (222)..(222): n is a, c, g, or t
  misc_feature (225)..(225): n is a, c, g, or t
  misc_feature (266)..(266): n is a, c, g, or t
  misc_feature (340)..(340): n is a, c, g, or t
  misc_feature (400)..(400): n is a, c, g, or t
tcatataagttatgctagggtgagtngtaggaagttttttcataggaggggtatgagtgggtcgtagcggaatcggggggatgcggtgcgaattcataagaacagggaggttagaagtagggncntggtgacaaaatatgtggtgtagagtgcaggggagagtgcgtgatatggggtgccnaggaagattgtagtggtgagggggtgtatgataataatgtntgngtatgcggctatgaagaatagggcgaaggggcctgcggcgnattcgatgttgaagcctgagactagtgcggactccccttcggcaaggtcgaagggggtgcggttgggctctgcnagtgtggagagaaatcatatgatggccaagggtcatgagggcaggagtgatcagaggggngcttgggtggtgataagggtggagaggttaaa

SEQ ID NO: 571510 - DNA, 357 bp, Homo sapiens
cattctcacatagtgaactcctgaatgatccattgggagactccgaggaaacagaagtggggctgcagtatctccagcagagacactctgcatctgagccacttttcagcattctcttttctctccaccattctgtgtaaaagggtctcaccctgtgttaactagttagcctccaatacgggaaagtgctctctccaacttcgttttccaaaaacagctcatatgtcatattctatttcgtggaccctcagcttagtcaagtccacttgaatctttagaaaggatgtcttagtgttataaagcaatctctttaagaagtgcaagtcatctgacatgggagtggcagaagttgtcaaa

SEQ ID NO: 571511 - DNA, 131 bp, Homo sapiens
gatggcgtttgcagcgggacaaaaaactggactttcgccgaaaggtgggacaaagatgaatatgagaaactcgcccgagaacgaggctcacggaaggagacgagaaaacgaaagatggaaaaccacgtgca

SEQ ID NO: 571512 - DNA, 646 bp, Homo sapiens
ggcagagtgctggctgctgagagccgagcccagcaatcccgatcctctgagtcgtgaagacatggaggcagcgagggaggtttcggagtagcgtgtgcgctgaggcaacgcccccatggctccggttcttggcagagggaccaggagacattggttcagaaaatggactgtgtgtgctgggcctcacttcggcttccaggcctgagtgcctcctgtagaagacatgctgccttgcttatgctatgaccattgattggacgtgccagtccagagagtctcaggaacgtgctccatccgtatctaaaccatgtgccaccagcatgcttgctaggatcaccccaggacgttcaccaaagtccacacaagagttgccaaattgaagaattgtgcattgacaattcaaggttatcagagcatgttagccagctaagggccttaaggtcagcacttctagaagtccatgcaagtgccaccacaaaaaaggccctaaatggtgtactatgattctctctcaggctccataaatggcctaaggatcgtagccccaacgacgcaggaccaagggcaagcctttaaggtcccaagaaattgcgtaccggccaaaagggtccacaagtgcttgccctattgagttccattccccagg

SEQ ID NO: 571513 - DNA, 747 bp, Homo sapiens
gctgctggagcggcactcgaaggggcctctgattgtggacacagtctctggctgagtctctctcagatgctgggtgaaggtggatacgtggtagtcgtgtgtgatgcaggcgcccacagacaggtcgtgtgacatcctacatcagactccctcagccccgatggggcaaggtagcatgtagtgctctgctcgagcgtgtgcgcacgaatggatgacccatgcactcactcgttcgacaagctagaagcgccgtgagtgcaacatgcgacacgttagtggcaagttccacatggggtggctacaggcggtggtggctcgccgagttggtggcccgaatggtcgaccgagtaatgcattactgagctggaaggctgccctcaggtatacgtgccaatgctatgcctctcagtcagcgtctgacccaggtcgcgccaccagggacgcacgagcagtggacgtagagaggcaaatgccagggatgccgctggaagggatggccacgtagaaccttgccacatgctgaagcgaggactagatggctggaggcccaagcatgctgacgccaggagaagatcagccttggtgccgagggccataaccatgaccacagaggaagacagtgggcctaggaggaagggcaggaacgtgggcccaatagacagcacaaaccacgcttggtagaacatgatgcaaagagcagtggacgaaggatgggttgtggaactgctcatgggaagataatcttga

SEQ ID NO: 571514 - DNA, 265 bp, Homo sapiens
atttttttacaagatacgttgtctggggggtcctatatttggttatgggtcgtctcccttgaactccatgacatatgtgctgagtcaaggaagaaatgaacccatggccattgaaactgactgtttcaactgagacttataagtggtggttgatctaaactgagaacttaagtcagtttcctgcttagatgctggtgtgtgaaacagaaagttcaaagttgggaaagggactctgttccctgcaacagctgatgcaattctgtgg

SEQ ID NO: 571515 - DNA, 302 bp, Homo sapiens
tccgcacgggtgatgcggttggaggaccacggccattggactcactgtggctggactggaggggacccgtggctagggggggctctggtgtcctgattggcactggtcccacctgctcctcagtgcatgccggtgctggctggtatgggccgagcttcaggttccaggatgcttctctggaacctcaaggcaggcaggccagtgcctgggcctgatctctaagcccgtcatgctgctgctgagcacagccagccaacctgtccctccctgatcctggggccccatttcctccagggaccagt

SEQ ID NO: 571516 - DNA, 289 bp, Homo sapiens
tcctcttaagcatggggagagctggggagtcgtgcctgtagggctgtggctccactaaggcatggatgtgctgcaccaaagctgaggctagtccagagggctccggcccaggtcagcgcactcaggagctacactccctcatgtcctgctaacccctggtgtgcacagagtttacacagccatcggtttttatcaacgaaaatataattcacctaccagaagacagatcatgttctgttttattatattttatttgatttgtactatctgagacggagtctcgctgttg

SEQ ID NO: 571517 - DNA, 205 bp, Homo sapiens
cgtcatccatcaggtgaagaaatagtcacagctctccttgctcgaattacttcctacaggagcacggcagttacaccactggaggcattcctcagtgcacagcgcaatttaggtgcaagagtggtgctggggtactggcgttggtctggctagctggctggcaaggtcataggcacagacacacaggggcaatatccgttctggg

SEQ ID NO: 571518 - DNA, 356 bp, Homo sapiens
gttttccagctcgttccactgccgacgcgacgcgaggtcgatgcgtcggaacatcgcattgcgcaccatgacgcggaatgcgcgcgggttcgccgagatgggactttgattgtcggcgccgaacgcaacctcttccgtatctgcctcggctccggggtcggtgagtgactcccattcgtcgagcaggctcgagtcgacctgacggatcagctcgcccaaccactcgatgatgtcttcgagttcctcggtgcgcgcttccgtcgggacggtctgtcgcagcgcgcggtaggcgtcggcgaggtagcgcaggacgaggccctcggaccgggtgagtccgtaatggcttatcaactcgg

SEQ ID NO: 571519 - DNA, 174 bp, Homo sapiens
acccctctctatatgcctgtatcttcagtgctgccactaatcgtgcattttacttctttggtttaagtactgaagcatatgatgaaagtgctctgctaagtagcagctctagaaattcaattatccgatatgtatttaacatctccgaagaacactcagggtgaccgagctcga

SEQ ID NO: 571520 - DNA, 196 bp, Homo sapiens
ctctagaggatcctgaggtggttgtgggtaggggtagaacatgggctggagtccgaaagacagagtcaagtcctgatactccctaatgggatatttcttcccctttttaaaattttctttgtggttaaccaggttttgtgttgttactgctgttgtagtagttgtagtagttgttgtttgagatagagtctccctc

SEQ ID NO: 571521 - DNA, 164 bp, Homo sapiens
atgccttttgccccattttactgatcaaggcaacttacaagggtagcccccattcaaggggaggcgaagtaaattcagcagttgatgggtagaaccatatgcatctataaagggaaaaattgctcatagccctcttagcagatagactgtgtttcattccctga

SEQ ID NO: 571522 - DNA, 1264 bp, Homo sapiens
  misc_feature (293)..(293): n is a, c, g, or t
  misc_feature (393)..(393): n is a, c, g, or t
  misc_feature (405)..(405): n is a, c, g, or t
  misc_feature (459)..(459): n is a, c, g, or t
  misc_feature (1264)..(1264): n is a, c, g, or t
gggctgtgctgcggaaacgcgaccggtccggttccgcgtgcccagtgcatgagggactctgtcaagacaactggcatgcgagccagctgctctgtgcaatgagccggtgccgtgactagcttgcgaggacgccagctgcctactccagcatagtctcgtgcttggcacgccttgccctcctagccgttgagcagcgtatactacttgagactttgatcgtgcatagggaccgtagcactgagccgagatggtgtatcatacggcggagtcatcgaactcgtggttaccctaantgcacatagtaaccacagagcgtgcaagagggtggagcatcgcggtggaactctatctctgattgatacctcgccatgcctcgggtgtatctgctcgatnacaagttcattntcaattgcgcggtgattgtgatcatcaattggcgccatcccaagtcagtagcgnctacttgatcgattcacgcgactgtgcgcacaaggtaatctagtcgtttgtcgacgttgctagcttcttatcgcttgagttagcccgtatgactgcgttggtggttccgttgcatccttagtcactctatggagccctcggcagacggctatctctcctactttcaggtccatgtgtattacttcctactgctgtcgtagtccgacgcttcgtttagcacgggtgatccatcatcgcgattcttgtgtgctagcctgctgggcgttcattcaaattcgacccaggttgccgcccattgcgttgctgacctcttccctcagataatcaatccctcctagtcttggtcgcccattcggctgtggcgcctgggggtctgcgtgcgttatatcagggcctggactaggtcgtctgttgaacatgacatgctgctgttcttcggcccctggggattactgttctcttcatccttcaccgacagtttcgggctatccgctggggtaccttcccccaaaggcttgggaatctgctgcttgggcctttcaggattggtgctgggtgttgctggacccttttcctgcatgggagagaggccctcaggcgggcttatccttgtccccggcttccattttagactcctttggggccggcaggtttcttgtgtcccacctggggacatggtgaaccctgggttggctttcactccccctagggagaggctgcctcctttaccttggcaattgcgagtgcctttcgcaccttgggcgccttgtgtgtacttggccccactctgggccctggatccttn

SEQ ID NO: 571523 - DNA, 136 bp, Homo sapiens
tgtcttcgtgaagtctgagagacacggcgtgcagtccctcagcaaatacaaaccttccagctcattcagggtgtcaaaagtgaaagtgcaggatttggactgctacacgacctgtgctcagctgtgcccgtttgaa

SEQ ID NO: 571524 - DNA, 643 bp, Homo sapiens
  misc_feature (590)..(590): n is a, c, g, or t
agaaatgctatctatcaaaatagactagctcttgattacttgctagcagctgaaggaggagtttgtgaaaaatctgaccttactaattattgtctacacatagatgatcaggggcaagtagttgaggatatagttaaagatataacaaaactggcacatgcacctgttcaagtgtggcacggactcaatctgggagccatgtttggaaattggttcccagcaataggtggatttaaaactcttataataagagtaataatagtaataggaacctgcttactgctcccttgtctgatacctgtatttctccaaatgataaaaaacttcgtcgcttaaccttagttcaccaaaatgcttcagcacaagcatactatataaatcactatcaatctattgcacgaaaatacataagtagcaaaaataagagtgagaactcccactgataaaaagtgagagtctcaaagaggggaaatgagggaagagagagaccctctcatattgttttatattgttttatactcagtacctcttttaagaaaaaaacaacaaggaagtagaaccaaagacaagcagcccagcgccaggcccanaaccaggcctggctgcctggtctaaaccagtagttaaaatcactcatacttag

SEQ ID NO: 571525 - DNA, 199 bp, Homo sapiens
ggaagcgggagcgagccaggcgcagtttgattcctttggcagcagttttaggtctgtcagtactgcactgcagattcgcagatttgggatctctgctggccagtttgtcgcaagtgtcttggataagtcaatcccagttgaggctcttaaagtcttgtgatagcctcagcgttaccgcaataggccgcgtgctttgaac

SEQ ID NO: 571526 - DNA, 113 bp, Homo sapiens
ttttttttttcccccccgggggccattggccggttaaaaaaaggggacttcataatttcttccccaaacccccagggcttttttaaaaaataaaatttaaaatggaaagggga

SEQ ID NO: 571527 - DNA, 159 bp, Homo sapiens
acaggatcttctgtatgatgctcacgtcaggttttagcccacttgtggtagactggaggtggtatcatttattctatttataaacaatgttatagtttgtatgacagttatggtataaactatgttataaattaagagttagtgttggggataacatca

SEQ ID NO: 571528 - DNA, 199 bp, Homo sapiens
tgccagcgctgggcctggatggcaccaagatgcaggagctgggcctggagaggctgccaagaagcatgagctgggcctggctgagtgtctgacttagagaaagttcagtggcctggagcgcaaggctgggagtgcagtgagctggtgtctaaacgaggccatatgtaactgatgtgagcatgtgccctgtgtgagtgct

SEQ ID NO: 571529 - DNA, 211 bp, Homo sapiens
accagttctgtatacctgtgtggtgatatgtatctaccacatccgccatcacgcatcatcttcttcaatgatagcttccaattcatctgaatattccatctgttgcaccgttaatagcacggcacatttttggttaccaaaaattgtttgcctgtgggtaggtatgccttcactttcaattcttcccctgtagcccattgccatgttggac

SEQ ID NO: 571530 - DNA, 907 bp, Homo sapiens
tgcccctcattatagcgtaaatattatagctagcatttaccatctcacattctaggaatactagtatatcagctcagaccgtcatagtcctccctactatgcctagtaaggaataatactatctgctgttcattatagctacgtctcataacccatcaaacacccactccctcattagtccaatattgtgcctattgcacagtaactaggtcgtgtctggcacggctggctcacagcaagggagagagcatcagggcttgtcatggcgaaactcggctaccctgtcttgcaggaaggtagaatcagagcgacagtccaaagggacagcaaaggcaacaggcatgaccggggtaccttcgggatcgccgatggcatagatggctgacaaatgcaagtatagcagtacagcgaagaacacccagagaagaagtaaagagtgaacccaagaacagtaccagcaagagtacgtgacccagacggaggaccacaaggacactggacaagaactgggcgccacaagcacgacatgagggagacagaggatcagcgaagggaccatacccggcgcaggaaaacacgcaacagaaaagaataacacgcacaggtaacacgtgcgctaaggatagaaggggaaaagcaacccatggtgaatggaagccacggtcggcccttaagaagaaatgccacatctatgggaaactattgaagaggcgtcaaagcacccaggcgtgtcctagagtaaagacagtgcatcaagtggactaagtgggcggtataacaagtatatatacccaaataataaaaaagttaatacacaacggtgcacacgtctcgcacaatacaggggagaaagggaagagcacagtaagaagcaattacgagatggataaaggaacagttgagaaac

SEQ ID NO: 571531 - DNA, 582 bp, Homo sapiens
catcatccgcgcgctcgcagcttctcggtctcgcctgcctgccgctcccttgcttgctcggcgctttcgctcgccctctcctcgaggatcgaggagtgactctgaccagcagcctgtggctgggaagggagacagaggcggcggcggtcaggggaaacgaggctgcagtggtggtagtaggaagatgtcgggcgaggacgagacaactggagcaaagctatcgctgaggacctggtcgtgaccagcgtatacacgatggggggcgacatcgctcaacagggtacttcggtccttggtggagcgcatctacgctcaggtgtgtcggtagcgtgacgccctgtgttgagaaaggtgagtgccatgagttactggaaggaatagcactgcaagagtctggcagtgaaagaaccagtgatcctgaagaagggtcgcttgcttcacccagccaggcattgccgggtaccataagctgtgtatctgagttctcccctttgagggacgcgaacaggagtcactttttctcacgggatggtggctgtgggtataggctggactcggcggtccaggttggctggggtaccc

SEQ ID NO: 571532 - DNA, 848 bp, Homo sapiens
  misc_feature (299)..(299): n is a, c, g, or t
  misc_feature (524)..(524): n is a, c, g, or t
cttaatgtgccactgttcggccgtggggcactttcttcggattcccttcccccgaggtctccggggcaggcttccgttttgtgtcttccaaaaaagtgcccctggtaaggccgccccagctctgtgagcccgtcactcccctggaggtctccaaatattgtcgagtggccccccaacgggaggacgcgcgtggttgacccccggaaacccgcccccgagctccctccgcgcaccccaccttcaaagaggtgtcctttcacaaagtcccacgatttatggtccagagggcgtcttccccntctaagaatccgcccattggggggattccaaatttttccgccgtttcctttcacacgcagagctttcctccgtggtaacaccccacccagggtttttctgtcaaagggcccaacctgaggggaaggtaaccgatgtgggtgacccgattttctcaggtcccgcgggatccacccctgcccccatgtacaatcgggcacttactcggcattgtttggggcacacancacattcttggccaccaaaacttttaacgaggaggagtgtcaagcaagccgtgaacccggaatgcgcatcccacccttcgtgggaggatcgcgagaaacccaccatttggaagggctgcgaatccccaatccttacatttgaaaggagaacaaaaaggcctagaacatctgatcctctggcctcccgccactcgtttaggaggctcctcattaggtcctcaccagggatatgctccctccgttgcgtggtcccctccggtttccggaaaggctatgcggaaagagaacccctaaaacctaaacactccgtatttccccaccccc

SEQ ID NO: 571533 - DNA, 174 bp, Homo sapiens
ttttttttccaaaaaaaagggcccccccccccgggggggggggccccccccggggggggggcccctttttgccccccccaaccctttttttgggggggggggggggggccccccccccccgggttttttggccccccccccccccccccattatgggggggggttttttttcca

SEQ ID NO: 571534 - DNA, 958 bp, Homo sapiens
ggagaaatactaactattctcgcactcacctcatatcctccctactatgcctagaaggaataatatctatctgtctgtttcattactagctactctcagtagagcgcgcgtgcaagcacccactccctctgtagccagagtattggtgcctattgccatactagtcttggcgcggcgtggcgaagcagcggtgggcctagccctgagctagtctcaatctccaagcacatatggcctagactacgtacataacctaaacctactccaatggctaaaactaatcgtcccaacaattatattactaccactgacatgactttccaagaacaaaaacaaaacaaacatccgagagagagtagatcctgctcctcctctactccgtggtgccgtggtggaacacttttacttatcccgtgggagggctgacccggaatcttggcaagacaccctcggggggcaactggcgcgcgaaacaacccgcacctgggggacagcgccaccacaccagcacacacatgcggcccaccggaacccacaccatgacacagacgggacaccacaaatccggcaatcggaaccgccccaggcaccgaagaaccccgcgggcacaccccacaaaaccacccccgcccacccacgtgggcccacccagtgaaccccaacacaggacggcaccacgacagaaacccgcaaatccccccaagcacacacaacacctcagggccccaaatccagggcaccccctaaaaccagcgtggcaaccagccgaaacggaaagaaacaaagcacccaacggacaatcgagaccagcgcgcaacacacgaggaacacaccccaaaacaccccggaaccaccgaaacgccccaacgagaaaaagcccaaaacacacgcccccccagcataaccaacacacgacactgcccgtgaacaccaaatggatgcgcacacgcaacaaaca

SEQ ID NO: 571535 - DNA, 180 bp, Homo sapiens
cattctctgtttacagtgttctcgcagtttggccttctgtattcagtccgagtcttcccaaacgctgcagtggcccgccctggtttctacgccatcatcaaattttactcatcgagagatgcgcagagagcccagaaggcatgcgacggcaagcccctttttcagacatctccagtgaag

SEQ ID NO: 571536 - DNA, 203 bp, Homo sapiens
atagaagtgtgccatgaccctctccctctctggatgcgcaccatcattgacactcggcgtcatcggcgtctcttgtgctgttggcgtgctacctggaagatccttctgtcctggacacgtcggcctccggccgcgcattttctgttttaagcacaggcagccacgcagcagctacaacaacagctgagatcacttaatccatg

SEQ ID NO: 571537 - DNA, 286 bp, Homo sapiens
ccgggtttttttttttccccggggggggggggggttaaccccttttttccccccccggcccccccccccccgggggggtttttccaccccggggaaaaaaaacgggtttccccttttttttcccccggggggggccccaaaacccccgggtttttttgccccccccccctttttgggggggggggggtttttttttttaaacagggggggggggcccccccctttttttttttttccccccgggccggggggggtttttttcttttaaaaaaaaaaaaggtcccca

SEQ ID NO: 571538 - DNA, 226 bp, Homo sapiens
tggactggaccggtgaggtctgaccattagccatcaaaggtaggtgtagttctcactcttaggtacacaggtgaagttaaagacatccttattctccctggggtttaagtggtggatggtgatgtagggcttgggcagcttcggaaggagattcagggtgcctgtttcactgcggctggcacttcactgggttccgtactttcacatccatagggtcctgaagtat

SEQ ID NO: 571539 - DNA, 259 bp, Homo sapiens
tagatcttttcatccacttcaagttttttatttttatttgagagacagggtctcactctgtcactgagggtgcagtggtatgatcatagctccctgcaggttgaactcccaggctcaagcgatcctcccggctcaagctcccgagtagctgggactattcgcacataccaccatgcctgggaaattttgtcttggtttttttgagacggggtctcgctttgtcacccaggctggaatgtacacggctaatgaaattttt

SEQ ID NO: 571540 - DNA, 402 bp, Homo sapiens
  misc_feature (53)..(53): n is a, c, g, or t
ctggggaaaaaacctgggcctaagcccaataatgtaagaaaaagcctgaaaanctgggaatcccctttcctttaccacccttaatacaaaaaatcaaattcaagatggattaaagacttaaacgttagacctaaaaccataaaaaccctagaagaaaacctaggcattaccattcaggacataggcatgggcaaggacttcatgtctaaaacaccaaaagcaatggcaacaaaagccaaaattgacaaatgggatctaattgaactaaagagcttctgcacagcaaaagaaactaccatcagagtgaacaggcaacctacagaatgggagaaaattttcccaacctactcatctgacaaagggctaatatccagaatctacaatgaactcaaacaaatttac

SEQ ID NO: 571541 - DNA, 719 bp, Homo sapiens
aacgacaatgtacgaggcgtccccgttttgatttcagacgggctgggtttacgttgtacgtagtggccgtggtctctacaattgatacattcccggagcttacttaaacgtggacaatggctacttggagggactaggtgcgcggcctgaaggccggggtgctcagccaggccgactacctcaacctggtgcagtagcgagacgctagaggacttgaaactagcatctagcagagcactagattataggtaacttcctggccaacgaggcatcacctactgacggtagtcagtcatacgatagaccggctcaaggagaagataggtggtggagttccgccacatagaggaaccatagcctatgagccactacgccagcttacctagacttacattactataacagttacatagatacgacaacgtagatacctagctacatacacaggcacgctgcaccagcgctccatcgctagagctcgtgcccaagatgccacccacataggcagcttcgagcagatggaggccgtgaacattgctcagacacctagctagagctctacaatgccattctggtggacacgcctctatgcggcttttttccaggactgcatattcagaggcaggacctagacgagatgaacatcgagatcatccgcaacaccctctacaaggcctacctggagtcttctacaagttctgcacctacagggcgggaca

SEQ ID NO: 571542 - DNA, 925 bp, Homo sapiens
taagttgggaaaacccaagggggtttataaattcatgtggcccacaatcttgtgggggagaaaaaatttggggggtttcaacccccattacaaaaaactaattttggaaaaaatgttttttattatcagtcgcaaaagagcccccacgcctcattttccccaacaaggccctggaagattcaaagagtcctaaatatgcaaagaaaaccaccttgaaaaaagagcgcaggcttgtgtactccacatggctggtaaatcccccagatctttgggggaaggttgagaggtggcgcggatacactctgggagtgtacaaggattttttcggagaacagtctggggccaaacacgagggtgaaaaaacaccccctatctctctctatacctacaaaaatatcaaccaaaaatattaaagcccgggcgcgcctagagggggggggcgatggccctttattatacccccgcgagctatacacatcgacgagagaggagagctcgtcgacaagacacacgagagagaaatatcactcgtcgtgtgaaacagctccgaggagagggccagagagagtgggcggggggcgaagcgcctgaagaatacggtggcccatgtggaggctcaccaacgcgcgggggtgacagcagagaagccaaacagatccatctgttggctcccataaaaaaaaaatacaacagagtcaacacagaagatcgaatcgacaatccagctagaaacgacatcgagaaattcaggacaccccccctgtggagagaaagggggcgggcgccacaaccacatgatcaaacacccctctttggtggtgcaccccgacaggtattacattcctctcaccacaacagcgtggggcactactcccggggaggacaaccctcctcgggggaggacaccctctaaatctccccaaga

SEQ ID NO: 571543 - DNA, 348 bp, Homo sapiens
ggaggcagtatactgtgccactgatatacatggtctggagggagtaagaggctggagagctgcaaacactgggaggcgagcttcacgggctggactcagagcagtcagagctgctggattcagggcccccaaggtgaactgctccattcagttgcaaggcagctgcttgcgctgtgcggtggcggaagaagcagcagcagcagtgtttggcagttggattccatcgccttctgccagtttggcaatgcgctgacaacttccacctgctgatcccagatccagctcctggtccccatcaggaaaagtgatgtctgtgcaccatccagtcgctcagtcacatgaccactc

SEQ ID NO: 571544 - DNA, 638 bp, Homo sapiens
ggggggggaaatgtggccaacggtgccatcaaaaatacgcatacagctgtgtgtcaggctttactaaaatatgaatttagagtataacatggtggagatgtaaattcttttcctcaatctcccaccaggtcttttaaggaacaggagagaagtcagaaaggtctaggatcactttacactctcaagagtatgttcggggcttgaagagatgaatgattgtgtatagtaaaagaacaatctgggattcgggtttagaattggatgagctagatgcggtgtacaggagttactgaaacaattcacacattggcgggtttagtgatgacaggtagacacacagttttcacaattacgtaacagtggaacaatagagcagtaatttttcctctcgtgtattcagatgagttgggaggagcacaaacctttattggaggtaagggtgtgggcaattgtgcccgagggaaacttttacattagcatgggaaagaacctttgcgagtttatttaattcagccttaatctcttggaggagtttattacacatcagtctggatagaaaattctgtactgttttaaagatctccaggggatttgcagcaagttttcttctatagcaatgtgcttattattccatgatt

SEQ ID NO: 571545 - DNA, 185 bp, Homo sapiens
ccagccaggcccttactccaagacctatgagtttggcgtggtgaattttgtggattggtacagcgagcggatgctcaacaacctgggcgcggcgccggcgccttatctcaaaggcgtagctgctcacgaataacgcttgtgtgggagcgggcttgcccgcgatggcattgtgtctgtcaaagcct

SEQ ID NO: 571546 - DNA, 525 bp, Homo sapiens
gccgactcatgtctccagtctacccaaatctctaggtggccaaggaaatacaaatgctggagacatttaagaaatacatttcggccaggcgcggtggtcacgcttgtaatcccagcactttggaaggccgaggtgggcagatcacctgaggtcaggagttcaagaccaatctgaccaacgtggagaaacctcgtctttactaaaaatacaaaattagccgggcgtggtggcatatgcacctgtattcccaagccacttgggagactgaggcaggagaatcgcctgaacccggaaggcggaggttgcagtgagccgagatcgcgccactgtactccagcccgggcgacagagtgggactccatctcaaaaaaacaaaaacaaaacaaaccaacacaaaaacagttatggaatttgtctgacaaccactcattgccttccactctacccaaagtctagtttggcaaaaaaatttaaatgctggagacatttacgaaatacatttcgggcaggcgcggtggctcacgc

SEQ ID NO: 571547 - DNA, 741 bp, Homo sapiens
cttgcagcacatttaattctaactagccagatttggtgatcaacagccaccgctgactgtggccaccatactggatagtgccactctaagaccttgatactcaaagtgccccatgaacagagagcatccacatcacctgtgagtatgttcgttgtatcaaatctcaggccttatgccaggcctactggatccaaatcttcctttcaacaagatcccgaagttactggatgcacattaaagaaagaaaatcactgcatttctggtttcccaaatgtatagaacattggtgttaatattactgcctatgacatagattcttttccaaacagctttattgagataaaattcatattccttataactcacccttttaacatgcaaagctcaatttttttagtgtattcacaattgtgcaactatttcagttatctaacttgataatatttttcttaccccagaagaaacacttctacccatgagcaatcactcagcacttccttctttgcccagtgactgacaaccactgatctactctatctatggaattgccaattctggacattttatataaatggaattatttaaggtgtggtctttcagtctgtctcgtttcacttagtataagtacattgatctgtagtctttatttcttttgatgcctttgtctagtttttattaacagaaggtttaaaaatgcttcttcttccaggttttgcgaagagtttgggaaaacttggggtc

SEQ ID NO: 571548 - DNA, 189 bp, Homo sapiens
tgtaacagtgtcaagaccattcacgtgtggcaaggcagtctttccaacaaatggtgctggacaaagctggacatctacactatagaaaaaagctggacccttacatgatattccaaacttaacaatcaattaattcaccaaagatttgtgaggatggtatagggagtaccgatgctcgatattcgatac

SEQ ID NO: 571549 - DNA, 127 bp, Homo sapiens
agtcgattctagaggactccccctcattactacttctgccttagcacactctaactacgaacgcactcacagtctgcatcataatccctctctcaaaggacttcaaactctaacggtaccgagctcg

SEQ ID NO: 571550 - DNA, 590 bp, Homo sapiens
gatctagaggacctctgtgtgcccagaaccggagaaccaaaaaagattggaacagcagacagagaactgattcaaacgtcagccttaattttcttactcctttaagaaactttatagaaggcgattacaaaaccattgctaaagaacaggaactatttgcaaataagagactggatttggatgctggaaaaacgagactaaaaaaaggcaaagctggcgaaactagaaattcatctgaacaggaattaagaataactcacagtgaatttgatcggcaagcagagattaccagacttctgctagagggaatcagccgtacacatggccatcaacttcgctgtctgaatgactttgtagaacgccagatgacttactatgcacagtgttaccagtatattgttggacctccaggaaacaaactgggaagttttccatcccaattatcttagtaacaacaatcagacttctgtgacacctgtaacatcagttttaccaaatgcgataggttcttctgccatgggttcaacaagtgggctagtaatcaactctccttacaagctcagtgaccttaaggagtgtagtggcagcag

SEQ ID NO: 571551 - DNA, 766 bp, Homo sapiens
tgacgttccccgcaggaactgacgtcagaccccagtctacaggggcctgcacaagataggtgcctggctctaaggcgtaggaccctacggccacagccctggcaccgatactatgacgggcgagggttactagtactatgtacccaaccatacagatagagaaagctagagactcagtggccagcaacccgggtcccagcggagcgcccggcacacgccgacactatacagcaccagtggcggtggccaccactgtgcgcggagataggctgcgacgcgtgcgcagatctcgatcccaaagctccctacctgccagaatactggacccgaataccacccatatgcccgtatttactagctgccgctggagagaatactctagaggtaccccaggagagcctgcctgcacggaagagacgcctacctacggtataggaccgccccggagaggagcgattaaggtagcagacctaccatgttgctcttgagccctgagcggctatcagggagccatagtttagtatactaggcagggcggccgaactcactgagcatgtgcagccctggccgggcggactacaagttctgacatacacagggcggtacctgaagtggacgtagtatgtacgagctagttattaacgacaatgctctgtgtcagggcctctaatctggaataggatattcggaaaggtcggcatcaggccctggttcagaacctagcatatgggtaacaggccggcaggcatctctgggttgagaaact

SEQ ID NO: 571552 - DNA, 260 bp, Homo sapiens
gctcggcctgctgaatccacctcctagactcggggcatcaaggctcatggaggtagtacccagacctgctccccgagtccagcgaccctgtgacaccgtgactgcagggagttggggactaagggactaccagagagaggctgaaaacgactccaggcccctgggaagactgtactgttcctgaaaactggccttggcacacatgggcttcggacacggacggaggagagcaccatgatatcggatcagcacgaggatcc

SEQ ID NO: 571553 - DNA, 388 bp, Homo sapiens
  misc_feature (1)..(1): n is a, c, g, or t
ngtgagctctcatatctctggtatgtttcacatgctatgacatatgtggccaattccgttgaggtagtcagtagcaacactgaatgctgctccggtacaatagtttgagtgcctaggccatagcacatccagtcggtacagaatttagtcagttctgcacagaaccaatgatgcacgatataaggcagccatgtctctgcagatacagaatctcgccatggcatacggtaagtcagtacaggcagggtccacagagtgtctggggcagtagctgacagcatcgggctgctgcggtctgtactggcacacaggtgtgtgtgccggcactaatggccctctcttaggtttcagcgtcctgtatgccagagctttgagtacgacacggaat

SEQ ID NO: 571554 - DNA, 822 bp, Homo sapiens
  misc_feature (77)..(77): n is a, c, g, or t
  misc_feature (822)..(822): n is a, c, g, or t
catcagcatcggcgcggagactgcggggcgggccatggcggcgaacctgagccggaacgggccagcgctgcaagagncctatgtgtcgggtggtcaccgagaagtccccgaccgactgggctctctttacctatgaaggcaacagccatgacatccgcgtggctggcacaggggagggtggcctggacggagatggtggattgagctcaaacagacgggtgaagagtgactgtacgccattactgacagagtgacagggacacccacaacatctggaactgacccaaagtttgctccatcaatcaaactgggaacagtgcggacggggcgctgacacggacgaggagccgcgaaacggggacgcccgtggtgcccaggacacaacagagcacgcacaccactaggcgcaaagaagtaccccatggacacgcggcgcaccccaatggtaggacacgcaggtcaaaacaggcaacccaggagaggcccaggacggcaacggggaatagaccagagaaacgccccgtggaaaagatggacagtacgaatagggaaagaaaccgggaagggcaacgaaaacggggcagaccacaacaaaggatcggacacacaacagagataaaacacaggcagagcgtcgacacacgcgagcgacaggggaaaagcacacggactgcgcgacccgaggacgttggagacccaagaggcaaacaagacgaaggaacagaacaaaccccagccaagaaggccagcacccacaaacgaactggacacgagcgcacccgatcgagaacggtctaacagacacagggaagaccgccaacn

SEQ ID NO: 571555 - DNA, 239 bp, Homo sapiens
  misc_feature (20)..(20): n is a, c, g, or t
  misc_feature (27)..(27): n is a, c, g, or t
  misc_feature (53)..(53): n is a, c, g, or t
  misc_feature (79)..(79): n is a, c, g, or t
  misc_feature (230)..(230): n is a, c, g, or t
ggccatgcttcagggtcttnaggtacntgccccgggccagtctgccaagaggnacccccttccccagcctctcgcctgnactgatgcagacaaaatctcacctggcaggcccaaccccccccacccctcccccgccgtgtgtggctcctcgccgcatcgttggggttttgttatgtgaaaatatccctggaaataaatacatgtttctgcacttagagcccagaaaaagnaaaaaaaaa

SEQ ID NO: 571556 - DNA, 122 bp, Homo sapiens
ctcatattatcagtgttttaatctagacgcaggcttatgcggaggaggatgtattcatgttacttatactaacattagttcttctatagggtgatagatatgaccaattgggtgtagaggag

SEQ ID NO: 571557 - DNA, 799 bp, Homo sapiens
  misc_feature (55)..(55): n is a, c, g, or t
  misc_feature (57)..(58): n is a, c, g, or t
  misc_feature (385)..(385): n is a, c, g, or t
  misc_feature (451)..(451): n is a, c, g, or t
  misc_feature (534)..(534): n is a, c, g, or t
  misc_feature (547)..(547): n is a, c, g, or t
  misc_feature (550)..(550): n is a, c, g, or t
  misc_feature (559)..(559): n is a, c, g, or t
  misc_feature (563)..(563): n is a, c, g, or t
  misc_feature (572)..(572): n is a, c, g, or t
  misc_feature (578)..(578): n is a, c, g, or t
  misc_feature (592)..(592): n is a, c, g, or t
  misc_feature (604)..(604): n is a, c, g, or t
  misc_feature (612)..(612): n is a, c, g, or t
  misc_feature (619)..(619): n is a, c, g, or t
  misc_feature (621)..(621): n is a, c, g, or t
  misc_feature (631)..(631): n is a, c, g, or t
  misc_feature (643)..(643): n is a, c, g, or t
  misc_feature (645)..(645): n is a, c, g, or t
  misc_feature (648)..(648): n is a, c, g, or t
  misc_feature (657)..(657): n is a, c, g, or t
  misc_feature (660)..(660): n is a, c, g, or t
  misc_feature (693)..(693): n is a, c, g, or t
  misc_feature (696)..(697): n is a, c, g, or t
  misc_feature (701)..(701): n is a, c, g, or t
aaggctaggtactgaggctgggtttaattcgagcacaggagccagatgagttcgntnnagaagtaccggctgcggagtaactgcaaagatgctgtccgtgcgcgttgctgcaggccgtggtccgcgcccttcctcgtgcgggccggactggtctccagaaatgctttgggttcatctttcattgctgcaaggcaacttccatgcctctaacactcatcttcaaaagactgggactgctgagatgtcctctattcttgaagagcgtattcttggagctgatacctctgttgatcttgaagaaactgggcgtgtcttaagtattggtgatggtattgcccgcgtacatgggctgaggaatgttcaagcagaagaaatggtagagttntcttcaggcttaagagggtatgtccttgacacttggaacctgacaatgttggtgttgtcagtgtgnggaaatgataaactaattaaggaaggagatatagtgaagaggacaggagccattgtggaccgttccagtggtgaggagctgtngggtcgtgtagtnagntgcccttgngtcntgctattgntggagngggtcctgttggtnccaagacgcgtnggcgagtnggtctgnangcccccggtntcattcctcgantntcngtgcggganccntgcagactggcttaaggctgtggttgttggtgncanntggncgtggccggtggaccgtcttggtgcccgcgatgggcgaccccctgggtgttggcgcgcttatccgaaggttcatgtgcttttggagaagggccggttg

SEQ ID NO: 571558 - DNA, 817 bp, Homo sapiens
  misc_feature (55)..(55): n is a, c, g, or t
  misc_feature (57)..(58): n is a, c, g, or t
  misc_feature (385)..(385): n is a, c, g, or t
  misc_feature (451)..(451): n is a, c, g, or t
aaggctaggtactgaggctgggtttaattcgagcacaggagccagatgagttcgntnnagaagtaccggctgcggagtaactgcaaagatgctgtccgtgcgcgttgctgcaggccgtggtccgcgcccttcctcgtgcgggccggactggtctccagaaatgctttgggttcatctttcattgctgcaaggcaacttccatgcctctaacactcatcttcaaaagactgggactgctgagatgtcctctattcttgaagagcgtattcttggagctgatacctctgttgatcttgaagaaactgggcgtgtcttaagtattggtgatggtattgcccgcgtacatgggctgaggaatgttcaagcagaagaaatggtagagttntcttcaggcttaagagggtatgtccttgacacttggaacctgacaatgttggtgttgtcagtgtgnggaaatgataaactaattaaggaaggagatatagtgaagaggacaggagccatagtaggaacgataacaagaaggtgaggaagacatgtaagagagatcagtgtagtaggatgaccattggtaactgctattagatggaacagggtcaaataggtaccaaaaaaagagtaaagggaagttgaggttgacatgacccaggatatcatatcctacgaatatcagtgctgggaaccaatgaagaatggaataatggtagtaggatagatggatgaaattggcagatggaaaagagaagtgatatggtgacgaaagatgggaaactcattgtatgaaaacattacaaagttaagagactgtgaaaaaagg

SEQ ID NO: 571559 - DNA, 209 bp, Homo sapiens
ggaaggaagggaaggtgttaggcggggccctcagattcatcggctaccccccagggctaaaacgccatgacttcatatttacaagcaatgttaaaactggacttcaaggatgtacctttttgagggcccaaaccgataacccttagtgtcgcagtgaggtggattcaaacgaatacctttccattgcgatccagagcaatcattcgggt

SEQ ID NO: 571560 - DNA, 337 bp, Homo sapiens
gtactcgaccgcgcggctgacggtgctgtcctgagggaagtcaggttttacggtgtcagcagtttccagatggaatctgtcaaaatcatccttgtcttggacactttatccctggacttctgctttgctgttggcagcttcataggctaagtacaatttttattagttctgcagctacagacagataaggtcctggtgcccctgtcctcagcaggctcacagctgagtggaaacagatacagaatgaaatggttctgatccgctatgataaaggcataatgaagggcacacacagagcgaagggagctggggagcacctgctggagggggccgcgcg

SEQ ID NO: 571561 - DNA, 145 bp, Homo sapiens
cgaaatgcgtagtgatggtatatactgttgctgtgtgaaattgtgctcctgaagcttaatgaaatctgtgtgtgtgtgtgtgtgtgtgtgtgtgtgtgtgtgtgtgtgtgtgtgtgtgtgcgcgcgcgaggaataagttaggggg

SEQ ID NO: 571562 - DNA, 158 bp, Homo sapiens
ggccgacggttgtggaggtccgtcatgggccagacttgcgttggccgtgagcctgtggtgggcagctgcggcgtagtgggtggctgcggcgtggtgggcggcatgcagggcacgcacaccgccctcctcgtggtcgaatctttctcctcgttgttttt

SEQ ID NO: 571563 - DNA, 368 bp, Homo sapiens
taattcaatctggaatcaaaaagcgggggattctggcaaatggtccttgtgccctccccattcatccctggtttggtcccctgtggcctatagccctttaccctggagcccaccccaaaaaattggggaccagccccctcgcttgcctgtgtttttccccaaacgcctttttagaatggggagggaaagatggaggacgaggggagagggacctgcccccctcctgtcaggcattcttgggaggggcccttgcccccagtgggcttatactcctctcccgtgggggctttttcttccccgacacattttggttaatacatcaacaccgtgatataaaagctatacagaggtttaactatgaagccccc

SEQ ID NO: 571564 - DNA, 283 bp, Homo sapiens
tttttttggggttccccccccaaggccctttttccgtgggggggcccccccccggtttttttttttggtgcccctgggttttgattttttaaggggttttttggcccccccgggtttttttttttttttaggaaccccctttggttgaaaatttttttttgacctgggggggggggtttggggggcccccctttaaatcccggggccccctggggggtttttttttgggtcccgtttattttcccttttttgggggttttttttaaaaaaaaaacccccccca

SEQ ID NO: 571565 - DNA, 194 bp, Homo sapiens
ctgccgtgagaggcggcatacacagcagacgagagacctatggagctttcattcattcatgcaacagtactacagaccacaggtctctactaccagacctgcattaccatttcggttgggcgactcggagcagagccacctcgagcagtacatgcttaggacttcaccagtcaaggcgactactatactcgatt

SEQ ID NO: 571566 - DNA, 223 bp, Homo sapiens
  misc_feature (5)..(5): n is a, c, g, or t
  misc_feature (7)..(7): n is a, c, g, or t
  misc_feature (39)..(39): n is a, c, g, or t
  misc_feature (41)..(43): n is a, c, g, or t
  misc_feature (56)..(56): n is a, c, g, or t
  misc_feature (59)..(59): n is a, c, g, or t
  misc_feature (90)..(90): n is a, c, g, or t
  misc_feature (97)..(98): n is a, c, g, or t
  misc_feature (125)..(125): n is a, c, g, or t
  misc_feature (129)..(129): n is a, c, g, or t
  misc_feature (131)..(131): n is a, c, g, or t
  misc_feature (146)..(146): n is a, c, g, or t
  misc_feature (167)..(167): n is a, c, g, or t
  misc_feature (218)..(218): n is a, c, g, or t
gtccngnggcctgaaaagaatgcaaaagacggcctgaangnnngtgttaaatatcngangagcaagtagcggaagagattcttttccccnggtcatnngaggatagaactaggaagcagatttcngctncnggtgaagaagttaanggatatatagcttcctctccngttttcggatccagtatccccgggttctgacctgatatttcatagccgcgnggcac

SEQ ID NO: 571567 - DNA, 113 bp, Homo sapiens
acctgcagatgtggcaggttattcatttggcagctttgccgacagacttccagcccgtgacggccgttctgagctgtctaccagtataccttctgcccaacttgtcgacgatt

SEQ ID NO: 571568 - DNA, 138 bp, Homo sapiens
tgaagcagacgccttgtgccctgctgttcaggttgtcgaagcgcaccttcgagccgcagccgagttcgccgtcatctttagcccagtcgatgagcacccacttgcctttacagctgccgttcggtggcgctgagggcg

SEQ ID NO: 571569 - DNA, 115 bp, Homo sapiens
taggtggaaagcagtatgtcttccctctgcctaaggcattatcctcctccaacggtgaggcaaaataatgtttcttcaggcccccatgttattcccccaaactattccaggcaac

SEQ ID NO: 571570 - DNA, 257 bp, Homo sapiens
aaattataagcattcccccaggaaagccacctggaaaagagccatactgagctcctgactgtcgtctggctgtggtggcctccctctgggctctctcatgctcttctcgagccttcttaactcgttctattctttctttgatctctcgctcttcacgttttcgctcatactttctccgatgttctgcaattttctgtgccctaggttgaacttctttcagccattgcactagcatcttcatcataatccaatttaca

SEQ ID NO: 571571 - DNA, 443 bp, Homo sapiens
gattgatatcatgtctatcagattcaactgagcctcgggagagggatgaggaggtagatactaggccacataagcagaggcacattgataaagctagggatctctcctattgatcaagtcaggcattataaaggcaagctcttggctagcgccaagataattgaagttggtgacaccccaaaagaccgagctctcgcggcggagcccaaaagttatatggcatgatcattactatcggccagtctatcgtgtatgtgatgaccgggatgtatggggacccttctgaagtgggtgctggaattggcctgctaatcaccattcagctctttgttgctggcttatttgtccaacttttggatgaactcctgcaagaaggatatggcctaggatctggtatttctctcttcattgcaattaacatctgtgaaaccatcgtatggaag

SEQ ID NO: 571572 - DNA, 678 bp, Homo sapiens
tggttatttacggcgttcacctgcgtctatactgcagttcacatgaagtaccaagtcactgatgtcgggtgcagtggcctaggcgtcctaccactcatatgtacggctatctagtgcggtactgccgaacatactctgcattagagactgtcaaagcttccggatttcggagagctcttgtaaggcacagccgcgacggcacagtagctcgagtcagtcagggaatatccgtctctccatgatctgcaatatcccagtggcgttctctcagcttggcatccagaatgcagccatgcgctaatttcatcatgcatcgtagatgttcacctaggtctgtaacaggaatgccccttaagcagtagcaggcggaaggtgccatgggtcaagacctcgtgcttcatgcgatatccttgtttgtcggtacacacggtgattcggaccacatgtcccctccattcttcacgcacagcctcaacagcaacgtctggagccatacgcttctcatagtaagtttgaagtcagcgttcatcgtccacttcaatcagtttctggcacccactgacttggaagtagatgttcagctatagccgtcatcatggagtgctgacattcagacaacgccgcgttctaggacccaactcacgctctgcaaacccagtctgccactcgccaccatcg

SEQ ID NO: 571573 - DNA, 208 bp, Homo sapiens
cgcggatctaccagatatgctgggcgcagcgtcatagcgagtcttttgatcttgatgtcgctcttctatcatgtgagcagatcacagcgtgatgtcaccctataggacgtgactgggtagacgtcgtgagacagtagttttacctatgatgatgtgtgtgcatgtatcctgtcatagagaggacgcagttcaacattgtgtatgtgct

SEQ ID NO: 571574 - DNA, 335 bp, Homo sapiens
tgttcgccgtctgtgatgctctgagtatccccgactgttctgcaagaacatcaccgtgtcaagcttagctttgttacagaaaatgaggtagggtgcggtgcgctcacatctgtaatctacagcagtatgggagggcaaggcaggcgcatcagctgaggtcaagagtttgagaccagcctggtcgaaatgatgaaaccccatctataccataaatacgaaaattagctgggcatagtggcacacgccccgtgatcccagctactcaggaggctgaggcactagaatcacttgaacccaggaggcggaggtggcagtgagctgagatcacgccacta

SEQ ID NO: 571575 - DNA, 230 bp, Homo sapiens
gtgcccgtctggtgtgtgttctatacatcctcaccagctggagcttcttctcctctgtcacgtattcggaattcagtagtgcccactagtgttggtctctaggatcccgacgctgccaccatggcccagtctgctgtgtgttcttacatcctcagcacctgtctcttcttctcctctgtcacgtattcggaattccctattgcccactatttgtcgttgctggacctctg

SEQ ID NO: 571576 - DNA, 180 bp, Homo sapiens
  misc_feature (1)..(1): n is a, c, g, or t
nctcatcaacccttcatcaaaccctcatcaacaccctgtcatcaccctactctgttgaatgggaactgtaatcttgtcatttgagaaggcatttacatttagcagctaagattcaagtgacaagtccctgcttccagcgttctaggaatatcagtgctgtggctctgcagtggggtctaa

SEQ ID NO: 571577 - DNA, 105 bp, Homo sapiens
ggcccccggtaccctttttgggggggggttttttttggggcctttttaaactgggtttttttttttgaaaaaaaataaacccagttggagggggcccaatgccca

SEQ ID NO: 571578 - DNA, 611 bp, Homo sapiens
  misc_feature (290)..(290): n is a, c, g, or t
  misc_feature (611)..(611): n is a, c, g, or t
agcatacaggacacttccttgtggtctgtggtggcaaagggcaagtaccactagtagggtgtatctcagaaagtgattggaataagggaaaatgaggattttctgtcctggttttagaaggatggtgcttgatgcccttgatgcccaggagagattctctggactattcacgtgtcaggcatttatggaaacggaagcctatacagatgtggggaatcaaataattgcgtgtctcctgctttccccgatgccatcagcatagacttgaccttccttaaaccgagagtttngatgtggcctgtggaaccctaaaatcagctgtgttaggtaacaaaactcaggctttctgttgatgacatcgagatggtgtcacttaaaagagccaagattcctgttttcaagttgtggattcatcctgctggttttactttagtccctccatgtcaaagtgggcctgagaaaagctcatacatgcctcatgtgaagtgtccaccctctctgaaaatctttctgtgttcaaaacagcaacgaatatctgtgttaacttttacggtgacttttgaggaggggagtttgcaaattgtcacaatgttatagatttgttgcctatn

SEQ ID NO: 571579 - DNA, 181 bp, Homo sapiens
  misc_feature (8)..(8): n is a, c, g, or t
gtgcgcangataggaagtggctagggtataattgtctgggtcgcctaggggtctggtgagaatagtgttatgtcattaaggagagaatgaagagaagttagccgagggcgtctctgattgggcccttgtaacgggtggaaggtgattttatcggaatgggaggtggttcctacggggttgt

SEQ ID NO: 571580 - DNA, 115 bp, Homo sapiens
catcatatagaggtcacgctctaagactcctgagacaactttaatgtaactggctatccgaggctggggattgaactaagtacagacgccaaggagtcacagcatctagcatagc

SEQ ID NO: 571581 - DNA, 748 bp, Homo sapiens
ggaacagagtaaatggacgaacaggcataatgagcgatgggcccgccctcctgctagatgacagtaatggcactttagcactcgcttaatgcagataccgaacagagaagaaggcgaagagtatgagagataagcatggatgttttcgatgacagacggagatgtccagcccttctgggcaccttaagaaatatccactcacctgcatttttgtttattcctacaaggcttctcacagcagatgagttgaccattgaggaacatgaggtgttagcaagtgattgacgatggagatcatggacagactgggtacaggctcgaacataacagttggcccagtgggtatatgtgcccagaaaagtacctacagtttcccacctcgaacagcgctcctgagcatgctgcagaacccatggacgcttaggacagacggacacacaacgtccagcaatccacggaacgcagaactcgtattcaggcagcctcaacggagatgccaggggtatgttcgtgcaagcacctcactcaaataatccaccgggccaggacaagacaggatgcaagttaatcagcgcccctgaagggccgcacaaaatcccgaatcattgacacaaccgacaccaccacagatgaagcatggctcctgtggaaggcgaataccaatgagcgcatggaatctaccactcgggccaacgcaagacaacaagcaacaacaaagatgaaacccccaggatgagaacgccagaac

SEQ ID NO: 571582 - DNA, 1083 bp, Homo sapiens
  misc_feature (21)..(21): n is a, c, g, or t
  misc_feature (54)..(54): n is a, c, g, or t
  misc_feature (59)..(59): n is a, c, g, or t
  misc_feature (67)..(67): n is a, c, g, or t
  misc_feature (75)..(75): n is a, c, g, or t
  misc_feature (90)..(90): n is a, c, g, or t
  misc_feature (111)..(111): n is a, c, g, or t
  misc_feature (156)..(156): n is a, c, g, or t
  misc_feature (201)..(202): n is a, c, g, or t
  misc_feature (207)..(207): n is a, c, g, or t
  misc_feature (246)..(246): n is a, c, g, or t
  misc_feature (262)..(262): n is a, c, g, or t
  misc_feature (286)..(286): n is a, c, g, or t
ggggaattgtaaaaaagaaantcaataataggggggaattgggcccggaagttngcaanggttcccnggccgccnatgggcgggcccggnggggatttggattaaaaagtngcgggaagtaaccaacaaaattatttttcggaaaaaaggaaaagnatttttaatggacccagccgtggaatgtgttagggttggcagctnntattntcccaaaactgtaggaacttggacttggcgttagagtgnaacttctgaaaccaantcgtctctggccgcaggagtctanatgttttcgtaatcttcatcaagaagtttttaaaaggcaagcaaaaacagaagcaaatcatatcaaacggggatagaatggtttccactgaggacattcagcctgggaaggaggaagtcaccagctcgaggcgtgtggattggtttccacccggaacaggctctgtgatggctgaatggaaagaaacgtaaaaagctgtgccaaaaaaaaagcaaaatgctgtgataaaccaaacagggaagggggaaaaaccctcctccttgggattttgtgttctggtatcccctaacaattgggacactacgatggctctcacaaaggaggttcaaagaccagttggtaccgatgaaacgcgcaacttgtgtaatcccaacactttctattgttctagaatcttcttggtcagtcgggctggtttttcagtcggctggaattctatcttctgggggccttccgtctgagatggaagctgtctggggcttgttgtctcttccttctgtggctccctgcccctcccccgtgcctttccacgtctgtctggtgagctctgcttttacagtgcaccatcaaggagatgcagccccgtggacattgaaggacacaagtctcccagcggagcagctttcccccttccgccgtctcccaccctctcctccccttggctcggcctcgctttctcactggagtgctcactgtcgtctctctctctccctctgtacctttctcatagttgctgcagatctaaggtctcaagggcacttgggcgcgtagtaacgtgcttatgtaacaacggccgg

SEQ ID NO: 571583 - DNA, 133 bp, Homo sapiens
ccccttattaggagcaacagaaagctactctctatagttctgttcttgtgatgtgacaaaatgtaagaagataggagaagagaatattttattacgtagatgcttttgttcccaagtgtgagagagatcctct

SEQ ID NO: 571584 - DNA, 765 bp, Homo sapiens
caagtaccggtcaggagaaccatgaggcaagtgggcggcgttcttctcacagataggagagctctacgtggttgcaccatctctgggcctataaagacctgcatgtctcgcggaggagactcgaaacgctgcctggtaggaagagcaggcgtggagagattgaaaatagtctacgtatacaagtccccgcgtggtgcgacgtcatggagtcttaaggatcaagtgatcgccccttggaaaatcatcgcacttcatgctatgtgataggcttggcacttacgatccgtcgcaaccctccttgtcccacattcttccctcgaggcaaacgcccgaacaaggacagtggcaactctctggtcctgatgacttggtatttggctgggctctggggcaggatcgtctagatgaggagcacgatgctcatgattacatgacaagggcgggatagctggagaggctgatcgaaggtgtctcgatgtgattacagcatctgaaccaggctcctttactactgtgcctctgactgcctcccactcctccctgggctaggaaaggggtatggaggttttccttggccacttttttcccccctgggacactgggagatggaattaggttgactccatttggtacgggcccttgcggttattagttctggcctaaaaaatgccccttcagtcgtcgaaggggccgacccaggggccccaaggtaggcaccgcgttgggagcccctcgtctgaataaagcggtaaagttgcgcaaaag

SEQ ID NO: 571585 - DNA, 215 bp, Homo sapiens
  misc_feature (210)..(210): n is a, c, g, or t
acgaggagcggatgtctaaagttccatctacaggctgaggtgggaggatcaactgggtctctccagttacctaggtctgaaggtaaatctgcttcctcactgtcttctcttaacactagaccgtcttcttcctggatcttcttactcaaaacatcatttttgagaatcttttcgggggagttgctatgatgaggggcagcagtgataatnggaaa

SEQ ID NO: 571586 - DNA, 263 bp, Homo sapiens
tgtccagtatgattccacgcatggcaaattccatggcaccgtcaaggctgagaagcgggaagctgtcatgaagtggaaatccgcatcacgcatcttccaggagcgagatccgctccaaatatcaagtggggcgatgctggcgctgagtacgtcgtggatgtgacaggagtcttcgccaccatggagaaggctggggtgagtgcaggagggcccgcgggaggggaagctgactcagccctgcaaaggcaggacacgaatgttca

SEQ ID NO: 571587 - DNA, 395 bp, Homo sapiens
atccatgttctaatgcctccactataaaagtattgttagttgtttgttttttagagactagagtactatctactagtacagcccaggctagagtgcagcagcacaatgcgtacagctacactaacaacctccacctcccgggttcaagtgattctcctgcctcagcctcctgagtagctgggactccaggaacacgccactacacctggctaaattttgtatttttagtagagagcgaggtttttctccatgtatggtcaggctggtctcaaactcctgacctctggtgattcgccctcctcggcctcccagagtggtgggattacaggcatgagtcacggagcccaacctacttttttgtgttttagtagagacagggtttcaccgtggtgccc

SEQ ID NO: 571588 - DNA, 676 bp, Homo sapiens
  misc_feature (15)..(16): n is a, c, g, or t
  misc_feature (19)..(20): n is a, c, g, or t
  misc_feature (624)..(624): n is a, c, g, or t
  misc_feature (634)..(634): n is a, c, g, or t
  misc_feature (637)..(637): n is a, c, g, or t
ggaaaatcctcacgnnagnngaagcgcaggcgagtagggccagacatggtggctcatgcctgtaatctcagcactttgggagactgagatgagaagatcacttgaggccaggagttcgagaccagactggcaacatagtgagaccctgtctctacaaaatgctggccaaggagcagggcctgcgcccgtggtctcatagagcctggcctgttctggaagagcacccagttgttccttctaggctgcccaagccccactgatgatggctgagagggaagaggacgacgacactgaggaagcctggatgcagctacggcccacagaacccttgccttcccagtgctgcggcagtggctgctcaccctgtgtgtttgacctctatcaccgagatctggcaaggtgggaggcagcccaagccagcaaggacaggagcctgctgcgtgggccagagtcacagagctgcccctccaagctgaacccagagaccttcgtggccttctgcatcattgccatggacaggctcactaaggacacctaccgtgtccggtttgctctacccgggaacagccagcttggcctgcggcccggccagcacctcatcctacggtacactcagggatagtngatgacttanaanattcagagagcctatacgcccatcagccctgccaacgcc

SEQ ID NO: 571589 - DNA, 519 bp, Homo sapiens
  misc_feature (15)..(16): n is a, c, g, or t
  misc_feature (19)..(20): n is a, c, g, or t
  misc_feature (467)..(467): n is a, c, g, or t
  misc_feature (477)..(477): n is a, c, g, or t
  misc_feature (480)..(480): n is a, c, g, or t
ggaaaatcctcacgnnagnngaagcgcaggcgagtagggccagacatggtggctcatgcctgtaatctcagcactttgggagactgagatgagaagatcacttgaggccaggagttcgagaccagactggcaacatagtgagaccctgtctctacaaaatgctggccaaggagcagggcctgcgcccgtggtctcatagagcctggcctgttctggaagagcacccagttgttccttctaggctgcccaagccccactgatgatggctgagagggaagaggacgacgacactgaggaagcctggatgcagctacggcccacagaacccttgccttcccagtgctgcggcagtggctgctcaccctgtgtgtttgacctctatcaccgagatctggcaaggtgggaggcagcccaagccagcaaggacaggagcctgctgcgtgggccagagtcacagagggatagtngatgacttanaanattcagagagcctatacgcccatcagccctgccaacgcc

SEQ ID NO: 571590 - DNA, 807 bp, Homo sapiens
  misc_feature (15)..(16): n is a, c, g, or t
  misc_feature (19)..(20): n is a, c, g, or t
ggaaaatcctcacgnnagnngaagcgcaggcgagtagggccagacatggtggctcatgcctgtaatctcagcactttgggagactgagatgagaagatcacttgaggccaggagttcgagaccagactggcaacatagtgagaccctgtctctacaaaatgctggccaaggagcagggcctgcgcccgtggtctcatagagcctggcctgttctggaagagcacccagttgttccttctaggctgcccaagccccactgatgatggctgagagggaagaggacgacgacactgaggaagcctggatgcagctacggcccacagaacccttgccttcccagtgctgcggcagtggctgctcaccctgtgtgtttgacctctatcaccgagatctggcaaggtgggaggcagcccaagccagcaaggacaggagcctgctgcgtgggccagagtcacagagctgcccctccaagctgaacccagagaccttcgtggccttctgcatcattgccatggacaggctcactaaggacacctaccgtgtccggtttgctctacccgggaacagccagcttggcctgcggcccggccagcacctcatcctacggtacactcaggtagcgggaggaccaaagcttcacagccctgctttgctatttgctagctgctggccttgaccaactagcgtactctcccttaagcctccatttgtcatcttcaagatagacatagtgacacatgactcagagagttcttgggattgaactagataatgcattttcataataaataataacacaatcaaaaa

SEQ ID NO: 571591 - DNA, 151 bp, Homo sapiens
agatgacgcagtctgctcactcagcagtgtccgcacgccccaggcagcaggcggcccctcctcgggcaacactggtcttcctgagggcagcccgtgctgcggtcccacgcttcgtccatacttgcgttgtggggtctctagaaactacagt

SEQ ID NO: 571592 - DNA, 103 bp, Homo sapiens
ccgttgtgcgttcccggcgatcggggtccgcgctcgaccttcgtactcctggtcgctcgctgtttcctgcgtgtacccggccggcccgtgccctccgttctcc

SEQ ID NO: 571593 - DNA, 187 bp, Homo sapiens
  misc_feature (148)..(148): n is a, c, g, or t
acatggcgatgcctcatctcttctctcaattggaatatctgatttgccgggcgtggtgttgggtcttgtggttccatatgctcgggaggtcggggctggagagtggcttgggccctgtgaggcggagccttgcattgacgattgcacntattgcattccagtcctggagcaacggagtgagaccccg

SEQ ID NO: 571594 - DNA, 159 bp, Homo sapiens
atgatgtggatcatgggaagaaatggactattcgtgtaatatatagccatatggatcattccccaagaccctcaattcatcattaattcatatataaaacaaaagcagagtacaccggtatttgctccagatcagctcacatcacctgggcacagtacc

SEQ ID NO: 571595 - DNA, 991 bp, Homo sapiens
acgacaccagcccctgctctatggagtatttagtctccaggaagctgtgcctttctggttctgacagtgactacgtcatctctgccattacatcatcacataaagaacacctctctctgctcagtcccagaatggctttccctcccagtcccttggctatggaatatgttaatgactttgatttgatgaagttcgaaataaagcgggagccttctgagggccgatctggagtccccacagcctcgttgggctccacaccatacagctcggtgcctccttcacccaccttcagtgagccaggcatggtgggtggtggcgaggcccctaggccaggcctggaggagctatattggctggccaccctgcagcagcagctggggtcggatgaggttctcgggctgagtcccgacgaagctgtggagctgctgcagaaccaggtcctgtctctatggaagggcctcttggctactattcagggagcccgggagagacaggagcccagcatgtccagctgcccgagagattttcggacgccgcgctggtctcgatgtctgtgcgcgagttgaaccggcagctgcggggctgcgggcgcgacgaggctctgcggctgaagcagaggcgccgacgctcaagaccgggctacgctcagcttgtcgctccagcggctgcaacagggcgcgggctggaaggaagaaggcgctcgcctggccgccccagtggatgcccttgcgggccgaggtggaccgcctggtcggaagcggactctatagcgcccgtgtgaccgtgaactccggggcctggtccgacgaaccaacacctcttctctgagcctagggcaggggtgtggcgtgaggggtcggaaagagataagagagaacacaaccaacaaccggtggttgtaaaacacagagcggagaaaaagaccggaaacacttgcaacaaagagcaaatacacagccggaagtcaaagagaacaaatacacaaaactac

SEQ ID NO: 571596 - DNA, 925 bp, Homo sapiens
actagttctagatcgcgagcggcagctactgtctgtaatcccaacacttagggaggctgaggtgggcagatcacctgaggttgggagttcgagaccagcctgaccaacatagagatggagacagagtttcaccatgtaggccgggctggtctcaaactcctgacctcaagtgatccacaagcctgggcctcccaaagtgctgggattacaggcatgagcaactgctgcccagctcttgtgtaccgttatgtgaggaagtcctgctcaagtcaggatcggtcacgcaggccctgatcttgctacatctggttccagtgtcctatggaagaccagagtttaccagagatagatttttcccttcatagtggcagatagtgttaacccgctggacctatctgtaactcagaaatccccatcatttcttcccacttgggcttcagaatagaattgcctggtttctctgatgagtcagcatggttccttaaaaaccaaatcagcaggaatgaacaagtttacgttggcatggatgaaacttagcactgatttggcctcgttaggccccaggcaggcaggcacctgtaagtgtccaccttgcatatactaggtcttcagaagcattgccttttgtcctactggtaggtgacatacgacaagtaatcagggcatctggggactctaactcctgaaaacagtgagtctgatactgcttgtagtaacatcagtgtccaccccaagtggagtcttcctgcttattctcttcacttaagtagacccctccaatggccatctggagcccagttggcaaggaatgtgcacaggcctagcgtacacttcggaaaacctgcttgacaccattctaattccctggatacgttagaagatcagttggggttgcacgttcgggctccttggaccctcaagcatg

SEQ ID NO: 571597 - DNA, 262 bp, Homo sapiens
cccccccggggggggggttttttttaccccccctttttaaaagggggggggttttcccccccccccattttttccccttgggggggggcccccgggggggctttttttttttttaaagggttcccccccccttttttggtttttgtttttccccccttggggttgggggggggccccccaaaaattttcgggggaacccgtttttttttttgggcccccctggggttttcccccttttcccctttggcccttttttttttta

SEQ ID NO: 571598 - DNA, 149 bp, Homo sapiens
ctctggttctacaagagcagcctgtaagttcacacttttcttgttccacttgtttctttattttctccagttcatggatacgtttccctccttctgcaatctgttccgtgaggtcagaaatctcctgctgtaagtgattgttccccgct

SEQ ID NO: 571599 - DNA, 1513 bp, Homo sapiens
atttgaagtattaagcatcaaacaacaaattttgaatacagagaattgggaagtggacagaatgtgaaattcatgaaagtgaaaagatgaagtctaactgttgtggcatatataaatagggaatagttttagcatagttagggctggtagattagtgatacaaggagggagccagatatatatggaagagtagtggtgctgagtaagatgatagcatattgatagagtgtgataaagagtatgaaacagttgataagagtataagtaggacgttaaaagctgaactgacatatgtgtggaagaaagatagagaaacataggataatgtttgtaagatgaagaagacaagatagaggaaataagagataatttaaggaaggtacgagagaacaggtaaaacgcaaatacactacacagcaacacacacaatgataccgtgcacaaagacacacagtcaacaacatacacaacaaccattacaaagcacaaagcacagtcacacgcacgcgaaaaagaaaccaaacgcagacagtagacgaaggaaaaaagaaggcacaataaagcgcaaaaaaaggagaacaaagacaactgaaggacagacaaaacaagtgaacccgacccaaagtggagtcaaataagacacaacaacctaacaaaaagacataggagtggaacataggaacaacaccaggaaacggtacaaagacactagacacaaccatacagaaagaaaccgcaacagtagcaaacaaatccgcaatagggacaaataaaatagaaagtaacagaagagacacaagatataaacaaaagaaaaagaataacataaaaaaaagaagaaaaccacaatacaaaagagaaagaaaacgaaacgcacacaacaacacataaaacaaaactcaacgtacacatggcaacatgacaaaaaaaccaatgagagaaacattacacacaccaagaagccatacactggagacaaaacacaaagaagcgacaacacaaaagaaagaagaatccatcaaataagcataacacaaaaaagaaccaagaaagcacaacaatgaaaaaacccaaaacacaataggaaacaaaagcaagaaaaaatgaagacaaacaaagaaacacgcaacataaaaaccagacagcctagcaccaccaagaaggaagcggaaaacaaaacaagagaacaagacaaacagacaggcgcaagaaaacaaaaaaaccacagcagaacagaaagacaaaaaccacaattaaagatagtgaaaagcaagcacgagtaaacacagacgaacggtaacgcgcaaacagcaaacgacgcgagagattgcaccaaaaaggaaaacagagacagacagaccaccgagacagcacgacacgaccaaccaagaaggaaagaagagtacataagcgcgcgacactggagaaggaacaagagggacaaaagacagggacatgaaagagaaaaaggaaaccagaagggaggcaaaaaagagagagacacgcggacgcg

SEQ ID NO: 571600 - DNA, 262 bp, Homo sapiens
agaacgccccccacttttggagatgcgtcagacattgcccttgaattactaaattctgaatatgaatttgatgaaggctccatcatcttaaatgaaatacaattctgtcctctcctataagacagacgaaaagcccatcttgtcccttaataccgtcaccaaagtctgacagcataaactatctatgacgatattgatgctgacggtgcttgcaaaattaccaagaataacaatctggccaacatcatctattactctctag

SEQ ID NO: 571601 - DNA, 621 bp, Homo sapiens
ggactagcgaactagctgtgcacaaggtgcatgatccaaccgattggaacctgaatgggcatgtgctgaggtttagactcccactatcagtcaaggtctctagattacttgggctgattcctaacctcatgcgtatacctgtgcggaatgcagaagcttcaaaatgaagtggtctccatttaaagatttccagctaagtggcttactacaatatgaatcaatgtcgcaggcttaaacctgcccgttaacgagagacgcattatgaagaagttcacaataagaacatggtgtgaagtcccagaaattatgactatacaatgaccatccctttgcttctactatcttgcgctgctatcaacgttacgcattgtctgtatatttactttgctctttctatatgatgatatttagtacggtcccccttacgtttattaccctcactcttattgttaacttgcgttcatatttactttgtaacataatacctctctattatcataatgtccaagattgggccttacaaatagattctcatcgtaatgttttactttggcaattaatttaatgactagccacatgaactatcattcatgcaatctcttaaattgtaacatgagagga

SEQ ID NO: 571602 - DNA, 712 bp, Homo sapiens
cggcagtgccggccgaaacccggccctgctcggacccggaaggatccgaatccgcccccctgacagggtcctctcggccgaggtcaccccagctgggccagaggcaggcgcacgcggctctacaggcagcggcgtcggtttcggcccggccctgcccccaacggctccgctctcccgcgctcaccccgagcccagtccgccatcgtgccctgccccggctcctcgacgcggacaccgacgcggccacagccgcctcagacgtggccacagccgcctcagacgtggcgcagtcgcggggaaagagcttccggccccgcccccagctagcgatggccccgcctccgcaccgaccacgcccctagatagcccagccccttccgcttcgggctcgctgacttccggcttagggccgagggtggggaactgccgggcgcggaagcgatgggcatatctgtggcttattttcagcactgtcgcgcagacagtggcgcgatctcagctcactgcagcccccggctgccgggctcccaaggtgctgggattacagcagcaccgcggatgtgacgtatggtgttcctgtgaacgtggggcggggcggggccgtttgcttgctcagtgcctagacgatggtggtggaaagacgcttctgtgggttaggtcctaacggctaggaacggattcacaggcgggtcatgaggaaggagcagacccc

SEQ ID NO: 571603 - DNA, 677 bp, Homo sapiens
gtttcatcctcaaattacagagatcttgtttttcatttttttaaactcttattattctcaatcacaatcataatacatgatgcaatgtaaaccttaaattatttatttaatcttactacactaatcagctaacaagatctctgtcttcttagatcttggagcctggaaaaacccagttattaatccccactatcccttcccaaaattctctggttagctgacatgttaataagattccaagaatgttctaaagaaagcaaaatcaccacaaaaaaggactgtgttctgaaagtaaaaactgtgtttttttttccttctctcataatttatttttaatttaaattctgtccttgaatgtgtatacataattatttggtcaggctgcgttcccttataatcaaatataaccactgcaagccgtacaagatattcctttttttttttttgagacagctctgcacccacgctggagtgcagtcggattgacctcgcttaactgcaagctccgccttccggttcaccccattctcctgcttaccttctgatagctggaatacaggccccgccaccaacccggctaattttggatttttagtcacggtttcaccggcttaccaggaggtctcaacccctggactaaggatctcccccttggctcccaaggcctggttcagcct

SEQ ID NO: 571604 - DNA, 133 bp, Homo sapiens
tgtgcgccttctccttgcctcgcagtctgcaggctgtctcactccagagtttgttcatgcccaccgggccctgggctcctgtgtccgtgcgctcctgggctgtgtggtggctcctctagagtcgcactgctgt

SEQ ID NO: 571605 - DNA, 386 bp, Homo sapiens
  misc_feature (160)..(160): n is a, c, g, or t
atctttttatttcatgagcagctttgtgagtacattctcaggtctaaagtcctcaccctcttctcctattcccccagggcccccagtgaaacacacacatacattaaacagtgcagtttgttatttcaggcctttttctttgcatttatgaaagtagcgncgcatgctgcctcacacctgtaattccagcactttgggaggccaaggtgcgtggattacttgagcccaggagctcgagaccagcctggccaacatgatgaaaccacgtctctgctaacactacaacaattcgccaggagtgcataccacgtgactttaaatccggatccccgggacgctgagaactcggcatcactagcaaccaaggcgctacagcttgacgtgag

SEQ ID NO: 571606 - DNA, 354 bp, Homo sapiens
  misc_feature (106)..(106): n is a, c, g, or t
  misc_feature (160)..(160): n is a, c, g, or t
  misc_feature (209)..(209): n is a, c, g, or t
  misc_feature (261)..(261): n is a, c, g, or t
  misc_feature (276)..(276): n is a, c, g, or t
  misc_feature (326)..(326): n is a, c, g, or t
agctaatctgaattctgtaggctaaaaaatattcatgtagcaaatctgagaattgaaaaactgcagattaccggccgggtatggtgactcatgcctgtaatcctancgctttgggaggccgaggtgggtggaccacctgaggttaggacttcaagaccancctggccaacatggtgaaaccccatctgtactaaaaatacaaaaatttncctggtgtggtggtgcatgcctctggtcctagctactcgggaggctgaggcncgagaatcacttgancctgggaggcggaggttgcagtgagtcgagataacactactgcattccancctgggtgacagagtgagactccacctc

SEQ ID NO: 571607 - DNA, 438 bp, Homo sapiens
acctttgcctcaacagatcagaaactgcattttcgtcagtcatgaacgcttaagtataagggcatttcggtgcttatgtccgctgaaaaactagctgacggacaaagttggctgtgtgtctggtgctgcagatgcttggtatctgaagatcttaagtctccttcacttagctaagaaaaagctgactggatgcttgccgcatcaatttgctcttttaactgcgcttctctcttctaacttaccttagttctttggggtactaaaggctaaaatctactgtacttatagctaggatttctctttcccacatctttctgataacctaatatcctcaagtggagagtctgggggcatgggaaagaaaggagggcgctttagaccttagaccactatggtagaagcagaggaagtcaggtgtaaggcccctaaaacttttgg

SEQ ID NO: 571608 - DNA, 1034 bp, Homo sapiens
ggcagagccagccggctaacgtcgctcggaccgggcacgcacgctcagctgcaggaggaccccccaaagatttttatcgcttaggtatattgaccaacagtttaacgagcaagcaactgctgcatcagcctgcggaggcatcgcctgcacaggcaactgcgaagttagcctcactcagcttcactgcctgaactgaaccgaacgcactacaactcacactacgcgtgaacgctccaccacggcccacgctcactcctcccgagctgggccgacgcactactcggacgcaccgcctctcgctcgcgcccaccacgcacgcgccctgactgcctccggcgaccacccccacgcaccgacctcttcggtcgacacccgcctccgtggctctcctggcccgacccacgccctcgcccacggcgccccctccgtaccccgccccctcctggccttgccgtcccccaagctcctccccctctacccgctccactcgcttctcgggccgcaccccacctctcgtccccgctcccactgcccggccactccgcctccccctgctcgctggcctcctccactccggtagcccctccccctcccccctccccccgctccctccttcccctccctaccgcctcgcccgctggtcccccctctccccccgaacccgccgcccgccccgccccccccgcccccccccctcccccccccccctcgcccgcccccccccccgtccaccgccctctcctccccccccccccccctccgcccctccgcccgctgcccttcgcaccgaggccgctctcgcaccccctctccctctcccctccccccctcccccttactccgtcccgcccctcgcgcctcctcttccccccgctccctgccttcgccctcgcccgccgacccccccgcccgcttctccccccgtcacacctcgctcgccgcctcccccgccctcctgcctctctccccctccctcgtctcctgctgtctcccgtccatctctccctctctcgcactcagcactgcgcacgtga

SEQ ID NO: 571609 - DNA, 1378 bp, Homo sapiens
  misc_feature (1302)..(1302): n is a, c, g, or t
tctcaaaaaaaaaaaaaaaaaaagccacaaatagaagggggactcggtcaagaaaaagcccaaaatattgcgtaaccagaacacgcaaccaggagaatgaacacaaagcagggatgtgggggaaacaaaacagaggagttttcagctttctgtgacccttccttcgaggatttagaaagtgtggggatttcagaggcgtgggaagggtgtgaaagcatgtgatttcttcaagaaaccagcctcggtgctgtgaaagtcttactgtggctctcacctttcctgtggtctctcagggaatgtgtctctcctgtgaatgtgcataatgtgacgtctcggtggtgaatctcatgtggcctctatagagtgtgttctgtgcatgtgcctgtgaagcccgaagccttttatcctctctatgtggagcccccctgtgtgtgatagtgccagaggcttgtggtgtggtctctctataactctccccacactctcacacacagagaatagagaggagatacagtctcctgaggaggctctcacaagaaagacactgtgagagtataacactttctgtgtgaggaggagttttcacacacacatagtcaccacacacgtgagagaccagaggtgggtcgtccatatataagaagagaggcgccccttaatagtagagagaataatatcatccctatactcaccgagaactctccgggagctttcattagaaacaatcttcacaatactctctcagtattaaaggcgcgaccaaagacgcttgagggggcgagcacttctccacacccaccgaggtggggaaaaacccaagccgctgctaacaacgagtggagaccacgcggtgataaacaaaccccaagagaagagaggcccaacccacaggtgatgtcatacaacacatattgtagtggggggcatactacacaccacattattctaccctggtggggtgtatggtggtggacttcccccacacactgttggggataaggaggatatatgtagcaccagttcgatctgcaaacaaggtatctacacagatcattgttagagatcaaacaccagtttttgttgttataataattatattttaaacgacgaacgccgacaatacagaggaagatcaaatttaaagtatatacctccttttggtgagaacggctggttgggggagaacacaccaatatattaaaaagaaaacagggcgcacatggttgagaacaacatttttttgtagtgaacaaaagaggctgtttataacagacaaaacgatgttgtggtctaaacagcganataacttaatgtgtggggggcagcacccgcctttattgtagtaacccatgttagtcacagactactacaaacttaa

SEQ ID NO: 571610 - DNA, 670 bp, Homo sapiens
gattgaaatactatgatacagatatgtctctgtaataccgttgctattgaagcacttagtttagaaaagttaagaacagaatctcgctgtgtagcccaggctgaagtacagtggcacaatgtctgctcactgcaagttctgcctccgggtttcaaccaattcttgtgcctcagtcatccaagtagctggaactataggcacgggctactacccccagctaatttttggtatttttaaagagacagatgtttcaccattgttggccatggctagtcttagaatttctagccctcaatgtgacccacctagactcggcctccctaatgtagctgggattataggcgtgagtcactgcgcccggccttctgaagcatttgggatgctttggtaaattgggttatgctttgggtaccaaaatattagcctggggtttgggcagttatttacttttctttccctttttttgaaatggattttggcttttgccccccaggctggagagcaatggcgcattcttggctcactacaacctccgcctcccaggttcaagtgattctcctgcctcagcctcctgagtagctaggattacaggcttggaccaccacgcctggctaattgtggtattttcagtcgagaggaggttcaccattttggccaggctggtctctaa

SEQ ID NO: 571611 - DNA, 194 bp, Homo sapiens
  misc_feature (118)..(118): n is a, c, g, or t
acgatcctcatacacggatccccctatcgatatgtgcttcagaggtcaatgagcgctacactgtgaagaacccaggaatatacggggtctgtgtgtattagaaaattcacgagattcngactgggcgcctcgattcatgcctgtcatccctgtcactctcgcgtgaggccgaggtatgctagatcacctcgagg

SEQ ID NO: 571612 - DNA, 144 bp, Homo sapiens
gatccccgtcaccaaaccctaacatttttaaatggtggtattatgtttgcacaaactgattaatacattaaattaagccaagatcttagaagactggcaaagttctatcattctattctaaaaacaaagatagggtttcgatga

SEQ ID NO: 571613 - DNA, 1264 bp, Homo sapiens
ctctaaatccccttgtaaatttaactagtatagtccaaagaggaacagctctttggcacactaggaaacaaaccttgctacagagagctaaaaaatttaacacccactagctacggcctaacaagcagccaccaattaagaaagcgcttcaagctcaacacccactacctaaaaacatcccaaacatataactgaactcctcacacccaacttggcaccaactctatcaccctactagcaagcacactaactgattagctactacagtaacactgaaacaccattctcctccgcactaagccctgcgctcacgatcaaaacactgcaactgacaacttaacagcccaatactctacaatcaaccaacaagctcattattaccctcactgtacaacccaacacaggcatgctcactccggacacaggttcaaaaaaacgtacaggaactcggccaaatcctctaccccgcctgatataccaaaaaacaccatcacctctacgcatcaccagtaatacagaggcaccgcctgcccagctgacacactgtcctacaccggcccgcggatacccctaacccgttgcaacacggtacccataattcacttgatacccttacaatagcggaccctgcatactgacatgggcttccacggagcggctcacacccctgcccgctcctctaccgcccacaacccccaggcagacacaactaggaaacgtgccccggctgcaacgcagcgccggcggccctgccaacccgccaaagcaacgacagaacaagaacgccaatatgggaagccacatctaacgactccactcaaacatgcccacaggcacatacgcacctatacccagggaagcccgaacgcaagggactcccttacgcgcgcataccccaacacacgactgggccagtgttcgagacgaacgcatcttcgaggcaacatagcggcggcggaaacccaccgcgcaggcacgccgccaggaagaggcccgaccagcactccgccgacaaagcactgatgactacccactgcggcactagcaagacactcgtccgacccacagacatacaacaggcgcgcgcatgcacatacaccgcaaaagccgagcaaccgtggagacgtcgccacgatatataccattgtgagtaccacaaagcgaacacagtcacgagtgatcacaccaaagagggggaatagaacgaacgggcgaacaggctagtcacgcgctcagggaaccccacgaccgctcccagacgaaa

SEQ ID NO: 571614 - DNA, 685 bp, Homo sapiens
  misc_feature (1)..(1): n is a, c, g, or t
  misc_feature (218)..(218): n is a, c, g, or t
  misc_feature (221)..(221): n is a, c, g, or t
  misc_feature (522)..(522): n is a, c, g, or t
  misc_feature (633)..(633): n is a, c, g, or t
nccagcgggggaaatcctgtgaggggcaggcggagcttgaggaaaccgagataagtttttttctctttgaaagatagagattaatcactacttaaaaaatatagtcaatagggactaagatattgcttagcgttaagtttttaacgtaattttattagcttaagattttaagagaaaatatgaagacttagaagagtagcatgaggaaggaaaagatnaanggtttctaaaacatgacggaggttgagatgaacctccttcatggagtaaaaaatgtatttaaaagaaaattgggagaaaggccttcagacccccgaattaataccaattaaaggggatggctttaagattaaaatgaagtgaccttaacagcttaaagttaagttaaaaggtgtgggtgataaaataatttgaagcgatcttttaaaagagattaaaccgaagtgataaaagaacttgaaatccatgacgcagggagaattgctcattaaagcctattaacgctttactaaaccaaccaanatgggagaataatgggaaggggagatgaaacaattggagaaatagaatttgaaggggaaaccgggaaacaaataccgggaaggcaaaaaaatattaggaagttgggaattngaattttaccttcctttggaaaaaagtttatttaacctaaaagtggcctatt

SEQ ID NO: 571615 - DNA, 895 bp, Homo sapiens
gactctttctgtggataagagaattccacaataaaggatgttttaatttcctctgcgtaaatatttttggctttttgccacccaaattgagatgcttgttagaaagtccctttggagcccatttcgggtggataaccacatctagaagaagatattttctcgaaccacatgtaattttcgcgtaagcaccttaaaatgggaagtccaaaactttctaagggagtcttaataggcaaatagttaaaacatatctttgcttggtggttcttggaaattcttctccccacagaaagtgtgacacacgttaagaatatagcacatttaaagttttcttcgtggcccccctctataagaccccaccttttataggaaaaaaaaactaccacaaaaggagtaaaaaatgtatgagaggagaaatatggagaaatgtgaattcttctgtcacatgagaccacatgttgtgagataacacaaatgtttccaatcacatgttaaatgagattcacccacacttttcccttgcacattaaatattgaaatttaaagcacatttaaattcacaaagaagaaaggggaagcacatccacattaattgaaaacaatgtgggcgtttctaaaaaactccacatccctttaataaaataagtcaaaggtttgggccaccaccacaagtaaaatttttaatcactggagaaaaatttcaaactcctcaaagccgtaaatgttgaacagaaattggaggtaattttctttataaattttttgaaacacaggcacaaatgaaagcttaattatatatgaaatgcatgtattttcttttatctttggaacatcagcaccagtatattgctggcagctattgtaattaaaaaataaagtaaattttcactatcca

SEQ ID NO: 571616 - DNA, 416 bp, Homo sapiens
ggcaggaaacattgacgggcgctctttgagccagcgcttctgtcattcctgtgcacactcagtcctgtgacctcccagtgtgggacaaagctccactcacgtctgcattttggggtggaatttaagcaccgtctggactaagaaatcattgcagagacgttcgttcccagggatctgaatgaagtagaaaagtgcagatgctcagggatgattcgtcctgctcttgagtgacaccaggtctttctcatctttgactcaggaggtgcagcccacggtgtgtgcagcttagcacacctgggcagggcacaatctgagggcacacggaggcccattaacaccagccgtgtattcagtgatcagattttatgtgggaaacatttcttgaccaccatttaataccattcactacactggaa

SEQ ID NO: 571617 - DNA, 756 bp, Homo sapiens
caatgtccatcgatgatagaatggattaagaaaatgtggcacatatacaccgtggaatactatgcagccataaaaaatgatgagttcatgtcctttgtagggacatggatgaagctagaaaccatcattctgagcaaactatcgcaaggacagaaaaccaaacaccacatgttctcactcataggtgggaaatgaacaatgagaacacttggacacggggtggggaacatcacacaccggggcctgtcatggggtggggggaggggggagggatagcattaggagatacacctaatgtaaatgacgagttaacgggtgcagcataccaacatggcacatgtatacatatgtaacaaacctgcgcgttgtgcccatgtaccctagaacttaatgtataataataataaaaaaaaaaccagacccaatgatatgttgcctacaagaaatgcatttcacctacaaaggcacacatagactacaagtaaagggatgaaaaacagattttccaggccaatggaaactaaaaaagagcaggagtagctatatttacatcagacaaaatagatttcaggataaaaactttagagagacaaagccattatataactgataacaagggtcagttaagcaagaagatataacagttgtaacatatgtatgcatccaacattggaggaccttgctttcagcattggtcagatcatccagacagaaaatcaacaaagaaacataggacttaatatgcattatagacca

SEQ ID NO: 571618 - DNA, 1165 bp, Homo sapiens
gcgaccagccgcgggccgcagggtcatggaccttcaggccgctcggggcccaggcgcagggggaccgtcgggagccagatcatcagggtgcacctgtcactgtcttgctcttaagcgcgtcgggtgggctgccccccaagcccggaaggcttggcatttgctacagtctgaccaacatccgagtcaggtagagagagactgagtaatggctatggatctgactagcccgtggaacacagatcattcctaatgacagttcctgtccccggggtgaggggcacccattctgaagaggaaggctttgccatggatcgaggaggacgtcgtgactggagaagctgaactaccgtggggagctgtctagaagggactaaactgtctcgacccaatggtaacagcctggcgatctttttactgaggactgggacctcggaggttgcaaagcagatcaagggaatccatatgatgctgacgacatccaggagagcatttctcaaggagcttaagaccttgggtgtgctgtgccccacaaggtagacatgagtctatgaccccagatggcaccatccggctccacttgataccctattattccaagcatggtctttgaaacaggacagtttgacgatgcttgaagattgagtgtggagctttctgccttgtaagtgggcggggcttccacgtcaagatctcttttcctgtcttggaggtgaacaggtactatctgagaaaatgtctgcgagtgaacccctaattctggggtacacaagaccagtgttactttattgagcatgttcataaggccccgtgctttttcgccagtctgtgtatggtcttaaggggacctccttgaaattgtgctgtcttgcgttccagagagatgaggatccttgtaaaacaaggttaagggagcacatcacacactacagacaactcagagcaataatataagggcgcgaaaaagggatattaaagggcacgtacaaatgtcttctgcacctttttcccgtggaattgcgcccaaaggactattggaagagtcgatgtatataaaaataagaactgacacacaataattatagcgtgagatcaagaaagacaagtaacacacgaatataagaagatgttgatgtgacataaacttattatgaacagaaaatatgaa

SEQ ID NO: 571619 - DNA, 1004 bp, Homo sapiens
  misc_feature (485)..(485): n is a, c, g, or t
  misc_feature (491)..(491): n is a, c, g, or t
  misc_feature (565)..(565): n is a, c, g, or t
  misc_feature (567)..(567): n is a, c, g, or t
  misc_feature (638)..(638): n is a, c, g, or t
  misc_feature (653)..(653): n is a, c, g, or t
  misc_feature (676)..(676): n is a, c, g, or t
  misc_feature (687)..(687): n is a, c, g, or t
  misc_feature (754)..(754): n is a, c, g, or t
  misc_feature (853)..(853): n is a, c, g, or t
  misc_feature (883)..(883): n is a, c, g, or t
ccagccttctccctgagtggctgctcctggtgttgcctgctgccttccctgccctacaacccccaggagaagattccaactatgtcattcgcccacacgatacagccactgcacttcttcagaacagaattgacaaacaaagttcggcacatcctccacggcatatcatccctgataaaggatacatgtatctaagtagttcactgtgtgaaagcagtaaatgaggcacctggcaagaaaactaaccgtgaactcttcgcataagattggcttgaataatagattggaccgccttctcctctcctcggtatgtcacccagttgtcgtagacgtacgaccctcggccgaccatgcctatatttacctctggatccactctcggttccttatttcgtccgctactcactccatcattccctcgcctaatccacacaagtcgtgtctggtatcaacccacacgagtgtcattcattatgaggttgttntattantttatatccacgtcgtgcgtctcgtttgcttagtcgcttcacaagtttattgtgtattagtttgaattattgtnantcctgtgctctgtagagtgctggtttctctttattcagtttgctccaattgcgattatcagatgcgaagancgagcaatgatgcgnacattgtgtcacactattatagntccagcagtcnccacactcctctgctacccgccgcctcatatcatctgtgttatcattcattacttctagtacgcgantctactacacacctcactcgctcaatcttcttctcatatcctactacttcatacccgatagtattttaaccaccgcggcagtcatcgccgtcgcagtgntgtcattatgatcttgccagctatcatatnacatattatttgttgctccctattgctcagttgctcttattgtcgtctctactctgtatgtcctgacgtcgccccgtcaccgccttctcgcgcccgggagcgcagttctggattgtctgtt

SEQ ID NO: 571620 - DNA, 172 bp, Homo sapiens
cgcacagcttctcgagtagctgggagtacaggcacgtgccaccatgccagccaatttttgtatttttagtagagacggggtttcaccacattggccaggctggtctcaaattcctgacctcgtgatctgcccgccttggcccgacacagcttctctggccgccacagcttct

SEQ ID NO: 571621 - DNA, 188 bp, Homo sapiens
catgcgttcagtcgaaaggccatatatcacacatgcacacacagcacacacacaaacgcacagcacacacaaacgcacagcacacacacacacagcacacacacgagcacacagcacacaaacgcaacagcacacgcacacgacatagcacacacgagacacacacagctagacacacatgcacacac

SEQ ID NO: 571622 - DNA, 346 bp, Homo sapiens
  misc_feature (43)..(43): n is a, c, g, or t
  misc_feature (307)..(307): n is a, c, g, or t
cgaaatcatggactaggacaaggttagcccatgagtgttaggnaggccgaggtgggtggatcagctgaggtcaggggttcgagaccagactggccaacatggcgaaaccccatctctactaaaaatacaaactttagatgggtgtggtggcacacgcctgtaatcccagtgggggtcacccagggagcatatctcctggtgagaagtacaggagcttcacattccctggatacgtcccagcccgaaatgttcaccgtgaatcccggcaaccttgttgaagctgattttccatttctaaggaaattangggggggatttgggaagaaacccccccaggacaaagaac

SEQ ID NO: 571623 - DNA, 302 bp, Homo sapiens
gaagaggaacggcctaaccctaacagtgattaaggttattaggaggccgggaatggtggctgacgccagcaatcccagcactctggaaggcggaggcgggcagatcacccgaggtcaggagcccgagaccagcctggccaacatgatgaaaccccgtatccaccaaacacacaaaaatcagcccggcgtggtggcgggcacctataatcccagccactcgggaggctgaggcaggagaaccgcccgaacccggaacgtggaggttgcagtgagccaagatcgtgctactgcactccagcttg

SEQ ID NO: 571624 - DNA, 271 bp, Homo sapiens
caacagagtgaagagacagcctacagaatgagagaaaattattgcaaaccatatgataatggtttggctctgtgtccccacccaaatctcatttcgaattgtaattccccatgtgtcaatggagggatctgataggaggtgactggatcacgagggcagttttccccatgctgttctcatgatagtgagtgagttctcataaggcctgatggttttctaaggggctcttcccacttcaccctctcttcgctctcctgccagggtaccgagc

SEQ ID NO: 571625 - DNA, 109 bp, Homo sapiens
gtatgacatgagcaccgcaccagcctcaaatctttcttgcagttagttcaaatctttttcactacagctcaaagcccttagcctcttggatcatcatcctcccatttct

SEQ ID NO: 571626 - DNA, 316 bp, Homo sapiens
  misc_feature (12)..(12): n is a, c, g, or t
  misc_feature (54)..(54): n is a, c, g, or t
cgttccaaggcncccgtgaatattccggctccaggatttccccttcccactcgntccgtttggaaatccgttcgctgttctgtctcctctaatcatagtggagctttggctccagggtcgggctcttgcgaaatccagacctggttttcgctccagccaaagccaggcgccttcgttccgcccggctctcgcgcttagccgcctccgagcctcaggggccctcagtcgtttccgtctgctggcgatagtcccggccgggtcgctggtgttgccagttccgcccaaagcagcttctaatagcatcaactgaaagaaa

SEQ ID NO: 571627 - DNA, 449 bp, Homo sapiens
  misc_feature (356)..(356): n is a, c, g, or t
aatgtggtccgtgttcacatgtgtctctgtgtgtgtgagagagaggggtcagctgggacgctggggtggcagggacagtcctggctcacccctcatcctccctcgacctcgactccctccacatgaggagcccccccttcctggctatcctgtgagttgagcttcctctgctgggagggctttgtcagaggttcctgcggttccagaaggaaagctggctgcagggagggccgggcactggacaccgtgtgctgacctgtggcgggggctgcacagctgggttcccagcccccctccttgtccccaccccaccgcactgggaggcctgctgaggggccagagtccggctgcaggtnccacgggtgggggtggggcccctcattagcactgcagctgacactgagggcttccacctcgctaattgattaaactgtttagaaaccaggaaa

SEQ ID NO: 571628 - DNA, 202 bp, Homo sapiens
gaatgagtactgatacatcagacagcgtctgcagaggaaagactaaagcatgtatgactgaagactaaagactcagtagcccagagtaagaaatgaggaatagcggtctaggttcccggtaccttcacatttgtaattccaggttctgtgaggtcttcacctaaatccatgagagattcctttttataataaatatctctca

SEQ ID NO: 571629 - DNA, 344 bp, Homo sapiens
  misc_feature (15)..(15): n is a, c, g, or t
tctacaggatcccangttcgacggacgactctcatgtcattacccccttcagacgaaaataccaaatgcatggagagctcccgtgattggttaatagggtgatagacctgtgagtccattcgtgatgtcttgactatatgagggaacgtgtgggctattaaggctttctggccctgtagctagtaactaaactgctccgtctactgttcatttctttctaccccctagtgcttttgggcccggatccgagggagagtagcgctcttgttgcgggatattgatttctacggatgatggtggtctagggacccctatctgaggggggtcatccatggtgacgagaa

SEQ ID NO: 571630 - DNA, 286 bp, Homo sapiens
ctgactctagaggatacaacttatgctctgacccaccgagaaggaacagctagtcatttaacaggctcttcttacaccaagcattgccgtgacagacctgaggactctgactcaaagcctggcacaccagcaaggcaagggattgtctcagtatgtaatgaccatatgttcacaggccatgtgctggtgtaggtttatggtctgagagggcttaaggctggagaacaggttctttacctgctgttttattggaaaacacgaagatttcctaactagaatagaagaa

SEQ ID NO: 571631 - DNA, 248 bp, Homo sapiens
  misc_feature (24)..(24): n is a, c, g, or t
tttagaggcagcgtgggtccatcngttgaaatagttaaaaagacatattcaaggataaaaatgtagtaaaactttcactgattgatcatagacattcttttgagttttgagacagggccttatcctgtcacccaggctgaagtgcagtagcatgatcacagctcactgtagcctgcaccttctgggctcaatcaatcctcctgcctcagccttgtaagtagctgagactacaggcatacaaccaccat

SEQ ID NO: 571632 - DNA, 1644 bp, Homo sapiens
tattgcgagtcagtgcagatcgacctgcgagaacataaatagttgtgtcacattccgatgcactattcagaggaacgaccgttacttgtgacgcatgagagagacacagtcgtgaggtgacggtaggaaggacacacctgcgcattcacaagcactggaagtggacacttactagtctgagacttgcgaccactcacgcgttaggcagtagaactctgccgagacaataaccacgtagtaggagtcagtacactacttagtgacacaagataaagtggactcgtcactacagaaacgcacactcgcgagacatggcttgggtcctgcacatgcgcgataggcacggcacttggccacggtggctgaatgtaccatgtatgtcttcaattccatacaatagaaagactcgagtgcgagccggcccctatcaatcttgctgttcgcggggtggcacgcagtggtgtaattcaattcgcgccataggcgctgtctacatgggttcccactagggaggtgaggccctcgcgtaactgacgcaagaacgccgcgttcactatgacttaaagtggcaacagggtgcctatccgcgaggcccttggggaggtttttcaaaacagaagtggtggcggtccgcattatgcgggagcaaaatacatatgaggaacatcccaaacggggggggaccaccacatagtaacgtggagacgcgagaggtggcggccaacgcttgcacgttgcccgggcgggtggaccacacaaaaggctagggcgggcgcagaactatcactcccaattgatggggagacgttccataccgtgctccgaaagttgcgtggccagatctataaataactatatgggttgggggccattcccaagggggttgtgggccagggagcagcattacgcatatgaaataggggtgcggatcccgaatgtcgaagaggaggttccccgtggaaaacaggcccgtcaagagctagagaaacaaccgggataggaactcctcctagacctccggcatcagagagaagagcatatacaaataaagccggggcccgtggaccccaggtccactttccaccacctgacacccattggcaccaacaattggctagggcctccccatgagcggaagaccatcaccatgaaataaacccccctttcctatccggaccaagggatggggacatccccagggaccgggggaaggggccaaaagcccccacatagggccatatctcaaaccagtgagtaatagcgccaagaaaaaacaaaaggaggcacccaaacatagaggcgcacccacacatatggacaccacgaaacaactacaccatacgcacagagaaacacaaaaccactggaataagagaaaaaaaagagacgaaaaaggaaaagaaacaacgaaccaaagaagacaagaaaaaaaagaacacacataggaaccaacgggacagcaaaaacgagcacgaaagaacaaagaaaaaaaaagaaaaaaacaaaggaaaggaaacaaaaaaaatacaacaccacaaacagacaaaaaagaagcaacagtaaacacaacaagagaagaaaaacaaaaaatcaaacaaacacacaaaaaaaaataaaacagccgacaccgcaaacaacaaaaaa

SEQ ID NO: 571633 - DNA, 157 bp, Homo sapiens
atgcctgttagtctgtctctagagttatccccacccgtgcaccggacagatcagctattccgacgcgcatttattcagtatgattaattaacataagctagagtcaacaccattagagtgtaacagacattgtggacttatcgcggtaaaaacgcat

SEQ ID NO: 571634 - DNA, 244 bp, Homo sapiens
  misc_feature (109)..(109): n is a, c, g, or t
  misc_feature (225)..(225): n is a, c, g, or t
aaatagttgggtgcagtggctatgcggtggcactataggaggctgaggcgggcagatcacctgaggtcaggagttggagaccagcctgggcaacatagacccctatctntacaaaaaatttaaaatatgaaaaattagccaggtgtagtggtgtgcgcctgtggtaccagctactcaagtggtcctcccacctaagcttccccaaatactgggattataggtgtnagccactgtgcccaggctt

SEQ ID NO: 571635 - DNA, 288 bp, Homo sapiens
taaagggtttttgccccccaaaaggggtaaaatggaaatgggggaaaaattgttgggaaagggaacccccccctgctttgaagggtttggaaaagccccatttaacctttaaaaagggtttgtttcccccaaaccctttggggggaaaaaccctatttttgtttttttaaagggccaggaaaaattgtttttttctggccaaaaacccctttttttttttttgccaattccccctccaatttggaattaagccccggttttgttttcaattaaaccaaaaaatcctta

SEQ ID NO: 571636 - DNA, 247 bp, Homo sapiens
aggattcacggccaggagatatatcacatggctggaatgaaaaacaggtatacaaccataagcatgagatccacatgtcccaaagacttactgaagtccagttgttgactgcatcctcagcacagcacgggccatggcaccataagagctgcgcaatgaggatgagcggtatgagaacaaaaatggagcttgtgatcatgagggtcagctcattagcatgagtatcaatgcatgacagtctaagcag

SEQ ID NO: 571637 - DNA, 119 bp, Homo sapiens
tgcttgattctggtacgggagtggtaatgcaagaaccaaacaatcctacactcaaagagaaaggttggccctgcccccttaagatcagtgtagcataaggttaatgaaaaatatatata

SEQ ID NO: 571638 - DNA, 238 bp, Homo sapiens
  misc_feature (57)..(57): n is a, c, g, or t
tttcttacataatatatttgttttgatagagatgtagagttgggtgggtgtttttgncactctgaactttacacctcattaaatttttgacatctacagttggataatttagccgcttagttgtccttttttttatacattataacatagtgagagaaatttatattactggtcattttatttttggcagtctatttttgtttatgttcctcttttttttaaacttaaattgcttaat

SEQ ID NO: 571639 - DNA, 316 bp, Homo sapiens
gtcccagctacttaagatgctgaggcaggtcgatggcttgagcccaggagtttgaggctgtagtgcacaatgattgtgggcaggaaacaggacctcgactttggaccagattcaagactggctgaaacagggaagaggcacagaaagaacttctccgtaagacacgcccaccagcacgacagtttaccattgccatggcgacacccagacgttactgcctttttccataacaacctggaagttaccaccccttttctggaaatttctgaatagcccactctttaatttgcatgtaattaaaagtcaatataaatgt

SEQ ID NO: 571640 - DNA, 276 bp, Homo sapiens
atggatagcggatgaggggctggcgacaataacgggcggatgtctggacgtgtgataactgtgtgcttcgtctcatttccacccgccaagactacaacttctcgtcagtctgctcagcggtgagtgagtcctgcctgatcactgcccatgggctggcggggccacctccgcagtgaggcgcctccatctagcgtgtgtgtgtgtgcgcgtgaggttgtgtgtgagcacttggcgggaggagggaggggacgcatgtccagctctctgtcctctggg

SEQ ID NO: 571641 - DNA, 184 bp, Homo sapiens
tcgaatcgacggtttctccagaagaattctctaagttcatttcagacgcaccaggatgttgccggttagatggctgcattccacacccgcctcatggagccatgccgtggagcctgacgcaagctttaaaggcagtcgacattaatgaagtctcgtggtttcttgtctacatccaacgtcccac

SEQ ID NO: 571642 - DNA, 330 bp, Homo sapiens
gagattggttctataagacataagttgtcaatcttgatcgcatgcgtaaccatgcacagccataccttgagacggagctattcttaggttaagaaccgtgagtgagaacgggatctgcgactgtgattactaggcacagctatgacttgcctgtgactcataccaatcaatgtggcgtagctgctgaccattgagctatatattctatgaatgtgctcctgcgcccagggtgtgtttacacagagcgcgcagtggtgagaacctgttatctactgttgagggaccctatgatagctggcgaatgtgatgtatggctatgacaggttggtg

SEQ ID NO: 571643 - DNA, 133 bp, Homo sapiens
ggctggttaagcccccgacacatccgcttgcattgaggttcagctcagtgagtacaggagatcctgagtgagtgctcctgtactcaccgctccatggtcccaaacagacagtggggctccttgtgtgaaagtg

SEQ ID NO: 571644 - DNA, 852 bp, Homo sapiens
  misc_feature (98)..(98): n is a, c, g, or t
  misc_feature (210)..(210): n is a, c, g, or t
  misc_feature (326)..(326): n is a, c, g, or t
  misc_feature (527)..(527): n is a, c, g, or t
  misc_feature (576)..(576): n is a, c, g, or t
  misc_feature (601)..(601): n is a, c, g, or t
  misc_feature (723)..(723): n is a, c, g, or t
  misc_feature (753)..(753): n is a, c, g, or t
  misc_feature (812)..(812): n is a, c, g, or t
cgggaaacggggaggcccaaacccaggcaggcagcaaccgcccctccgcatccagacattcccagcagtcaggaacacagaaggcaaccgcagcaccnccccccaccgggccggggcccaccagcggtcccagcacagggcccaccacccacgagccccccaagcacccagaaggagccccccagccaggagcagggtagggggagcccngcaaggccccaaggaacagagaaagcaaccccaccacagccttggggccctgggtgaggcagaagaggccccccccgccagccccacaccccatgtcgggggggcccgctttaacnggaagcacaacaggcagtaacagcacccccaccagcagggccagggggaagccgtcgtgcaggccttgggtgcggcactcgtgaatggacagaaccccctgcaccagggccagcaggaagagggcggggccaagaacacaagggacacacgaagggagaaacaagacagagtcccagaaacacagcacccaccagcataancacaaaggagtccagggacagcagaccaacggggacctggggcagcagncccacgtaggcgagcgcatggcagnggacatgcggagggccctcttcagctccctgctccgacaagacatcaccttctttgacgccaataagacagggcagctggtgagccgcttgacaactgacgtgcaggagtttaagtcatccntcaagcttgtcatctcccaggggctgcgantgcacccaggtggcaggctgcctggtgtccctgtccatgctgtcgacacgcctcacgcngctgctgatggtggcacacagccctgatgggagtgggacc

SEQ ID NO: 571645 - DNA, 543 bp, Homo sapiens
  misc_feature (477)..(477): n is a, c, g, or t
  misc_feature (486)..(486): n is a, c, g, or t
  misc_feature (492)..(492): n is a, c, g, or t
  misc_feature (500)..(500): n is a, c, g, or t
  misc_feature (514)..(514): n is a, c, g, or t
tgacacttgatgtggtatcttttctaacactactccagttctctagataacaactgggcattccataattcagtttaattctgacactatctgcctggagttagcatcaaatcctacaagttaaagggctcagtgtcacaagactgacccaacttaagacaccagttgtaagtcctgggctacctgtgtttctgaccaatggctgtacatcagtggttcccataactccctctttggatttgataattttctagaatgattcatagaactcaggaaaacactttacttacattttgacttacgtggtttttttataaaggctacaactcaggaacagccacataggagagatcacagggccagctgtgggaagtgggggtggcatggagtttccgtgccctctctacttgcaccaccgtctcaacgcctctgtgtgtttaataacccgaagctcttcaaatcctgtcgttcaagggnttctttttnattttnatttttantttttttgagacancttgggcgacagagcgagaccatgtatca

SEQ ID NO: 571646 - DNA, 146 bp, Homo sapiens
gagtgatcgtccggtgccttgagatcccttcctgctcagctctgagtactagatgtagggtcaaccctacaggcttagggggtgtctccctatgtgcagagacaagagattgtaatcaataacagacacaaggacgaagacgataa

SEQ ID NO: 571647 - DNA, 894 bp, Homo sapiens
agcgtgtagtaaaaataccccttgacatcaattttgaggagagtaggtgctaaggaatgatgactccgtatttcaaccacttaaccctcagtatcatttctttctttattttttgttttttataagaagacaagggtctcactatgtggcgcaggctggtctataaactctgggcctcaagggaatcctcctgcctcagacatcccaaatggctgcaacatacaggcatgagccaccagtgctatatcatttctgatatggtatgggctcgtgttgttccccacccaaatcttatctcgaaatgtgtaatccccaagtgtcagggaccgtggtgggaggtgatgggatcagtgggggatggtctctcagtgctatctcgtgatagtgaggtagttctcattaaatccgagggttaaacaacgtggtagttccccgtggtgttgctggacctctcatctccgtgatgtgccttgtgaagcaggtactgtgttcctaccttgggccttctgccagtgattactaaggttccccaagggttccccagctgttgtggaccgtgtgagccaattaaacctctataggtttataacattatccagtctcaggtagtatctttatacgcagttgtgaaaacggactaaatacacttttttaaatccagagttgtgcaacggtgggtgtcgaccagcaagtatactcccttttaccaaaacttgttagccacacccttggactgacatctttccacatgaaatcttgattagccccagggatatatgggggacccaaataccttgcaacaccctcaaccgcggcatttacgcgccacaagaccgcacctatcctcgtgcttgcccttcaccacatttgaacaaagcacatgcacatgactgc

SEQ ID NO: 571648 - DNA, 743 bp, Homo sapiens
  misc_feature (547)..(547): n is a, c, g, or t
gctccctccggagaaacagcgtgcatggtttattctggagtgttggtgactcgtgtactcattgaagcagatctctgcttcctcttatttttataggaatagacgaagaaaggtcagatgcgtgcccagctcttcaccccccaatctcttggtggggaggggtgttcctaaatatttatcatatactcgccctcgagtgctcgtcatagagaaagagaactactcaggcatctcacgaagagcagccacttgactgtcacacacacctccgcacatgcagcgtgacggagcccacactgtctccttgtggacgcctgagaccctggcgcaccccgcgccccccacgcccctctttttacccttcatggaaatagacgcatacaatatcatcctcctttatgggatcacaaagacagagtgtggggtcagagactcaaatgaggacacagtggtttcccccgtgttcaatagatctacgagcacacatgcacggtgctgcatgacctaccaagacagaactctcctcgattacagggtgactcacagncgcattggtgactcactctaatgtgtcattatcagctgctgtgagtgagcagaggacacactaggggggggtgtgtgagagagacaagcacatcggattcaactaccctcgagatattgctgtcccaccacccacaaggtacgggcagagatggatgttgcacttttttagggcagagggcgggattgctttaccc

SEQ ID NO: 571649 - DNA, 901 bp, Homo sapiens
  misc_feature (1)..(1): n is a, c, g, or t
nacctcttttgctgctcgatgctgtattgctctgtgttgctgtttgtgtcgtgtgttgcctctttggctcccttcgtccgccatttacccttggtgccgccaccggcctcgcttgggcccgctactgtttcaccattcaattcccttccggtccgcaaatccggctgcctctcgcggggcgcttgtgccgcaccccacggttttttaaggccaccgggcttggtgcaccgccaaaggtgtttttctcggtgaaatagggtttatcccccgtgcctttaaaatctcccatagggtccaaaaattctcctaccgggtaaagtgtacacgaaagtatatatagcctcatactctttaaaggaaattttatagtcctttgagagtttccattcttgtaggagataaattaaagggggttcttaaaacacaaggccggagggttttaaatctatcctttttccttgtgggttaaaaaagttgtctttaaaaaaaaatctgtgtgaaagggcttccccgtgcgcccccggtattaatccccattagaagccgccagcgctcttttagagagtttatatataaaggtggcgtttaccccgccgttaaatgttataggtataaaatgtgttaggtgtgatatatattaattttgaagccgatctcttttcaaaaaaaggagtgttaacacgcgaaggtgggatttataaaacacgttgtaactcctgaccccccgggaggaaatgcctgcctttataaacgcttgtttaccgtccttttccttacccccgaccggatatgggaaaaaataaattttggggagtggtaaggagtggacacccaattttggagagaaaaaaaaattttaaggggaaaagggaaacaaaaatcggggagggcgaaaaaaaaa

SEQ ID NO: 571650 - DNA, 844 bp, Homo sapiens
  misc_feature (37)..(37): n is a, c, g, or t
  misc_feature (49)..(49): n is a, c, g, or t
  misc_feature (54)..(54): n is a, c, g, or t
  misc_feature (82)..(82): n is a, c, g, or t
  misc_feature (90)..(90): n is a, c, g, or t
  misc_feature (234)..(234): n is a, c, g, or t
  misc_feature (251)..(251): n is a, c, g, or t
  misc_feature (288)..(288): n is a, c, g, or t
  misc_feature (366)..(366): n is a, c, g, or t
  misc_feature (372)..(372): n is a, c, g, or t
  misc_feature (378)..(378): n is a, c, g, or t
  misc_feature (388)..(388): n is a, c, g, or t
  misc_feature (408)..(408): n is a, c, g, or t
  misc_feature (410)..(410): n is a, c, g, or t
  misc_feature (414)..(414): n is a, c, g, or t
  misc_feature (431)..(431): n is a, c, g, or t
  misc_feature (443)..(443): n is a, c, g, or t
  misc_feature (446)..(446): n is a, c, g, or t
  misc_feature (470)..(470): n is a, c, g, or t
  misc_feature (487)..(487): n is a, c, g, or t
  misc_feature (496)..(496): n is a, c, g, or t
  misc_feature (504)..(504): n is a, c, g, or t
  misc_feature (506)..(506): n is a, c, g, or t
  misc_feature (516)..(516): n is a, c, g, or t
  misc_feature (547)..(547): n is a, c, g, or t
  misc_feature (585)..(585): n is a, c, g, or t
  misc_feature (591)..(592): n is a, c, g, or t
  misc_feature (598)..(598): n is a, c, g, or t
  misc_feature (656)..(656): n is a, c, g, or t
  misc_feature (660)..(660): n is a, c, g, or t
  misc_feature (664)..(664): n is a, c, g, or t
  misc_feature (666)..(666): n is a, c, g, or t
  misc_feature (675)..(675): n is a, c, g, or t
  misc_feature (685)..(685): n is a, c, g, or t
  misc_feature (696)..(696): n is a, c, g, or t
  misc_feature (700)..(700): n is a, c, g, or t
  misc_feature (704)..(704): n is a, c, g, or t
  misc_feature (743)..(743): n is a, c, g, or t
  misc_feature (749)..(749): n is a, c, g, or t
  misc_feature (754)..(754): n is a, c, g, or t
  misc_feature (758)..(758): n is a, c, g, or t
  misc_feature (778)..(778): n is a, c, g, or t
  misc_feature (822)..(822): n is a, c, g, or t
taaattttttatatttatttattgcagaaaaatatanaaagatatttanaaaanaatcataaaaatatgaatgcatttaganaccggatntatttgcattttaccatgggtcctcaataaataaatagaatgttgttttttgtattttaagtttttttttgtttttcccctcagaggaaggatgaaaaaaagaattaactgactatggttttgcaggccagtttgatcccagtntttttatttctaaaggngttcttatagttcctctgattgttaccattttaaaanagagaaagtccatagtgatgcctttcctttcagtggctgattggcacgacctcttgagaatgcatgcatgaaaaaaanaaaaanaaaaanattcttcgtnaaaaaaaaaaaaaaaaaaananaaanaactgttcagacttctntcagaatgcagnggngtgagggtggggccgctgcccgtntgggaatcactgtccangggcctgtntcgctttntnttttaaaagngcgccccacgccctgtttctttgaatttggnttttgctcttctaatttccaagaaaatctttggcatanattttnntttttngttatccagccccagagtctctagactgtccattttctccttctctggaaaaaatganatcnaggncnccggccctnctgagggggnggggggctccncctnctantgggacgcggacatggaccaggccccctccatcctccanaccganaaggngtantgaagccgctcgtgagcaanaaagctgcagcttgccatcttggagtccagctcgtcgctctggnggacctggtagaggaagtcgat

SEQ ID NO: 571651 - DNA, 316 bp, Homo sapiens
  misc_feature (192)..(192): n is a, c, g, or t
ttaaagaaatgcagtttgaccttgccagtgcctccagaagcccagccaacaaaacgcgtccagaacgtacgggcctctttccagccgtgggggctgctacggtgactcttcataaaagctaaacagatattttgttgaccttctaacaagaataaattctactagactagtactttagagaaagtactagcnaagggagagctcctctccagcttgcaaacaggactcaatcattcccacacacgtggcggggaagaaagatcccaatgttgcttgaatggcaaaagctatagggagaatttcccaatgtcagtta

SEQ ID NO: 571652 - DNA, 801 bp, Homo sapiens
  misc_feature (801)..(801): n is a, c, g, or t
cacgcgtcgccacgcgtccgagtaaaagcacgagatgatgctagttataaataataatagctattattattatgtaatatgggaaaccagatgattataccaggacttgtggttgacgtctgggttgagacctatattcatagtgctttttttttcccacttcagacgacgtaagggtgctgatagcataaccaggttggaggggggtccatttcacacgtgagcttgaaaacccaatcatacgcttctggcatccagggttttcaacatgggtgtttctgtagccagacctctgagctggttttctcttcgggtgaaagggcgcaatgatcattatagggggccctctgggttatggggaggaaagaaccgggccgggcatcaaagaatattcagtagtggtactagcaacctcagtccccagttattcacatttcaagcgcattacagtatggtgtggaatggatacggccttattggtgaaatgtggtttagaaaaaagcccgtttggcttaggggtccaccaaattaatttcgaaaagggtaggtccaggggaaaaccggggcggtgtgaagatatttgggacgcagacgatgtggtttgggccaagaacattctttccctggggggcccggggtatattttcacaaggagctctctttgttaaccatctcaaagggccacagtgtgtgtggtttggcaccgttcaggtaataatgtgcaccataattcgagggttaacgaacaaagtttaattgagggtcagacacatggggatattgaagggtgatataatgtgn

SEQ ID NO: 571653 - DNA, 479 bp, Homo sapiens
  misc_feature (56)..(56): n is a, c, g, or t
  misc_feature (114)..(114): n is a, c, g, or t
  misc_feature (227)..(227): n is a, c, g, or t
  misc_feature (237)..(237): n is a, c, g, or t
  misc_feature (251)..(251): n is a, c, g, or t
  misc_feature (255)..(255): n is a, c, g, or t
cagacacacacagacacatgtgcaccctctcacacacttttctctttctacaactntggggtcagaagaccactgacagctgcagcaggatcactaaaaagtgacacaaggtcncggggctctgtggccccagcttcctcagacccccagggtctctccactcccagagccccctgcctgaggggccggagccctgtggccaaggcctttcctcctgggcccatctnaggcctgcangtggaccccggccnggcntcctctgagggccgtcttccgtgctggctccgcagccctctcctgtgcccgcacctgtgcagatgcttgttttcacccgggcgtctgcaggcacttggtgccaggctcctccggggctttctcagaggcagccgagtgccaggccctgcacacgacaccctcacccgagccggagagcttcacatctgtggaaaactctaattaaagacgttttgagaaacgct

SEQ ID NO: 571654 - DNA, 850 bp, Homo sapiens
  misc_feature (13)..(13): n is a, c, g, or t
  misc_feature (65)..(65): n is a, c, g, or t
  misc_feature (72)..(72): n is a, c, g, or t
  misc_feature (77)..(78): n is a, c, g, or t
  misc_feature (85)..(85): n is a, c, g, or t
  misc_feature (95)..(95): n is a, c, g, or t
  misc_feature (133)..(133): n is a, c, g, or t
  misc_feature (139)..(139): n is a, c, g, or t
  misc_feature (143)..(144): n is a, c, g, or t
  misc_feature (166)..(166): n is a, c, g, or t
  misc_feature (168)..(168): n is a, c, g, or t
  misc_feature (172)..(172): n is a, c, g, or t
  misc_feature (193)..(193): n is a, c, g, or t
  misc_feature (201)..(204): n is a, c, g, or t
  misc_feature (220)..(220): n is a, c, g, or t
  misc_feature (241)..(242): n is a, c, g, or t
  misc_feature (245)..(245): n is a, c, g, or t
  misc_feature (255)..(256): n is a, c, g, or t
  misc_feature (264)..(264): n is a, c, g, or t
  misc_feature (266)..(266): n is a, c, g, or t
  misc_feature (271)..(272): n is a, c, g, or t
  misc_feature (275)..(275): n is a, c, g, or t
  misc_feature (287)..(287): n is a, c, g, or t
  misc_feature (292)..(292): n is a, c, g, or t
  misc_feature (294)..(294): n is a, c, g, or t
  misc_feature (306)..(306): n is a, c, g, or t
  misc_feature (330)..(330): n is a, c, g, or t
  misc_feature (333)..(336): n is a, c, g, or t
  misc_feature (340)..(340): n is a, c, g, or t
  misc_feature (342)..(343): n is a, c, g, or t
  misc_feature (345)..(352): n is a, c, g, or t
  misc_feature (365)..(365): n is a, c, g, or t
  misc_feature (376)..(376): n is a, c, g, or t
  misc_feature (388)..(389): n is a, c, g, or t
  misc_feature (404)..(405): n is a, c, g, or t
  misc_feature (432)..(432): n is a, c, g, or t
  misc_feature (434)..(434): n is a, c, g, or t
  misc_feature (446)..(446): n is a, c, g, or t
  misc_feature (452)..(452): n is a, c, g, or t
  misc_feature (456)..(456): n is a, c, g, or t
  misc_feature (463)..(463): n is a, c, g, or t
  misc_feature (468)..(468): n is a, c, g, or t
  misc_feature (499)..(499): n is a, c, g, or t
  misc_feature (522)..(522): n is a, c, g, or t
  misc_feature (525)..(525): n is a, c, g, or t
  misc_feature (568)..(568): n is a, c, g, or t
  misc_feature (570)..(570): n is a, c, g, or t
  misc_feature (574)..(576): n is a, c, g, or t
  misc_feature (578)..(579): n is a, c, g, or t
  misc_feature (581)..(582): n is a, c, g, or t
  misc_feature (606)..(606): n is a, c, g, or t
  misc_feature (841)..(841): n is a, c, g, or t
  misc_feature (849)..(849): n is a, c, g, or t
aacaataaaaaanaaacaaataaattaaataaaaaatggtatccataaatcctccgccaaaaaantaattancaggnncatcacnaacatcaacncccggaagcccaacacttcgcgcaataaatgcaaaacngatatnctgnncccaggtacaacgacaagatcntnctcnaaaaaagaagacttcacatcnctcccccnnnnaaaaaaacaaacacancccaaaacccttccgcccaanncancttagacaanncctggaanancaganncgngacaacccagantcccngnataaagttttantaaaagaaataataaataagcatnatnnnnaaananntnnnnnnnngaaaaataaaatnagaattaagantaatctgaaaannttatggttcccaagnntccgcaccatggtacccagatatgctnantatgtgctttgncttatntttnaaaaccnaccancaggtaaccaaaatggaccccactctgaganttccatgatgaaggtgtttaagnttnacattaaccccaagttaaggtagttgatgaaattttccatttntntttnnntnngnnttttttaggtgagactacattggnaaatggggaaatgacaccaatcatttgattacagaaaatggttttataaatcctcctcttgaaattatgttcaggcccagcatggtagcttatgcctgcaatcccagcacttggggaggccaaggcagaaggatcgcttgagcccaggagttcgacaccagcctgggcaacatagtaagaccccatctctgtttttttttaaaaaaaagaaattctgttcaaaagtatttcagancaaaaggng

SEQ ID NO: 571655 - DNA, 206 bp, Homo sapiens
aaaaaaaaaaaaaaaaaaaaaaagaaaaagattttttttaaattttcccccgcccccctttttttttggggggggggcccctttttttccccgggggggggggggggttttggggggttttttttgggccccgggggtccccccggggttttttccccccccggggcccgggccaaaattttttttttccatggcccttaaattta

SEQ ID NO: 571656 - DNA, 118 bp, Homo sapiens
tgaatcagatgccaagtagagtgagccaagctggaagcaatgcgagaacatctagactccatatgacagacagctccagcagcaggcagctaataccacagtagagactatagaggca

SEQ ID NO: 571657 - DNA, 1253 bp, Homo sapiens
  misc_feature (932)..(932): n is a, c, g, or t
ccgaaggcgggccagacgatgatgagaccaggacagctgctgatgaccgtctaaggaaggtccagactactatgacgcaaagatgtttcaaacgtgggggcctcattgtccttctaccgcgtgcctgtgtgagcccacgaacatgggccatgttctgggaggccatgcccgtgcccctggaccaagaccctgcccttgaattgtgaaattccaaggacaccatggccaccgtctgcaggttcacaaacagggctctttgcaacggaatgctctgatctaacatgcactcttcaggcaaaatggccattgacatgtcgtcggcgggagcctatgatacggagcacttatcatgagaaataacgcgttttcacggcatccctgggacactcccatgaacagcccttggcagcagacgcgctatcttatcttggatgggctcttcacattggcgaggtaccttgcatatgagataacacgtggaccggatcgtacgattgaattgcccctgaggccctttgacaaccacagccagtcaattcagcagcaataaacacagtgatacaaccatgggagtcgcacccctatgttactgaccatcgccaacatgctttcgatgcaacagtgcggtgccaacgacagtcccccagttggagacttggcggacgctaacccagtaagacactaccattaagttgaggttgaagcccaatgtaccaccattacattgcgcgccccacttcaaatgtggtcgtccccacaccggttgaataatcttagtcgagcccaccgactgtgggactatcccgaaggctggcagaaaaggttcctagggagctggagggcgcacttaggagacaatcgctgggaacagcgcctagcgacaccggagttgcatccatgagcgcaggcagcacagacttactatttaatgncacctggactgcgatccaacgtaatctctacacgccaaccgaggaaatgcaatagcgtgaatatccgcacggaccctttggggtttgcccatcagtcaaccttcgtacctcatgaccacaaccaccagagattttttgacacacgccactggacacaaaaagtgtcgcatttgcactaatacattgtgttacataacgattggagtagtgcaaagttggtaacaccttcatgactcgctaatcctcttcacaaccacaattacaactaagggggtatcatcgtaccttggggaaacttcaagtgtatccattcatatacaa

SEQ ID NO: 571658 - DNA, 140 bp, Homo sapiens
tactcggggtcatgctttgaaatttgtggagcaaaccccccagtttcatgcccatggtcctaaaattaattcccctaaaaatttttgaaaaaggggcggtatttaccctaaagcccccctctctaccccctttagagcca

SEQ ID NO: 571659 - DNA, 1029 bp, Homo sapiens
gtgcgcgggtctcgggatcacttcctcagtgcggtgcacgatcccgcctgcagcagtgggtgtgggggcgctgcggggctcatcccgaatctcagagagcgtggggctggccctaggctcggaatgagtctcccactgagtccgcagctcctcactcgctgccctggggcgtgggtcttcccctggaccttgcaataggcgtcgggggtgtcctggacgtcccagctccctagtgcacctcggtgggaggcacctggccaaggacaaagcttggtggttaacgtacagcagactgctgcaagcatgcgccccggcttaaggacatggagatgatgtgacttgacaggggcggttcgcgcttcactccaaaggggacaaatggaaggaggctcatggccacagggcctcggaagaggctaatgaacccaagactcagggatggaagctaatcttcaggtggcctccaggagggcagctggggagaagggcaaggctcaaccagtctctcaacctttttttatttccacaactaacatctgtaacatttttaagaatgaggttctcttcagacttctacagtacaaatggaatgagtacaccgttcagaatactattaatatgctaagttgacaagtgagaagatgactagcctgtctggtaagttacctccacaagtacctcgtctcgctcttggatgcctcctctggctgggcctcccaatttggtagcacttgaggatgcccttcaagccctgacactggcacttgttggggaaagcccctttcaagagggtggccaaaaggcggagcgggtgccctcaagttgctggggaagcgtgtgggagggaagaaaggggggtgggaacaaggttgaccgcggtgattggaagcagaagaaagtacaggtgggaaggggctatgagggcccgatggagacgagataaaccggagcagggatagaggtaaactgaacaagaggtgagcaatacaggagcaaaggtccgaagaaggggacaagcgaaaaagaccc

SEQ ID NO: 571660 - DNA, 170 bp, Homo sapiens
cggttcctgccttaactgatgacattaccttgtgacattccttctcctggacaatgagtcttagaagctccccactgagtaaaaggatattaaccccagaggcaacaaaagaaattaaattagtggaagaaaaaattcagtcagcacaaataaatagatcccttagtctc

SEQ ID NO: 571661 - DNA, 286 bp, Homo sapiens
  misc_feature (28)..(28): n is a, c, g, or t
  misc_feature (137)..(137): n is a, c, g, or t
  misc_feature (185)..(185): n is a, c, g, or t
  misc_feature (195)..(196): n is a, c, g, or t
  misc_feature (221)..(221): n is a, c, g, or t
  misc_feature (267)..(267): n is a, c, g, or t
ggagcgtgcaaccgtctgggaagacagnccactaagctcagaaatggcgatgccctcctcctagcagctcaatggtcccaggttgactctggactgctgtgctggcagtgagaaatttcaagccaatggttcttagncttggctgagctctagtgggagtgggacctggctgagttgagaacagncctggctccnnctggcttcatccccctttccagggnaagtggactgggttctcctgtcgtcggtggcgtttccagaatgccnactgggaatacgaaaaaaa

SEQ ID NO: 571662 - DNA, 292 bp, Homo sapiens
  misc_feature (240)..(240): n is a, c, g, or t
  misc_feature (268)..(268): n is a, c, g, or t
tgagtcaggagttcgagaccagcctggccaacatggtgaaacctccgtctctattaaaaatacaaaaattagccgagagtggtggcatgcacctgtcatcccagctactcgggaggctgaggcaggagaatcgcttgaacccgggaggcagaggttgcagtgagccgagatcgcgccactgcactccaacctgggtgacagactctgtctccaaaacaaaacaaacaaacagaaagattntattaatagatacttttgtttccctcancttgactgatgggcaggaaaaaca

SEQ ID NO: 571663 - DNA, 214 bp, Homo sapiens
gaggatccccatcttgcaggcgcacacccaataatcagtcatgtgtaatatgcacaagcttgtttttgtttttggtttttttgtaggatgggttgatcttttgctctaagttgcatgatctttctgcaggaaataggcactcatcccactccacataaggggtttagtaagagaagtctgtctgtctgatgatggatagggggcaaatcttttt

SEQ ID NO: 571664 - DNA, 427 bp, Homo sapiens
  misc_feature (91)..(91): n is a, c, g, or t
  misc_feature (202)..(202): n is a, c, g, or t
aacccttaaaagacctggctccaacattaccttaaaattggagaatagggttagggccatcctatcccaatcctcccccatgcccagtaantcctacagaaacagattaggttagcctagaataagccatgtttaccaattaaatttatgcctgtatcccttcctaatcacccactttcctcatcaaaatgcctcacaaatncatcctgccatcattgtcccattctttaaaaatgtataaacccatctctactaaaaatacaaaattagctgggcatgatggcgcacgcctgtaatcccagctgttcaggaggctgaagcagaagaattgcttgaaccccggagacggaggttgcagtcagccgagattgcaccattgctctctagcctgggcaacaagagcaaaactccatctcaaaaaaaaaaa

SEQ ID NO: 571665 - DNA, 383 bp, Homo sapiens
ggtcatctggaccggagtatggctccgagggcaggttcactttcactatcccatacccctagtgagcaccagatctgtctgcacgtgccaattccaccaagttctccctctttgctggaggcatgctgagagttcacctggacatccaggtaggtgaacatgccaatgactatgcagaaattgctgctaaacgacacgttgacgtgcgttgccgctacgacgtgcgacagctggtggaacaagtggagcagatccagaaagagcagaactaccagcggtggcgagaggagcgcttccggcagaccagtgagagcaccaaccagcgggtgctgtggtggtccattctgcagaccctcatcctcgtggccatcggtgtctgggtc

SEQ ID NO: 571666 - DNA, 1356 bp, Homo sapiens
  misc_feature (340)..(340): n is a, c, g, or t
gcttcttcatagtaatacccatcataatcggaggcttggggaaccttctagggtaacgagcagatgtacaacgtgatcgtcatcagcccatgcgtttgtaataatgcttcttacatagtagtacccactcataatcggaggctttggcaactgacgtagtttcccctaataatcggttgtccccgcgtatataggcagttttccctcggtgataaactgacataagcattcatgactcttactctccacttctcatccgtacttcctgtgtgcgcgatctgcttatagtgggaggccggaggtaggcaactaggtctgcaacaggtctcacgccttcgcntctaagtcaggggaaccttagagagaatgggaaacccatgaagaccctaatggagaatcatacaacaaacgcgagacaccaaacgagcggagggacgaatataagtagaggcacattagcgcaagggcaattgtggcgtggagggtgtgagacataatcttccgtctgaacaaagccgggcgagaattctgtcgttctggggattcgtccgagacatcaaaagcgcattcaaagactaaaatggaaagtaccaccctgagggtggtggtggccaaattaacagctggttcccacacgaatgaggccgcccagactcaagcaagctgggggttgtcctctggtgtcccgctttccgttcgggcacaccagacaggcaaggccgcagagcccacttacttaccactccggtgcttccacttggtagaggcctgtgtgggcaccagacaggacttgggtccaagagggggtcatgcgaaaaccgcattgtgggtcttaacaagcttggcaaacggcctcggaaagtggaagcgccacaacagccaacagacattgtgaggcgccaaaacaacaagggggccataattccgtaggaaaccagcgcgtggcaacctttggttcttccttaccccagggaattggagcactcccaccagtcccatggaatagggcagtactcgtagcggaacgaggccacaaccgcggcaatgggagcgcccgaaggaggccacatcggctcaatgagggggaatccttcacacagcgaacagggggcacaaaccaagcccttttctaccagcacacataagaaatggggtaggagcgaaccaatcgacatcacagacacggggcccaggttgaccgtccaaagaccccgttaacacgggataacacgcggaacagagagcacggcttggcaccaacacaggggccagcagcggacactcacgacgcacagcctggggcgaataccacaggacgcggggacaacggctccactcagggcagcgccacgcaag

SEQ ID NO: 571667 - DNA, 509 bp, Homo sapiens
tctccctgaattccttactactgtctgactgcctgtaggggtgacacatcaggatgagataaaagatgcctttttatactggatagttacacccactaagattgaaccaagattatatccagaagcaaagaggcaggataggcctatttgcttggcaggaggagaggggaagcagccttgtagctccgtatgacttggcacgtttaccagagtttaggaatcacgttagatgtctaaactaaagtgctctttagcctttgtacagaaccaaaataatactaagtccatttgattatctatttctagagtatctaattctccctactgttactaccttaatctgagtagccatcatctctaaactacattgctatatgtcaaccttcccacatggcagccaaaatgatcttttaaaaacataaatctgatatgtcacttccctactttaaaagcctttattgggtcacagtcaaatctaaatcccttattatattctttgggataggaac

SEQ ID NO: 571668 - DNA, 683 bp, Homo sapiens
  misc_feature (1)..(2): n is a, c, g, or t
  misc_feature (7)..(7): n is a, c, g, or t
  misc_feature (15)..(15): n is a, c, g, or t
  misc_feature (20)..(20): n is a, c, g, or t
  misc_feature (42)..(42): n is a, c, g, or t
nngaggnatccgaanccccnaccaccacaacgcgaacctctnccttttctcaagggttagagccagaccaataaattcatctcaactaatacaacccccttcacccttttataaaattcaattaacccaacccaattataacctttataatcactcattacccataaaaaacattcacaacataaccctacttacaacattttatccaacactttttacagtgtttaccctccttacacctctcaaccaccacaaaaaacaaacccccaaaaccttaatcactccatctaaacctattttaaatatctcatcacacactccattcctctcaaaccctttcataaaaacctcattacccctgtacctgccatcatacaattaccccaacttctatcaaatattttctaataatcccaacttcattacaaattactaaccaaatctaattcatatccacatcaccaatatctaattctctcaaaaaaccccccactctacccaataactctttttatcttaactacacttcacctactacttttattcccagcctcttcaacccctcattattttatctaaataacaattctctaaaacttctccatcttatcaaataccaccctaaccctttacttttcccattaaaaaactcacacttacccaaaccatcaataaataccaaa

SEQ ID NO: 571669 - DNA, 248 bp, Homo sapiens
gaatgggtagagtatgataccgagatccagaaactattagatcatcttgaaaataagaagaaaagtacaattcatgatgaactctagcacagacgatgagaacgatggaaatctgccacctgctggaaatttgtggaactgctaagactagtaggccattcgttccaattattgacataaggttggctggttttttataagctttatttaaaacacatgtaaagttttaaaataaacttaatttatgt

SEQ ID NO: 571670 - DNA, 126 bp, Homo sapiens
  misc_feature (33)..(33): n is a, c, g, or t
tgtaaccgattgcaccgtttcgactgttggtgnttatcacacatgcctcatgcacaggattctggggtagaagtgggagactacagagttggggctccccaacccccaggggcaaacatggcgaaa

SEQ ID NO: 571671 - DNA, 118 bp, Homo sapiens
tatcgagcagcgtccccattggttgaagttgacatctgcacgacgtgcaggagcagatttacacactggccaagaagggcgcgggctccttcacagatcggtgtacctcctgagagat

SEQ ID NO: 571672 - DNA, 102 bp, Homo sapiens
ctgtcttgaaagtcctgcgcgatctctacgcaccagtacgctgaaaaggcagctttctgatcagcggctcggtggacttccggtagcggcgaatctcgggca

SEQ ID NO: 571673 - DNA, 395 bp, Homo sapiens
  misc_feature (1)..(1): n is a, c, g, or t
  misc_feature (331)..(331): n is a, c, g, or t
  misc_feature (375)..(375): n is a, c, g, or t
  misc_feature (389)..(389): n is a, c, g, or t
nttgcaggtgagctcagaatggcagccactgcactccagtctgggtgacagagtaagactccgtcgcggaaaaacaaaaaacaaacaataacaactacaaaaagagttaagtctctacctcaaagtgaacatgggttgtatgttacatgcatgtttgttcaataagcatgagtcaggatgaccttcataattattcatagctcctcctgtaacctgttgaatatgtatgtttagccaacctattcagcatcaagttcctacccctgctcctcctttggaagtgcctgtcttctgggtctttggccagaggattgtacttcctggggctgtngggatgggccaccttggcagggccttttaacccttttataaggnaataaagtctcctnttccaa

SEQ ID NO: 571674 - DNA, 492 bp, Homo sapiens
  misc_feature (6)..(6): n is a, c, g, or t
  misc_feature (87)..(87): n is a, c, g, or t
  misc_feature (100)..(100): n is a, c, g, or t
  misc_feature (118)..(118): n is a, c, g, or t
  misc_feature (120)..(120): n is a, c, g, or t
  misc_feature (122)..(122): n is a, c, g, or t
  misc_feature (124)..(125): n is a, c, g, or t
  misc_feature (144)..(144): n is a, c, g, or t
  misc_feature (211)..(211): n is a, c, g, or t
  misc_feature (213)..(213): n is a, c, g, or t
  misc_feature (216)..(216): n is a, c, g, or t
  misc_feature (237)..(237): n is a, c, g, or t
  misc_feature (241)..(241): n is a, c, g, or t
  misc_feature (243)..(243): n is a, c, g, or t
  misc_feature (250)..(250): n is a, c, g, or t
  misc_feature (256)..(256): n is a, c, g, or t
  misc_feature (273)..(273): n is a, c, g, or t
  misc_feature (275)..(275): n is a, c, g, or t
  misc_feature (282)..(282): n is a, c, g, or t
  misc_feature (326)..(326): n is a, c, g, or t
  misc_feature (364)..(364): n is a, c, g, or t
  misc_feature (372)..(372): n is a, c, g, or t
  misc_feature (421)..(421): n is a, c, g, or t
  misc_feature (474)..(474): n is a, c, g, or t
acaagngcactcgaggctgcagtgggagcccatggggacactaaacaagggcacaagtattccaactatgaactcctaacctaatcnacttcttccatgngagacgcatcctcatcgngntngnngggggggatctcatcaggnactgcagcattgggttcctctgctgccacttcatcttcatcaatacctagacctagcttgatcatgngntanatgcggtttttttttgttctngggntntttaagntaaaantctagaagatatctggntngtttcanacagcagcaccaaccaggtccttaactgccttatcattcttgtnggcctcagccttcttccgcagcgtctccacaatggggnggtcaggnttaatcaacaaagttatatttggccatcatatagcccatggtggagttntcccgaagtgcctgggctttcatgatccgctccatattggctgtccagccggnagtgctggtcacaatgca

SEQ ID NO: 571675 - DNA, 268 bp, Homo sapiens
ctggtactggtgatggagcatgataatggtgagaaaaaagaatgcatgcatgttgtgagccacatgggaagtccaaaagaatgcatacatgtatgtgtgactgggtcaccttgctgtgtagtagaaaattgacagaacattgtaaatcacctataatggcaaaaataaaaatcattattaaaaaaaaagacctacatattagaaatgtgtccagcttcatagatagatctagttaggtggggttttggcagtccaggagcctggtaaa

SEQ ID NO: 571676 - DNA, 508 bp, Homo sapiens
cactgggaggattcccctgtgaggacagaaacaagacaatacgatgcctactctcaccacccctatgcaacatagtactggaggtcccagccacaggaatcaggcaagagaaagaaataaaaggcatccaggaaggaaaagaggaagtcaacttatatctcttcatttatgatatgattctatacctagaaaaccctaaagactcaaccaaaaggctccgtagaactaataaaaaaagcttcagtaacatttgggttacaaaatcaacgtgcaaaagtcagtagcatttctacacgccaataacgttcaagctgagagccaaatcaagaacacaatcccacgtataatagctataagaagaataaaatacctaagaatacatttaacgaaagaggtaaaagatctctacaaggagaactacaaaacactgctgaaaaaagtcatagatgacacaaacaagtgggaaagcagtctatgctcatggattggaagaatcagtatcattaaa

SEQ ID NO: 571677 - DNA, 117 bp, Homo sapiens
tctgcaggttgtagccatttaccaagcatagttgtaggtaaagaagggcagatttattagacgaaattgtgaaacatatgttcgcacgtagggcaagctcagacacgagaacagagg

SEQ ID NO: 571678 - DNA, 101 bp, Homo sapiens
tattgttatgactgtctgctttttagtatctatgatgtacagcaacttgcaccttctagctcatttaattttctcagcataaagaaggcaaataagcaata

SEQ ID NO: 571679 - DNA, 672 bp, Homo sapiens
gactgaaatgtcacatcatgtatggactaatgtcctaatccgttacaataatatcacccacctgaaggaatccaacctttatccacagggagacccaccaactagttaactccggcttaactggaattcaatctcattgcggaactctccacccccaataagtgttccctcccagcctcggagatggcttcactcgtgtgttccggtgtctaccagacattgattcatggtgcctcgtgcagtccattgaggaaagttctcttcagaggagcatccatgggtgctgttccccttgtcagctgtaacactgtgccgtcattctgcacacagattttcaagctccaggacttcttcaccttcctggatccagtgggtcaccacatccaggcactgttcttcagggctgcggcactgcaggctctagtgccggcccctctcacagctcatgtctgatgagccacaggaaatgcattcgaggtaacggcttcgggaataggtgacagcccggcctgtttggaagagggggaggggagtgagactccatggggacagtcctggagccccagctctgcaaggactcactcacaatcaatttctccttatcccaccctgcagccagtcattgagcctgcctattctgctgctgatcttctagaatcaccctccttcagc

SEQ ID NO: 571680 - DNA, 327 bp, Homo sapiens
gaggattccgtaggacaggagtttgaaaccagcctgctaatacggcaaagtcccgtctctactaaaaatacaaaaattagccaggtgtggtggcacacacctgtagtcccagctactcgggaggcttgaagcaggagaatcgcttgaacctgggaggcagaggttgcggtgagccacgattgcaccatctcactccagcctgaaaactatcttcaggttacagaagtttgtaaaagggaacttcttcccctctcctgctgtcaggccgaatgtcagctatcactgggatttcttttttttgtcttgttttgagtgtgattctggccg

SEQ ID NO: 571681 - DNA, 878 bp, Homo sapiens
tggggctttgagctgtgtatttcctcgacggtaatcacatagaaataggggaaaacattcacatgcaatgatagaagactatgcccctcttccttctctctgcaccccttcacagcaattcattgtatttgctgttgtctacttgtccttcgtccatcctgtctctcatttccctcttcttttttttttttttttgaaatggagtctctctttttttgcccaggctggattgcaggggcacagtttctctcggccttcactgtgcaaccctccacctctccttaggtttcaagtgtgatttctcggtgccttcagccctcccaagttagcgtgggatttacagaacattgcccccacgcgaactctcccatatggctatatctttcttttgtgtgatatttctctagttagaggcagggttcttgtgccagtgtgtgtggcgcgaggctgtgggtctcttttgaaactttcctgtgtgccccctccaagggtgttggaatcttcccaacgctgtggtctctttcgggcctccctcccccccagaaaaatgtgtctttggaaaactataaccaggcgtgtggaacgccatctctatttggcccccagaaactctctatttttattctcgctctctttctctctcacacaaaaaaacagccgtttttgccacaagacgtttgttgagaaaacataaccagcggcgccaacaagtggttggtgaacgcccccccccttgttctacttccccataattctttctgttttctccccagaaaatcctcttttttttgtgcggcccccccccgttgtggtcaacccctcttccccgctactcttattgttctacttctcttccgctcttctcttcttcgcctctc

SEQ ID NO: 571682 - DNA, 277 bp, Homo sapiens
caagggggagtgggcaactttgtagcccagtcagtcagatgtacgggtggctggatagtgggataggcatctgaagtggagtggagtcatgggactgagccctcaacctgtaggatctgacatggtctctaggtagataaacatccaaatggaattggattcatcaggcatcacccattgggagtcctctgggagcacatggcttggtgtggggcaacagccccccagagatctggtcacaaaagtgtgccgggcggagcgaaagtgggtaccgagc

SEQ ID NO: 571683 - DNA, 204 bp, Homo sapiens
ggaacgctggaggcatacctaccaacaggcaaacaattgtggtaacctaataatgtgccgcgctataatgcggtgcacgacagcatggcaatattcagcatgaattggaacgctatcacttgacagacagatgactggtgactggcggcatgcggtagacaacactacacactacgggctgcagaaacttcaatgcccgtcaaa

SEQ ID NO: 571684 - DNA, 118 bp, Homo sapiens
  misc_feature (70)..(70): n is a, c, g, or t
ctctcctcctggacccagggcagccaagggagggataggcgcagtggtcagatgaagcagcccagagagnacctcccagctcttatttcaccctccccacctcaccaactttggttcc

SEQ ID NO: 571685 - DNA, 87 bp, Homo sapiens
  misc_feature (41)..(41): n is a, c, g, or t
  misc_feature (44)..(44): n is a, c, g, or t
acaactgggacattaaagcctgacgacagggttgtggttgntgncaccccgctggatagtcgttcctttttctggaatgtgggccca

SEQ ID NO: 571686 - DNA, 1610 bp, Homo sapiens
  misc_feature (573)..(573): n is a, c, g, or t
  misc_feature (1242)..(1242): n is a, c, g, or t
ttggggaaagggcggacaccggtataattgggcaggaaaaagaaaccattccacggctggcccagaggggggcacgggtgggtctttaactcctctcctctccttggtgtggtcttctcgagcccgcagccccacctctgtgtgcccttttgtgtgggtattctgttccttctattcacgcggcgcccggggtggtgcacccgcgcggagaggggagaggagaggcgccacagagagagaagagaatcgacagagtgtgacatctgctgtgggagaaactctcgcaggagcggaaacaaaagagaagagagacagcgcgagagagtgtgtccccacacacacgcgctggcgtgcgcggagacacccgcgtgagaagagtggcgcgcgagtgcgcggagactccagcacacgcgcgagacagcgagtgagggcggagagctgtgagaactgtggcgccaagagcgccccaagcgcgtgtgagaaagacacgacgagggcggaccgtgcgaggcgaggcagacctgcctcaaagagaaaaaactccccaaaattaatcaagaagagcccccacanggggatgtggagaaacctcacacgccttgctaacctatgtggcgcccctgcatacacacccagggacaccccccaaaaagtgcgggggacacacagcccgcggtcagcgccaacaacacggggaccaggaataccgcatatgacgcgaaaggacacacaacaagaccgcgccgggaggggagcactccctttttcctagacaatatacaagaggcgcggtggtcgaaacaacgaagaattctccccgaagagagaggcgacgccccatgtgcccgggaagacataccgaggaggcgccaccacgggggggccaaaaaaattagaggggaaccccctgctcacgaaaaaaagccacatcacaaatagcagaatggggacgtcacccgggagagaagcgccaccccaatataaacacgtcgcgacaggagaagatacccacgcacttctgcacagcccccacaatggaggggaacaacgagcaaacccgacgacaaacatatctatcccctagaagcaaaagggggggcagctctccatccacgcggcgggggggggggggcaccaacaacatttatacaaagcaggatatatgagggcgcaggcagacacaaacacaacccccccacaaaaagagcctccgcgggggggggcacactaggcggtggcgtncccacaatgtctgcatgcgagcacacctgcgccggaccgccatcaccacagatggtcatcaaacagacactacgccgcgacaacaacagcggcgccatccagcacctcaatagaaaggaagcggatacactccaccctccatgagaaggggggggggcaccaccaacgagacgattacaagcgcagcggatatgcccccacagacctagtcgccagcgggctacccaaaaggggtggggccccccacaaatagtcgagcgaccaacggcatatacatacagagcaaagacgacgtgctgccccagacgacgacataaaaacaccggccaggagcaacgcggcgcaaccaaagcggcccgccgcgggga

SEQ ID NO: 571687 - DNA, 186 bp, Homo sapiens
  misc_feature (14)..(14): n is a, c, g, or t
cccccaaaaaaaantttttttggggtaatgggggccccatttttcccctttgggaaagggggttcccaggcccaaaataaaaaaaaccaaaagtttttgggtttgggttgggattgggaaattttctgtaaagtcctggttttttaacccgggggatttaaaaataaaatttaatgttaaagggga

SEQ ID NO: 571688 - DNA, 842 bp, Homo sapiens
cgcggctgctcgtcggctcgtgcgccaacaacgccttcgccttcggtccggagctcgaggagcctcatcacgccgctcgccatccagacccacaactttgccgccgtggccgccgccgcctactaccgccagtcagcagcagcagcagcaatgcagggccttggctgccccccgtcgcagccgccggcgccgcccagcgcgaccctccccggcggggccgactgtacctccctcgccggcccttcagcttcccagcgtgccagcgccgcctgtccgacgtcggccgtgttcggacgcgccgcccaggccccctggactctgcgtgtcaggaccggcgacaggcgtaccgtagagcggcgtccctgagctccggcaggctcaggcggcttctgatgtctcccagcctcggatccttggccgcagccttgccaattcttcagcctgcctcttccattctccgaggactgaggccaagagggcgccagtgacggatggacgggaaagggcggtcagagaatgtaggaaggacaccccctcgccatctcgaccttgcttggggggccgggagtgggggggggttgacattgggcccctaggcagactgctaagcccacgaccgaagcactttggaactcgaactcatgtgccggggaaaggggcccacaaccccatccataattcgggatccaacaggcataattaataaattaaaataacacaagtataattcattatggacgcacaaaagataacacttatcatgttgaaaaacttataccaaggagcagtgtgtaaacgaatatgacaaaacaacaaacggagcatattagggtggaaaaaat

SEQ ID NO: 571689 - DNA, 296 bp, Homo sapiens
ataatttttacattttggctcccccaactcagggggtacatagaaaaatcccccccttaggggggggggttggcccctatttcccccccccgggtccctttttccataaaattttttttggggggtattcccttttttttttttgttttagaaattgccccccttttcccccccccatgggccccccaaacaattaccctgcccctaatggttaggtcccccctttttttattcttcttcctggccctaggtttggcctatggggggctccaaaaggggttaggttgacccgaata

SEQ ID NO: 571690 - DNA, 416 bp, Homo sapiens
ccgaggtgtcctttgcagagcgccgtgatcactctgctgcacataaggctgtccagcagagctcgactctgaatagactggatagaagcagcttcacgattgtggccaatactggagtgtatgcttcgctatcgcatataccttagacgagtgtctatactatgacagagaagtttgatccgttaactcatatgctgctcttagctaactgccagagcgtattgataggactcagaccctgagagcatttgccacagttgcccacttacttcctctttgaccatgagtgttatgaattcagtgtccattttacgtgtcacacatgcctctacagtggatgctgtcatcatagtctgcgtaagctctgcagatcaggctatcttaacatcggcaatactagtagccatagaggtgcc

SEQ ID NO: 571691 - DNA, 776 bp, Homo sapiens
  misc_feature (569)..(569): n is a, c, g, or t
tcctgggccccaaaaatccttaactggagaatccacttgaaacacttcggtccttaatctggtaaactgattggacaggctgatggctgatctaggtaaaggttccacggtaccaaaaacatcttcctgcctataatactatcaaaacgggtctccgtgaatgtggtggtggtgaattatcatcagggctcctcgtgtcccaatcttctctcagggttctcgatataagcctcctcaaatttgtggtggactctgacggagtgaaaaaactccccattaacgccgtcgcgaccttggttgctccgcgagtggtggactcagtgctccttatcaagtgttagaagctcaaccctcgtggagggcgtgcacgtgaaaaatctccaccaactccgagggccgtgagaaatccaccggctgtggtctcccacacgacagggtctcctcccactctggggtgtttgtgaaaagaacagagaagagccgtggaaactcgcggaaaactctcccgtgcctcgtggtgaagggctcccgaggaaaagccccgaagcacgagccttgtggcccaccangcgtcatgtgggtgggtgttaaagagcttctcaggaaaagccgtgcgcgatgtgggtttagaaaaacgcgtggcgccgtgcgtgcttgatacttccactcagaaaaaacaacctttacagcgtgcttgcagaaaggggcctcttggcgggaagatgggggttgcccaattctccataagttggggcacctacgggcgacaggaactg

SEQ ID NO: 571692 - DNA, 440 bp, Homo sapiens
  misc_feature (194)..(194): n is a, c, g, or t
  misc_feature (204)..(204): n is a, c, g, or t
  misc_feature (208)..(208): n is a, c, g, or t
  misc_feature (210)..(210): n is a, c, g, or t
aattcaatcggtcgtactcatccccttctacagttacatcttgcatcatctactacatcaaactcctctatctatcaccaattctcatgttcctcggtcttcctcatcttctccttcttcgtcctcctcctcttcatccagcaccatccacctcggcatctgagtcacgctgcttcctggtcctctcggtcatngcttctctcntttntnaaactggggcaggagcttgaagacactctctcggtagtcattcaggttggtaacctcacagttaaagaggtccaggcttttcagacattctaactttttcaaaggttccaaggtgctgatatctttcagtttatttccacataagtttagatgtgtgagatttggaagtttttcagctaacatgtccagacctccaaagattctattttcactgagttcaagctttttca

SEQ ID NO: 571693 - DNA, 235 bp, Homo sapiens
ggtgactctagaggacccccagtggtgacgtgtaggcgtgtgtgcacataacacagggtcgcagtctcacacaccacactcctacacagccacatgtgcacataacacagggtcccagtcacacacatgccacactcctacacagccacgtgtgcacattacacagggtcccagtcacacacacaccacactcctacacagccacgtgtacacattacacagggtcccagtcaca

SEQ ID NO: 571694 - DNA, 384 bp, Homo sapiens
ggcaaaaaacaatcatttattggtttattttggctttactaaacacattagtcatttatcatttaaatcccggccttctttaaaaaccgttggaacactttttttccctcctgccataaaaatacagtaagtaatttgcttaaaaaaaacaccccaccccttggaacaggggttctggttttttttcactgaactaaagacatttttcagggatttcagtttgtaaatcagaaaaacagggcaggctacaaatcattgcaggctgaaaactgaaattaaatgatcttccacttaaaagtgctgggctttggaaccgggtttttttttacccttccttttcctaacatttttaccactggacccccctgtttttaaaacctatta

SEQ ID NO: 571695 - DNA, 153 bp, Homo sapiens
cactgtgctgtgacgtgacgggccaggacctaactgctccttctgctgcctggacccttctggacgaccgggctctactgggacgggccccacacgcacgaggtactggggttacggggccaccagacggacactccactactatactgacac

SEQ ID NO: 571696 - DNA, 90 bp, Homo sapiens
  misc_feature (8)..(8): n is a, c, g, or t
  misc_feature (89)..(89): n is a, c, g, or t
ggggttgnttctcttactttcctctgcctgcctcagtttaattattttgtcctacagaaatatcattaaaatatttttttgttaaaaana

SEQ ID NO: 571697 - DNA, 180 bp, Homo sapiens
gacgatacggacccccctgagtgtcaaaagagatctcagagtactctacagtattataactagttattaagattttacactcattcataagattatatatggtggcaaccatttagtccatttaataatgcccccactctgtcacagttgagacaaaagtagaccaacctagtataatcc

SEQ ID NO: 571698 - DNA, 214 bp, Homo sapiens
agcattgggtggccaattgatttgatggtaagggagggatcgttgaactcgtatgttatgtaaaggatgcgtatggatgggagggcgatgaggactaggatcatcgccggtcacgagatatctcgtgaccggcgattattggtaggatcagcgatggatagtaatagggcaaggacgcctcttagtttgttaggggcggatcggagaattgtgt

SEQ ID NO: 571699 - DNA, 367 bp, Homo sapiens
ccccaatggaatcctgtatgaatgattctttttggcacgtgtgtggtttgctatgccaggcagaggagtatactggcattttgcaagtagaagactcacgtttctatacgtgttgacaattagctagtgcaggacaattatcataaatggcaaagcctctctagtagtattataaatgacaggtcactttcatagtctatacaaaattaggaatgcaccccaatgctgttactaaggcctgttaatgcactcaaaacaacaaggacaccgagataactgtttccgattctctatatcaggcaggcgttgaataattatttcttcgatgatgaggatgtttggcctatgaatgcaattcacttagatt

SEQ ID NO: 571700 - DNA, 950 bp, Homo sapiens
  misc_feature (22)..(22): n is a, c, g, or t
  misc_feature (38)..(38): n is a, c, g, or t
  misc_feature (157)..(159): n is a, c, g, or t
  misc_feature (196)..(197): n is a, c, g, or t
  misc_feature (628)..(628): n is a, c, g, or t
gcgctttctcccgggaaccggnctgtgacccaagtggnccggacagtttggggctgcgtgcggctgcctcaagcaaccaggtacgtaggtcggcggccagctcggcgctgcggtgggagccggagggcgaagtcagagccggggtgccagcgggacnnnacgcagatccacttaggaccccgtcgtctgcgaaggnncacgtctgagtcccggggcctcctcgtgctgcagatgtcgccttaggacctcggccaggataccctctgccatgctcttgtgctgcccgtgatcaccgattgcccttgtaatgcaccttcgcagcaggaagcccagagctgcgctgcccctttctgaaggctgtggaagaggttggagtgggcgcatcttagcgttgcgccaatccccatttgagggtctgtcggaggctgcccttcagtgtgagcatccacaatgggtaccccagcctcggtggtcagtgagccacccccttgtagggccccgattgaggccgtggccggaaagcaggcctcgggcaagatcttccaggagcgcgagctgctggggatccaaggcctgtttcaacgcaggggggaaccagctggccgaggaagggggcacagatcatctnggaatgtgcatggggaccaccgtgtgctgaggcgctcaagaggcttgcgcagaaggaggccccaaagagaaagccttggcatcggtaacaagttgagcgctagaatctggagcccagttctgagttggcagccaaggagtgcacggagaagctccgtggaagttttggctctaggagaaaaaggcgggtcgcgaatggggagtgggccaaagactcaccgtagctggtctgagagcgaggggttcttcaagctggggcgaggagaataggccaggggataagacgcgggccaaaaagttgtgctaggcaccggggaggggca

SEQ ID NO: 571701 - DNA, 399 bp, Homo sapiens
  misc_feature (38)..(38): n is a, c, g, or t
  misc_feature (42)..(42): n is a, c, g, or t
  misc_feature (386)..(386): n is a, c, g, or t
  misc_feature (388)..(388): n is a, c, g, or t
  misc_feature (392)..(392): n is a, c, g, or t
caggaaaatccctttaacccgggaggtggaggtttcantganctgagatcacgcccatttcactccaacccgggcaacgaacgaaactgtctcaaaaaaaaaaaaaaagtggggggaggctgggcacggtggctcactcctgtaatcgcagcactttgggaggccgaggagggcggatcacgaggtcaggagatcgagaccatcctggctaacacagtgaaaccccgtctctactaaaaacatacaaaattagccggacgtggtggtgggtgcctgtagtcccagctacttgggaagctgaggcaggagaatggtgtgaacccgggaggcagaggttgcagtgagccgagatagtggcactgcactccagcctggttgacaaaggnangaantgtctca

SEQ ID NO: 571702 - DNA, 919 bp, Homo sapiens
ggcacttttctaccctctgagcttggttcttaataagcataatgtgagggtgaatatgtagtatctcctaattatgagcactgcatgagaattaaaaaactcatgtaagtaaaatagttgaaaaatcagtatgttctctgtttttaaaatgtcaaagtttatgtcagggttaatttagttataacaaagtgatcataatggtgaaatttaataaatatactctagtatgatcagcctatgtgagactacattttgattttttgtgtggcatgcagatgtcatgaactatagtgcagcttttagtgtgttctaattttaattggtttatatcctggaaaaccaagggtggaaaaggttaatttcattggaggggtggcttttccaatggctgtgagatagagcttaaaggaatatctgtgaatatatggagacatcttcatttatatctttcttatataaaatatatgtgggtttaattggtgtgaagagttggggtctctttaaattcagattgggtcttaggacagtaaaacccaggttgagttgacccaaaaaaaagaaaaaaaaaaaaaacagagaacgaagaggttgtgttggggccagacgtggcacacctcgagaaaagcgcttacaaacacccgatcggagtggagaccgcgagggcgcacaaagagggaaaagcacaccggtgcgccaacacgacggtggccccagagagggaaacaccgggggcagagaacaacagcagggcagggagaaaactacaacagaattaacaaaacggccggggggtgaaacacaggagacgcagttctgacacaaaaactcacaagaagtagagtatccaagaggcaaaaacagcggggcaccaaaaaaaacaggagacgacgagaggaagaccaacaaacagaaaaacgcg

SEQ ID NO: 571703 - DNA, 768 bp, Homo sapiens
  misc_feature (411)..(411): n is a, c, g, or t
  misc_feature (697)..(697): n is a, c, g, or t
gctcacacctgccattttatcactagaggctgttattacaggtgtatgacgagggagcttacatggagatagcgctgtccagcacagggaaaccccatttctactactgagaattagccaggcaggatggcgcgttcctgtaatcctagctactcaggacgttgatccagtagaatatgatagatcccagtagcctgagactgtagtgagcggagatcgcgccattgcactactgcctttgcgcgtgagataaactatgaaccagaattaaagcttagcaagaggctatgcaccctgtatataaatccatttcttatgacgcacatgttaattacagtgggaaagctattcacgcacaaagcatgtgtgacttagagagatagctatgtatgctcgattagtagaatacantcacctcctgcttggagacgtatgtgcatggaaacttcgaaagctcgtctatcaagacatgttgactttttagttgaccctgaagaccttgttgcagggtctggtccagttaaccatatgcctatgattattggacttgatgtccattcgcgttggctcatggctcttaatcccaataattttgggaggcctatgttgtcccattattacggtcagtatattgaaacttatctctgcaacacatttatacccctacttttgcaattcccaataatctaacttgtanctatttattggtttctagttttccaacgtctcatgttggtgtctcctcgtgggtcaccttgttcttggtcg

SEQ ID NO: 571704 - DNA, 377 bp, Homo sapiens
tgcttacctgtgcagttatatgacatggaaataattgcaagcaagcacactttcttggcttggaaagcaagcatataaccccaagcagtttccgggaaaaggcaaggctttgttcccaggtgaatccagtggctaaccctggttagaaactgctgcaagcacagcaagcaatccgaggcaagcaagctgactcaaagacaccagccaacagccttacattgtgcaaaacatactgttgctatgatgtaactgcatttgacctaaccactgcgaaaattcattccgctgtaatgttaacacaatatttaaagcagacacacgtccagttcaggcatttccttctgctataaggtatcccagcacgtgtaatgtcttaa

SEQ ID NO: 571705 - DNA, 129 bp, Homo sapiens
acaaccatgaagcagatcctgatcattggcgcgggttttgccggcctgtggagcgcgctcagcgccatccgtcagcttgacctcaacggcagcaaggatgtcgaggtcaccctgcttgcgcctcaggcc

SEQ ID NO: 571706 - DNA, 467 bp, Homo sapiens
  misc_feature (283)..(284): n is a, c, g, or t
  misc_feature (307)..(310): n is a, c, g, or t
gatggcttctagctagcccagtctgtgaatgtggaagcttcatccccctatagctcttccttgctgatacttgtttccttctgcttgtgccagcaatagccctagaattgcacaaatccaaccatccaagggctaaccagcaggtaagacagtcacccagatgcacatggtcacaggaggcagtactgtggggtgagcaaaaacagtaccagaggagactcaaatgcccggggtctcgctgccaaccacttgagcttgggcaagttgctaatcattcctttcnntttttttttttttgttttttttnnnnttttggattttaagaaaaatttttccccctttggcccccaaaatattgtgagagatgatgaccgcagcctcgcatccttggggtgaagggagaaaatggatgtgactgtgttattaactgtgtggatctgtacaaatgaaagggatcaatattaaaa

SEQ ID NO: 571707 - DNA, 1482 bp, Homo sapiens
cgccacgctggtgcgccaccagcgcacacacacgggctgagaagccgtactgcatgtggctgactgtgtgactgctgcttcagctgagagttccactgctgctgcgccatctgtgcgcagccatcagtggctgatgcgtgccacatgctgtgctgccacttgctggcaagggtttcgggcagcgctcctgacctggtgtgtgcaccagcgcatccacacgggctgagaagcccttcgctgtgcccctgatgtgctggcctgctctgcgttcatggtgacctgctctgtgaccatcaccaatgcacctgtgctgcactgcacactggtgcgatgaatgcccataccggctgctgaacttgtgcgtgcaatgctggttcacagtgctgttgtccaagtctcaatctgttgcactcgagcgcaaccaatgcctggccacaatgccacaacaaattgcccctgatgttgcatgcaatggcccttcagctggtcagccatccaatgctatgcactttgcaacctggcaatgactgcaccttgtggctgaactgggccaaggcgggagtagcggcagaggtgctggcacaggttgcttcagaccaacatgccgctcagcttggtcacaagacattcaagctgggtgccccaagcaatcagctggctgcccctgacacccggggatcgcactggcacaggatttggccgaatacccatgttccctggcaatgatttgtgcaacattggaccatccaggtcttattcgagggtggtgtgccaggtgcttagacaccatgtggaaagatggccggaggagggagtatacataactttaggatagatacacttaaaggatttacgaggtgggaatgggcttattggcagttggaggggggctattcttccttaaaaaggggtgtaggggtattggtggcaaaatggcaagccttattaataagtaaatcagcgaggtgtggaaacgagactgtagatgtgagacaaagattccgatacgcatttgtgacaggaattttagtgggggaaaacgaagggaagcggacatgggttgggggcccttcgcattaccacattattccccaaggtattacaatgagatgggggcacaagcacccccatttacacggattatggaccgatctcatggtcaccatatgggacactacttataacggaccgattaactaaccccacgtgtgattatgaggcaccccactattactagtccaatagtgctgtgatccctctcggatcaaataagcaatcggggataatacgataaatcagctacagggcggcaacagggattgctccaggcgcaagccaacagggggaaaaccccgctttaataaacatctcctcgtgtggtgtagtgcaaagatagaagcacagtggttgtttcggagctagctttccccccatgatagtagagaacaggagagtgaccacgtcaggagagaagtagaagac

SEQ ID NO: 571708 - DNA, 174 bp, Homo sapiens
ggtctgtggaaaaatactacatcccctgtataactgcagtgttcgccggtcacctccgcattatgtaaaagagatgcatcatatcccagaaatgacttggctttccttgcataaataacctctgatagtgctggttgtatgaataaaggagaacttctaagcaaattcatagtt

SEQ ID NO: 571709 - DNA, 709 bp, Homo sapiens
cggtcttgttttcgcccatatgccttttcgtggggagtgcgctgctccggacgttgttactctaatcttcgcccccgtcttttggcggcaacccgcccacgtttttcgcatgtggctcctcctgggagacccctcgagacccttctttttctctgtctcctctgcgcgctcaccaccacccactcagctccaacaggtgggctgcagcgatctaccatcctcgcacacactccgtttgctgagcccgtcgccattgccgcaccagccccctcccctaggggcgccccactttggcccaaaagcgatgccatgccgccccacctctgcgtgtgccccttagtccaacgtgttgtaccctagtcgtgtgtgtgctgtcttctaggggggtttgggggtgggtatctggggcattgggccctctttctcccccagtggaggaaaggtgtcgcccgtgtacttcgccccgttaaacttgaaaaacatatatatcataatatatttggagagtccactaatttcccaatgggcgggaggccattaagcccccgaccctgggtccctaggccccgcctggcactcagaccttgcccgagattggctcccagaatattttgcccggcttaccaggacccaccccctgtcctagaggccctttttaaggaacccggggctggatagcctttcatccccactattctctgtggtatga

SEQ ID NO: 571710 - DNA, 768 bp, Homo sapiens
  misc_feature (14)..(14): n is a, c, g, or t
  misc_feature (82)..(82): n is a, c, g, or t
  misc_feature (87)..(88): n is a, c, g, or t
  misc_feature (92)..(93): n is a, c, g, or t
  misc_feature (98)..(98): n is a, c, g, or t
  misc_feature (100)..(100): n is a, c, g, or t
  misc_feature (102)..(102): n is a, c, g, or t
  misc_feature (144)..(144): n is a, c, g, or t
  misc_feature (174)..(175): n is a, c, g, or t
  misc_feature (182)..(182): n is a, c, g, or t
  misc_feature (187)..(187): n is a, c, g, or t
  misc_feature (191)..(191): n is a, c, g, or t
  misc_feature (194)..(194): n is a, c, g, or t
  misc_feature (196)..(196): n is a, c, g, or t
  misc_feature (239)..(239): n is a, c, g, or t
  misc_feature (247)..(247): n is a, c, g, or t
  misc_feature (325)..(325): n is a, c, g, or t
  misc_feature (558)..(558): n is a, c, g, or t
  misc_feature (569)..(569): n is a, c, g, or t
  misc_feature (620)..(620): n is a, c, g, or t
  misc_feature (667)..(667): n is a, c, g, or t
  misc_feature (681)..(681): n is a, c, g, or t
  misc_feature (686)..(687): n is a, c, g, or t
  misc_feature (700)..(700): n is a, c, g, or t
  misc_feature (758)..(758): n is a, c, g, or t
ttttttgttctctntttcttttttgtttacctttttttgttgttcttctcttcaaagattcgagaattgcgtacaaaaaaanccttnntttnnttaancntnaatacatttacaggcgtaaatgcaaaccgcttccaactcaangcaagttacagccctcggtgttctggccanngacctcngctcngccnggnanctgggtcctccggcttgggctttccccccctgcccgccccgcnaggcgaancggctggttcttgccggcctctccgccgcccctccccggcccctcagccctgccccgttggtcccctgcccccgctcnggggctcgctggccacccacgccctcggccaccgccccagacctctcgtcttccgcaggcgcgtgtgctgtgcctctcgccccgcccggcccccgccgcccgtcctcccggttgggctcttgctctgtcccgggtgttaccccctccccgggggggcgggttggcctctccgtgctgggtcgggctgcggcgacacgttctcgcgggtgcgcggtgctgttgctcagatacangctttcaaggnacaatttctatttcgaaggcttattccagtttcgtgaggctagcatgaggngtgtgcatttgccaggggcaaatttctattctcaattaacccatgcngcaaatgctacgcntctgnngggtccgtttagnagcatttgcggtgggcgatggaggggcccgactcgtcgtactcctgcttgctaatccncatctgctgg

SEQ ID NO: 571711 - DNA, 1399 bp, Homo sapiens
  misc_feature (638)..(638): n is a, c, g, or t
accgtggcgtggttgtgtctatgtcatgtgcatactattataatcggccaagctgcgctccctcttacctttcaataagtgagggtgtgcatcattcgctcggtatgtgtgattgcaccattgcttgtggtcggtgcagcacagcgtcccgcttgttgggcgcgccggagacttagttacgtggcgaggatgttgtgttgtattttgctgatacaatgttggtcccacctctcgtgggagaggtcttctcctgccctcgtccttgtctcctctgcgcggtacaccttgcctcttggggcccctctggcctgtgtttcccttttgccagtagacccccattagcccaccgttgggccttttgtgctttaaataggggcaccacacaccgtcctcccggttatatgtgatttaaggccccatgtgggccaccacgtgttccacacgcccaaagttttagtgtgaaagctccactttgagaagcccacgaatgtgccccgtggtacttagtaccggcgcccacgggtttatagggagagtccctgtaataggatttctcggtcttgtcgttgataaatacccctaggtaaggatagatgtcggtagagggagaccatattatataggaaagctgggctagnccccccctaaattttatggagtgagggaacggagttatggaaaggattcgtccaacacagggagagttcttcccacgcccgctatatgtttgcgggaaaatagttatgcccttgttgtaacctgggtctttctggtataaatagctatactttcttcgctgtgaaagaagagtgttctaaactttcacgggttttttcaccctcgcctcgggttggggagagagagaggcttcttacacgtggctgccactggagttgggcccacgctaggagaaaaagccccaccacggagcgcgtgggctttccttcactgccacatttggtgggtgagcctggagtgatgttgtcccaccctctgtcacgagaaagagaagatggagaaaccacgaataggaaagaggaagttctccccggagaaagattgaattgccaagaaaacccaaccccgagtccgcgaggtgaaacgcgagccacactggggaatgctcgtccaccacgctggagaaatgaaaattctcggagaaacacacatgtgaaggaaggaggcctgagaaatccacaggtctgaaaaccgcggcacaccacactggaaggggaccacctggaagggctggaagactacccacattgtaaacaccctgccatgtttaagaagggggccccgaccctcctccccagggaaagatgtttttgtaaataaaggtatatttttcacttttggaggattctttttgtataaccttccaataaagattgtaacc

SEQ ID NO: 571712 - DNA, 116 bp, Homo sapiens
cgggctgccgtcgccgtctgtaccagcagtctcagttctccagtatattccaaataaatatatggcccccgatgagtcctgtgaaggcactgatgcacacggtcaggtgccgggca

SEQ ID NO: 571713 - DNA, 1783 bp, Homo sapiens
  misc_feature (1495)..(1495): n is a, c, g, or t
gggctgcgtcgggctgcaggagaagatggcggtctccacaggacgttaaagttcctcgtaattttcgcttgttggaagaacttgacacgaacggacaacaaacggacgtacggcgaccggtaccagttacgctggtggccttgaacgactgaactgacacgactactgaccaccttaccaacggtgggaccagtgcactgaacttactgggggaccaaccaaaggggaccaacacttacgtgacacaaccacgacagtactattacggccgtgacaaagggtacgaaaacgtgctgggacacgtaaaaatataccgcgcagacacgggctcgcttcccggtacaggtctacgactttgggtacagcacaaacacactgtacacatatgtgacacgcggacactacaccttacactttcccaccgtggggaatggggtgggaattgccccgggaagctattaccaaggttgatttagccacaaagtggggcaaaaagtgtcagtaatcagccattttaacaggtgtggtacatttcaaaggaaggcttaaggaacggtactacatggatggttccaaaggaaaacattcttggcacaggcctttcccaacaaggatgcaacaccgaagaaacaggggaccaaataactaatacacacaacccaaactctccacaactcgtgtcaacgggtggggcagttccgtcaaacacagcagttggggcccttttaaaagagtcacaacaaaaagacgttatcattaacctacacatgtgtgtcaacgtcggtcattcgggacgttcaaacttactttcaccgcaaacgtggcagaaactcattaccacaccattttacagggttacaccaaagggaaatgttcccaaggacttgggggtaaacacaacattgtaacgcgtgatggcaccaattttgtgtgatacggaacattaatatctttcacgttcacttacttgggttagacgcacgcccagtttaattgggtttgtccagagggaacaacaggggaggggacgaacattggcaggcaaaaagatagtgtgtatcttgcattggagaagggggcgctggtgtctcttgaacaacagttaaaccagtgtggagagatatcgggagcagctagaacatgccacgggggttaccaaacagacgtacaacgccgtgtgtggagcgaccacgcgtcacaacggagaccggcgaacgcaggcggcgtgtccccccaaggaaaacagcccaccacacaccacaggcgagcgcggctcaccccactatgacgtagccgagccgcgacggacacagtgacacaacacgagcacgcaagcagctagcggagacagcatacagccagcgcgcgacgcaccacaccaaacagccaggcgcactgccgacaacacaggagagacgaaaccgcaatgtatgaaagacgatagatacaagtatttaggtggttgtctcttcgtagtgcttctctgtttcatcgntcgcacgcgtacgacaggtgcaagattgacgcggaaggatagagatcaactaggcgacaagtagcgtatacgtcgcaaggagataggaaatgacagaaaggtaggacgaagatcagcgtgaaagaatgcacatacagcatcgaacaatccgaaaatggccagagtagaaaacggatcgaaacaggtcagagaatcaagcagatcggatactgaagatcgtactgaccataagcgaagacgaagatgcagacgattggagaaagagacgaaagtgtaaagagcgagccg

SEQ ID NO: 571714 - DNA, 104 bp, Homo sapiens
ttttttcttgtttttataaaaggttaaaattacgattttatgggtaacaaggggggaccccaccaaggcagggtcagggacccccaaggaggggcggagggggg

SEQ ID NO: 571715 - DNA, 441 bp, Homo sapiens
  misc_feature (37)..(37): n is a, c, g, or t
  misc_feature (82)..(82): n is a, c, g, or t
  misc_feature (395)..(395): n is a, c, g, or t
tgccttttaatgtgccataagaaatatcctatgaatnccctagtaaacaagggaagggagctggatgattgggagggaaaantccctgttcacccatcaccttgttttgtacagtttccctttttgtacccaagtatttgtattaccctaactttaaaaatgctctgataggctgggtgcagtggttcatgcctgaaatcccagcactttgggaggccaaggcgggtggatcacttgaggtcaggagtttgagaccagcctggccaccaaggtgaagccccatctttactaaaaatacaaaaattagctaggcatgtaatctcagctacttgggaggctgaggaaggagaatcgcttgaacctgggaggcggaggttgcagtgagctgagaattngccactgcactccagcctgggtgacagaggaagactttgtctcaaa

SEQ ID NO: 571716 - DNA, 1123 bp, Homo sapiens
gggctgcgtcgggctgcaggagaagatggcggtctccacaggacgttaaagttcctcgtaattttcgcttgttggaagaacttgacacgaacggacaacaaacggacgtacggcgaccggtaccagttacgctggtggccttggagcatgatgcaagatatgcacacttacaaggtggcacagcacatgcatcatggggccacccaagggacaaattatgaacaaccagaatatatagcctgaaaggtacgaactgtggaccctaaattacccagaagctcctccgttcagtaacgatttgtacccacacaattaactatgaaccgggaatacactcattccagtgggatggtggatgcccggagcataccagttgtcagcacaaatgggcaacattcatatagcattacacagtcggtacttcaagcagctaaagacgtctaatgatgtccaacgaacacatatgaaggcttccacgagcccaccagacggaccaccacatacaagaataaacttacaggggcatctcaaaccttgtctttaacatcaccaaccttctactcagtgtcaatggtcttgcgtaacataatacacaatggcaacataccacattaccgtacacgcaattccagctggtaaaacattgacctggcccattgcgtaagcactatctccatatatgtaccccccatacggtcccagggcaacccgggcgcgacacaactggcaggcccgaattagatgcactcctggcaagcgcactgtgccatttacagcaataaacctgtggggtcgctgcacagagcacttacggcttacacgaatcaacgggtgtgtcgcactgtgtcaatggcatgtcacccgtggtgttgcataaacagggaaaaacttcggaaacacgcgaaggggggttagcccacataaaaatggaacaggaccgtgggagaacatggtgacacgcagcgggcagacactgcggaccgggtgtatgaacaccacggggtggaccacgaaagaaaacagtagcacgagcgccagtaaaacaagacggggcacgcgcacgacgcgatgtgagatcacgcaagcgagcgcgaccgggacaacgacgcggcgaccacaccaa

SEQ ID NO: 571717 - DNA, 1242 bp, Homo sapiens
  misc_feature (365)..(365): n is a, c, g, or t
  misc_feature (382)..(382): n is a, c, g, or t
agcttagtgacgtcttgctctatacaaatcttcttactattggaacccaactcgtaagtattcatacctcgtggaaagcttgcatgacgataatgagcaatacaggcatggatggtcagaagaccgacgagttgtattgctggcatctccatttgtgctgtgtttggagtgtagagcgcatgcataatttccttgaggctgttgttgatcgagtggtctcgacccatgtactcacgtattcttgtgaaaacacacaaagggcatacagtacatgggtaccatctgattgctatataccatccttatatgagagaaattgcgataggacagctagagacaaccagagagggtaaccgctcgagganagccatgctattcgttnaactcgatgtaaactcggacacagcacgtttctaccctacactcgcagcgtatcgtctccttccatttgtgagacgctactctctgtgttggctcaccccttcacataggagaggcatgtaccctgtttgagcgcacgctagttgatggacttcattggcgccaattggaaactagtaaattgaccttgggatacgtcccttatttcacatgtgtacataggccaaggagcattgtcctggcgagagaacttgtcgggtttcaagcatggctcttagacccgggttggagcgcttgttctagtaaacctccacaagaggggcaatcgaaacgctgtatagacgtcatttgcctttataatcccttgtgcgaccgtacatcgcgctaatttgggcacgagggcagctcgaatcttgctttgtatctaggaaagtttcaacttgaactcgccaattgagcacgaggggcttgaaaacgccaccagtctgggggccacttggcaagaggctctaaatggggtctctagaatccataaagattgtgccacgccgcacacctattgaaggcttttcctttcgctgagtcgtgacgattaacaaacttcacagatttaggacatgacacgagagggacccttctttggaagacttgggacctttaatattggtgaaagttaccccgttgttatggcccctattttaaccctcgaacttctctctgggcattaaggtgtaacgcggtcgacttaagtggataaaccaattcccaagagagggatgggcctcgccagatggcgaacattcctatattggaacacttttacttataccaacaggtccatacacaaacaaaaccgggtaa

SEQ ID NO: 571718 - DNA, 333 bp, Homo sapiens
  misc_feature (320)..(320): n is a, c, g, or t
gtatgcacaaccttagggtcagttttgcaggtggtaagccatttaccaagatagttgtaggtaaagaagggcagatttattagagaaatagtgaaaatatgttgcacgtgggcagctcagcagagaaggggctacctgcaaagaggcaagggctggaggaaagttttatagggtcctgctgaagggtgctacgtgtggaatgaggtcattgtgcccgcaggttgtttgtgattagctgtctctaacaattgttcatacaataattgttcattattgttctcaacttggggctctccccaacctggggacccttccttatngttgctacccaca

SEQ ID NO: 571719 - DNA, 347 bp, Homo sapiens
gtccttcacacaggggttaatagtggtcagctctccaagcactaaagatttgtataatggggccgggcgcggtggctcacacctgtaattccagcactttgggaggccgaggcaggcggatcacctgaggtcgggagtttgagaccagcctgaccgacatggtgaaaccctgtccctaccaaaaatgcaaagaaaaattagctgggcgtggtggcgcgcggctgtagtcccagctactcaggagttcgggaccagcctggccaacatggtgaaacccgtctctactaaaataacaaattagtggtgtgtgggccctgtatcccagtaccaggaggtaagagggatca

SEQ ID NO: 571720 - DNA, 280 bp, Homo sapiens
tgggcccggccctctggcgctaccatggggtttggcaagagcaaccgggatccctacgcgacctccgtgggccacctaatagaaaaggctacatttgctggagttcagactgaggattggggcccgttcatgcacatctgtgacataattaacactacccaggatgggccaaaagatgcagcgaaagctttgaagaaaaggatggccaaaaactacaatcatacagaaaagcaacttaccttgccacttattgacatgtgtgtgcagaactggggcacaa

SEQ ID NO: 571721 - DNA, 1494 bp, Homo sapiens
  misc_feature (214)..(214): n is a, c, g, or t
  misc_feature (224)..(224): n is a, c, g, or t
  misc_feature (234)..(234): n is a, c, g, or t
  misc_feature (239)..(239): n is a, c, g, or t
  misc_feature (267)..(267): n is a, c, g, or t
  misc_feature (280)..(280): n is a, c, g, or t
  misc_feature (416)..(416): n is a, c, g, or t
  misc_feature (419)..(419): n is a, c, g, or t
  misc_feature (443)..(443): n is a, c, g, or t
  misc_feature (525)..(525): n is a, c, g, or t
gggaggcttggggtcgttatctgcagacgcggatacttcggtgtgttcggacggtgctatggaccggtggctgggtacttgcacttcataccaggccctatcctgcgcattgtgcatagctcaagcccatacgccgggaggggaaagaaggacacatacgtctgcaaccggggaaggccgcagtgtgatctttgacgcgagtcctcgtgacggnactcccatcnatgacactgntgtcnctatgtctaccatgtgtcctacgttccnatgacacaccaancacaaaacagacaaaaacgtaccctacgacaaaaagagtagatcctataaaccagaggaagggaaagatgcatattgcactctagggtgcaccagtgcagagtccgaagaatgagcgcagaacgtggacagagtgnaanctatagaggtatgggtcaaacganatgggacaaaaacggagagatgcgaaggggcaccccatacgcttcactacgcctgcatgcgtagagggaatagcagtgggcnctccatgtgcagtcaacgaagaccacgtggaggaaaaagggctatagccacaagacggcaccgctcaccgcaagggggaccctgagcggcagcggcactcagatgagttagtgctccttgcactagcggtggtgattctctctgaatgagacagtgagcggcagaccaggtgggggcccagggtgtcactcgcaagggcgctgggcgggagacagcccactcagtgcaaatatcgagggaagtcagtacatcacacagagtggcgaggaatatccgccatttcagttgaaggttcgcacttgccctggggagtcctcacggggaaatttttcgctggacatatggctgcgtggcccacttgcaaccaacaaacgaccatttaatggggcacctttgggcactttcggggcatacctactggggcgacgtttggagaattcaaattgagggcgtagagggtttcccacaattgattagggtgaagggccaaccccagggtggaacggcccacattcgagtatcgtgggatgtctccaaatttcgcactcccaggggaagacccccggaaaggggttcggccccacgacacggggtcaatacccctcctacaagcatcgccacaccacacaggccacggcctaacaccacggacgggggcacccgcaaacacaactaggttgctctcgccaggggttgttgattgacccgacacagcgaggacaagcaactaccccaggccggtagaaaggcaaaatacagccgcgaggacacaccacaaccaacgggcgagacacacaaacgaggtggttacccacgagggacgcacggcgtcaacgcccagtaacaatggtgtgcaccacttgccaaaaagccgaggaatacacaagagcagggggtgagagccaacacccactaacgcggtcacacagacagggaaccccagcgccacgaccctctaccagaacgcca

SEQ ID NO: 571722 - DNA, 135 bp, Homo sapiens
agaagcgaagggagtggcattcacaggactactttatattaaacgtttattacatttgtgaaaatctactgtacaggggaaaaaaccattgtgatataagtatgagtttttggcacacagcacaaagactattac

SEQ ID NO: 571723 - DNA, 216 bp, Homo sapiens
cgatccggctgtttctgtacctcacttccgttttcggtacatcactttcctctttccattcataaatcttttccacgacatggctgtgctggagtctctgaacctactctggctcgggaggctgcccaatttgcaaatcattctttgctcaattaatccattaaatggcatggtggctcacggctggtaatccgatgcacgttgtgagaggcccga

SEQ ID NO: 571724 - DNA, 765 bp, Homo sapiens
agcggaatgcctaacaaagcagaacgactcacgctgggtcccagagctggccagtggaagcactgagacctccacatactgaaggcatggactattgaccgctgttggtattggtctcatcattgactatcattaagtgttggctgtttgcatgcttcctgcccagtggcaggttcaaagaagcccgcaggaagcgtgctcctttctttcccagggcccgcaattgggctggaagatagagcaacaaaaagcgcccatgtaactcatgggaacattcatgtgtgctgaatggcaggtgaaggtgccacagagaggctgaggatttcagagggcaccatgaactggagtgaggtcgcagagcaggaacccaagaccttcacttggttggtgtgagcactccaggaggcaggcaccctccctcagccctcaagcaagcaaaaatgggtttaacaacaaagaaggagaagaagcagcagcagcagccgccacagagcttgtgacagctacagcctaagggcaacaggcaggggagaccaaggaccagaaagagcagaggctttttcaaagaaagagatccctctcccagcacccagcgatggcggcaaaccccaccacagtgcctgctaagaacaagtcccacgtgagaacaacatgggcccccgagatgccacaggggaccccgagatgctgcagtgcttggtctcccgctggcagtgcccactggctcaggcccagtactcaccctggtcacactgggagaggagg

SEQ ID NO: 571725 - DNA, 170 bp, Homo sapiens
  misc_feature (106)..(106): n is a, c, g, or t
cctttcaaaggaacggtatatttctatattggaaaagagtaagatgaaatctaaatatttgaacttgctaactaatcatcacaatcgtcaatcggcccaggctcangaaaaacataggacctaagcctcgaacacgcatctctaaatggaattggaagacactccaagac

SEQ ID NO: 571726 - DNA, 1222 bp, Homo sapiens
gtcgtagtctatcatcgtatcacttactgatgtctgaagggcgttcgcgtatatgttgaccgagcgaaatgttctgacggctatagtacaacatatgcaaacgagcctgcaactgtagtacggcgccctatcggacgtaatacatagtccttatacagactagaactgccataaactacatactatcatcagatagtatgctcacttatgattcgggccattagtctactcaatcggactctctatgaatcagccgccactcgcacactttaggcgtgctccacctactctgccatcatttcatactactagacaccccacccatgcactagtgatcccgaacgcgacgcttgtgtacagactccttctaaaccattacggggcccttcagtcattctagaggtgcctaggcacgacccctttcttagttcccgttagccacgggacgtgagcgccctctttcccttcttgcactgcatgcggttcgccatcgattccctatacctcccgctagcgtcccacaccgccttgtacttccggggcaggctacctttgtcgctaggtccctgctcatctcctccacaaacaatccccctctagttaaatgggagacgcctccacacaccagttaaacactgacgtccatttaccttaacagtgactctgcatcaccactgcggagtttacccctcacatgtcagtgccccactgggtgtcctatgctgcattttctcccccaacaagctgtctacattgccatgccacatctgaccttgaccaaaagggaaccggcccgctggggtccacactttgcccattgacaccaagtgcggacttgtaccccgcttaatcgagccccctggtctaccgcattagccactcctaggagtcgttatccctaaccctcgtaacgccaaaataagacatcgcgaaccttgtaccccaccccacgcaatcgcaaccgcaaaagcacgcgctagagcacaaacgaaaaaccccagagccaacaaacgcacgcccacgggcagctcaccggcccccccggccaaaccacccccaacccaccctcccggcgcgcacccgccccccgcaacgtgcgaaacgaacccgcgccaaacaagcccccacgacaccatccaccaaccccagcccctacacggcgcccgcacacgaacagaccccccaaccatccccccctaccctcccgccaccccccccccgc

SEQ ID NO: 571727 - DNA, 874 bp, Homo sapiens
  misc_feature (874)..(874): n is a, c, g, or t
gtatcaacgcagagtggccattatgccaggcgcggtggctcacgcctgtaatcccagctctcagggaggctaagaggcgggaggatagcttgagcccaggagttcgagacctgcctgggcaataatagcgagaccccgttctccagaacacaaggaaacaaaaaaaaaaaaaaacaaaacaaaaaaaaactgtggtgtgggccggcacgctagccaccggaagaaagtttttaataacaacaatatctcgttggtgggcaccacgggcccacacaaagggtacaaggtgcaaacatgggcaccaaaagggtgtgtccccaagaggaaaaccgcggggccacacgacacataggtgtgcggggattctccccacactatataaaacacagcgccgccggggtaacaaccgagagcgtctccggataaaaacatcttccaagagggcggagttacgaaggggccacacacgcgggggctttatcacgacggggcgcccagaggaagaaacacgaatatactaacaattaaagaccgggcgcgtggggaccaagatggaacaccatacacacaagacacagaaaggaaacacagacgcagcaccaacagccaccaaaagccacaccaacaggggaaaccattcggagaacaacagcaagaacaacgagcgcgaaacaccaaccacaacatgacaacaacatagaaccaacgacgaagaaaagcacaaccagcgagagagagaaaccaaacagccacaacacacacatcacaaaacaaaaatccaaccgcgagaagcaccgacacccgaagagagaagagacaccacgcaagaaccgcaacaaaccaccgacacaccacacgaaaaggaaacaaaacn

SEQ ID NO: 571728 - DNA, 153 bp, Homo sapiens
cgagctcggtaccggaaagcacactgcaacagagtgagactctgtactcaaaaaaagttacagcaagacttttctttttgagacagggtctggctctgttgcccagtctggagtgtggtggcatgatcatagctccttgcacctttaacctcc

SEQ ID NO: 571729 - DNA, 316 bp, Homo sapiens
tggggggggtttgttttttggtttttggtttttttgaatccaaaaattttccccggggtttggggcccggtaggggggaaaaaaaaaattggcccggcccctgggcaatttttcagggggttccccccaggggccttttcaaaaaattacatgggggggcctttccgggggggggggctgggcccctttttggttttctttggggcccaaaaagggcccccctggggggctttgtccccttggccccctggggccccctttttttttttaaaggcccgcccttcccctccttataaaaaggccccgggttttggga

SEQ ID NO: 571730 - DNA, 231 bp, Homo sapiens
cgtctagaggtcccatcagtgacacaagcatatcttaatgtattttagatttagattaattgataataaatgtaaatattttttctttaaaaacatcgagaccatccggctaacaaggtgaaagcccatctctgctaaaaatacgaaaaattagccgggtgtggtggtgaatgcgtgtagtctcagctactccggaggctgaggcaggagaatggcgtgaacccgggaggt

SEQ ID NO: 571731 - DNA, 547 bp, Homo sapiens
  misc_feature (204)..(204): n is a, c, g, or t
  misc_feature (244)..(244): n is a, c, g, or t
ggaaactatacagtacacatacgccgacatggaacaacatgggctggtccatggataagcgaggtcgagccagaccatatcgacgaccacgatccgcctggtgcgccacaacgaattcgtgatgggcggatcattgatgctcgggcgcatctttctcgatgtggtttcggccaaccgctctcagttcctgttcctggctcgcgnacagtacggcggctgcctggccgtgcgccaagccatcgcngccctgcgcgatgacatcactcgcgacctggccgccgacctgacactgatgcccaaacttcagcacttggatgccgaaggtttgcacgtgatggccgacctgatcgtcaagagtgtgttcgccaccctgcccgatatcatcgacccaccggcccacgccttgccggcccaccttacgccccaggcgaaaatcacccagcagctgcgctttatctttatcggccttaaacattggcaagggctgggcagtaccgagtaagtcaatcaacccgccgtgtggaaccgttgggcggtggactcaggt

SEQ ID NO: 571732 - DNA, 208 bp, Homo sapiens
gggtttttcccgccccaaaaccaaaacccctttcccctcttggggggacccccaaactcccttaagggggggggggccttgtccgggggttttttccccccctttttaaaacccctgggcccccccggggggggccatttttcttttccttttccttttgccaggggggttttttaaaaattttccctccccccccctcccctttgga

SEQ ID NO: 571733 - DNA, 227 bp, Homo sapiens
agtctccactccacctctccttttgagtctccttctccttcccatttctctacactaagtgggtatgttccctcttgtccctttccctacctttatatttgggtgtcctttttatacaggaaaaacaaaacaaagaaataatggtttttttttttttttttttttttttttttttttttttttttttttttttttttttttttttttttttttttttttgttttttg

SEQ ID NO: 571734 - DNA, 275 bp, Homo sapiens
ctctttctatcatatccgataataattaagtcaacaatggatggatgattaaggattggatggggactggattattttaggaaaccacagaagtcgtgactggctaggacttggtgattttgatttaagaccatgtcatgaaacaaaagtacacattgttcataagaagcatacaaaaaatatatgatgggtggtagcctaatttgtattatgtctactttaagtgaatattggattttttttaaaagatcacttttataatgtatatacaagag

SEQ ID NO: 571735 - DNA, 662 bp, Homo sapiens
  misc_feature (39)..(39): n is a, c, g, or t
  misc_feature (147)..(147): n is a, c, g, or t
  misc_feature (259)..(259): n is a, c, g, or t
  misc_feature (346)..(346): n is a, c, g, or t
  misc_feature (364)..(364): n is a, c, g, or t
ctttttttttgtaatatttattttaaatagtgaccacantaccaaagcaggtatattatttgtatttgctttttattaaaaaatgattgaaatgccaaacatcaaattcaaaaagtttagagcataatctacatcaatgcctacctnctatataagacataaagtaagaggataaaatatgatgaatccaagaactaggattctcaaagcagaacactaggtctttgacagatatttacattacctaatactgtttttntttttaaataaaaaaatatatttggtcaccatcactttccacacttcatttgagaaaatgccaagttcaaagctgaccttcccctgntgttcttgcttgagtctntccaggtaggatagcagaggaaaaggacttgattaaaataaattatcctaagggcagagcagtgaatggatctaacactgggaaaagtatgggagaggaaaagagggaactgtgccacagagaggtgggcaggctcttgagaaagggctgagaagtggggctggcgtttccttcctcctcccctgagctccatcctctgccctactttcatgtcttccccttccagctcttcctacctctacccacattccttttttccttccactccaaactcaattcttctttcatcagttttttg

SEQ ID NO: 571736 - DNA, 114 bp, Homo sapiens
cgtcctagctcgcaggtgtccagatgtgtgtacactagcctcatcagagtgtccagtgtgcgctcacctagcctcatcatagtgccccagtgtacgctcacccggactcatcat

SEQ ID NO: 571737 - DNA, 711 bp, Homo sapiens
gaaaggaaatcgcagcctgattcggtccatctgtggtaaggcggcagagactgcaagtggtgtccagcgagagtattgctgaaccgaatctgggagatagagaaggctgctggacaagctttgtacggttctgtgtgtccgatcttgctcgaccaatatgaatgtgtgtcgccgagagattgatattcacatagtcattctgtatgcagatgggctgcccttatgtcatacagcacgtcgggactcaatgagactctggcatatagtgagacgtatgctccgataaatatcgtggtagccatgtggtgtactactgctgcatgtgcttatatagaaattcatttatttcatcctgtagtccactagatcataaaatgtcttttgctgcttgttattctgccatctctaaagatgattgttgtgcgtataaaggattgatcagaaggaaacacgtccaaaaagttgcagatgagatgttggttgcggccgagtatagtcagtaatatagttaacaagcaaaaaaagtgctgccaccttttatgatgattttctaaatggagaaacatttggctgcatccacatagacctttatgtgtgtctcagttgaaaacttgcctcctttggcaacattcgtaaatgaagcagaatctctcactcttatccccaaatatgttagtttgtcttgtaagcatgttccatgggtaatggggc

SEQ ID NO: 571738 - DNA, 187 bp, Homo sapiens
ctagcggtggggaaggtacccttaggactgcgtgcaatgaggaacggggaatcattaattaattctggagaacgctgctgttagattgcgggagacttgaggtcttccagagccttatgttgagcctggccccgttctaaccactactcttgcaccaataaactgatgcaccatgacccatccatga

SEQ ID NO: 571739 - DNA, 149 bp, Homo sapiens
gacactgaggcagctactgagaagggcagaacatgtctcaatccatagaggtcttggcaggcgaacccagagagacttgcagtacgtgagaagatggagaaccaaataaaaggactggagtccagttcaaacaaggagggagtggtagt

SEQ ID NO: 571740 - DNA, 881 bp, Homo sapiens
gagcggttggcagacgcatgctcatgcaccgcagcggggtccttgtgcttcctgagcattagcttcacatggtctaaccattgttctatatgtgcattgcaattacctcacttggctgtcactcaagcgtgactcaatgtcttgaactgctcacaagtacctgtttaacaaggtagactgataggtaacatgcacatccccttctggtgaactgtccctttgtagtttgaggtttctatacggacatggcctgtccgtctgaggacgtgaccctatgtactatacgttccagcgccctctggacggctaggaccacttccctggttaccttttagttccaccggcggactgtgtcggaacacgacgggacgtaacgacggacaccgggctgacacgggcccagcggactctctttgcctatgctactcctctcaatttgcttcgccatgaccagactcgggcttgtctaccgacctgaattataaccccatgcagggggtcccttcctagagagaaagcccgctcccctcaaccggtaaagacgttggcccgttggttgtttgaccactatgttggggaaccaaaacagtttcaccttcagttcatggggcccaacatcgaagttcctctacacggcctgtgtaacacggcaccacattggccgcgggttggaacgcccaaccccttgtcactccggcaagttaccacaccaatcgctttaagcaacgggcccttatagtttcgaaccctcttctaaaggcccccttaaacttttcttggttaccaaacatatacgccagtctagccggtccgacagttcacaaccttggcaattaggcggcaactaacccacttccttacggcggcacccccactttggc

SEQ ID NO: 571741 - DNA, 318 bp, Homo sapiens
cttgttgctgtttttctcctcccgttcgcttggcgggcgctacggctagggcgaccgccgccgccctacgcccagctgtccatgttttcttcgggcccgttgccggcgacgggaacccaccacaccaggaatcgtgcaaacagtcggcgcaagtctggagaaaccttaggccctccacaacgttacgcctaagtgatgcccaaaacacggtacagctggttgcggatcgttcctcctgctgtggccagtgatgccaatttcaagcggcgccaaaaaaacagggagcggggcaactagttgcgccaaggcccgctactg

SEQ ID NO: 571742 - DNA, 756 bp, Homo sapiens
catttattacttgggagtcccattgtggacactaataataaaatcatggcaatgctaaaaaaaaaaaaaaaaaaaaaaaaaaaaagcgtcggcgggcgcgcgcgccgcgcggcccccgcgaaaagagcctctaccaagaaccaagtcgcgcgtggggcgcgcgcgcggggccaccgaaagagcgaaagagggaaacgagtgggccaaacaaggtggttcccaagaggagaaaccgggggcacgaggacaagagagggggcggggaatcttctccaacacaaataaaaaaagacgcccgcgggaggaaacaacccgagagggacttggggcaaacacaaactccagaagagtggacagtctccgaggagggccatcatcaagggggagctacaacacccacagcaggggcggcactacacaacaagcacgagcgcccgcagaatatacacacaaagtatacacagccccgcccgccctcggtggggaaaaaacaaaaagcgacaaaagacagagcacgcacacataaaccaaccccgaacacaaaaaaaccccacaacggagcgacaaaaccgcagcggcaaaacaaagcccacacaacaacaaagcagcaagcgagagacacaccaccaacacccccacaagaaccaaaccacccaccagcaaaaggacgaacgcccaagacccagccacccgacaaccaaacaaccagggcgcgcccaccacgcagagaagacagaccaaccacccgcgcaaacc

SEQ ID NO: 571743 - DNA, 322 bp, Homo sapiens
gcgatcaagacgattattttgttccaggccatgggggtttactccgaaggagttgttcagcaaccgcctgcggtttcgcaccatgctggtggcctggtcttcggcgttttgcatcatgctgttcatgtaccagattctgcagatgttcccgcagttgagcccgcgcaacctggtgttctggtttatcaccagcctggcgctgttcggggtggagcggatggtaatgctgcgcctgtttcgcaacctgatggcgaacggcaaatacctgcaacgcacggtgatcctcggcttcaccgacaccgccgtgcgtcgacgcggccgc

SEQ ID NO: 571744 - DNA, 224 bp, Homo sapiens
  misc_feature (7)..(7): n is a, c, g, or t
  misc_feature (22)..(22): n is a, c, g, or t
  misc_feature (60)..(60): n is a, c, g, or t
  misc_feature (64)..(64): n is a, c, g, or t
  misc_feature (74)..(75): n is a, c, g, or t
  misc_feature (79)..(79): n is a, c, g, or t
  misc_feature (95)..(95): n is a, c, g, or t
  misc_feature (108)..(108): n is a, c, g, or t
  misc_feature (115)..(115): n is a, c, g, or t
  misc_feature (124)..(124): n is a, c, g, or t
  misc_feature (206)..(207): n is a, c, g, or t
  misc_feature (215)..(215): n is a, c, g, or t
  misc_feature (222)..(222): n is a, c, g, or t
aattaantgatgggaagaaatnatgataatcataaactgctaataacctccattatttanatantcagcccttnncctncctcattctactcatnctacaatacaganaaggccntcccttatntagttctgttttacgtcataaaggaaactggggccgggtacggtggctcacccatgtaatcccagcacttagagaggctaanntgggtggntcacctnag

SEQ ID NO: 571745 - DNA, 985 bp, Homo sapiens
gttggtcctttcagccttccactttgtatgtctaacacagcgaaatgtctctgtataagctagaaggaggtacgcaaggagtactggatccctcttccatgaaaagggcaggtgaatgggttatggctgttagaggcggcactatgggatcgtataagaaggtacggatcaaactaaaattacttgtaggttatttagttgtcagatgagcaaaggtcattgaccaagggacaatgtgatgaggtcaagttgcttgtgtaagcaggagttggggtcaatagaagatactgtgctctggattgtgacagatgaagttaaagggagtgtagtcaaggggatgttgggctaagtagaataggcatgaatgtcaagcgggagagcatggtaccaactgatgaaactctcttgaagtagctagcaggttctggtatcacgatcctggtgttgtggagccactggctcttgctaatcaccatgaaccataaaacttggaagccccatgtgataattctctacgaagaaatccgtcttataatagcatactcaatggggattagacgatgggatgttctcgacgtgtgtcacccaggggcgtggtgcagagcgggtggatctcggatcaaatgctagcttccgctcctggtgtgcacgcggatttctctgatatacgccttgcaaggtagctggtgctaccagggagtgtacaacacaatccggcaaatgagaaagccttggaaaaaatggagtaaaaacgccaggaagggggcaacgaatcccacgtgaaatcgcacctcggatccaaactgagagtacagaatgacgagggcaacgagggccacttaacgggaacactacagaaacagagggagaactctcaggatattaaagcagacctagaaacaaattacatcaccaagaggagcaatcacaagggcgaccaaaaaagggtcacacaaaagacgggcaacaggcgagaaaaaaacag

SEQ ID NO: 571746 - DNA, 139 bp, Homo sapiens
ggccccccccttttgggcccccccaggtgaggcctggccctgcccccccattacctgggggttttaagcccccggttcccccggaactgacttttccggggggcctgtgccccccattaaacccggggtttttttccca

SEQ ID NO: 571747 - DNA, 448 bp, Homo sapiens
  misc_feature (241)..(241): n is a, c, g, or t
  misc_feature (335)..(335): n is a, c, g, or t
  misc_feature (384)..(384): n is a, c, g, or t
  misc_feature (407)..(407): n is a, c, g, or t
cggaatagaagcttacatcctttgtacccctcacaggaacaccaaattgtaacaagtatctgcacacagaaaagcaccatcacaagaaccaaaaatcaggtgagcaatcacagcacctgatttcatatctctgaaaaaggtattgaggagggtccaacagacagtcttgaatcaccaacaccaaccctcccctatcccctgggcaacagctgtacagcatgggagagtatctgcacttgcngaggtacaccaactgggggacatttacatttgaactcatttgctcccctgttcattagtgggcaaggcaaagccagggctggggcttcacccanaaccccacacacacagggagcttttgggaccagccttagccagagattnacccttttcgttggtcagaattngagggggggcccgttacccattttggcttttgttgagttgt

SEQ ID NO: 571748 - DNA, 131 bp, Homo sapiens
gtcgattctgcaggatccccccgggtacagtagatgtccagttctacgaaggcctggaaaaagcccagccggtgcgcgtgcgtttctctggcgattatgtggctgagctgtcctcgctcaatggctccaag

SEQ ID NO: 571749 - DNA, 157 bp, Homo sapiens
atgctctattcataaagttaaactgcctgctggtattaatgagtttagccgtgctctgaaacatggcaaagagttagtcaactgcttaagctggcccacaaatacagaccagagacaaagcaagagaagaagcagaggctgttggcccttatccgag

SEQ ID NO: 571750 - DNA, 410 bp, Homo sapiens
agcgggcggctgccgccgctgctcttggctcggggacgcgggcgggcgctccgagaggctctggtgcctgcggctgctgctctcctccggcgcccggggctgcggcgctttccccggggggggtttcccccccgggtgaccccccctgtcccggcatctctcgggtccctgagccccggccccgggtcccgcgtccggccggagagaacgcactcagctgctcgagccgccccgggctcgcgcccccgggccatgaagaggggcccgtgaggcgcgcgcggagtcggaggaagaggagggaggagggaggccgaggaggagggcgcgggaggcggaggatgccgccgcgggctgctgccgcgccgccacccgcgggtccccggcgaccctgactccaggaccccgaggat

SEQ ID NO: 571751 - DNA, 201 bp, Homo sapiens
agggtacacagctggctcacagacttcctcatcacccttctcgtactctggtccagcatctgcagcagtggtacccaggacatggtataggctggttaggcgtatgtcaaagctcacccataacttagcaaatagcttgtcattgatagtgtagagcttctcctagatgtcatatcccagcatggcctataagaggcagga

SEQ ID NO: 571752 - DNA, 148 bp, Homo sapiens
gaacccagccagcacagcagcagcagcctttgcctctatgagatcaaacagtttctggagtgttccccagaacccagggtgacatcaagctcttttgaggggtttcaattgaggggctgaaacagttccgacttgcaaacggattggc

SEQ ID NO: 571753 - DNA, 1376 bp, Homo sapiens
  misc_feature (254)..(254): n is a, c, g, or t
  misc_feature (319)..(319): n is a, c, g, or t
gacgagagcgccggaatgcggtccggagactgaagagtgtgatctaccatggcatagtcattcagaagagaggcagatactgactctcgagtgtccgagacgcttcaaggtgcacaggcgggtactgaagctcgttcgtggagggccttctcatgtagaggcgccagcgacgcgcgccggcagtgaagccctgctagggcgaacgggatggactcaagctggcagcgcaagagggcagggggtcgctgtgaagntactgtcgagcacacggccgattaatcggaaagacggacgtaatgaacgaaagaagatgccaaanatggaccgtcattatgggatgtgcagaaggacgcgagacggcgtgctggcctcgtgggtgaacatgttatgaccaggacgcatgctagtagaataacgatgccatgtgttccatcccatcatctcattggaaactcttggaataccatgttacactcagggatctcgtgtgcacgtaggggctcaaggccaagacaacagctaagggaacaaggattgatttccaggggccaaaggcttccttaaaaggcgccaggatatcttccaagaggggggctttaatttattatactacggtagacgaagacatccgggaaatgcgcgccattcttagtgtggggcgtaattggacaggggaaagtctcctttacatagctcggggacaagggccactacgggcagcaggttttctgcaggggcactggtacgtccgagcccgagaaggcataaggaaccctgggacctggggaatagcgtttgagtgcccctcaaatggggcttacaaactcttcgcctggtggttacctacgttggctgggggaaaaacccggattggggccttctaaattgttccccataaaagcaatttgtggaaagcaggtgggaagtgcagaaagagtgtgccccgaggagcgttattccggacggttcccaaaaaggtttggaataaccgggaggtttcttagggcggaaaaaaggaacaagggtttacacaaaaagggccggaacaagcgggggcacaacctcgcaatttaggcaccccgccttggcgttgggaacagtttccctatctttcggaccccggggatccaatataaaaggggggcaaagggatggggatatcaaaggtgcgcaagcaacggcctctggggtacatagacaaactgtgggaggaccacacatatcgcgcccttaaacagtatttggtggtcccgcaggccactgttttgaccaaagggtatggaacaaccggcaagcatcataccagggtgtcacaaggggccacaaaaatttcccgaattgttaacatcaagacaccccacacactcctttcccaa

SEQ ID NO: 571754 - DNA, 151 bp, Homo sapiens
tcctccctctcatcccaaagaaacaggtcagctgggagcttttgccccccctgcctagggaccaacaggggcaggaggcagtccctgaccccgagacgtttgcatcctgcacagctaaaggtcctttattaaaagcccactgttggttttt

SEQ ID NO: 571755 - DNA, 81 bp, Homo sapiens
gtcgaggacacggctgtgtattactgtacgagacctggaggtggaattgtagtagtaccagttgacttctggggccaggga

SEQ ID NO: 571756 - DNA, 886 bp, Homo sapiens
cctgggtgtcagccatcgaaggaggctcagagacgctgtggggaggaaattgctgttcagtgtgcgcggacatggtgaaggggaagtctctcacgggggtgtgaatgcccaggcccttaccagtgccttctctccacacaccaagccttggattggtctggcagaagctctgggagaacacttgatgcgagcctgggctggtggtgcccccaataggtggaccatccaggtgataactaacatgtggaatctatccctgtacatgcatatgctgggagatactgtcgcctagagcgcactcgactagctcagttgtcgcggctgcctgaatagggaggcttccaatgctaggcctggagtgtagaatcgtttgcgtcgagacgcttaaagccgtgcgtgcgtgctacacgcaggctgggttgcctcaggatgtcaccttcggagtctcacgcaacaggctccttgcctgcagccagaggtggaagcaaggggcttccgtgcggcatagtgcgctcgctgggcccgttgtgcccttggcgaggcggcctcgccattatccagtgctggtgggcgccgttggggtcccaaagggcaactaactcccttgttagccttgcacgggggctcgaatgggtgggctgtcgtgtccaggcctaaaaggttgccttctcccgcgagagggagcgtgcccgcctgcatcggtaatatcccgggactcacgaccttcttgacccttgacacagtgcatgccctagcgcatggattgggcgctcccttgggcaagaggcaatggcgtttggtggttgttgatcataccaagagtgcacttgggttgtccagaatggggagaggacccttggccaccgtaattggggcaattttcctc

SEQ ID NO: 571757 - DNA, 132 bp, Homo sapiens
ctatgccgtccagacggtatgtcagagagtaatgaagacgatggggggacacacttggcgaggaggtgggctatgccatccgctttgaagactgcacttcagagaacaccttgatcaaatacatgacaacgg

SEQ ID NO: 571758 - DNA, 132 bp, Homo sapiens
tgcggtgctctcacaggctcccgcagctctctctgtggggcacaggcacctggtcccatggccttctccagccactccaccacacatcctggtgggcaggccatcgcagcacagccatgtgctggcaaggca

SEQ ID NO: 571759 - DNA, 144 bp, Homo sapiens
gccggtccacacgccacgggagaggattatagtggagcccattagtaccagataattaaaaagttttttctttgagcaattcaattatttttataaagatgaagtattagctgtctttcatttgtgtgatgtgcaagttccctt

SEQ ID NO: 571760 - DNA, 678 bp, Homo sapiens
  misc_feature (3)..(3): n is a, c, g, or t
  misc_feature (78)..(78): n is a, c, g, or t
  misc_feature (84)..(85): n is a, c, g, or t
  misc_feature (87)..(87): n is a, c, g, or t
  misc_feature (102)..(102): n is a, c, g, or t
  misc_feature (157)..(158): n is a, c, g, or t
  misc_feature (177)..(177): n is a, c, g, or t
  misc_feature (179)..(179): n is a, c, g, or t
  misc_feature (182)..(182): n is a, c, g, or t
  misc_feature (184)..(184): n is a, c, g, or t
  misc_feature (193)..(193): n is a, c, g, or t
  misc_feature (201)..(201): n is a, c, g, or t
  misc_feature (223)..(223): n is a, c, g, or t
  misc_feature (230)..(230): n is a, c, g, or t
  misc_feature (273)..(273): n is a, c, g, or t
  misc_feature (276)..(276): n is a, c, g, or t
  misc_feature (282)..(283): n is a, c, g, or t
  misc_feature (288)..(288): n is a, c, g, or t
  misc_feature (295)..(295): n is a, c, g, or t
  misc_feature (346)..(346): n is a, c, g, or t
  misc_feature (355)..(355): n is a, c, g, or t
  misc_feature (433)..(433): n is a, c, g, or t
  misc_feature (492)..(492): n is a, c, g, or t
  misc_feature (503)..(503): n is a, c, g, or t
  misc_feature (675)..(675): n is a, c, g, or t
aangttgctcattgggggtttccaggaagaaaaccagctttgggggatttcaaggcccagggagggtgggaagttgcncacgcnntnaggttgtgcccagtntcatgctcaccatttttttttatggccaaagggaagttgctggacgagggaggtnnctttgctgggatgagtagnanagnanggttggggntccaggtnaaagaaatgggtgcagggattntgggacntgggctggatgggcacccgctttgggattttttttgctttagnttntgtatnnttcanggaacantttaggaaggggcgtggcatggggtggggctgccatgttcggggtttttgngtagccagnaaagatgctacaggaggaacaggaggagagggctgggaggggtttgggggaggaggaggagatggggctgcagttaangccttgctcattgcagggggtgtgggaggccaggcagggtcacctctggccctgcaganagagggacggnagtaggcgggctcaggcctgcgcctccagggcacacacgtgcacactgggcaggcagaaccaagagggtggcagctccttgctggtgctgtcctcgtggaaccggatgtggaggaagaagtctcccgtgtagaggaagaggagggcccgaggcaggccgactggccggacgntgc

SEQ ID NO: 571761 - DNA, 294 bp, Homo sapiens
cgccaataggaactttttggaccaaggctacacgtatcgctgcgcgtaatcttgagcatctataccatgtacatattcattaaacctcagaatcttcctgacagggagatcagcgacagatgccctttgactgagctgaaggaaacgtagcctctaagatcaccgagccaatacttaggcatcaatcaagcaatcaaattgcctctaacccagtgcttcaatcttcattggaatcacctggaggagctctagacactattgatccctgtagaaccctccccggaattcgtagat

SEQ ID NO: 571762 - DNA, 447 bp, Homo sapiens
ccgaccctccagaagaggagatgcatcccagtgatgtgagggggacctctggggactgtcattctcagtatcatgtaggaatttaaaaagccaaaatactaattctttctttgtagtgtgtaagggagtgtttttaaaaacaaaacccaactctttgtgtatttttaatcaactctttactcagaatcacgctccaatgcaggtcactctccaattatgatggaagatattttttatacttaattgctgtagggactcattcccagacaaagcaatagtcatgatgtcatggaaccgatcaatggattgtttttaataaatgaagactggcaataaagctgtccattcaattccaaatattggttataaagtagaaccattgataactttcatgtttagaaactccttctcttactattcaaaaaatgtttttaatcatgctaataa

SEQ ID NO: 571763 - DNA, 193 bp, Homo sapiens
  misc_feature (27)..(27): n is a, c, g, or t
  misc_feature (62)..(62): n is a, c, g, or t
agggtggtgagctccatacatatttgnctttcccctcctatgtgggtgtgttacaggaaagncttgagcggggcatgcgttcttcacagtcttaactgggctcctcccttgtgtggagacatcgttttgaagactcataaatgtgattcaacaaactggacggcttaggggctggggattgggcgctgctgct

SEQ ID NO: 571764 - DNA, 1638 bp, Homo sapiens
tttatactacattcgtaagagaatatgcacgtgacaacttcagcactttataaggtaaaaatgaggttaccaagactttaataatctgatcaagcttcttgttatttccaaatagcaatggactcgagtctagtctaagggctacaggagaagagcgaagactaaggcttaaacagtcgcttaactgaccaatcacattctaacaagacaatgcaccacaaaccaaagtttcatctttccaagcccttcagacacctcatttcaaggcaatagcaacacacatcgattctcgctcacaatgccatcatccatcttgctgcagcacattacctccatacacactcatccctgcaatcgatgtccattgcacagcataaaggcattcacaccgctctcgcactccgcatcatgtcaatcatcaggcacaagctacctatctctcactaggctccgaaaaccatgctctgccaatagctatgcgtcacagggccttcccactttcaagcttgtgcacacactcatcacaaggcattgcacaccacacagacatccctaacaacaacaagataccacatacaataaagagagatcacagcgcgcacgcatccgcgacacaccacatcggcataacaacactaacacactcacaaccacacctagaaaagaccagccacaccaaggcaagcctcagcaactcactagctcaccagcgaacaaacaccgacagaaagctgtaaagacacacctggcccacaatcctggacacaagcgcaaacggcgacaccctaggcgtgacaccaataaaacaataagtaaatcccacacggccaccacttggcagctaagacaactacataggggccaacacaaagcaatcgcggcgaatccgaccaacacaagagccaaatacgacaaccgaaacgcgggaccacaaccaaccctatgagtacacgacacaacaacaaagcgaatcgaccaacccaatacaaatacacaaccaacagcacactagcaaaccgacaaaccaaacaatacaaaacgaaggaaaaccacaaggacacacacacatcacaaaaacaaactcccacacaccaggcacacaacaacaataaccacgcgaagcccgacgacaaacacaaacatcagactaccgcacacacggcaaccatacaatgaacacatacacacaaagcgcacaaaacatcgacctaacacacaacacaaaacacccacaacgcacaaaatatagagctcaaccaaaactacccccaggcaaccactacacacaggacgcaaaaagaaagaactacacaacaacgagccgcagcagcacatataacatattataacatacaagacaaatacataaaacgaaataacttattatcaccactacatacatactaaacaactcaatcatacatacctacaaatcacaatatatacatataaatataatacaaattaaaacaacaataaaacataacacatatacaacaaaccacacacaacaactacatacaagaatataaaacaaacaaaccataaaaaaaacatatataattcacacatctaaccatatccctaataacacacactaaataacaaatcaataatatcactactcacacacataca

SEQ ID NO: 571765 - DNA, 450 bp, Homo sapiens
caagcctggcaggatgagtagctggggctgcggtgtgttcggcctgggcctggtgtggccgcctgcgccccagttggtcccctgtctgtgtacatgttgcactcaccatgctgggatcagccgcagtgctgggcattctggggtatgggccagcgtgtcaggtgcctggtctggctcatgtacacgccgtgcattgtggagccctccaccgatccggcagggctgaaggtgctggggaagctggctggtcccgagtggctggtagagcacacctccggctgcggtcatggcctggagctgggcgtaggggcagcggggaaggcgggcatctgcgcgcgcatctggaccgtcgtgcttctgctgctccagccggatctgccgtgccttctcctgctcctgcaggcgctggatggccaggtgcctctgcacctccaggtacccctgcttctt

SEQ ID NO: 571766 - DNA, 168 bp, Homo sapiens
tgacggcccgctcctacggagaggacggtggctggaattaagggttgttagtcatagcttttgctggtatgtaacgagatagtagtaggtcgtggtgctggagtttaagttgagtagtagaatgcggtagtagttaggataatataaatagttacccgtacatgcaag

SEQ ID NO: 571767 - DNA, 446 bp, Homo sapiens
  misc_feature (243)..(243): n is a, c, g, or t
  misc_feature (286)..(286): n is a, c, g, or t
  misc_feature (292)..(292): n is a, c, g, or t
  misc_feature (302)..(302): n is a, c, g, or t
  misc_feature (329)..(329): n is a, c, g, or t
  misc_feature (352)..(352): n is a, c, g, or t
  misc_feature (371)..(371): n is a, c, g, or t
  misc_feature (395)..(395): n is a, c, g, or t
  misc_feature (416)..(416): n is a, c, g, or t
  misc_feature (444)..(444): n is a, c, g, or t
tgagaagggtctgttcatgtcttttgcccactttttaatggggtttattttttatttgttgaaccatttaagttccttatagattccctccctccctcccttcccctgctttcttttttagttccttactttttttttttttgagacggagtaggttctttccctcaggctggagtgcagtggcatgatctcggctcactgcaagctccacctcccaggttcacgccattctcctgcctcagnatcccgagtagctggggactacagggcgcccaccaccacgccnggggtnaattttttanaatttttgggtaggagactggggttgncactgtgttagccaggggtgggncttcggatctcctggaccnggatttatcccgcccatctagggnctcccaaagtgctggaggatnacagggtgtgaggcaacaaaaccaggcntc

SEQ ID NO: 571768 - DNA, 84 bp, Homo sapiens
agccccttccccttgtttttattttactgttaaaaaaattattaacttccttgtaaaaaaaaaaaagtttgtacttggggttca

SEQ ID NO: 571769 - DNA, 405 bp, Homo sapiens
ggtaccggggagggcgggaggcatttggtccccaaaattacggcatatggacatctgcacaggacagtcctattgttggatgtcctttcctttctgaacaatcacacgttttgtgcttcggagaatgactcgctgagcacatctttagggaccaagagtggctatctgtaaggagtgacccgtggcttgccttggtctcttgggaatacttttctcactcgggttgctctcacctgagactattctccacccgcggaatctcagggtcccaggctgtgggccatcactgacctcaaactggctcctagtctccagctttcctgtcatcgagagcttcggacgtttactggctctgctcccgcctgctccgctttctgactctatctggcagcccgatgccaccca

SEQ ID NO: 571770 - DNA, 249 bp, Homo sapiens
aattggctttgccgcccctaattttgcccccctttagatctgtataaaagtgggttgtggtgaaaccacaaaccccagaggggcggccttttggaaatttagttttttttttagttccccccccccatggggggttcctttttcccctttaatatttgcccccctgttgtgggatggataattttgtggtcttttttttccccttggtttcctttttagcctttaaataaatttctgttttgtgcttta

SEQ ID NO: 571771 - DNA, 186 bp, Homo sapiens
agacatacccaactgaacacgagtaacaagagatgcgagcaactgagtaaaccagtatctgcagatactcactccaaggaaaaggccccaaacatcacgcatgagtttcacggacaagatcaaactcctaaaaagagattcagagaaataaatggagtactcaggccacagacataatacaacaat

SEQ ID NO: 571772 - DNA, 305 bp, Homo sapiens
acgaaaacaccatatacaagatgattaaaaatggaaccagacaccttgaaacatatttatagcaccacatgatttaaactttagaaaaataaaacttataatacttacagagataacatgatagcaaacgttagcttgttggcctagactttccaggactaagaccctctgggaatacaatggggctcggtgacatggcgtaacctgctactaggggtagtaggtctcagacacaaaatcacactggatgttaggactacagaggcaggattctctcattgctggataactctggaaattaagcc

SEQ ID NO: 571773 - DNA, 312 bp, Homo sapiens
  misc_feature (307)..(307): n is a, c, g, or t
agcacccgggacattcccatcggccaggccgtggacgatgccaccctgttgctgctgcgccctgacggacagccgtgcgaggtggatgaacccggcgagctgctgatcgccgggggcggcttgtccccgggatatctgggggatgccgagctgacccgggagcgtttcatcgatctgccatggcagggccggacgctgcgttgctaccgcagtggcgacctggtttcccgggatggccaggggctttatcacttccatggccgcagcgatgaccagatcaagctgcgtggccagcgcctgtcgctgnccgag

SEQ ID NO: 571774 - DNA, 206 bp, Homo sapiens
ccgttacgctcagccaacggctctctcgcctcagcagcttgcggtaggtggcgatctcgatgtcagtgccagcttcacgctcatgagcttcctggtactcacgcagctgccgtgccatagtctgcttgtgcctgctgcagggcggcttccagctcctcctgacgtggctaggagcgtgacatggggtacctgagctcgaacttcgt

SEQ ID NO: 571775 - DNA, 597 bp, Homo sapiens
ctgattctagagtaacccgtaatccgcccaggccaacagagagagatcagatggtactgtgtctatgttgaaagaagtagacataggagactccattttgttcgtgtactaagaaaaattcttctgccttgggatgctgttaatctataaccttacccccaaccccgtgctctctgaaacatgtgctgtgtcaactcagggttaaatggattaagggtggtgcaagatatgctttgttaaacagatgcttgaaggcagcatgctcgttaagagtcatcaccactccctaatctcaagtacccaggtacacacacaccgtgggaaggctgcagggacctctgcctaggaaaaccagagaactttgttcacgtgtttatctgctgaccttctctccactattatcctatgaccctgccacatccccctctccgagaaacacccaagaatgatcaataaatactaaaaaagaaaaacaaaaaaggatttctgcgctcccacgttggtggcagcattgttggaaatagccaaatttcagaggcaaattaagcttccatcaacagataatgggaccccgggaacccccgggaaggtccagga

SEQ ID NO: 571776 - DNA, 252 bp, Homo sapiens
cacgaggtccatctgagcctggtggcggaaacgctgcggccccgcgccacagggccggtggctcctccgggtttctgaggacccgcagggagcgggtctcatcatttctgtctcctgtttctccacttccttctctattggctggtccactgatgtacggacctgtccatgattcactgtgaccttctagccacatgtagtgcccttgggtacttggtgggagacacttaccattgggaaccagattgctta

SEQ ID NO: 571777 - DNA, 274 bp, Homo sapiens
ctgacgactattgcagttaccggcgcctacgccgcccgggttggtagcgggcttgtcatatctttggcagcagcagcaaaggcccgctatgactcgatagttgccacgcacagcgcacgatcgtcgcagagcgcccagcaacactttcggcagcagatgcagccgcacaagtgcaagtcgaagcgctgtcgccgatcaggctgcagcgtgggcgactgcgcagcggaccttgtgctgaatattgctgcggccagagccttccaggccaaagagc

SEQ ID NO: 571778 - DNA, 152 bp, Homo sapiens
tgtaacctcgggcccattatttccggaatctgatattcatatatcctccaggaataccggccagagggctgtgctgaaagatacgctgctgccactggtagccagctccaaattgctggccgcttcactcctggaaccttcactatcagcat

SEQ ID NO: 571779 - DNA, 193 bp, Homo sapiens
gggggtggggttttgccccccccccacccggaaagggcttttttttttttccggggttattatttggggggggcggggccccccccctcccggggtttttttgttttgcaaggggtttttggggggggccccctttttttttttttcgggggccccggggggggttttgggcccccccccccccctgggggga

SEQ ID NO: 571780 - DNA, 163 bp, Homo sapiens
tatactagccagtcttccatcgcgacatatatcggacacggctctacctcactcacacactattgcacactggcttctttctgctccttgcgtcccctgaatgtatcccacccaggcctttgtatctgtttcctctctacctaagcattcttcctctgctctc

SEQ ID NO: 571781 - DNA, 122 bp, Homo sapiens
agtggagagtgagtggtagatggtagaaggcagaaaacaggaagctgttatagttttccatttattttttgagacagggtcttgctctgttgcccaggctatagtgcagtggtgcaatctta

SEQ ID NO: 571782 - DNA, 257 bp, Homo sapiens
  misc_feature (50)..(50): n is a, c, g, or t
  misc_feature (90)..(90): n is a, c, g, or t
tccatagaaattcaggattagaagagtcccccctaatacaacattcctcntcttataattgagaaatctggggtcccagtaaggttaaanaaatttgttcaaaatctgagggctggttaataaacagcaaagatcacctaaggtagtattatgggaagacaatatgctctaagtagttttttctagtagtttacacatgcaataaaataaagcagtttggataaacaacatgaactcgattaaaaattctatatttt

SEQ ID NO: 571783 - DNA, 105 bp, Homo sapiens
  misc_feature (61)..(61): n is a, c, g, or t
gagaccatctaagcatactgatctactcgatagtctcggctatgctatcgtccatatcaanggatgtagcttgagactcgggatatctacaggatactgatcata

SEQ ID NO: 571784 - DNA, 1074 bp, Homo sapiens
  misc_feature (193)..(193): n is a, c, g, or t
  misc_feature (1069)..(1069): n is a, c, g, or t
tagttctagatcgcgagcgccggcccttttttttttgtttgggggcttaaaaaaagggtttaatttcttaaagacaaaagcttttgggtttaaatacacaaactaaagtgaggctcctggcaggctcttccacctttccggcccaaccccttccaagggttgggtgggcgtgcagtctcgtgggtggccaagngacagaagagctgtgggcccggcttgcaggggcctcaacagcctcggtgggctcgggagttccagggcgtggacagaacgggccaggagaagctcatccaggagaaaggtcacttccgggggcgtcgtgcccccttttctatggcgtgtccacccagggagggcgtcggggtccgggggggactgggacttcagttcaccgtaggcaccgtggctggtggtgcaggctgaactccttgggccttgaaacggaggctggcgatgctgtgggccattgttgaccccgtggggttgcggggcctgagctcccagggctgtaggggggcactgtgctgtagggggacgaggctgtccaggagagataatcgggactcagggcggggggccggggagccacgggctgctcgagtgggggcctcctggctgtaggacttgagcagcgaggcagagcggctggccagcatgggccctttcattccgtgcggaactggggcgcggggggtctctgaaaccagactgaacgcgcgcctcgctggaaggttgacgccgcccggaaaagcgcctcgcgccacaagggtcggggaatgggtgggctcgaacagggctcaaggcgctgactggcgtcgtctgaccgggggggcccccgaggatttctacagtaggggagcaacgagccggggtgaacccactctgggggacacaagacgagtgtccgagaacccgagtggcaccacccagatgcacggggcccacgaccgggggcactagcaggggacaaaaatatcgggcagtcccctcacagggcgaaccgaccaccgcacgcacaaatctaacataaacgagtaattattatgatgtagatgatcacgaagggggnagaga

SEQ ID NO: 571785 - DNA, 497 bp, Homo sapiens
gggatataggttaaaggtccaacaaagacatatagaatgaagtgtaggataaaccagacacaaaaattctaggtgtccccttcccagggagtcccacatggggagaggggttgcatttaattcttcagtactgatgtgatatgtggcaatacatgctaagtctggccatctggggaagcccaccaagccttggttaccaggttttattgaggtgtcagctgtgactgaaattagctattcagtctcctatcccccagaggtcggactcgcaggcatattaaaattcatttaatatgcagttaaaacagatgaaaggtgaaatttatagtatataaattaatcttaagaaaaaggttaaaaattttaaatcttacaaggaattttaaaattacctttaatgccaccatttagatataactggtgttaccattttgatgtacatatttctccagttgttttttctttttttatcttcacaaactcaggatgcttcttga

SEQ ID NO: 571786 - DNA, 168 bp, Homo sapiens
gaaattgtccccgcagttgccaatcatgtctgaacccaatcagagtacttgtgaccggagcagctggtcaaattgcatattcactgctgtacagtataggaaaaagaactgactatggtaaagaacagcctataatacaatactgttggatatcaccccatgatggtg

SEQ ID NO: 571787 - DNA, 361 bp, Homo sapiens
atacaggttttcgctctgttgcccaggctgtagtgctgcagtggcgtgatcatagctcactgtaaccatgaactctcgggctcaaatgatcctcttgtctcaccctcctgagcagctaggactacaggcacatgccaccatgcacagctacttttttttttttttttgtagggatggggttccactgtgttggctaggctggtcttgaactcctcccaccttagtgtcccaaagtgttgggattacatgcttgagccgccgaccctggcttgtttctgaacctaaccaacactctctgttacggttcgaagacataaatataggacctttttcgtcaaacggaaggggtgtttcagtatgc

SEQ ID NO: 571788 - DNA, 343 bp, Homo sapiens
tatcctaagggtaattatttttatgcccatcttattgaacagcctaatttgaagttatcaggaaactttgaagaggcccaggtgtagtggctcatgcctctaatccctagcactttcggaggccgaggtgggtggatcacctgaggtcaggagttcaagaccagcctagccaacatggtgagaccctgtctctactaaaaatacaaaaactagccaggcatggcggtgcatgcctgtaatcccagctactcggaaagctgaggcaggagaaacacttgaacccaggggatagaggttgcaatgagccgatatttcaccactgtactccagcctgggttgcaga

SEQ ID NO: 571789 - DNA, 149 bp, Homo sapiens
ccttgccctcctgtagtcctatctatgttttcattttttatgtgacaaatctttagatattgaacaagaattatgtcagttctctttccagttatgctgcaaaagctctgtctgccctccctccctctttgatgtgatttcagaccctt

SEQ ID NO: 571790 - DNA, 199 bp, Homo sapiens
cacgaggcggcacgagggcgatgaagtagccgttgttcaggatgttgtggtgcgtcagcgtcgcgcccttcggcgcgccggtggtgccggaggtgaactggatgttcaccgggtcgtcgaattgcaccgtcgcctccaccgcgcgcagccgctgccgcgccgcctccggcgcgccgagggcggagacgctctcgatggg

SEQ ID NO: 571791 - DNA, 209 bp, Homo sapiens
  misc_feature (11)..(11): n is a, c, g, or t
  misc_feature (35)..(35): n is a, c, g, or t
  misc_feature (66)..(66): n is a, c, g, or t
agtgtgcagtngtatgatccaccattctctatgtntacttaaacatccaaaacaacaggggacatnttggaacaatctgtaatattcttctggaatctttctagataaaacacacaggaataaaaaaatgaacatccccgggaaagcatggctgactgtgaagaggtaagctgtaaccactgatgcgtgcacaactggtcgacgattcg

SEQ ID NO: 571792 - DNA, 383 bp, Homo sapiens
ttccacatcaggagccacatctgtcaggctcagtgacgtatccttagtgtctggcacaggatattttcaatagaggctatgagatttactaaataattgattctcctctggagaatgtatagtggaatagttgttctcgatccttcgtagataaacttatttctgaatctttgtcaagtagttgcctttcttgttgcccttataaattaaagcataaattcactgattttatatgatatatataacctatgtgctaaaatatatgggatatgaattagagttcaacaaggatgttatttttaaaaaccaaaccagaaacacatacaaacatgttattttaacgcagtggagaaagctcaaaataataacctgtatccctgtca

SEQ ID NO: 571793 - DNA, 420 bp, Homo sapiens
caggattaatccacggcaccccctgctcctgtgggtaatagtcagcacttgggtggggacttcttgaacttgcagggagaataacttgatacaccccactttgcgccggtgctttgcgccagcggagctgcttcgccatctccgagccccaccgcccctccactcctcggccttgcccgacactgagacgctgttcccagcgtgaaaagagagactgcgcggccggcacccgggagaaggaggaggcaaagaaaaggaacggacattcggtccttgcgccaggtcctttgaccagagtttttccatgtggacgctctttcaatggacgtgtccccgcgtgcttcttagacggactgcggtctcctaaaggtcgaccatggtggccgggaaccgctgtcttctagcgttgctgcttccccg

SEQ ID NO: 571794 - DNA, 135 bp, Homo sapiens
tagctcggtaccacgccgaaggtcatactgcacacgccgaatctccagactttagtgtcaggtccggatggacgaagttgttgcctgagcctccatacacttcttaaaatcaagtcgtaatggacgaagttgttg

SEQ ID NO: 571795 - DNA, 100 bp, Homo sapiens
ctccccatcattggttttttttagtgtgtcaactgtgccgattttattatattcattatattttcccccttttcacagagaaataaaggtctagaagtta

SEQ ID NO: 571796 - DNA, 172 bp, Homo sapiens
tgtatctccgcagctgagaatttagcagtctgtgtcctgtacctcgtacacctgtttgctccctgctagtccgcagaaggcaggtgtccaggtgtggcttggagccaatgggaaggtggctgtgattgtcagcaatgaccatgctgggaaactgtatggtcgctcggcgtga

SEQ ID NO: 571797 - DNA, 736 bp, Homo sapiens
tcggactagccacgaaccttgctgttggcttcctgggcgagtgtttctcgttgggtttgggcccgccccaccgcctctgttgggttgttccatgggtgtcgcgcgggggcctctctaattgcccttccgacgccggtcggtgaactgttgttcttcccgtccgggggatggtgtctctctcgaatggggtgccctttcgccactcatattaccctcgctgctcgtgtttgtggtgtttcttcccacggcggcgccggggtcttgtgactccacgccgcgcgatgggttggtcaattatccctcccatccgcgcgctcatgtggcgcgccgcacgcttccctcgcttcgtgtggcgccggcgcatcggttcttgtctgccaccgcacacaccccgcccgccgaggctgctttataccctggcactggtgtgcatctgtgcacagcccgtgcttcgcacttgtatgcgctcgccgcgtgtagagatcgttcgttgcgcattgtcccggactatgtaagttccaaggattttcctgtgttatgggacacgccctctgtttcggtatgtctctttcaggaacaaacagcgaacaccaacatcttttggtcttttggtctgattgtactttgtgacgcaaccgtctgagcgcccccacgccatccctcgtcccagttgtgtagaggaggaaaacagaacaggtggccatcgtcaccccacaaacaaaataacaaacaaaca

SEQ ID NO: 571798 - DNA, 508 bp, Homo sapiens
  misc_feature (370)..(370): n is a, c, g, or t
  misc_feature (449)..(449): n is a, c, g, or t
gtagatcataaatgatatctgtagcggtttcatgagtgaagaactgcttgcaaaaattgcaatacaaggctggtatgcgaattactgattctgaagatgcacttttatgtatttttcattagaaagtagaactaattttagattttcagcttgatggattttcattttttcctgaagaattttctttaccattagtcttcaaattggattctgttgtgcagtggtgtactgttatacttcagagaaagggtaagagtacatctagttcagttcctatgaggtagctgtaacccttaaaaatgaaacgtcaactctagggtacatttgacattgaaagaatagttaggaaataactttgttttgatagggncatgattaagaaatgatatattggtttatttatggaattgttttatagtgcatacaaatcagcgatcagccagcaaatnatttttctttgagcttgtgaaagctctgtgttctttttgccttcaaatctgttgtcttc

SEQ ID NO: 571799 - DNA, 141 bp, Homo sapiens
ggtggctgttactgaactacactttagacagtaagtaactggagactactatctctatgaatcggacgactcataaaaatatctgttttttcaaacatctacagaataccatgataagtccaatgaaccatactaagcagg

SEQ ID NO: 571800 - DNA, 936 bp, Homo sapiens
gctcttcaccctggcgtcgtgtctaagtcagagtctcctaaagagcccgaagagctgaggaagctcttcattggcgggttgcgcttagaaacacctgatgagagcctgaggatccatttttgagcacctggggaacgctcacggactgtgtgcgtagtgagagactccaaacaccaagcgctccagtgggctggtggtgtttgtcacatatgccactgtggaggaggtggttgcagcctatgtagtgctcggccaacgaaggtggatggaaacagttgtggaagcaaccgtagagctgtctccagagaagattctcaaagaccaggtgcccattgtgctgtgaaaacctgctcttggttgtgtggcattaccgaaccgacattgagagaacatcactaggagattattttggaaccagttctgggaccacttgtggtgcttgcaatcatgactgaccgaggcagtggcactgaaaaggggctttgccgtttgtaaccttgacgaccatgactccgtgataagcatcgtcattcagaaatctcatgactgtgaatgggccactaacttgtcgcggtaagcatagcccttggtgatagctagagaatggcctatgtgctttcgtcccacggccaacgacggacgaccgtggtccttggagaccgttggtgcgtggtcgtggcagtgtggttccgcgtggtgacctgtcgcttgcgttccgttggcgagacacttgcccccggctgtggttgcctatcggcgcacacccgtccgcggtgcggcgctctggggggcgcggcgtttgcttaggcgcttgggcccagcgggcgcactttggcggggtcggcgcccccgtttcgggctaccccccacttccttttggcccccggggattggagcgactcccctcggggccctcttcacccccggttgtgcccc

SEQ ID NO: 571801 - DNA, 603 bp, Homo sapiens
gagctcggtaccgggagtgctcgtcgttggaccgatgagttactactatgatagccttcatggagactgactagcagtgagagagaatcctactgaacccggcagcgacggcaccgatgacagacaaggaaattactcatgatgtcaaagctgtttgctcgctagtgagagcgatgacggggccctgccgggccgtgatgcctcgttggtacttcgacctctccaagggaaagtgcgtgcgctttatatatggtggctgcggcggcaacaggaacaattttgagtctgaggattattgtatggctgtgtgtaaagcgatgattcctccaactcctctgccaaccaatgatgttgatgtgtatttcgagacctctgcagatgataatgagcatgctcgcttccagaaggctaaggagcagctggagattcggcaccgcaaccgaatggacagggtaaagaaggaatgggaagaggcagagcttcaagctaagaacctccccaaagcagagaggcagactctgattcagcacttccaagccatggttaaagcttcggagaaggaagcagccagtgagaagcagcagctggtggagacccacctgg

SEQ ID NO: 571802 - DNA, 1405 bp, Homo sapiens
taagccttcttcgggcctcggcagcggtagcggctcgctcgcctcagccccagcgcccctcggctaccctcggcccaggcccgcagcgccgcccggccctcgtgctgccccgatcgccgtgcctgggctgcggctgcagccccgggctcgcgtaggcgcgacctgtcccggccctgccccctatgggccccggctagaggcgccgccgccgacggcccgtggagccccggattgctggcccgggaggaaggccgggttgctgccggggggctcaccgatcaaagccctaaccatcggccgaggggccccatccccataacccagcggaagggcgcctcggaggccaaagaccgtggtgggacctggcagacagaaaggctgggaggggagctgggaacttttgaccggagcaggcagaaatgaaagcgtggtgggaaagccctattgctcaccccagaaaatgcgcaagggtcgggcgaaacttcaaaagacggatgaccttcgacagagggatctccagaagcttgggccgcgggcgcaaacgggcggcggtgggtcaccaaaatgttccaggccacaggacccgtcggggccctcaatccatgggcccagggaacgcttgaatccaacctttggagcatcaaacgccggggcgccattcgtgagacaccccgaggaatcaattccgggcgaaggcttgcagggggctccttggccacgtgaaattggccaaaccttccggcccgggaaccaaatccgctgggccgcctacctacgcgccgcgccctttcataaccagggtgcacgcgcggggcccaatccaggccatttggcgctggggaaccccactttggggaccgcgcgcgcggcacccccgcgggacacccgggtggtggttgacaaagcagcgccacgcaggggaatccccggagagcacgaacccggggcgcgacagcgcaaggcagccgcggggaccaccggggggcgcatgggagcagaccctcccgggagagaacgcgacaaagataatgccccgagaaatgttgacgcgccccagagaacctccgggaaccccacacaggcggacgacccccgctggggggcgacccccgcggggaacggccgcagcccaaaaaactcatgggcgcgtcactactggggacacgcgccaacatatgggcgcagacggagcggggcgccaaactcggaggggcgcaatagaaagagatccctaaggaggcagagaagacaaacccccacaaaaagaattgtcctgcgtcagagagagaacaacacacaggacgagagataagagaagcgtggtgtgtttacacaaacaaggcttgggcgtcttctcgcccctggcgcgtccgtcgttcgtgtcttctggtttttatagagggga

SEQ ID NO: 571803 - DNA, 664 bp, Homo sapiens
ctttagtgaatatttgaaaatccagatgtggacgtatgaggaatttttaggagtaaaattggtacagtgtggaaatatataaaacaacattcatgaaagttattttgagtatgtcataaaagtgtttttcagccaggcacaatggcgggcacctacagccgcagctacttggagggctgagtggatctcttgagcctaggagttcacatccagggcttttcacaagaatattgaccaaatcttctggtagcacacttcaacaagatgtcccggttatcttattgtagcaaatacaatgaatgattagttacaagtttttcccattgagtttctagtacttaacactgcacgaggcacatggacaactatttgttgagtgagtgaatgggagttcactgctgcagtaaagatctgcctttatacatgaaatgttaattccaggtagactttgctaagcgaaggatgcataacctaattccctagagcaaccactaaaaacaaaaatgtagctaaaaagccaatagcagatataaagtaggattctagatgctttcttaaattcatgaaacagcagaaaagggcaggtgggggaaagaaaaaatgggacaaataaaaacaagatcgtagacttaaacatctgtcaaataattacttaatgttagag

SEQ ID NO: 571804 - DNA, 357 bp, Homo sapiens
tctagcggcgataaccatgggaacgcttttattttgcgtgtgtgtgcgagactgagtcttgctctggtgcccagggtgcagtgtactggcgcgatctcagctcaccacaacctccgtctcccaggttcaagcgattctcctgcctcatcctcccgagtagctggcattgcaggcatgggccaccacggccgactaattttgtatttttttagtagagatggggtttctccatattggtaaggctgagctcgaacccccaacttcaggtgatctgcccgcctcggcctcccaaactgctgggaccacaggcatgagccaccgcacgtggctttttttttttttttttttttggagagg

SEQ ID NO: 571805 - DNA, 142 bp, Homo sapiens
gatgagaatagttatcgccacctgggtacgtggaggggcagagaatcaagatgctacactgcactccagcctgggcgacagagtgagactccattatacaagaaatagatcactaaataaataaaataaacacagaacacta

SEQ ID NO: 571806 - DNA, 841 bp, Homo sapiens
atacctgtctagacgactgggctgggagcagtcctcggagggtatcaggtgtcaaaatcgcgccgatccagagacgacacatcgtattcagatctactgcaagggacacagtggcagagcgtggaggaggcgttcccccagatctagctcccacggtgtgtcctgaaggatgtcatgcaggtgagtgcaccagcttggtgggagacgtggtgcgattccacgtcgaacagagcgtggacgtcctcgacactacgccacgacgcagtcgtcgagacccaatcccgtctacatctcctaagaccaggactcttgacattcaagtgacagccccaggtgggcaggcctccaggaggcaccaggcaggccctgtatcaggctaggacgctcgtgactgtgcgtgtacatatatacagtagtataagatacttttgataagtatatagcacatcagtctatatatttatattacactgtttcctggccccagagctcatttgggttcaggcgcacttcaaaaccctccctgggggaggctgtttcttctcaaggattccttgccaggaggaacggggagggaacagggtgggttttcttcactgaagcagagaaagcagaatggttctagatcctggcacagactgatcccatgttcccatgctcttctccgtccccagggaatgccgaacgggagtttcccttccccagtggacgtctaggtggggacagggtatcttgggtccagctggacagagtgcctgtttgccttctgtcttccctttgtggggactcaagcagagaagctttgggaatctggaatggcgggtccccggggagaccccac

SEQ ID NO: 571807 - DNA, 878 bp, Homo sapiens
ggctgcgggccacctaccaccggctcctcgataaagtggagctgatgctgcccgagaaattgagggcgttgtacaaccatccagcaggtcccagaacagttttcttctgggctccaattatgcaaatggggcgtgctgtgtgctgcatgctgatatggccagatctgcagaacacacttagcacagctcactctgctgtctgatggctacagggtttatccgtcaagatactcacttgtaattattccaaaaaattgagtctgtcgctgtcaactctcttgtgggggcagcaggagcctctcagcttcccgtattggagatataaccaagaactacacagctaaagccaccccaaataccacgagttccctgattcaccctgaaccaactctagatggttgggacaaaacacatgtggaccctagttctataattcggcccatgataacacgcacacgctaacgtgtgtgttcagaaggcacctgtaacctggctagctagttcctgtgattcactagaacaccctgccgcacactctcaactaccacgcttctctacaattgacttacgcgaacttatctactggcttatccagccacctttctcctcacccattgtggtccggtaaataaaccaataacttgggctcgtttatacccccctggcctcctttttgtcccagtcacgcaacctatgtcttaaacgaaccccaacttcacggacgggcaccttcacctacctgccattacgggtagaggccgccagcccccatacaggcacggacttggggaaactcgaccgcgcgcgcgcacaaacgcccacccttcaccttctgccgacactctggcggaacgcacaccccccctcaagctgccacc

SEQ ID NO: 571808 - DNA, 349 bp, Homo sapiens
tagtttgtgacttctataatatgctcatataacaaatagattaaatggggtcagagtaaaatctctcctaaaagctacttgggattcttaacttaatttctcttgacatttctggaagtgaacaaaagctgccctattcattactttctgaaaattttacttagatgcataactttatgaactataaatctctcatctcttcgaaaagccctcaagacagaagctaaataatgtatctgggaacagacactggtccccaattaatacagatacaaaatttgtaaccaaatatttatatccttaatttgtggttttgggggaaattcctttccccaaagggaaaggcctg

SEQ ID NO: 571809 - DNA, 405 bp, Homo sapiens
cacagtgccctggagctggacaggcgctgggctcagatcccaaccttagcgtcttgttcctgtgccttgacctcccagcttcagactcctccaggagctgaggaccaaatgaaatattttaaaaacaaaacgctgcatcccatggcctgccagggtgaggtgcccaatcaatgtgaacttttaattttcaacctcaacacttcttcatcctagatatgtgtgttccccaggaaagaggagaagccagatttaaatgagcacctatcaataggccaatcgttcctacaaattctcttggaccacaccggcctgtgagatagtattttagcaccatttcacagatgaggactgaggcttaaagaggtgaagagagacctgcttagtaagggacggtggcaagagaag

SEQ ID NO: 571810 - DNA, 143 bp, Homo sapiens
gacaaagccacgtggctaacacgagtatttatgcatgccacagaccaaggggggctagtcggctgtggatgcctatcgagatacacgtccacaggcgcccccaatgggtatagggctactgcaatgttacaaggccacagttt

SEQ ID NO: 571811 - DNA, 842 bp, Homo sapiens
tcaatcgccctttcttgccgtcattaccacccaccgcggtaaacctctgccccccccacccaccggctatggttcttaaaaaggttcacccgcccccaccccacttgtttctttcctcgaaacaagggtgtacaaaagcaatacaaacatatcctggcagcagttggagacacccccgtccccccccccttcttgaacccttgggtacagacagccttttgataccgccctcgtgatctataattctgtctgacaaccacacgagggtcaatttttgtcaagaaatgcaccccacgtgtgtcttatacaaaccacccttcataatttctataagccatctaattacttgtcacgcagtagttcatatatatctgcgcggtgtccccctcgttcgccccctccttcttcctcgaacaccccccctcctttttctgccccttagattcttgtcccaccacaccccggctttataatcaatgaattcaacattcccccaacaatcaatctgtgtgttgtgcaaatatgccaccagcgagttaatatgcacctatgaagatggcatctttatgtaaaccatttatacaggcattcatacacccccgtctaggagatacttcctcctcttggagaagaagcctttcactacgctgcgaatattacagatctgaggagagtaaagtgccacaagtccactcgataaagggaggtcgtaacgtattatgccccaagagctggggcaccgggtggtccattttgaatcctcagaatgatacccccgcggttatctctccccgtttgtaaaataccccctggaccccttttccaaaacagcccacaaaaca

SEQ ID NO: 571812 - DNA, 464 bp, Homo sapiens
  misc_feature (6)..(6): n is a, c, g, or t
  misc_feature (17)..(17): n is a, c, g, or t
  misc_feature (25)..(25): n is a, c, g, or t
  misc_feature (28)..(28): n is a, c, g, or t
  misc_feature (30)..(30): n is a, c, g, or t
  misc_feature (80)..(80): n is a, c, g, or t
  misc_feature (142)..(142): n is a, c, g, or t
  misc_feature (184)..(184): n is a, c, g, or t
  misc_feature (195)..(195): n is a, c, g, or t
  misc_feature (228)..(228): n is a, c, g, or t
  misc_feature (249)..(249): n is a, c, g, or t
  misc_feature (283)..(283): n is a, c, g, or t
  misc_feature (451)..(451): n is a, c, g, or t
gtcacnatgcctatctntgggttgnagntncccttgtgggagagcacagtgcaagagacaggaataagcagggttaaggnagttcggaggagggtccagtacgccaacagaaagaactcttgggcagtggtgggcccagggnagcccctcactccacgttacggtacttggtgaagaggttgtncaacactcgtngtgtagatttcaggtcacagttgattatgtctnctggccgcggtttgggttttnccacccctccatcttgcatgagctcaaaggcaanggagacattcaagaccttctgttcaaagttgtccggggtcaggaagaagttgtgcaggggaacaaagtagccctccaggagccccatgagcagcaccaggtcaccccatcttgcaaactgggtttccagttcttgtgacctccaggttcaagtttattcaggtgcttngtcacgaaagtga

SEQ ID NO: 571813 - DNA, 911 bp, Homo sapiens
  misc_feature (12)..(12): n is a, c, g, or t
  misc_feature (65)..(66): n is a, c, g, or t
  misc_feature (68)..(69): n is a, c, g, or t
  misc_feature (89)..(90): n is a, c, g, or t
  misc_feature (94)..(95): n is a, c, g, or t
  misc_feature (107)..(107): n is a, c, g, or t
  misc_feature (109)..(109): n is a, c, g, or t
  misc_feature (126)..(126): n is a, c, g, or t
  misc_feature (129)..(129): n is a, c, g, or t
  misc_feature (133)..(134): n is a, c, g, or t
  misc_feature (179)..(179): n is a, c, g, or t
  misc_feature (187)..(187): n is a, c, g, or t
  misc_feature (189)..(190): n is a, c, g, or t
  misc_feature (194)..(194): n is a, c, g, or t
  misc_feature (202)..(202): n is a, c, g, or t
  misc_feature (208)..(208): n is a, c, g, or t
  misc_feature (226)..(226): n is a, c, g, or t
  misc_feature (229)..(229): n is a, c, g, or t
  misc_feature (231)..(233): n is a, c, g, or t
  misc_feature (244)..(244): n is a, c, g, or t
  misc_feature (256)..(256): n is a, c, g, or t
  misc_feature (259)..(259): n is a, c, g, or t
  misc_feature (264)..(264): n is a, c, g, or t
  misc_feature (267)..(268): n is a, c, g, or t
  misc_feature (271)..(271): n is a, c, g, or t
  misc_feature (276)..(277): n is a, c, g, or t
  misc_feature (279)..(280): n is a, c, g, or t
  misc_feature (285)..(285): n is a, c, g, or t
  misc_feature (290)..(291): n is a, c, g, or t
  misc_feature (297)..(298): n is a, c, g, or t
  misc_feature (300)..(300): n is a, c, g, or t
  misc_feature (312)..(312): n is a, c, g, or t
  misc_feature (315)..(315): n is a, c, g, or t
  misc_feature (319)..(319): n is a, c, g, or t
  misc_feature (321)..(321): n is a, c, g, or t
  misc_feature (324)..(324): n is a, c, g, or t
  misc_feature (328)..(328): n is a, c, g, or t
  misc_feature (331)..(331): n is a, c, g, or t
  misc_feature (336)..(336): n is a, c, g, or t
  misc_feature (346)..(346): n is a, c, g, or t
  misc_feature (352)..(352): n is a, c, g, or t
  misc_feature (358)..(358): n is a, c, g, or t
  misc_feature (360)..(360): n is a, c, g, or t
  misc_feature (363)..(363): n is a, c, g, or t
  misc_feature (385)..(385): n is a, c, g, or t
  misc_feature (395)..(395): n is a, c, g, or t
  misc_feature (400)..(400): n is a, c, g, or t
  misc_feature (407)..(408): n is a, c, g, or t
  misc_feature (428)..(428): n is a, c, g, or t
  misc_feature (436)..(436): n is a, c, g, or t
  misc_feature (446)..(446): n is a, c, g, or t
  misc_feature (450)..(451): n is a, c, g, or t
  misc_feature (460)..(460): n is a, c, g, or t
  misc_feature (466)..(466): n is a, c, g, or t
  misc_feature (468)..(468): n is a, c, g, or t
  misc_feature (470)..(470): n is a, c, g, or t
  misc_feature (474)..(474): n is a, c, g, or t
  misc_feature (495)..(496): n is a, c, g, or t
  misc_feature (511)..(511): n is a, c, g, or t
  misc_feature (516)..(516): n is a, c, g, or t
  misc_feature (519)..(519): n is a, c, g, or t
  misc_feature (637)..(637): n is a, c, g, or t
  misc_feature (778)..(778): n is a, c, g, or t
  misc_feature (908)..(908): n is a, c, g, or t
ggggggaatttnggggcaagttgtttccattaaaaagtactgattttaaaaactaataactaaanncnnccacacgcaaaaaaaaaaannaaannagtccacaaaanantctcctttccttcgganggntttnngatgcattgttatcattaaccagtcttttactactaaacttaaanggccaatngnnacanacggttcngggacngttcttccaccactggtnccncnnnggggggcgggncttgggggtggngtnggttnggnnttnggggnntnnggggnggggnngggggnntngcgggcgccggnggngttntngtncacngcnttggngagacccacngcaacngtgtgngnggnatggggggcggcaagggggccngggggggggnggggnggggggnnctgaacgggggtgggcttgnggggggcngtgtgggcantggnngcgtcaccngggttnangngttnggggccatcttccagcttttnnccagagcggcgatcnatctnttngttcagctcagcaaacttgcatgcgatgtgagcggtgtgggaatccaataggggggcatagccggcgcttatttggcctggatggttcaggataatcacctgagcagtgaagccagcngcttccattggtgggtcatttttgctgtcaccagcaacgttgccacgacgaacatccttgacagacacattcttgacattgaagcccacattgtccccaggaagagcttcactcaaagcttcatggtgcatttcgacagantttacttccgttgtaacgttgactggagccaaggtgaccaccataccgggtttgagaacaccagtttccactcggccaacaggaacagtaccaataccaccaattttgtagacatcctggagaggcaggngca

SEQ ID NO: 571814 - DNA, 665 bp, Homo sapiens
gacctcctgcgacttccgagttgcgatgctgtacttctctttgtttggggcggctcggcctcgtgcacgagatgtgggcaagctggtcacggatggccagttcagggctcagcacagaaaagcagacccaagacatcagaactggggaagcaaacagggtgctggacaggccaggagagcctgtcggcacagtgatcctgacgatgtgggaagtggctgcagcagggcagaaggacggggcagggtcggtggccctggaggctccatgggctcagagaacttcatgcaagccgagtctgcgctggagggccctggggtcctgttgctgaagcaacaagtactcggagggattatccatggctaacgagatactatgcggggagcaggagagttggtggcatagacaacttcgagaatcgcttcgctgcagaggccgtcaccgaggacacctagtggaagcgccattggtagcgctcgggatctccagggggaacggctcgagggaaggtaaaaacaaggatcacaagggcccgtaacaagcacgcgaggtaaccacgaaggcacgaagacctggggcccggcgcctaacaactaggaaccctgaaatggagacagactcaaaccgaaccgcgatacacagatgggcagggaagcttgagacggaa

SEQ ID NO: 571815 - DNA, 136 bp, Homo sapiens
atcccctgcttgtcatgctctgccacaaaggtcctgagtatcaggataacaatgtgttctctgcttgtcctgcctcggctgcttgtctctgcttgtcctgcctctgctgcttgtctctgcttgtcctgcctctgct

SEQ ID NO: 571816 - DNA, 1210 bp, Homo sapiens
  misc_feature (459)..(459): n is a, c, g, or t
  misc_feature (906)..(906): n is a, c, g, or t
tgggagagatgggatgtctcactctgtgtcggcccagggttgggaatggcatggggcagcagatctctggcgtcactggagaaggctcaaccttccggggatcacggccatttctcctgggctcaccctcccagagtagctgggagaccacagggccctctggcacagcaccagcctgggctaatactacgggagtattccacaggtaaagaagacggggtgttcacaccactgggtgtcacaccagagatatggggtctcagatctaccgggaccatcatggatcccggcccgcttttggagctctcacacacaatgtggctggggatcaaccaggcgctgtagacgcccaacccggcggcccgagagcacaaagaacttgtgcgggcctattttttacaagagtgtgtgcaaaccacacttagtgtgtaccaagagtggacatgtggggggcacacncttgcttgggagaagtaaaaactgctcataaaggtgtggggccccttacaaagctaaggagggttgaattctactactatttgttatcaactgttgtggaagagtattcaagaatttagacgagagaattattgagtctgtaaaaagaggccttttaaatatgggacgccaagtgtagtgtttccaaatcaacagtgtgggaatccatgggaaattggggcaagaaattaaactgtgtgtgggatgtgtgtggcacttttgtcggaaaaacgcagcgacgtgtatgtggctcttactcgtggggaagaaaaagaacacggtgggcctctttctttcgaaagaggctgtccttatagaagatgagcagacacccaagattcacaggtgaccaaggggaaacaattctggggcacggaatagtgcttccacatttagtgggaaccagtnccgattcactacggaggattagcaccacaccaaacagatttcgctattctaaaacgacgcggtagaggggagtctaaacacgtattttgcggaaacaccctttatttctaccactctagaaagggccagccgaatttaaggctcccctgtgaagaagattgatgatccccgttcttagctaggtgctggggcacacaaagtgttggtctagacacacagccggagacaaagcttgcagttccagcgtctcgcatataactaaggatcgagacacacatttatcagcatggggaggtctacacca

SEQ ID NO: 571817 - DNA, 283 bp, Homo sapiens
aaggatctgcgagacaggacagcaggtcacaaggaggagcccagtattagggatgaggaccgcaggtcacaggaagagccagggttcgggagtggctgccgcaggactgttgatcatcctggacgcacggggggtgtcagtggacggagattgatcccaggggttgggatggctgccgcaggactgttgatcatcctggtagatggggggtgtcagttggaggagcattgagccgggatggggatggctgccgcaggaccgttgatgatcctctacagtcgat

SEQ ID NO: 571818 - DNA, 281 bp, Homo sapiens
atagcgacaccgtacatcaatgaagggctcacccaggaacaggtgctcgccgccgcgctcagccataaccctaatgatcggaagaccgcgtagatgaatcaggtcaaacacctttttacccgctacaagatgctcgcgctagtgatcgccgtggcgttcatctggttgtttttcagctggcagaccgagggcggttttctcaccccgcgcaacctctccaacctgctgcggcagatgtcgatcaccgggatattggcctgcggcatggtgctggtgattat

SEQ ID NO: 571819 - DNA, 204 bp, Homo sapiens
gggtgtggtgtgtgtgtgcttgcaaaagtctctgacttcccagagcaatggatcctcatcgggaaatgaggaggtgggctgactatagatcccggtttctttcctttttgactcttggccaacctatacgtgggcagtgtcttagggctgtgtggcatggcctcacaccttactagccccgtgtccggggcacacattatggag

SEQ ID NO: 571820 - DNA, 113 bp, Homo sapiens
cattcccaaaaaagttcagcccagatggaaggtgttcagggaaaggtgggctcccttttccccttgtccttatttaaggaagcccccgggcatttaacacccacttggacttc

SEQ ID NO: 571821 - DNA, 685 bp, Homo sapiens
ccaacattaggctcgcgagctactatagactcccttgcagggccagcggctcaagcctataatcccagcacttagggaggcaggggcagacagatcacctgaggtcaggagtttgagaccagcctggccaacatggtgaaaccccgtttctaccaaaaatacaaaaattagctgggcatggtggcgggagcctgaaatcccagctactaaggaggctgaggcaggagaataagttgaactcgggaggcggaggttgcagtgagctgagattgtgccactgcactccagcctgggtgaaagagcgagactcagtcttcaaaaacaaacaaacaaaaaaagactcccaccaacaaccccggcttgaaggtttactttctactttgtcctcaactgtcccagctctggccttcactctcattaaaaggcatttttatgtttaaaaacactcagtaaatagaactggggatacagaaccacagtctaaacgagagaagcagaatgacagctggtgagtgtggtggtctggaaaggaactacctactctgtacgaactcagtaattctgattgaaggcatccaaggctccgggaatagccataagagaaggagctgaccgaaaaaggttccttcggtccagtctgttcgggacctaataggtggctcataattaatacatctggcggtgg

SEQ ID NO: 571822 - DNA, 677 bp, Homo sapiens
gttattgtggcctcccagacagccaacaaagaataagagagtttactcgagactagaagtagatttgcgataatttggaacttagaaagatattgtacatcacaccagagtatcagatctggtactgaagatcatttctggatgattgatctgctccatgcctttccatttatcctgactaaagcagatcattattactatataggtattgattgctaccctgaccatagctgctttggtactatgagaaacttcttagattttctatatgtaaatgctgtggaccactggtgagctactagatggcccgactatcatcttcaagaagagtgttatgtgctagcatttataatcactgtggtgttccttgttaagctaaaactagcacatggtgctttgattctctattcgatgactattgagtagccatgatcgttcataaaaccttattcgcaaattaagtagaaggtacgctgtttcctttctcaatattgaaaataggcttctagtcgtaagaaggctgacgccagaatacgtacgatccttgtcgctagtggatcagccccactgtctttatctttgtataactaaatctgcattttcaaatgtcgtcaatcacatttttcttagagctgaatatccaggctgtaaatgctctaaagcctttttccttgact

SEQ ID NO: 571823 - DNA, 489 bp, Homo sapiens
ggccccaaaagctaggttagcaagggcactctggtgcaaacgaaggcccccggtgtttctggctcctttaactcaacaagaagggcagcctccgggggaaccaagcccaaggttaaaaaggcgggcgggaccaaacctaaaagcccagttggggcaccccaaaagccccaaaaggcgggtgggggggcaactctccaaaaagagcgcttaaaaaacccccaaaaaaaagcaaaaaaccggcccgggccccgtgtaaccaaaaaagtggttaaaggcccaaaaagggccaaggttgcgaagcccaagaaagctgccaaaagtcttgttaggcttgtaaacccaaggccccttaagcccagggtggccagccttaaaaggcggggccccaaaaaaaataggcggacgccttctttttaaaccccaaagggtttttttcaaaccccccccggtttccaataaaagagcgggatattttctttaaaaaaaaaa

SEQ ID NO: 571824 - DNA, 329 bp, Homo sapiens
cagctcggtttcctctgcggctggaaggaagtcatccacccgtccctcatctgcggctggaaggaagttatccacccgtccctcatctgcggccggaaggagggcatccgcccgttcgtcatctgcgaccggaaggaatcatccacccgtccctcatctgcgtccgaaggaagtcatccgcccgtccctcatctgcgtccggaaggaggacatccgcccgttcctcatctgcgtcctgaaggaagtgatccgcccgttccttatctgcgtctggagggaagtaatccgccctttccttatatgcgcccgaaggaagtcattcacccgtc

SEQ ID NO: 571825 - DNA, 584 bp, Homo sapiens
cgctgttttccccgcgggtttttggggccaataggaactcgaggggggcctacgtttacgagcaagggggggggggtaaccggaaatatcggtgaggtttttatggcgggtccccgggggaaggtttaaccgggtttccggtgagaaattcccggcgtagtttgggtgatccgcgcggccgaaaaattaaaagggcccggcagattttgagcggagaccgatttccgcccagggaaccgctcttgccctgtgttcccgcaaggcgccaggagcgtggcgaagctttttttttttttcccgggaagcgcgcccttttgttgggtcccgggaattcggccctttaggccgggggggcaaagaaaaggggggggggtctggggaaaattgccctttagttccttggcccgcccgcccagttttggcctggccgctttcagtccatgggagggggaaagagccttctcggggcccttgaagagagccccgagggcaaaaaagggatggggtttaagcgcggcgcaggattgcgaattgggggggggtccctcagggggggtttcccgtgggaaggaaggaagaaagga

SEQ ID NO: 571826 - DNA, 1394 bp, Homo sapiens
gttctgcggcacggcctttcccagtgtcccacgcggaaggcaactgcctgagaggcgcgggtcgcaccgcccagagctgaggaagccggtgccagttcgctgggtgctccagtggccggacacgtcatagtctatgtagcgtacgtgcgcgggccccctcccgaatgtggatgggtatgacactcccgtcaaggctggacaatcctggatctaccggaaccttcagctccgagtacgcgtgaggctgacgtcgttcgagaaatgatactgggacgacgattcggacgacgttcgttacgagttcccgcgtggaatctgctatcacgctagaggtagtcgccgtcggacattcagcctgtcgtttcgcttgtcaggaacgaagcgcgacgcttgagggactgctattgggagtagcccgatggatctggagtgccagtagcgtgggactgggccagcagatgctcgctggggttgcagcaattgggcgcgctacaggccagcgccccacgggactcagcaccaacaagcctgccgggggacccggccaacccccggcaagggtaccggaggggccggtgggctaccggaccgccagggagacccgacagacccctaagggcggggagttcggccaggcaggccagaatcccccggaaggtccgggaagccccgattccccaggtcctcagcaagccggaatactccgctttacagaccgcgtccgaaaggctcctcgggttcccgggaacatcccgttcttccgaaatcttcgggatcaggaagcgtcccaaagttccaagaatccggagccgaaaggggttcccacgtttccaaagtttccttcggtcgggtccttcccagaatctccggtatcaggcgggtaccaaagtgtacccggtacttcggggtaccacgggaggttcctccagccaagtggtccaaggagggggacattcgagaattcccagggtacggcgattccgaagagacattcccacaaaaaggttctcccttggacggacggacgggaaccagggttggtccttttacggacacaatgattagattcgagagcagagatagtcgtcaaaccgggaagggacatgcggggcacacgagcagcccagttgaccatcgccgaggagagccgcaccccagccagtgcaaatgaaacggccatgcacgctggccaacactaatgaataacaggacgacgggaccaccccacaggcccacggggcggccagccaccggccacggaggacaacgagaatcgaggaggacaagagcaaacacgacgacggcggcaaggacaagaagaaaacgacgacaaagcgcggagaacacagcagagtcgaccagcagtgaaacgcgcacgcgccaccgcacccgcg

SEQ ID NO: 571827 - DNA, 438 bp, Homo sapiens
  misc_feature (16)..(16): n is a, c, g, or t
  misc_feature (20)..(21): n is a, c, g, or t
  misc_feature (25)..(25): n is a, c, g, or t
  misc_feature (29)..(29): n is a, c, g, or t
  misc_feature (32)..(32): n is a, c, g, or t
  misc_feature (36)..(36): n is a, c, g, or t
  misc_feature (38)..(38): n is a, c, g, or t
  misc_feature (68)..(68): n is a, c, g, or t
  misc_feature (188)..(188): n is a, c, g, or t
  misc_feature (270)..(270): n is a, c, g, or t
  misc_feature (288)..(288): n is a, c, g, or t
  misc_feature (303)..(303): n is a, c, g, or t
  misc_feature (420)..(420): n is a, c, g, or t
  misc_feature (436)..(436): n is a, c, g, or t
gaattcggcacgagcnctgnnatcntgantgngcangnactgatcatgtgccgggagccggggaggcnttccactctggacaaaggtcatgaggaaggaggctcggcatacgcaaatgcgggatcgagcctcaggagtccacccggatattctcgagcatctcccccccaaaaaaaccagagtctgcntactgtattgctttgtgctctcacctctgatttcactgggggctgtccccaccaccatctcgctctctctgtcaaagagttnacttacagctccaattcnttaagttccttgtcnttcttccctttaacttccagctgagtctccatctggagcgcggaacccaccacgtttactaattatgcctgggctgctaagacccactcgagggggggggcccggtaacccaatttngccctataagtgagtngg

SEQ ID NO: 571828 - DNA, 829 bp, Homo sapiens
aaggctaggtacgaggctgggttttaattggccgagggctgagcctccggtcccgccggcccgctgctgctcctcggtgctgctgctgctcggctccctggctggcccgtggcgccggcccagagccccccgtgctgcccatcctgttctgagaatggagcctgctgccctgttcggggagctggcagtgctgcacacttcgtgctgtggaagtgtctatgccttgtgactgatgactgtggcaccctgtgacctatgtggtggatgccatatcgtgtggtgatagctgctgcagtgcattgtgctgcctgcgagtgcgcctcagtgtggtgtctgcctgtaccatgtggtgccctgtgcagtggtcagctagcaagaacatcaaaccagaagtgcccaaacccctggcctgtgtgtgcatgcctgctgccatgctgcctgtggacactagctgccagacctgcccccatggatgctcaggcaggttctggatgcagtgcatgccagagctggacttgtccttctgatgtatcctgcgggacccctgtgatgcactctgcacgttatagcgaccgctgggtgagccagtgctgctgagtgagcgggcccggtggtgacggcacacactggacttctgtttgcgctgcttgaccggggccgaggtcgcaggcgggtggcacggagccccgagtctcgctgctgcgctctaggcctccggcttctctatctcctacaggcgggctggaccgcctaaccaggatcggcttctcagactctatggcggtgtcctgtttgagcacctggagcccacccagatggctggactggg

SEQ ID NO: 571829 - DNA, 116 bp, Homo sapiens
ccgcggtttatgtctacgaggctaagggtctaattggagctgtagccaggctaagggtataactggagctgtagccaccggcctacaccagcaccacagcaagtgcgggatccgag

SEQ ID NO: 571830 - DNA, 938 bp, Homo sapiens
agcggacgagtctttccgcctccccagcccgcccgggagctgcgagccgcgagctggattatggtggcctgagcagccaacgcagccgcaggagcccggagcccttgcccctgccctgcgccgccgcccgccggggggaccaagggaagccgccaccggcccgccatgcccgcccctcccagccccgccgggagccctgcgcccgctgcccaggctggtcgcgacgtgcccgatgtagcgggctccggatcccagccgtctcccctgctcccggtgctctgcgagatctcccctgaccagatctccacagcccggacccgggggctggcccatgggccctagcatggccctggcgtcctgatgccccccaatgctccctctacctgaaaagcccaccagcatgcaacccagaacttgcgggcgcaagcgcgccagtgtacggacgtgggccagtgcagagccccagaaggggcccagaaaggccggagggcccaacaatggacccaagcccactgccatggagtcctgctgtggatgggcacgggcaatagctgccatgacccacaggaacccatgaaacggcaatccgagctggacccctgcgcagctaaaccaggaggggcgaccccacctgggggcatgcgggatgaccccgagggtgaacctgaacgaaaatgaaggccccagaatgggtaaagcacccgtgtccgataatactggtcagtcttttttggttcggaaccaattggtagcacccaatccctgcaaagcgtcgcaaacttccggtagcaataggagatctatactatgtttgtaaacaatttaaactgatggtgacatttctactctccggaaatacagtcaccaaatagatccttgcatggactataatacggcagtctgtagaactgtatgtggtttgtattgctatgcacccc

SEQ ID NO: 571831 - DNA, 262 bp, Homo sapiens
acaacagatcacagaggtcagagagtcatagaacccgtgatccggaacgagaggacaggaggaggcctttgagaccatagatactactgaatatagtagaaacctaagctcgcaagaatccaggactgctaacaagcccctccccccgcataagttagagacacagcagggccaaaacctgtatctaatttttcagccagtgttcactacagagtatcctatatctccagtccttgtgaagttatttttcagtcctttactt

SEQ ID NO: 571832 - DNA, 309 bp, Homo sapiens
caatttgtgagcagacagtagtatgccttcgtgtactataggcaatcaaaatttaattttactcatgcccgtctcacaggcttgtgttataattgtaagcccatattacttgtgtcagtagttaagacactataggtaacataatgacagtggtgtaaagtttctgttcaagaaacatatgttgtaaagttactttatacaagatacctgccataggaaatggtcttactttcaaatgactttgaaagcatgtataattgcaaacagagcaggagaagactttaatcagaatttctgtgcccatttcaa

SEQ ID NO: 571833 - DNA, 130 bp, Homo sapiens
gaggatcccgtatttatccccaatcacccatcccaggtttcagcaccaagatgtagaagtaaagaaagagaaaagaaacatgaaaagtggctcaacagtcaaagacaagtttattttggagaataaacct

SEQ ID NO: 571834 - DNA, 109 bp, Homo sapiens
caggatcttatccagcagagaagaagctcaggaagataacgaaggtatctgctggtcatgactggtcatatcctctttgggctacagccacaccttgggttaccgagct

SEQ ID NO: 571835 - DNA, 359 bp, Homo sapiens
ctcaaagatggcacagcataattcctctggtagcatggacctccggagtgctcaaatgtattataccaggaaattgggctgatggtgaagtgcaaggggtttggaatgtatggcattttaaatcttaattatctgagcggctatcatttaccagggatgctttagtctcagagggggaggacaagcaaggtgtagtgcactctgcagggcatcccatagcacattcaaggtcggggaaaggttcttggttggacaagttctggtatcaaaggggtggctgcagtagcttggtgccccggtcagtctgggtagccccttaagattgggaacgtaaatgcaaggaaatctggtatgcaatg

SEQ ID NO: 571836 - DNA, 526 bp, Homo sapiens
ggtcgacgtgaggcaagatggcgccagtgcactcaagtcttaggacaagagtaaaacaccctctaaaaaaaaatggccgaggggctgtgggaagagacagaagctcgggggtccttgctcagcctggtcgtggctgtgtctgagagatgcctctgacccgctgatttccctcatacagaacagactttctgattcctttctggcagaggtggacagggatgaggagaggcgagagagggagaccttgagttgaaggctgtggggtgggcagaaggggtggtgagggggcaggggagctggggtggtggtcctggagccctgcaggacacctttgaggtaacccaccagggaagttccaccatcctcccagccagggactcacgccctccgaggctgcctctgcccgccaagccttgacagatgagacctcctttaccccacctggacatgttgggagagaggtacaggtggggaggagctgatgggagagtttcaagggctggagtgatgaactctgtggagtcga

SEQ ID NO: 571837 - DNA, 157 bp, Homo sapiens
acctagggatttagggcgagtatctgctataggtgaggagaatagggcatgacagacgagaagtagaagaaggcgaggttggaagagagctgcggtgggaatgtaggcactgcttgaaatacctacatacatacacgaatacatacacaagatcatg

SEQ ID NO: 571838 - DNA, 240 bp, Homo sapiens
  misc_feature (6)..(6): n is a, c, g, or t
  misc_feature (74)..(74): n is a, c, g, or t
  misc_feature (110)..(110): n is a, c, g, or t
tttttngtgaaaattttcttagcaaattgaataataatcataagaaaatgtatggaacactcacagacacactngcaggttagctggggctcctactctgcaatcagctnccacttccaccagggcacctgagtacagccctccactgccaccagtgatgcagggtcatctggcttttgcatcctctcaggcattaaaaataataatcaaacagtcttaggggacactcatagaagccct

SEQ ID NO: 571839 - DNA, 110 bp, Homo sapiens
ccgattatttgcaggattcagacattgaagggagaaggatggcatccggaaggcccgtgaggtcctgatgcggttgggcctggacacgatctggcagatccggtgagtgg

SEQ ID NO: 571840 - DNA, 316 bp, Homo sapiens
aatggaatgcaatggaatggaatccttcccggaatgcaatggaatggaatggaatggaatggaatggaatcaaccccgagtgcaatggaatggagtggaatggaatggaatggaatggaacaacccgaatggaatggaatgtaatggagagtaagggagttgaatagaatcaatccgaatgtaatggaatggaatggaacggaatggaattgaatggaatggaatggaatgcatggaatggaatcaacccgagttcaacggaatggagaggactggaatggaatggaatagaaactacccgaatggaatggaatgt

SEQ ID NO: 571841 - DNA, 368 bp, Homo sapiens
caagttggcggcggtggcgttggtggtgatcaagccgttttaagaataagaaatctcttatttattttttgctgatttattaattgttttgcggcggtatgtatcagctgcgctgaaattaatttcatggtcatttatcccggcgactttatttgatcgtcggcgattccgggttggcgcatttctgcgctaactattcttctgaaaagttagcgatgtgtttggccggtcgttcagaattatctgaatccgtatgcggggccaatggcgcatccattgttcttgcgctagatgcgtctggtgttgaaggttctgagtcttgacactcggtgcggcgctacctcatcaatctcgtgttcgccaacttg

SEQ ID NO: 571842 - DNA, 1663 bp, Homo sapiens
  misc_feature (387)..(387): n is a, c, g, or t
  misc_feature (678)..(678): n is a, c, g, or t
  misc_feature (741)..(741): n is a, c, g, or t
  misc_feature (1134)..(1134): n is a, c, g, or t
  misc_feature (1250)..(1250): n is a, c, g, or t
ttggctgcttttcctaccatttccagtaagaaaaggggtgttttggaagaaaatcattggcctttgtcttcacggaaattctgatttaagccctgtggcctcttgatggtatagagtcatggtgtattattccagttaccttagaatatttccctttgagaatttggatacaatttgagggaggcagaagttctgcagttgtgaagaaaaaaaaattaagttcgtgttgtggtcattattttaagttagccgtggtgccttatttttatatacgtgattttggatattcagtgtttctttttcattagctcgtattttgtgccaccggtaaaccattaaacagaacaacaaacaacaagagaatttctcacaaaatagtggcgcgtnttttacagaaaaccgcgtgggttttataatatgagccagttattgtgaaactgtgtgtatagagcttatagatatagtgtgtgccgaaaatatgtgtgaacaccacttgaggggtgggccactctcgagttatattctttataacgaggggggaacagttcacgtgtgcatctcaccaatgtgtggtgtgacacttttcttcttttttatcacttatgtgtgtgttaagaaaaatataccccgcaaagaacattgtgacaacagagatatgtgtgtgtcgtgtggagaatncaatgtgtgccgtgtgttttgtgtcgttgagaacatatactctctggtggggccagaagagcncgagaaaagaggacattttcgtggtttcaacgaaagaggttggggtggaaactcttgaaaatttctctccacagaagagagtttcaaataaatacagctgtggttgaaggtcttaaccaaatttgtcgggggagggggggcctctaatatataagcaaccccgtcttttaaaggaaatattttatttttctttcctaccccatctttgctagcacacgttttctacaatattagagacacaccgctgtgtggcgtcaaccaccaactctatcaacacactcagcttgtgggctctcgtgaaaaaacacaggccccgctttctttgtgcacaacagcatatatagtttcccccatttaaagagacctaagtgggggggcaacacagcgagaggngaaccgcgggcgattatataaacgaacaggctccaggtgtggaaaaacacgaaatggtgcggccctcacacaggttttcccgtgggaagcgggaaaagacaagacgcctacaccgngcgggaagaaaacacgtatcacacgattcaaccgatcgtgctccggctggtgaccaaacgaaagcacgcgaacaaaacaaaaacacagggggggggcgcgcccggctctacaagaagagtaatccacccaggcgagagggggcgcacagagtttttgcagggaagccacacggattttcttgttggcaacggagggccccacaatagagacggaccaattaaaaggaaacgagcagcgggcccgcgatttcacaaccgagtgggcggcggcaaacagggtccatctggcactcttgtggagaagagccgacctgcgtcggacgaaatagagagaacacccgcactaaactccggcaaataacaagagaatgagtgtaacgccagctgtgcagtttacatcagagcagcaagag

SEQ ID NO: 571843 - DNA, 280 bp, Homo sapiens
cccccgttttttttttaaaaaaaaaaaccccttttataagggccccttgggggattcttcccccccccccttttaacaaaatttaagggccttccctttttcccacattttggaaggggggacccccttttttttccccccccccttttttaaccccttccccccgattttttttttccccgggcagtcggggccccccccaattggggccgttttggccaaaatttttcttttttttgggggggggttttttcccccaaaaagggggttggaggtttta

SEQ ID NO: 571844 - DNA, 191 bp, Homo sapiens
tatttgcgtgtgtgtggtatgtatgacgtatagctatgtgtggtatgtgtggtatgtgtggtgtgtgtggtgtgtgtgtctgtgtgtgttgtgtgggtgtggcgtgccctatgcgtagtatgtgtggcgtgtgtgtgttatgtctgcgtggtgtgtgtacatgtgtgctgtgtcgctatgtgcgtgtgtgt

SEQ ID NO: 571845 - DNA, 502 bp, Homo sapiens
agcggggtgtgagactgcgtgcggcaggcagtggcgcggacggcatatatgccggctgtctggcccgagccgccgacaacaaaaagtgcgcgggcgctcggcgggcgctcgagacgggcgcgagaggcttgaccgcgcaatagcgaaccgagcgagcgactaaataacagaaagtgcaaccatgagatcaacaaaaatgaccgagtaacagaggacatcaacgacaaacaggagagcagatgaacatagaccgaatccagtcataatcgaaaagtgacctactgtcacaccatgaaacacggccaagccaagccaagcggacggcacaacaggaggacccccgggttcccaataaatagcggtacaacccggaaagaacggcatggatgacagaacaggacgacaagcaccaccaaacacgagaagtcggggcgagaagacaggaacgcggggcatcgactagcaaaagaagacatggaaggcaagagaccaataacgcctc

SEQ ID NO: 571846 - DNA, 483 bp, Homo sapiens
gtacctcaggattgaagtctcttttgactattgatgccaatggtatacttcaattgtctctgctgtggacaagagtacggtaaaacgagaacaagattactatcactaatgacaagggcctgtgtgcgcaaggaagacattgaacgtatggtccaggaagctgagaaatacagagctgaagatgagaagcgtagggaggaggtgtcatcctaagaattcacttgagtcctatgccttcaacatgaaagcgactgtagcaacgataagaaacttcaatgcaggattaacgatgcacgacaaacagaagcattctggaccagtgtaatgaatttatcgactggcttgatatgaatcatgactgctgagaaggaagaatttgaacatcaacagaaagagctggagaaagttcgcagagccccatcatcaccaagctgtaccagattgcaggaggcatgccaggaggactgcccgggggtaggaggt

SEQ ID NO: 571847 - DNA, 724 bp, Homo sapiens
  misc_feature (644)..(644): n is a, c, g, or t
atggtcagcttcatcttccttttttttttttggaaatggagtttcgctcttgttgcccaggcggagtacaagggtgggatctcggctcactgaaacctccgcctccggggttcaagtgattctcctgccacagcctcccaagtagcgggggattacagggtgcctgccaccatgcccagctaattttggtattttatagtagaaagggggttttaccgtgtgggccaggctgggtctcgaactcctgacctcagtggatccgcctgcctcagcctcccaaagtgctggggcttacaggcctgagccaccacgctcagctcagcttcaccctgtctgcaaagacaaagtttataccaagaccagaagtgaactatgacatttcctaggtagtggtaactctaacactagttcaacaacgtcatgtggctctcagatggcctatacttggttcacaaacgttggtgattaaggatatgacggattctagaagtgaccccaatttggtgtaaatccctagactccattcatgaacgcagactttataccctgcggtggcttcctgaaagaatttccgaaatcagagcaaatgtgtctcacggccgatcagctccttttaaatatttcctctgtggccattcttttgnctcccccgaaatctgtggtggtacctataagacagatctaactccgtgcccctggtagaagctcttttgggacacatctg

SEQ ID NO: 571848 - DNA, 734 bp, Homo sapiens
cccccggaattttccaaatttagtcaccgagtcccggaagccaactcgttaggcgaatctatcctatgaggaccacccaattccttggtccctgtcccctgtctggaatcattcacgcactctcttctggtccctcactcccccccgcccatctctgaagatcattcccgcacacgtctacaccctattaacaaaaggactgcgtgcataattaataaacgacggaacccttctttatgaatagactcccccacttattcctactatgctgtaccgacctccactgtgcggttgaccatcacgtccggatagtccccccacgtcgcacttccggagactgtgcaccagctgtgcgagcgtgcgacagacttcgcctccgcatagtgtctatagaggggtcattgggcagagccacccgagtgcgctacactcgatgtggataaatacacacggtctgtggcttgggtatgctcacatagatgtcataaagactaggtccacagccgagtcgtggggggcgaccgacacaccacctccggtaggttccgcagatcatgttgtggcgcgttgtgtccaagagaagttttactctcccacacccgagtgagtgtcgaggggcgtgcccacttgcgacgtgtgcgacgatgtaggcgcccgcacgacgcgcgcccaatgtgagcaacacctcgagtgcaagagaccctgtcctggccatacaaatagacaagacaaat

SEQ ID NO: 571849 - DNA, 906 bp, Homo sapiens
  misc_feature (314)..(314): n is a, c, g, or t
gggcgccagcaacacaggtgtcgtgaaaactacgcctaaaagccaagacatgggaaaggaaaatgactcatatcaacattgtcgtcattggacaggtgtattcgagggaacgtgcatcattgactgggcgatctgtatctataaatggcggtggcatctgaggaataagaacgcattgagaatagatttgagaaggaggctgctggagatgggagaagggctccgtgtcaagtgatgcctgggttcgtcgggaataacactgaacagctggaggcgatgaacgatggctagtcagcagttgagtatcgtccttntgggcaagagttcagaggaccaggcacagtagctatgtgcactatgcatgtgagtgccgccagggactagcagagacttgtagtctagagaagacatggatgtacaggggactatctcgagtgctgagctgtgcgtgtccgtgacttgttgcatgctgggtgttggtgaactttgaacgctggtagtctccagggaactgggcagacccgatcagcatgcccattctggcttacgacacatgggtgtgaaagtaacgtcacaattggtcggtgttgagacaatagatggattccaggtgaggccacgcctacgagccagacagagatatgaggacaattggttacgggaacgtcagcgctgtccttgagagacacttcggatgacagagccaccgagtagctggtatcacttgtgtcgcacagatttactgagctggggaaatggtgaagatagactgcatgggtagccagggtgcctagaaatgccattgggggtcacacagggaatggaaaacgttaacccgtgaaggggatgcgaattgcttgtgggactggatagttgttgaagggtttgggatgggtcgataggaag

SEQ ID NO: 571850 - DNA, 474 bp, Homo sapiens
gagtcgggttatggtatcctctccaaccaagctgaagctgaagcgacagcgtggagtatgaatgagcaagccttccagtgacctgagcgggggggagccacctggtgggagcacctcacatttgatgtggaaagggatgaagaacctcaggggtgggagctgccctttgatgccgggacaagccactgcgcgcaaatgtacccgaatgataagttcactcaaaaccccatgaggggcgtgggcctgtcccctgagcatatctgcctgttgccgactagcctccatctgccatcgagtcccggggcgaacgagcaagagcaggttccccccacagtgctatgcctaccagtaccaggactagagtctgtcgtgaagccacacggtgtcaggccttgccgttatggtaccaacccttctttcaggcatggcaatgccggctgctcgggccctcatttgagtccatacccggactcg

SEQ ID NO: 571851 - DNA, 132 bp, Homo sapiens
gttatcaacactgtgaaaatcctaaaatccaccatatgaaaaccattttaaagtggttaaaatggtcaattttgtggctgtcgtgcttgtgtgctgcatgccgtgataacccagacactttgaggcggcggg

SEQ ID NO: 571852 - DNA, 162 bp, Homo sapiens
aagacaacaataatcagcacatagtacaatggatagcagagctatccagattattgaacaatgttacagacaaatcgcctgaatattaaatgagcgtaaaagggcctctaacctatgacaggtttccccacttatgcatatagcaacatgctagtatgtttt

SEQ ID NO: 571853 - DNA, 271 bp, Homo sapiens
ggcacagtgtccgctcccttgtatggctgtcaaggaacaccgatctagatagaaacccacattggaagagaacacaggtagaggtagctgccatacatatgagatatgcgtccttaaggaacctgacaagcagactgaagggatggtaagtgtgaccagcctgatcaagtatactcaaagcccagtgatacagagccagtgttttctgtacactggcagcactccagtaaggcccaatatcgaattcccacagccaggtcggaagtctcat

SEQ ID NO: 571854 - DNA, 479 bp, Homo sapiens
  misc_feature (202)..(202): n is a, c, g, or t
  misc_feature (425)..(425): n is a, c, g, or t
  misc_feature (479)..(479): n is a, c, g, or t
cgtccccctgtggagatgaaggtgtgtgctgatccctcgatgcccctgtggagatgaaggtgtgtgctgatcccccatctccctggtgtagatgaaggtgtgtgctgatcacctattccttcagtgtggtagattaataggatagtgtgtgtttcactcttgtaccttacatgtggattggatgtgtaatgagtgtacgtgngtgtatatgtacatcgtgtaacgttatagttatgatagaattgtactggtaagctgtgagtaaatagagacttatgatgttaacataagttttatactaagaatgtcactggtagtagctgtatgagctacactgaggatctgactatgatcagcacactgtggctactagacttatctgtggatgtctcgttgtagcgataatctagactctgatctgagancagacacactagagagctttcaagataacttagtttgtgcacggtctagcatan

SEQ ID NO: 571855 - DNA, 1029 bp, Homo sapiens
tcggagtgagcgttatattggcacgattacaacatggggacaaacccaggggaaatgagcgagtctagggttcctaacccaccccggctgacaaggggtggccccgaggggccggaatgcccagccccgaagggggccctaactcgctcctccttctcccgaaagaactctctctcgaaacgtgtaggcctatgaagcaagcgtcgggtctctgggggacaaggggatgccccggtctcacaattctcaaagcccaaaaagcttgaaggtctcggacgcaagggggcctcgtgtccttcggggtctctgggtggaagcaaagtgaaaactgtggctcggctctcgcaagagtgtgcgcttctctcgagggaaacttccgaggaagaacactgtgcaaagacgtgttccttgtgctgtccccctctgggggcaaggcgggcacggccgcgggagatcttcgaagtgttagaaggctgtgccggccagtctccagggcgcggcggggtctccgtgagctctccgtgggggcttctcccacacgagtgtgtctctgtggggcacaggggaacacacagaaactcccgggggggaaaacactctttctttacccagaaggccctcgcggaacagcggcacccctcgcgaaatatcccccctcttacgcggtgttttgggcaaaacctactcgcgggggaggaaccaccactctatgtctcatcggggggcgcaaattatatcacaatgtagggtctccatgggggaggaaccctctgtggcccaagaggacaccgccggcgttatacaaagggcggggggataataaggcactccccattttcttggggaccccaaaaagcaccgaaacacccaagttggaaggctcatccccccacagagaagtttttcggagtcacgaaagaaaaaattgtcatttttcccccaccacgtcaagcgtgtttgagagaggcgcccacggacgcgtatacaaaccacggccccgtgggcgtcccaacatttgggggataaccc

SEQ ID NO: 571856 - DNA, 2552 bp, Homo sapiens
  misc_feature (347)..(347): n is a, c, g, or t
  misc_feature (404)..(404): n is a, c, g, or t
gaagaattcgcgaaggcgtagacatcctgataacccatggaccaccactgggcttcctggactgggtccccaagaagatgcagcgggtgggctgtgtggagctgctcaacacggtgcagaggcgcgtccagccgcggttacatgtctttggccacatccacgaagggtatggtgtcatggcagatgggacgaccacctatgtgaatgcgtccgtatgcactgtgaactaccagcccgtgaacccgcccatagtcatcgacctccccacaccccggaactcctgactgctccccactgcccctgccctgcccgcccgtgtcagctccacaggcctggcccggccactngttccttccatgctgagttgcctggacgacccatctggctgcgggggactggcctancaggcaggtcagggccttggaacgactctttagccttctgtcacctggagttgggaccctgcgcatccccatcaggggttctgtgctcatttaactttattcctggcgtgttaacatcctgcgtgtacctcgttcaaaggacctactaagctcatggccctgtcatgtttgggaaatgactaaatcttcattcttctcccttggacgccctcctggtttgggaagctgctgctcttgaatgggttttggaagttacacaaaatctccctctaaccacgggtctgtgtggcggcatgccctgggttggggtgggtgggaggattcgtgagctgcacacagacagtccctttctctcctcccaagtgagggaggagacaggcccaagggggaggccctccgagggagcatttagggacatctcaggaattcagaccgcacctggccaggcccacagctgtttgcctggcattgttcccccctttttcttcccataggcatttttgttttacttgaacaatgacctgagtgtcctaggcattcactcggagcctggatgatgggggctggttctacagaatgagccactggcattcgtgcccaggaccagtgagagcgttcccagtcatggggggatgacccttggtcccacggggaacacactgctctgtagaatgcggtagcctggatggagggtctgcaggcttaggctgcagcaggcctgccatgggtgtgaacccatgtccaggcacgcaccgacacacatgcacgcacgcacccctcttaattgaaccaagtgggtcctgtgtttctcttttctgccccgtagtgaggttctgttccttggtgcggcttcccttgcaccgttaggattctgtctggcatgcctgcagccgaggaagcccaggaccagccggccctgtgaattggagggtggcacagggaccgagcgggccccaggctccagcagccccaccttggacagcttctttttcttctttgaattaggactggagggggtggggccagggcggtggtgggaaccggtagggcctagatgaggggcaggcagtcaggcagaaatgggcaagttcagggtcagattctgtcgttatttaatattttgttcatcatggactttttctgcatttattttgatttttaacgttgcattaaagtagtattatttgtcctgattggtgactttttttgcacccctttccgttgtacatctgagagaagggtgtcactccctcacccaggtcccagccctgggaaccagcctaccgtgagcccttttgcagatatagactcatttcatcctcagatggtccttcaaggtaggtactttagtcccattttagagatgagacgattgaggccagaggggtgtggtaacttgcctgggggctcacagcacaaaaggagccgaggcaggatctgacccttgttctctggcctcactgccctcactttgccatgacccgaagttatgtccctacaaagcaatgcatggtccaaggctctttttattgtatttttatttttaagggtcctgttcaaaactggtgtgagctctgaggagtcctgaaccctgggtgcagcatcctagcatcctgggagtccttttctgcccacactgagctgggctcctcgaggggtggggctgctgtccctggaagcctggcagcagcactgtatcgggttggctgaagctgagcgccgtggggtgcagggctccaggaatcccgtttggctgaaggggttcctgtagccagggatgtttatgaggtctctctgatgccccaggcgcaggacatgtgtgcgggtggagaaaagcaggccctttcagtgccagctccactcaatttctatgtggaccaagaacgataaacttaaaaaattttttttcctaaggtatcttcagaatatggtgtatttttatgtggaaaagaaaagttatgaaggcagctgttactttaagagaaaattcattaaaagtcctcgaggtatgaagatgacggcgtgcttctcaatcattttggcataacttgattgtggctgtaatttttttttttttttttgtcaagcatgtcagacaataaagtctttgtaaaaaaggggaaaaacctcgttgccgaatcttgggcc

SEQ ID NO: 571857 - DNA, 387 bp, Homo sapiens
ggttttcctcagctttgggtggtggcctggtgccgggcatcggcttccagtccgtggagggcgaggcggcgtggacttgcggccccggcatccagcgacccgtcgcccgcaagccgagcgccctgtccgactgagctaccgagcccgaccgcgttccagtatctcagacgaccctgaccgacgagcgatcgagagaaggcagtgatagctgcaaaattagtgaacgcaggtgcatggaataacaggccaattcaaaggtggtgctgagtgagtgaagaaaacgaaaagcatagtgagcctagaacattgtccgtgacctgaaaactgaagtagagaacaatgaacgcattgaccgagacacaataatgaacagaatttgtgaaatac

SEQ ID NO: 571858 - DNA, 216 bp, Homo sapiens
acttctaggaccccaagaattgctgggagaaggggttcactatcttggagaggagctgcaccaccagaattgagggcacacaggcagataccagagagtctgacaagatgtggcttgtccgccacctggaaattataaggaagtacgttctggatgacctcattgttgccaaaaacctgatgattcagtgctttcctctccactatgaaatgttta

SEQ ID NO: 571859 - DNA, 194 bp, Homo sapiens
  misc_feature (36)..(36): n is a, c, g, or t
  misc_feature (46)..(46): n is a, c, g, or t
cccccccccttaggggggcgccaggtttaagtgttngtgctttctnatgggggaaccgggcccttggggggccccccgaacagcctttgttttttgctttggggggggtgggggaccccccagggcatttccccccccccccctgctgcccagttggggctttagctccaaattaaaaaaaaccctgtttttca

SEQ ID NO: 571860 - DNA, 2819 bp, Homo sapiens
  misc_feature (46)..(46): n is a, c, g, or t
  misc_feature (60)..(60): n is a, c, g, or t
  misc_feature (614)..(614): n is a, c, g, or t
  misc_feature (671)..(671): n is a, c, g, or t
agcacagatggtctggggggcgccagcagttactgagcaccccacnccaagcgcctggcncatgctgagctctttcaaggaggccctcagtgcagccctatggaggaggggggtgaggctgcaaggtcctgaatggtttcagtccctgaagcctgaggcagggcagggttccggagagcttgctaggggagagtggtgcaaagccggagtccggaagccccatgccttctccaggctgcagaagctgctgctaggcgtggggcagtgaggggctgggacagaccgcgtcatggcctcctgttgtctcccccataccaggcttcctggactgggtccccaagaagatgcagcgggtgggctgtgtggagctgctcaacacggtgcagaggcgcgtccagccgcggttacatgtctttggccacatccacgaagggtatggtgtcatggcagatgggacgaccacctatgtgaatgcgtccgtatgcactgtgaactaccagcccgtgaacccgcccatagtcatcgacctccccacaccccggaactcctgactgctccccactgcccctgccctgcccgcccgtgtcagctccacaggcctggcccggccactngttccttccatgctgagttgcctggacgacccatctggctgcgggggactggcctancaggcaggtcagggccttggaacgactctttagccttctgtcacctggagttgggaccctgcgcatccccatcaggggttctgtgctcatttaactttattcctggcgtgttaacatcctgcgtgtacctcgttcaaaggacctactaagctcatggccctgtcatgtttgggaaatgactaaatcttcattcttctcccttggacgccctcctggtttgggaagctgctgctcttgaatgggttttggaagttacacaaaatctccctctaaccacgggtctgtgtggcggcatgccctgggttggggtgggtgggaggattcgtgagctgcacacagacagtccctttctctcctcccaagtgagggaggagacaggcccaagggggaggccctccgagggagcatttagggacatctcaggaattcagaccgcacctggccaggcccacagctgtttgcctggcattgttcccccctttttcttcccataggcatttttgttttacttgaacaatgacctgagtgtcctaggcattcactcggagcctggatgatgggggctggttctacagaatgagccactggcattcgtgcccaggaccagtgagagcgttcccagtcatggggggatgacccttggtcccacggggaacacactgctctgtagaatgcggtagcctggatggagggtctgcaggcttaggctgcagcaggcctgccatgggtgtgaacccatgtccaggcacgcaccgacacacatgcacgcacgcacccctcttaattgaaccaagtgggtcctgtgtttctcttttctgccccgtagtgaggttctgttccttggtgcggcttcccttgcaccgttaggattctgtctggcatgcctgcagccgaggaagcccaggaccagccggccctgtgaattggagggtggcacagggaccgagcgggccccaggctccagcagccccaccttggacagcttctttttcttctttgaattaggactggagggggtggggccagggcggtggtgggaaccggtagggcctagatgaggggcaggcagtcaggcagaaatgggcaagttcagggtcagattctgtcgttatttaatattttgttcatcatggactttttctgcatttattttgatttttaacgttgcattaaagtagtattatttgtcctgattggtgactttttttgcacccctttccgttgtacatctgagagaagggtgtcactccctcacccaggtcccagccctgggaaccagcctaccgtgagcccttttgcagatatagactcatttcatcctcagatggtccttcaaggtaggtactttagtcccattttagagatgagacgattgaggccagaggggtgtggtaacttgcctgggggctcacagcacaaaaggagccgaggcaggatctgacccttgttctctggcctcactgccctcactttgccatgacccgaagttatgtccctacaaagcaatgcatggtccaaggctctttttattgtatttttatttttaagggtcctgttcaaaactggtgtgagctctgaggagtcctgaaccctgggtgcagcatcctagcatcctgggagtccttttctgcccacactgagctgggctcctcgaggggtggggctgctgtccctggaagcctggcagcagcactgtatcgggttggctgaagctgagcgccgtggggtgcagggctccaggaatcccgtttggctgaaggggttcctgtagccagggatgtttatgaggtctctctgatgccccaggcgcaggacatgtgtgcgggtggagaaaagcaggccctttcagtgccagctccactcaatttctatgtggaccaagaacgataaacttaaaaaattttttttcctaaggtatcttcagaatatggtgtatttttatgtggaaaagaaaagttatgaaggcagctgttactttaagagaaaattcattaaaagtcctcgaggtatgaagatgacggcgtgcttctcaatcattttggcataacttgattgtggctgtaatttttttttttttttttgtcaagcatgtcagacaataaagtctttgtaaaaaaggggaaaaacctcgttgccgaatcttgggcc

SEQ ID NO: 571861 - DNA, 295 bp, Homo sapiens
tggcacagcgacgggtgattgtagtgctagtgtactatacggctgtggagctgacctttaaactgacggtggatgtctcctgggtggcactgcaggctcagcctctgtgaggaagctcctcatgtccctggccagcagcatgccgtccgcgcaggcgcaggtaaacttgggcgagtgggggtatgatctgcggggcaagggaggcacagatactggcagccgccattgctcagggtggtcctctcacaccagttcactcctacttgggctgagtgaggtagtggaaagaagaacc

SEQ ID NO: 571862 - DNA, 110 bp, Homo sapiens
tattcccaagcatgggttattccaaaactggggacggtgaacattaaaacgaaagaggggactcgcgtggaacctgaaacacggacgccttgcttccaagaagggctgtg

SEQ ID NO: 571863 - DNA, 663 bp, Homo sapiens
gtacgaggtataagctctgcaaaatcttaaaaatttgaaaagtcttgacctgtttaactgagagatcacaaacctgtgtaaaaaaaaaaaaaaaaaaaaaaaaaaaaaaaaaaaaaaaaaaaaaaaaaaaaaaaaaaaaaaaaaaaaaaaaaaaaaaaaaaaaaaaaaaaaattaattggccgtcgtttaaaaacttttaaaatggaaaaactttggcgaaaccaaattaaatcgctttgaagaaaatccccttttcgccagttggctaaaaagcaaaaaggcccgaaccaatcgcctttcaaaaaattgccaattttaaatggcaaatggaaaatttaaagcttaaatattttgttaaaattcgcttaaaatttttgtaaaatcagttaatttttaaaccaaaaggccaaaattggaaaaatcctttataaataaaaagattaaaccgaaataggtttgagtgttgttccattttgaaacaagattccattataaaagaacttggcattaaaattaaaagggtaaaaaactctttataaggctcaaggcccaataacggaactattacctaaaaaaagtttatggggtcaaggtgcctaaaagaattaaatttgaacttaagggggagcccccattagctgtacgggtctcttagcttggcg

SEQ ID NO: 571864 - DNA, 670 bp, Homo sapiens
  misc_feature (55)..(55): n is a, c, g, or t
  misc_feature (76)..(76): n is a, c, g, or t
  misc_feature (82)..(82): n is a, c, g, or t
  misc_feature (102)..(102): n is a, c, g, or t
  misc_feature (124)..(124): n is a, c, g, or t
  misc_feature (135)..(135): n is a, c, g, or t
  misc_feature (143)..(143): n is a, c, g, or t
  misc_feature (172)..(172): n is a, c, g, or t
  misc_feature (185)..(185): n is a, c, g, or t
  misc_feature (234)..(234): n is a, c, g, or t
  misc_feature (274)..(275): n is a, c, g, or t
  misc_feature (289)..(289): n is a, c, g, or t
  misc_feature (303)..(303): n is a, c, g, or t
  misc_feature (388)..(388): n is a, c, g, or t
  misc_feature (394)..(394): n is a, c, g, or t
  misc_feature (407)..(407): n is a, c, g, or t
  misc_feature (498)..(498): n is a, c, g, or t
  misc_feature (510)..(510): n is a, c, g, or t
  misc_feature (555)..(555): n is a, c, g, or t
  misc_feature (557)..(557): n is a, c, g, or t
  misc_feature (568)..(568): n is a, c, g, or t
  misc_feature (583)..(583): n is a, c, g, or t
  misc_feature (606)..(606): n is a, c, g, or t
  misc_feature (609)..(609): n is a, c, g, or t
  misc_feature (649)..(649): n is a, c, g, or t
aggctcatggaaaagagcatagggatccaggaccatacaacgtggtggtgctggncagggctctgcatcccctttnctcagnacagcaccatcttcaccctnctgggaaagcagaattggagcntaaaccgcttnttcttttntcaccagggtaagaaatgcaagtatttgnagaggggagttantttggaaggtggcagagaaaaactagggcaagaattaagggaacttgtnggaagagtaactgtggaacctacctatgctctcttgaccnnaaactccccaaaanccctcactgaggantgtttacccccgcgggctcagaataaactgcttactggaagatgggtgacttaaggcaaaagggaagagctgcctcctgggctcnccaatnccctgctgcaganctggtctagtgatactgagaaaaacacctgcattttgccctttcagccagctccctcagaggttacagcagaaggggatggtgggagggtnctatttcacttnaaccctacaggcactttccaccctcaaaccttctgcacaggagantnaacaggcacanccttctttccccgtngctttagacggccccgcgcgtanacnctgagcaggagggcagcaaagaccacagccacccccagcnctcccaacacagtaacagtgt

SEQ ID NO: 571865 - DNA, 706 bp, Homo sapiens
tgcactggccaccatgcccagctaattttttgtcattaagtagagatggggtttggccatgtgccaggttgttctcactcctcagtcaagcaatctgcctgtgtgagcctcccaaaggtggggcaatcacagcgcgtggcccatgcgcgtggcccaagagagacgatttcttgaaacaacaacttggcaagtgatttgtcattcacatttggaaagtgattcttcacttcctagttcttaattatagtatactataagatctgtaagatcctgaagactatagagatcatgaagccatataagaatgaggatggaaagtggagcaaaatttcgggattgggggaaacattcttagctgtgctatctgctaaaattattccttatacttctctccttggacagattcaagttttcttcatagccctttcaaagttttggagccatccagagtaaaatcatttctaaatgatagttctgtatatctccaactcgtctaaagtgtattggcctgtgtgcaaggtatgggtagattatgaactcttcagcatgggtgtggataactttaatgtgtcctgagtaaatagccttcaaaggacaaatcggtttcttgtgagatagttcgtaaactcacatggagttatttaatcatattgcctttttattcctgcccctcttaatgccattgtgttaagagactgcatttagg

SEQ ID NO: 571866 - DNA, 132 bp, Homo sapiens
ttcaggaggcgctcggtcagcagcactggagtgctcctccggggccacgcgcagctcgttgtataaggtgtggtgccagtatcttactaccatagtcgtcccagattggatgacgatagccatgctacaatg

SEQ ID NO: 571867 - DNA, 337 bp, Homo sapiens
gatccccaagcagttaatacagactcagtctcctgagtatctagggattacaggcctgtgctaccatgcccagctaatttttggtatttttagtagagatggggtttcaccatcttggccacgctggtcttgaactcctgacctcaggtgatccacccgcctcggcctgccatagtgctgggattacaggcgtgaggtgccgtacctggcatgtataccagacagcttctatcaaacaagggagaacctgaggtttacttattttttacttaatatttacctccaaaatcccatttatccggtctggccactaaattgagtctgtataaccgtgctg

SEQ ID NO: 571868 - DNA, 155 bp, Homo sapiens
tcatcatgtaggacagttgggatatttctgcagcagcattcataatttgagtattatccaaaagacagtttcatcagccggatactctctctgtaaatttcctgaagttctttccatggacttgattaattctaattgttgtaagtgttcataag

SEQ ID NO: 571869 - DNA, 452 bp, Homo sapiens
cctcttgggttcaagccatcctcccacctcagcctccccagtagctgggactataggcacatgccaccatgcccagctaatttttgtatatttttgtagagacagggtttcgccatgttgcccaggctggtcttgaattcctgggctcaggcgatccgcccatctcggcctcccaaagtacttggattgtagacatgagccaccgcgcccagcctccccctgcccttttaacagctgcttatccacttatttgaaagctcttcccctggggagggtgggggtttggggagaaactggtgtgtggcttggaggtgtggggagcactttcaggaaccagccctctgctgccccgtctcacatggccaccagcgacccagcccctggatcctgccccactaaccatcgctatcttcttttcttcctcctactccagcatacttccacaggctgca

SEQ ID NO: 571870 - DNA, 234 bp, Homo sapiens
  misc_feature (36)..(37): n is a, c, g, or t
  misc_feature (40)..(40): n is a, c, g, or t
  misc_feature (146)..(146): n is a, c, g, or t
atctcagagcttagaaatagccgagcagcgtgtctnntanctccgtgtgggaagtgtgcggtgggtcaagcgcagaagtttcattctgacacttctttgatcctaagtcatggagtaatgtttggaaatttcatttatcttaattnggtcttcgtcttgcgggtggggaaaatgagttcgcattacatcagtgcttttcagcctgaccccgtcggctaagttttccgggtaccg

SEQ ID NO: 571871 - DNA, 162 bp, Homo sapiens
gctggtgcaaatctagggccatcagaagggactgcaaagacccaagggcagagccctccaagctcccggtgtgtttggcgacgtagggcttgcgcgcctgccagctgactctcagagtcgcagcccctggtaccgggttgaagacgccacgcccaggcgaca

SEQ ID NO: 571872 - DNA, 148 bp, Homo sapiens
ggtttgcactgatgcatgcaaacaggattaaactaaggtttggttccttcagccctctaaaagcatagtggcttagcctgcaggcttccttgggctttctctgtgtgtgtagtatttgtaaacactatagccatctgttaaggatccc

SEQ ID NO: 571873 - DNA, 339 bp, Homo sapiens
tccagtggtgtgatcatggctcactgcagcctcgacctccttgactcaggtgatcctcccacttcagcctcccaagtagctgggagtacaggtgcacaccatcatgcttagctaatttttgtattttttgtagagacaggtctcgccatgttgcccaggatggtcttgaactcctgggctcaagcgatctgttggtctcggcctcccaaaatggtaggatttcagaggcatgagccactgcgcctggctgaacttttttttaaaaaagaaatgcagtttttattttttcccactgacgtacttggaaaaaaaagttacatgtaatgagacacatagttc

SEQ ID NO: 571874 - DNA, 856 bp, Homo sapiens
  misc_feature (4)..(4): n is a, c, g, or t
  misc_feature (344)..(344): n is a, c, g, or t
  misc_feature (360)..(360): n is a, c, g, or t
  misc_feature (366)..(366): n is a, c, g, or t
  misc_feature (404)..(404): n is a, c, g, or t
  misc_feature (408)..(408): n is a, c, g, or t
  misc_feature (417)..(417): n is a, c, g, or t
  misc_feature (490)..(490): n is a, c, g, or t
  misc_feature (495)..(496): n is a, c, g, or t
  misc_feature (505)..(505): n is a, c, g, or t
  misc_feature (520)..(522): n is a, c, g, or t
  misc_feature (524)..(524): n is a, c, g, or t
  misc_feature (538)..(538): n is a, c, g, or t
  misc_feature (554)..(554): n is a, c, g, or t
  misc_feature (684)..(684): n is a, c, g, or t
  misc_feature (692)..(692): n is a, c, g, or t
  misc_feature (718)..(718): n is a, c, g, or t
  misc_feature (780)..(780): n is a, c, g, or t
  misc_feature (855)..(855): n is a, c, g, or t
tttntacatttgtcatttactctttgaagtgtacatgtattttgcttcaaattctgtgatgagtacgtttttatactaatcagtatcataaataatttaaaatattagtcttatctctggaatcaccaatcaatttactcagatgatctcactgtctaattctactacatttaaagactgtagaacatttgtgattaagcaatttctttttcaaaactgcaaagatgggcagtgcgagagctgattccataaatttcaatgaattcttagaaaattatgttgttctttatttctgatctattttcttgaataatttgggtaattatctgatcagttacctttgngaagaatagtaaaagnacctcnaatctcaacattttagctactgtaaaatgtcataagcntccntcaaatatnagtggtacataattacctcaataagaaaaatttaccaggggcgagggggagggggcgccaccccatgggaatntatcnntgggtaaangggtagggattatannncnggtgaggggacagngcggccgccggcctcnctcaaggaatacatagagctgataaacattaaattccataatccagaccagatcttttataaatggtaaataaaaaggcaaaaatgaaagacaaaagtcctgtgatctttgagaaaagacatttatccancatctccnactgtgggcaaataaatattcgttcntgtattttaaattactaccaaaatattttatctttctacaaacaacaaaaaacaagcaaacngtatctagaaattttttttcctctgacaagaatgtcaagtctttgaagttaccctaaattttttttttttttccng

SEQ ID NO: 571875 - DNA, 195 bp, Homo sapiens
gaacccgatgtacgtagccatagctggagcctgagtccgctgcaggcagagtctggtgtgggtcttgacgacgtgacagtgaactacctagatagggagacttgagagaatacagtctccttccagaggtcgggggtcaggtagctgtaggtcttatacctggcctcccaggtgaatacgcgaatgtggtaccga

SEQ ID NO: 571876 - DNA, 389 bp, Homo sapiens
  misc_feature (1)..(1): n is a, c, g, or t
  misc_feature (63)..(63): n is a, c, g, or t
  misc_feature (98)..(98): n is a, c, g, or t
  misc_feature (114)..(114): n is a, c, g, or t
  misc_feature (124)..(124): n is a, c, g, or t
  misc_feature (137)..(137): n is a, c, g, or t
  misc_feature (160)..(160): n is a, c, g, or t
  misc_feature (215)..(215): n is a, c, g, or t
  misc_feature (256)..(256): n is a, c, g, or t
  misc_feature (292)..(292): n is a, c, g, or t
  misc_feature (361)..(361): n is a, c, g, or t
ntccctcactgtctatgatatttatattgaggtttttctagtctctgggtatatatgcttgtnattaaaataaaggaaattaaaaaatccaatagtgnattatacatttttcantcatttgccntactgtcagtgtnaatataaatctggactaaatgtncagactctcaagctataatgttcagctttcttcgtcctccatgctaagagttgtnaaagcttatagggtcaaacaataccaattgtataggcttcnaaaactatttaagttaggggattctctagttttagnttagatacttttggtatactgtcaagtcatcatcttacttattttaatgtgtttttttttttttgtttnttatatttttttggaacaatcctgaagg

SEQ ID NO: 571877 - DNA, 449 bp, Homo sapiens
  misc_feature (142)..(142): n is a, c, g, or t
  misc_feature (145)..(145): n is a, c, g, or t
tgcacacgccgagagtccacacagaggctgagacaggagatttgcttgaaccagggagtcagaggttgcagtgagccaagatcgcaccattgcactacaacctggtgacagagcaagactccgtctcaaagaaaaaaaaaangangattgatattttagacatcaacggaatggggactgtttaaaagggaataccttacacagatcacctgaggtcaggagttccagaccagcctggccaacatgatgaaaccctgtctctgttaaaaaaaaaaaatgcaaaaggttggccaggtgcagggctcatgcctgtaatctaagcactctgggaggccggggggggcggatcacttgaggccaggagttcgagaccaacctcaccaacatgaagaaacgctttttttactaaaaatacaaaactggccaggtgtggggcctcggcgtgtgca

SEQ ID NO: 571878 - DNA, 392 bp, Homo sapiens
  misc_feature (173)..(173): n is a, c, g, or t
  misc_feature (301)..(301): n is a, c, g, or t
  misc_feature (371)..(371): n is a, c, g, or t
ggactgcccgtttgtttatgagacagggtctcattctgtcactcaggctggagtgcagtgtcatgatcatggctcactgcagcctcgacctctcaggctcaagtgatccttgcatctcaacctcacgagtagctacgactacaggtatgccccactatgcctggataattgtnccttttttttttttggtagaaacagggtctcattctgttgcccaggctagtctcaaactgctggactcaagtgatccttccaactcggcctcccaaagtgctgggattacagatgtgagtcacaatgnccagcatggattgtccttttcagacccagaccaaagaacaggacttatttgtcccaagaccaatctaggnaaagtataagctgtgttgtca

SEQ ID NO: 571879 - DNA, 286 bp, Homo sapiens
ccgagatgctcagtagactgactcattgaccatcactctcctactcataaaggaacaacgccacagatgaactagacggacacagcaccagtagccggaaggagcagcaagggcaagtgagcagagcaaaggaatacataggcagcgtacaaaagcgcacggacgcaagacaaggcaggtccgtagcaaatcaacgatagccgcgacggacaagacgaagagccggaagcaacatcgaacacaggacggtcacaaccgacgacaccatcaaaacatccacaagtaa

SEQ ID NO: 571880 - DNA, 419 bp, Homo sapiens
ccattaaaataacatcaaattgatcagaaatacagtgtagacattgttaatgttgtaaatgactatcgtaactattgaaatgacagattttttaaaatggaatatcgacataggcgtacagaggcccatttatcagcaaccatcagtcctgtgttccaatggcacgttgtgttagctaatccaagtgtataattttagaaggctaattgatcattagaaaacctgtttgcaattatgttagcacagataactgttctgattaaagaaacaataaaactggccttcttaagactagttgagtatcgggagcatcagcatttgtgggttcgattacaggctcaaaatggccagaaataagaactttcttaaactcgtcagtctattcttgttctgagaaatgaaggctattccgtcgacgc

SEQ ID NO: 571881 - DNA, 262 bp, Homo sapiens
gatatgaacacatacatacacatatgtacacattcatagatacacacacctcaacaataacgttatgaaaacatcaacaacaacgttatgaaaagttcaacaacagtgttatgaatacactcattcatcactagtactgttctcctgaacatgatatgtgggggggaggggatctatgtatcatgacctctccacatctgcccgcagactacccctttttcttctgcaccacccttttccgtaccctcagtgcttggcagtg

SEQ ID NO: 571882 - DNA, 855 bp, Homo sapiens
gttgggggtcaggtggaaggatggatgtagttctcaccgggggtttcttatctacagcttacaccattatagtgatcacagctagtctgtgaagtggaatttgcatgcaatcagcattcactcagagccctgtgctattaatagaacaacatgaaggaatcataaatcagcctttgctcaggattagactagcaagttctgtactattacaaagaaaaattcaagtggagaacaagaaggtgaatgctaaaacaaatctctggcttccaatcaaagcttcctggccaggtgtggtggctcatgcctgtaatcccaggtggatcacctaaggttatcagttcaagaccagcctggccaacatggcaaaaccgcgtctctaatcaaagtacaaaacttagccaggcatggtgtcacatgcttgtaatcccagctacttgggaggctgagatggaagaatcacttgaacccgggaggcggagattggcatgagccaagattgccgcccctgcaactccaggcctgggcaacagagtgagattccatcacaaaaaacacaaaaaacacacacaacaaaacaacagcctgagcaacagtggccccgaggaaaggctataaaaaaaacaaggataggaacacggggcaccacaaggaccggaaacatggccataccgaggacacccaagaggaacacgcggggtaacgacaaaagacgggtagggagacgcccccccgaaattaaacaacggcgcggcgggccaccacaggcgggtctcgaacaacacgccaaaataagcacaggagcgaatacggcgagcttacaaaagagagtacacagcgaggcagcatacaaataac

SEQ ID NO: 571883 - DNA, 560 bp, Homo sapiens
gggcccccgccccgttgaggttgtctagtcccccgctcggagccctgccgtcccagggtcccctgccagtcggtcccggttttcggacccctagaagcaccagcgaccagctttggccccactgccaacccggccaatggtctcatcaaggtgaacgggcggcccctggagatgattgagcccgcgccacgctaccagtaccagctgctggagcccagttttgcttttcggcaaggagcgatttgctggtgtagaccatccgtgtcccgtgtaaagggtggtggtcaccgtggccccagatttatgctatccctccagtcccatttcccaagccctggtggcctatttcccagaaatatgtggatgaggcttcccagaaggagatccaagacatcctcatcccgtatgaccggaccctgctggtagctgaccctcgtcgctgcgagtcccaaaagtttggaggcccctggtgcccgcgctcgctacccagaaatcctaccgataagcccctcgtgactccaaactcacttgtataataaaccgtttttgagggattttta

SEQ ID NO: 571884 - DNA, 139 bp, Homo sapiens
gtgattgtttccatttgatgacgacgcttcccgttctcatgccttgacggtgccatggaatttgccatgggtggaatcatatggaacatgtaaccatgtagttgaggtcaatgaagggtgttattgatggctacaatat

SEQ ID NO: 571885 - DNA, 310 bp, Homo sapiens
  misc_feature (304)..(304): n is a, c, g, or t
agatcctctgtgactattgtggagaagctgtctatgtatctgaatttaaaaagccaacttttctaatatcaaactccctgctggattaattctccagtttagatccttcaccttccttttgctttaagttgtcatataatgacattgctttttctggaatcacattggagtctacagctatggctttttttcgttagacccagggacagattggaaaggtatgcctttcttacagcaaccctgcaccctacataaaagctgaattttcaatttgataaaaatgtattttgcaacaaatagtcangcagca

SEQ ID NO: 571886 - DNA, 229 bp, Homo sapiens
  misc_feature (168)..(168): n is a, c, g, or t
  misc_feature (215)..(215): n is a, c, g, or t
gaagatcgagctctttgcagacgttgtgcctaagacggccgagaactttaggcagttctgcaccggagaattcaggaaagatggggttccaataggatacaaaggaagcaccttccacagggtcataaaggatttcatgattcaagggtggagattttgttaatgganatggtactggaagtccccagtatttacccgggggccaattttgcagnatgaaaatttaaaa

SEQ ID NO: 571887 - DNA, 1024 bp, Homo sapiens
gctatattggacaggtccggcttcgcagcagaagtggtccgtgcgacctgcgattagccatagagtgccatccgcgtgatgtcgagaagcccgcatcgctccgatgactgagagctgttgccaagtgaccgcttcgtgtgaaagccgtgcgagggcgacgaaaacacagactgggtcacacctcgtataggtttctcctctcggcgcgttaaccagaagcgttgaggcctctgcgatattcttttagaataggcgcagtcattacagtgtgagaaggctgaatctgggagtagagcgctacatatggtgtacctactgggtgatctcccaggaatgtatactcccctgtgtgataaagactgatgccttgtctgcgctctttaatgaaccaaggaggacgcttgtccaggactctatgtagctggatgtcactgcagccgctcacgaatgcacgtcatacgtggggccacggccgtagatgtaattagcagcacgcaataacctgtgcgtctgttgactgtgtgaggtgttcccccctgtaaatacggtctcatagactcagaagttcacatcatgaatgccctgacagcaatattttagcgcggggggccgtgaaattaaactgagctgatctagaggctgcactgagtaatgttgcagtgctgagccgtttcacgagaaaaccaagaagccaatgcgacaccgggccccctcaaccgagactgaatgaatggtgaacagcacacgttcaggctgacaaccaattggtgtgagccaccaggaaactaaggcagaggtgacccacaatgaacgacggcgccgaagcacgacagccgggaagcggcgacaggcaagccaactaccgcgtcgggcgccaacgcctagacggaccaaccgtggccaccagccacacgaacgcaacggacagcacactcgacgacaacgctaccacacaaacacatgaacgcacacacacaagaccttactatcacactacgctgttaccccaccacccccacaaaca

SEQ ID NO: 571888 - DNA, 102 bp, Homo sapiens
gtggtgagggtcatggtgatggtgatgatgatgatgagtggggatgattatggtgatggtggtggtgatggtgattgttgtgatggttgagggtggtgaaag

SEQ ID NO: 571889 - DNA, 105 bp, Homo sapiens
tcggcccatattctgggtacagaatagactccgtctcacataaaacaaacaaaacaaaacaaaaagcacaacacaggtgattagggattacagtggaaggaactg

SEQ ID NO: 571890 - DNA, 464 bp, Homo sapiens
attactataaattacgatatttaatatggcacaattcacatcatttagaatccagcatagaccacgtttggtctatttggaatggccagtgaagggccaccttttgcatgacggattgactggccccttgactagtagaccatacttttctttcacaggactgttcctaacaaatgacaacagtgtggccaaaatcactcccacagctcccattgttgctaaggtgaaaacccttagagaggctgtatcaggcttatctgtggtgcctgaatgcgtccgtcgaatacttctctactttttttctttattagtcttgctagcggtctatcaattttgttgatcctttcaaaaaaccagctcctggattcattgatttattgaagggttttttgtgtctctatttccttcagttctgctctgattttagttatttcttgccttctgctagcttttgaatgcgtcgg

SEQ ID NO: 571891 - DNA, 438 bp, Homo sapiens
tgctccaagagagttctgcaagttcacatgtctattatgaagtctttctcaattaacagacgtcaggcccattacagcatctctgtgccattcgatgtattctgttgcacaagtcataggaatatcagctgccatagccaaaggtcgctgcaaatatggtcacataaaagtgttatccacgaccgcaataatgtctccatgcttatggacaatatgtgcacagcctgcaatgtcagtctacatgtgggtggagtttgtaagagtttcgatccatacaaggttggttcagggtgtgagggctgccgctagtaatttaatcttggatcgatcaccgatagaaatcttgaatgcgaatccagatgccacaggactgaagtacctgtgtgagcctccatgcacgtgatccagaccaataattcggtgtcctgcttgtaaaag

SEQ ID NO: 571892 - DNA, 1027 bp, Homo sapiens
gtcgcccacgcgtccggtgcaagtaggtctgcttgagcttgtgtgtgctgaagggacagccctgggtctaggggagagagtccctgagtgtgagaaccgcttccccggtccagccctcccagttcccccaggacggcattcctggtccccgacgcaaccatggctgaagaacaaccgaggtcgaatgtcgagaaggctgggcacgtgctggggccaacatggaagaactgacacatctcccagagacatgtccaagggatactgtggctcacgggagtcaccatacgcaagtaaacaccgacagacaaccaaaaggcggaccgcagacaggcaacaaagcagagcaccagagcgagagcagctaccaatcacatgccagcatggcacaagacggtgcacacacgacaacaacaagatagcaggacattgtcacgagcaggccagacagccacagtgcaccgatcccaagcgtacccccaggcgtggcagaatcatgacaccaccaggagctccaaacaccagagtgggacaggacagatcatagcgcacaagattagaagcacgtacacgtcccagagactcagaacccaggcaaaccagtgaaactcaaggaaagaaagggacacaaatgaaaagaccgtgacaggctaaagaccgaacaatagacataacagaccgacccagacagaaggagtgacacaagacgccagaagaagacggggacactcaaggaacgaacaggaaggcaccgaggtccccggcctgaaggaaccggggccaagcacacacgacagcgagagaagcagaccggatgcgcgacacggagcagcacggaggcggagatggacacaacacccgaacaccgcgcaagccagagggcggacgacagaaaaagcgacgcacagcgcaaggaccgaacgaaagacacacgtggactgaccgcacccacgcagcgagacgcgcccagcagaacgacgccaccgcgacagaccacaacaaagcacgagccgcacaccgccgccagacc

SEQ ID NO: 571893 - DNA, 152 bp, Homo sapiens
cggatcttttcgattggcgggcacttatgcacgcttaactatcttaacaagcttgaggtgccagagattgaagagttcaaatctgacaaggatgttgatgtgggataagagaattcgtctgctccccaccactaagttgcccgccaatcgaa

SEQ ID NO: 571894 - DNA, 275 bp, Homo sapiens
  misc_feature (12)..(12): n is a, c, g, or t
atctagaggatncccatgtggggcatcacgggcactgagaggaagcaatattaaggtaaattcagagctgaacccttcaaccggaaatcgatcaagggaacagagttcagaggcagcagaaacgggagttagtgaaaatgaagagaacccggtgaggattatttcagtcacaccggtaaagaatatggacccagtaaagaataaggaaattaattctgatcaggctacccagggcaacatcagcagggatgcccaacaggggggtaccgagctcg

SEQ ID NO: 571895 - DNA, 129 bp, Homo sapiens
tggccaaaaaagtgctttaatgattataaagtgtccaaaatatactgggcagaaaataagcggactctgagcgttttctctctttcaaaccctataggattattgcaggggtgtgaaagagcatgtgtg

SEQ ID NO: 571896 - DNA, 577 bp, Homo sapiens
gacctgtttcggcgagcgcacgccttgccgtcgggccgtataaatgctttggctacccacagactttcgccagatgagaccgctgtccagggtactggctcctcatctcactcgggcttatgccaaagatgtaaaatttggtgcagatgcccgagccttaatgcttcaaggtgtagaccttatagccgatgctgtggtcggtacaatggcgccaaagggaagaacagtgattattgagcagagttggggaacgtccaaagtaacaaaagatggtgtgactgttgcaaagtcaattgacttaaaagataaatacacattggagctaaacttgttcaagatggtgccaataacacaaatgaagaagctgtgtgatgcactaccaatgctactgtactggcacgctctatagccaaggaaggctctgagaagataagcacaggtgctaatcccgcggaaatcaggagaggtgtgactgttgctgttgatgctttaattgctgaacttataaagcagactagaccttggaccaccccttgaggaaattgcacacgttggtaccgatttttgtacggtgccg

SEQ ID NO: 571897 - DNA, 917 bp, Homo sapiens
tctggaatctatgaataacatcggtttctaagttatgagttgatttttaactactgggtttaggccaggcaggcccaggcctggtttcggggctggtgccgggctgcctgtctttggttttacttccttgtttttctctcaaaacaggacaagagaatgattcaacgaagaatgaaataaaaattgaaacagaatcgcagagctcatatatggaaacagaagaactttcatcaaaccaagaagatgccgtgattgtggagcaaccagaagtgattccattaacagaggacaagagaatgattcaacgaagaatgaaataaaaattgaaacagaatcgcagagctcatatatggaaacagaagaactttcatcaaaccaagaagatgccgtgattgtggagcaaccagaagtgattccattaacagaggaccaagaagaaaaaagaaggtgaaaaaggtttggatgacatacttactgcatttggatttagactcaaccacttcacatcaggtgcaagaacttccagatcctactgattgtgcaaaagatatatccatttcgatttggatttcaaatctccaggcgaggacacacctaggatgcctgggaaacagtgaaggctccagtgacctagaaaatactccaggtcctgatgttcgaactgaatagtccggttgacaaggtaaatgacgcagcagagagtccacaagaagatcactattagcatggcaccagatgaagcgacggaaccacagaaatggacttaatgacatctcagatcgcaagactttactgggtctggggactcgggaaatacagcacagcgtgagaaggtggggtgggggaaggcaccctggaagcgggaacttaccaatctccggttggtccgcttcgaaaaaaaaaacaaagggggctat

SEQ ID NO: 571898 - DNA, 291 bp, Homo sapiens
gggaaaaatttttattttatttaaaaataatacccaaaataaagagttcccccttccaaccttttgaattggaaccctataacccttgaaaactgaaagaaaactttttgcgggaaatcctttgaattgggacaacccaaaagggcctggaaaaaccgggaccgaataaaataaaatgggagggttgcctttgtaaaacaagaccgaatgaacctgattgggggggccgcaatggggggttacctggggacttcataaaaaactttgaaacaaaatggaaccctgttggaa

SEQ ID NO: 571899 - DNA, 333 bp, Homo sapiens
gcaggacagctatacgggccgcgtaaacagacagagaaacagctatagcagactgtctgtatcacaccacagtaaccctcgtatgaccggccatcgctcatccacaccccctgcagcttcaccgggcgcattctttctcataatcgcccacggtcttacatcctcattactattctgcctagcaaactcaaactaggaacgcactcacagtcgcatcataatcctctctcaaggacttcaaactctactcccactaatagctttgtgatgacttctagcaagcctcgctaacctcgcctattttacaccaaccccgccgttaggccgatctga

SEQ ID NO: 571900 - DNA, 409 bp, Homo sapiens
aaggccgagtttgtagggtgagtctagattcttgatataagtgcggggttatgcatggtggagagaataaacataagatgagtgttctagtctatagtagagcatactgacaggctgcttatgattgtggttcgtctaattactggtcatgttgttttagaacactatcaacttcagttttttctctttgtacattaatagtaaatttgtggggagatctgtcaatacactgttcattgtcgcagtttaccctcaagttttaagacccatcgatgagttaagcctgaatcggttgtaacagtgaatactccaaagtggttatattctaacttcatcattgtactgtcattgcatcatatgtatcattgctccctcattgcgtcatatgtatcattgcatatgactgtct

SEQ ID NO: 571901 - DNA, 208 bp, Homo sapiens
ctttttgtcattccccaatgcacaattgcatggataatgtttgactgggaaagaggaagggtaggaggatgcatggatgagtggctacagtggatctgctggcatgtatttgataaatagatagaagcagtcatcttgaagcaacttcaagaattgtagccttgtacccctatgagacttgtagataacagatccatggaaacattta

SEQ ID NO: 571902 - DNA, 323 bp, Homo sapiens
gggggggccccgcttcccccggggggccccccggttcaagggttgggccagccagccctgggtgggggcgctttttgggcccttggggaaaggagggcccccaaggcccccctttttccccccaaaaaaggtccccgggggtcccaggtggccggggtttgggtttttcccgggagcccccccggggggggggcccccccccccctgggaggggggggggggggggccctttctttccctttggaaaggggcccccccttgatggtttccccccaaccccccttttgggggggggggttttggtttaaaaggggggtttttta

SEQ ID NO: 571903 - DNA, 421 bp, Homo sapiens
cttgtatgaagaaattatgaactattttggttgcagacaaaaagtctcgctctatcaccaggctggagtgcaaaggcccaataattgtccactgtaacctacagctgcggagtcaagcgattcttctgcctgcagcctcctgagaagctgggactacaggcacatgccaccatgcccacgtaattttggcatcatgagaagagatagggtttgacaatgctggccataatggttgcaatctcttgacctctcgatccgcctgctttggcctctcaaagtgctgggattacaggcgtgagccaccgggcccggcccctgagggtctaatgttaatagaacagatcaacactttagatagtagccactaccataaggaggacctctgctcaaactggtatttacaatgacgtcccttatcaga

SEQ ID NO: 571904 - DNA, 900 bp, Homo sapiens
  misc_feature (500)..(500): n is a, c, g, or t
ctggggtggaaatatggtgcgcgcccggagggggcgccgtttcctatggtggaagggatgtgcgcccccccccccctgggggttgtgcaccccctggtgccagggaaggacccccagccaaaggttatagtaatggttgttttcggcgcgccgccctgtcgtcccccgcacttgcgccagctgccgctcccccttttagggagtgtttgctacctcggcgcgctgcgcttcgcgtccagcttctctcgccgcaaagcacagaatacttgggctcgagctcgcggtgagatccctcgccagccagagcactcggcaactcgctcgccgggggtgctgttggggaacgcacctcgcgcggcacgcgctctgtcataaccccgcgggtgtcttctctggacaaaaggggaccgcccgcgagccagaaccccacaccgccttcactgcacagcgcagccagtctccctcgaggtcgctgtacatctccgggccaactgcacagnggcatggctcccccacggagatgagacttcacttgcgcagagacacccctcgctggctcagtgacagccaagacacacacacaaacagattggggaggtggaaccgcaccacagcgcgcaacacacgcctcgcacggtgtctctctgtggggatagagaccggcacttggtctcggggcgacacaaacccgtgcgccacagccaccaatagacccgcctgcaagcgagggtccacgcacccccacacatgtggggaccgagataggggcactctctccgatgacacacaccagggcgacgagagtggacactagcatcactacaggctgttcaccatcacttgctctggcggcacacccccaaaaacagcacgtcccacccgtcgggaaaaacaaaacaa

SEQ ID NO: 571905 - DNA, 326 bp, Homo sapiens
cccagcccagctttgttgtgtagcacctgcttcaggcccggcggccgcggcagaccctccagcgtgtctcccgagtctggccgcttctgccgcggccgtgcctgcacatgtactggagggaagtggcgctggcacacgcaccgggtcaccttcatgctgctccgggccgccgtggaccacaccatcgggtagaatctcttgttcctgcagtcttgtgtgtcctgccacacctgtacacttcctgttcttcgaccgcggttagtctgccgtgccttgtcgtccggttactcgcctgtcatggagccctcgccgaaccgcgacaagca

SEQ ID NO: 571906 - DNA, 781 bp, Homo sapiens
ttttaaagtagagatgggatttcaccatgttgcccagcatgctctcaatgtcttgacctcgtgatccaccctcctcggccccccaaagtgctggaattacacatgtaaaccaccgtgcccactcctggagtgcattttctttttttttttttagacagagtcttgctctgtcaccaggctgagatcgtgccatgttggcactccagccgtgggcggtcaacaagaacaaaactccgtctcaaaaaaaaaaaaaaaaagaaagagaaaaccaggtgtggtggcctggtggatagcgggcctcccgtgttctcgtgaatattcacattcctgtgttacaagtcccttcccatttgttgtaccagggttttggtttgtgtgcgaccaatagaaatatgtggcagaagtgagggtattgtccacttcggaagatccgggttataaaaagactttggcgcgccaccatcttgggctcaatctctttggggcttatctctccatccccactttgggtctgggaagaaaaccagtttgccatgctcaagggcgacagttcagcggtgacaaacctttggccagcaaccctatgttgatggttgctgaccctctttaaaagagtgaaaaagccttctcagaaaggggtgtccaccagcccgggtcagggttccaaatgacagaagcccccagggaaccattctgatggcaccttatcagagatggtgagccagaactcatccagtgaagacagctcactggagggtccccaggactttgtgaactgatc

SEQ ID NO: 571907 - DNA, 224 bp, Homo sapiens
gacataaatgtgatcctataatactctactgcttatatcacctttaaacgctttgcatccttcacagggtcactgtataccagcttgatctttggattctcctctgaatagcctctcctttctgtgtacatgcctcctattcgagaccttaaggtcacccaaagagaaacattgcttaccacccacttttccttgtgctcatatttgttctctctgtctggtag

SEQ ID NO: 571908 - DNA, 843 bp, Homo sapiens
  misc_feature (72)..(72): n is a, c, g, or t
  misc_feature (76)..(76): n is a, c, g, or t
ggtaaagaatacagagctcttaatgtttctacaatgatttcagagctcttaatgttgcttagatgagggtgnctgncaagtacaatgatacgagatgccacactgggaagagatacgttcagacggactacaaatgaaaccaatggagtggacattgtcctcgtcgtggtagaagcagcgatgagatgaataagagtgctcgtcctccaccaaagatgtgttagactaggaggcaaatggagtgaatcagtgcatctataggcgcgctccaatggggtatcaggggtcgtcccggccgtctatatccccgtcttccccgtcgactccgcggaggttccatcagccacggtcggcgcgtagccgagtgctgacccgggtccgaggagctgcaggtgtgactgatgggaatgaagtggtcaaggcgccagcaggcgaactcctgggggagctaggcccaaccatcttctccgcgggatcctggacaagagcctcccagctgacattctctatgaggaccagaagtgttgcttgtgttccgtgatgtggcccctcaggctcctgtgcacttcctggtcattcctaagaagcccattcctcggattagacaggctgaagaagaagaccagcagcttctagagacaccttactcccttgttgggtcaaagcagacaggaaaggctgagggctgggaagatggatcaccgacttgtgatccaagatgggaagcttgggtgccccactgggtatcatcttgacatccatgtacttgggggccggaagtcaagtggcctcaggtgaactggcattgttaaaggaacagatctggtgttgattgaagggccc

SEQ ID NO: 571909 - DNA, 561 bp, Homo sapiens
  misc_feature (72)..(72): n is a, c, g, or t
  misc_feature (76)..(76): n is a, c, g, or t
  misc_feature (135)..(135): n is a, c, g, or t
  misc_feature (149)..(149): n is a, c, g, or t
  misc_feature (156)..(156): n is a, c, g, or t
  misc_feature (420)..(420): n is a, c, g, or t
  misc_feature (483)..(483): n is a, c, g, or t
  misc_feature (504)..(504): n is a, c, g, or t
ggtaaagaatacagagctcttaatgtttctacaatgatttcagagctcttaatgttgcttagatgagggtgnctgncaagtacaatgatttctaaggtcccagtcttgcttgtacttgacagtcaccctcatctnaagcaacactgggnaccttangaaactcattgtagaaagcacaggttttggacaaggaccaataccatgtctctaagccaactttaattgcttaaaagacatttttatttagttgaaaaatctagttttttttgtaaactgtatcaaatctgtatatgttgtaataaaacttatgctagtttattggaagtgttcaagaaataaaaatcaacttgtgtactgataaaatactctagcctgggccagagaagataatgttctttaatgttgtccaggaaaccctgngcttgctttgcccgaagcccctaaactgacacagcggacaaagttcagctttttcagagccangtgaaggagccacgtgaatgngcctagaactgtgcctagttcctgtggccaggaggttggtgactgaaacattcacac

SEQ ID NO: 571910 - DNA, 396 bp, Homo sapiens
aatactaatactctccccgagttactccctagctggaacagctaataatactgtccagtggttcgcgttctggccacatccaccaccatgatagttcgggtaacagaacaccatgttgccacactgagatagacacagacagaaagtgtgtggactgcgctgggccccagatggacgacatttggccagttggtggtactgataacttggtcactgtgtggcctagtgctcctggagaaggtggctgggttcctctgcagacattcacccagcatcaaagggctgtcaaggccgtagcatggtgtcccctggcagtccaatgtcctggccacaggaggagcaccagtgatcgacacattcgcatctagaatgtgtgctctggggcctgtctgagtg

SEQ ID NO: 571911 - DNA, 304 bp, Homo sapiens
gtttttgggttgggaagttttactggggtttgccccaaagccccccccccatgggcccctgaagtaaagataggggacccaaccattttttggggaactgtttccttgggggccaattggggtaggcttttagaagtttccagaagggttttttttttgtttaaaacaaccggttggtcttttttttttgttgataacccctttgggcagggggggggggtttgccctgttttttcctgggggtaccaaaacccccccgtcatgggcgggggttttcaaataaagcccttttgttgactcccca

SEQ ID NO: 571912 - DNA, 174 bp, Homo sapiens
atgtttaagtcaaagcatacttcatccatataagttcaaacactgatttactttgtatataattaatatttactgttttaaagtcctgccacaaatgacttgtctggtttaaatttcttcagtgccagtgcttgttacatacactaggatcctttcactttttgacatgtttat

SEQ ID NO: 571913 - DNA, 1217 bp, Homo sapiens
ctgggcgcctggggcaatgtgccctggtcataacggcgctcacgcccatgacggatccccgatgtgtttccgcacctgcctgctcatcgccatcacccgcaacccggtgttccctgctgctttatcaagattatcgaggttacacaatcagaagcttggttgagctgctgagaaggaaagtacgtctcgacccagccttatgtcgcgcgtctttctaaagagcagatgacacgcatgagtcggatgtggtcgagagcctggactgaaatctaccacacggcggacgtattgcccagatccatgagcatgccggaccttggggacaagctgcgcatgatcgtacatgggacacagaagagtccatatcagccagaccgctggcaggtggagcccgaggagccggaggcggagacacacagcacaaagccccgcaaggaacggtcacaagccggccgcaacgcaacggacggcgcgagggacgacctcgagcgcccaggcaccccggcggagctggacgatggagcccaaccctgagatcccggctgaacgtgctaccatggtggccggcaagcagaaccggtaggccccgcacggactacccaggcacacccgcaggaccgctgaacaggccctgactggccgcagaaccgagaaacacaccaacggggacaataatggaccagcaaaccacctctacaccgcaccgtccgggatgctggcccaacccgtaagcaccacgacagacaccacacagaagatgacaggcaacaactaccccccatagataccactgtcgcaggaacatgtgcccccacggctacaccgcgcggcccgcgaccacacgatgaatcagtcaaggacccgccagggaaagaacccgcagctaaccaacacgcgcgagcaccagggtccctacctgcttcaaataacaaactaaccaacacaacacagctactactacttacctactcattagcatctacaacaaacataaaccccccataaaacctcgaacacacacacttcaaattaaacacaaaacaatctatataatcaacaacaaccactaccaccaaaaccaaaacacgcagaacacacaacctcaccaatccattctaccatcctgaaaaaaatcacattagatgacagtatcgtaaatctacagcaaatagttccaactaacacagtactccctcacttcaacataaccaccaact

SEQ ID NO: 571914 - DNA, 556 bp, Homo sapiens
  misc_feature (252)..(252): n is a, c, g, or t
  misc_feature (290)..(290): n is a, c, g, or t
  misc_feature (358)..(358): n is a, c, g, or t
  misc_feature (421)..(421): n is a, c, g, or t
  misc_feature (462)..(462): n is a, c, g, or t
  misc_feature (474)..(475): n is a, c, g, or t
  misc_feature (479)..(479): n is a, c, g, or t
  misc_feature (493)..(493): n is a, c, g, or t
  misc_feature (537)..(537): n is a, c, g, or t
aatccagcaaaacattacggtacagcaatctctgagcctcatcgagatgcccccctcctcctgggagaaatatatggccacgtcttcaaaaaccacatgaccctgtgcagggtttatttctgccatcgccaggggaccctgaaggaagagggaaaccgtgagaaatgggcaacgatgggaagatcttacaggcagagttggaccaccatctcttcttcttaccctaaagcaaactgatctcaagttgattgnataaactcagctcctccgacttcactggtggctcttancagcactgtgactctagaaaagaactgaacctgctggagcttcatgctctcatctgtaaatagggtgnaagaatggctcccctcataggactcttaccggggcaaacactcgtgctcatcatatatatcanctattactggtcttggaataatgggtactatatgttttcangataaatgatgnngtanaaattcaaaactgngggggtattttaacttttaaaatttagaagagactaaaatttcntgggtggtgtaatataagc

SEQ ID NO: 571915 - DNA, 324 bp, Homo sapiens
  misc_feature (273)..(273): n is a, c, g, or t
  misc_feature (276)..(276): n is a, c, g, or t
  misc_feature (296)..(296): n is a, c, g, or t
  misc_feature (298)..(298): n is a, c, g, or t
gttcattctttgctgtttttgagaattagtacatggttgcagttttaacctacatattgttaacattgttaaatatttcatcaatttatttttgtagtttgtagttttgtttcaaggtgaagtatttggtttttgttgttgtttttttgacacaagagtctccctctgttgctgaggctggagtgtagtgctgcagtctctgtcactcaacctccgctcccgggtacaggagaactgcttgaacccgggaggtggaggttgcagtgagccganatngtgccattgcattccagctngngcaatagaatgagacatacataacgg

SEQ ID NO: 571916 - DNA, 158 bp, Homo sapiens
ctccaaatgcaactgagcagcaacccacaagcatcaaagactcactcacaacttctgaacacaaactccatggatgaagctgtttatgttgtttcctttatgtgtaacaagatgatatctgaaccagagagacttggaatgtctgactgacttctatt

SEQ ID NO: 571917 - DNA, 427 bp, Homo sapiens
ggccctgagcgagatcagcatggctacaacacatcattacctgggtaaaactaaactggctaattagcgcgcctgctgccttacttggatgtggtagccgtgaatcatgctccctctgcggaatcgaaccctgattccccgtcacccgtggtcaccatggtatgcacggcgactaccatcgaaagttgatagggcagacgttcgaatgggtcgtcgccgccacggggggcgtgcgatcggcccgaggttatctagagtcaccaaagccgccggcgcccgcccccccggccggggccggagaggggctgaccgggttggttttgatctgataaatgcacgcatcccccccgcgaagggggtcagcgcccgtcggcatgtattagctctagaattaccacagttatccaagtaggagcgcaacaccggt

SEQ ID NO: 571918 - DNA, 1206 bp, Homo sapiens
cctaccactttcgctatcttgaaaactaggacctaaagctaactcttctgaacaatgaggcacactgctattactatgcacagctgacaaagctccacgcacgaactcctttcagggcctgacactcgctctcaaactctgctcattcctgacacaaggctgactaacaacagatggaggcacaaacacattcaggcagacttccagcaagcaacggctgcaacacactgcttcagcaactcctggcttctaacgcaactacagcgacgcctaagcacacacagacacacaactcgactgactgccctgcactactgactgcttacctaaacctctcttcctacacttacaaacgcactggctctctactgccactgctactactgccccactcaacttctctcgctacgctctcagacccaactagctcctcccaagacccgcacaactcctcactacgcactacttctctatactgcctacctggcactcctactacctctccttccagcgagccctctcatccctcttgcacaggcactccttcaaaccctctcccgcacgcaactcggctctccggcacaacacctctccgcaagcaactcccacttgcaacacttctactgacttacacctctccctcccccaaccttcacttacagcaccccaccgcgcgccacacaacacactcaccccctcacttggctcacaccacaaaccccctctctctccaccacacttgctccaacacacctcacttcctcgcacggcaacctcaccgcctcttcccactaacccacaactccgcctccctctcacaagccctcactcctcacacacggcccccctctcaccactccctacccccttccacgtccttccctttccctttcctcctccccctctctccggaccccactcacccctctactccctcttgccctcgccgcaccccccgcccccactccacctcgccctctcccctcgcgcccccacgcgcagccgctctcccactcctctcgcccaccttcgccctccccttctcctcgcgccctctcacccgctcctcctcgccacccatctcccacccgcggcctgtcgctctcacgactccctcctcacgcgacccctctcccctcgcgtcgcgcccccctcgctctggcgccctctcaccacgcgcatctcgccctctcgtggctcgcccgg

SEQ ID NO: 571919 - DNA, 227 bp, Homo sapiens
ggctacatggtgggtctcgcttagcacagagcccagtgccttggccttgtttgtacatggtatacacctggtgaaagccatcagtgttctagtacctgcggcgcaaacagctgcacgtggtgcacagaaccgaggtaagtctggctgcgtggtgtcactgtgacatccactgcccagctgacttcagtggggcgctctgcacacgcagtcacacctgtggttttccc

SEQ ID NO: 571920 - DNA, 295 bp, Homo sapiens
tgactcactatgaggtagctgcaccagcaggtgacgcggctggcgcgattgggttctttcaccgccacccagttggacgcggcccacggcgcctgcacgttgccgccctgcaccaccgtcgccgcgaccagttccatggcggccgaatgccgaatccggtgccggttgcgtggcactgccaacgccgtggatgcgcaatacagcctccgggttctgccaggcaggctgtcccgacggaccgatgtccgcaacgccagcgacgatgcgcccacgcgcccggcaccggattcggcat

SEQ ID NO: 571921 - DNA, 302 bp, Homo sapiens
  misc_feature (62)..(62): n is a, c, g, or t
  misc_feature (65)..(65): n is a, c, g, or t
  misc_feature (108)..(108): n is a, c, g, or t
  misc_feature (195)..(195): n is a, c, g, or t
  misc_feature (200)..(200): n is a, c, g, or t
  misc_feature (249)..(249): n is a, c, g, or t
  misc_feature (253)..(253): n is a, c, g, or t
  misc_feature (286)..(286): n is a, c, g, or t
aggagaagacaaagaaggcagagagagagctctcggagcagattcagagggccctgcagctngtngaggagaggaagcgggcacaggaggaggccgagcgcctagagnctgaccgtatggctgcactgcgggcctaaggaggagctggagagacaggctggtggatcagataaagagccaggagcagcttggctnggaanttgcagaatacacctgccaagattgccctcctggaagaggcgcggagcnaagngaaggatgaagtttgaaagagttggcagcacangggccaaaagaagccc

SEQ ID NO: 571922 - DNA, 102 bp, Homo sapiens
cggccatgcacagttgtatcagttagtggagaacaaaacataattttatgcacatatacatgcactatataggtaaaatgtccatcatcctgtaaggtgaac

SEQ ID NO: 571923 - DNA, 117 bp, Homo sapiens
aggtggtgtggcagtaggctggcagtgcagtgtgactcaacccctagcctgagaacttccattggcagtgggtgcagccgaaaaaggcaaaaaacaaacaaaaacaaaaacaaaaat

SEQ ID NO: 571924 - DNA, 412 bp, Homo sapiens
accgccgctatccggtcaatttttacatgtcacagatactgacaaccatataaatctttaatatgccagtttctacctgaaaaagctccttctgggccaagcgcagccgctcacatctgtaatcccagcactttgggaggccaaagtgggcgaatcaccagaggttgggagtttgagaccagcctcaccaacatggagaaaccctgtctctactaaaaatgcaaaattagctgggcgtggtggcgcatgcctgtagtcccagctacttgggaggctgaggcaggagaatcgcttgaacccgggaggcggaggttgcgttgagctgaaattgcaccattgccctccagcctgggcagcaagagtgaaagtctgtctcaaaaaaagaaaaggctaagatagttcattgaaccgg

SEQ ID NO: 571925 - DNA, 244 bp, Homo sapiens
acccagcgcggaaaagtcaaaggttcatgacctacataggtcttaccattgacctaagatcaatttcaactatcatagcccagtcagggagatatgcttcctagaaaggcatctttggtcaggggattcgcctcaaggttaaggccgccattggaagatgaaaaattgcactcccttggtgtaggcaaaaaccagttcccattggtgttgttgcctataataaacactttttctttttaaaaaa

SEQ ID NO: 571926 - DNA, 88 bp, Homo sapiens
acggccgtgtattactgtgcgagagagggtatagcagcagctggtactgcctggcacttcgtcgacccctggggccagggaaccctgg

SEQ ID NO: 571927 - DNA, 165 bp, Homo sapiens
ctctgaggatctgtaggtctcttctcactgagttgtgtagtcatctacataataaatcaaagaggagcagttacatgactcatcaggcactggagatataattgctgtcatgataacagaattgaggggtacggatatttgagttatctggagaaaaacatctct

SEQ ID NO: 571928 - DNA, 275 bp, Homo sapiens
tatctagaagaatccccggtgggccctttggtgaacgaagcttagtcaaggtatggtacttgcagtgtgctggggataatcctaagagtgggcctgatttattagtcttgcatctggccttaaggatgtgcaaggttcaggaaattaagggaaaagtcacttactaagcagggtgagtcagacctagtatggtctgggtctggactccatctcttacccggtatctcagattacgttagaagggggacatggaaacgttctggtaaaggattgaa

SEQ ID NO: 571929 - DNA, 241 bp, Homo sapiens
ggggagccaatgcctagtgaactccagctgtagcccaccagtaaaaatggagggccgggaaacaaaccggcccctggtattgtcaaacccccccaggctttatttggatccccaggcaaagccaagggaaggggtgattttttgaggaaaaagtgatttttaaaaaaggacttgtcccattggggttggacccatttgcccccaaaagtatgggaatttatattattaaaaaattttttga

SEQ ID NO: 571930 - DNA, 854 bp, Homo sapiens
  misc_feature (623)..(623): n is a, c, g, or t
ggaacggcgggctgtgtgtgggtatgtgtgtgtgtatgtgtgtgcggacgcgatgctgtgcagtgtgtgtgcgcgcgcgagtgtgtggacaaggaggtggcggcagctaagttatacgatccgcaactcttggactccatatgctatatctcttctgtactcccccagatctcatccttgggttggggctagtaggtgcgattgcatatttttgcgtacctttcttcatctacagttatactaaaaatcgtcttaactagattgttggagcggttcgaggggccgtatggccgggacatggctaggaataaagcggtagcaacgtgcaggagtcacgtgagcttgagcgcaagcgagatggcaatggaggacggagtgggtgggatgaggaaggaaggattgagacccgtggtacgttgacatggagaagcgagaatccaccgcgcatgggagggatcgaccaagagcttaggtcactctgactcagatgtggccgatgtgttggtcataatgggggaaagatcagagaggccttgaatatgattgacttgtcgaaatgcatagttagaaatgtgctgaggtatggctgaacctgtgggagtgtgatagtctacgcccttggncgcgccgagcttgtgctcccagatctatcaacagtaagacatcgtttgcgtacacagaatcttggggacgctctaagtggaattgatattgagaatttgtgctcgggagcgcactttgttgggcattttccctgggactaggcaagaaaaaatcgcttcctaactattccttaattggtaaccctacgagatcctggaggttggtaagagcaaaatattaaaaagaattct

SEQ ID NO: 571931 - DNA, 574 bp, Homo sapiens
gatgcttggttttccatggtttatttgtgccacattttcttaatccagtctattattgaaggacttttaggttggttccaagtctttgctattgtgaatagtgctgcagtaaacatacgtgtgagtgtgtttttatagcagcatgatttataatcctttgggtgtatacccactaatgggatcgctgggtcaaatggtatttctagttctagatccttgaggaatggccacattgtcttccacaatggtcgaactagttaacagtcccaccaacattgtaaaagtgttcctatttatccacatcctctccagcacctgttgtttcctgcctttttaatgatcgccattctaactggtgtgagatggtatctaattgtggtttcgatctgcattcctctgatggccaatgatggatgagcattctttcatgtgtctgttggctccataaatgtcttccttttgcaaacaacatgatcttaaatttagaaaagcccagaaacttcaccaaaaactcttataacctacatatgaattttagaaaatgataggacacataataagtatgcaaaaatca

SEQ ID NO: 571932 - DNA, 385 bp, Homo sapiens
  misc_feature (1)..(1): n is a, c, g, or t
natgtggacttaataggtctgaggtgtggatagggcaatggatgttataaaaaaaaatcccaggatgattcttaaattcagacaagttgagaacctctgaactagggaatgcaaagaaacatgtcacaaagtccctatcttttggtcaccattttttatggtgtctctacactcattcttctaaagatccttttatcttacatatggcatagaaagattatttggggaagatgtacaattagctgtagtgcgtaggttacatagtgatgtcattaagatcacaggttttacattcttccctcgggagtttacatatataatgtggttttgaattattagtattattttggccatccatgaaacttcagtgtatggtcgggcttgg

SEQ ID NO: 571933 - DNA, 583 bp, Homo sapiens
tctagaggatcccaagtctactgaaattgcacacacagcatctcttatgagtgacccccaatggattgctgtgcgcaggaggagacccgcattgttaccactcaggctgccaagtggcccacacagtctctacctttcctggggagctacggagcaggctctgggtttggcattttgcttctgtccctcgagtgaaatgtgcctctgcttcatttctggaggatcgggtttgtgatttttgtgattctgctttagcccaggattcgaggggtcatgtccacatttgtaggccatccagggagcagagagaaacttttagggccgtgataaagacaagccaagtggaaaatagcctgtgccctcattggcacacctggtgtctttatttccattagccctgattgatcaagcgttgctggtctgtgggcacttcacgctcccagagagaccagattggagctgtcctgttgaatctgcctgtaccagatcatcactggagagtgggagggggcgtcttgttagattcctaggtaacccctggccgcatttctaacatatcactttccagtatttcccaagaggc

SEQ ID NO: 571934 - DNA, 292 bp, Homo sapiens
  misc_feature (131)..(131): n is a, c, g, or t
  misc_feature (271)..(271): n is a, c, g, or t
ggtcacggcgccccgaaccctcctccttgctgctctggggggcagtggcttgaccgagacctgggctggctcccactccatgaggtatttccacacctccgtgtcccggcccggcccggggaagccccgtntcatctcagtgggctacgtggacgacacccagttcgtgaggttcgacagcgacgccgcgagtccgaggacggagccccgggcgccttgggatagagcaggaggggccggagtatttggggaccgggagacacagatcttncaagaccaacacacagattta

SEQ ID NO: 571935 - DNA, 242 bp, Homo sapiens
  misc_feature (162)..(162): n is a, c, g, or t
gttgcggaccataggcggtctggtcaggatcaacaactgtagatgaaaatattcggaaaaagaaattgcacctgtactgagcgtgtacagatcttttttctgtcattattccctaaagaaaacaatacaacaactatttatacaacatttacattgtatganggtattataagacaatctagaagatgatttaacagcgtacagcgatgatgtacgcaaggtttataggaaatactaacagt

SEQ ID NO: 571936 - DNA, 770 bp, Homo sapiens
  misc_feature (15)..(15): n is a, c, g, or t
  misc_feature (195)..(195): n is a, c, g, or t
  misc_feature (214)..(214): n is a, c, g, or t
  misc_feature (235)..(235): n is a, c, g, or t
  misc_feature (351)..(351): n is a, c, g, or t
  misc_feature (402)..(402): n is a, c, g, or t
  misc_feature (511)..(511): n is a, c, g, or t
  misc_feature (562)..(562): n is a, c, g, or t
  misc_feature (608)..(608): n is a, c, g, or t
  misc_feature (615)..(615): n is a, c, g, or t
  misc_feature (704)..(704): n is a, c, g, or t
  misc_feature (744)..(744): n is a, c, g, or t
ccgcctcccaggttnaagcgattctctgtctcagcctccctagtagctgggattacaggcgagtgtgaccatgcctggctaatttttgtatttttagtagagatggggtttcaccatgttggacaagctggtctcgaactcctgggctcgagtaatccacctgcctcggtctcccaaagttctgggtttacaggnttgagccaccatgactgtnctggcttattttttaaataanagctttattgaagaataatttatatataaaaaatttacccttttggaagtccaagccatagcaatcaggcaagagaaagaaataaaaagcatgcatataggaaaaaaaataaaaanatctctgtggggtaaaaaaaaaaagatcggattgttactgtgtctttgtanaaaaggaagatataaggaactccattttgatctgtactaagaaaaattgtttctgctttgagatgctgttaacctgtaactttagtcccaaccctgtgctcacagaaanatgtgctgtatttgaatcaaagttcaatggatttagggctgtgcgggctgngccttgttaacaatatgtttgcacggatatgcttagtaaaagtcanccgccancctccattctcgattaaacagggacacaatgcactgcggaaagccgcagaaccctctgcccaagaaagcctgggaattgtccaaggttnccccaactgagacagcctgagatatggcctcgtgggaaangaaagaccttaccatccccagcccga

SEQ ID NO: 571937 - DNA, 677 bp, Homo sapiens
  misc_feature (4)..(4): n is a, c, g, or t
  misc_feature (10)..(10): n is a, c, g, or t
  misc_feature (56)..(56): n is a, c, g, or t
  misc_feature (80)..(80): n is a, c, g, or t
  misc_feature (89)..(90): n is a, c, g, or t
  misc_feature (96)..(96): n is a, c, g, or t
  misc_feature (102)..(102): n is a, c, g, or t
  misc_feature (105)..(105): n is a, c, g, or t
  misc_feature (121)..(123): n is a, c, g, or t
  misc_feature (125)..(126): n is a, c, g, or t
  misc_feature (132)..(133): n is a, c, g, or t
  misc_feature (135)..(135): n is a, c, g, or t
  misc_feature (137)..(138): n is a, c, g, or t
  misc_feature (149)..(150): n is a, c, g, or t
  misc_feature (153)..(153): n is a, c, g, or t
  misc_feature (168)..(169): n is a, c, g, or t
  misc_feature (174)..(176): n is a, c, g, or t
  misc_feature (181)..(182): n is a, c, g, or t
  misc_feature (189)..(189): n is a, c, g, or t
  misc_feature (191)..(191): n is a, c, g, or t
  misc_feature (197)..(197): n is a, c, g, or t
  misc_feature (199)..(199): n is a, c, g, or t
  misc_feature (206)..(206): n is a, c, g, or t
  misc_feature (223)..(223): n is a, c, g, or t
  misc_feature (234)..(234): n is a, c, g, or t
  misc_feature (238)..(238): n is a, c, g, or t
  misc_feature (284)..(286): n is a, c, g, or t
  misc_feature (308)..(309): n is a, c, g, or t
  misc_feature (321)..(321): n is a, c, g, or t
  misc_feature (327)..(328): n is a, c, g, or t
  misc_feature (332)..(333): n is a, c, g, or t
  misc_feature (338)..(338): n is a, c, g, or t
  misc_feature (340)..(340): n is a, c, g, or t
  misc_feature (348)..(348): n is a, c, g, or t
  misc_feature (355)..(355): n is a, c, g, or t
  misc_feature (360)..(361): n is a, c, g, or t
  misc_feature (364)..(364): n is a, c, g, or t
  misc_feature (367)..(367): n is a, c, g, or t
  misc_feature (374)..(374): n is a, c, g, or t
  misc_feature (394)..(395): n is a, c, g, or t
  misc_feature (403)..(404): n is a, c, g, or t
  misc_feature (411)..(411): n is a, c, g, or t
  misc_feature (413)..(413): n is a, c, g, or t
  misc_feature (416)..(416): n is a, c, g, or t
  misc_feature (437)..(437): n is a, c, g, or t
  misc_feature (439)..(439): n is a, c, g, or t
  misc_feature (442)..(443): n is a, c, g, or t
  misc_feature (449)..(449): n is a, c, g, or t
  misc_feature (461)..(461): n is a, c, g, or t
  misc_feature (468)..(468): n is a, c, g, or t
  misc_feature (481)..(481): n is a, c, g, or t
  misc_feature (487)..(487): n is a, c, g, or t
  misc_feature (489)..(489): n is a, c, g, or t
  misc_feature (501)..(501): n is a, c, g, or t
  misc_feature (516)..(516): n is a, c, g, or t
  misc_feature (524)..(525): n is a, c, g, or t
  misc_feature (528)..(528): n is a, c, g, or t
  misc_feature (535)..(535): n is a, c, g, or t
  misc_feature (538)..(538): n is a, c, g, or t
  misc_feature (544)..(544): n is a, c, g, or t
  misc_feature (550)..(550): n is a, c, g, or t
  misc_feature (561)..(561): n is a, c, g, or t
  misc_feature (575)..(575): n is a, c, g, or t
  misc_feature (580)..(580): n is a, c, g, or t
  misc_feature (590)..(590): n is a, c, g, or t
  misc_feature (595)..(595): n is a, c, g, or t
  misc_feature (599)..(599): n is a, c, g, or t
  misc_feature (613)..(613): n is a, c, g, or t
  misc_feature (631)..(631): n is a, c, g, or t
agcnagcacntggtgccccggcgggtcgtgcggcgcggcgctcggcgagagctggnggtcaccatggcaatgcgggagcnggtggaggnngaatgngggggngcnaacccgctcatgaagnnngnngggganntnanncaggacaaggnnctnggggtagtgaggganngaggnnnggggnngggggcncnggagcncnggtgggnggagggagcggccaagngggggggaggngggngggaagaggagggggggggggaaggggggcaggagcagaagggacnnngggggggcggggggcgggaganngggaagagggangagggnngggnngagangnaggagagngagcagngatanngtngcnatgcgtncctagagagcaccgtggtgnngcagacgnngcccggngngtnagaatgtgcgcccaggcaggngnggnncagcgngtagagtcgtgntgagtgnactgcatgtaggngaagtnanacgtacgtgcgnccaataaggcagcgngtcaaggnncanaccccgnttngtgtgncccgtnccgcgtggcgnaggaagagggtgancaagnagaggagaancgtgngcgnggagaaccgtaggnaacagccaccgagtgcgnggtgtagtaagagcagccgtaggaggagtgtcagcacacggccagg

SEQ ID NO: 571938 - DNA, 110 bp, Homo sapiens
taaagggatggccgcgcaggccttgcaggaccgctggggaggatgtgtaacgtaaagagccaggctgatgaggaaggtcatgagtcctttgggtataagcgggagttggg

SEQ ID NO: 571939 - DNA, 153 bp, Homo sapiens
tagagggtataagacaggctgaggagcgacgtatctgtgctgaggagcatgcttgtaacccaactgaggaatcacacctgtcccccagtctgaggagcatgcctgtcccccggcctgaggaatcgcatctgtcccctgaagcttgacgaagcc

SEQ ID NO: 571940 - DNA, 382 bp, Homo sapiens
taaagcacatcaatggtcagtctatgtcttatgttaattatgaggactaaaccctgatttttttttatcttgcccaaattcctatctaagcggtctgggagtcatgcccacagatgggttttatttaaccctgtatatcatgatttactttccaacctgactctggcataacattaggagagaaagaagaacatcaaaatattttaccctgaaacacgtttctttgccatgttatgatggccctgcaaagctgttctttgtggggaaaactttgcatctgtaaagaatctgtattaacacagctagaagatctttttcttccagaccctcccaatcctaaagagattaactaagatctgaataggaaacatttgtcacctat

SEQ ID NO: 571941 - DNA, 1276 bp, Homo sapiens
  misc_feature (256)..(256): n is a, c, g, or t
  misc_feature (658)..(658): n is a, c, g, or t
  misc_feature (893)..(893): n is a, c, g, or t
gcgacctcctgctactgataacacgagtcccttgtcattgagcttcatcgatgtctatgcatcgcgacgagtaaaacgggtacatctgagacgcgctagtagtgagccattcacggcgacctatgcggccatgttgccagatcgatgcccactacgtaatgcttagcattgagggcagtgcaatcgagaccgtgggagaggcaggctcgcaagtgaccggcgccgattgtcgaagacgaagagaacgagaacgagncaggagacgcacgttatgccatcgttctggccactacgtgcctccgccgctcgccagaagtcgtactaccgacgtgcacgtcaggggcgtggttgttggcatcgcggaggcttcttgagaggctgttaagacgcactgttgaagcggaaccgattttcgcggcgctaataggtcgaagcgactgccacggtctatagggaattgctaatgtcgactcaaaaataactacgaggttcttgaccacgaagcaattcgagagtcgagtgtggcccccactagtccattctcgcgcctttgagttcaccttattttcagcgaaggacactcagcaggtctcctcagattacggcataagagggatgtttactaggggatagagccgggttgtattagcaagtgtcnagagaccaaaagtgtcaaaagtgccatctcataagggctttctctacaagaccaattgtctccggtctatcatgtttggtccacgagaaaacgctgtgaagaaagcaagcagtgaatactgggggtggagtccccgatgaatctcctaaacgtgtttcgcagttgagaacaaggcacgaccgtggtgatcttggggccggatgccgtttgcgcttgcggctcgcagtaacggcanattgcagccaggcggttggccctcgaggtgtcgttcccttgggccccgtggcctcccttgcgggcaacttcattccgcggaggagggacggctatcgcgtggggttttagccccgtttctacatttgggagtcctcctgtgcgtaggaaacgaagccaagcttggcccttgggaaaacctgtagggggtcttctaatagggcttccgaggacactggcgcaattttccttttggcgaagaacatctcccccataggcccaaaggcaggagcccccttttaccatgggttaccttttttctcaccgcgaattacattggcgacgcacgataacgcggatggcccccgaaatacgtgtagtggtcctcgccaccgggcggcggga

SEQ ID NO: 571942 - DNA, 374 bp, Homo sapiens
gcacagctctccagtctgaagtcatacgacactattcaacaacaggccattaagcagtatgttgctctgcctcttggacttggatgtattgggaaatccatcttggtttaattagagaatttgctgaaggtgtagaagcatttctttactgaaccttaccagggagccatccaggatcctgaagagtttgtggaaggaatggcactaggacttaaggcactagttggtggagctgttggtggattggctggtgctgtctccaaaattcaccggtgctatggctaagggggtagcagctatgaccgatatgaagactaccaaactggaagagatgcggatcgccatggagacatactaagatgaggcgcattgtc

SEQ ID NO: 571943 - DNA, 156 bp, Homo sapiens
atgggtatcgaggctgagtgagggtgtcaggatgagtgagggtgcagggtgaggagtgagggtgtcaggatgagtgagtgagggagtcccggatgaggagtgagggtgtccagggtgaggagtgcgggtgtcagggtgacggagtgagcggtgtcc

SEQ ID NO: 571944 - DNA, 271 bp, Homo sapiens
atggtggggagagggtataagtatcgcggaatggaccttcctggtgtgctgagagtgtgaacctgctcatgtcccacaagggcaggtgctgagtgccatgttcggcgggtgtgataagagctacctgagtggatgcctgaatgcggttgggatgaatgacaagattgtattgaaagcagggcaaaggcacagctgatgaaacaagcaagagcgggaagcaatcaattgccattgatgactgcccttccacagtgtgtgcgactcacagttg

SEQ ID NO: 571945 - DNA, 132 bp, Homo sapiens
  misc_feature (43)..(43): n is a, c, g, or t
attcccccccaaggggaaatttaagaatggcccccctttattnctccaaacaatgctaattccaggaaaaatcttgggacaaaaatttccaaacaaatgggggtgtgtgaaaaaaatttaaaagtatggcca

SEQ ID NO: 571946 - DNA, 90 bp, Homo sapiens
tcaagccgttgaccaattacagttcggctgttgactgagaagtttgtggtgggaaaacgcttgccagactttctttgcatttgaacaact

SEQ ID NO: 571947 - DNA, 188 bp, Homo sapiens
gtgggtgactctagaggacctccaaacaccgcaatctggaatctttaagcttgacaggtcatagatagagaatttaacggcacaggtatggtggcatcacgcctagtagttcctaacaatttggaaggccaaggcgggtggatcacgaggtcaggagatcagagaccatcctgagattgcggtgtttg

SEQ ID NO: 571948 - DNA, 2807 bp, Homo sapiens
ggcacgagggccggtcgttcggacgtcttgcctgtcgctggaggagaggtccgggctctccaggaaggtggctgcggcgacaaaatgaagatattcgtgggcaacgtcgacggggcggatacgactccggaggagctggcagccctctttgcgccctacggcacggtcatgagctgcgccgtcatgaaacagttcgccttcgtgcacatgcgcgagaacgcgggcgcgctgcgcgccatcgaagccctgcacggccacgagctgcggccggggcgcgcgctcgtggtggagatgtcgcgcccaaggcctcttaatacttggaagattttcgtgggcaatgtgtcggctgcatgcacgagccaggaactgcgcagcctcttcgagcgccgcggacgcgtcatcgagtgtgacgtggtgaaagactacgcgtttgttcacatggagaaggaagcagatgccaaagccgcaatcgcgcagctcaacggcaaagaagtgaagggcaagcgcatcaacgtggaactctccaccaagggtcagaagaaggggcctggcctggctgtccagtctggggacaagaccaagaaaccaggggctggggatacggccttccctggaactggtggcttctctgccaccttcgactaccagcaggcttttggcaacagcactggtggctttgatgggcaagcccgtcagcccacaccacccttctttggtcgcgaccgcagccctctgcgccgttcacctccccgagcctcttatgtggctcctctgacggcccagccagctacctaccgggcccagccgtccgtgtcactgggagctgcctacagggcccagccttctgcctctttgggtgttggctatcggactcagcccatgacagcccaggcagcctcttaccgcgctcagccctctgtctcccttggggcaccatacaggggccagctggctagtcctagctcccagtctgctgcagcttcttcactcggcccatatggtggagcccagccctcagcctcggccctttcctcctatgggggtcaggcagctgcagcttcttcgctcaactcctatggggctcagggttcctcccttgcctcctatggtaaccagccatcctcttacggcgcccaggctgcctcttcctatggggttcgtgcagctgcttcttcctacaacacccagggagcagcttcctccttaggctcctacggggctcaggcagcctcctatggggcccagtctgcagcctcctcactagcttatggagcccaggcagcttcatataatgcccagccctcggcctcttacaatgcccagtctgccccatatgctgcacagcaggctgcttcctactcttcccaacctgctgcctatgtggcacagccagccacagctgctgcctatgccagccagccagcagcctacgccgcacaagccactaccccaatggctggctcctatggggcccagccggttgtgcagacccagctgaatagttacggggcccaagcatcaatgggcctttcaggctcctatggggctcagtcggctgctgcggccactggctcctatggtgccgcagcagcctacggggcccaaccttctgccaccctggcagctccttaccgcactcagtcatcagcctcattggctgcttcctatgctgcccagcagcatccccaggctgctgcctcctaccgcggccagccaggcaatgcctacgatggggcaggtcagccgtctgcagcctacctgtccatgtcccagggggccgttgccaacgccaacagcaccccgccgccctatgagcgtacccgcctctccccaccccgggccagctacgacgatccctacaaaaaggctgtcgccatgtcgaaaaggtatggttccgaccggcgtttagccgagctctctgattaccgccgtttatcagagtcgcagctttcgttccgccgctcgccgacaaagtcctcgctggattaccgtcgcctgcccgatgcccattccgattacgcacgctattcgggctcctataatgattacctgcgggcggctcagatgcactctggctaccagcgccgcatgtagggccatcctgggatggggcaccacagggagggagggagaaaacaggtgggtagggttacagatccaggttataactactctggcccatacctttcctggttgtggtttttcatgccctctaccatgtgggccttccccaggagatgatcctgttaagtgttcggcagtaacctactttgttccttcgcctcagcagcaaatcttgctactggctctagatctgcggtttcccctctaccctgcctcccgtctccccagaatgggaatttcttttatgtttttatttttttcctggctcccttttatttttgtgcgcgatatttaaggtcgtctggatggggaagcaacctgcagctgaggtcgccggcgcctttttctttttagatgggaaggaggccaggaaagggtcagcttaaccatttcctatgtgccaagctgtgccagcagtccagggtaccctgactgtccctctgtagactgttgagacgtccagggtaccctgactgtccctctgtagactgttgagactgagttcctgttgggacagtcagttggtatgtatccaagtccctgctgaccactaatgttctagctgatggtgagcggcacagtcccacttccccatctccccaagtaggtggtgttagaaaaccttaattttttttcccttttgtatggactacaaataaaacttggggcaatttgcagtttgg

SEQ ID NO: 571949 - DNA, 884 bp, Homo sapiens
ctggagaagggcgtactccaaatagaattctcggagcatggggaggtgcccaaggccatgtacgctgcatgtcgcactaagtgtgttctccttgtttgccaagcttgggctcatcatcatcataggtggcatgtacctggctctggccagtgtgctaggcactcctcagcaggcttgacgctggcggatttgcttccacgatcctcatggagagtacgagtagtctgtgcggcaacgcagaggccaccggccgatcgtaaatttggcaacagtcgccgaggatcggaatccgagcgggcttctagaaagtgccattggtagtgagaagggaggaagggggcctgcttggtgtgatagctggtgcttctcgccatgtcgatgtgttagccgcgactgtaagaactatacctcccgtcagagttggatcgttcccctaccacagcaataccctggagacacggggtaaaggaaatggcctagttcgagcctgaaacgtgcatggcgggggttctaggcgagtatggcctcgtcaaggctttaacctctagacaagcgaaggcacatttgttgcacgagcgcagcgcactggaaatccaccctcgaagctgccgctacgctggctggatgtgcaagtgctggcctgtggtgctgttctgacaaaggtggcataaagcaccattcggtggccagcggagtctagcaaggtacccacagggtctggtgcatgtgacttgtggtgcgagtcttcaagcagccacctgtggctgccctagcgcatgaaactgctaatatcgatgtggagggcccagtcacccgatcctggaggtcagtgtcctctgtactcaacagggcctctctcccgtctgttcagtaaaacgaaactg

SEQ ID NO: 571950 - DNA, 122 bp, Homo sapiens
tcatacatatcctgatgaaatgcaaatataatcacctcacctcaacattccccaatgtcttagctcattcattaaaattaactaagtccaaaatctcaactaaatatcaaaataaatatggg

SEQ ID NO: 571951 - DNA, 2766 bp, Homo sapiens
ggcacgagggccggtcgttcggacgtcttgcctgtcgctggaggagaggtccgggctctccaggaaggtggctgcggcgacaaaatgaagatattcgtgggcaacgtcgacggggcggatacgactccggaggagctggcagccctctttgcgccctacggcacggtcatgagctgcgccgtcatgaaacagttcgccttcgtgcacatgcgcgagaacgcgggcgcgctgcgcgccatcgaagccctgcacggccacgagctgcggccggggcgcgcgctcgtggtggagatgtcgcgcccaaggcctcttaatacttggaagattttcgtgggcaatgtgtcggctgcatgcacgagccaggaactgcgcagcctcttcgagcgccgcggacgcgtcatcgagtgtgacgtggtgaaagactacgcgtttgttcacatggagaaggaagcagatgccaaagccgcaatcgcgcagctcaacggcaaagaagtgaagggcaagcgcatcaacgtggaactctccaccaagggtcagaagaaggggcctggcctggctgtccagtctggggacaagaccaagaaaccaggggctggggatacggccttccctggaactggtggcttctctgccaccttcgactaccagcaggcttttggcaacagcactggtggctttgatgggcaagcccgtcagcccacaccacccttctttggtcgcgaccgcagccctctgcgccgttcacctccccgagcctcttatgtggctcctctgacggcccagccagctacctaccgggcccagccgtccgtgtcactgggagctgcctacagggcccagccttctgcctctttgggtgttggctatcggactcagcccatgacagcccaggcagcctcttaccgcgctcagccctctgtctcccttggggcaccatacaggggccagctggctagtcctagctcccagtctgctgcagcttcttcactcggcccatatggtggagcccagccctcagcctcggccctttcctcctatgggggtcaggcagctgcagcttcttcgctcaactcctatggggctcagggttcctcccttgcctcctatggtaaccagccatcctcttacggcgcccaggctgcctcttcctatggggttcgtgcagctgcttcttcctacaacacccagggagcagcttcctccttaggctcctacggggctcaggcagcctcctatggggcccagtctgcagcctcctcactagcttatggagcccaggcagcttcatataatgcccagccctcggcctcttacaatgcccagtctgccccatatgctgcacagcaggctgcttcctactcttcccaacctgctgcctatgtggcacagccagccacagctgctgcctatgccagccagccagcagcctacgccgcacaagccactaccccaatggctggctcctatggggcccagccggttgtgcagacccagctgaatagttacggggcccaagcatcaatgggcctttcaggctcctatggggctcagtcggctgctgcggccactggctcctatggtgccgcagcagcctacggggcccaaccttctgccaccctggcagctccttaccgcactcagtcatcagcctcattggctgcttcctatgctgcccagcagcatccccaggctgctgcctcctaccgcggccagccaggcaatgcctacgatggggcaggtcagccgtctgcagcctacctgtccatgtcccagggggccgttgccaacgccaacagcaccccgccgccctatgagcgtacccgcctctccccaccccgggccagctacgacgatccctacaaaaaggctgtcgccatgtcgaaaaggtatggttccgaccggcgtttagccgagctctctgattaccgccgtttatcagagtcgcagctttcgttccgccgctcgccgacaaagtcctcgctggattaccgtcgcctgcccgatgcccattccgattacgcacgctattcgggctcctataatgattacctgcgggcggctcagatgcactctggctaccagcgccgcatgtagggccatcctgggatggggcaccacagggagggagggagaaaacaggtgggtagggttacagatccaggttataactactctggcccatacctttcctggttgtggtttttcatgccctctaccatgtgggccttccccaggagatgatcctgttaagtgttcggcagtaacctactttgttccttcgcctcagcagcaaatcttgctactggctctagatctgcggtttcccctctaccctgcctcccgtctccccagaatgggaatttcttttatgtttttatttttttcctggctcccttttatttttgtgcgcgatatttaaggtcgtctggatggggaagcaacctgcagctgaggtcgccggcgcctttttctttttagatgggaaggaggccaggaaagggtcagcttaaccatttcctatgtgccaagctgtgccagcagtccagggtaccctgactgtccctctgtagactgttgagactgagttcctgttgggacagtcagttggtatgtatccaagtccctgctgaccactaatgttctagctgatggtgagcggcacagtcccacttccccatctccccaagtaggtggtgttagaaaaccttaattttttttcccttttgtatggactacaaataaaacttggggcaatttgcagtttgg

SEQ ID NO: 571952 - DNA, 195 bp, Homo sapiens
  misc_feature (57)..(57): n is a, c, g, or t
  misc_feature (88)..(88): n is a, c, g, or t
  misc_feature (120)..(120): n is a, c, g, or t
  misc_feature (151)..(151): n is a, c, g, or t
  misc_feature (177)..(177): n is a, c, g, or t
  misc_feature (183)..(183): n is a, c, g, or t
tacctgggcactaactcaacaggccctgcacccatggcccctccaagagccccaggnccctgagcaagcaggctctggcagcagcacnccatggaggtgcaggaaggctatggctttggntcaggagatgatccctactcaagtgcagagncccatgtgtcaggtgtgaaacgggtnccgctnaggtgaggggcg

SEQ ID NO: 571953 - DNA, 774 bp, Homo sapiens
catacactctccgcgcccgtctccgtgctgtcctcccgttcctgctgccctgccctgccaccatgacggaacaggccatctccttacgccaaagacttacttgtgccggaggcatcagccgccgccatctccacagactgtgcctgtgtgctccagatctgagctgtggtcaatgctgctgctgcagtgtccatgcactgccagcaatgcagatctgcctgccgacaatgcagtacaatggtgcatcgtggacttgcatttgtcctgcatccccaagtgatgcatgtggctgtgcttgtccttctggagtgtgtgcaaccttgccaacctgtcattctgctacttccccactcaatgccctcaacttctgccttcaatgtgataatgtacaacgcatgatcttcctgtggtgtgtgcgtggacaatgcacactgcagtttcttggagtgtactattgctgtggcaaaccttggcctcctgtgcctggtgctggcactgggctgcagaactcacctactgctatcgttgtaccctgcttggatttctgccagaaacccgcactggcagcgtgaccgtgtggaaatgttcatgtgcacatgagctgcgatgttcctgcaggcctggtcacgacttgcctggatgaagatcaccaaagtaccgacgggcatctgtggcctgtacccatggcctccagtgtctccgtgcatgtggcatcatcatctaccgggcggctacttcggcgtgtacatccgccatggcatgtacccgaaccaa

SEQ ID NO: 571954 - DNA, 359 bp, Homo sapiens
ggtcgacgtggcatgccgagcctagcgcgccggagtggtggggcaaagaccttttggttacttttggggcgtttgcaaaagtgacccgctgtaagagccacccctttcaaggtcttggtttaaaatcccctaaccaatccagtcaggacgacgaaactatgtgggaaaaggttttagaacggtttgaaaaacaggctccggccagcgtcatgaccaagttgatattagagcaggcagtagatgccgcttgggttgacaaggtgttcgatgatcaccgccaacggcagtactcacgtgagcttttgttttcaaccgttgttgagctgatgtcccttgtttcattgggcttgagggtcgac

SEQ ID NO: 571955 - DNA, 333 bp, Homo sapiens
  misc_feature (4)..(4): n is a, c, g, or t
  misc_feature (56)..(56): n is a, c, g, or t
  misc_feature (130)..(130): n is a, c, g, or t
  misc_feature (234)..(234): n is a, c, g, or t
caantatgataaaacatgtaacaacatttgcccttttttttttttgacagagcaanaccctgtcttcccaagaaaaaaaaaaggggctgggattggtggctcatgcctgtaatcccagcactttgggaantcgtggtgggcaaactgcttgagcacaggagttaaagaccaccctgggcaacgtggcaaaaccccgtctctacaataaatacaaaaatgagctgggtgtggtancgtgcatctgtaccccagatactcaggaggctgaggttgggaagattgcttgagcccagtgggtggaggctgcagtgagccaagattctgccactaccc

SEQ ID NO: 571956 - DNA, 289 bp, Homo sapiens
gccgcgcgaacggtagccgcgaactggtcatgaaagcggctgtaaatggcgttggcgcggatggccatgggactgtcgagaaacaccgcctgctgtggcaggcggccttcctgatagaagcggcctaggtaatagataaggtcctgggtgcggccgacggcgaaggaggggatcagcacgttgccgccttccttgtgagcctgctgcagaatgtcggccagctcctccagggtttcgtcactggggcgatgatcacggtcgccgtaggtcgactccatcagcagtacgt

SEQ ID NO: 571957 - DNA, 203 bp, Homo sapiens
cggcacgaggacagctgctgagcctgcctttccctctcacccacttcggttgtgggcttgtccctttgtttgcctgtacattgacacgtctgtatggtccagtcgtgcctgtgtgattgtttcttgttgggggggtaattgaaactgtccctggcaaccttcccagtctctccctgcatgttacctatatgacgtggccttta

SEQ ID NO: 571958 - DNA, 372 bp, Homo sapiens
  misc_feature (22)..(22): n is a, c, g, or t
ttcgggggcccaaaaagctcanaactgttcgagtcccaaatgaataggatttttgaataagagtgggggttgattagctaacccttggtttgtgttttttgtagattgccacccaaagaggccttttaaaaggagacggggttttgccctttcgcccgggctggagtgcaagtggctcgtttttggctccctgaatcctttggggttcaggtgttcctctcccctcagggtcctgaggggctggggctataggggtcccccccccctgtttgttttgtttttttttttaattttagtaaagatgggggtcttgttttgttgcccagactggtttgcaactcctgggctctagcgataaccctccctttccta

SEQ ID NO: 571959 - DNA, 116 bp, Homo sapiens
  misc_feature (26)..(26): n is a, c, g, or t
ctgtttctcatggtctcctgtctgtntctctctctctcccctctttctctctcctcgctctttctcatcccctccatttctgtgtcaatctcaatccatttatatcggtggccact

SEQ ID NO: 571960 - DNA, 561 bp, Homo sapiens
aatgtctcgtccatacctgaacgcacactgagaacagaaagatgttcactacaataagtgtaacagaaacgctattttctttttttaaaaagacataagaacaaagcattgtggcatgaagccatttaatataaactgccgcacacttaagctatttttttttttgagacagagtctctctgtagcccaggctggagtacagtggcgtaatcccagctcactgcaacctccgcctcccaggcccaatgattctcatgcctcagcctcctgagcagctgggaccacaggtgaatgccatcacgctcagctaatttctgtatttgtagtagagacgggggttccacaatgttggccagccctgtcttgagctactgacctcaagtgatccacctgcctcggcctcccaaagtgctggcattacaggcatgagccactgcacccagcctatgaacagactattacgggtgatttctagtgaggctccaaaagaaaagaggagatttgaaatcctcaaccagaatgttggtaaaactgtgaacagtaaagctattcttatgaggt

SEQ ID NO: 571961 - DNA, 528 bp, Homo sapiens
  misc_feature (521)..(521): n is a, c, g, or t
ggtagatcgataaaccccggatcaacctcaccacctcttgtttagcttagccacacccccaggggaaacagctagtgtttaaccttttagcaataaactgaaagtttaactacgtctatactacccccagggtggggtcaatttctgtgccagccaccgcgtgtcacacagattaacccaagttctatagaacgcgggcgttaaagagttgttttagattcacccccttccccaattaaaggctaaaacttcaccttgagtttgtaaaacaactccagtttgacacaaaattagactacgaaagttggttttaacattatctgaacacacaattagctaagacccaaacggggattagataccccattatgcttagccttaaacctcaacagttaattcaacaaaattgttcgccagaacattaggagccacagtttaaaattcaaaggacctggcggtgcttcatatccctctagaggagcctgttctgtattcgataaaccccgcaagtcaaaagaaantcgagct

SEQ ID NO: 571962 - DNA, 109 bp, Homo sapiens
  misc_feature (33)..(33): n is a, c, g, or t
  misc_feature (61)..(61): n is a, c, g, or t
  misc_feature (106)..(106): n is a, c, g, or t
ccagaacagtgcaatatgtgcttagatccttantcatcgatacaatcatttacatataatngtaaagatgaacatgtgctggcacagctagggtttacatactctntgg

SEQ ID NO: 571963 - DNA, 589 bp, Homo sapiens
  misc_feature (1)..(1): n is a, c, g, or t
  misc_feature (51)..(51): n is a, c, g, or t
  misc_feature (75)..(76): n is a, c, g, or t
  misc_feature (294)..(294): n is a, c, g, or t
  misc_feature (309)..(309): n is a, c, g, or t
  misc_feature (389)..(389): n is a, c, g, or t
  misc_feature (460)..(460): n is a, c, g, or t
  misc_feature (474)..(474): n is a, c, g, or t
  misc_feature (483)..(483): n is a, c, g, or t
  misc_feature (520)..(520): n is a, c, g, or t
  misc_feature (553)..(553): n is a, c, g, or t
  misc_feature (588)..(588): n is a, c, g, or t
naagagaagagctctctctactgcagagagaggggtccaagagaaatggantgctggttccgcagtggaatgcanngcgtttcatagatgagcttgaggaggcagtggctgatttacataggatgcaaaagattggttgaaccaggtgtgtcatttgcatagggcaccaaaaactgtttagggctaggtgtgtcatttgcatagggcatgaaaaagctggccaccccacactcatcttttattatgcagctggttctccacctgggccagcggccatgtttacctggttttccnttactggtaacatgntggtggcaaaagaaaaaggggaagagtggaagcctcccatgttaaaacataacctgggccctttaccgtagccccttttnctacctgggcaatagcctggccgggtggttcaacccggtggcaaagcctttcccaagcttttccttttatncttaatggtcctgncaggctttngaattttttccagaactggctccttttggtttaaaanaaaaaaaaggaaatttaatttggggggccttgncttttttggttaaaaaaggggaaattcctggttgng

SEQ ID NO: 571964 - DNA, 320 bp, Homo sapiens
acagacaggccgcattttttggctcatgtctgtaatcccggcactttgagattccaaggcaggcgaatcaagaggtcaggagttcgagaccagcctgaccaacacagtgaaaccccgtctgtactaaaaatacaaaaattagccaggcgtggtagcacacgcctataatcccactactcaggaggctgaggcaggagaatcccttgaacctgggagatggaggttgcagtgagccgcgattgcaccactgcacttcagactggcgacagagcaagactccgtctcaaaagaatgaggacacgacggacagataaacatgt

SEQ ID NO: 571965 - DNA, 118 bp, Homo sapiens
cataccagacctacgccaaaatccatttcactagtcatattcgtcggctcaatctactttcttcccacaatcgctttctcggctctatctggaatgcccctaagttcctcagactacc

SEQ ID NO: 571966 - DNA, 280 bp, Homo sapiens
ggaagaaattctgtacggattaactagagtattcagacgtgaagaaactgaagatgttgtaacatctgacaaagaggggaaatgtgacagttacgaaagttcgcaacagctgttctgacagcatgaaagcaggcaccgacttattgaagatcgtcggtcgcacaacgcagtctaagttagaaatggcaagttgcgtagctttgctgaagctagtagctgacgtagcgatacgatgaaataatgtaaatcagtcgtctgagtatagttgcagcatatcgat

SEQ ID NO: 571967 - DNA, 582 bp, Homo sapiens
aggtttatttaacgaaagggtatggagtaaaattggcagaatcggaaggagaaatccccagaagcttatactaagaggctgctcttaaacagggccactggggaatatttatgacaaaagactcatatgtgatgactcttgatatacccttactgactaactaaatagcacctaatgaccaattgtatttgaaatagttggcttgtgaaaaattttctctaacactatacctcttataagggaaaaaacagattcgttttcacctagacggctctgttttcactgtgtggcacaaagcattaatgatttaacttgtgaaagttgtatcaggtggagactagacctcttgccgaattcctggagacccggttattcactagttatagagcgaacgacaccctggcagagctgcagctcttgttgcttataatgcgggataagtactagcttggagtaatcatggacatagctgctacctgccagaaatcgatattccctcactatacacacagcctaccacccagacgtattattagacagccagggtcctctatgagtgcgctgcctccacaattttgtcca

SEQ ID NO: 571968 - DNA, 402 bp, Homo sapiens
gtttttcattatatttttctgtgtgttctcagattatatatttccctcaatttagagtttgctaagtgaaataaactggttcactagtagagaaagaattacgtcgcttaatacctaatatcatagttgtccaatatgaaaaaaagattaaaaggtagcagtaaaattatatactgaaaccaccaaaattttaaatgccttattgagttatccgtgaaatactcagtgtgcctttaataatccctggaccggccgtggggttaaataccaatcctcatattcaaggctactcttgaagatacctctgtcacaaatatatctcactcttctggtgagagctgtgtatatccactgatgtgcatatagcctgaatgatgagccttgtgcctgcctcgctggtgt

SEQ ID NO: 571969 - DNA, 269 bp, Homo sapiens
gagagatttgagagtcttttatagaggtgctgcaaagaagaaggtcgtccacatattgaagattactgggagacaggtttaaggaagtgacggtttcgggctagagcttgtccaaagaaatgagggctatccctgtaagccctgtcgggaggacagtccatgtagacgttgttgtgcactggagggtgtacagggtcagtccaggtgtcaagcaaataggtttatgggaatcagtggtgtagcggcaaatggtagggagacggcatccc

SEQ ID NO: 571970 - DNA, 541 bp, Homo sapiens
  misc_feature (419)..(419): n is a, c, g, or t
  misc_feature (449)..(449): n is a, c, g, or t
gcgtccgaaaaatttgccaggcgtggcggcgggcgcctgtaatcccagctactctggaggctgaggtgagagaatggcgtgaacccgggaggcggagcttgcagtgagccgagatggtgccactgcactccggcctgggcgacagggcgagactccatatctcaaaaaaaaaaaaaaaaaaattctgttttaataatggagagtcagttatgttttttaagcataggtagttggtatgagggacaggatcatattggtgttttcaaaatttcaaagttaatttcaaaagttcactcagccaaagtaagtgaactattaaagcttagagatctttcagagactattatagtaccaaatgccaaaactgattgaaaatactcagattttaagaaaatattttatgataatctgtagtatgnatttatataaatatttatttatttgtatgnatttttgtatctgcagaggttaccactattccaaggcacctagatgaccatgctactaatataataatgttagaagaaaggcaaatctaata

SEQ ID NO: 571971 - DNA, 721 bp, Homo sapiens
gggaccactgtttgctgctactttttcctgctgctctatcctatacattgaataatccaatcatggtccaactaggttcggaaaaattccatacaatcaaacagtctgccttaaaagtgacccacatttttccatagtctcctctactattgtctagcccttctgcaagagaaaaggcctcatggagtccacatggtgagaagttaagtttcctgtcagtgggcctctcaccctggcaaccatggagttgcagggactatcagcacgctggtagccctcactgaaacgtccatgcaatgtcttagccagtagttcagattatcgtaaacaacgtggaacagtgtctcatgtactatgatgttggagccatgccagagatctactggacacttgtcgagcacttttggactccattatccttatccttatcctaatctttcctagcccttcaggctagagtaggctatcgatcctgagaatccttgtctgttgctctgaggagatatcgttctgggagacagaatcttttataagaacagtacgagatcgttctctcagagggcccatctagaaggaagccataggagttcacaggctcagccacctaacgagctcaagcatggtcatcatgttttctatatggtatgaccagctagcagtattcccttccatacctgtgacctgggcagtgcttttctctctcccatgtgtagccttccaa

SEQ ID NO: 571972 - DNA, 824 bp, Homo sapiens
  misc_feature (225)..(225): n is a, c, g, or t
actccaccagtgaagccactgtaggcgatctctaagcagaacttcggctactcacctcgacagaagtagtcgaacgatccagaacatctccggtcacccgaaggagatctcgagtctcgcacatctccagtaactcgaagaaggtcccgctctcgagacctcacccacgtgacaccgcgtccgctctacggtcccggacatcctccacgcctattctggcgccgnctctatgcattctcgtagacgccagcgtgttatccaccctgcagacatcgttctcgaacgtcgcctcaccactttgcgtgagtcctgccgccgcttcctagatcccgtactccacggatcatgcttcggggtaaactggtccttaacaagatctactccatgccatccgcaagtgctgttcgtgaatctggaagtagttcgtgatcgttcatcgatctgctactcctccagcaatcaagaaatcagttctggttcacggtacacctccagtagcactcaagcagattccagaatgagctgcttcagtcgtcctagcatgtccccaacacctcttgatcgctgcagatcacctggaatgcttgaaccccttggaagctctagaacacccatgtcctgtcctgcgtgcaagccggcggctccagtgtatggatggtccaggtccccgagatcctgaccaccagagaacatctgtgccagacaaatcgtgctcagtccacgattgcacttgcctgggagctatcacgctggcccggtcggccctccggcatgttgttgttggcttgttgcgaatgtcccggtcacccggggcctctgagttc

SEQ ID NO: 571973 - DNA, 396 bp, Homo sapiens
tcatctacaaggggaagaaatcaacgctcggaaggagacggcgccgaacgaggtctacctgggcctgccccatcttccgcttttacatcaagtgcacgcgctgactggcagagatcaccttcaagacagaccctgaacacacagactataccatggagcatggagccacgcgaaatttccaggctgagaagctcctggaggaggaggcgaagagggtgcagaaggagcgggaggacgaggagctgatcagcccgaaaaggtcagagcgaacgcgatagatagcatctcctcatgtgaaagaggatgtgatcatcttcagagggggtcggtctcagtgtgaactgcccaagcaggggcctctgcagaatatgattacccataccgagacctgccagg

SEQ ID NO: 571974 - DNA, 117 bp, Homo sapiens
  misc_feature (2)..(2): n is a, c, g, or t
gntgaccgtcgaccctgccaggtacattaaccattcctgtgcctctaactgtgtggccgaagtcgtgacatttgacacagaggacaaaatcatcatcatctccagccgcagaaagag

SEQ ID NO: 571975 - DNA, 980 bp, Homo sapiens
ggaccgcgagaccgcgtccgccccggagcacagagctcgcctttgccgatccgccgccgtccacacccgccgcagtcaccatggatgatgatatcgccgcgctcgtcgtcgaaaggctccggcatgtgcaacggccggttcgcgggcgagatgccccccgggccgtctttcccctccatcgtgggcgcgccccaggccaccaggcggtgatggctgggcatgggtcacaaaggatcctatgtggagacgagaggcccagagcacagacgaggcatcctcaccctgaaagttaccgcaattcggagcacggatcgttcaacccaacctggggacgacatgggagcaaacatttggcaccacaacactttcttacaatgagactgcggttgtagcgtacccgaaggaacgcaaccaccggtggttgatagacacgggagggcccactctgaaccccaaaggccaacccggagaacacgatgaccccagatcattgtttgggacctttcaacaaccccaagccatgtacatttagttaatacaacgggcagagcatatcccctgtacggccctccgggcgacacccacctggcatcgtcgatgcaacctcccggcgtgaacgggaggcacccaaacaacggtgccaatactacaaggggaatgcctcccccaatgccaaccatgcggcatgggacgtggtggcccggacactgactgatccgtcaggaagatctcaccgaagcggtacaggtcaacacacggacgagcggaaaatgggcgtgacttagcagagcggtgaccgcccgcacttcagaaacatgcaggaggtcagcacccgaaaagcagcggccgagcagcacccctgcagacggcgagcaagaccctcacctcggagcgagggcacaacccacatgaggagcaccaagccaagtgggccactcacagaaaacacacagcacaccgcgcacaacccccacgcatgg

SEQ ID NO: 571976 - DNA, 93 bp, Homo sapiens
gcctttttatgaatctgtcatctcaaatccttttgtcgctgagtctgaagggacctatgacacctatcaagcatgttcccagtggaaagcttt

SEQ ID NO: 571977 - DNA, 429 bp, Homo sapiens
gaggttttactttattgcatgctggcctggcaccctgtggcctgggctgacttcatagggatcaccttgagtgccaggatttcaggcatgagccactgtgcccagctgaggtggttactttaatgtgtgaaaagcccccagattagagtgatgtcattattggtcctccatctgtgtggtgtcacccagctgagtgcatttaccaaacactttcctcttagccccgagagctcagtaaacagagctagatgacatagcttggtggccgtaggagctagcaggagtccctggcagggatcttcctccaagcagactgagctgggacagtgacaggaggcaggtgtgctgtagcatctggtctttatacagcacatcctctgatgacttctccaggcttctccagacttcttcttaacactgcttgcactt

SEQ ID NO: 571978 - DNA, 356 bp, Homo sapiens
gtcgtggtgactggcctgacctggtgtgcagctcggcccgggccccctggagctggactgacgggcgactggagagcttcaagaagcagtcgtttgtgctgaaccaagggttgagtacggataaattcttcgggtacgaaatgtgcggctaataatcagacgtcaggaagcgtaatgaagatgactaatgtagagctatgccggcgagagtcgagtctgacccgtgagagaccagtatgtgccgtgcatcagcatagtccgtcaagagagaaacgacacttctggatgaatccacatcaaagatgaaggatgaccacagaggcggagtgaatgatgacgagacggacaggcggatg

SEQ ID NO: 571979 - DNA, 250 bp, Homo sapiens
gaattatacagctgtcagctcacaagatgagatatgggacattttgaaataccagatcctatggaggatcaaccaccatcactagtgtcgtcttcaacatctgcttactctccctccctgtagatgttgtggttatgtacgagtcagccctaacagatcaaatttagctgtttaccagtatcagagtagatgcatgtaaagctgccatcctggatttggtgtttctcaaccgaggagactggagcttagg

SEQ ID NO: 571980 - DNA, 182 bp, Homo sapiens
ggtgttgctgaggcgctctagaggacccggtcacttctacacctaagtgagaacacacggtgttggttgtttgtcctgcgatagtttgctgagaatgatggtttccaacttcatccgtgtccctataaacgacattaactcatccttttttatgactgcatagtattccatggtgtatatgt

SEQ ID NO: 571981 - DNA, 178 bp, Homo sapiens
tgaatgtcgagatcatgttagagcattaatgttgagatgtttctgggatggttcctaccgtgtcacttaaagaggatttgcctggactaagtcctgtgtagattgttttccgcaaagcagctcctgtgttgaatagcaatccgcaatgatgtagcatgtgggccttgagcagaggagg

SEQ ID NO: 571982 - DNA, 807 bp, Homo sapiens
gaaatgaggtatggggggactcaaaatcccgttatatgcatatatccttttctagctacaagagttaggtggattataatttacattgttcgttcattgtgagtcgtctctttaacaagtaatgtcaatatagaagcgtcagtggatccataggaattacacttgtgctgatcatttgaaactgataggttgagagagaaaagtcattcaacagtggtgggcataaggttccctctctcttttctctttcctctcttggaccatgctagtctcactgtccacccagcgatggagtgccgctggccttgatctcactgcagcctctgcctcccaggttcgaggcaattcctcgtgcctcagcttcccaagtacgcctggcgccctataggcatgtgccatcaggcccggctaatctctcgtacatttcatgtacgacacgggggtcatcaccattgtcggccaggttggtgctccgaactcctgatctcggactcccaaagtgctgggactatagcgccttgagccaccgtgtcttggtctctccgttctcatacgcaacgcaacttcacgtactgctaaccacagtgcgccaagacccatgacccgaattgccgcagcaacaacaagtggcacaactccggtcaccttccaaccactcgggagtctctggccaccgtggataatgctacaatacctaggtaccaccgacctgtaagccattacagaggatcgtatatccatacaggaaaccttgttcgacccccgttacacgtttcggcctcaccacacaattgggctcaccttaaa

SEQ ID NO: 571983 - DNA, 427 bp, Homo sapiens
  misc_feature (204)..(204): n is a, c, g, or t
ggtctatatatgtacttctgtactttgtatgctgtagtaaatgccaaacagtactatctgctttacggagagaatgagtcttagaattaagacgtttgaagtcttcagctacatggtaactagatgtcgtcaatcttggattatttcacccttttttgtttatttttggccaaggcagcctccagaaaagaggggtttgtgtancaggtgttaaggaatagttaataacctttggtgatggatcccgcagtaaaatccaagctaaccccacaaagggatctataataataagaactgggtcttgagacatgaaacgagaattggctggctgcatcacttttgttctagtaccttattttcttctcatggtcttcatcaaagtcttaggatttgttgaatattctagtacttgacatgtaatttccag

SEQ ID NO: 571984 - DNA, 555 bp, Homo sapiens
  misc_feature (467)..(467): n is a, c, g, or t
  misc_feature (497)..(497): n is a, c, g, or t
  misc_feature (515)..(516): n is a, c, g, or t
  misc_feature (525)..(525): n is a, c, g, or t
ggtgatccgtccgcttggcctcccacagtgctgggattacaggcgtgagccgccatggccagccctgatggctctttctataggcgcatccctccacacccctttagtctggagcttgctgtgacaaatcctggcctccacgaactatttcttaattcttcccttggtctctggattttgattgaaattgttattctgttgccttcaacttcagactgtcagcctggacaggatcccagagttgatcaggtcagtctcctcattgtacatgtaaggaagcatggagcctatacctgtagctctctactcccaacttcgggcaacctttccttgaggctccttttcgggagtatttagggacactggtggatagtctctccccggctctttttcttcagatggcttggtgtaatgtcccctgagggagaaagataaactggatgacttgcgtaattatattattacanggcatttgcactataaagtttcctgccatnccacttttatctgtgttnnagagaaaanataattcttaatatgaccatcgcctcttag

SEQ ID NO: 571985 - DNA, 138 bp, Homo sapiens
ttgtagactaactgaactgttgacagtgtgctaaagtcgaacacacccgtcactttcagaggacagacagaagccatctttataatagtgattttgccagaccaagggagaggttaggtctacctggggggatcctct

SEQ ID NO: 571986 - DNA, 1041 bp, Homo sapiens
ctgtttcatcgagaaagcacgatcatcgtggcgttgaaactgtggagttgatagccgtacgtatcatgatcgagtttcataacaacatatatatatagggctgggtgcagatggtgcatcgatctgtaatgcccatgtgctttgggacggctgaggtgggtgaatcacctgcaggtactaggagttcaagacgcagcctggtcaacatgacaaatacccaatcatgtacaaagtgttacaaaaaattaatctgggcttgtgtggcatgtgcgctgtaatcccaggctactcaggaggccaaggtcgacggagatagtcacttgaaccctgggagtgcagagagttgcagtgtagccaaggatggtaccactgcattgccagtctgggtcaacagaggaagagacaactacaaaaacataaatatatatatatcatactggacagactacatatgtatactgtagtatacagatgtgtatatttatatgtagtgttgcagaacatgtatcctctaagggttggggcagaagtgtgtgaggtgtccatgtacatttcaatcaggctgaataatagggtatgtataaatctgtacagtcattggcaatagatgggtctaatgatgtataagagagaatgtctaatttgctactatggggggaggatatgccatttcgctttagttctgtcatgtggtgggtgactaaacaggtgtcatcattgacccctgggacaatgtacgcggactcgtcttcttactgtggggcctagacaatggtcgacagttgatgttgtgaaattggccacaggccgtgaatcggtgaagaagagaccttgtcatagaggtatactagtcgactatggggtgtgtgaggcccactaggcatcggaaggggtggggtaactttaacacgttggtaattaatccacagagatatgaaattgagaatgtgggtatagggtgagaaagggctatgagaaaacggacctgtgttggacaaaaatttgggggtgtaaaagagaaagaagagaggaaacactaaa

SEQ ID NO: 571987 - DNA, 1299 bp, Homo sapiens
ggctggactctgtcaactagtcctgcgcccggagaagctccacgagtacccatctccgagcccagcagacagggcgcagtgcacagcctctcagaggcatcccacactgccccctctccgctgacaggcgtagggtcctccaacattctgggcaggtcctggatttgtctcgcccactagatcggggggactctggatggacaggccagctccttgcctatactcttggaccccccacccaaggtggcggacagtcagcgccggatggcagttgaggacgtaggtggccagggatggccctagacggtgggcccatcgtggcgagccagcgcactggctggggcctatcgaccagggtgcatggtgcatgatgcttgtggggtgacggacggtgcgccaatgggacgtaccttatcagtggaatgcctcgcatacgacctgggagcttgtccgactcgtcgaacgcgcgaccggtcgaataatgcgaggtcggcgagccccagaggagcgtactgagtggtgcccacacatacgccgacattgactaggctactactgcaactcactgcgctggctgcgctggcagggggccatgctgagaccctaggtgtcacaccccagttcatctgggctacgtggccgtccaccgtgacccttattccagcggtcgctcggactcgtccgtgcttgcgaacgagcagtgaccttggaaccaagaatcatgccggatccaccccaacaacgagagagtgcacggacccactagaggaggcatccgggcacactggacacctcccataccctagccctccgtaatgtagcgcaggacggaccaggctacacaggacccctgggtcaaagcccggggcatcaggaagcacccgggggatggtcacaagcaaaaacgaccagggaggcaccccagcactggctacaccatgtccgataccctacgggacccttgcacacagcaagcaccaaaaaggggatccacgcagcaccaagcccgagacacgtcagggtaaatgcaagaaggacgaccacgagaccgcgtaggcacaaagaaggaccaaccaaacccgccagaacaaccccgccaacacacacatcgcgaccgacccacacccaccccacgcctaaagaccccatcgcacgccacacgcgccaagccaccagcaacaaaggggcagcccccgacacaacaacaccaagaaccacacacgaccacacacacaacaacacacctacaagaccaaccacaccacaccacccaccacaccagcgaaaaccacacccacg

SEQ ID NO: 571988 - DNA, 307 bp, Homo sapiens
gatgtgtcgtatggtagttaggtgtggtagaggtgtctatggttctcatattctcagaatgagggttagatttcatgaacttctatagaggttgtctgagaggcgtattccatctggctacatgttagtgtttatcctaaagttcctgactaccctaatcagggatatatccctcttggtaatattctactagccgctctattcgtctctagctctcgatagatatatgcggctcataactagtatgctttgtcaaggttcctctccctttggacctctcctagcggtctcgtcatttcatagcggt

SEQ ID NO: 571989 - DNA, 113 bp, Homo sapiens
ctcgaagcgtgtaaatctaatggttgttccgggctggctttgagcaagtagcctcagatcgtgggggtgaacgcaagcaatcacggggtaaccaccggtgacggggtggtcgg

SEQ ID NO: 571990 - DNA, 611 bp, Homo sapiens
  misc_feature (46)..(46): n is a, c, g, or t
  misc_feature (120)..(120): n is a, c, g, or t
  misc_feature (141)..(141): n is a, c, g, or t
  misc_feature (183)..(183): n is a, c, g, or t
  misc_feature (195)..(195): n is a, c, g, or t
  misc_feature (229)..(229): n is a, c, g, or t
  misc_feature (278)..(278): n is a, c, g, or t
  misc_feature (453)..(453): n is a, c, g, or t
  misc_feature (508)..(508): n is a, c, g, or t
ccctcaatggccaaaaccttaagaaaaaggccaacctggcaagaanccctttgagatggaatctacccaaccaaaagaatttgaccgggccaaggatgtggacgtcaaaaactttgccgnggaggctctgactgttctttnatatcccctgatcctggaagaggaccaaacactggcctctgntatcaaccctgnaaccctcaaagaagtccctccttttggggaaaanacggggggggcctttggctgtaactccctgtggatggactgaccccagnccccttcccccaggagggttcctcctctccccagcctgggaagatgtctcactgagccacctcccaacgggctaggggagcacggggttggacaggacagtgaccttgggaggaaggggctactcctcccacatcagggagagatgtgagcatcccgggtcactggatcctactnctgtaatgggaacccctcccccatttacttctccacctaccgtcctccccatcantggtttttttttgtgtgtcaactgtaccgtttttaatttattccttttattttcccccttttcacagagaaataaaggtctagaagtagttggaaaaaaaaaa

SEQ ID NO: 571991 - DNA, 520 bp, Homo sapiens
  misc_feature (204)..(204): n is a, c, g, or t
  misc_feature (271)..(271): n is a, c, g, or t
aaatcccacactggtcgagtcttatggtggagtgcagtgggcgatcttggtccctgaacctccgatccgggttcagtgatctcctgctcagctccgagtagctggattacaggcaccaacaaaccatgcctgggtaatttttgtatttctaagtagacgatggggtttcaccaatgttgaccatgctagtctcgaactcttganctctagtgatgtagccacctcgacctctcacagtgctgggattataggaatgagttatgcacctggnccctctgagcttctttatggacatcagataattgtattttattttaacagtagttttatttctctgattattgaggtatttatgtcaaaaaattggacttggacactactagtatgctacacttgttgatgacacaagtgagtcttttttcagtgactacacaatgtatcatctaaaggagaatcatatccttttacttaaaaacacattctttttctttctggcatccctatgatatcctcttctttg

SEQ ID NO: 571992 - DNA, 352 bp, Homo sapiens
cccgacggattccccacatcacgcaccacgatcaatacactttctggggctccaggggtgtcaggtgtgcctatgtgataagaatgtgggctagtggcattttttatcttagagcgcacagctataatcactgcgcccgctcataaggggatggccatggctaggtttatagatagttgggtggttggtgtaaataagtgaggcaggagtccgagaagattagttgtggcaataaaaatgattaaggatacaagtataagaaatcaggattcgaccttaagtgttgtgtatgagtaatcatatagtataaaggggtaagatagattaataatcgaggaatagcaaaatgtga

SEQ ID NO: 571993 - DNA, 990 bp, Homo sapiens
ggaagaactagtctcgagttttgtttctcatttgggcgaaaacagaagccaggtttctcttctcaaagggttcagcatccccaatcactcacgtggtggtgtgtgtaccctaaggtattggtgctcgctggagccatttaattctccctcactcttccgattcgggattcttctatctagcgatttgagtgacaccacgtcagacaacattgtctctcgatctgggctcaaagaaagaacatctttggcactttaggcaacgagtggtggcgtctcctgtgattaccattttgcgagtatgagcgttcttgcgcctcagaaacatcagacttgtataaaagaagaagccacaagtcttcgtgaagaggcttgccagtgaaagtggatgtgtgtcgtagccagatattccgttgaaaccttcgtggagagggaggactcgagctcttgacgtggcccttgggaagcctgaaacagcggccacgcaggggaagccatattgtgctctcaggtgtgctttcagaagaccgtgcttcgtgcaacagagtttcttcccgttcttgggtctccacttcaaacgaggcgttcacacttattccgattgtttccaccagaaagaaaccaattcaccgtgcgtggttctcgtgggaaagaactcagttccctctttacaatttgctctccttgggaccattaagaggcacacagccttcctttgaatgcgggacatttccgtggaaaaaggagcgtctccgtgaggagctccattcgtgcgagttccttttccgtgggtgcccagggacctggctgagactcgagaggaagctcgagaaaggcatccttagagaccgtgcgtcacgtgaacgtactttacgcacaaagtgattccagcactctggtgcgtgttaacctggcgcaaaggagtcccaggacagccctcttggtcctacagtgtgggcttttcctcaaaggaccgaggttacacagcagttg

SEQ ID NO: 571994 - DNA, 294 bp, Homo sapiens
  misc_feature (282)..(283): n is a, c, g, or t
tgactgaggacccaacacagcattcctcgctatctctattatgcaggctatcaaaaactcacttattatattcaggctcatataaagtacacagaagttataaaatgggcaatcacaatcctcaccatccaggtcattcaatctattaagggacacattcatttctgaaaaggttttaatactaacggtattcagaaaatttctgaaattcataaaaataaatttgctatgaaagtatatagtagagcatatgcggtgtttgggggtacccgagctcggaannttcgtaatcat

SEQ ID NO: 571995 - DNA, 916 bp, Homo sapiens
ccggtcctgcccatttttgtgtagtccgtatttcttatagatactaaaaggttctgttgggccgcacattcccggtttgtcgcctattctccggggacaaagttttggccaaccttctttcgtccccccgccaatgggccgccaaaggctttcgcgcgttattgcgctcagcccatagggtgaccccgctgggccctacttcgccacagggtccccacgttgaattactgaccttcgacttggcgggctgacaagaaaacgcgttcgtctaattcttgccgcgccacttgtgcatgcacgtgtcaaatatcttgcgaaccccccatcttcgtccgtggtggccgccctcgggataaaacttggtccctggccccgaggatgaagccccccacaataccagggggtaaagctgggtaaaaagccctcccccaattggggggttaacccccagggggaggccgtccccccaaaggctgggtacccacaaagcttctaagcaccttctaacgttccaggtgaccgccctctgacgactgtgcctccaaagccggacgtaaccgcgcggaacacaccccaaagtgtttaagaccccgcggcacatctacacacaaacagggccctcagggcatcccctcttcaaaaagcgtgcacaacgggagagtctttaaaagggagaacagcgccccccaccccgatcgtcaaggtcacacccgcaagaccaccactgcacaccctcggcccccgtgacacaccgtgtgtcccccggggacactgacccctactgtgcggtcgcgccgcgaccaatcatttgcacgcaccagcaccaccacgacctgcctgcctcggcgagtaaacaaagctaaagatggggggaaagaaaaaaaaacaaggaaatttgtgcaccccaaaaatgaca

SEQ ID NO: 571996 - DNA, 291 bp, Homo sapiens
ctatagagaatccccctttgggggtcttggctcatgttgtcaagggaacccaggaccagatgcatagagtgataaaacaatctaattgtatcacaaatgtataaaacaaccacagcgatggggtggatgaaattgttgtgggcctaagtaattttggaactggagcctataaacttaagggcaaaggaacctgtatataagaactgcactctagttgaaaagttgtttcctgcgggattggggttaccaattatgatcctgctgtacaggtatgctggggctgaacaaata

SEQ ID NO: 571997 - DNA, 118 bp, Homo sapiens
aaactccggtacttcatgacgtccactgtgcttcgggcgtccttatcacttgcttgctcacgttagaattttatgatgcttcgatgagcctaatttctcccctaccccatcctaacac

SEQ ID NO: 571998 - DNA, 129 bp, Homo sapiens
atcttatcctagaagcccattactcactcttacagtagcatgcctactaaactattgtgtcttgtttgtgcttgtccaggagaacagatgaggtggactgtgtgggaggtggggacgtaatgttctagc

SEQ ID NO: 571999 - DNA, 186 bp, Homo sapiens
atcacttaccactccaagccatgagtttggctttggatgtaacaagattgaggtgttcatgggttgacaagtgggaaaaacaaggaaggaggttgagtgtttaaggactgctggtttgaaggagaaaggctaggcctcaaggcaaaaggtcagggcttatcaagttgggaattggcacttaaaatt

SEQ ID NO: 572000 - DNA, 264 bp, Homo sapiens
gtttgaatttagctaagcagaatagtaatagaggatgtaagcccgtggacgattatgaaaatgactgcgccggtaaagcttcagggggttataggatgagaatggctgtaactacgaaggctatgtggctgattgaagcagtatgcgcatgagcgcattttagagatctgtttgtacgtcggcagatagagcttgttataataaatgcctcataagggatagtacaaaggcaagggtaggctaatatcgttttgtcaaggggta

SEQ ID NO: 572001 - DNA, 104 bp, Homo sapiens
ttgtgcagctccattctaggcctctctgaatatggctccacagctggaagggtacctcgagatctgatatgcagtaattaattttgctctctgaatggattgct

SEQ ID NO: 572002 - DNA, 115 bp, Homo sapiens
ttcgactctaaggatcagctcaaatttcttttgacttgcggggactctagaagatcagctctaatttcttttgacttgcgggggtccacttgatagatcctcaatagtccagcga

SEQ ID NO: 572003 - DNA, 247 bp, Homo sapiens
caagtggttaaccagtcctcacacttgaatagcactatgagacaattcatactacagcattcttacacataagagaactcataccagggcgaatgtcttacggaaggtgacgaatgtcgcggtcgtttaaatgcacctcaatcctttctaaatcataagatacttcataatgccgagaaactctccaatgtgaaacatgtgagaaggcttgcactcacacctcaatctgtcgtagacataagagtac

SEQ ID NO: 572004 - DNA, 128 bp, Homo sapiens
cctgccagcgcgaagggagtgtgaaacaggtcgagctggtcagtggacgcgggagcgataagttcctggtcgcaaagctcaagggtcttgatgaccgtgaagaagctcgccttctggccggttatgag

SEQ ID NO: 572005 - DNA, 391 bp, Homo sapiens
  misc_feature (122)..(122): n is a, c, g, or t
ccccttaggaagtagtgccttatattaagagttccaaatatgagtaggatttacccaaggtgaaatatgaggataaaaaaatctccccacgtgtcatgattaaagcactcccatgttgaccnaccgggccgtgagttgtcacgcctgtaatccccagagtgattacaggcacgaggctgaggcagggagatcatttgagatcaggagttcgagccctggccaacatagtgaaaccttgtctctactaaaaacacaaaacttaggtgtggtggtgcacgcctgcaatcccagctacttgggtggccaaagcaggagaattgctcgaacccgggaggcggaggttgcagtaagccaagaatcggccactgcactctagcctgggcgacagcgc

SEQ ID NO: 572006 - DNA, 131 bp, Homo sapiens
agattaagacttcaggagtatataaccgtctacagtatgcttcccatccaaaacactaggtcttcatctttgtttcttcgaccacgcatgtgcttcttttttagtaaagagtgtggtttaggtgtaaatat

SEQ ID NO: 572007 - DNA, 179 bp, Homo sapiens
caggctagaagtcaggtgccgccttggattgccaccacgttaagacctggccagagtgatctaacctgctccagggccagcagcgtgctacgggtcttcttcatctgcctcagggatgccagaaggaggaaattcctgggctgaccgcacagcattttccaggtcttggaacttgacat

SEQ ID NO: 572008 - DNA, 339 bp, Homo sapiens
gtctagaggatctccagaggcacaaggaggcagaggtggcagtgtgcaaggatcgcaccactgcactccagccggggtgacagtgagactctcacaaaagaagaaaaaaaattcccaaccttgccaacataacaagaccatgtctctacaaaaattttaaaaattaaccaggcataggggcgtgcacctgtagtcctagctactcaggaggctatgacaggaagatcactggtgcccagaagttcaaggctgcagtgagctgtgatcacttgtgcccaggagttcaaggctgcagtgagctgtgattacaccatggctctccagcctgaatcacagatg

SEQ ID NO: 572009 - DNA, 270 bp, Homo sapiens
agggggctggtgactcgccaggtcatggatctggctgcttggtgccatgcagtccgggctcctttcttctaggtccagcgtacggtggggtcaaagccactctcggggtttccctcgggccctccagctccttgatcagttttggctggcactccatctggtgatggttttcctcccagttccgagggcccaggccattcccagagtcaacaaatggctttttcgaggtcctggcacctggtcctgctgcggggcatccaatcgatttgg

SEQ ID NO: 572010 - DNA, 1147 bp, Homo sapiens
  misc_feature (203)..(203): n is a, c, g, or t
  misc_feature (257)..(257): n is a, c, g, or t
gcacgtctaaggtgttttctagcatgtgcccgctgtacggtaagggacggcagggctctccgtactaggttgctgctggtgtgtgatctcttcttagtggatgcttcctatccctactagatgatagatgacgcacttcccgccaagaagacctcctgtgtggagccagcggtgcctcggtcctctcttgtgtgaagcagctngtgagcactgagagctcgtggcgtggtcattcatgacatgcatgatgacggaangcgctatttcctggttaagcgataggcaggcgcgattccacgcgcgaagaagggcagcatgtgtttggtctgctgtttgggtaacagtcttcttcctgacacaactaccatgtctctaaaaatcaagaaggtcctggttttctcacgcgaagacaggtgtgtctagaggggagaaaggggccgatgtttgtaatccaagaagagcgatatgtatattgcaggtagtaaagtggtagccaataatggtttctaccagcgctgtatgcatggcacggtatcacaatatttatccttgctttgctggtggaaatagcaccagcctattctttaatgctgagtgtctttttaaatatgtagataatggcttatgggttggcttaatgcgtttctacacttaagcattttaacatgtttcaacgaaaacatgctaagcacaaaaggtaaatgacttacactttctatgaaattttgaccaagagtgttgtacgttaccccaacttggcgcgctgactcacgctcactcgggggcaactttctcggagaaatggagatttaaataggcacttaattggctcttcgtctggtgcttaaccctctaacactaccccacgtgaaaaccctttttccccacttgctttctcccataaaaacattggtgtgtaaaaaccccggtgccgcaatccggtgtgttggacaggagcgcaaccagtgttaagagcccggcgagaccacatctggccggttacaaccccggcggtggggtggttgggagaccacgcagtgggtcccccccgagaatgagccctcggagggggagcgttgtggagtccgaccaccggtgtgtctccccgaacaggaggcagtaagtacggggtggccgcctcttcgtg

SEQ ID NO: 572011 - DNA, 662 bp, Homo sapiens
actccagccgcgcgcacccccggggacttcggctccggcacgggtcgcgcccagctagacctagcacctgaggccgccggccagccgccgccatgggtagcctacctactacccagcccaacacggtgaagtagctaccggggacggggtcggcgccccgcgcctgccgctagccctaacggctatctaccgccatgcaaggctggcgcgtctaccatggaggatgctcacaacttgtatatcctgagctggacagtgagacagccatgtattcttgtactacgatggacataggaggggaggaagtttgccttgtcactgtgccaaatatacttcctgataatcatacaaaagatcagaaggcctacaaggaaggcaaagctacagaacggctttcagcacagaatgccttcttgggctattggaccgccaaaatggacccaactgcgagcacgctcattacccgagcctggcaacagcactggcacgggcgaaccccaacatggacgggcatgcaagcatcgcacccaggacacaacgtacgcccggactgaacagcactgctgctggcacacaggacggaggctggcacaggctgcatcgacgaaggcaaccagacctactgacgaccctgcaggaacggccaaccgggccaaaccgcc

SEQ ID NO: 572012 - DNA, 373 bp, Homo sapiens
  misc_feature (17)..(17): n is a, c, g, or t
  misc_feature (84)..(84): n is a, c, g, or t
  misc_feature (213)..(213): n is a, c, g, or t
  misc_feature (331)..(331): n is a, c, g, or t
cggtcgcggcgccactntactatggcatacctcgttttattacgcttcgcagatagggcattctgaaaacaaatggagggtttntggcagccctgagtccagcaattgtatcagcgccatttttccaacagcatgtgctcacttggtgtctctgtgttacattttggtaattctcaaaatatttaaaactttttcatgatttctgtgtctgtnatggtgatctatgatcagtgatctttgatgttgctattgtcattgttttggggtgccacatacagcgtcttttaataagacgtggaacttaatgttgtgtgtgttctgaccggtccanccacagaccgttccccatctctttccctcttcttgggcctcc

SEQ ID NO: 572013 - DNA, 111 bp, Homo sapiens
ctgggcctctatcaattaacacaccctcgtattagtaggtattcactatttgttttttgaatacctactaatacgagggtgtgtttaattgggtagagactgcttggttga

SEQ ID NO: 572014 - DNA, 122 bp, Homo sapiens
gaggctctctgggctggaggtggggttgggcagcaagtcagccactcttcacctggctccctgctctgggccctgcacagagctgccaccctcttctttctccccagccttctcatttcctt

SEQ ID NO: 572015 - DNA, 1006 bp, Homo sapiens
tattgggagaaaaaaaggttttttttttgcatatggtacactcggggaaatgtcccacaagatacactctgggggtgaatataaagggtatattatttgggaggctccccgagaagatatttcccccacgcgcaagatatgagtgtctggcgtgtgtcatactccaacgcggcgcttgtgagtatataatctgtctttatgatgtgggcgccccctttgtcccccctctttttgtttttgtgggaaagtcgcccgctgggggttttattagaccccctgttatcgccccgcgtgtgtttgtgtggcacccctttttttccggtgggtctttttgttgccacccctctttttttgcggttctttcttgttggttgctctctcgttttaatattcctttttctttctccctccccatatgtggggtgtctttgatataaattatgtttctctcaccacctcaaaaaagtgtgttcacacacgtgtttttgtagaagagggcgctgccctttacacaacgagagggttttttaaagagaattaggctccttggtttctccccacccacacagggagagggtgtgggggtgtgaaacgaccccccattgtgtttttttattggacgtcttctttgttatacaacagagagagagggccacgcggtgtttttctctagaacacaatttataaatctctctcttttcatagagaacacacccccctcccctctcttttgctccccctttctcttcccctcgtggcagcagcaggttcctcttttccgcggtgtgtgtcgcctctctctctgagtgttgccccgagtgtttgtttttttccccgagggtttttataatataacccctgcttggaatatttttttttctctctccctcttggtgtcgtctctctccggctttttcttttgtgggggaaatattttttctcccccccccctcccacacccccccgtggggtttttggagaaaaaaataacaaaaaaaaatgggga

SEQ ID NO: 572016 - DNA, 585 bp, Homo sapiens
  misc_feature (92)..(92): n is a, c, g, or t
  misc_feature (125)..(125): n is a, c, g, or t
  misc_feature (149)..(149): n is a, c, g, or t
  misc_feature (180)..(181): n is a, c, g, or t
caaatagaatccccaaatggattccccaaatggatccccaaatggaatccccaaatggaatccccaaatggaatccccaaatggattcccanatggaatccccaaatggaatccccaaatggatncccaaatggaatccccaaatggantccccaaatggaatccccaaatggaatcccnnaatggaatccagaaacaaatacacagtgccaagattatcaccagtagtattccaggactcagatgagaatgagacagttcctggaatcacagagaattgaacaaattttaagcagacagtaagggaatcagacttccatattcataatgcccctccatccaatctgcccatcacaaagcatgtggaaaattttccctcaacatacagtctctacactgaaaaaagtgacatcaaggtggacaatcagcttccccaccattcagggcaccctagtaggagacccttcccttttgcccacagaaactatcagtagtgtctgaagggagaaatattcctgagaacagccagagaccaagacggaaggtggaactaccatccctaagcctgaaaatttgctctggtat

SEQ ID NO: 572017 - DNA, 976 bp, Homo sapiens
gtgagagccgtgctcatccccatctcctggtgcaactctgttagcggctgtgggggccagtcaatggtcatgtgtgtgcagagtgttgcatagtgacgacacgcctgaggcgctagtcgcctgtcacgcaggcggccatcttgtggacggagctcatcggagttgtctgccccatacgtgcaatcagttgcatgggcgaggagagacatcatctgcggagaaggcacaggactgatggcgtggcagatgctaggccggacagatcgtgcggacgtcgatagggaggctagagtcgtcactagggtggcatccgcggccgtatatgcggacttcgtgtcacgccagcctggtggcattaggagagcttgctgaatcgatcgcgacatagtggtcctccgaatggcagggggccagcaggctcctcttgcgcggcgtggtggatattggggaaggactaggagcaaggttacgcgcatagggccaacccttcggcattggtgaatgatcctaaactaaggctagcatgtgtgacccttgaggcccgcgacccatctcgttacaacgaagacctagtactatgcaacccataggtacgtggcgctgactcgaggaggagtctccaataatgaagctagacttgcggtacgacaggactcggatgacctaggaagcttctctcgttgccattggcggtacctcccaggacatccccagaggtgtagagccgttacatagcgatggggcgatctatgtgagtgccacgcaccgagaatcacatctggaaaattgacgtcgctgactagcacctttttgaaaacccccgagtattccttttcaagctgtccaacattcgcgagggtggacccacaccggttgttcttcccgtcctccgtcaatcgtttagcttttccagtgtttcaccccctaaactctgttactaaaaccctggcgttgtgtggcacttctgggagaagac

SEQ ID NO: 572018 - DNA, 93 bp, Homo sapiens
agaatggcttgaaaccacaaggcagaggttgcagtgatgcctgtgattgcaccactgtactccagcctgggtgaaagagtgaaactccatctc

SEQ ID NO: 572019 - DNA, 962 bp, Homo sapiens
ctgtgagagaaggacgcggtccgacatgtgtagcgtgttcaggggcgagtcatttgggggcaatgtgttccgccaggggcgcctattaaggagtaggtcccccatggcgctaaccccttgcgggcactccacgccctttttgtgggatagccccctaagaattcgcccggggggaaaaaaccaaccgcatttgttggccaataaccacaaccgcaatatatgggccttactgggtatattgcactcgagagctgctttgtgctaatggtcgacccacccgcccgcccagtggcgggtggcatggccaccataagtccgttcccagacgaaagttcttctgaacggggtcctttcggtccagagggtgctcctcacgggcagagagcttttcttatggttgccggcctaggatgcccacactagggcatcatctcacttttgtgcggccccgcactgtctgcgtggttctttggacagggggacaccccgcgcacgttgttgttgggcgggcccctctccacacttctgctgtatgaaagaggagtgctcctctggatcattctctgtgtacccgcccaaatcgacgcgaggtattttgtcgcgccgcaatgcgttgatcagcattcatgataccaccggggaaactgtcataacacttctctcgacaagatcacaataccaccacaagcatttatcccattttaacaaaatgtcttcacacgaacccgtgtatatgttctcacacgagaccctatataattcaagtgatgtcacacgcagaatatatcacctcttcctgttgtatgtaaagcttgcatattcttcttaatataaaaattttgtcgccaacaccttctcttgttccctcaataaaaggtggtgataatcaccgtgtaatagaactatcaagacagaggaaaaacaaaaccaaaaaggccctttaacaccccgccaacaaaaca

SEQ ID NO: 572020 - DNA, 1519 bp, Homo sapiens
ggtttccctgctactgctgaactgttagcttagctctgtctgctagacctcgtaccccccatgtgggtactctggtggtcttttgcacctctcttatctccctggaggcttcgcctcaagacatggatgcagggtttggaatgttcgccgaggcttgtctgtggaatgccccgtcgatgtattcagccatgtcgtcgtgctatccttccgcttcttatagctggctcatggggtctacgtatttgtgatcctggaacatctatcctgttaggcgcacttgagccaagagtgttgccatgaaccaagcctaggaacgtttcatacttgagttccctttcactatgtgccgccagtctcacatcggtcagactggctttggtaccaccgagaatccccaagattatcgcgtgtgccgctctcaaggcgtgtggatttcctgtctgattggagttgggccccgaggtcccgtgttgtgtggccccggtgtggcccatttgctgtcagtgcccttgtacacctcggtgtcagtcgagtcggcccaagtgcgtgtgcccatgctgggtgttccgtcgcacaaccgagtgggttggctcccggtatgcaagagccgtcgcggtatctccttggacttgtttccgggaccggcgtcgggacttctatgtcacgaaaccgtttgttgcggcgtttgtgtccattggacgccacatgggcattttagcggcgtagagggcttagccccgccttcgtccgatccctttccgccgaggctcggggcgccgaatgagccccctcttgttgcctgtttcacgttcgtaattaaatacggtatccgccaaaatgaaagcatatagagttccgcactatcgagagattattcgctatgcaatttatgggcagtagcgcagtatttggaggacccgtatcccacgacgcctaacaagaggaacccccagctgtaacccgctatagcattacattactggagagcgatatcaaaggacgcccattaagagcatgcgtgtaggcggacccctttggatattgagatctcccccttttaagttaaagggaggatccaagccattcataacgtcctgtatacaaatgtaattcacaatacttttgactttgatgttaaagggcctacttatcgcgtaaagacaaacaatctcccagatagatttaaaaagaatattgagcgaccaaatatcagcggagattgataaagctaaatcatgcaacacacacttattgcaccaagaacagattctttgtgaacggaacaaaaacggtcgtccaacccaaaacctacatacaacaacccgcgaatattgttgtatgcgaacacatgaaaaacagagtacatagtagtatgaacaattgtcagagttaacatgcacccacagaagtcaaccacgacgacacctgatctactactcagcgttgacaacatgtctaatcatcgcccaccatgacgatgaacacagatccatactcatcatcaaataccaacagccaa

SEQ ID NO: 572021 - DNA, 355 bp, Homo sapiens
  misc_feature (6)..(6): n is a, c, g, or t
  misc_feature (13)..(13): n is a, c, g, or t
  misc_feature (18)..(18): n is a, c, g, or t
  misc_feature (37)..(37): n is a, c, g, or t
  misc_feature (190)..(190): n is a, c, g, or t
  misc_feature (218)..(218): n is a, c, g, or t
  misc_feature (303)..(303): n is a, c, g, or t
  misc_feature (325)..(325): n is a, c, g, or t
gctctncgtgctnggccnttctccatgatggtaaccnacatccttggttggtgagtgacgacactgttccacttcttgatcctcttcgtctgcctgccgacacgtcttgggactagtcatcccccagtcatggacttccaccatcggaatcaccgaggacacgtatcacgtcatggcgaccgttttgggnggtgcagccgggctggcggccctcgtcngactcatcgggctgttgtaccgcaggttcatgactataagtctggtgtgcctccactgactaacctacctatggactatctgtcnaccttatgtgctgcttcacttnttacagtcacgctggggtgctgggcctacc

SEQ ID NO: 572022 - DNA, 816 bp, Homo sapiens
ttacataaggaaacagatactctagccaaggccagagagacaccaagtgtgttggaagccaccatagctacgacagaatacgtgacggctagtgtcgggctatgacgttagataggcacgggcttggggaccataatgagaagggccttgtaagccacaggttgtgactttggctcttacgtctgcagggggtggaatagctgttagaaggttttaaaaaagcaaagtaagaaacagtatatcttgtcgtttaagagggtcctcttttggcttgtgatgttaaaacatatggtagagcaggacaggagacccatggcagaccatggtacgaatcccaggtgacggggtgatggaggctggcgagcattttttcatgctatgctccataagggtggtaagtaataaaaaatctacagacaaaggaggacacagaatagtagaatatctcactcactctagcccctctatctaacttgttagaatagttttggaaacagactagtacaccaatctagtcccattgtgggcttgtcctgctgggtttcaaatagcctctatctattatctataatactagacaggggacctggagaacattgctgcttcccccacatttatgtgatgtagctacatgattgagtcgtctactgacccgttttaaacttcacgttcttgtcccgtcgttctcgaacggtttacccacccgtgtctgaagtcgcctctaaatttcctcacaaacctggggcaccccctctttgcgcgcatataagcacggttcacgcgcgctcatcccgcccttcgtactattcagcgccc

SEQ ID NO: 572023 - DNA, 964 bp, Homo sapiens
aagcctaaaagataagtcggtgaccatctgtaatcatgatgcggtggtgaattcttggagcgctagcttacaataacctagacaaagagaagaatcaatcctttgtcctgtctctagtgtaaagtatctgtaatgaatgatcaaaagttcaaggtttaaatattatgaaaaactttaaacataaagtagtagaaataagacagtaaatactgtatcctaatatccagtcaggatacatgcaaaccaatatccatttaatcttgaacagcgatactaatgttgtaattataaaaaactgtgtaactgataattggtattaacttttaagagggatgaaagagagctatgatgtcctaggactgagagtaccccaggtaagagaataccccttgaagagggtctccccttccccatggtgaagtcaggcctaattggagagagtggctacagccgtactcagtgattgggaaattccctgtcttgcccgtggggccagagcgtggtgtagccctgcatggtggatcaggtcttgaacaatgcaagatgaaactcacactctacaactgataggccagaagcctcttgtagggtgtgagcaaaactctggacaggaactctcagtagatgttgtgtagtccagattctgcagaggaattccttaaaagggattggtttgtgttgctgttattaagtctaaccacgtcccatagagctggaagtgtgagagcatcgaggtggagacctcagaaagctgatggtggcaggccagtcccaagggatcgtgcggaggattccctgtcgggaaaaggcgagggttttactttcagacatttcctgatggtgaggcctaacatttgggggaaagctggtgaaccagggccggtggtaaggggggcctataaaacctccgaaccaaaatttggttaatggaaacggaggggatctaaaaaaaaacccgcttttg

SEQ ID NO: 572024 - DNA, 1040 bp, Homo sapiens
gctggtacgcctcggtttacccggtgatatcgtcgatccacgcagtacggtccccaaattggacatttgaatggactaaccacaaacaactggaaagactgaatttccgacacaaaggaatgatgagactcaaacagaaacgcagtgaggagctcttgagtactgtagctaccgtattcttattttaactctgcttcatccttgatctacctgcagacactaagcaagcgacaattagttttccaagagctcctttgaacctgtctaggactgtagttaaacctatttgccctatgggggttcttcacactcgaaaaactataaccttatcaccaacgacccacccagacaaggccaactgaggccaaactgtacaccactacctcaacactttacaatataactatctacacattgccacttaacttgtgaacagctgcacctcacacacgggctacgcaccatactcccaagcgcacgcacccgaacctggctgcccacctcccacggtaaatatctcccttcacactactccttccccacattcacacacacttccaacatccaaacccagacacacaactggccactattcaccaacctcttttcctcaccacacagggtaacaacgggcactcaatatactcggcaaaggcaaaagagcaacactccaactcattagccccgtctcaaacgaccatatacctggccccctctaacagacagcttagcctatcacccttcacccccctatcccacagaatttacaccctatactcgactaactcccgcagaccaatatcaccatgccccatctacccatacactgcctatagaaccccacgcaacccctgagcccacaccacgagccacaacatacatctcacctatatcggcccaccacagcacccccccactaactgcgaattcccccactaaccacgcttcacattacatctcaaacaactctttccaaaccgtctacactatacaaatttttggttgagcctacacccacatcgtatactaaaaacaaaata

SEQ ID NO: 572025 - DNA, 549 bp, Homo sapiens
ccagtttttttttaattggtaaagctcggccataaacttctagcgtgtgccaatggtcaccggccacactcgcaccaggtggtccgtgtagccagcaaacagagtctgggccatcagcaagaccaggccagggaggtgcactgggggtggtctctggcctgtgcgtgctgggtactggataacttctggctacagttcatctacaaggatctttccctctaaatcccagatcttgatgctggggctgtggagcacacagccagtagcggtatagggctgaagcacagggcgttgatgatgtccccaccatctagcggtgtaaagggtgttggcccttcgtggaagatcccataacagtggccgggccattccttgtgcctccagaaagcacagagggatccatctgggagaagacaggtcaaccgggggtctcagagattaggcctggtggtgggccaatgtgggtgggtctcacaagctttggcaggtataagcccaagggtctcccaatacctttgtgacccagcttggtccccaagccacagggag

SEQ ID NO: 572026 - DNA, 381 bp, Homo sapiens
  misc_feature (4)..(4): n is a, c, g, or t
  misc_feature (7)..(7): n is a, c, g, or t
cctnacntcaacccagtcaacctctctacaagaggagtattgaattctggtggactgtcagctttatttagctgacctagtgtttcccagaaaattgatccaccgtctaataaatccagaggtttcacattaaaattagaatttctggcctctctcgatcggtcagaatgtgtggcaattctgatctgcattttcagaagaggacaatcaattgaaactaagtaggggtttcttcttttggcaagacttgtactctctcacctggcctgtttcatttatttgtattatctgcctggtccctgaggcgtctgggtctctcctctcccttgcaggtttgggtatgaagctgaggaactacaaagttgattgggttgacgtcag

SEQ ID NO: 572027 - DNA, 205 bp, Homo sapiens
tctattttattattagtttgaacttgcgaaaggagaagtacttggccgcatacgattttattttattttatttatttattttgagacacagtcttgctttgacacccaggctggagtgcagtgcagtggcatgatctcggctcactgcaacctccccctccagggttcaagtgattctcctgcctcagcctcctgagtagctggg

SEQ ID NO: 572028 - DNA, 211 bp, Homo sapiens
aggtgtgcgagattccagctattccttggaaagttccctagagcttttacagaagggatgttggtacagctccatgctcctcgagtatcagtctatgagaaggggatgtaatttggctgtactcagggagatgggatttcatttcttttgggcctcgggaattgatatttgaaaaaatcggtctgttctccctgttttttctaggggtgga

SEQ ID NO: 572029 - DNA, 373 bp, Homo sapiens
ccaattttgttatcaactaaaactgctctaaaaaactattttaagtaccagtgttgaatcgtttcagggtaagttatttctcaatcaaaccacatatgctgtttaggacatatcagagaataaggaaagaaaaaaagcatttccattcttttaaagacactgacattttactgtgctgataccagacttgtatttgaacttctatcagaacttgtatatacatgtgtaggggcagggaatatatgggaaatctctgtaccttccatttaattttgctgtgaacctaaaactgctccagaaaataaaaactacaaataaattaattacattaaaaagtaaaatgcagcctggccaacatggtgaaaccccatct

SEQ ID NO: 572030 - DNA, 486 bp, Homo sapiens
gtgtgatcagacagaaatgatgccatagtcccacccccagctccaaaacttggtcagagattgcctgagtcagaggcagaagggctgggctgagagtaggggagcagccaggacaggaaacaaagcagacaactcctaatctcttcccagaggaactgacttcatttgcaacacacctagcaagagtccaaggctaagggtgttctcagaaacactggagatagtagcacaatgtacagggtccccctttatctgcaggggctgtgttccaagacctcccatgggtgactgaaactgcggattatactgaaccctatactgtgtttccctatatacacatgcctcttataaattttaattcactagataagtcacaatccgagattaacaatagctcataatagaacaattttcacaatacacgtgtactaatagttatatgaatgtggtctcccaaaatatcatgttgtacctgtatgcaccctt

SEQ ID NO: 572031 - DNA, 127 bp, Homo sapiens
ggactcaagcctctctttggctaactggaaatgcgcatgtccattaccatccccaggtgtctcgagatactcatcaacggcctcaggactacatggcagcggttgtatgcagtataacaggatcacg

SEQ ID NO: 572032 - DNA, 224 bp, Homo sapiens
ctaaccgacgacatgattgaactttctctttccccctgtatgatactactccattccaaactcatctcattctgacacccggagctacacattaccctaagtataacagcgaccctcttattctagaactgcatatcatcaatatggtttacgacctcgcatgttggatcatgacatcccgatggtgcagccgctattaaaggttcgtttgttcaacgattaaa

SEQ ID NO: 572033 - DNA, 196 bp, Homo sapiens
cgtatagttcagtgatttttttttagtggattacctagctattttcttgttacaaaattatgtcatgtgtgaatagataaccttactggtccctgtccaattgggatgcctcttatttcatggtgtacctaactacggttggtaattacctaattacctgacagaacctccagtacaaggttgaagataagtggta

SEQ ID NO: 572034 - DNA, 1033 bp, Homo sapiens
tcgtgccactgcactgcagcctgggtgacagagcaagacttcctctcaaaaaaaaaaaaaaacagtggctctggggatgccctctaaagtggctggagccatccttatgggcaccagcagcagtgacagtcccaccctccaagccctcaccaaggctggattcattggtctccgggacagtctgagggctgagcatttaagcctgtgggtcatcatggaccctccgtaccctgcggccattcaaaagcctgatggtttccttcctctcttatctgctgtcccttctcagcaccaggaaggaggaaaacacagcggagattggcaagaacgacaaggacgtgcaagggggcggcacaaagcaggaaaggacgcataaagacataacagcgtgatgagagagagaaggtgccaatgaagccaaggaaagaacactggaccaaataaccacaaggagttcaaaactaacggaggaagagaactaccgaggaacccacattagcatggagcaaaccaaggtggggccacacaagggatggcaagactcatagatgaagagaggcccctatacaagcggaaggaacaatacaaacaaaaacactaaaggtgatggaaaaacccaagagggcaaaagaaaggggcagagaggaacggattgaccaacgaaaagaaaggaagacaaagaacagaacgaaggaggcacccaacacccgacaatgttgggacagggaaccaggacggtgataggaagaaacgggcagagccaagggaaatagccaatacagagccaaagagaagagaaacgggacgtaaagccaagaaaaagaagtgcatgaaaacacaaagcaagagaaacagaagacaaacaggaccgagaacagagcacaaggcagaaaacgaagacagaacaagtgaacagaaagagaaaggagacacactgaaacgtagcaccagaagagcacaaagcaagaaacaacagaacagaagagccagacaagacaaaaagacagtacgtaataaaaaagcaaattaaaag

SEQ ID NO: 572035 - DNA, 657 bp, Homo sapiens
ggatgatttactgcctgaaaaatctcacaatatctgggtaacaagtatggaaatggaactctggatttgcagttatactggcaagtggaccctttggctgcgttcttcatactaaacgccaggtgaatttttcctgaaaacatctagtggctaaaagagataccaatagacctctaaaacttcgcacaagaccttcaagatcacagaaatgtttaaaatttgattccagttaataacagaggtgcgtgccagaatgcctggactgcagtggatgtgccccactctctttgcttaaatcaaaaaatatgtcaatagccaggcatagtggctcacgcctgtaatcccagcactttaggtaggccaaggcgggtggatcacctgaggtcaggagttcgagaccagcctggctcatacatgcgtgaaatcctgtctccactaaaaactacaaaaattagtcaggcgtggtagtgggtgcctgtaatcccagctactcgggaggctaaggcaggagtaatcacttgaacctgggagggggaggttgcagtgagccaagatcgctccattgccctccagcctgggtgacaagagcaaaactccatctcaaataaataaaaaggaaaaaaaagtcaataaactgtacaaattaattacagtatt

SEQ ID NO: 572036 - DNA, 538 bp, Homo sapiens
  misc_feature (399)..(399): n is a, c, g, or t
gagtcctttattagccggcagccgagagacagctagcgctcgaaattctcttggccccgaagaaggagctagattttcttttatactttggtttagacaggggagagggggagtctagttgaaacaatcttacagaagtaaagtaggcaaaaagttaaaaggataaacggttacaggaaagtaaacagttccaggtgcagaggctttaagtctatcctaaggtgatggacgccgggctttgggcgttatcaaccggacacaaacgcaggggctctgggtgctattaaccgggcgaattcctgggaactgcggatatagcttgccacagtatcttatcagttaattgcattcttgatgtgctgggagtcagcttgcacaagttaagtccttgaggaaggnggtgggtgaagggctgctaatgaaggagtcacgatagagtccgtctggctcttttagctaaggagagtcacttaaggtaaaacagggcggggctcacactagaagccctacattctcagctttagtcaggcaggccatt

SEQ ID NO: 572037 - DNA, 305 bp, Homo sapiens
aaaaaaacaaggggggggggccctttttgggggctttggcaagggggccccccccccccctttgtgtggtttgggggggttttcccctttttttttggaaggcccgggggtttctttttcccttttcccgccccccctgtcccccccaatttgggttttttggttggggggcctttccccttgttttgtggggaaaggggggaatgtggccttttcccccccgccccttcccccgggaaagggggggggggcccccccctttttttttcccatcgggttttttttttaaccctggggccccccca

SEQ ID NO: 572038 - DNA, 1200 bp, Homo sapiens
  misc_feature (1085)..(1085): n is a, c, g, or t
gtcagtctctcctgttttttgttcttcgttgctcttgtgactgtgcagcgtgatacgagatgatgatgatgatattatattgtgaatgtgaaggaagacaaggagacgaacgaagagaagagtcggaagtttagtatgtccgctctatttggtcgacagatgctgatctcttgggtgtaactctcccgttcggtaccagtgttgtacgtcttatcctgcgacggtacacactactgtgtgttgcggcgcgcaccatatgtgtataacatgcgaaggcaccacttgcgtgttaataggtgcgcgccggataggcgcccctcgagctattttgggccccgtgtaaagtcgtccttggtagagcgctggttgttgctcgttcgaaaattagggggatgtcggcgttgtgcgcggaggccgcacatgggtttctctgggtgcggggtctccctctgcgcggtgtgtctctctcggtccccgggtctccccccaggcgctttgtggtgcgctcgtcgccgcggtgagagtccggttggtttcttgcacaaagttgtgtcccagtcggactgttggctcggtgttgctcgcttcgagggtgtctccatgttgaacacgcgagcaattcccctggtggaaaaattatttggggtgaccccggattccctcggcagaggaggaaccaccttggttataagataagtggcgggcacgtcgtcggtggtcgccacctgttaattgaaaaatcatcgggagtgggcggttagatggaggcgggtagttttgtacaaccacacacaggcgtccacaacgttgcttgtgtacatttctttttgtcaaaagaggccgctcactcacgctggtgttgtttacaccgaagggggtctctctctttcaatggggctggtatatatcggtggtgttcccccccttgttgggcacaccaccacacgagggtgttccacacaattgtccggcgtagcaataaccaactcggccgcgggggtatagtcacaactgctcctttgcttatggacatgatgagagtagcccactccccaggaggttccccttgatttatgaactgtctnttcgtgcacgcaccagaatggatataagatagttacttatttaccctctgcttttctctagccattgaatataaaaaaaatgcaggggctgtactcatcattgatacaagaaaat

SEQ ID NO: 572039 - DNA, 707 bp, Homo sapiens
  misc_feature (407)..(407): n is a, c, g, or t
  misc_feature (707)..(707): n is a, c, g, or t
tgatgggtctagcaatcaatgatagcttactcagtgccgtccctagtaaggatcctgtgttgaacaaatagcctctgacatctgtcatctccagagagtggtgtgcaaaatcatttccccagctgatgctcatcgagaacctctgcctagctcttcgaaggtcacaaggaaatgtaacgtatctgaccctacaacggccaatgaccagtgatgatatgttatcccgcattgtggtgaggtcttgagacatgtccagaagtgtaatccctgcgaatatctccgggtctgcaagtcttgttccggtagcaactcaggcagctgggctgactctcgtccttgcgccctggaagtcgaaccaggtcgcctgacgtgcgtaaacctctccgatcaatgagcattctgtgcantgaagggttgcttacagtttgcgtgtacacctgagcttatgagacaccccaacgttgtctttctgcatgaggatatgtcgcatcggacatagatctgctgaagcgcttagcaggaaaacgccacatgttgcacaaggaaagccttggactgcctagtgtatggcttgatgcacgtcgcgcggggagtgcttgaacatgagccatgcttcctttgtgacccaagagaaagcccccagtttggggaaagtacagggggatgaacgctttcatggtgctgaggggcgttgcatggtacccccn

SEQ ID NO: 572040 - DNA, 980 bp, Homo sapiens
gcgctcgcggccacgccggcgtcgcgggtacattcctcgctcccgggccgaggagcgctcgtggctgtctgcggacctgccgtgtgcagtgtgtcggcggcggctggagctgggagtgagttggcggtggaggagccagtgtgaggaggagccaggtgagcatggaccctgtgctgggcgcggagtcactgcatgctcgaggaaggcagttggtgggaagtccagcttgggtccctgagaggctgtgagcaaggagatgcgtgtgttgctggccctgttgggggtcctgctgagtgtgcctgggcctccagtcttgtccctggaggcctctgaggaagttggagcttgagccctgcctggtcccagctggagccaggaagagcaggagctgacagtagcccttgtggcagcctgtgcggtctgtgctgtgggcggcttgagcggtggtggccactgggtacaaggagggcaggtcgactggcacctgctggccgtgtacggggcttggaggggcgcgctagagattgcgagtttcctacctgaggatgctggcgctaactcttgactggacgagggtccatgatcggcctgcagaatctcaccttgattacagggtgactcccttgaacctccaaggaacgattgattgacggacccacagttccatagggacccctcgaatagggagagtaccgcagtaagcatctatgtgggaagcgcggcagggatggagaagagagtggatgagtactggggaagacgtcagtcgatgcagtgagggaacgagggcaaagcgtgcgtaggtgaggcttcatgggaacggatggggattggtggaatagatgagttgtgaggaagtgtctgagggagatacgttgtagagggggcggccgtaaagagatggggggcgaggaagtgagggacgaaagggggagggttggtgggatgaaaggggggtaaaatgtggttttcttgggcgg

SEQ ID NO: 572041 - DNA, 152 bp, Homo sapiens
acgtgtcactgcattttatccttcaacttgtggatgcaggcaggtggcatgatgccagagctctcctacagagatgtggtgcaattgctgaacacaacccgatatagtagttgttcctccttaggaattctaggaaacaaggaaaggtactg

SEQ ID NO: 572042 - DNA, 898 bp, Homo sapiens
  misc_feature (200)..(200): n is a, c, g, or t
  misc_feature (298)..(298): n is a, c, g, or t
agcggaaaagtctcctaatcgtaggacagcgtgcgacccagcccttcttcacctgccgtccaggtatcgatccgtagtcgttaccctccggctctgggatgggaaacatcctcgtctagctgatggtgacgtcagtatacgatgagtcccagacgtgggaaaagtctggttcaagagttactcgttgagcatccttgagntttccgtgaggttgaaggggaactcattcttcagtgcacgcacaggcttgtcaacgcctgtgcgagcatcaaagtaggcaagcgcagcacgagtaatnaaccgaaacatcggcgaacacgctggctgaagagcggatgacgcagtcgatgtatctgcgattctccttatgctaagtgaattgccagccgatgcctggctatctgcctacggggaaagaggaggagtccatgggagaagtgggcagaagcaggaggcatatagcaatgtcagacatgtttaggtactagtcatacgactgacacaggagcaggatgctcgagatagtttatggtgacgagaaggatgaacgaggacaattcagcgagtactggccaggtggacaacagacaggagctacttcggtgactctcactttgcagaggaacttaccctggaaccaacttttgctgggccctggacttgtcaaaaggctgtccgcaacgaagagcttcgcggaatgcgtaataccttactagttctagctggaccgcggaagaacgcaaggaagacactaggacgaagttccaggggacgaaccccatgacggcacacggagcgtgactccacgacaggatactttaacccccttggcaaagccgtggcggcaagactggggctttcaacatccgtggcatcggcctcacaatgccacgggcaa

SEQ ID NO: 572043 - DNA, 189 bp, Homo sapiens
ctgcatgcgttggtcttgactctgggctcaggtgatcttcccacctcagcctcccaaggtgctgggattgcaggcatgaactaccgtacctggctgggctgataatttaaataggtcggctcaggccaggctggaaatgacagggctccagttgagcaaagacctgaccaacgcgacagctgacagcga

SEQ ID NO: 572044 - DNA, 650 bp, Homo sapiens
cctcggggaaaaggcctcgctttcgaagctttgccaagagcctgcgcgcacgcggtcgccccttttctgggggatctttccacacactttgcaccttttagaagaggcacattttaggggattttctgccacaacgaaatgtttcaatcccgcgggacccattccaagaggtggtccctgggttcttcccccccagaatatgtcctaatatcacactgggccacagagcacgtctagtctgtaaactggagacttgaaattataataggagggatcacggccccagcggcccacaggtggttcacaaccaccgtaaatcccacgccaccactttgggatagggctgagagtcgggcggcgaatcacccctgacggggtcacggggaagttgtgacgagacccaccagtgccccacaaactggcggacagaccccgtgtgtcctcccgccgaacaaccccgcaagtctacaccaggcctcggtggggcaccgacgataattccccgtgacttgggagggcgtgcaggccacaacaaccgggtgacacccacggaagggacccagggtgccccggagcacccagagtcaccaccccaatgcgctccacaccacggggcggcagaacagagcagctctcgtcccacaaagaca

SEQ ID NO: 572045 - DNA, 220 bp, Homo sapiens
gacgaggtttgccatgattttttctttacttcaggtcgcttctggatacccttgataggcgcataatgttaacttggcacatgcagtcctggtagactacccagtctgatactatcctgagttggcactgattggatcgcatgactcacagccctgtgtctttgaggacccaaatatcaacaccaccagtctggattttgcttcacatgaggtcctcatg

SEQ ID NO: 572046 - DNA, 452 bp, Homo sapiens
caagggtgctccttgcgtgggtcccttaacaaaatgccagtgtgggcggtttggagaaagggtccccatgggatttgagggggctgctgaactaccagtttttaaatttgggccgtgctgttccagtaaagtctctttagcctaacacctttgttaaaaaatggtaaagggctgggcccggtggctcacccctataataccacccctttatgaggccaaggcgggtggatcagttgaggttgggagttcccccccacccagaccaatatggagaaaccccctctttactaaaaaaacaaaattacctgggcctggtggggcatgcctgtaatcccacctactcgggaggccaaggcagaaaaatcgctttaaccaagaaggcgaaggttttggttaaataagatcaagccattgccctccagcctgggcaacaaaagttaaactttgccccc

SEQ ID NO: 572047 - DNA, 399 bp, Homo sapiens
  misc_feature (17)..(17): n is a, c, g, or t
  misc_feature (43)..(43): n is a, c, g, or t
  misc_feature (99)..(99): n is a, c, g, or t
  misc_feature (116)..(116): n is a, c, g, or t
  misc_feature (391)..(391): n is a, c, g, or t
  misc_feature (393)..(394): n is a, c, g, or t
ccccccccgggaacccnagtaccccctttccccccttggcccnccttttcccccttttaaagaaatgggaaatgtcctgcccccctatgccctgtcccnactgttgtaattttggnaaagtcaaataacttgttttggactttaacaggcttacagcccagagggaatctccccatagaatgaattgtacccttaagtctcaccccacatctgatttagatgagaccatggactttggaattttgagttggtgctggaacaagttaagactttgggggttgtctaagtgtggtgtttcatgcctgtaatcccagtgatttgggaggttgaggtgggaggattgcttgagcccaggagctcaagaccagcctgggcaacatagtgagacctnannctaca

SEQ ID NO: 572048 - DNA, 703 bp, Homo sapiens
  misc_feature (7)..(7): n is a, c, g, or t
  misc_feature (72)..(73): n is a, c, g, or t
  misc_feature (95)..(96): n is a, c, g, or t
  misc_feature (125)..(125): n is a, c, g, or t
  misc_feature (187)..(187): n is a, c, g, or t
  misc_feature (227)..(228): n is a, c, g, or t
  misc_feature (230)..(230): n is a, c, g, or t
  misc_feature (236)..(238): n is a, c, g, or t
  misc_feature (244)..(244): n is a, c, g, or t
  misc_feature (251)..(252): n is a, c, g, or t
  misc_feature (264)..(264): n is a, c, g, or t
  misc_feature (279)..(279): n is a, c, g, or t
  misc_feature (287)..(287): n is a, c, g, or t
  misc_feature (299)..(299): n is a, c, g, or t
  misc_feature (302)..(302): n is a, c, g, or t
  misc_feature (310)..(310): n is a, c, g, or t
  misc_feature (320)..(320): n is a, c, g, or t
  misc_feature (323)..(323): n is a, c, g, or t
  misc_feature (325)..(326): n is a, c, g, or t
  misc_feature (336)..(336): n is a, c, g, or t
  misc_feature (350)..(350): n is a, c, g, or t
  misc_feature (352)..(352): n is a, c, g, or t
  misc_feature (354)..(354): n is a, c, g, or t
  misc_feature (360)..(360): n is a, c, g, or t
  misc_feature (363)..(364): n is a, c, g, or t
  misc_feature (366)..(366): n is a, c, g, or t
  misc_feature (376)..(376): n is a, c, g, or t
  misc_feature (389)..(389): n is a, c, g, or t
  misc_feature (392)..(394): n is a, c, g, or t
  misc_feature (398)..(398): n is a, c, g, or t
  misc_feature (420)..(422): n is a, c, g, or t
  misc_feature (425)..(425): n is a, c, g, or t
  misc_feature (430)..(430): n is a, c, g, or t
  misc_feature (439)..(439): n is a, c, g, or t
  misc_feature (443)..(444): n is a, c, g, or t
  misc_feature (475)..(475): n is a, c, g, or t
  misc_feature (486)..(486): n is a, c, g, or t
  misc_feature (493)..(493): n is a, c, g, or t
  misc_feature (495)..(496): n is a, c, g, or t
  misc_feature (506)..(506): n is a, c, g, or t
  misc_feature (509)..(509): n is a, c, g, or t
  misc_feature (511)..(511): n is a, c, g, or t
  misc_feature (514)..(514): n is a, c, g, or t
  misc_feature (554)..(554): n is a, c, g, or t
  misc_feature (573)..(573): n is a, c, g, or t
  misc_feature (632)..(632): n is a, c, g, or t
  misc_feature (639)..(639): n is a, c, g, or t
  misc_feature (642)..(642): n is a, c, g, or t
  misc_feature (693)..(693): n is a, c, g, or t
caataanaccgatatcaatttcaatcaaaatgaattatatccagtgctcactctcagccttctatatctagnntgaggggggggggatatattannatgtctagccaattccatctgtgttgggngttttcagctgaatctgggggtaattacatgcagatgccaatatcttgtttatctacaaggnatttctttcataatgaatgaagtggagggatatcataagnncnggactnnngttttnaacaaanncaaattgaaggnacactttcagaaaangggttctngtatgtcttttnggnttactggncggttatgcngtngnngatgtcgggngggttatttgtgtntngnttgggnttnngngggggggggngctggtgttgtgntgnnngggnggggggggtgtgggggggtttnnngtnggggngcatatggntttnnggggtatcctttatatatatatgtgggtgtntatatatgggngtgtgtntnnagcggggggnttntntcngtcatttttggtctttttttttttgttagcttgcttcctnataacttgccatgcttgcntaatttattcagttttttggtttttagttttatttgtcctgtccctttagtaacaattntttaaanttnattctctatatcatacctataatgcacattaaaacactttatttcacacanaacatttaaa

SEQ ID NO: 572049 - DNA, 192 bp, Homo sapiens
gtgggacacgatcttcgtgaagacccgtgactggtacggagcatcaccctcgacggtggagcccagtgacaccatcgggaatgtcacggcaaagatccacgctaaggaaggcatccctacctgatcagcacgcggttgatctattgcgtgggaaacacgctggaaggcatggacgcacccttgtcgtgacta

SEQ ID NO: 572050 - DNA, 271 bp, Homo sapiens
gtggactgctcgccgcgtcattgtcacctcttcctggtaagccttcctgtatacccagcagccccgtctctagccttgatcgttctgtggtctgtagtttattctatggttctcgtgtggtcatcttcctgctccgctctcgacgacagcacactgtagagcccggaagagttagaagtatccctgtagttctgtaacatgcgatacgaattgtctagctactagatgcgtgcccgacccccgatggctaggaagggtggctccactttcc

SEQ ID NO: 572051 - DNA, 209 bp, Homo sapiens
aataagctggtgacgataaaacaatcacttatgatcaaaatgcgtatgaagtgttcgtcactgttgcggatgatggtaaaggccaattggttgcgactgtagaagatgcggatacagaacgtgtcttcacaaacacttatacagcaccagttccaccagctccaacagctacatcagcaacacttgaatttacgaaagaattggctggt

SEQ ID NO: 572052 - DNA, 1355 bp, Homo sapiens
atgtttgcccacctcgtttacaagacgcgctcctcatttttttgtccggggtttattctcccggtgtgtccctcttttgtgcccattagagtgttgccaaaaccggggttgtcgccgcatttccccgagtttttgaaccaccgagctgtgggccgcctttttggagcacctgataagctgtttgctccgcttgtgtgtttttcccacgggggccccccctttttggtgttttgtgccccgtgtttttccaccccccccctggtggggccctatgggcctatgactctcttgtccccctctatgtgtgcccccttcacgggtgaagaacaacaccaaaagttggtgtgccacacctggtgtgaccccgctttcacccagtttttgggggggtttcttaatagggggccctttcttcacactgtgtgttgtcccacaacacgaggagtgggcttttattctgtcaccacgggagatttttcgctcgggataaacggctgctgtttttttatgggggaaggattctccccccttgatggttagctacccccttgttttgcccccttttttgtatttgagggccccccccccgggcgcgcctcccaatgtgttttcaccccacgtgtttctcgcgcacccgcctgttgtggtgagagagagagtttaataatgggccccccacagcttctctctcaaagagaggttttctctcctcgagggaaacgccctcttttgtcttttgctcttttatatgagagaagaagcgccccccacgcggccccctctttccgcggaggagatgtatccctcaagagagagataccttgttgagacaacccctctgcggggagactcgttttcacacaataaggaggagaatgtggatgtgaggtgttgtgtacacacagaggatccccctctctttgcacccacacaagaggggatatttctatactaacctctcgcggtgttcgcaacaccccttctctctggaaacacacgtggagcgccacacatagccacaagagtgtgtggtttataatagaaactctctttgtttatatatatttttctcacgcgtagacacatgtgtgtttaatactcttttttatatattgttcaagaacacacctttccccacccctccttgttgaacctctcttgtgcgcaggccacctcttggtttttccgcccttggcctctcttttttttgtaagtagttttttcccgcaccctctttttgcccctcttggcccctgtgtaatatataccgcgcacggcggaaatggggggggggggggttaatttgttttgtatataaaaatttcgggaataaaaactcaccccaaaattgtgta

SEQ ID NO: 572053 - DNA, 927 bp, Homo sapiens
  misc_feature (267)..(267): n is a, c, g, or t
  misc_feature (295)..(295): n is a, c, g, or t
  misc_feature (304)..(304): n is a, c, g, or t
  misc_feature (307)..(308): n is a, c, g, or t
  misc_feature (310)..(313): n is a, c, g, or t
  misc_feature (328)..(328): n is a, c, g, or t
  misc_feature (343)..(343): n is a, c, g, or t
  misc_feature (359)..(359): n is a, c, g, or t
  misc_feature (363)..(364): n is a, c, g, or t
  misc_feature (382)..(382): n is a, c, g, or t
  misc_feature (385)..(385): n is a, c, g, or t
  misc_feature (399)..(399): n is a, c, g, or t
  misc_feature (404)..(404): n is a, c, g, or t
  misc_feature (410)..(410): n is a, c, g, or t
  misc_feature (414)..(414): n is a, c, g, or t
  misc_feature (416)..(416): n is a, c, g, or t
  misc_feature (420)..(421): n is a, c, g, or t
  misc_feature (443)..(443): n is a, c, g, or t
  misc_feature (452)..(453): n is a, c, g, or t
  misc_feature (456)..(456): n is a, c, g, or t
  misc_feature (475)..(475): n is a, c, g, or t
  misc_feature (486)..(486): n is a, c, g, or t
  misc_feature (490)..(491): n is a, c, g, or t
  misc_feature (493)..(494): n is a, c, g, or t
  misc_feature (496)..(496): n is a, c, g, or t
  misc_feature (500)..(500): n is a, c, g, or t
  misc_feature (506)..(507): n is a, c, g, or t
  misc_feature (510)..(510): n is a, c, g, or t
  misc_feature (521)..(521): n is a, c, g, or t
  misc_feature (524)..(524): n is a, c, g, or t
  misc_feature (526)..(526): n is a, c, g, or t
  misc_feature (529)..(530): n is a, c, g, or t
  misc_feature (533)..(533): n is a, c, g, or t
  misc_feature (543)..(543): n is a, c, g, or t
  misc_feature (564)..(565): n is a, c, g, or t
  misc_feature (568)..(568): n is a, c, g, or t
  misc_feature (574)..(574): n is a, c, g, or t
  misc_feature (578)..(578): n is a, c, g, or t
  misc_feature (581)..(581): n is a, c, g, or t
  misc_feature (585)..(585): n is a, c, g, or t
  misc_feature (587)..(588): n is a, c, g, or t
  misc_feature (597)..(598): n is a, c, g, or t
  misc_feature (603)..(603): n is a, c, g, or t
  misc_feature (607)..(608): n is a, c, g, or t
  misc_feature (643)..(643): n is a, c, g, or t
  misc_feature (660)..(660): n is a, c, g, or t
  misc_feature (667)..(667): n is a, c, g, or t
  misc_feature (699)..(699): n is a, c, g, or t
  misc_feature (817)..(817): n is a, c, g, or t
  misc_feature (900)..(900): n is a, c, g, or t
catcagagtccacacgattgttatatctgttcagcatgatgaagaggtttgtcctgatgggagcaccagtcttctcccatcagctttattggaatagtttaaaattacatttctattttctaggacttcagttgctctttccatctgacttttaaaaactgattacagcaaatgaaacacagttgtctaagtgatatagtatacaaaaataacatcttgatttctgtgaaaatgcatttctctgcaattcctgaatagctccaaatnatgctaactctgggcattgatgtttacnctgggtttncgnntnnnnctttggcaatcatgngttctaaacctttgncatcaccatctatgtntccnncatcaacactgtgatgangtngttcctgtttaggnttttnttccgntttngntcgnncagccattaacacgcatgtgtntgtttttgnntantcccactcaactgtatgtnctatgtggggnctgnnanngntgtnacttgnngtnatttagtagcnacngnggnnagngaatccaagngcatcattatactaaaattgnngtnatttgngggngtncatngnnacttccagnnttggntttnnctccgacatgggaacatgttcaaggaacccaggangggcttactggtctgantcaactnttcccattcatcaatccctattcaccagtggnacggaaagggggttctttaacaaagcattatacataacacctctaccaaactaaacataaacttttttttagttaaatgcagaaagtcggtttttttccacccctttcctccttttanacggcaagtaaagctcactggcctgggagttgcctctatctgccaacctttggccagtgaagaggattcagagaaaataatancaacatcaatcagaaaaaggggggggg

SEQ ID NO: 572054 - DNA, 130 bp, Homo sapiens
  misc_feature (76)..(76): n is a, c, g, or t
caagtgtttatttttatacatttttttgtattaaaaagaaaagcataattaccacaaattacaaaggtcctttgcnggactggtttaatgaatgaatcacttcagcctggaaagcagatcctctcactaa

SEQ ID NO: 572055 - DNA, 813 bp, Homo sapiens
ctgagtcccagcatggtgtctctgcagtcgagggcaaggactctgcgtgaattctcaactgctctgtctactcggccactccggtcccgacactcatagcctgcgggacatagaactaccctggaattgaaaggccaccgatgaagaaaagtgcagtagctcttaggacagagacaattttggttgttgaccaggactggccgctaatttgttttaccaccagtttgtggacaccattttaaatctccccttgcaaggtaaccctctttccgtgtaccgaagatggtgttcaatcacagtactaaagaaagggctgctagccgagtgggcaaacagcgaggggaaaaatctaagaacttatttaaagaataccccagatttttgcgtggcattttgactccttgtaggcaacctttacaaacgctctttgtggaatgtcccttatgggatttattggccctgagttgcgccagcccggcccatggaacagttttccgccgtacgacacttttggtggacgcaccgtcggttttttgcccgagatttgccatcatttgattgcgccccttgaattacagtgttttaccctcaagtggacccacagttgtgcatgtcggtgaaaccgcccccagtgtggtcccctgcatgttgtatgctcagccgcctccacggggagtttcaaacggccatatcccccatgattttgaacttttgtaggactgcattcacgtggcaaaggaatgcgtcttttgtcacttcaccacttgttagggcaagtggccgaacacgtgcctgggaccctccagcacttgt

SEQ ID NO: 572056 - DNA, 161 bp, Homo sapiens
gcaattagggaaacattgttattttaaatatgaagggctaaaattttctcttaatacgtacagtagagtcggtggatgtttaagaggttatttggagtctatccaccttaattaaagttccctctgttcaaaaatccaggattacatttcttatttagagg

SEQ ID NO: 572057 - DNA, 236 bp, Homo sapiens
cactgtgcgctccttgtcatgtaagcttcatccacatacttcttgatgcaggacaaattcgttctccatctctgtacgcatattgatctcatcctcatcctgggtccccgagcactcctctggcacagtacgggtctccctgctcacctacagggccttggcaccacactgttgccccgtccttggacatgctctccgtttctcctgtatctacctgcatactatggctacaaagt

SEQ ID NO: 572058 - DNA, 317 bp, Homo sapiens
tgacagcaaggcgatcaattctgtcttgaagagaatttgctctgatgtagaagttgttagcctcattaaacaactcaccaaatatgtcttcagcatgtttgctcagactgctcagctgcgtatgatagccgcaagagtactatgggtacacttcaaggtcgtggtaatccccttaaggcaagaagccccaattcggggctcaattgtcttctcactaagcttggtcacatcatgtatcgtaacttggtccaggaaatcccttaagtagcatcaccactttggctcagttatcagtagtagttaacagcaatcaaaac

SEQ ID NO: 572059 - DNA, 157 bp, Homo sapiens
gcgctgagaggcgtagaccttttagatatcattccaggcttaaagtctcttaaggagcaaaacagcttcctgggtcttcgtgtcgccttcaactttatcttcaactaccaaaggaagttcaggagcttcctcaatacgatgcgcgtaagggccagca

SEQ ID NO: 572060 - DNA, 714 bp, Homo sapiens
gcctcacggtcctgctgatatgtgacatcacccccggaggcccagctgtaaattcctctcttgtgtactctgtgtctcttatatttctcagaccagtcgcgacacttagggaaaatagaacctagcggctgaaatttggggggcaggttctcttgctaggtttcgaggatttagctgaacgatattcctgagagaatcatcccagggtgccatcactaaataaaatgatccagttgacagctacccctgtgagtgcatcttgtggactgagccagatgcattattccaatgctacaggcctgattccctttcagatggtgagtcttgtcaggcatcactggaagactgaaaatcggtacgacatgtattattctcaagcccatctatatgggaccaatgaattcggtagaggtggacctgaagtcatgcttacttcacttggaggggatcatatgggagtccaccccatgggtctcttctggtctcgtgaagacctgatatgctattaactaagactgttgaagagagatgtgatgaataggcctttccaggtccaagtaaaagtttatgacttagagttaatacgtgaacaataccagttgcctagtgcgtccaaaggccagcctgaactttgcagaggtggtatgtggcagctggtgtcacacgaattaaggtccgagaaggccgactacgaggagctctcttactgcgata

SEQ ID NO: 572061 - DNA, 441 bp, Homo sapiens
  misc_feature (29)..(29): n is a, c, g, or t
taagcagtgccctttttccaaaaagcccnactcccctcaattggttgaaattaataaattttaaatgagagaagtcctgatttcctaacaaccttaggtctcccttagaggttgatgtctcccaaacaaatgttcggaaagtgttgagattcaattcctatatccctagggtcctaatggagagagtataacacagtagaaaaggcacagatgtagagttgggcaaaccccaggttcaagtaccaactctgcctcttattagttggaaagctggtgacatttctttgaactttagagtaaagatacagcaataacaacatcacaggtgtgttgtaaagattaggaaggatgatctagcactgcacctggggcagggtaggaatgtgatacgtgatggttatcactgtggtaactttcacctctaacctccctcttccctgc

SEQ ID NO: 572062 - DNA, 257 bp, Homo sapiens
gatctgtgtggaaaacacattgaagacgacattgcccagtgtattgacactcttgacagtgccccttgtgggggcggtggacccctctcttctcccccagtctgtggagccccttcttctttctctcccccttctagaagagaggagaagagatatgagaagagggaggtgtctgaagacacatatgatgacatggtatgtgctctttgtgattataccccttctcccctacatataaactctttccacacatctca

SEQ ID NO: 572063 - DNA, 109 bp, Homo sapiens
ggttggggaagcaccagacgaagagtctgcctatgtggcaggagaaaagagtcagcatttcaggcaagatgtcattgtatctattgatagactggtgagacgtggattc

SEQ ID NO: 572064 - DNA, 445 bp, Homo sapiens
gctcgacgctggccactgcgctgaccatacttggctcgtactctcgcgcttcggtttgacttttgttcgctatcatgtctgaccaacccgatatggatgacatcgcgaaattcgcttggttgaaactgatgacgacagagacgcaggagagacatccactgccttccaccgaaacgattgaacagtagaagcacgcaggcgaatcgtattgaggcgtgcgccgccaatatgcactgtacattccacaagcattgacttcttattgtacttcttttagctgatgaactctgtaagatgcagagaggttgcatcaagtttaaatgactgtgctggccctttgacatcaaagagctactggcagcgaaggccgagcctgcctttcccatctgtctatctatctgactgtcagggaaggatagaacttgcatgttggtgaaggaagaac

SEQ ID NO: 572065 - DNA, 558 bp, Homo sapiens
atcttgatacttatacttgaatcagttttcagaattaccatctttctactggaactaatgtgctgttctcttgactgcctgctggcgcagcgctccgattgccagccagaaacgtcacactgcccaagatggccaggtacttcaaggtctggaacatgttgagctgagtccagtagacatacatgagtcccagcatagcagcatgtcccaggtgaaatataatcgtgctaggagcaaaagtgaagttggagacataggcaccaatccggatccacagagcgaagagcagaagcaacggcgagaggatcagggcagtgaatgtattggacaccacggtggggggcctcttctcaggctcgcggaacaggtgctgaatttcctgttttggagtgaaacggttctgggacaagacagtcgagggagcttcctcctcagggaacttgatgaccacatcagccacattccagaggatagggttcttccaagtggcatctccaatgattaagtagagagtgtaggtgcagaggcagagtcaattcaatcttacttcagaggtaa

SEQ ID NO: 572066 - DNA, 228 bp, Homo sapiens
tttctctgcctcccagattcaagcgattctctgcctcagcctctcaagttgctaggattacaggtgcctgctgtcacgcctggcatattttgtattttatagaacgagataggagtttcagacatgtatggccagtgctacgtctcgcaactcccacatcttgatcaacgtgattctgcccgcctcggaactcccagaagtgctagggattacagcgtgtagagccac

SEQ ID NO: 572067 - DNA, 134 bp, Homo sapiens
aaaactaggaaacatcattctgtacattgtccttggtacatttgtgacgtagtcctcaaaacagttgtaccacagcaaagacagtgacaggtgtacgtaagtaaactaagagcttctgcagagcaaaagaaaac

SEQ ID NO: 572068 - DNA, 250 bp, Homo sapiens
gggattcctttcctcgcaggtttctactccacatatcagctcatcgaaacccggaatatatcctacacaaacgcctgacccctatctattactctcatcgctacctccctaacaagcgcctatagcactcgaatcattcttctgaccctaacatcacacgccgtacgatcccctatctaggcctactgacgaggcaaaacctgtccttactcctcctagacctaacctgactagaaaagctattacctaa

SEQ ID NO: 572069 - DNA, 550 bp, Homo sapiens
ccaaggccgtcccgaaaggaaattattattaacttggttggttcaagcaccgtggaaggcaacttttaaaccgaatgggtggtaggaaattttgggtggaaaaaatcaaaagaagtttcaacttggatggaacaatttgaggtaacttttgtttaaagtggggctttaaaaagaagcaacttcaagcccctctttaaaacaaccaaccgtttggccctttaagtggtttaatttaagcctttggggcttacctaaaaatggtggcccattgcccccacgttttttctgaaatggccacccctggaggaagccaccaatggggggatggggtaggccaatggggttctttttaaaaaacaccctggggatggaatttcccccacgccaccccactccaagaaaatacttggtgccccttcttgttaacaagacttggcccctccattggtggtaattaccttgcaggtaaggaagaatccgtttttggaaacaatggggaattcttttgtattaggaaggcttaggcctttaaaaatcttaaaatggaatt

SEQ ID NO: 572070 - DNA, 898 bp, Homo sapiens
tctagcaggggcactggtcgactggtctctcgtggtgttcctgtgctctgatgcgtgaccatgttatggggacttccatgggcttggggtgcccccagcagtgggtgctccccccatttgtgggggtccccgccaagggtttctgtcgacgccctctatttttttttggcggccgcccccatttggggagcccacccttctgaatgcccgctgttctgcggttacatgttgtccgctgtttcaggtccgtctgacataatagagtgtctgtcacccccgatggttctggaccatgtagtcgggctgctgccgcattactcatcggggtaggggttcgcccggttccccgcctcagggatgatgcatgtgtctgtcgccggaaagtcaattaaatggttctcctggccccccctgttatgatatctaacgtaggaaatgccgccgtcgtgcccacgccacgtttttctgatcccccccatcagtacggccgcgacaaaccagtggcgttttgtattcgcacgttacactgcggcagcacaagagcattggtgtttcccaggtcatagctggaaacagaaatttttaccagtgtctgccaaaaagtgtttcagatcagctaaccacgatgtcttggagcactgcatttcgcaggttttcttggaacaagccgtgtgcttattatccatattttagtgaggcgaggttacaagcattctaatacttgtaggggcaccgcctacatagtaaaaatttcttggtgtttgccaactctccgtgatgttacgaactgtcgtttgtgctcgctgcggtcttgtacccccgcaggaaacaacgagtaggggaagccccgcgaatggaccccaagcggggaaaaaaaaaatattgtgtccacaagaca

SEQ ID NO: 572071 - DNA, 349 bp, Homo sapiens
agcggagacgctgcccttccgcaggcgatggcagtgccggcgtctgtgggaggggccctctggtatgtgtagtcccatgtcgcgttactgggagcgtggatgtgtgcctgtggacccagcgtgagcaacactagttgaagtactgttcatccatatgggaagactcgttgtgctcctggaggacttatgaccatggggcgattggactctgcgcaattggcagtttccaggagggccgagggcacgtctattgaatccaggccctggtgcgatgacggttggcctgagagtccccggtgttccatgtacactgacggtattggcgcatgatctgcaaattcttccctag

SEQ ID NO: 572072 - DNA, 2150 bp, Homo sapiens
aacagagttatcgaggaggggtggctgctagccattctgagctcatcccaggcccctgggtctccgggtcactcccattctgactgatcaatcaccaaaagccaaggagggcccggcacccagcccagggcacagctgagtctgcgtccagcccaacaccagcccacggcctcactccccagcctcggtctgacccttctagccctgagatccaagtgcccggcatcccgtccccaagcctcacccagaccttctttcccttcaccctcccctcctgccacccatcctctgcccccatcccttcacccacccctcctgccatctatcctcagcccccatcccttcacccacccctcctgccatccatccacagcccccatcccttcaccaccctcctgccatctatacctcagcccccatcccttcacccacccctcctgccatctatcctcagcccccatcccttcacccacccctcctgccatccacctgcagcccccatttctgcagcctgaaggcacagggaagccctctgaggccaggccacaggacagttgagggcttcgggcccctggagtgggtagagggctcccgcagccagagaaggggtttcctgcagggacagcagcgtccgacctcgtccctatgacctcgtccagcctctggcttcagcagtcctacttctttctctctgggtttcttagtaaagatccttttcacaaaccccacgtctccagagggctctgtgggaggtgtgtgtggccctggagtggctggcgggaggcaggacccctgaggacgtgcaggaggagccagaggggaaggaagggcaggggccattctggggtcctgagagccaaagtgcccaagcagtggttcccatcaatcacccctcagcaccccagagactccccagctcggccctgtcatacctggtctgctggtctccagcccagactcatgcctccttctcaggtaaagtcaaagcaacaatcaacatcgaccctttgtggcaaaaccagaagaggccatgctgtggtcagcacaggaggccaagaatgcagctgcacagtcaccaaggtggaggctggtgggggcccccaggaccactggccacacacccttggatccagcacccactgagcacagacaaagctgactccccagcccacagccgcccaccagcctggacctcctgaagagctgagaggtgacccaggagcaggctggggccccagagccatcggggccacaggtgggcttgacccacaccagtcctcagggcaaatgtgcagcctccctggctggagaggcctgcttacaagggtcttccacaacatcctaaaatgggagagaacgcatgataggcatgacaaagggcagggttccctcatatacaaagagcactcagagatcactaagaagaaaggtgagcaataggttcttcatggaaaggaaaaacccagtggccgataatataaagaaaccattttaaaatgagaaaagtgaaaggaaggaggaggggatgaagggggtggaggtgcttcttggccctgactgagggcacgtaaatcattaagaccactttttagggccagttggcaaaatgccccaatgcaggagagtcctctcacagtgatggccccacagggagagcctcgctctgtgccaggagagccacgtacactggagtctggcacaaagcggaatgaagcaagcctgcctcagtctgacagcggcacctgggccctccgccctgtcctctgctgcgacctcggagcagccgggcacgggggagaaggtgaggagcgacggctccctacagggtagaaaaccccaaagcgggcagcgctgaggccgactgggtccaaacaacaccagaggaggggcgtcgcaggacagggccaaggccacagccgctgcccagctggggtcacacactccctcattcacagacacacatgcaggcacacactcgcacatgcaaaaacacacaggttcacacacacagactcaacctctcatacacatttgcactcacacacaccaatcatgcactcacacaggctgacacgctcaggcacgctcataccaacacacacacagtctcaggaagccaggccctccatccaccccatcaccagcccagg

SEQ ID NO: 572073 - DNA, 279 bp, Homo sapiens
gctctcgtataatcgactaagtacataagaagatgtaggaccagatgagaagtctcttccattgtaattacaaagaagtgggaaggaaaggaagttagcgtccctttctgtgttttggtttttgtgaaatagacaggatagagccaggacagagcacggtgtgctcacaccgtgtaatccagagcacttatgggaggccaagtgcgggacggattgcttgagccccagcgaatttcgagaccaattcgtgggcaaacaaagtgatgaacgcctctctct

SEQ ID NO: 572074 - DNA, 429 bp, Homo sapiens
cagagacagaggccaggaggcagtgaggggagccccgcggggaggcagtggcgactgacacaggccttccagcctgtcttgctggacgacctggttcatatatgagttgaattgtactgaccctggacccagataagctgcaactttgagtctttgggggcacagaacattttggggcagtttaatgtggtaccaaactgaacataggagctattgatagatggagcatcacttacagcttcatagaaagcaatgcctatgttgaaagttacaaacgcagatatctacatagatatgctttgctgagaagttaggtctgtggtagaccataaaccacaaattgactttttatctcatgaaatatttctatttgcgggaaaaatagtaatatgtaaattaatgacatgtgacgatctctggagtgtctgt

SEQ ID NO: 572075 - DNA, 938 bp, Homo sapiens
  misc_feature (258)..(258): n is a, c, g, or t
cggccgagagctccaccgctgaggccgacgaggccaacagtttattgtcacacagatatttttattttaatgcgggctagggtggctaccttgtttcttaatttacattttgaggggtacttgatattgtcttcagttctacaaatcaaaattatgattacattcctcagttatacatataacatgatataggtttttaaaagtaaatgttttggtcttacggggggggctttttattttgtgtatattttaatgtanagatttaactttatattttttcctaaatgaaagtcagtcaaatatttcaacatgatttaatgtcttttccagtttttctctgagagaaattcagaacagttaaggagtacattatgggatgggcttatctaagagtcaaggaaaatcggtattgaatgaaggggaaaaaacacagcctcttttgagtatgagtacaaacgaataaaggggagatgagcgcagcagggcattggaattaggggagggttattgggttaatattttccaccccctcaatgagggaggacactgttagctgacggtgttcaattcagacctagaagaaagggggtccttggtgatgggttataaaagcttgtgtgtaaagtaaggagggcgtcaatgggggaccacggggcagcattttaggctttctgggctttatacgatggggggggattggtgaggggggggagtaaaaagaaaacggggtttgttccgggggggggtggggggggggtgggggtttgagggcgtgggggtttaggtgtgaagggggggggggggggatgttcgcgtatagggggatgttgaggcggggtgggtggggggcggggggagtgggagggcaggggggggaggtggggggggtggggggggacggggggggtcaggcgggagggggaacagggggacgggtg

SEQ ID NO: 572076 - DNA, 272 bp, Homo sapiens
gttgtcatggcagaccccaaagggaaggcctcccgcgttgtttgaaagtaccaccagtgaatctgttttttgtttctgtccctttccccgtgacacacagagcaggcatggaatttaatgggtgttttggacagacacttgtacatggacagacatccctactgtggatactacaagactgaaaagaaaatggtatgttgtcattttttggctatggagtgtttgtggccttcccagatttcccaggaaccaataaatccctcagagaagta

SEQ ID NO: 572077 - DNA, 392 bp, Homo sapiens
  misc_feature (2)..(2): n is a, c, g, or t
  misc_feature (13)..(13): n is a, c, g, or t
gnaattttagtanagaatggggtttcacccatctaggcccagactggtcctcgaactcctgaccctcaggtgatccacctgcctcagcctcccaaagtgttgggattacaggcgtgagccaccacacccagcctctgttctcagactcaatttctgagctacctccttggactatgagcagaggggatgcagcaactaggaggcttagtgtaaacagccagcctccttctgcaataggtgttagagtggatgtgggtcgaagctgccagtttactacaaagttgaactaattagttttttaaagtagtatgccatattaaaatttacttgagtggggactcagatcgggtttaagggattattacataaattaacatttaagtaatactaaa

SEQ ID NO: 572078 - DNA, 111 bp, Homo sapiens
  misc_feature (13)..(13): n is a, c, g, or t
tgctgatgtcagnacgtgactgctgccggttgcatggagatctgaaggggcggggtagagccaagctgcacaatttaatatatttcaagagtggggggatggagcacgcat

SEQ ID NO: 572079 - DNA, 941 bp, Homo sapiens
ggacttcaaatctactcccataatagcttttgatgacttctagcaagcctcgtaactcgctttaccccccatattaacctatggagaactctctgtgctagtaaccagttctcctgatcaaatatcatctcctacttaacaggactcaacatactagtcacagccctatactccctctacattatttaccacaacacaatggggctcatccacccaccatattaacaaataaaaccctcattcacagagaaaacaccctcatgttcataaaacctaatccccccattctcctcctatccctcaacccgatatcattaccggttttcctcaaaaaaaaaacaaaaaacagagaaaaccaacagtttgtgggagagcctgcggaaccaggaaaaaagggttaagcaagaccaatctgtgtgggggacgggggggcccaaagagtaactgtcacacgttggcacacaaggtgtgcccgaggagacacccgtggacccagcacaaggggtggggttcctccccaattaaaaaaccgggggggggaacacggcgcggttgggaaccaaccccgaagggggtcgggggcacataccggggaccacacacggggggttcagaggggaaccgaaaatacaaattgccgcgcggggggggtgagacgagaaaaacacacaaccacaaacacaccaaccgaacaaaaaccacaacaaccaacaagagaccataatcaacaaacaacaccacgaaaaaccacacacagcacagcacacacacaacaaaaaccacaacacacaaacatgaaaatacaacaacaacaacaaaaccgacacacacaacacaactacagtacaaacccacacacacaacacaaaccacaaccacaaccaaaaccaatccaacaacataaacaaaacatacatcacataaacaaacctcaataacaa

SEQ ID NO: 572080 - DNA, 164 bp, Homo sapiens
ccctattgacaagagacgagatgctggtggcaggacatcagacagcaatggttagtatcaactataaagcgttatgagaggcatatcctgtcaggggtgacgggcccatggaggacgagagctcgtaccagcaataggtagctgcaatggctagagagacctta

SEQ ID NO: 572081 - DNA, 640 bp, Homo sapiens
cttcatgaaaaaaaaaaaaaaattttaaaaaaaaaaaaaaaaaaaaaaaaaaaaaaagaaaaaaaaaaaaaaaaaaaaaaaaaaaaaaaaaaaaaaaaaaaaaaaaaaaaaaaaaaaaaaaaaaaccttggggcccccttggccccagcggtttttagcctgggcaagtttttgcctggggcccgaatttgggcccacttggccaattcccccttttggggggcggtttaccattcccgggcccgggttttaccacggcgggactgggaaaaccctgggggtccccaatttaaaccccttgggggaaaacccccttttccccggtgggggaaaagccaaagggccccccccggtgggcctttccaaaagttggccaaccctaatggccaagggaaattggaaggggtaaatttttgtgaaaattccgggtaaatttttggtaaaaccggccattttttaacccattggcccaaatggggaaaaaccctttataaccaaaaggattcccccgaatatgggttaggggttgtccaatttggaaccaggggccccttttgacgggggctccaaacgtaaagggggagtttttggggcccggggggcccaaaggccttggggacccttaagggcccccccgttt

SEQ ID NO: 572082 - DNA, 565 bp, Homo sapiens
agagcgggctgggccgggtgagcgctctgggtggcccgctgtgggccctgggccgtcgtggcgctccggcttgctgtgcggagatgagctgggtccctcggctgagctgcggcggctctgctccgctgtgggcgcggctgctgggctggcgtgtggtgccattctgggagtccacgttcagacagccgccgtgtgcagaacgcgacaccgatgccatgatcatacctcagaatggtggagtagcccaggaaaccacgacacaaaatagccgagcctcaaaaaagacatgccagcaggaagagcacgaactcaagtagaggagattagggagagcgccgatcaccagagatggctaccagcggggaactaacagaggcagtcgattggagtgaaatgcatggaaggactcgcggaacaatagagtcgtacagacgaagcactcatcccaaagttggtggcccaagcaaacaggacaagcaaagaaggacccctcaaacatgagaggaagacttaggaagtgcgccgcctagacgagagtacaatacttgaagaagcgcgcgcggac

SEQ ID NO: 572083 - DNA, 370 bp, Homo sapiens
gcacaaggcgatctctgctcactgcaacctctgactcccaagttcaagcgattctcctgcctcagcttcccgagtagctgggattacggtcacccaccaccacgcccggctaatgctttcatttttagttgagactgggtttcaccatgttggccaggctggtctccaactgctacccttaatgatccgccctcctcagccttccaaagtactgggattacaggcgtgagccactgtgccccacctatcattttgttaatgttacaaatttggtagcttattagctattgatcctctttgtatgttagatcgactccattactgttttgttgtggcaatatcatcagtataccatgatatctcgtccttt

SEQ ID NO: 572084 - DNA, 118 bp, Homo sapiens
cggcacgaggccgatccgccgcccgtccacacccgccgccagctcaccatggatgatgatatcggcgggcgcggagctctgcgcgcggctccagcgggccgggatgggcgggcggccg

SEQ ID NO: 572085 - DNA, 550 bp, Homo sapiens
gctgtataatctgagttttcttctataagatgcttttaacttagtatgttctcagtagaatcttgccgagatggagagctgcttttctctctcatgctttgggtgtctgtttcagaagggctattcatatcctgtggtttgtgtgaattacgtgggctgtcacagtgagaactcttggagcatctgcacttatcctggaaatccagcagtattttttaatgtcacaattataactagaaactgaggctgaaacactgctcccattcccattattatgaaggcacaattctatccaggaggcctacaggatctcctcatgcagctcaggctttactctctgatgtggcactggagtgctgctatggcaattggggttcatgtatgatgtgagctgccagctgtgagccctgtgctgtgagctgtgtttcagtggcagatggtaggagtcgagaggacactcgtcatcaggagagggtaagcaggagtgctctaacccagtgcttagggagtagaggagccattgctttaaaatgtcaatagccaaaaagat

SEQ ID NO: 572086 - DNA, 495 bp, Homo sapiens
  misc_feature (123)..(123): n is a, c, g, or t
  misc_feature (318)..(318): n is a, c, g, or t
ttctcgctatgaagtagtaattggtataaataacaatcttgcaggcgttgtatccactaagaagacactgacaagatgtaggagatcaattctatacactcttcagatgtcggcccgaatctnccatcgtgttcccatgaaagcaccatctcctctctgtgttagaacccacgacctctcctctaaaaggaagaaacaaagaacaaaccattttggaacttttctcacaagtcatttaacacccaatctcacagggacgctgtattcgagacattaaacacaagagcgcaatatagattgatgtcaaccttctctacnaagatcttctggtcagcctcctctcatatgcgcccctctaagaggaatagatacactggtgtttcttaggatacacccccgtccccatgggaaccaccctcatatcctgggcataccccaaggaagatcgcccaaaattggaagatgggcctcccaggaatatggcgattagaaagc

SEQ ID NO: 572087 - DNA, 138 bp, Homo sapiens
  misc_feature (135)..(135): n is a, c, g, or t
tacttttcccagggcatacaaaaccaagcaaattcaagaccataaactgaagcgctcttcggcactgtctgatatgaatgtggcatctaatactataagaaacactatacacttttcagatatatgttgtctccntaa

SEQ ID NO: 572088 - DNA, 441 bp, Homo sapiens
  misc_feature (29)..(29): n is a, c, g, or t
  misc_feature (54)..(54): n is a, c, g, or t
  misc_feature (109)..(109): n is a, c, g, or t
  misc_feature (146)..(146): n is a, c, g, or t
  misc_feature (406)..(406): n is a, c, g, or t
cagccaatccccaacccaacccgaccaanttccccccagccccgccggccaatncccccagcccccacccctggcttccttctggcaaaaggcatgaagggaggaaatnatttctgctcctgcccactcatccacttgctgccctngtcccttccagtgcagtgattcttgctggtccctaaccaaggcttgggtgagatagggctgcgtggtgcaattcttctcaagccgtagtgactgtactgaggctggtggtaccgggtggcaggacctgcgttcagacctataaggagtggtctggatcttttgcttagaactctgacgaatggttcacaacacactccatgcgtatctgtagtgatgggaggagggggttaggagcaggacgttggggagaggaggaggngttggaggaggagcactccactggtcaacattatt

SEQ ID NO: 572089 - DNA, 417 bp, Homo sapiens
caagacttacacctacaagtgagttcagaaactgcaccccaccctcctgggacacgcccattggagtgctgtggttggggctctgtacaatgttagacccagtaactgcagaaatagaaacaaatggtcagaagacatatcgtgagagagagcgagagagagttcacaaaaccagaaaacaaagtaccttaatatttaccagtgaccaaaagatgtgaagtagcaggaacggctcctgagcccattgccagctagactgtgtggaacactcggttcataccagccatcctaggggtggggtgagttgttgtcatccttaggaaagtgtgttgtagtaggatcaaccacatccttcacaaagccattgatatgcataatgatgtaatgttactgatctgtgaaatcacgggaagggta

SEQ ID NO: 572090 - DNA, 405 bp, Homo sapiens
cctacagtggcaacctccacagccacagctaaacctaccaccacaggcagccagatgtggagcagaagaatacaccaaactctgggtgggaaaagcagccacagggtgactcgggacctcacatccactagggtagaacatcggaggacccctcaccctacaagtccactaagccccggacaccccatttcgaggcttctgggggccacccaaacaagctcgggacatgcacatcttatgaaaatttcaagcagtacaagcacggtggttatcccgggttacaccttcacaagccgggggatgaccaccaccctaatagagacagtgtatcgccatgtcagccaggcgggtcttgaactcctgacctcggttgacttgccacctggtgctcccaaagtgcgggaa

SEQ ID NO: 572091 - DNA, 221 bp, Homo sapiens
gtggcatataactcgtggcattcatacaagtccttatttggagaacaatgtgattatgctacctttgcacggtcagaataccgctggcgttaaactggtgtcactgggcaggcctttggcttctaatactagtaatgctagaggtgatgttttttggtaaacatggcggggtattgtgtaggcccgagttcccttttaaccttcttttaaatcctttcctt

SEQ ID NO: 572092 - DNA, 109 bp, Homo sapiens
cactgctccgccggctggagatcgaggcggagaccattactggctgagcatgcctacatgaccctgggagcaggagcgcggccacgccgtgtgcgcagggggaggcttc

SEQ ID NO: 572093 - DNA, 230 bp, Homo sapiens
  misc_feature (18)..(18): n is a, c, g, or t
  misc_feature (99)..(99): n is a, c, g, or t
tagcaggatcctcattgnagatgtgcatactcatgatgttccacagtcatccatgtactgtttcaggtctttatccagatactcaaacaccaaagtcangatttatctgtgtgaacaatgtcatgtaaggttactatatttgcatgttttaaatcctttaatagtgaaacttctcttatagctgtgccagggtggcaccattctttccaatggggtaccgaggctccgaa

SEQ ID NO: 572094 - DNA, 129 bp, Homo sapiens
aactgagaccggaacaagcaaaaaattctctctggcttacaagcaaatgacacttacagtctaaagacaaaagtgaacctgatcagccttgagaaggggccggccagacaagaagaggctccttctgag

SEQ ID NO: 572095 - DNA, 109 bp, Homo sapiens
cgattccgtgattgacactcctcctccaagctgctgatgaggctatttttcctctcagctcgttgcctggcccgtggcccttgtgcttccactcatcttcagccttggt

SEQ ID NO: 572096 - DNA, 1466 bp, Homo sapiens
  misc_feature (783)..(783): n is a, c, g, or t
aagcccctacaagtcacaacacatgctataaaaatgaaacgacgacagaaaagaacaaagatatgtgccacctcacgcgtggtgacaggttgctctgtctctagtacagtcgcgtctctgtagtttggtttgttagccaccacatatctgttaatgcttggggcgcacaacacgctgtgctatagggtgtgctcttcgggtggcacaccttttcttatacaattaatcaattatgttttccccacgagtgtcacacaggggggaaaattggtgccgcagagaactttttttgggggccccccccttggtgtttttttcgggaggattttctcgcactgttagagtccccccccccctcaaggggggtaattcctctttggggcccaccccactgtgcccccccctgtgttattttccgggccctttttcgtctatatcctggggtccggcctcttggtatcgcccgagaaactggggtttttcgcgcgccagaccgcgtgggggttgtgcccttgaatagtgtcccttctcgggggccataccccgggccccatttttttttccttgaaggtgatattcctgtgggaagaaatgggtgtccgcgtagtttcgacccttgtgccccccgggtggtgttcctccccccccctgggagattctatttgccgcacgagtccacagggaggggggtcccacacattctttttctgtggttgtcccccgctttttaagaaaccacccctttcggtggaaaaactggctttcacgggccactctaacagngggttaatggcaactatttttgcgcgcaattatgcccccccgcccagtattttctgtaaaaaagagttggttccacactctttacacacgagaaacacacgcctgggtggtgaccccccattttcgcgaaacgctggtaaaaccacatggggtgtgagattttgcgcacaggtgtgttgcgccacagagcccccacagccactttgggggctctggaagcacacaacagggttcgggtggggcgcccccagaaaagaggtgtgctcgaatatttttttgctccgcacacacaggagttttataaaaccccccgaggatgttatatccttgagaatttaaagaggtttatagatagtaagattttcttcttggttcacttgaggcataattcccacattggaccccaggcacccttagagttgccccgcccgcgagcctataccgaggtttcacttggtccggagtttaacccacaaacacagaggctcttccctgccaccacttgagatgagtcctttcgggaaagggacacgagattgttcctataaaccacgaaagaaggagaggtttcccacagagaagagaaaaagatattcccacgagaagataaactcgtaaagaaacccacaaaacttttggcccgggggttaattccgcctttaaataaaagtaatttaaaggga

SEQ ID NO: 572097 - DNA, 161 bp, Homo sapiens
  misc_feature (38)..(38): n is a, c, g, or t
tgtatagtaggatcccctgtggagacggggcctgatcnatgtaccaggctagtctcgaactcttggcctcaagtgatccaccgcctcagcttcccaacgtgctgggattacaggtgtgagccactgcacctggccacaacataatcattttcactccaaca

SEQ ID NO: 572098 - DNA, 665 bp, Homo sapiens
cctctttccttgccctaacgcagccatggctcgtggtcccaagaagcatctgaagcgggtggcagctccaaagcactggatgctggataaattgaccggtgtgttggctcctccgtccatccaccgggtccccaacaagttgacgagagtgtctccccctctatcattttcctgacggaacagcacttaagtatgcccgtgacaggagtatcgaagtaacagcaagcatttgcatgcagcgagttcattcaaaatcgatggcacaggtccgaactggatataacctagcccgtgttggattccatggactgtcactcagcacttgacacagaccgggacgagacatttcgcgtctagatctactgaccaccacagggctccgcttgtggctgtcaccatcggtacttaccaccctgacggacggccacagtacaacgttgtcgcaacacgtgacgaacagactcttcgtgtgaggcaacaacaagggaactcccgtcgatcgtggatgacctcaactgactgccacgacacacattcgcgcgtaaccccggaatccctctcattcacaggtgacatgactagccattcagacttgatcttggagacttggccacgattacgtgatttcactcaagttcgacacctggtaacctggtgtatggtga

SEQ ID NO: 572099 - DNA, 1317 bp, Homo sapiens
gaaagagggactcctctctccctccgtgtatagtctctatgtttgtgctagttaactttatatttctctgtgtccagtcagccacagggcccgcatccctgcaggaatcacggggtacaacgctataggtgtggacggggcaagaaaccacactgactgatagaggggtacacatggaaccaggtagagccactccggcccagctgtcacccatacagacacttctttccgcagctgacagacatgttcacgtacaccgtgtgaggacgctaaataacaaaccagagccttgcaggacagtgggggcctcaaagtgggcattcacgtgatccctgtacctgggtcgcccctagtgcattacatgacactcaaccaaactcccaaaagggatggttcaccagacaaaacgctacgcccactggcgacatacgggcaacggtacacacaaacaaaaccacggacccgcacgcacacgccacgacaccaacggcgaagggcaccccataatgcttgcccgtgctactccttacacatatgtacaaccactaacggcacattgtgcgcgatccctcagccctggaggataactccacaatacaagacaccttctcggcatcgacacgaccagacacggggtcgtcagcacctccgtgggctggacacaattacacacccaccggtgagcagcacacgacaagcgggcaatgcaataccgtccccctctagacatgaggggcccccgatgctaaacatacacgggggggacgcgcggaacaaactggacacacgacgcaacgacaagtcactacggagagacacacacagtgcggcaggaggaacaaagctcagcaacgcagaaaccacgaccaccgggcgcattctagggcaacaccccccacggtcataggacacacaaaggggaaggccaacaaaagggcaagtgtaccacacaacagcgcgacgttaaaccaacaagacgactaacaacgacggggtcacaccacatcaactcgggccaccacggcgcggcgacaacacggtggagacgcggagtgtaccacacagaagggaagtatggacggcagatcttagtcgagccacaagcgggtagaatagcgaactacaacgaagagtatgtatgatagcacacagcggatcgatacaccaagcgcgacgatcgaagcctacacgtcaacacaagctggtatcgtagcgacattgttgttattctattctcacttcttcccttcttcatcgtcaacggcgacgagcaccgtaagctcactccagtccacatgccacatccagtagcatagg

SEQ ID NO: 572100 - DNA, 451 bp, Homo sapiens
gctgagctagaggacccggcttaggaggtatacactgcgacccacttttgcttatgagaatccctagcttctcaaagtaacaagaaagaaagaaaaaagtaataatcccacctagattcacaactaagaagcgtaccctgatctcacactatcaaaacggaaataagtcgcaccttgtatatttcattctctcttatgtaaccaatttctctctgccccccgccctcgtcatcagtgtctaagcgccttgtaccaacacccagatcattttgtctttgtttctcccaggacctagcacaccatcttgtgaaagagtaggcaccagattggagcttcttcattgactgacccacagttcctagttcagttctctactctgatggaagattctcatggctgatgaagcttataagttaaaggccttcagaatgaatttcttgaccattatgac

SEQ ID NO: 572101 - DNA, 484 bp, Homo sapiens
tgatgctgtctcatacacacacacccacacactacacacacacacacacacatatgttctgttgtctctgtctctctggagaaatctgactaatacagttatatgaacctcattgtacagtatctcaggtcatacagtagacttatattggccatttctctcttcagtattatgtttcttcattattagacctttatctgtaactttctagtgtgtgttcgtgaaacttcgttttatacaaaaaaaagaaactcacgcatcttatttctgatgcctatagtactatatagtatatgtatatttgaataatataatcatctctgtgagtgcgcaataatagacttaatatgcccctccactataactcatcacttattaattcaacatatagtttgagattcgtgtagggagtgtgctaggcagtcgtgggatttatatcctttctgtgtatagatgtgtatattatttagtgcctatttgtgta

SEQ ID NO: 572102 - DNA, 415 bp, Homo sapiens
  misc_feature (356)..(356): n is a, c, g, or t
  misc_feature (362)..(362): n is a, c, g, or t
  misc_feature (399)..(399): n is a, c, g, or t
aactttcccacatcgtcctgtctcctgagtcctccaagtctccaggaagttccaaactttcccacattttcctgtcttctgagtcctccaaactgttccaacctctctgcctattacccagttccaaagttgcttacacattttcgggtatcttttcaacaacaccccattctactggtaccaatttactcttttagtcagttttcatgctgctgataaagacatacttgaggactggggcaatttacagaaggaaagaggttcattgggacttaacagttccacgtttctgggggtggggggggcctcacaatcatgggcaggaagggcaagggagggaggcaagttcatggtcnttacanggggtgggttggccaggggcaaaggaaaggaggagcntttgttgccaggaaaa

SEQ ID NO: 572103 - DNA, 391 bp, Homo sapiens
aggcaggggtacggaattggtcttgagtcagacatcttgatggaagtccagtatatagctggtcacagctgtgataagtgctaccagagcctccagtgccttttactgtagctacttcctacgctagtataaggtaaccagtcaccacgtgagcacattctttcccctgggggaagcagaccatggaattgaggaactaataagctaacatgaatctctcaggtataatcagaatcaattattcctgtatgtacagtgacacttcttaaatttgaactagaccttccaagcaatagaccaactgttcctgagggtaaagggcccctaactcccatgaggaccttctttggtggctccccaggaagtaaggaaatgggaactgtgctacaga

SEQ ID NO: 572104 - DNA, 425 bp, Homo sapiens
  misc_feature (395)..(395): n is a, c, g, or t
  misc_feature (423)..(423): n is a, c, g, or t
atgaggcaaaattcacataacatacaagtccctgtatgaaaccatacacttcagtatcattaaatacattcacaatattaagcaatcatcatctctgtctagttccaaaacattttcattaacacccccgccccccaaaaaaataaccctgtatccatcaagcattctccattccctcccctttcccccagctcctggcaaccacttacctgctttctgcctctatagatttgcctattctgggcctttcacataaatggaatcatgccatatatataataaccaaaaggtagcgacaacccagatggccatttggttgacgaatgaacaaacaatatgtgcggtatccatacaatggaaatattggtgcctactacatgtggatggaccctggnaacatcatgctaagtgagagaaagcctngg

SEQ ID NO: 572105 - DNA, 302 bp, Homo sapiens
ggggcggagtgtggaattcttctcgggaggcagtgctgggtccttccaccatggccctagaaagcaagaagagagcggggcgcaatccaaggtctcatgtcgaacagaccaatccaggattaaggaggcttcactatcatggacaaaaggatggtcatgacagacgatctgaagaacttgctgcctggcgatgacgtgaaatgaagaaatgtgaatgtcaggaggctcggtccatactttatggtcctcacaagttgggagaataaggagcggacctgggaccatctcaagctcaagtgtga

SEQ ID NO: 572106 - DNA, 246 bp, Homo sapiens
tcacgcatcaggtaaatttggctaattaaatatacttgtagcagcgtgtgtgacagagcagtgggaaagctacatcattgaatatattgataaaactatacgacttgagttggtttatttttcccttttcctaaattaactaagactgactggaaattaatttccctgtttcacgtctctccccttccattctgcaggagtttcagctatttggagatcgggggaccatcaaggtttggcatttaa

SEQ ID NO: 572107 - DNA, 512 bp, Homo sapiens
  misc_feature (66)..(66): n is a, c, g, or t
  misc_feature (80)..(80): n is a, c, g, or t
tcgggccatctggacttatcaaataagtatgtcctgaataaaatccagaaggacttactataatgnaaacctatgttccnacgcaaatcaatcatgactttcctaatgcttattagatggaccttaactaggaattaaggtgggtgggtggggggggcctcaccggttaggaaactcagacacacctcctaatattgcctccagctcttcagacaataaaaaggttttgcttgagtatgaaaacattagagacttcctggtgtcttattttcaacctctcacagaatgctattatctccttctaaatctttgttcattcttcccccgtatggtgtgtattctcatataacagaactctggcaatctcatccattcaaggttcattttagaaatcatgtacacaaagaaattttcttacctgtgcaccctcactaggtaaggtgcctcaccctaaggacttaccaccatcctggtatgtcatactatatgactattagcttcttcacagacat

SEQ ID NO: 572108 - DNA, 794 bp, Homo sapiens
  misc_feature (683)..(683): n is a, c, g, or t
  misc_feature (794)..(794): n is a, c, g, or t
gaggcttcacaatcatggcggaaggcaaggagaagcaagtaagtcatgccttacatagatggcagcaggcaaagagagcttgtgtagggaaactcccccttataaaagcatcagatctctttgtgtttttttagattaagtctactctgttgtccaagctggagtgccagtggcatgatctcggctcactgcaatctccacctcctgggttcaagcaattctcctgcctcagcctcccaagtggctgggataacaggtgccagccaccatgcccagctaattggtgtatttctagtagagatggggtttcaccatgttggccaagctggtcttgaactcctgacctcatgtgatccgcccgcctcagcctcccaaagtgctgggattacaggcttgagccaccacgcccagctgtagcatattttaataggagaatacaatatataatagtagcaggttaagtaaggcatccatcatctgtagcatttctccttgttttacaaacaatccaattctacacttaaaaaacaaacttttaaatgtacacttaattttatttacacaggtattttatcgtcatatagcagtttttacgagtataatgaatcatttctaaatcttataatatttttcatgcaaaaaaaaaaaaaaacaaacatgggaaaagaaaaaaaaaggttggngccgccgcaaaagttacactctgtgggcgggccaaaatagaagtaatgtgcaaacagggagggggtccaaaaccgggcggtaacaagttgctgggtagcgtaaccgggggn

SEQ ID NO: 572109 - DNA, 212 bp, Homo sapiens
ttatacttatcgcatgtttcattatatgctacctctcattacctctcaacacccactccctctatatccgatattgtgcctatagccatactaatctatggcgtctgcaaagtaatgatagtcctagtcctactaatctctatctccatcacatatagcctagataacgtacataacctatatctactcttacacccttactcttacacact

SEQ ID NO: 572110 - DNA, 392 bp, Homo sapiens
  misc_feature (392)..(392): n is a, c, g, or t
ttctttggctaccgcatccttgcatcgtggtcccaagaagcctttgacacggctgacggttccagagcaccgaatgctggataaatggcctgtagcggtgcttgcttgtccatctaggggaccttacatgcttgagccatcgtaccgctactcatcattgacttgaggaacaggcctactgttgaattggcagggcatgagattattgaccattcgcttccttggaaacgttggatactccttgtcagggtggttagcaggtttgcgccttttcaaccatcctagccgccgctttgatgcccaatctcttctaccttagatgcctaagtcaggtggggccgcgtgtgaatgatctttgcgtccatcaaagggttcactcaggtgatccctcn

SEQ ID NO: 572111 - DNA, 968 bp, Homo sapiens
  misc_feature (623)..(623): n is a, c, g, or t
  misc_feature (773)..(773): n is a, c, g, or t
ggtgactgagctggtgaagaggaaaataacaaggtagcattgaagaagacctcacagttgacgcctcaagcggggcgtttagctgaaaatgaggatgacgatgatgatgatgatgattcactcatgaacactgatttctgattctgatgaatggatgatagaatcatgactactcggaagaccccctcatgcgaacaacggggcctcatagaccacttggcgagacttgatggacgtcgatgtgtggacccaaggtctccgtggcttcgatagttcataggggaaccttcttgcacgaggtcacagtacagatacgtgtacgacatcctgtcagtgtagcattggtatcatgtgagggcacatagatcatgagaggccttattcatattgccttggattgtattattcaccagactgatcgaggagagtactgtgactgacgattcattaaaaggggtgcctcagaggtaccgtgagtgtgaaacacgaccctgaaggaagccctttgggacgcgtagtttggctaattgtgagattgaacctcgttctaccaaaaggcaggatctaggagcgccgatacgggtgcttcttcacttccctggattaatcaagagaaaagttcnttaaagcagaaactagacactcacaacaaacactagtgaagagatagaatatagggccttaagaacgaatgcatgacaacaggaaactctccaaaaagggccaatttgagcgatcggtgggattgtggaggaatgcaatcttgctagaanagttgacagctcgttgtcctaaggcgcgcccctgtcggaactggttgccaactaagcaaccaaggacgccgcgaatgctccggaactaattgaaccacggccttgaatgccgaggaaatggggtccccccggaagttttcgaaaggagctttgtggggcaagggtaaagccgtgggccacgggcagaagaattga

SEQ ID NO: 572112 - DNA, 262 bp, Homo sapiens
  misc_feature (2)..(2): n is a, c, g, or t
antctacaggatcccctggggaacctatctggggaagggagcctactatggtgtatacatatgaagtatgtgcctgcgttcaggcgttctggctgtttgcctcatcggatgatgatatccaatgtgtcgattactgtggtttcgaagaacatatcttatatgattatcttctgtgtgctgtcaactgttactaaattcgaccgaaatttctaggggagtattgctatatacgaggtaccagttttttctccgctgactcgct

SEQ ID NO: 572113 - DNA, 223 bp, Homo sapiens
  misc_feature (213)..(214): n is a, c, g, or t
gaggcggagtcttggtcagctgcccaggctagagtgcagtggcgcaactgcggcttactgcaaccaccgtctcctgggttcaagcaattctcctgtctcagcctctcgagtagctgggattacaggcacccgccatcatgcccggctaatttttatattttagtagagacaggatttcgagatcagcctggccatggtgaaaccccaaaactnntaaaactac

SEQ ID NO: 572114 - DNA, 574 bp, Homo sapiens
gcctcccttttttggtttttttaatgtgttgtcgtgcaggtaaaggtactaaaagtgtgaaaagtaggtttggataaggcgacggatcctaggataagcgtaaaattaaatggtgaaatgataagtgtaagggaaggttagggtggatatggctaggtgtggcgctccaattaggtgcatgagtaggtggcctgcagtaatgtaaccgtgttaggcgtacggccagggctatgggtggaatggactaggctgatggttcgataataactagtatggggataaggggtgtaggtgtgccttgtggtaagaagtgggctagggaattttaatcttaaagcgaaagccaataatcacggcgcccgctcaaaagggcgattggccagggctaggtccaactacatactgggccggctccgcggtcactgactgagcgacggagctccgagccaggtcagcggggcccacacaaaagacaccggactccaagtatcagagaccaggctccgacctcaacggcgtcgtcacatggacaccactcagtcgcgcggtaccgcgcaaccccacggtgcgtggc

SEQ ID NO: 572115 - DNA, 883 bp, Homo sapiens
gtgggcagatcatttgaggtcaggagtttgagaccagcctggccggcatggtgaaaccctgtgtctactgaaaatacaaaagaaattggctgggtgtggtggtgtgcgcctgtaatcccagctactaaggcaggagagtggcttgaacccgggaggtggaggtcgcagtgagctgagatcgcgccagtgcgctccagcctgggcaacagagtgagactctgtctaaaaaaaaaaaaaaaagaaaagaaaaaagaaaatttgaagaacttaacttttctacttttgaaatagataattttttaaaattggtttaacctccctggaaattaagtgttattttttattactggcagttgagaagatacctttccagaggaaaacaagaggctaaatcccagtgttaagagctaagtagtatttttttcttaacaatttttgccaaaatttcttctacgggcccaaaggaatctaactctacaataaatctacttctgaatattatttacgatgggaaatgtcttcataggtatctctgtataatacccttaattagatgaattatccctttatcattcccaaaaatggaaatggtcggtgttacatctctccccggcccaagcggtttgttgactggcaccacgtttgcaaatgggtctctgtccattgcctgttgccctgtcccccaagctgtcacggttcgagcaccatccggctgcaaaggccttattctagaaattgccctaaaaagtggtctggcccggaaatccacttgttttcgtgcgcgccgattccccattggaaaccgcgctgaagtagacgaactctcctcagatttaggagcgagaacacaggattataataagccgccgaaatgtctaagaga

SEQ ID NO: 572116 - DNA, 374 bp, Homo sapiens
cagtggctcatgcaggtaatcccagcatgggaggctgaggtgggtggattacttgaggttaggagttcaagaccagcctggccaacatggtgaaaccctgtctactcaaatacaaaaaattagccaggcatggtggctcacacctgtaatcccagcaacttgggaggttcaggcacaagaattgcttgaaccctggaggtggaggttgcagtgagctgagatggcaccactgcactctagcctgggcaacagagcgagaccctaactcaaaaaaaaaaaaggacagaggggaggaaggagcagaacccaaaaatggcatttagggagaaatctcaggaatgtggcatcccatctccctttgagacctatcactg

SEQ ID NO: 572117 - DNA, 392 bp, Homo sapiens
cccttgaccacgtgcacacgcaggttgttaagtaggtaacttgtatcacaggaattagctgtacagattattgttcgtcacccaggtactaagcctagtatccaacggttattattctttttcttttctttttcattttgagacagagtcttgccctgttgcccaggctggggtgcagtggcacgatctcagctcactgcaatctccacctcccaggttcacgcgattctcttgcctcagtctcccgtttagctgggaatacaggcgtgtgccgagcatgcccagctaattttctgtgttcctagtagagacgggttttcatcacgtcgggtaggatggtctcgatctcctgacctcatgatccgtccccccccggtctctcaaagtgctgg

SEQ ID NO: 572118 - DNA, 399 bp, Homo sapiens
gacaggccttttcgtatggtaaggttcgggcagcactctctccagacttcctagtcatgggcagaaggggaactctccgaaccagtataaatttcacttctctagttatgagtcagcttgaacaatcttttcacatgtttaagcaccagttttatatcctgtgtgtgtaaattttctgtttgtgtcttttgcctgtttttttggtttgagttcattgtagattctggatattagccttttgtcagatgagtaggttgcgaaaattttctcccattttgtaagttgcctgttcactctgatggtagtttcttttgctgtgcagaagctctttagtttacttagatcccatttgtcaattttgtcttttgttgccattgcttttggtgttttggacatgaa

SEQ ID NO: 572119 - DNA, 198 bp, Homo sapiens
  misc_feature (7)..(7): n is a, c, g, or t
  misc_feature (25)..(25): n is a, c, g, or t
ggggacnaggaccaggacagggggngttggagaggctgatgagggggtggcccgtggcctttgagtcacgggggggagggaagtagggggaactctttatcaacttcccacctgtcctgggcctggcccactgtgggcactgctgtttccctgtccacaaccaagctgtaagaaaccccattaaagaattttataggg

SEQ ID NO: 572120 - DNA, 166 bp, Homo sapiens
atctccccgctagcccttaaggggctctaggaaggaagagcaggaaggtattacatgagactgtgtcaggaaggggagaaggggcattagctccctgtgtgtgcccagtccatctgcagtctcactgtctctattacagtgtgatgagctgtcgggctagtcgggg

SEQ ID NO: 572121 - DNA, 868 bp, Homo sapiens
  misc_feature (127)..(128): n is a, c, g, or t
  misc_feature (141)..(141): n is a, c, g, or t
  misc_feature (146)..(146): n is a, c, g, or t
  misc_feature (547)..(547): n is a, c, g, or t
  misc_feature (632)..(632): n is a, c, g, or t
  misc_feature (650)..(650): n is a, c, g, or t
  misc_feature (673)..(673): n is a, c, g, or t
ctccaacccgctaatcagatagtaaatgatcgttcaaacctgtcaaaaaccaaatgtcgagaagagccaggtagctgtgtagcagtgcgatagtgtaagcagagatagggaagggcacctgtgctgnngtgcacttgcttngattncatgtggaatgaagtacgaagatgcagttcagtttataagacaaaaaagaaggggagcgttcaattccaaacagctgctttatttggagaaataccgacctaagatgcgattacgcttcagagataccaatgggcattgctgtgttcagtagaaggaaatgtaaacgaaggctgacttgattgtgccatttagagggaactcttggtacctggaaatgtgaatctggaatattacctgtgtcatcaaagtagtgatggattcagtactcctcaaccactctcctaatgattggaacaaaagcaaacaaaaaagaaatctctctataaaatgaataaaatgtttaagaacaagagaaagagaaacaggaattaattcagtgaaggatgattttgctcctagnttctggagtttgaatttctgccaggattgaattcattttgaaatctcctgtctttttaaactttttcaaaataggtctctaaggnaaaaccagcagaacattnagcctgtgcaaaaccatctgttntggggagcacactcttccattatggtgtggacatagatctccctgtggtgggatcttttattccctatttggggggaaggtgggggaaataccccctcttgcatactaacataaattcctttcccgcaacaatgtaagagactaaacccctggtgcgtgaaaatatcacagtgggaaaaaccttgttctttttgt

SEQ ID NO: 572122 - DNA, 397 bp, Homo sapiens
cgtgtattaggtatcacgtagtgtgtattggtatacaaagctacttttaagtactgaaaatatactagtaattatatagtatcaatatattagtatatatggaaatctgaattattgagtgattgttatgtagttaaggcataaaagacaagatcctatattctacaggtctagatatgaaagctgcaatcagccactccattgagtgaaccagagttctgttattagttcgtgaggactctctataccaagtagaatagaacacttgacagcattaatattgtctaggcaatagcatcagactcttcatttatatatgatgaagcttaacacagaaggacaaatgctttcagaaagctatagtccctcactccaaattaagaagatctgtgaagag

SEQ ID NO: 572123 - DNA, 221 bp, Homo sapiens
ctgggagggggccccctttcccccacaaacctctagctccccaccctggttctctgggctggccaattaagactggtctgtcttgggtaaagtactctgaaactcagctccaagtctctctttctaaccaggtgattcccctgaaactccatctatttagaaagtctgtaagttctgaaaatgggggaaaaaaagtgaaaataaatgcaaaggacagtttc

SEQ ID NO: 572124 - DNA, 310 bp, Homo sapiens
ctggttcgttatgaggtacgtcgttatgaggttcggtaaataaatataaaaaataaatagggttattgtatttttgtatttgtttttgtttttgagacggtgtctcactctgtcgcccaggctggagcatagtggtgcaatctctgctcactgcaaggctctgcctcccgggttcacaccattctcccgcctcagcctcctgagtagctgggactagggcaggcgcccaccaccacacctggctaactttgtattagtatttttagtagagatggggtttcaatgtgttagccaggatggtcttgatctc

SEQ ID NO: 572125 - DNA, 918 bp, Homo sapiens
atcattgtgcacccacattcgttaattgtcccccttttttcgcacccctcgctattttaggtcgctctccgcgactcttctttttcttgtctccaacatttatggcacctcgttgcaacgaccacgtgtaccacacccgtataactcggcctcttcccccctcttccattaatctatttggcgtccctgtataaagtacctcacttttttgccgccaatataagccaaaagcagccttcactaatatttccgagcaaacagccctgctattcgcaagacaagtgctccccgttaaatttttcttgatcacaaccaacccgtgcatctggtcataccccccggcttattaaccggtcgttcaccctctaaagcaccctgacatatcgaaagtggtaacattcacccagagggccatttttttctacgggtagataatattattattgactttcttttattgtcccacagaagacaaaaggttagtattaattattgcttgttataaacagaaaggccggaacatgagtcttctcgggcacaggaacgctcgcgttgcggtcgcacctcactatgggaagcgagcttctgttattaatatcctagcggccattgctccccctgtgtttcttcggggcgacaacccacatcatcatcgcctcttcggcttttgatacccacccgttattctaaattatcatcttgtgaaggcacttgattgttcagagatattcccacaattatgattcctcctcccccagaagtatgacgcatttggatggaatggtaccccacagttattttaaatagtgacaataatactcccacaaaagtatcatactaaacagtctctatataaaaattaaggctctcatacctccatcatcaataatgttaaaaaaaaaaacccggccacatgaa

SEQ ID NO: 572126 - DNA, 140 bp, Homo sapiens
gtactgagctcgggtcactatgtacggctgcagttgtctggaatctgtgcttagggcagtggttcagaaatgtactgaatgcaatccttaccatgtgtaaaaccagtctcaaaagaagtaaatgtggattccttggcagg

SEQ ID NO: 572127 - DNA, 270 bp, Homo sapiens
ttaagggctgttaggctcagaggatggggttggaagggaacttgagggtcccagagttcagctccaccccaccagcattgtagagagagctgaggtgcagagagaggaagagaccagctaacgtcacagagtcagcagcaaggccaagagccttccagtcatcctttgaatccagggccaatccagcaacacctgcagagtggattgagcacagcttagaaggaggatgccacctccttcccgagtctccactactccacatctgccagg

SEQ ID NO: 572128 - DNA, 697 bp, Homo sapiens
cccaccatttttcttggggccggggaaaagaagagggccaaaagggttaaatcaccctcccctctgtcccttaaaaaaaaggaggccgccaccattgtacccggaagggttccccccccggctgtcctggggaatgacctctttggggaggccagagggaaaaacattattttagaaccctttactattaaatgaggcccaccatattattttggaatcacctattttaaatgagacaatcatttttagttttaaggtaacagaagtgaccaatgtaatttcccaacacccaaggattttttggttgaacagggtaccggagatttttaccgattgtcccggaagaatagactgggctttttctttttcccccccctccttcgtggtttcccatagtataaaaagcaagcatactttaacttctatagttttcccctttaggggggcctcctcagttttaggggtttacttcccccttgcctttgacccattggactagggcaggggctttaagtagtttaaaatgggcttttgcttttccagggcattaacgttttttatttagtttctttagcccatagtggctgggtttcccccttgattttcaatattttatggtaagaaatggcaaactgctttggttcatttcctaaacaaactctgccttttggtaactattaaaggttgttaaggtgga

SEQ ID NO: 572129 - DNA, 341 bp, Homo sapiens
  misc_feature (12)..(12): n is a, c, g, or t
gaattggtgagngggataacaatttccaccacggggaaacagcctatgacatgattcccgaatttaaatacgacctcacctatagggaatttggcccctcgaggcccaagaattcggaacgagggccctgactctcccactgtttgtccttccctgatcagagcagataaacatcaccgtaccatagatgggacttctagaaattccccacacaggactgggttaattctaaggtattgctttagctctgtgaagaaaatgtagtcaatttgtaaaattgaagtcaatttgtaaaatgactcaatttgtaaatgaagtcaatttgtaaaataaaaaaaaaa

SEQ ID NO: 572130 - DNA, 453 bp, Homo sapiens
atgggtgctctggagatgcaggacgaggaggacagaatcgaggccctgaaacaggttgcagataagctcccccggcccaacctcctgctattcaagcccttggtctatgtgatgcccctcatcagcaagaactttgaggtgaacaggatgggctccagccatatggccatatgcagtggacccaacatgctcaccatggagaatgaccagagcctgttccccatcctcaaaagtccagacaaccaaggatagtatttggcccattaagccaatccccttattagttctagccctggcttcctcattccagccgaatcggaggtcaaccagtaagctaccctttcaccatcattgggcaagtagcatccgcactatgcttctctacaatcttaatcctaataccaactatctccctaattgaaaacaaaaaactcaaatgggcgtaaaaaaaaa

SEQ ID NO: 572131 - DNA, 428 bp, Homo sapiens
atgcacctgaccgacacggtgaaaccctgtctctataaaatacaaaaattagttgggtgtggtggcgtgtgcctgtaatctcagctactcaggaggctgaggcagaatcacttgggcctgggaggtagaggctgcagtgagctgaggtcacaccattgcactccagcctgggtgacggagcaagactccttctcaaaaaaaaaaaaaaaatttagtcaggcatttgtggcaggcgccttgttatcccgtgctacttgggaggcttgagcgcaggaaaatcgctttggaccgtggagaggacagaggtttgcaggtgacgccaagattggcgccacttgacactccaagcctcggcggacaagaagcgagcattctattcaaaaaaaagaagaaaagaaatttttagggctacgttacttgaacccatg

SEQ ID NO: 572132 - DNA, 82 bp, Homo sapiens
accaatagtaagaatgtggctgtaatcagcagagacccctctgaggggtatctcgacgaattccggccggaattccggccgg

SEQ ID NO: 572133 - DNA, 183 bp, Homo sapiens
gtgggtgtacaggtgagtaagcagtgcattacagagtcagagtaaggatgcagtaattggtgggaaatggagcagggatccattcacgtttaggtgattgtgggtctgccaagaagcatggcaaaacatgttcttttctcctcattcttttgccatgcttcttggcagacccacaatcaccta

SEQ ID NO: 572134 - DNA, 454 bp, Homo sapiens
  misc_feature (236)..(236): n is a, c, g, or t
  misc_feature (243)..(243): n is a, c, g, or t
  misc_feature (345)..(346): n is a, c, g, or t
  misc_feature (362)..(363): n is a, c, g, or t
  misc_feature (436)..(437): n is a, c, g, or t
atctcggtcactgaacctccacttcccacgtcagtgattctcctgcctcagcctcctgagtagctgggattataggtgtgcaccaccatgtccaccatgaccctcttcccacgctgacctgtgctccctccccaatcatctttcctgttccagagagggtggggctgagggtgtctcccaatctctggtctcaacttcatggtgggcactgagctggtaactttcttccttccctnattaaanattagaacctgaggtataaatttactcttcttcaaatttccttgccactgaagaggtgtgagtgaggttaatataaaaggaagaaagatttcctataaattnntgaagagacacaaatnnaaaatgtgaacaccatgaggagacccttccacgagtaaaaaaaaacaccaaccaagggcgggggccgctctanngaggtatcacctaagag

SEQ ID NO: 572135 - DNA, 151 bp, Homo sapiens
ggttcacccctacttaggcaacctggcggtcccccgctcccgggaggcaccatattgatgcgcgaacttagtgcggacacccgatcggcatagcgcactacagcccagaactcctggactcaagcgatcctccagccacacggtgcgttgg

SEQ ID NO: 572136 - DNA, 666 bp, Homo sapiens
ctttcatcacgctgacaatcgacggtgtcttgaggtacaggtccgggttttcttcgtcagcgaaggtcagcacctgttgcagcgcttcaatggtgtaggggcgcggggtgatgacgttatcgaacacggccagttggtcgcgctgcttgtccagctccggcgtggtgttgcgcgggtagccgtagaggctcatgcgctggcggttggtcgactcgccgatgaccaagacaagtgtggacggctggccggccatgctgtccttgaggttgttcaagggcgggatcttgcttgcactggtgagcatgccttgcatgttgtccaactgctcggtgtagcgacgataggcgacgatcatctgccaaggcacggcaggctcgatgcgggtttcgaaacgatcgatggccaattccatggtttcgctggtggcgatctgcttgaccagtgggtagcccaccaccgccaggacgatggctatggctgccacgatcgactggccgcgaggcagatacaccgggcgcaagcgcgtccacaggaagatggcgaaggcggtgtgggcaatgaacgccagcacgatccaccaggcaaagtattgggtggcgtattcgccggcttcagagatgttcgactcgaacatgatgaagatgacgctctgggagaatcctgctg

SEQ ID NO: 572137 - DNA, 464 bp, Homo sapiens
agtactcggaccgtcgatctagatagacagtgtggacggctggccggccatgctgtccttgaggttgttcaagggcgggatcttgcttgcactggtgagcatgccttgcatgttgtccaactgctcggtgtagcgacgataggcgacgatcatctgccaaggcacggcaggctcgatgcgggtttcgaaacgatcgatggccaattccatggtttcgctggtggcgatctgcttgaccagtgggtagcccaccaccgccaggacgatggctatggctgccacgatcgactggccgcgaggcagatacaccgggcgcaagcgcgtccacaggaagatggcgaaggcggtgtgggcaatgaacgccagcacgatccaccaggcaaagtattgggtggcgtattcgccggcttcagagatgttcgactcgaacatgatgaagatgacgctctgggagaatcctgctg

SEQ ID NO: 572138 - DNA, 369 bp, Homo sapiens
  misc_feature (160)..(161): n is a, c, g, or t
  misc_feature (212)..(212): n is a, c, g, or t
  misc_feature (221)..(221): n is a, c, g, or t
  misc_feature (224)..(224): n is a, c, g, or t
atcggaggagaacccagcccctgcccacctcaggggtcttcttccaggccactcaggacatttttagcttctgttatccccgtttccctcttttctcaacttccctgtggctagcctccccaccaagaggggcacccataagagggggtgttctgaggcnnccctatgggacaattccacttttgaagtgtcagtgttggggaatatctgtngcctgcaangcnatctcaggtttggggatcccccagtccctatgatcagtgttggggtatcccctgggagcctaggttctttgagccccagccctcttttaactacccttgagtgggtggtccctgtatttatagaaataaaagatccatttcctca

SEQ ID NO: 572139 - DNA, 159 bp, Homo sapiens
  misc_feature (108)..(108): n is a, c, g, or t
ctatgtcgatcgttagccatcagagaaatgcaaatcaaagccacaatgagataccacttcatacccactaggacagttgtcattaaaaagataacaaaaacagctgangtgacagtgcctcacacactgtaatcccagtattttgggaggccaaggcag

SEQ ID NO: 572140 - DNA, 315 bp, Homo sapiens
gtcccttgccttcttaaaagcccccccctttttttttaaggagaagggcccggtcttttcccaagtccccccagggggggggaaagcattgtttttgggtaaattatgtaaagccaaatttttttattttggcccaaaaacttttttattttgtttttttttggaaaaaagggccttggggcccccccttcccccttttttttcccccaactttaaaggtttgaagggttttggtttccctgggggggggggggggcagccagggttttcctgtccctttattttagaccagttgaataaaaggggcccccttta

SEQ ID NO: 572141 - DNA, 153 bp, Homo sapiens
tatcccccgcaagtggattcactggacatcgtactacacgacacgtactacgtagttagctcacttccatctatgtcctatcaataggagctgtatttgccatcatatgatgcttcattcactgatttcccctattctcaggctataccctat

SEQ ID NO: 572142 - DNA, 424 bp, Homo sapiens
  misc_feature (149)..(149): n is a, c, g, or t
  misc_feature (240)..(240): n is a, c, g, or t
  misc_feature (252)..(253): n is a, c, g, or t
  misc_feature (267)..(267): n is a, c, g, or t
  misc_feature (314)..(316): n is a, c, g, or t
  misc_feature (329)..(329): n is a, c, g, or t
  misc_feature (396)..(396): n is a, c, g, or t
actgagcagcaaggaaggtgaatgataaatagaaagggattcttggaaactaagacttttattgggaatgaaaaaccttaaaaaatctcttcatcgtgaactgtgattttccctgattttttccaacaaattttgtgggggttatgtantgagcatccacacatgacccagtgcaggcgtcacgtaaaggcatatcgtactcgaaatctgaagacctgcagcagatttaaattacaactnctgtcacaactnntaaaagattgtggnaaaatcgaaatacacatgaaaccaggtttctacaccccgcatcacgnnntgaaggggggggngggggggggggaccgggggggggggggggatatcttctccccctcgccccactctacctcccctcanccaaccgaatcaaaaaaaaatatatggg

SEQ ID NO: 572143 - DNA, 108 bp, Homo sapiens
gacgagaagctgagcccctacggcgacggcggcgacatgggccagatcttgtcttgccgcctgcaggacaccaacaacttcttcggcgccgggcagaacatgcggcct

SEQ ID NO: 572144 - DNA, 224 bp, Homo sapiens
tttttcactttcgtagcgcaggatgacgtgggcggatagctcacctcgtggcgtgagcggatagcccggtttaacgcgctggtgaggcgaataaagtggcctcttccagcgccggctgttcgccaaactgcgcggtgaccaacggacgcaagatcttcaggaattcatcgccgcgcgccagctgcatttcgaacagcaggcttggcgattcgtggatagcggtg

SEQ ID NO: 572145 - DNA, 1636 bp, Homo sapiens
  misc_feature (627)..(627): n is a, c, g, or t
  misc_feature (693)..(693): n is a, c, g, or t
  misc_feature (1098)..(1098): n is a, c, g, or t
  misc_feature (1177)..(1177): n is a, c, g, or t
ctctatcgttgagttagggagtagctgagtgggcactgtctcttcatgtcattattttctactgcccttgtgatcatcgtctgctgcgttgtgtgctgctttcgtgtcattttagtactggctttggctccgttggtgtgttatcttgtcgttcgctttagtatctctccttcgtgtgttctgttctctattgaaatgtttctttctcttcctaccgagtgttttcttgcgtccttctttggtcccccctcttttgttgttcgacatattaatgagcaccagtgtttgggtagtccaccgaagtagcagcctggttgggttttttccgacattggggtggtttcgtcattactctgcggcctgtttaagaggtgttgtgatagaacagttgtgttgtgtccacaaagagaataccgtgtgtaaagctcgtgtttgataaaatgtctctccaaattttataagaaaacttcttttttgtgccccaattgtgtaataccgcccagaatatttattacgtttgtttctttctagaaacacacatgctgccaatcgttctcgtttgtccaaaggggggagaaaacatttttttgcgggaaatatgggggggaaccatctccactgggaggnggacctcctccttgtgtgtacacgctatttgttatgttgtaagttcgctaagaatttcgttggggnttaaaatttctccaaatgtttgttaattttaaaccctcccgaaacctcgttggggccctaagaggtgttataaccctcctacattatttttggaaaaacttttcaagtgccttaaagttccgtcgcgtgtgaaaaattgtttgtgtaaacccagctgataaattctcacaacgctccacatttggttttgtaaaagctgcctcttataataaatagagaagagtgtgccacggttcacatccaccatgtgcaaaatatgcccctcgtgcggttttctcgattttcgctccacaattatccaccgtatacaattgctgggagagctgttataggagacaccccacaatgtgagatacctctcgtctcgttatatggagaaaactaaactttctacactctatatgngtctccacattgggtgtttgtggtgacccacaatagtttgtttaatatgcacacttccacagtggcaacagtgcctctngtccacagtgtatacccctctatactctttatatggagagtataacgcgtataaatatagaccgcacacactttacacacatctttctgttataagacactcgtgtttatctatactatgggcacactcttgagtataaaatggtcacaggaaaccacacctttaactggcacaaaagggtgccacatgtaaccacccacatgtgtctggaggcacattctgtttttaacacatcgtggaaaaattctaatgagatggtaaatgttttccttcacatgtatagtgcctaattcagaggtttcagaaattttaaaaatgccacaatattttcacatggtcactttgcacatgtagtaagccagaaaaataattcacaaagaggagttttgagaaacccattgtattttaccagcctccaattgtgccaccctgatgtataataaagaatttgaaaccaga

SEQ ID NO: 572146 - DNA, 588 bp, Homo sapiens
ctatattgatgcaggactgccggttataataaatcaaatccacaggaagaagtgactggccagctcttccctgtaggtctgtactgtagtctgatgcaatctgtattagtagtcttgatccaagttgaatctgggttgagagggccagcctgggtttctccagttgggtctcataatgcatctgcaccctggtgcagacatgttgccatagtcacggtttcgcttttgccgtattactttggcagaatacattctaggccaaataggtcataattctttctcatcgaatctcatgacttggcctaattgtggcgtattttgatggtcctcagcacgattattttcttctctgtgagaaactcacttttgtcatatcgtcctgctgagctcagtggtctctaagaaaggataccttcatttcaaggagcctctttacagtaactgggctaaacattttgttgtcgtccgtcggccttatgtcttcatctataacagtgacaaagaccctgtggagcgtggaatcattaacctgtccacagcacaggtggagtacagtgaggaccagcaggccatggtgaagacaccaaa

SEQ ID NO: 572147 - DNA, 434 bp, Homo sapiens
ctcgagaggatccccgaggctccactgcaatgtttgacaagatatcactacatacttgatgtttaaaggtgaaaagccccaccactgacaacaccaaatgctaacgaggatgtggagcgacaggaacttgattcattgctggtgggaatgcaaaatggtacagtcaccctgaaagacagtttggcagtttcttacaaaactaaacatactcttaccatacgatccaacaatcgtgctccttggtatttatccaaatgagctaaaaacatgaccacacaaaaacctacacacagatgtttatagtaacttcatgcataattgccaaaacttaagagcaaccaaaatgtccttcagaaggtgaatagataaacttatacacctatacaatggagtattactcagcagtacaaaaaaaaaagctggcagggcaggga

SEQ ID NO: 572148 - DNA, 253 bp, Homo sapiens
cattgaggactttgctaagaagctctgctgtattttcctctgttgaacacaagctcaaggtaatcttttcccctagggttaagccacacgataagccattacatttcaagagttcagtggagaatgaacagagagagagagctaaagagtgagagagacagagagagcgagcgagagcgacagcgagcgcgcgagagacacagcgagcgagacagacgctcccgagcgagagagccagagcaagcgcgtgaga

SEQ ID NO: 572149 - DNA, 309 bp, Homo sapiens
acactaggatgaatccttggggctaacaccagaggcttcagaacgtaacctgtactcgggcctacagatcattcctgatggcgacggatacgtctcacggtgaactcgtccagcctatggcagtcccatgtatggtaggatctcacgtgatccacgcggacaagttaggtgagaaggtagaagatagcaccatgccgattcgtcgaactgtgaattctacccgggaaactcctcccaaaagcaagcttgctgaaggggaggaagaaaagccagaaccagacataagttcagaggaatctgtctccactg

SEQ ID NO: 572150 - DNA, 398 bp, Homo sapiens
  misc_feature (201)..(201): n is a, c, g, or t
tgagatgtttcccccctcagaaaatgatccagagtcctagacattgaaagtcaagtttgcctaaaaagccaaggtttatagatagaaaagaaaatgaaggcccaaatgcggtggctcatgccctgtaatccccaacaatttgggaggctgaggtgggaggactgcttgagcccaaagagttcaagaccagccctggacagncatagaaagaccccatcttgacaaaataacaataataataatttagtcaggtatagtgatgtgcacctgtggttccagttactcaggagggtgagggaggaggatcacttgaggctgggagggaaaggctgcagtggtgagccatgattgtaccactgcactccagcttgggcaacagagtgagaccctgtctccaa

SEQ ID NO: 572151 - DNA, 460 bp, Homo sapiens
  misc_feature (278)..(278): n is a, c, g, or t
  misc_feature (416)..(416): n is a, c, g, or t
gtgtgccactccacatactgcttatcctcttctgaccttacctctttccatagtcccttctcctcattctctaggttttagccacattagccttctctctgtccctcatacattccaagataatttctggctcacagccctttcacctgcttgttccttcttggaataccattccctccagatcttcaccagactgctgcttctcgataataaaatgacatctcacacagccataaaaatgaatgaaatcatgttgtttgcagcaacatgtatggagntggaggccattatccttagtgaactaactcagaaacaaaagaccaaatactaaatgttctcacttgtaagtgggagctaaacaatgggtacacatggacataaagaaggaaataattaacacttggggctccaaaagntagggcagtgggttgaaaaattacctaatgggggctgggtgccg

SEQ ID NO: 572152 - DNA, 364 bp, Homo sapiens
cagatgtacacatacagtatatactgtcaacattttttctcattataaaccaatttcagctcacatcagacgtataatttcaaagccagacatgatactgggttaaaactgagtggtatgttgtgaatgtgtcttctctccccaaaaagcagcaatagtagtagatctaacaataccatagactcatgactatgaaatcgtggctatttgtgttaacatgttgttcctgttgttgatgtgatacaaagctcctgcaaaacagttggcacagtccagtgcactggcttccctcactggactcggtggactgggtggttatggatcaggagacagagaagatgagaggagtgacagaggatctgag

SEQ ID NO: 572153 - DNA, 110 bp, Homo sapiens
tggcgttgatgtcggtgtagcgggggtgctatacggtaaatactgggccctatttcaaagatttttaggggaattaattctagtgacgatgggcactaaaccgtggtttg

SEQ ID NO: 572154 - DNA, 258 bp, Homo sapiens
gccgggcctctctgacgcctgcgtatcctcttgtgatgagacagctaagcaggcagagccggcctcggagggcggctcagaaggtcagaagataccatgctattcttatttataagcagtcggcacgaagataactgaagagcccagcagcaaaatggataacgcgaaatctcgcgtgtagtttgcctgcaaggacaagttacttaaggtatctacccggccatacccgggctaccgaggctcgacattcagtaatca

SEQ ID NO: 572155 - DNA, 255 bp, Homo sapiens
gatgatgaggttattccaggctcaaaacaggacaacagcttaagactagaattgtgaaactatctaacaggctttgggtattaatgcgtacatagtttcaaagcacctcccatcgtgatattatttactaaggggaaccataactgtatgtcaagaactgaggagactgagagtatattctgctggtaagctaatacatgtgaactgccagttttcatggacactggtaaaagacaagactattacagggttaca

SEQ ID NO: 572156 - DNA, 749 bp, Homo sapiens
cccgcgaattcggccattatggccgggcactttgactcacgccagtattcacagcaatttgaaaggctaaagcagtcacctgactagagagcctgattgctagccagccctcatctaacctggataataccctactatctcaacagtacaaacatttagtccccattctcgcaggacaccggcacccccactctttgacaggctgtcgcagtagtaggatttgaaccaggcagttaaggcttcgcctcatatatcggcttacagacctcagtctgctcagaccatacagactccttgtactactgctatgagacgacagaagcacaggcgacatgcgacaaggcctaccactgcgaccagcgatcattgcgcctcatgacacagactaacagccattgaaggatcagcccttcccattcctacctcatagaaagtcactcgcccactgactcacatatatgccaaatgacttacacacgcagtactattcccccttatcccagctacgacctacctcacagttagatactaaccctcctctcaagaacttcagaccctaccttacatttcctagcttgcgcacacgtactagcactactcacttacttccacctacgacccgcttttcaacctaattggctcaatctcccgcgccagtaactctagctctcccgctccacctcccactctgcctacttagccgaaccccttcctatctcactcgagctctctatacctccctcgccccg

SEQ ID NO: 572157 - DNA, 869 bp, Homo sapiens
cgccgcaactggtagctgacagcacgacaaagcgtcggtgtacgcgcggggtaaaccccgggtggaacgacgggaccagagaaccatttgtggtgcggcatatacttaaaggggcaaccaggccctcctgggaaaggccctctggtgaaggtcgcgcccaacctagagcccttgcgagagactttcataaagcggcggaatgccctgtaaccagagcgccctcaaccggaaccgtgaaagcacgtgggataaactccacgcaaatcaggcgaattccggggcgccttatacagggcaaaatgcacggcccgctaaaaggttacaaagagcttgcccccaggaaaatacttaaagagccggagtaaaaccaagctggccggggccgaaaaccagggccggtcccggacaagacagaccgacgggcagcggcaccgaggatcagccgaaacggcccgcaccaggccctcccaagcaacccgaggggaacaggcgagctcctcccaccggcaaccggcctcttggtttcccgctgccgctcaaacctgggaatacacccatgtttaggcgacgagtcaacaatcgacgaaggagtgttacgcaaaatactcgccggcgtgcaaaaaatgtaagccgcaaatgtccccgaagtaaaacgaagatattagggctactggggggtgaaaaaacttggataataacttatattgttataaagtgccaggatatggacacttctggccaaaatattgttttgcaaaacgtgcttcctcaaaaaaacccctcctgcggtgagatgtagttctcgcccccaaatgaaaaaattcatttaaaggttttaaaaaaaaatttttaatttttaaaggcccaca

SEQ ID NO: 572158 - DNA, 135 bp, Homo sapiens
tggcgaagcatgtctaggtgccggaagccgtgactgctagcaggtaagccgtggtacggggaatgtaagtacaggagtgcggcggagaggacaaggactactgctctggctcctaggtaaccccaagtagagctg

SEQ ID NO: 572159 - DNA, 1244 bp, Homo sapiens
  misc_feature (172)..(172): n is a, c, g, or t
  misc_feature (217)..(217): n is a, c, g, or t
  misc_feature (969)..(969): n is a, c, g, or t
gtggggacctaagctatttggtgtccagaccacagaaaccacttcccagtgcaactgttgtcgcgcattgcccccgctgtgtgtggaactgcgaccgaagggaatgtgccagtctctaggctaagaccacatcaatcgagtagtaagccttactgggtagtgcttctgagtngagagatgaacgcgactggactcgtgtctatgatgttatgctgantatgacacactaggcggggtctcgcgcgaagcatccgccacagtgacgtgggtggctgctttactcgtacgcaattgactgtctgctacacgtggaagggcccataggcctccgtgtgcctgaacagtactactttccttgcatggctgaagcacccttgtttttgtcctcatgtcgtaggaatcgtgcatttgtgtagacgtcggcaacgtcgaggacgcgctcttctctctaagacgcctggccccttatgccgacctgtgcgagacctctgcctaggatgagatgagatacacgaaagcgggcggtgtcagtggtccagttggacgcccatccagggtgtctcttctggatcttgggaaagggcacggtccacatcccatccgtttggggatttgaagggggcacgtttgactctctttgatgtcgcccatgtcctagtgtctcgctttttgagtccaccttggggtcgcgcgcgcatggcggtcttttcctcgtcgtgttgcggccgactcctgaccctcctgccactcaaggtggcaacgcgccgtcacgcaacgcccgtgtggtcccctgaggggcgcgtcattcaactatgtgtagggacccaaagaggcccagtcccaaaaaaccacacaagtgcccacggattccctatttcttggagacaccgcaaatttaggaaaaggccccttgtgcaccattacattccaggggccttttctttgtccacatacgtcgccctctggttncacttttttcccccgaacattggttaaagacttaagggcgaattaagggcggaactcctcatggtggcgaaaaacgcccaggcgcctaggcttttcgcggcttgtgcgcatgtttgcagggggacccaaccttcagaggtctgggtgggtgccccacacgggagattttgcctgcactttggttccaccccccttggcggctttccaaagcgttggttggcacatttccttgggggcgttttacaccccggttgcgttccttatacccctcttag

SEQ ID NO: 572160 - DNA, 563 bp, Homo sapiens
  misc_feature (20)..(20): n is a, c, g, or t
  misc_feature (38)..(38): n is a, c, g, or t
  misc_feature (149)..(149): n is a, c, g, or t
  misc_feature (154)..(154): n is a, c, g, or t
  misc_feature (167)..(167): n is a, c, g, or t
  misc_feature (173)..(173): n is a, c, g, or t
  misc_feature (211)..(211): n is a, c, g, or t
  misc_feature (215)..(215): n is a, c, g, or t
  misc_feature (261)..(261): n is a, c, g, or t
  misc_feature (370)..(370): n is a, c, g, or t
  misc_feature (377)..(377): n is a, c, g, or t
  misc_feature (434)..(434): n is a, c, g, or t
  misc_feature (436)..(436): n is a, c, g, or t
  misc_feature (476)..(476): n is a, c, g, or t
ccaaacgtgtgaatgagcgnggtagggtgattaggttntaatgggatggtaatgggcatgtgatcagttgccagggaaggagtagagatgtcccatacttgtggcttaaggtggggggatacgagaggaagacgtgaaggaagctttgngctgnggagaagggcggnaatganatgcggctgtagtccaggaatagtcagggaagcagatnattnggttaaagtatctcggcctaataagggaactgggcaggtggggatnactaaaaaagagtgcataaaagagtgttgtctaagttggcaccagagtgggggagttttcaggggttttgaagcccatgctatagcaggcgagtgataacaggctttantcctttnaaagcatgctgtgggatgggatattggcgttgagcggggtaagggtgattaggtttnantgggatggtaatgggcatgtgatcagttgccagggaaggngtagagatgtcccatacttgtggcttaaggtggggggatacgagaggaagacgtgaaggaagctttgggctcagtcgaacggactga

SEQ ID NO: 572161 - DNA, 464 bp, Homo sapiens
aacgatcacccgtacgtgagagcacagatctcatatgctttgaagacacttcttttcttatatattttttttatgagaagcagtctcactggtcgccaaggttgaagtgcagagacacaatctcggctcactgaaatctccaattccggggttcacgccattctcctgcctcagcctcccgagcagctggaactacaggcgcccgcaaccacgccgggatgatattataggtattttcagtagaaacaggtttccactgtatatccaggatggtctcaatctcctgacctaatgatttgcctgcctcggcctcccaaagtgtgggaattccaagcttgagccaccgtgcctggtctcagatggaattatacactaaggtgctcaaagtaaggctatagggtactatgacatgtgagcagagtcttacaggaagtgacataatgacgccgtgtgattacaaaaaa

SEQ ID NO: 572162 - DNA, 329 bp, Homo sapiens
tcagtttgttcattttcaaaggtcttgcaaaagttacatgaccttcatttatctacaattgttctcaaataaattattccagctaagcttaaacttttcagtttcatagtattttcctcgtattcccttggttttaaaaaagtaataatgggccaggtatggtggctcacacctgtaatcccagcactttgggaggccaaggcgggtggatcacgagctcagaagatcgagggccatactggtcaacatggtgaaagccggtctctactaaaaatgcaaaaactatctgggcgtggtggtgcgtgcctgtaatcccagctactcgggag

SEQ ID NO: 572163 - DNA, 220 bp, Homo sapiens
agtaaactcataacgtttacagtagataggtaaagcctcagtctggtgaaaagctcccgagtttaaccggggaccctactataatgcgtgcgctcccattgcgaagctgattaaaatctgccaatcataacccatccctaaacacatcagatgatagtggctttgacctagggacagaagaggttaaacgaagaacccccaccaggtatggattgagagt

SEQ ID NO: 572164 - DNA, 280 bp, Homo sapiens
cttcggcgttttacggcccactggagggcgtctgttttgcgactgtccatggaggttcggcctgtgttcccatgagtcaccaggttatgctggagcgtcctgggagagagtcgtgattgggagtagcttgacgaggcctggcactgcccttccctcttcccaaggtcttcatctttgcagaccctgatgattggccaaacaggatctcatatccctcgccaaagggacttcctactttacaggggctaagtggtagcgaggaggctggacagtccctcaa

SEQ ID NO: 572165 - DNA, 190 bp, Homo sapiens
gcaccctgcaggatgcaagcatgtcgtaataaggaactggaagagaactagctctcagggcaccttctcctactcacagtctgtcacatattagtcggtgaatgtatgaattaggtttgtgaaaagctgggatgcaagttatctctgcctattacgagtaaagcatatcgctcccagcagccagcatagg

SEQ ID NO: 572166 - DNA, 136 bp, Homo sapiens
cacgtgtagtggaagttcggatgtcttccttttcagggctgaataatattccactggctggatggaccccatttgtgatggattgtagatggacagctgggttctttctaccctttgactgttgtgaatagtgctg

SEQ ID NO: 572167 - DNA, 136 bp, Homo sapiens
tgcatctgaactgatgacttcactgaatacagcagccctccgatgccgcatcctgcccgtcagagcccgcatgcctgaggcgaggtttcgtattccttccgaatatttagacatgctagtattcccctccttctca

SEQ ID NO: 572168 - DNA, 437 bp, Homo sapiens
cacagagagaactctgtagatctgcagaagattcttcttgagtcttcaactgagtactaacaggcacattcatgtgaagaaatcatatgagacaggagaaagaattacttcaaagaattaagaaggaaaatcactggagcccacagggccagaaatactttctgtttctactagccagactggaaaaatgtgtaattcacatggcttcagataggatactcagaagggttatgcttcagtagtgggtacaatttagttttagattaaatgtttttctggtcttaaaaaagatctgaaggaatcaaactgctgcctagtaacttaactgtatctcaatacagagcttaagtatatttatagggacataaatatatttagcacccagaaagacaaaattcacaatgtctgacttccaattaaaaattgccaggcatgca

SEQ ID NO: 572169 - DNA, 283 bp, Homo sapiens
gctgggactacaggcacataaccactgtgcctggctgtttttctacccccatcatttcaggcaacaggataaatccagtccctgttactccattgtggctggaagcagaaggtccacacttaagtactttaaattcctacaaacctgaacctaaaatatagacctcaacaactgtgagtctctgtgattttgcagatctaagtttgtggaaggctagtgcctgagaaaggcaaggattttggctgaatgatgtgaatttgctcctgattcttatgtaaagctt

SEQ ID NO: 572170 - DNA, 99 bp, Homo sapiens
tcctccaaaagtagttgctgccctattggctgtatgtctgcctgcattcttaattctgccactgccgggtctacttacctacgctcctgaccaaagctg

SEQ ID NO: 572171 - DNA, 348 bp, Homo sapiens
  misc_feature (259)..(259): n is a, c, g, or t
  misc_feature (312)..(312): n is a, c, g, or t
cgagatcgcaccactgcactccagcctgggcgatagagtgagactccatctcaaaaaaaaaaaaaaaaatattgcttaggaggctgaggcacgataattgcttgaacccaggaggcaaagagctgagatggcgccactgtactccagcctgggtgacagagtgagactctgaaaaaaacaaaaaaggcctgtcgcagtggctcacgcctataatcccagcactttgggaggcagaggtgggtggttcatgaggtcaggngttcaagaccaacctgggccaagatggtgaacctggtctctacttaaaatttncaaaaaaaattttagcttgggcttggttgccgggtt

SEQ ID NO: 572172 - DNA, 519 bp, Homo sapiens
  misc_feature (504)..(504): n is a, c, g, or t
  misc_feature (507)..(507): n is a, c, g, or t
  misc_feature (510)..(511): n is a, c, g, or t
ccatcataagttgtgcagcgtctttatgtataggcatttacatagtatatatggacttggtctatatctgcatttttaggcatccgtaggggttcttgaaacatatccccctcggataaaggggaagcattctatatataacaagatccttacttaaggaattggctcatgcaattatggaggctgagaagtcccaagatctgcagttggccagctagagatccagtttaccgactctgtcacttgaccaatactgaccctctttaccttgcttcacgcggacactttgcatccagagacactttgcatccagagacactttgcatccagagacactttgcatccagagacactttgcatccagagacactttgcatccagagacactttgcatccagagacactttgcatccagagacactttgcatccagagacactttgcatccagagacactttgcatccagagacactttgcatccagagacactttgcatccagagantcntcnngatcacta

SEQ ID NO: 572173 - DNA, 232 bp, Homo sapiens
  misc_feature (217)..(217): n is a, c, g, or t
  misc_feature (220)..(220): n is a, c, g, or t
  misc_feature (223)..(224): n is a, c, g, or t
gcagggttgcccaaggcctgaggtcccgacacgtgtgcatcagaggacacttgcagtcagagacactttgcatccagagacactttgcatccagagacactttgcatccagagacactttgcatccagagacactttgcatccagagacactttgcatccagagacactttgcatccagagacactttgcatccagagacactttgcatccagagantcntcnngatcacta

SEQ ID NO: 572174 - DNA, 263 bp, Homo sapiens
  misc_feature (248)..(248): n is a, c, g, or t
  misc_feature (251)..(251): n is a, c, g, or t
  misc_feature (254)..(255): n is a, c, g, or t
tgaggtcccctctggatgcaatggtcaaggacgctggtgctgaagtcggcgtgtggagtgctgagcgcctggtggctggcaagctcaagaaagacactttgcatccagagacactttgcatccagagacactttgcatccagagacactttgcatccagagacactttgcatccagagacactttgcatccagagacactttgcatccagagacactttgcatccagagacactttgcatccagagantcntcnngatcacta

SEQ ID NO: 572175 - DNA, 328 bp, Homo sapiens
aaccccagtctcataactaaggagagcatttgctgcagtaaataggatagagggacatagtctgtgggatgcaagccacggaagcagggtgcctgagacactgagtggagccagaaagatcatgcggcctttttccaagtacatggccaccaagtaagaatggtaggtgaccagacagaaggctaaaacaggaaggcaatcttgtgcacctaacggatagaaagagagaaaggatcaaacttgaaggcaggctaataagagtatccagaaatttcttaaaaacccaaaagtgatattggaaagcacaaaacttacagttaatagctac

SEQ ID NO: 572176 - DNA, 87 bp, Homo sapiens
gtgggtgagtccgctgcacggagactctggtgtgggtacaacatagggtttttatacaagaaaaataaagtgaattaagcgtgttaa

SEQ ID NO: 572177 - DNA, 231 bp, Homo sapiens
  misc_feature (216)..(216): n is a, c, g, or t
  misc_feature (219)..(219): n is a, c, g, or t
  misc_feature (222)..(223): n is a, c, g, or t
aagattaggtctgaattcagaagaaagtacggtagtccctgtactattatatccagcaagtacactttgcatccagagacactttgcatccagagacactttgcatccagagacactttgcatccagagacactttgcatccagagacactttgcatccagagacactttgcatccagagacactttgcatccagagacactttgcatccagagantcntcnngatcacta

SEQ ID NO: 572178 - DNA, 90 bp, Homo sapiens
ttagctaaaggggagatctggatggcatctacttcgtatgactatgcagagtgccatggaagacggggataagcgctgtaagcttctgct

SEQ ID NO: 572179 - DNA, 178 bp, Homo sapiens
  misc_feature (163)..(163): n is a, c, g, or t
  misc_feature (166)..(166): n is a, c, g, or t
  misc_feature (169)..(170): n is a, c, g, or t
ctctggatgcaaagtgtccaatgatggtaaaagggtagcttactggttgtcctccgattcaggttagaatgaggaggtctgacacagccttggacactttgcatccagagacactttgcatccagagacactttgcatccagagacactttgcatccagagantcntcnngatcacta

SEQ ID NO: 572180 - DNA, 421 bp, Homo sapiens
  misc_feature (220)..(220): n is a, c, g, or t
  misc_feature (226)..(226): n is a, c, g, or t
  misc_feature (258)..(258): n is a, c, g, or t
tagtttctttccctcttatatttgtgaatcacagggtctctaaaacctttttaaccgatggttgttctcagagggcacagaataggcagaaataaaggtatgaacttccaggaggaatccgtctaggcaaaatagctattggtatacacaatactatctgtaagacttgtgctgatagtctgctaaaaatatacaatagaaaagagttcacaagcatggnggaganaggggagtggaggatgaaaaattacttagtgngtcaatgtgtcttattccatactaaaagctctgacttcatcctgaagcaaaatattcatgtaacaaaattacacttgtaccccaaaaatttatacaaatatggaattttaaaaaacatattgagttctaaattctgatatttggtataaaatggctgcattcc

SEQ ID NO: 572181 - DNA, 1204 bp, Homo sapiens
gccagcccatgacccctaacagggtgcccgtctcagccctcctaatgacctccggcgctactcgcatgtgatttgcacttccgatcgtctcgataagcgctccctcatactagagcctactaaccaatcacaccgtaaccactataccaagtgagtggctgcgatgtaacgacgagagaagcacagtaccagacggtccaagccacatcaccacactgtctcaagataaggccttcgtagtacggtgcataattccgtactttagttacctcagtaagttttgtttgcttcgtcgaggatttgtctgagaccttttatgcacgtccagtgctagccctcgtatcgcctccagataaggagggcgcacgtgggcgccccctgagcaggcgatctagccctgcgtgaaattcgcccgtagaaggtcgccacttcctatgacactatcccggtagttacttgcgcagtcacggaggtactcaagtcagccgtagagcttcgaaccattaggtggcctataggtagagaaactgagcgcaggacataccaaaataattccacaagtcacgtggcgttcatttactagaatttctagcttggcgctctcgtactctgttgacgccgttcgcgtagcaaagctcgtccaggaggtgacgttgccgaggtcttccctttcacgcgattttgccgacgtgatatcctaacgaggtcacagcacttctatgtaggtaggccagctaggcgttcgccacgggactgtcaccggtcacttgattgggctcaaactttgcctcacgtatctgcttcatccgcccaactaatattttcactttagcatccaaaaacatcaactttggcttcgaaaagcccgccgcctgatacctgggcattttctggtaaggattgtggggtgttgacatcatttgtctggtaatgtcttcccatcctagttttgattgaagcggtcctgtcaacacattagaagggcaaaccatggaccacggcgagacacgcgtcgcgacgcacataggtttgctcccactaggccacgccatgtaatttgcacccagtgaaagccatccgcattgggctgacaacaacaacccaccgcggtgagacacatggttcccacacgagggggacactgtgcggacaccggggcaccacagtgtaacccgaggggcctcccagggtgaggagcccccaa

SEQ ID NO: 572182 - DNA, 165 bp, Homo sapiens
  misc_feature (94)..(94): n is a, c, g, or t
  misc_feature (115)..(115): n is a, c, g, or t
cccggccgccgaacggctgcgagagacgacagagggtggtggaaaaaggcattgaaggacttcacctggaaacttaccaaattctgcctgagtntgggactaatcccctgtagantgggccaagctgtgaatgtggcttcgagatgattctatgaatagaatctc

SEQ ID NO: 572183 - DNA, 360 bp, Homo sapiens
tatggtctgaccctacagttctgtccatgccagggcagataccaaggagctgcagagttcgtcgtcagtggcagcccatgcgagcacccgaggaagtcacaggtgcccaggccggagtcagtggcgtgatctcggctcgttacaaccaccacctcctagcagcctgccttggccttccaaagtgctgagattgcagcctctgcccagccgccaccccgtctgggaagtgaggagcgtctctgcctggccgcccatcgtctgggatgtgaggagcccctccgcccagcagccgccccgtctgagaagtgaggagcccctcagcccggcagccaccccatcttgaggaagttgaggagcccc

SEQ ID NO: 572184 - DNA, 669 bp, Homo sapiens
cgctgcctgggtggttttaaaaggtagaaaaaggtaaaaaggtaattttccttccccggtagatatcacagcttaaaaaaaaaaaaaacaccggaccgagttctctcctcgccgcattggggcagagcccggaggaccaactgaagctttaggctccttcctaatccacttgccagcccataaagaaaggttgcttccggcacaggatataatagctctgtttgtgtctaaggagaataaaaatttgcctcgaaagaaggtttcctccaagaaggcgaataacaaagcatcttgtgaaagatatgcccaatatgccccaggctatgcaaaagcaagggcagtttcaaaggtggtcccccctgggttcctttgtactgcaggagtgagtccttatgatgaccccaatacttccagaggtgattctggcggccccatgatagttcacaagagaagccgtttcattcaagttggtgtaatcagctggggagtagtggatgtctgcaaaaaccagaatcggcaaaagcaggaacctgctcacgccccagactttcacatcaacctctttcaagtgctgccctggctgaaggaaaaactccaacatgaggatttgggttttctataaggggtttcctgctggacaggggcgtgggattgaattaaaacagctgc

SEQ ID NO: 572185 - DNA, 342 bp, Homo sapiens
gaggtggctggggcctcttctgtgtatcctggtaagctgtaagaccggttggtcagcgtggaaggctggatggatggcgcatggagtagagccaagctgatgcgatatctgcaagaagtcgaggtctgagctctgtccaaccaatatgtatcctgtggggagaagaacttcagttctctaccataccctacacaatgcagaaaacaagtttgtatggaggatgcggggcatgctgattgctcttctggtctcctaatgaaggagttggcaaactaaatccacacgaagaagtgtgtaacgagcaactaccaagggacccacacacctagtgggaaggtccga

SEQ ID NO: 572186 - DNA, 130 bp, Homo sapiens
tacctaatggctgtgcgctcgttgtgttctcggcgagcagttttgttgatttaactgttgcaggtttagggctaagcattgtgaggtatcgtatcccagttgtgggtcttagcttttgtgtgttcagata

SEQ ID NO: 572187 - DNA, 297 bp, Homo sapiens
ggggctatgttcgacgattccgtagatcatggttgtagctgcctatctgtgtcaaacaggactcaccagatcgctatgatgctactgagtggtgcttcagggctctgtagggtccaccgtgaagccagggtcccctggaggtgtgcccaggtgtacttagcagagatcccggaagaccccaagttcttccgggatcacaacaaattgcggctctgcttcaaggacttctgcaagacaatgtgaggatgcgctgcggaacagtaaggccctgattgggccggaccagaaggagtaccc

SEQ ID NO: 572188 - DNA, 777 bp, Homo sapiens
  misc_feature (731)..(731): n is a, c, g, or t
  misc_feature (733)..(733): n is a, c, g, or t
tacaggtgtgcgccaccacactcagctgatttttgtatttttagtagagatggggtttcaccatgttggccaggctggtctcgaattcctgacctcgtgatccactcacctcagcctcccaaagtgctggggttacaagcgtgagccactgtgcccggcctgtgcacaggagtttataatttaatggtcttatttattttttttttgttttcttctgttctttttcttctgcttttttttttttgaagtcttatttattttttctttgtattgcttgtatatttggtgtcatagtcatgaaatctcatatatcttttaatttatgagtggtttatatcttggagtatttttctgcttgttgagttaaaaaacacccaggcccactgcaaatgctgcacaagttgtgcaacacagccctgctcaggattctggctttgaaacctgagatagactgtgagttctacaaggaaaaaaaaaatctggcagggtcagtaaaattagagaaaaaaacatcttctttagaaccaagagggaaggcacagcagaattaagattttgctctcctgtgtcctgaaactttaccagaaacatatatttagtgttaaccttgcagaaggatcattcctcctgatataaagggattgctttttctggattgtacctagttttagtgcacccacatccttgacaagatgttcctctgtgtctagttatgacagagctaacaaccngncttaatagggcactcattaatcagaatgaatgatggcagtaacc

SEQ ID NO: 572189 - DNA, 126 bp, Homo sapiens
acccagtatgaatgtgcacagaagcaggaagtataagggacgttgtgagacacgaaataaaagttaaggagtctgaagaccaccataattttggacagcaacttcaacgttgggggtccccagaac

SEQ ID NO: 572190 - DNA, 278 bp, Homo sapiens
ggtctctatgattcgccgtgtctagatattttataaaaataacacatgtggcctttcgtgtctgacttccttcacttagcatgtttcaaggttcatctatgctatagagtgtaccagtgcttcattacattttatggctgaataataccctatggtgtggatataccgcatttagtttattcaccagtcgatcgaaatttagactgtttccactttttggctattatggatgatgctgctatgaatattcgtatatgaatttttatatggatatatgt
